United States Patent Application Publication US 2018/0305689 A1 - sequence listing, part 20

SEQ ID NO: 272503 - RNA, 19 nt, Artificial Sequence
  Description of Artificial Sequence: Synthetic oligonucleotide
  Antisense strand to SEQ ID NO: 272502
uucccucagguaagcagag

SEQ ID NO: 272504 - RNA, 19 nt, Artificial Sequence
  Description of Artificial Sequence: Synthetic oligonucleotide
  Sense strand starting at position 1078 of SEQ ID NO: 3498
ugcuuaccugagggaaauu

SEQ ID NO: 272505 - RNA, 19 nt, Artificial Sequence
  Description of Artificial Sequence: Synthetic oligonucleotide
  Antisense strand to SEQ ID NO: 272504
aauuucccucagguaagca

SEQ ID NO: 272506 - RNA, 19 nt, Artificial Sequence
  Description of Artificial Sequence: Synthetic oligonucleotide
  Sense strand starting at position 1215 of SEQ ID NO: 3498
gugacuucuccagaaguua

SEQ ID NO: 272507 - RNA, 19 nt, Artificial Sequence
  Description of Artificial Sequence: Synthetic oligonucleotide
  Antisense strand to SEQ ID NO: 272506
uaacuucuggagaagucac

SEQ ID NO: 272508 - RNA, 19 nt, Artificial Sequence
  Description of Artificial Sequence: Synthetic oligonucleotide
  Sense strand starting at position 1241 of SEQ ID NO: 3498
uuaauaacaugugcaagua

SEQ ID NO: 272509 - RNA, 19 nt, Artificial Sequence
  Description of Artificial Sequence: Synthetic oligonucleotide
  Antisense strand to SEQ ID NO: 272508
uacuugcacauguuauuaa

SEQ ID NO: 272510 - RNA, 19 nt, Artificial Sequence
  Description of Artificial Sequence: Synthetic oligonucleotide
  Sense strand starting at position 1354 of SEQ ID NO: 3498
ggcggauagcaccaacaau

SEQ ID NO: 272511 - RNA, 19 nt, Artificial Sequence
  Description of Artificial Sequence: Synthetic oligonucleotide
  Antisense strand to SEQ ID NO: 272510
auuguuggugcuauccgcc

SEQ ID NO: 272512 - RNA, 19 nt, Artificial Sequence
  Description of Artificial Sequence: Synthetic oligonucleotide
  Sense strand starting at position 1462 of SEQ ID NO: 3498
ucuguucuccuguaagaua

SEQ ID NO: 272513 - RNA, 19 nt, Artificial Sequence
  Description of Artificial Sequence: Synthetic oligonucleotide
  Antisense strand to SEQ ID NO: 272512
uaucuuacaggagaacaga

SEQ ID NO: 272514 - RNA, 19 nt, Artificial Sequence
  Description of Artificial Sequence: Synthetic oligonucleotide
  Sense strand starting at position 1669 of SEQ ID NO: 3498
ggaagacucugacagauuu

SEQ ID NO: 272515 - RNA, 19 nt, Artificial Sequence
  Description of Artificial Sequence: Synthetic oligonucleotide
  Antisense strand to SEQ ID NO: 272514
aaaucugucagagucuucc

SEQ ID NO: 272516 - RNA, 19 nt, Artificial Sequence
  Description of Artificial Sequence: Synthetic oligonucleotide
  Sense strand starting at position 1778 of SEQ ID NO: 3498
aagaacaauccguacaugu

SEQ ID NO: 272517 - RNA, 19 nt, Artificial Sequence
  Description of Artificial Sequence: Synthetic oligonucleotide
  Antisense strand to SEQ ID NO: 272516
acauguacggauuguucuu

SEQ ID NO: 272518 - RNA, 19 nt, Artificial Sequence
  Description of Artificial Sequence: Synthetic oligonucleotide
  Sense strand starting at position 1780 of SEQ ID NO: 3498
gaacaauccguacauguga

SEQ ID NO: 272519 - RNA, 19 nt, Artificial Sequence
  Description of Artificial Sequence: Synthetic oligonucleotide
  Antisense strand to SEQ ID NO: 272518
ucacauguacggauuguuc

SEQ ID NO: 272520 - RNA, 19 nt, Artificial Sequence
  Description of Artificial Sequence: Synthetic oligonucleotide
  Sense strand starting at position 1917 of SEQ ID NO: 3498
gcacaagagaaacgugaau

SEQ ID NO: 272521 - RNA, 19 nt, Artificial Sequence
  Description of Artificial Sequence: Synthetic oligonucleotide
  Antisense strand to SEQ ID NO: 272520
auucacguuucucuugugc

SEQ ID NO: 272522 - RNA, 19 nt, Artificial Sequence
  Description of Artificial Sequence: Synthetic oligonucleotide
  Sense strand starting at position 1923 of SEQ ID NO: 3498
gagaaacgugaaugacuuu

SEQ ID NO: 272523 - RNA, 19 nt, Artificial Sequence
  Description of Artificial Sequence: Synthetic oligonucleotide
  Antisense strand to SEQ ID NO: 272522
aaagucauucacguuucuc

SEQ ID NO: 272524 - RNA, 19 nt, Artificial Sequence
  Description of Artificial Sequence: Synthetic oligonucleotide
  Sense strand starting at position 2028 of SEQ ID NO: 3498
gcagcaccaccaugagaaa

SEQ ID NO: 272525 - RNA, 19 nt, Artificial Sequence
  Description of Artificial Sequence: Synthetic oligonucleotide
  Antisense strand to SEQ ID NO: 272524
uuucucaugguggugcugc

SEQ ID NO: 272526 - RNA, 19 nt, Artificial Sequence
  Description of Artificial Sequence: Synthetic oligonucleotide
  Sense strand starting at position 2205 of SEQ ID NO: 3498
uuguuauugcaagaauaug

SEQ ID NO: 272527 - RNA, 19 nt, Artificial Sequence
  Description of Artificial Sequence: Synthetic oligonucleotide
  Antisense strand to SEQ ID NO: 272526
cauauucuugcaauaacaa

SEQ ID NO: 272528 - RNA, 19 nt, Artificial Sequence
  Description of Artificial Sequence: Synthetic oligonucleotide
  Sense strand starting at position 2869 of SEQ ID NO: 3498
uuacaagaugccugugaga

SEQ ID NO: 272529 - RNA, 19 nt, Artificial Sequence
  Description of Artificial Sequence: Synthetic oligonucleotide
  Antisense strand to SEQ ID NO: 272528
ucucacaggcaucuuguaa

SEQ ID NO: 272530 - RNA, 19 nt, Artificial Sequence
  Description of Artificial Sequence: Synthetic oligonucleotide
  Sense strand starting at position 2871 of SEQ ID NO: 3498
acaagaugccugugagaua

SEQ ID NO: 272531 - RNA, 19 nt, Artificial Sequence
  Description of Artificial Sequence: Synthetic oligonucleotide
  Antisense strand to SEQ ID NO: 272530
uaucucacaggcaucuugu

SEQ ID NO: 272532 - RNA, 19 nt, Artificial Sequence
  Description of Artificial Sequence: Synthetic oligonucleotide
  Sense strand starting at position 2880 of SEQ ID NO: 3498
cugugagauaggcaauacu

SEQ ID NO: 272533 - RNA, 19 nt, Artificial Sequence
  Description of Artificial Sequence: Synthetic oligonucleotide
  Antisense strand to SEQ ID NO: 272532
aguauugccuaucucacag

SEQ ID NO: 272534 - RNA, 19 nt, Artificial Sequence
  Description of Artificial Sequence: Synthetic oligonucleotide
  Sense strand starting at position 3037 of SEQ ID NO: 3498
cuaguagucaguuauaaug

SEQ ID NO: 272535 - RNA, 19 nt, Artificial Sequence
  Description of Artificial Sequence: Synthetic oligonucleotide
  Antisense strand to SEQ ID NO: 272534
cauuauaacugacuacuag

SEQ ID NO: 272536 - RNA, 19 nt, Artificial Sequence
  Description of Artificial Sequence: Synthetic oligonucleotide
  Sense strand starting at position 3095 of SEQ ID NO: 3498
ggcuucugauuugcaaauu

SEQ ID NO: 272537 - RNA, 19 nt, Artificial Sequence
  Description of Artificial Sequence: Synthetic oligonucleotide
  Antisense strand to SEQ ID NO: 272536
aauuugcaaaucagaagcc

SEQ ID NO: 272538 - RNA, 19 nt, Artificial Sequence
  Description of Artificial Sequence: Synthetic oligonucleotide
  Sense strand starting at position 3120 of SEQ ID NO: 3498
ggguaaaucaagugaggcu

SEQ ID NO: 272539 - RNA, 19 nt, Artificial Sequence
  Description of Artificial Sequence: Synthetic oligonucleotide
  Antisense strand to SEQ ID NO: 272538
agccucacuugauuuaccc

SEQ ID NO: 272540 - RNA, 19 nt, Artificial Sequence
  Description of Artificial Sequence: Synthetic oligonucleotide
  Sense strand starting at position 3121 of SEQ ID NO: 3498
gguaaaucaagugaggcuu

SEQ ID NO: 272541 - RNA, 19 nt, Artificial Sequence
  Description of Artificial Sequence: Synthetic oligonucleotide
  Antisense strand to SEQ ID NO: 272540
aagccucacuugauuuacc

SEQ ID NO: 272542 - RNA, 19 nt, Artificial Sequence
  Description of Artificial Sequence: Synthetic oligonucleotide
  Sense strand starting at position 3184 of SEQ ID NO: 3498
auguaaugucuuuagcuag

SEQ ID NO: 272543 - RNA, 19 nt, Artificial Sequence
  Description of Artificial Sequence: Synthetic oligonucleotide
  Antisense strand to SEQ ID NO: 272542
cuagcuaaagacauuacau

SEQ ID NO: 272544 - RNA, 19 nt, Artificial Sequence
  Description of Artificial Sequence: Synthetic oligonucleotide
  Sense strand starting at position 3244 of SEQ ID NO: 3498
uuaccagaguugucagaaa

SEQ ID NO: 272545 - RNA, 19 nt, Artificial Sequence
  Description of Artificial Sequence: Synthetic oligonucleotide
  Antisense strand to SEQ ID NO: 272544
uuucugacaacucugguaa

SEQ ID NO: 272546 - RNA, 19 nt, Artificial Sequence
  Description of Artificial Sequence: Synthetic oligonucleotide
  Sense strand starting at position 3265 of SEQ ID NO: 3498
agugaaucuuugcccugaa

SEQ ID NO: 272547 - RNA, 19 nt, Artificial Sequence
  Description of Artificial Sequence: Synthetic oligonucleotide
  Antisense strand to SEQ ID NO: 272546
uucagggcaaagauucacu

SEQ ID NO: 272548 - RNA, 19 nt, Artificial Sequence
  Description of Artificial Sequence: Synthetic oligonucleotide
  Sense strand starting at position 3472 of SEQ ID NO: 3498
accuaaguccuugaggcua

SEQ ID NO: 272549 - RNA, 19 nt, Artificial Sequence
  Description of Artificial Sequence: Synthetic oligonucleotide
  Antisense strand to SEQ ID NO: 272548
uagccucaaggacuuaggu

SEQ ID NO: 272550 - RNA, 19 nt, Artificial Sequence
  Description of Artificial Sequence: Synthetic oligonucleotide
  Sense strand starting at position 3700 of SEQ ID NO: 3498
uucggucacuuacuagaaa

SEQ ID NO: 272551 - RNA, 19 nt, Artificial Sequence
  Description of Artificial Sequence: Synthetic oligonucleotide
  Antisense strand to SEQ ID NO: 272550
uuucuaguaagugaccgaa

SEQ ID NO: 272552 - RNA, 19 nt, Artificial Sequence
  Description of Artificial Sequence: Synthetic oligonucleotide
  Sense strand starting at position 3970 of SEQ ID NO: 3498
guaugucccucauuucuca

SEQ ID NO: 272553 - RNA, 19 nt, Artificial Sequence
  Description of Artificial Sequence: Synthetic oligonucleotide
  Antisense strand to SEQ ID NO: 272552
ugagaaaugagggacauac

SEQ ID NO: 272554 - RNA, 19 nt, Artificial Sequence
  Description of Artificial Sequence: Synthetic oligonucleotide
  Sense strand starting at position 3974 of SEQ ID NO: 3498
gucccucauuucucauagu

SEQ ID NO: 272555 - RNA, 19 nt, Artificial Sequence
  Description of Artificial Sequence: Synthetic oligonucleotide
  Antisense strand to SEQ ID NO: 272554
acuaugagaaaugagggac

SEQ ID NO: 272556 - RNA, 19 nt, Artificial Sequence
  Description of Artificial Sequence: Synthetic oligonucleotide
  Sense strand starting at position 162 of SEQ ID NO: 3502
ccgguuuacugucuacaaa

SEQ ID NO: 272557 - RNA, 19 nt, Artificial Sequence
  Description of Artificial Sequence: Synthetic oligonucleotide
  Antisense strand to SEQ ID NO: 272556
uuuguagacaguaaaccgg

SEQ ID NO: 272558 - RNA, 19 nt, Artificial Sequence
  Description of Artificial Sequence: Synthetic oligonucleotide
  Sense strand starting at position 163 of SEQ ID NO: 3502
cgguuuacugucuacaaag

SEQ ID NO: 272559 - RNA, 19 nt, Artificial Sequence
  Description of Artificial Sequence: Synthetic oligonucleotide
  Antisense strand to SEQ ID NO: 272558
cuuuguagacaguaaaccg

SEQ ID NO: 272560 - RNA, 19 nt, Artificial Sequence
  Description of Artificial Sequence: Synthetic oligonucleotide
  Sense strand starting at position 165 of SEQ ID NO: 3502
guuuacugucuacaaagca

SEQ ID NO: 272561 - RNA, 19 nt, Artificial Sequence
  Description of Artificial Sequence: Synthetic oligonucleotide
  Antisense strand to SEQ ID NO: 272560
ugcuuuguagacaguaaac

SEQ ID NO: 272562 - RNA, 19 nt, Artificial Sequence
  Description of Artificial Sequence: Synthetic oligonucleotide
  Sense strand starting at position 383 of SEQ ID NO: 3502
guuuaucacagaugguagu

SEQ ID NO: 272563 - RNA, 19 nt, Artificial Sequence
  Description of Artificial Sequence: Synthetic oligonucleotide
  Antisense strand to SEQ ID NO: 272562
acuaccaucugugauaaac

SEQ ID NO: 272564 - RNA, 19 nt, Artificial Sequence
  Description of Artificial Sequence: Synthetic oligonucleotide
  Sense strand starting at position 397 of SEQ ID NO: 3502
guaguaugcaaaggugaua

SEQ ID NO: 272565 - RNA, 19 nt, Artificial Sequence
  Description of Artificial Sequence: Synthetic oligonucleotide
  Antisense strand to SEQ ID NO: 272564
uaucaccuuugcauacuac

SEQ ID NO: 272566 - RNA, 19 nt, Artificial Sequence
  Description of Artificial Sequence: Synthetic oligonucleotide
  Sense strand starting at position 517 of SEQ ID NO: 3502
ccaacuugguuucugauua

SEQ ID NO: 272567 - RNA, 19 nt, Artificial Sequence
  Description of Artificial Sequence: Synthetic oligonucleotide
  Antisense strand to SEQ ID NO: 272566
uaaucagaaaccaaguugg

SEQ ID NO: 272568 - RNA, 19 nt, Artificial Sequence
  Description of Artificial Sequence: Synthetic oligonucleotide
  Sense strand starting at position 522 of SEQ ID NO: 3502
uugguuucugauuauagca

SEQ ID NO: 272569 - RNA, 19 nt, Artificial Sequence
  Description of Artificial Sequence: Synthetic oligonucleotide
  Antisense strand to SEQ ID NO: 272568
ugcuauaaucagaaaccaa

SEQ ID NO: 272570 - RNA, 19 nt, Artificial Sequence
  Description of Artificial Sequence: Synthetic oligonucleotide
  Sense strand starting at position 663 of SEQ ID NO: 3502
ggagcaauuuaagaacguu

SEQ ID NO: 272571 - RNA, 19 nt, Artificial Sequence
  Description of Artificial Sequence: Synthetic oligonucleotide
  Antisense strand to SEQ ID NO: 272570
aacguucuuaaauugcucc

SEQ ID NO: 272572 - RNA, 19 nt, Artificial Sequence
  Description of Artificial Sequence: Synthetic oligonucleotide
  Sense strand starting at position 671 of SEQ ID NO: 3502
uuaagaacguucguacuau

SEQ ID NO: 272573 - RNA, 19 nt, Artificial Sequence
  Description of Artificial Sequence: Synthetic oligonucleotide
  Antisense strand to SEQ ID NO: 272572
auaguacgaacguucuuaa

SEQ ID NO: 272574 - RNA, 19 nt, Artificial Sequence
  Description of Artificial Sequence: Synthetic oligonucleotide
  Sense strand starting at position 677 of SEQ ID NO: 3502
acguucguacuauagauua

SEQ ID NO: 272575 - RNA, 19 nt, Artificial Sequence
  Description of Artificial Sequence: Synthetic oligonucleotide
  Antisense strand to SEQ ID NO: 272574
uaaucuauaguacgaacgu

SEQ ID NO: 272576 - RNA, 19 nt, Artificial Sequence
  Description of Artificial Sequence: Synthetic oligonucleotide
  Sense strand starting at position 682 of SEQ ID NO: 3502
cguacuauagauuacagau

SEQ ID NO: 272577 - RNA, 19 nt, Artificial Sequence
  Description of Artificial Sequence: Synthetic oligonucleotide
  Antisense strand to SEQ ID NO: 272576
aucuguaaucuauaguacg

SEQ ID NO: 272578 - RNA, 19 nt, Artificial Sequence
  Description of Artificial Sequence: Synthetic oligonucleotide
  Sense strand starting at position 1024 of SEQ ID NO: 3502
guccucaucuugcuggaaa

SEQ ID NO: 272579 - RNA, 19 nt, Artificial Sequence
  Description of Artificial Sequence: Synthetic oligonucleotide
  Antisense strand to SEQ ID NO: 272578
uuuccagcaagaugaggac

SEQ ID NO: 272580 - RNA, 19 nt, Artificial Sequence
  Description of Artificial Sequence: Synthetic oligonucleotide
  Sense strand starting at position 1026 of SEQ ID NO: 3502
ccucaucuugcuggaaaga

SEQ ID NO: 272581 - RNA, 19 nt, Artificial Sequence
  Description of Artificial Sequence: Synthetic oligonucleotide
  Antisense strand to SEQ ID NO: 272580
ucuuuccagcaagaugagg

SEQ ID NO: 272582 - RNA, 19 nt, Artificial Sequence
  Description of Artificial Sequence: Synthetic oligonucleotide
  Sense strand starting at position 1096 of SEQ ID NO: 3502
guguuaagacgaggucgau

SEQ ID NO: 272583 - RNA, 19 nt, Artificial Sequence
  Description of Artificial Sequence: Synthetic oligonucleotide
  Antisense strand to SEQ ID NO: 272582
aucgaccucgucuuaacac

SEQ ID NO: 272584 - RNA, 19 nt, Artificial Sequence
  Description of Artificial Sequence: Synthetic oligonucleotide
  Sense strand starting at position 1146 of SEQ ID NO: 3502
uacuccaguccuggaagaa

SEQ ID NO: 272585 - RNA, 19 nt, Artificial Sequence
  Description of Artificial Sequence: Synthetic oligonucleotide
  Antisense strand to SEQ ID NO: 272584
uucuuccaggacuggagua

SEQ ID NO: 272586 - RNA, 19 nt, Artificial Sequence
  Description of Artificial Sequence: Synthetic oligonucleotide
  Sense strand starting at position 1255 of SEQ ID NO: 3502
ugguauuugucccacacaa

SEQ ID NO: 272587 - RNA, 19 nt, Artificial Sequence
  Description of Artificial Sequence: Synthetic oligonucleotide
  Antisense strand to SEQ ID NO: 272586
uugugugggacaaauacca

SEQ ID NO: 272588 - RNA, 19 nt, Artificial Sequence
  Description of Artificial Sequence: Synthetic oligonucleotide
  Sense strand starting at position 2585 of SEQ ID NO: 3502
cugauuaaaccgugaaaga

SEQ ID NO: 272589 - RNA, 19 nt, Artificial Sequence
  Description of Artificial Sequence: Synthetic oligonucleotide
  Antisense strand to SEQ ID NO: 272588
ucuuucacgguuuaaucag

SEQ ID NO: 272590 - RNA, 19 nt, Artificial Sequence
  Description of Artificial Sequence: Synthetic oligonucleotide
  Sense strand starting at position 2678 of SEQ ID NO: 3502
gcuguauuccugguuugca

SEQ ID NO: 272591 - RNA, 19 nt, Artificial Sequence
  Description of Artificial Sequence: Synthetic oligonucleotide
  Antisense strand to SEQ ID NO: 272590
ugcaaaccaggaauacagc

SEQ ID NO: 272592 - RNA, 19 nt, Artificial Sequence
  Description of Artificial Sequence: Synthetic oligonucleotide
  Sense strand starting at position 2686 of SEQ ID NO: 3502
ccugguuugcaccgggaga

SEQ ID NO: 272593 - RNA, 19 nt, Artificial Sequence
  Description of Artificial Sequence: Synthetic oligonucleotide
  Antisense strand to SEQ ID NO: 272592
ucucccggugcaaaccagg

SEQ ID NO: 272594 - RNA, 19 nt, Artificial Sequence
  Description of Artificial Sequence: Synthetic oligonucleotide
  Sense strand starting at position 2702 of SEQ ID NO: 3502
agagcuauggauuguauac

SEQ ID NO: 272595 - RNA, 19 nt, Artificial Sequence
  Description of Artificial Sequence: Synthetic oligonucleotide
  Antisense strand to SEQ ID NO: 272594
guauacaauccauagcucu

SEQ ID NO: 272596 - RNA, 19 nt, Artificial Sequence
  Description of Artificial Sequence: Synthetic oligonucleotide
  Sense strand starting at position 2709 of SEQ ID NO: 3502
uggauuguauacucagaau

SEQ ID NO: 272597 - RNA, 19 nt, Artificial Sequence
  Description of Artificial Sequence: Synthetic oligonucleotide
  Antisense strand to SEQ ID NO: 272596
auucugaguauacaaucca

SEQ ID NO: 272598 - RNA, 19 nt, Artificial Sequence
  Description of Artificial Sequence: Synthetic oligonucleotide
  Sense strand starting at position 2763 of SEQ ID NO: 3502
uguuguuacguaugaggaa

SEQ ID NO: 272599 - RNA, 19 nt, Artificial Sequence
  Description of Artificial Sequence: Synthetic oligonucleotide
  Antisense strand to SEQ ID NO: 272598
uuccucauacguaacaaca

SEQ ID NO: 272600 - RNA, 19 nt, Artificial Sequence
  Description of Artificial Sequence: Synthetic oligonucleotide
  Sense strand starting at position 2823 of SEQ ID NO: 3502
gcaaguucgggcagaguua

SEQ ID NO: 272601 - RNA, 19 nt, Artificial Sequence
  Description of Artificial Sequence: Synthetic oligonucleotide
  Antisense strand to SEQ ID NO: 272600
uaacucugcccgaacuugc

SEQ ID NO: 272602 - RNA, 19 nt, Artificial Sequence
  Description of Artificial Sequence: Synthetic oligonucleotide
  Sense strand starting at position 2924 of SEQ ID NO: 3502
ugugaauuauucuccuuga

SEQ ID NO: 272603 - RNA, 19 nt, Artificial Sequence
  Description of Artificial Sequence: Synthetic oligonucleotide
  Antisense strand to SEQ ID NO: 272602
ucaaggagaauaauucaca

SEQ ID NO: 272604 - RNA, 19 nt, Artificial Sequence
  Description of Artificial Sequence: Synthetic oligonucleotide
  Sense strand starting at position 2925 of SEQ ID NO: 3502
gugaauuauucuccuugaa

SEQ ID NO: 272605 - RNA, 19 nt, Artificial Sequence
  Description of Artificial Sequence: Synthetic oligonucleotide
  Antisense strand to SEQ ID NO: 272604
uucaaggagaauaauucac

SEQ ID NO: 272606 - RNA, 19 nt, Artificial Sequence
  Description of Artificial Sequence: Synthetic oligonucleotide
  Sense strand starting at position 2973 of SEQ ID NO: 3502
agaauuagguagcauuuau

SEQ ID NO: 272607 - RNA, 19 nt, Artificial Sequence
  Description of Artificial Sequence: Synthetic oligonucleotide
  Antisense strand to SEQ ID NO: 272606
auaaaugcuaccuaauucu

SEQ ID NO: 272608 - RNA, 19 nt, Artificial Sequence
  Description of Artificial Sequence: Synthetic oligonucleotide
  Sense strand starting at position 2982 of SEQ ID NO: 3502
uagcauuuauuugguggau

SEQ ID NO: 272609 - RNA, 19 nt, Artificial Sequence
  Description of Artificial Sequence: Synthetic oligonucleotide
  Antisense strand to SEQ ID NO: 272608
auccaccaaauaaaugcua

SEQ ID NO: 272610 - RNA, 19 nt, Artificial Sequence
  Description of Artificial Sequence: Synthetic oligonucleotide
  Sense strand starting at position 3007 of SEQ ID NO: 3502
cgagugagggagugugaua

SEQ ID NO: 272611 - RNA, 19 nt, Artificial Sequence
  Description of Artificial Sequence: Synthetic oligonucleotide
  Antisense strand to SEQ ID NO: 272610
uaucacacucccucacucg

SEQ ID NO: 272612 - RNA, 19 nt, Artificial Sequence
  Description of Artificial Sequence: Synthetic oligonucleotide
  Sense strand starting at position 3012 of SEQ ID NO: 3502
gagggagugugauauuuau

SEQ ID NO: 272613 - RNA, 19 nt, Artificial Sequence
  Description of Artificial Sequence: Synthetic oligonucleotide
  Antisense strand to SEQ ID NO: 272612
auaaauaucacacucccuc

SEQ ID NO: 272614 - RNA, 19 nt, Artificial Sequence
  Description of Artificial Sequence: Synthetic oligonucleotide
  Sense strand starting at position 3253 of SEQ ID NO: 3502
gccuguuauuugucaggca

SEQ ID NO: 272615 - RNA, 19 nt, Artificial Sequence
  Description of Artificial Sequence: Synthetic oligonucleotide
  Antisense strand to SEQ ID NO: 272614
ugccugacaaauaacaggc

SEQ ID NO: 272616 - RNA, 19 nt, Artificial Sequence
  Description of Artificial Sequence: Synthetic oligonucleotide
  Sense strand starting at position 3509 of SEQ ID NO: 3502
uuguuaaugagguguaaca

SEQ ID NO: 272617 - RNA, 19 nt, Artificial Sequence
  Description of Artificial Sequence: Synthetic oligonucleotide
  Antisense strand to SEQ ID NO: 272616
uguuacaccucauuaacaa

SEQ ID NO: 272618 - RNA, 19 nt, Artificial Sequence
  Description of Artificial Sequence: Synthetic oligonucleotide
  Sense strand starting at position 3511 of SEQ ID NO: 3502
guuaaugagguguaacaua

SEQ ID NO: 272619 - RNA, 19 nt, Artificial Sequence
  Description of Artificial Sequence: Synthetic oligonucleotide
  Antisense strand to SEQ ID NO: 272618
uauguuacaccucauuaac

SEQ ID NO: 272620 - RNA, 19 nt, Artificial Sequence
  Description of Artificial Sequence: Synthetic oligonucleotide
  Sense strand starting at position 3516 of SEQ ID NO: 3502
ugagguguaacauacagua

SEQ ID NO: 272621 - RNA, 19 nt, Artificial Sequence
  Description of Artificial Sequence: Synthetic oligonucleotide
  Antisense strand to SEQ ID NO: 272620
uacuguauguuacaccuca

SEQ ID NO: 272622 - RNA, 19 nt, Artificial Sequence
  Description of Artificial Sequence: Synthetic oligonucleotide
  Sense strand starting at position 3526 of SEQ ID NO: 3502
cauacaguaugggaacaau

SEQ ID NO: 272623 - RNA, 19 nt, Artificial Sequence
  Description of Artificial Sequence: Synthetic oligonucleotide
  Antisense strand to SEQ ID NO: 272622
auuguucccauacuguaug

SEQ ID NO: 272624 - RNA, 19 nt, Artificial Sequence
  Description of Artificial Sequence: Synthetic oligonucleotide
  Sense strand starting at position 3665 of SEQ ID NO: 3502
cugacuguaucaccauaga

SEQ ID NO: 272625 - RNA, 19 nt, Artificial Sequence
  Description of Artificial Sequence: Synthetic oligonucleotide
  Antisense strand to SEQ ID NO: 272624
ucuauggugauacagucag

SEQ ID NO: 272626 - RNA, 19 nt, Artificial Sequence
  Description of Artificial Sequence: Synthetic oligonucleotide
  Sense strand starting at position 3863 of SEQ ID NO: 3502
gcgggcauuuggguuguua

SEQ ID NO: 272627 - RNA, 19 nt, Artificial Sequence
  Description of Artificial Sequence: Synthetic oligonucleotide
  Antisense strand to SEQ ID NO: 272626
uaacaacccaaaugcccgc

SEQ ID NO: 272628 - RNA, 19 nt, Artificial Sequence
  Description of Artificial Sequence: Synthetic oligonucleotide
  Sense strand starting at position 3865 of SEQ ID NO: 3502
gggcauuuggguuguuauu

SEQ ID NO: 272629 - RNA, 19 nt, Artificial Sequence
  Description of Artificial Sequence: Synthetic oligonucleotide
  Antisense strand to SEQ ID NO: 272628
aauaacaacccaaaugccc

SEQ ID NO: 272630 - RNA, 19 nt, Artificial Sequence
  Description of Artificial Sequence: Synthetic oligonucleotide
  Sense strand starting at position 3885 of SEQ ID NO: 3502
uuuggacuauuauuagcaa

SEQ ID NO: 272631 - RNA, 19 nt, Artificial Sequence
  Description of Artificial Sequence: Synthetic oligonucleotide
  Antisense strand to SEQ ID NO: 272630
uugcuaauaauaguccaaa

SEQ ID NO: 272632 - RNA, 19 nt, Artificial Sequence
  Description of Artificial Sequence: Synthetic oligonucleotide
  Sense strand starting at position 3909 of SEQ ID NO: 3502
uagugagcauucuuacaug

SEQ ID NO: 272633 - RNA, 19 nt, Artificial Sequence
  Description of Artificial Sequence: Synthetic oligonucleotide
  Antisense strand to SEQ ID NO: 272632
cauguaagaaugcucacua

SEQ ID NO: 272634 - RNA, 19 nt, Artificial Sequence
  Description of Artificial Sequence: Synthetic oligonucleotide
  Sense strand starting at position 3946 of SEQ ID NO: 3502
ugcacacauuucuaggaga

SEQ ID NO: 272635 - RNA, 19 nt, Artificial Sequence
  Description of Artificial Sequence: Synthetic oligonucleotide
  Antisense strand to SEQ ID NO: 272634
ucuccuagaaaugugugca

SEQ ID NO: 272636 - RNA, 19 nt, Artificial Sequence
  Description of Artificial Sequence: Synthetic oligonucleotide
  Sense strand starting at position 29 of SEQ ID NO: 3505
uccacucagugauaaugaa

SEQ ID NO: 272637 - RNA, 19 nt, Artificial Sequence
  Description of Artificial Sequence: Synthetic oligonucleotide
  Antisense strand to SEQ ID NO: 272636
uucauuaucacugagugga

SEQ ID NO: 272638 - RNA, 19 nt, Artificial Sequence
  Description of Artificial Sequence: Synthetic oligonucleotide
  Sense strand starting at position 63 of SEQ ID NO: 3505
ggaccauccgagugagugu

SEQ ID NO: 272639 - RNA, 19 nt, Artificial Sequence
  Description of Artificial Sequence: Synthetic oligonucleotide
  Antisense strand to SEQ ID NO: 272638
acacucacucggauggucc

SEQ ID NO: 272640 - RNA, 19 nt, Artificial Sequence
  Description of Artificial Sequence: Synthetic oligonucleotide
  Sense strand starting at position 70 of SEQ ID NO: 3505
ccgagugagugucuagaau

SEQ ID NO: 272641 - RNA, 19 nt, Artificial Sequence
  Description of Artificial Sequence: Synthetic oligonucleotide
  Antisense strand to SEQ ID NO: 272640
auucuagacacucacucgg

SEQ ID NO: 272642 - RNA, 19 nt, Artificial Sequence
  Description of Artificial Sequence: Synthetic oligonucleotide
  Sense strand starting at position 81 of SEQ ID NO: 3505
ucuagaaucucugugagca

SEQ ID NO: 272643 - RNA, 19 nt, Artificial Sequence
  Description of Artificial Sequence: Synthetic oligonucleotide
  Antisense strand to SEQ ID NO: 272642
ugcucacagagauucuaga

SEQ ID NO: 272644 - RNA, 19 nt, Artificial Sequence
  Description of Artificial Sequence: Synthetic oligonucleotide
  Sense strand starting at position 82 of SEQ ID NO: 3505
cuagaaucucugugagcag

SEQ ID NO: 272645 - RNA, 19 nt, Artificial Sequence
  Description of Artificial Sequence: Synthetic oligonucleotide
  Antisense strand to SEQ ID NO: 272644
cugcucacagagauucuag

SEQ ID NO: 272646 - RNA, 19 nt, Artificial Sequence
  Description of Artificial Sequence: Synthetic oligonucleotide
  Sense strand starting at position 85 of SEQ ID NO: 3505
gaaucucugugagcagaug

SEQ ID NO: 272647 - RNA, 19 nt, Artificial Sequence
  Description of Artificial Sequence: Synthetic oligonucleotide
  Antisense strand to SEQ ID NO: 272646
caucugcucacagagauuc

SEQ ID NO: 272648 - RNA, 19 nt, Artificial Sequence
  Description of Artificial Sequence: Synthetic oligonucleotide
  Sense strand starting at position 130 of SEQ ID NO: 3505
cuccauggcaguuaaggau

SEQ ID NO: 272649 - RNA, 19 nt, Artificial Sequence
  Description of Artificial Sequence: Synthetic oligonucleotide
  Antisense strand to SEQ ID NO: 272648
auccuuaacugccauggag

SEQ ID NO: 272650 - RNA, 19 nt, Artificial Sequence
  Description of Artificial Sequence: Synthetic oligonucleotide
  Sense strand starting at position 136 of SEQ ID NO: 3505
ggcaguuaaggaugcuaua

SEQ ID NO: 272651 - RNA, 19 nt, Artificial Sequence
  Description of Artificial Sequence: Synthetic oligonucleotide
  Antisense strand to SEQ ID NO: 272650
uauagcauccuuaacugcc

SEQ ID NO: 272652 - RNA, 19 nt, Artificial Sequence
  Description of Artificial Sequence: Synthetic oligonucleotide
  Sense strand starting at position 212 of SEQ ID NO: 3505
agcagucaucuagaaacca

SEQ ID NO: 272653 - RNA, 19 nt, Artificial Sequence
  Description of Artificial Sequence: Synthetic oligonucleotide
  Antisense strand to SEQ ID NO: 272652
ugguuucuagaugacugcu

SEQ ID NO: 272654 - RNA, 19 nt, Artificial Sequence
  Description of Artificial Sequence: Synthetic oligonucleotide
  Sense strand starting at position 228 of SEQ ID NO: 3505
ccaugagguuucccagaaa

SEQ ID NO: 272655 - RNA, 19 nt, Artificial Sequence
  Description of Artificial Sequence: Synthetic oligonucleotide
  Antisense strand to SEQ ID NO: 272654
uuucugggaaaccucaugg

SEQ ID NO: 272656 - RNA, 19 nt, Artificial Sequence
  Description of Artificial Sequence: Synthetic oligonucleotide
  Sense strand starting at position 562 of SEQ ID NO: 3505
gugccuggaucccuugaga

SEQ ID NO: 272657 - RNA, 19 nt, Artificial Sequence
  Description of Artificial Sequence: Synthetic oligonucleotide
  Antisense strand to SEQ ID NO: 272656
ucucaagggauccaggcac

SEQ ID NO: 272658 - RNA, 19 nt, Artificial Sequence
  Description of Artificial Sequence: Synthetic oligonucleotide
  Sense strand starting at position 599 of SEQ ID NO: 3505
agugaacuaugauggaaac

SEQ ID NO: 272659 - RNA, 19 nt, Artificial Sequence
  Description of Artificial Sequence: Synthetic oligonucleotide
  Antisense strand to SEQ ID NO: 272658
guuuccaucauaguucacu

SEQ ID NO: 272660 - RNA, 19 nt, Artificial Sequence
  Description of Artificial Sequence: Synthetic oligonucleotide
  Sense strand starting at position 712 of SEQ ID NO: 3505
guacuauuaucagucccua

SEQ ID NO: 272661 - RNA, 19 nt, Artificial Sequence
  Description of Artificial Sequence: Synthetic oligonucleotide
  Antisense strand to SEQ ID NO: 272660
uagggacugauaauaguac

SEQ ID NO: 272662 - RNA, 19 nt, Artificial Sequence
  Description of Artificial Sequence: Synthetic oligonucleotide
  Sense strand starting at position 835 of SEQ ID NO: 3505
gagguuaaggacugucaga

SEQ ID NO: 272663 - RNA, 19 nt, Artificial Sequence
  Description of Artificial Sequence: Synthetic oligonucleotide
  Antisense strand to SEQ ID NO: 272662
ucugacaguccuuaaccuc

SEQ ID NO: 272664 - RNA, 19 nt, Artificial Sequence
  Description of Artificial Sequence: Synthetic oligonucleotide
  Sense strand starting at position 915 of SEQ ID NO: 3505
agcagacauuuacagaauu

SEQ ID NO: 272665 - RNA, 19 nt, Artificial Sequence
  Description of Artificial Sequence: Synthetic oligonucleotide
  Antisense strand to SEQ ID NO: 272664
aauucuguaaaugucugcu

SEQ ID NO: 272666 - RNA, 19 nt, Artificial Sequence
  Description of Artificial Sequence: Synthetic oligonucleotide
  Sense strand starting at position 1034 of SEQ ID NO: 3505
agggaacuauggguccuua

SEQ ID NO: 272667 - RNA, 19 nt, Artificial Sequence
  Description of Artificial Sequence: Synthetic oligonucleotide
  Antisense strand to SEQ ID NO: 272666
uaaggacccauaguucccu

SEQ ID NO: 272668 - RNA, 19 nt, Artificial Sequence
  Description of Artificial Sequence: Synthetic oligonucleotide
  Sense strand starting at position 1084 of SEQ ID NO: 3505
ucguuucugagacagaguu

SEQ ID NO: 272669 - RNA, 19 nt, Artificial Sequence
  Description of Artificial Sequence: Synthetic oligonucleotide
  Antisense strand to SEQ ID NO: 272668
aacucugucucagaaacga

SEQ ID NO: 272670 - RNA, 19 nt, Artificial Sequence
  Description of Artificial Sequence: Synthetic oligonucleotide
  Sense strand starting at position 1497 of SEQ ID NO: 3505
gcgacucuccgggaauaca

SEQ ID NO: 272671 - RNA, 19 nt, Artificial Sequence
  Description of Artificial Sequence: Synthetic oligonucleotide
  Antisense strand to SEQ ID NO: 272670
uguauucccggagagucgc

SEQ ID NO: 272672 - RNA, 19 nt, Artificial Sequence
  Description of Artificial Sequence: Synthetic oligonucleotide
  Sense strand starting at position 2040 of SEQ ID NO: 3505
ggacaucgcucacucacau

SEQ ID NO: 272673 - RNA, 19 nt, Artificial Sequence
  Description of Artificial Sequence: Synthetic oligonucleotide
  Antisense strand to SEQ ID NO: 272672
augugagugagcgaugucc

SEQ ID NO: 272674 - RNA, 19 nt, Artificial Sequence
  Description of Artificial Sequence: Synthetic oligonucleotide
  Sense strand starting at position 2370 of SEQ ID NO: 3505
ccucuugugcccgacgaau

SEQ ID NO: 272675 - RNA, 19 nt, Artificial Sequence
  Description of Artificial Sequence: Synthetic oligonucleotide
  Antisense strand to SEQ ID NO: 272674
auucgucgggcacaagagg

SEQ ID NO: 272676 - RNA, 19 nt, Artificial Sequence
  Description of Artificial Sequence: Synthetic oligonucleotide
  Sense strand starting at position 2372 of SEQ ID NO: 3505
ucuugugcccgacgaauau

SEQ ID NO: 272677 - RNA, 19 nt, Artificial Sequence
  Description of Artificial Sequence: Synthetic oligonucleotide
  Antisense strand to SEQ ID NO: 272676
auauucgucgggcacaaga

SEQ ID NO: 272678 - RNA, 19 nt, Artificial Sequence
  Description of Artificial Sequence: Synthetic oligonucleotide
  Sense strand starting at position 2382 of SEQ ID NO: 3505
gacgaauauuccguggaca

SEQ ID NO: 272679 - RNA, 19 nt, Artificial Sequence
  Description of Artificial Sequence: Synthetic oligonucleotide
  Antisense strand to SEQ ID NO: 272678
uguccacggaauauucguc

SEQ ID NO: 272680 - RNA, 19 nt, Artificial Sequence
  Description of Artificial Sequence: Synthetic oligonucleotide
  Sense strand starting at position 2383 of SEQ ID NO: 3505
acgaauauuccguggacac

SEQ ID NO: 272681 - RNA, 19 nt, Artificial Sequence
  Description of Artificial Sequence: Synthetic oligonucleotide
  Antisense strand to SEQ ID NO: 272680
guguccacggaauauucgu

SEQ ID NO: 272682 - RNA, 19 nt, Artificial Sequence
  Description of Artificial Sequence: Synthetic oligonucleotide
  Sense strand starting at position 2384 of SEQ ID NO: 3505
cgaauauuccguggacaca

SEQ ID NO: 272683 - RNA, 19 nt, Artificial Sequence
  Description of Artificial Sequence: Synthetic oligonucleotide
  Antisense strand to SEQ ID NO: 272682
uguguccacggaauauucg

SEQ ID NO: 272684 - RNA, 19 nt, Artificial Sequence
  Description of Artificial Sequence: Synthetic oligonucleotide
  Sense strand starting at position 2385 of SEQ ID NO: 3505
gaauauuccguggacacac

SEQ ID NO: 272685 - RNA, 19 nt, Artificial Sequence
  Description of Artificial Sequence: Synthetic oligonucleotide
  Antisense strand to SEQ ID NO: 272684
guguguccacggaauauuc

SEQ ID NO: 272686 - RNA, 19 nt, Artificial Sequence
  Description of Artificial Sequence: Synthetic oligonucleotide
  Sense strand starting at position 2423 of SEQ ID NO: 3505
ucugcaauguaauucgaca

SEQ ID NO: 272687 - RNA, 19 nt, Artificial Sequence
  Description of Artificial Sequence: Synthetic oligonucleotide
  Antisense strand to SEQ ID NO: 272686
ugucgaauuacauugcaga

SEQ ID NO: 272688 - RNA, 19 nt, Artificial Sequence
  Description of Artificial Sequence: Synthetic oligonucleotide
  Sense strand starting at position 2425 of SEQ ID NO: 3505
ugcaauguaauucgacaag

SEQ ID NO: 272689 - RNA, 19 nt, Artificial Sequence
  Description of Artificial Sequence: Synthetic oligonucleotide
  Antisense strand to SEQ ID NO: 272688
cuugucgaauuacauugca

SEQ ID NO: 272690 - RNA, 19 nt, Artificial Sequence
  Description of Artificial Sequence: Synthetic oligonucleotide
  Sense strand starting at position 2428 of SEQ ID NO: 3505
aauguaauucgacaaguuu

SEQ ID NO: 272691 - RNA, 19 nt, Artificial Sequence
  Description of Artificial Sequence: Synthetic oligonucleotide
  Antisense strand to SEQ ID NO: 272690
aaacuugucgaauuacauu

SEQ ID NO: 272692 - RNA, 19 nt, Artificial Sequence
  Description of Artificial Sequence: Synthetic oligonucleotide
  Sense strand starting at position 2509 of SEQ ID NO: 3505
cuccuccuucucuggagaa

SEQ ID NO: 272693 - RNA, 19 nt, Artificial Sequence
  Description of Artificial Sequence: Synthetic oligonucleotide
  Antisense strand to SEQ ID NO: 272692
uucuccagagaaggaggag

SEQ ID NO: 272694 - RNA, 19 nt, Artificial Sequence
  Description of Artificial Sequence: Synthetic oligonucleotide
  Sense strand starting at position 2673 of SEQ ID NO: 3505
cgagcaguggcaugauaca

SEQ ID NO: 272695 - RNA, 19 nt, Artificial Sequence
  Description of Artificial Sequence: Synthetic oligonucleotide
  Antisense strand to SEQ ID NO: 272694
uguaucaugccacugcucg

SEQ ID NO: 272696 - RNA, 19 nt, Artificial Sequence
  Description of Artificial Sequence: Synthetic oligonucleotide
  Sense strand starting at position 3256 of SEQ ID NO: 3505
uggaguggacucggacauu

SEQ ID NO: 272697 - RNA, 19 nt, Artificial Sequence
  Description of Artificial Sequence: Synthetic oligonucleotide
  Antisense strand to SEQ ID NO: 272696
aauguccgaguccacucca

SEQ ID NO: 272698 - RNA, 19 nt, Artificial Sequence
  Description of Artificial Sequence: Synthetic oligonucleotide
  Sense strand starting at position 3301 of SEQ ID NO: 3505
uauuguaguguguaaggca

SEQ ID NO: 272699 - RNA, 19 nt, Artificial Sequence
  Description of Artificial Sequence: Synthetic oligonucleotide
  Antisense strand to SEQ ID NO: 272698
ugccuuacacacuacaaua

SEQ ID NO: 272700 - RNA, 19 nt, Artificial Sequence
  Description of Artificial Sequence: Synthetic oligonucleotide
  Sense strand starting at position 3306 of SEQ ID NO: 3505
uaguguguaaggcauaagu

SEQ ID NO: 272701 - RNA, 19 nt, Artificial Sequence
  Description of Artificial Sequence: Synthetic oligonucleotide
  Antisense strand to SEQ ID NO: 272700
acuuaugccuuacacacua

SEQ ID NO: 272702 - RNA, 19 nt, Artificial Sequence
  Description of Artificial Sequence: Synthetic oligonucleotide
  Sense strand starting at position 3308 of SEQ ID NO: 3505
guguguaaggcauaaguau

SEQ ID NO: 272703 - RNA, 19 nt, Artificial Sequence
  Description of Artificial Sequence: Synthetic oligonucleotide
  Antisense strand to SEQ ID NO: 272702
auacuuaugccuuacacac

SEQ ID NO: 272704 - RNA, 19 nt, Artificial Sequence
  Description of Artificial Sequence: Synthetic oligonucleotide
  Sense strand starting at position 3317 of SEQ ID NO: 3505
gcauaaguauucuuaggca

SEQ ID NO: 272705 - RNA, 19 nt, Artificial Sequence
  Description of Artificial Sequence: Synthetic oligonucleotide
  Antisense strand to SEQ ID NO: 272704
ugccuaagaauacuuaugc

SEQ ID NO: 272706 - RNA, 19 nt, Artificial Sequence
  Description of Artificial Sequence: Synthetic oligonucleotide
  Sense strand starting at position 3389 of SEQ ID NO: 3505
uagagcugcguuuggaaga

SEQ ID NO: 272707 - RNA, 19 nt, Artificial Sequence
  Description of Artificial Sequence: Synthetic oligonucleotide
  Antisense strand to SEQ ID NO: 272706
ucuuccaaacgcagcucua

SEQ ID NO: 272708 - RNA, 19 nt, Artificial Sequence
  Description of Artificial Sequence: Synthetic oligonucleotide
  Sense strand starting at position 3473 of SEQ ID NO: 3505
gccacaugccagcauugau

SEQ ID NO: 272709 - RNA, 19 nt, Artificial Sequence
  Description of Artificial Sequence: Synthetic oligonucleotide
  Antisense strand to SEQ ID NO: 272708
aucaaugcuggcauguggc

SEQ ID NO: 272710 - RNA, 19 nt, Artificial Sequence
  Description of Artificial Sequence: Synthetic oligonucleotide
  Sense strand starting at position 3506 of SEQ ID NO: 3505
cugcuugucccgggacaga

SEQ ID NO: 272711 - RNA, 19 nt, Artificial Sequence
  Description of Artificial Sequence: Synthetic oligonucleotide
  Antisense strand to SEQ ID NO: 272710
ucugucccgggacaagcag

SEQ ID NO: 272712 - RNA, 19 nt, Artificial Sequence
  Description of Artificial Sequence: Synthetic oligonucleotide
  Sense strand starting at position 3521 of SEQ ID NO: 3505
cagaaauccucagcuuggu

SEQ ID NO: 272713 - RNA, 19 nt, Artificial Sequence
  Description of Artificial Sequence: Synthetic oligonucleotide
  Antisense strand to SEQ ID NO: 272712
accaagcugaggauuucug

SEQ ID NO: 272714 - RNA, 19 nt, Artificial Sequence
  Description of Artificial Sequence: Synthetic oligonucleotide
  Sense strand starting at position 3753 of SEQ ID NO: 3505
gcuguugcugacuggauua

SEQ ID NO: 272715 - RNA, 19 nt, Artificial Sequence
  Description of Artificial Sequence: Synthetic oligonucleotide
  Antisense strand to SEQ ID NO: 272714
uaauccagucagcaacagc

SEQ ID NO: 272716 - RNA, 19 nt, Artificial Sequence
  Description of Artificial Sequence: Synthetic oligonucleotide
  Sense strand starting at position 175 of SEQ ID NO: 3503
caguuaaagugagaaauua

SEQ ID NO: 272717 - RNA, 19 nt, Artificial Sequence
  Description of Artificial Sequence: Synthetic oligonucleotide
  Antisense strand to SEQ ID NO: 272716
uaauuucucacuuuaacug

SEQ ID NO: 272718 - RNA, 19 nt, Artificial Sequence
  Description of Artificial Sequence: Synthetic oligonucleotide
  Sense strand starting at position 183 of SEQ ID NO: 3503
gugagaaauuaguucaagg

SEQ ID NO: 272719 - RNA, 19 nt, Artificial Sequence
  Description of Artificial Sequence: Synthetic oligonucleotide
  Antisense strand to SEQ ID NO: 272718
ccuugaacuaauuucucac

SEQ ID NO: 272720 - RNA, 19 nt, Artificial Sequence
  Description of Artificial Sequence: Synthetic oligonucleotide
  Sense strand starting at position 207 of SEQ ID NO: 3503
gggagaauguggccucaga

SEQ ID NO: 272721 - RNA, 19 nt, Artificial Sequence
  Description of Artificial Sequence: Synthetic oligonucleotide
  Antisense strand to SEQ ID NO: 272720
ucugaggccacauucuccc

SEQ ID NO: 272722 - RNA, 19 nt, Artificial Sequence
  Description of Artificial Sequence: Synthetic oligonucleotide
  Sense strand starting at position 616 of SEQ ID NO: 3503
ccgggauuccuugacugca

SEQ ID NO: 272723 - RNA, 19 nt, Artificial Sequence
  Description of Artificial Sequence: Synthetic oligonucleotide
  Antisense strand to SEQ ID NO: 272722
ugcagucaaggaaucccgg

SEQ ID NO: 272724 - RNA, 19 nt, Artificial Sequence
  Description of Artificial Sequence: Synthetic oligonucleotide
  Sense strand starting at position 618 of SEQ ID NO: 3503
gggauuccuugacugcagu

SEQ ID NO: 272725 - RNA, 19 nt, Artificial Sequence
  Description of Artificial Sequence: Synthetic oligonucleotide
  Antisense strand to SEQ ID NO: 272724
acugcagucaaggaauccc

SEQ ID NO: 272726 - RNA, 19 nt, Artificial Sequence
  Description of Artificial Sequence: Synthetic oligonucleotide
  Sense strand starting at position 878 of SEQ ID NO: 3503
cugcucagcucacuaagaa

SEQ ID NO: 272727 - RNA, 19 nt, Artificial Sequence
  Description of Artificial Sequence: Synthetic oligonucleotide
  Antisense strand to SEQ ID NO: 272726
uucuuagugagcugagcag

SEQ ID NO: 272728 - RNA, 19 nt, Artificial Sequence
  Description of Artificial Sequence: Synthetic oligonucleotide
  Sense strand starting at position 879 of SEQ ID NO: 3503
ugcucagcucacuaagaau

SEQ ID NO: 272729 - RNA, 19 nt, Artificial Sequence
  Description of Artificial Sequence: Synthetic oligonucleotide
  Antisense strand to SEQ ID NO: 272728
auucuuagugagcugagca

SEQ ID NO: 272730 - RNA, 19 nt, Artificial Sequence
  Description of Artificial Sequence: Synthetic oligonucleotide
  Sense strand starting at position 1079 of SEQ ID NO: 3503
ugcugauuugggugcaaua

SEQ ID NO: 272731 - RNA, 19 nt, Artificial Sequence
  Description of Artificial Sequence: Synthetic oligonucleotide
  Antisense strand to SEQ ID NO: 272730
uauugcacccaaaucagca

SEQ ID NO: 272732 - RNA, 19 nt, Artificial Sequence
  Description of Artificial Sequence: Synthetic oligonucleotide
  Sense strand starting at position 1158 of SEQ ID NO: 3503
aaguaaucugcucacugga

SEQ ID NO: 272733 - RNA, 19 nt, Artificial Sequence
  Description of Artificial Sequence: Synthetic oligonucleotide
  Antisense strand to SEQ ID NO: 272732
uccagugagcagauuacuu

SEQ ID NO: 272734 - RNA, 19 nt, Artificial Sequence
  Description of Artificial Sequence: Synthetic oligonucleotide
  Sense strand starting at position 1160 of SEQ ID NO: 3503
guaaucugcucacuggaca

SEQ ID NO: 272735 - RNA, 19 nt, Artificial Sequence
  Description of Artificial Sequence: Synthetic oligonucleotide
  Antisense strand to SEQ ID NO: 272734
uguccagugagcagauuac

SEQ ID NO: 272736 - RNA, 19 nt, Artificial Sequence
  Description of Artificial Sequence: Synthetic oligonucleotide
  Sense strand starting at position 1199 of SEQ ID NO: 3503
cgaguuaauugauaccaac

SEQ ID NO: 272737 - RNA, 19 nt, Artificial Sequence
  Description of Artificial Sequence: Synthetic oligonucleotide
  Antisense strand to SEQ ID NO: 272736
guugguaucaauuaacucg

SEQ ID NO: 272738 - RNA, 19 nt, Artificial Sequence
  Description of Artificial Sequence: Synthetic oligonucleotide
  Sense strand starting at position 1238 of SEQ ID NO: 3503
gugugucugacagauucua

SEQ ID NO: 272739 - RNA, 19 nt, Artificial Sequence
  Description of Artificial Sequence: Synthetic oligonucleotide
  Antisense strand to SEQ ID NO: 272738
uagaaucugucagacacac

SEQ ID NO: 272740 - RNA, 19 nt, Artificial Sequence
  Description of Artificial Sequence: Synthetic oligonucleotide
  Sense strand starting at position 1246 of SEQ ID NO: 3503
gacagauucuagggccuga

SEQ ID NO: 272741 - RNA, 19 nt, Artificial Sequence
  Description of Artificial Sequence: Synthetic oligonucleotide
  Antisense strand to SEQ ID NO: 272740
ucaggcccuagaaucuguc

SEQ ID NO: 272742 - RNA, 19 nt, Artificial Sequence
  Description of Artificial Sequence: Synthetic oligonucleotide
  Sense strand starting at position 1372 of SEQ ID NO: 3503
gugugaauguccucuccuu

SEQ ID NO: 272743 - RNA, 19 nt, Artificial Sequence
  Description of Artificial Sequence: Synthetic oligonucleotide
  Antisense strand to SEQ ID NO: 272742
aaggagaggacauucacac

SEQ ID NO: 272744 - RNA, 19 nt, Artificial Sequence
  Description of Artificial Sequence: Synthetic oligonucleotide
  Sense strand starting at position 1610 of SEQ ID NO: 3503
auucgaggugguggaauau

SEQ ID NO: 272745 - RNA, 19 nt, Artificial Sequence
  Description of Artificial Sequence: Synthetic oligonucleotide
  Antisense strand to SEQ ID NO: 272744
auauuccaccaccucgaau

SEQ ID NO: 272746 - RNA, 19 nt, Artificial Sequence
  Description of Artificial Sequence: Synthetic oligonucleotide
  Sense strand starting at position 1726 of SEQ ID NO: 3503
gugugaauucaccgaaagg

SEQ ID NO: 272747 - RNA, 19 nt, Artificial Sequence
  Description of Artificial Sequence: Synthetic oligonucleotide
  Antisense strand to SEQ ID NO: 272746
ccuuucggugaauucacac

SEQ ID NO: 272748 - RNA, 19 nt, Artificial Sequence
  Description of Artificial Sequence: Synthetic oligonucleotide
  Sense strand starting at position 1748 of SEQ ID NO: 3503
gcuuaagaaugcucacaac

SEQ ID NO: 272749 - RNA, 19 nt, Artificial Sequence
  Description of Artificial Sequence: Synthetic oligonucleotide
  Antisense strand to SEQ ID NO: 272748
guugugagcauucuuaagc

SEQ ID NO: 272750 - RNA, 19 nt, Artificial Sequence
  Description of Artificial Sequence: Synthetic oligonucleotide
  Sense strand starting at position 1825 of SEQ ID NO: 3503
gauaaauuguguucugcuc

SEQ ID NO: 272751 - RNA, 19 nt, Artificial Sequence
  Description of Artificial Sequence: Synthetic oligonucleotide
  Antisense strand to SEQ ID NO: 272750
gagcagaacacaauuuauc

SEQ ID NO: 272752 - RNA, 19 nt, Artificial Sequence
  Description of Artificial Sequence: Synthetic oligonucleotide
  Sense strand starting at position 1863 of SEQ ID NO: 3503
agccgugagaaugagcaaa

SEQ ID NO: 272753 - RNA, 19 nt, Artificial Sequence
  Description of Artificial Sequence: Synthetic oligonucleotide
  Antisense strand to SEQ ID NO: 272752
uuugcucauucucacggcu

SEQ ID NO: 272754 - RNA, 19 nt, Artificial Sequence
  Description of Artificial Sequence: Synthetic oligonucleotide
  Sense strand starting at position 1889 of SEQ ID NO: 3503
ugcagauauccucgccauc

SEQ ID NO: 272755 - RNA, 19 nt, Artificial Sequence
  Description of Artificial Sequence: Synthetic oligonucleotide
  Antisense strand to SEQ ID NO: 272754
gauggcgaggauaucugca

SEQ ID NO: 272756 - RNA, 19 nt, Artificial Sequence
  Description of Artificial Sequence: Synthetic oligonucleotide
  Sense strand starting at position 1930 of SEQ ID NO: 3503
gugggauucuauuaauucc

SEQ ID NO: 272757 - RNA, 19 nt, Artificial Sequence
  Description of Artificial Sequence: Synthetic oligonucleotide
  Antisense strand to SEQ ID NO: 272756
ggaauuaauagaaucccac

SEQ ID NO: 272758 - RNA, 19 nt, Artificial Sequence
  Description of Artificial Sequence: Synthetic oligonucleotide
  Sense strand starting at position 1941 of SEQ ID NO: 3503
uuaauuccuguuugaagca

SEQ ID NO: 272759 - RNA, 19 nt, Artificial Sequence
  Description of Artificial Sequence: Synthetic oligonucleotide
  Antisense strand to SEQ ID NO: 272758
ugcuucaaacaggaauuaa

SEQ ID NO: 272760 - RNA, 19 nt, Artificial Sequence
  Description of Artificial Sequence: Synthetic oligonucleotide
  Sense strand starting at position 2199 of SEQ ID NO: 3503
ggcugaauccugcagucag

SEQ ID NO: 272761 - RNA, 19 nt, Artificial Sequence
  Description of Artificial Sequence: Synthetic oligonucleotide
  Antisense strand to SEQ ID NO: 272760
cugacugcaggauucagcc

SEQ ID NO: 272762 - RNA, 19 nt, Artificial Sequence
  Description of Artificial Sequence: Synthetic oligonucleotide
  Sense strand starting at position 2543 of SEQ ID NO: 3503
ggagcucacagaugauauu

SEQ ID NO: 272763 - RNA, 19 nt, Artificial Sequence
  Description of Artificial Sequence: Synthetic oligonucleotide
  Antisense strand to SEQ ID NO: 272762
aauaucaucugugagcucc

SEQ ID NO: 272764 - RNA, 19 nt, Artificial Sequence
  Description of Artificial Sequence: Synthetic oligonucleotide
  Sense strand starting at position 2848 of SEQ ID NO: 3503
uccuuucccguuuggaauu

SEQ ID NO: 272765 - RNA, 19 nt, Artificial Sequence
  Description of Artificial Sequence: Synthetic oligonucleotide
  Antisense strand to SEQ ID NO: 272764
aauuccaaacgggaaagga

SEQ ID NO: 272766 - RNA, 19 nt, Artificial Sequence
  Description of Artificial Sequence: Synthetic oligonucleotide
  Sense strand starting at position 2858 of SEQ ID NO: 3503
uuuggaauuucccgaucag

SEQ ID NO: 272767 - RNA, 19 nt, Artificial Sequence
  Description of Artificial Sequence: Synthetic oligonucleotide
  Antisense strand to SEQ ID NO: 272766
cugaucgggaaauuccaaa

SEQ ID NO: 272768 - RNA, 19 nt, Artificial Sequence
  Description of Artificial Sequence: Synthetic oligonucleotide
  Sense strand starting at position 3038 of SEQ ID NO: 3503
ggcucauucccugacuucu

SEQ ID NO: 272769 - RNA, 19 nt, Artificial Sequence
  Description of Artificial Sequence: Synthetic oligonucleotide
  Antisense strand to SEQ ID NO: 272768
agaagucagggaaugagcc

SEQ ID NO: 272770 - RNA, 19 nt, Artificial Sequence
  Description of Artificial Sequence: Synthetic oligonucleotide
  Sense strand starting at position 3074 of SEQ ID NO: 3503
gggcccucuccucagaaca

SEQ ID NO: 272771 - RNA, 19 nt, Artificial Sequence
  Description of Artificial Sequence: Synthetic oligonucleotide
  Antisense strand to SEQ ID NO: 272770
uguucugaggagagggccc

SEQ ID NO: 272772 - RNA, 19 nt, Artificial Sequence
  Description of Artificial Sequence: Synthetic oligonucleotide
  Sense strand starting at position 3259 of SEQ ID NO: 3503
cagggagauguaugaaguu

SEQ ID NO: 272773 - RNA, 19 nt, Artificial Sequence
  Description of Artificial Sequence: Synthetic oligonucleotide
  Antisense strand to SEQ ID NO: 272772
aacuucauacaucucccug

SEQ ID NO: 272774 - RNA, 19 nt, Artificial Sequence
  Description of Artificial Sequence: Synthetic oligonucleotide
  Sense strand starting at position 3294 of SEQ ID NO: 3503
cgagccuggaaagguuaaa

SEQ ID NO: 272775 - RNA, 19 nt, Artificial Sequence
  Description of Artificial Sequence: Synthetic oligonucleotide
  Antisense strand to SEQ ID NO: 272774
uuuaaccuuuccaggcucg

SEQ ID NO: 272776 - RNA, 19 nt, Artificial Sequence
  Description of Artificial Sequence: Synthetic oligonucleotide
  Sense strand starting at position 3326 of SEQ ID NO: 3503
gcuggaagccaucaagugu

SEQ ID NO: 272777 - RNA, 19 nt, Artificial Sequence
  Description of Artificial Sequence: Synthetic oligonucleotide
  Antisense strand to SEQ ID NO: 272776
acacuugauggcuuccagc

SEQ ID NO: 272778 - RNA, 19 nt, Artificial Sequence
  Description of Artificial Sequence: Synthetic oligonucleotide
  Sense strand starting at position 3334 of SEQ ID NO: 3503
ccaucaagugucuggaagu

SEQ ID NO: 272779 - RNA, 19 nt, Artificial Sequence
  Description of Artificial Sequence: Synthetic oligonucleotide
  Antisense strand to SEQ ID NO: 272778
acuuccagacacuugaugg

SEQ ID NO: 272780 - RNA, 19 nt, Artificial Sequence
  Description of Artificial Sequence: Synthetic oligonucleotide
  Sense strand starting at position 3389 of SEQ ID NO: 3503
gcagccagugucugguuau

SEQ ID NO: 272781 - RNA, 19 nt, Artificial Sequence
  Description of Artificial Sequence: Synthetic oligonucleotide
  Antisense strand to SEQ ID NO: 272780
auaaccagacacuggcugc

SEQ ID NO: 272782 - RNA, 19 nt, Artificial Sequence
  Description of Artificial Sequence: Synthetic oligonucleotide
  Sense strand starting at position 3416 of SEQ ID NO: 3503
ccagacgcuuguuuagaga

SEQ ID NO: 272783 - RNA, 19 nt, Artificial Sequence
  Description of Artificial Sequence: Synthetic oligonucleotide
  Antisense strand to SEQ ID NO: 272782
ucucuaaacaagcgucugg

SEQ ID NO: 272784 - RNA, 19 nt, Artificial Sequence
  Description of Artificial Sequence: Synthetic oligonucleotide
  Sense strand starting at position 3430 of SEQ ID NO: 3503
agagaaaucuuugccuccu

SEQ ID NO: 272785 - RNA, 19 nt, Artificial Sequence
  Description of Artificial Sequence: Synthetic oligonucleotide
  Antisense strand to SEQ ID NO: 272784
aggaggcaaagauuucucu

SEQ ID NO: 272786 - RNA, 19 nt, Artificial Sequence
  Description of Artificial Sequence: Synthetic oligonucleotide
  Sense strand starting at position 3465 of SEQ ID NO: 3503
gcucucuguguuucucuua

SEQ ID NO: 272787 - RNA, 19 nt, Artificial Sequence
  Description of Artificial Sequence: Synthetic oligonucleotide
  Antisense strand to SEQ ID NO: 272786
uaagagaaacacagagagc

SEQ ID NO: 272788 - RNA, 19 nt, Artificial Sequence
  Description of Artificial Sequence: Synthetic oligonucleotide
  Sense strand starting at position 3476 of SEQ ID NO: 3503
uucucuuaucuuuggaugu

SEQ ID NO: 272789 - RNA, 19 nt, Artificial Sequence
  Description of Artificial Sequence: Synthetic oligonucleotide
  Antisense strand to SEQ ID NO: 272788
acauccaaagauaagagaa

SEQ ID NO: 272790 - RNA, 19 nt, Artificial Sequence
  Description of Artificial Sequence: Synthetic oligonucleotide
  Sense strand starting at position 3656 of SEQ ID NO: 3503
gugaauuuguaucuuucuu

SEQ ID NO: 272791 - RNA, 19 nt, Artificial Sequence
  Description of Artificial Sequence: Synthetic oligonucleotide
  Antisense strand to SEQ ID NO: 272790
aagaaagauacaaauucac

SEQ ID NO: 272792 - RNA, 19 nt, Artificial Sequence
  Description of Artificial Sequence: Synthetic oligonucleotide
  Sense strand starting at position 3685 of SEQ ID NO: 3503
gcagcaauugcaugauuuc

SEQ ID NO: 272793 - RNA, 19 nt, Artificial Sequence
  Description of Artificial Sequence: Synthetic oligonucleotide
  Antisense strand to SEQ ID NO: 272792
gaaaucaugcaauugcugc

SEQ ID NO: 272794 - RNA, 19 nt, Artificial Sequence
  Description of Artificial Sequence: Synthetic oligonucleotide
  Sense strand starting at position 3736 of SEQ ID NO: 3503
cugcgcuucugagcagaga

SEQ ID NO: 272795 - RNA, 19 nt, Artificial Sequence
  Description of Artificial Sequence: Synthetic oligonucleotide
  Antisense strand to SEQ ID NO: 272794
ucucugcucagaagcgcag

SEQ ID NO: 272796 - RNA, 19 nt, Artificial Sequence
  Description of Artificial Sequence: Synthetic oligonucleotide
  Sense strand starting at position 208 of SEQ ID NO: 3504
gggucuuucccauguaaga

SEQ ID NO: 272797 - RNA, 19 nt, Artificial Sequence
  Description of Artificial Sequence: Synthetic oligonucleotide
  Antisense strand to SEQ ID NO: 272796
ucuuacaugggaaagaccc

SEQ ID NO: 272798 - RNA, 19 nt, Artificial Sequence
  Description of Artificial Sequence: Synthetic oligonucleotide
  Sense strand starting at position 233 of SEQ ID NO: 3504
agcugaaucuuccugaaau

SEQ ID NO: 272799 - RNA, 19 nt, Artificial Sequence
  Description of Artificial Sequence: Synthetic oligonucleotide
  Antisense strand to SEQ ID NO: 272798
auuucaggaagauucagcu

SEQ ID NO: 272800 - RNA, 19 nt, Artificial Sequence
  Description of Artificial Sequence: Synthetic oligonucleotide
  Sense strand starting at position 332 of SEQ ID NO: 3504
ggagcauccuugucuagga

SEQ ID NO: 272801 - RNA, 19 nt, Artificial Sequence
  Description of Artificial Sequence: Synthetic oligonucleotide
  Antisense strand to SEQ ID NO: 272800
uccuagacaaggaugcucc

SEQ ID NO: 272802 - RNA, 19 nt, Artificial Sequence
  Description of Artificial Sequence: Synthetic oligonucleotide
  Sense strand starting at position 333 of SEQ ID NO: 3504
gagcauccuugucuaggau

SEQ ID NO: 272803 - RNA, 19 nt, Artificial Sequence
  Description of Artificial Sequence: Synthetic oligonucleotide
  Antisense strand to SEQ ID NO: 272802
auccuagacaaggaugcuc

SEQ ID NO: 272804 - RNA, 19 nt, Artificial Sequence
  Description of Artificial Sequence: Synthetic oligonucleotide
  Sense strand starting at position 480 of SEQ ID NO: 3504
cccgcuguggccucucaaa

SEQ ID NO: 272805 - RNA, 19 nt, Artificial Sequence
  Description of Artificial Sequence: Synthetic oligonucleotide
  Antisense strand to SEQ ID NO: 272804
uuugagaggccacagcggg

SEQ ID NO: 272806 - RNA, 19 nt, Artificial Sequence
  Description of Artificial Sequence: Synthetic oligonucleotide
  Sense strand starting at position 482 of SEQ ID NO: 3504
cgcuguggccucucaaagu

SEQ ID NO: 272807 - RNA, 19 nt, Artificial Sequence
  Description of Artificial Sequence: Synthetic oligonucleotide
  Antisense strand to SEQ ID NO: 272806
acuuugagaggccacagcg

SEQ ID NO: 272808 - RNA, 19 nt, Artificial Sequence
  Description of Artificial Sequence: Synthetic oligonucleotide
  Sense strand starting at position 593 of SEQ ID NO: 3504
auucgcaugccauagaauu

SEQ ID NO: 272809 - RNA, 19 nt, Artificial Sequence
  Description of Artificial Sequence: Synthetic oligonucleotide
  Antisense strand to SEQ ID NO: 272808
aauucuauggcaugcgaau

SEQ ID NO: 272810 - RNA, 19 nt, Artificial Sequence
  Description of Artificial Sequence: Synthetic oligonucleotide
  Sense strand starting at position 1016 of SEQ ID NO: 3504
gaugguuaacagugaugau

SEQ ID NO: 272811 - RNA, 19 nt, Artificial Sequence
  Description of Artificial Sequence: Synthetic oligonucleotide
  Antisense strand to SEQ ID NO: 272810
aucaucacuguuaaccauc

SEQ ID NO: 272812 - RNA, 19 nt, Artificial Sequence
  Description of Artificial Sequence: Synthetic oligonucleotide
  Sense strand starting at position 1020 of SEQ ID NO: 3504
guuaacagugaugauacuu

SEQ ID NO: 272813 - RNA, 19 nt, Artificial Sequence
  Description of Artificial Sequence: Synthetic oligonucleotide
  Antisense strand to SEQ ID NO: 272812
aaguaucaucacuguuaac

SEQ ID NO: 272814 - RNA, 19 nt, Artificial Sequence
  Description of Artificial Sequence: Synthetic oligonucleotide
  Sense strand starting at position 1028 of SEQ ID NO: 3504
ugaugauacuugucccacu

SEQ ID NO: 272815 - RNA, 19 nt, Artificial Sequence
  Description of Artificial Sequence: Synthetic oligonucleotide
  Antisense strand to SEQ ID NO: 272814
agugggacaaguaucauca

SEQ ID NO: 272816 - RNA, 19 nt, Artificial Sequence
  Description of Artificial Sequence: Synthetic oligonucleotide
  Sense strand starting at position 1807 of SEQ ID NO: 3504
gcagaauaagcagggaaua

SEQ ID NO: 272817 - RNA, 19 nt, Artificial Sequence
  Description of Artificial Sequence: Synthetic oligonucleotide
  Antisense strand to SEQ ID NO: 272816
uauucccugcuuauucugc

SEQ ID NO: 272818 - RNA, 19 nt, Artificial Sequence
  Description of Artificial Sequence: Synthetic oligonucleotide
  Sense strand starting at position 1817 of SEQ ID NO: 3504
cagggaauaucuuugucau

SEQ ID NO: 272819 - RNA, 19 nt, Artificial Sequence
  Description of Artificial Sequence: Synthetic oligonucleotide
  Antisense strand to SEQ ID NO: 272818
augacaaagauauucccug

SEQ ID NO: 272820 - RNA, 19 nt, Artificial Sequence
  Description of Artificial Sequence: Synthetic oligonucleotide
  Sense strand starting at position 1818 of SEQ ID NO: 3504
agggaauaucuuugucauc

SEQ ID NO: 272821 - RNA, 19 nt, Artificial Sequence
  Description of Artificial Sequence: Synthetic oligonucleotide
  Antisense strand to SEQ ID NO: 272820
gaugacaaagauauucccu

SEQ ID NO: 272822 - RNA, 19 nt, Artificial Sequence
  Description of Artificial Sequence: Synthetic oligonucleotide
  Sense strand starting at position 1819 of SEQ ID NO: 3504
gggaauaucuuugucaucu

SEQ ID NO: 272823 - RNA, 19 nt, Artificial Sequence
  Description of Artificial Sequence: Synthetic oligonucleotide
  Antisense strand to SEQ ID NO: 272822
agaugacaaagauauuccc

SEQ ID NO: 272824 - RNA, 19 nt, Artificial Sequence
  Description of Artificial Sequence: Synthetic oligonucleotide
  Sense strand starting at position 1820 of SEQ ID NO: 3504
ggaauaucuuugucaucuu

SEQ ID NO: 272825 - RNA, 19 nt, Artificial Sequence
  Description of Artificial Sequence: Synthetic oligonucleotide
  Antisense strand to SEQ ID NO: 272824
aagaugacaaagauauucc

SEQ ID NO: 272826 - RNA, 19 nt, Artificial Sequence
  Description of Artificial Sequence: Synthetic oligonucleotide
  Sense strand starting at position 1823 of SEQ ID NO: 3504
auaucuuugucaucuugga

SEQ ID NO: 272827 - RNA, 19 nt, Artificial Sequence
  Description of Artificial Sequence: Synthetic oligonucleotide
  Antisense strand to SEQ ID NO: 272826
uccaagaugacaaagauau

SEQ ID NO: 272828 - RNA, 19 nt, Artificial Sequence
  Description of Artificial Sequence: Synthetic oligonucleotide
  Sense strand starting at position 1836 of SEQ ID NO: 3504
cuuggaucuuguuccagaa

SEQ ID NO: 272829 - RNA, 19 nt, Artificial Sequence
  Description of Artificial Sequence: Synthetic oligonucleotide
  Antisense strand to SEQ ID NO: 272828
uucuggaacaagauccaag

SEQ ID NO: 272830 - RNA, 19 nt, Artificial Sequence
  Description of Artificial Sequence: Synthetic oligonucleotide
  Sense strand starting at position 1889 of SEQ ID NO: 3504
ucuauauuugugcaagugu

SEQ ID NO: 272831 - RNA, 19 nt, Artificial Sequence
  Description of Artificial Sequence: Synthetic oligonucleotide
  Antisense strand to SEQ ID NO: 272830
acacuugcacaaauauaga

SEQ ID NO: 272832 - RNA, 19 nt, Artificial Sequence
  Description of Artificial Sequence: Synthetic oligonucleotide
  Sense strand starting at position 2197 of SEQ ID NO: 3504
gggaacugucuggauaguu

SEQ ID NO: 272833 - RNA, 19 nt, Artificial Sequence
  Description of Artificial Sequence: Synthetic oligonucleotide
  Antisense strand to SEQ ID NO: 272832
aacuauccagacaguuccc

SEQ ID NO: 272834 - RNA, 19 nt, Artificial Sequence
  Description of Artificial Sequence: Synthetic oligonucleotide
  Sense strand starting at position 2434 of SEQ ID NO: 3504
ucuaguaaugaggguaaca

SEQ ID NO: 272835 - RNA, 19 nt, Artificial Sequence
  Description of Artificial Sequence: Synthetic oligonucleotide
  Antisense strand to SEQ ID NO: 272834
uguuacccucauuacuaga

SEQ ID NO: 272836 - RNA, 19 nt, Artificial Sequence
  Description of Artificial Sequence: Synthetic oligonucleotide
  Sense strand starting at position 2616 of SEQ ID NO: 3504
uuaccuacuguguacauau

SEQ ID NO: 272837 - RNA, 19 nt, Artificial Sequence
  Description of Artificial Sequence: Synthetic oligonucleotide
  Antisense strand to SEQ ID NO: 272836
auauguacacaguagguaa

SEQ ID NO: 272838 - RNA, 19 nt, Artificial Sequence
  Description of Artificial Sequence: Synthetic oligonucleotide
  Sense strand starting at position 2859 of SEQ ID NO: 3504
acacacgucgugaguuaug

SEQ ID NO: 272839 - RNA, 19 nt, Artificial Sequence
  Description of Artificial Sequence: Synthetic oligonucleotide
  Antisense strand to SEQ ID NO: 272838
cauaacucacgacgugugu

SEQ ID NO: 272840 - RNA, 19 nt, Artificial Sequence
  Description of Artificial Sequence: Synthetic oligonucleotide
  Sense strand starting at position 2923 of SEQ ID NO: 3504
uucucaggcuuauuaagga

SEQ ID NO: 272841 - RNA, 19 nt, Artificial Sequence
  Description of Artificial Sequence: Synthetic oligonucleotide
  Antisense strand to SEQ ID NO: 272840
uccuuaauaagccugagaa

SEQ ID NO: 272842 - RNA, 19 nt, Artificial Sequence
  Description of Artificial Sequence: Synthetic oligonucleotide
  Sense strand starting at position 2974 of SEQ ID NO: 3504
cucuaagcauguucuggaa

SEQ ID NO: 272843 - RNA, 19 nt, Artificial Sequence
  Description of Artificial Sequence: Synthetic oligonucleotide
  Antisense strand to SEQ ID NO: 272842
uuccagaacaugcuuagag

SEQ ID NO: 272844 - RNA, 19 nt, Artificial Sequence
  Description of Artificial Sequence: Synthetic oligonucleotide
  Sense strand starting at position 2978 of SEQ ID NO: 3504
aagcauguucuggaaucau

SEQ ID NO: 272845 - RNA, 19 nt, Artificial Sequence
  Description of Artificial Sequence: Synthetic oligonucleotide
  Antisense strand to SEQ ID NO: 272844
augauuccagaacaugcuu

SEQ ID NO: 272846 - RNA, 19 nt, Artificial Sequence
  Description of Artificial Sequence: Synthetic oligonucleotide
  Sense strand starting at position 3025 of SEQ ID NO: 3504
ccaagaguguaaccaaaug

SEQ ID NO: 272847 - RNA, 19 nt, Artificial Sequence
  Description of Artificial Sequence: Synthetic oligonucleotide
  Antisense strand to SEQ ID NO: 272846
cauuugguuacacucuugg

SEQ ID NO: 272848 - RNA, 19 nt, Artificial Sequence
  Description of Artificial Sequence: Synthetic oligonucleotide
  Sense strand starting at position 3118 of SEQ ID NO: 3504
gaguguucucucuacagga

SEQ ID NO: 272849 - RNA, 19 nt, Artificial Sequence
  Description of Artificial Sequence: Synthetic oligonucleotide
  Antisense strand to SEQ ID NO: 272848
uccuguagagagaacacuc

SEQ ID NO: 272850 - RNA, 19 nt, Artificial Sequence
  Description of Artificial Sequence: Synthetic oligonucleotide
  Sense strand starting at position 3120 of SEQ ID NO: 3504
guguucucucuacaggaca

SEQ ID NO: 272851 - RNA, 19 nt, Artificial Sequence
  Description of Artificial Sequence: Synthetic oligonucleotide
  Antisense strand to SEQ ID NO: 272850
uguccuguagagagaacac

SEQ ID NO: 272852 - RNA, 19 nt, Artificial Sequence
  Description of Artificial Sequence: Synthetic oligonucleotide
  Sense strand starting at position 3163 of SEQ ID NO: 3504
uuaguuuacucauuugcag

SEQ ID NO: 272853 - RNA, 19 nt, Artificial Sequence
  Description of Artificial Sequence: Synthetic oligonucleotide
  Antisense strand to SEQ ID NO: 272852
cugcaaaugaguaaacuaa

SEQ ID NO: 272854 - RNA, 19 nt, Artificial Sequence
  Description of Artificial Sequence: Synthetic oligonucleotide
  Sense strand starting at position 3184 of SEQ ID NO: 3504
ggagaacugucacugacug

SEQ ID NO: 272855 - RNA, 19 nt, Artificial Sequence
  Description of Artificial Sequence: Synthetic oligonucleotide
  Antisense strand to SEQ ID NO: 272854
cagucagugacaguucucc

SEQ ID NO: 272856 - RNA, 19 nt, Artificial Sequence
  Description of Artificial Sequence: Synthetic oligonucleotide
  Sense strand starting at position 3185 of SEQ ID NO: 3504
gagaacugucacugacuga

SEQ ID NO: 272857 - RNA, 19 nt, Artificial Sequence
  Description of Artificial Sequence: Synthetic oligonucleotide
  Antisense strand to SEQ ID NO: 272856
ucagucagugacaguucuc

SEQ ID NO: 272858 - RNA, 19 nt, Artificial Sequence
  Description of Artificial Sequence: Synthetic oligonucleotide
  Sense strand starting at position 3190 of SEQ ID NO: 3504
cugucacugacugagguua

SEQ ID NO: 272859 - RNA, 19 nt, Artificial Sequence
  Description of Artificial Sequence: Synthetic oligonucleotide
  Antisense strand to SEQ ID NO: 272858
uaaccucagucagugacag

SEQ ID NO: 272860 - RNA, 19 nt, Artificial Sequence
  Description of Artificial Sequence: Synthetic oligonucleotide
  Sense strand starting at position 3527 of SEQ ID NO: 3504
ggcauuaggaucuaaugca

SEQ ID NO: 272861 - RNA, 19 nt, Artificial Sequence
  Description of Artificial Sequence: Synthetic oligonucleotide
  Antisense strand to SEQ ID NO: 272860
ugcauuagauccuaaugcc

SEQ ID NO: 272862 - RNA, 19 nt, Artificial Sequence
  Description of Artificial Sequence: Synthetic oligonucleotide
  Sense strand starting at position 3566 of SEQ ID NO: 3504
acacucagucuauggcaaa

SEQ ID NO: 272863 - RNA, 19 nt, Artificial Sequence
  Description of Artificial Sequence: Synthetic oligonucleotide
  Antisense strand to SEQ ID NO: 272862
uuugccauagacugagugu

SEQ ID NO: 272864 - RNA, 19 nt, Artificial Sequence
  Description of Artificial Sequence: Synthetic oligonucleotide
  Sense strand starting at position 3840 of SEQ ID NO: 3504
gacaaaggugcugaaguuu

SEQ ID NO: 272865 - RNA, 19 nt, Artificial Sequence
  Description of Artificial Sequence: Synthetic oligonucleotide
  Antisense strand to SEQ ID NO: 272864
aaacuucagcaccuuuguc

SEQ ID NO: 272866 - RNA, 19 nt, Artificial Sequence
  Description of Artificial Sequence: Synthetic oligonucleotide
  Sense strand starting at position 3894 of SEQ ID NO: 3504
ggugguuguuauuucugaa

SEQ ID NO: 272867 - RNA, 19 nt, Artificial Sequence
  Description of Artificial Sequence: Synthetic oligonucleotide
  Antisense strand to SEQ ID NO: 272866
uucagaaauaacaaccacc

SEQ ID NO: 272868 - RNA, 19 nt, Artificial Sequence
  Description of Artificial Sequence: Synthetic oligonucleotide
  Sense strand starting at position 3928 of SEQ ID NO: 3504
aaugcuggguauguaauua

SEQ ID NO: 272869 - RNA, 19 nt, Artificial Sequence
  Description of Artificial Sequence: Synthetic oligonucleotide
  Antisense strand to SEQ ID NO: 272868
uaauuacauacccagcauu

SEQ ID NO: 272870 - RNA, 19 nt, Artificial Sequence
  Description of Artificial Sequence: Synthetic oligonucleotide
  Sense strand starting at position 3933 of SEQ ID NO: 3504
uggguauguaauuaccgua

SEQ ID NO: 272871 - RNA, 19 nt, Artificial Sequence
  Description of Artificial Sequence: Synthetic oligonucleotide
  Antisense strand to SEQ ID NO: 272870
uacgguaauuacauaccca

SEQ ID NO: 272872 - RNA, 19 nt, Artificial Sequence
  Description of Artificial Sequence: Synthetic oligonucleotide
  Sense strand starting at position 3938 of SEQ ID NO: 3504
auguaauuaccguauucug

SEQ ID NO: 272873 - RNA, 19 nt, Artificial Sequence
  Description of Artificial Sequence: Synthetic oligonucleotide
  Antisense strand to SEQ ID NO: 272872
cagaauacgguaauuacau

SEQ ID NO: 272874 - RNA, 19 nt, Artificial Sequence
  Description of Artificial Sequence: Synthetic oligonucleotide
  Sense strand starting at position 3947 of SEQ ID NO: 3504
ccguauucuguagauuugu

SEQ ID NO: 272875 - RNA, 19 nt, Artificial Sequence
  Description of Artificial Sequence: Synthetic oligonucleotide
  Antisense strand to SEQ ID NO: 272874
acaaaucuacagaauacgg

SEQ ID NO: 272876 - RNA, 19 nt, Artificial Sequence
  Description of Artificial Sequence: Synthetic oligonucleotide
  Sense strand starting at position 13 of SEQ ID NO: 3506
ggaggcucaggcugaaauu

SEQ ID NO: 272877 - RNA, 19 nt, Artificial Sequence
  Description of Artificial Sequence: Synthetic oligonucleotide
  Antisense strand to SEQ ID NO: 272876
aauuucagccugagccucc

SEQ ID NO: 272878 - RNA, 19 nt, Artificial Sequence
  Description of Artificial Sequence: Synthetic oligonucleotide
  Sense strand starting at position 448 of SEQ ID NO: 3506
ucaauugucugguuacuga

SEQ ID NO: 272879 - RNA, 19 nt, Artificial Sequence
  Description of Artificial Sequence: Synthetic oligonucleotide
  Antisense strand to SEQ ID NO: 272878
ucaguaaccagacaauuga

SEQ ID NO: 272880 - RNA, 19 nt, Artificial Sequence
  Description of Artificial Sequence: Synthetic oligonucleotide
  Sense strand starting at position 517 of SEQ ID NO: 3506
uaagcagaaucguuguaga

SEQ ID NO: 272881 - RNA, 19 nt, Artificial Sequence
  Description of Artificial Sequence: Synthetic oligonucleotide
  Antisense strand to SEQ ID NO: 272880
ucuacaacgauucugcuua

SEQ ID NO: 272882 - RNA, 19 nt, Artificial Sequence
  Description of Artificial Sequence: Synthetic oligonucleotide
  Sense strand starting at position 534 of SEQ ID NO: 3506
gaauguccuuuggcaaaca

SEQ ID NO: 272883 - RNA, 19 nt, Artificial Sequence
  Description of Artificial Sequence: Synthetic oligonucleotide
  Antisense strand to SEQ ID NO: 272882
uguuugccaaaggacauuc

SEQ ID NO: 272884 - RNA, 19 nt, Artificial Sequence
  Description of Artificial Sequence: Synthetic oligonucleotide
  Sense strand starting at position 576 of SEQ ID NO: 3506
aggucuuauuauuccagua

SEQ ID NO: 272885 - RNA, 19 nt, Artificial Sequence
  Description of Artificial Sequence: Synthetic oligonucleotide
  Antisense strand to SEQ ID NO: 272884
uacuggaauaauaagaccu

SEQ ID NO: 272886 - RNA, 19 nt, Artificial Sequence
  Description of Artificial Sequence: Synthetic oligonucleotide
  Sense strand starting at position 848 of SEQ ID NO: 3506
gguaucguucaaugcagaa

SEQ ID NO: 272887 - RNA, 19 nt, Artificial Sequence
  Description of Artificial Sequence: Synthetic oligonucleotide
  Antisense strand to SEQ ID NO: 272886
uucugcauugaacgauacc

SEQ ID NO: 272888 - RNA, 19 nt, Artificial Sequence
  Description of Artificial Sequence: Synthetic oligonucleotide
  Sense strand starting at position 1089 of SEQ ID NO: 3506
gacuuacuugcugaugaug

SEQ ID NO: 272889 - RNA, 19 nt, Artificial Sequence
  Description of Artificial Sequence: Synthetic oligonucleotide
  Antisense strand to SEQ ID NO: 272888
caucaucagcaaguaaguc

SEQ ID NO: 272890 - RNA, 19 nt, Artificial Sequence
  Description of Artificial Sequence: Synthetic oligonucleotide
  Sense strand starting at position 1201 of SEQ ID NO: 3506
acgccaauucuaugcaauc

SEQ ID NO: 272891 - RNA, 19 nt, Artificial Sequence
  Description of Artificial Sequence: Synthetic oligonucleotide
  Antisense strand to SEQ ID NO: 272890
gauugcauagaauuggcgu

SEQ ID NO: 272892 - RNA, 19 nt, Artificial Sequence
  Description of Artificial Sequence: Synthetic oligonucleotide
  Sense strand starting at position 1202 of SEQ ID NO: 3506
cgccaauucuaugcaauca

SEQ ID NO: 272893 - RNA, 19 nt, Artificial Sequence
  Description of Artificial Sequence: Synthetic oligonucleotide
  Antisense strand to SEQ ID NO: 272892
ugauugcauagaauuggcg

SEQ ID NO: 272894 - RNA, 19 nt, Artificial Sequence
  Description of Artificial Sequence: Synthetic oligonucleotide
  Sense strand starting at position 2585 of SEQ ID NO: 3506
aggagcauauuaucuguuu

SEQ ID NO: 272895 - RNA, 19 nt, Artificial Sequence
  Description of Artificial Sequence: Synthetic oligonucleotide
  Antisense strand to SEQ ID NO: 272894
aaacagauaauaugcuccu

SEQ ID NO: 272896 - RNA, 19 nt, Artificial Sequence
  Description of Artificial Sequence: Synthetic oligonucleotide
  Sense strand starting at position 2608 of SEQ ID NO: 3506
ugcugugacauggguagua

SEQ ID NO: 272897 - RNA, 19 nt, Artificial Sequence
  Description of Artificial Sequence: Synthetic oligonucleotide
  Antisense strand to SEQ ID NO: 272896
uacuacccaugucacagca

SEQ ID NO: 272898 - RNA, 19 nt, Artificial Sequence
  Description of Artificial Sequence: Synthetic oligonucleotide
  Sense strand starting at position 2610 of SEQ ID NO: 3506
cugugacauggguaguaga

SEQ ID NO: 272899 - RNA, 19 nt, Artificial Sequence
  Description of Artificial Sequence: Synthetic oligonucleotide
  Antisense strand to SEQ ID NO: 272898
ucuacuacccaugucacag

SEQ ID NO: 272900 - RNA, 19 nt, Artificial Sequence
  Description of Artificial Sequence: Synthetic oligonucleotide
  Sense strand starting at position 2623 of SEQ ID NO: 3506
aguagagcuaucuguguua

SEQ ID NO: 272901 - RNA, 19 nt, Artificial Sequence
  Description of Artificial Sequence: Synthetic oligonucleotide
  Antisense strand to SEQ ID NO: 272900
uaacacagauagcucuacu

SEQ ID NO: 272902 - RNA, 19 nt, Artificial Sequence
  Description of Artificial Sequence: Synthetic oligonucleotide
  Sense strand starting at position 2630 of SEQ ID NO: 3506
cuaucuguguuagcacaau

SEQ ID NO: 272903 - RNA, 19 nt, Artificial Sequence
  Description of Artificial Sequence: Synthetic oligonucleotide
  Antisense strand to SEQ ID NO: 272902
auugugcuaacacagauag

SEQ ID NO: 272904 - RNA, 19 nt, Artificial Sequence
  Description of Artificial Sequence: Synthetic oligonucleotide
  Sense strand starting at position 2815 of SEQ ID NO: 3506
gauguauucgaguaucagc

SEQ ID NO: 272905 - RNA, 19 nt, Artificial Sequence
  Description of Artificial Sequence: Synthetic oligonucleotide
  Antisense strand to SEQ ID NO: 272904
gcugauacucgaauacauc

SEQ ID NO: 272906 - RNA, 19 nt, Artificial Sequence
  Description of Artificial Sequence: Synthetic oligonucleotide
  Sense strand starting at position 2862 of SEQ ID NO: 3506
gaaaguguaacggguacau

SEQ ID NO: 272907 - RNA, 19 nt, Artificial Sequence
  Description of Artificial Sequence: Synthetic oligonucleotide
  Antisense strand to SEQ ID NO: 272906
auguacccguuacacuuuc

SEQ ID NO: 272908 - RNA, 19 nt, Artificial Sequence
  Description of Artificial Sequence: Synthetic oligonucleotide
  Sense strand starting at position 2905 of SEQ ID NO: 3506
agacaagucucaguuaaug

SEQ ID NO: 272909 - RNA, 19 nt, Artificial Sequence
  Description of Artificial Sequence: Synthetic oligonucleotide
  Antisense strand to SEQ ID NO: 272908
cauuaacugagacuugucu

SEQ ID NO: 272910 - RNA, 19 nt, Artificial Sequence
  Description of Artificial Sequence: Synthetic oligonucleotide
  Sense strand starting at position 2923 of SEQ ID NO: 3506
guauaaaguuuaucuugac

SEQ ID NO: 272911 - RNA, 19 nt, Artificial Sequence
  Description of Artificial Sequence: Synthetic oligonucleotide
  Antisense strand to SEQ ID NO: 272910
gucaagauaaacuuuauac

SEQ ID NO: 272912 - RNA, 19 nt, Artificial Sequence
  Description of Artificial Sequence: Synthetic oligonucleotide
  Sense strand starting at position 3113 of SEQ ID NO: 3506
ccagguuauaaguagguga

SEQ ID NO: 272913 - RNA, 19 nt, Artificial Sequence
  Description of Artificial Sequence: Synthetic oligonucleotide
  Antisense strand to SEQ ID NO: 272912
ucaccuacuuauaaccugg

SEQ ID NO: 272914 - RNA, 19 nt, Artificial Sequence
  Description of Artificial Sequence: Synthetic oligonucleotide
  Sense strand starting at position 3115 of SEQ ID NO: 3506
agguuauaaguaggugaga

SEQ ID NO: 272915 - RNA, 19 nt, Artificial Sequence
  Description of Artificial Sequence: Synthetic oligonucleotide
  Antisense strand to SEQ ID NO: 272914
ucucaccuacuuauaaccu

SEQ ID NO: 272916 - RNA, 19 nt, Artificial Sequence
  Description of Artificial Sequence: Synthetic oligonucleotide
  Sense strand starting at position 3117 of SEQ ID NO: 3506
guuauaaguaggugagaga

SEQ ID NO: 272917 - RNA, 19 nt, Artificial Sequence
  Description of Artificial Sequence: Synthetic oligonucleotide
  Antisense strand to SEQ ID NO: 272916
ucucucaccuacuuauaac

SEQ ID NO: 272918 - RNA, 19 nt, Artificial Sequence
  Description of Artificial Sequence: Synthetic oligonucleotide
  Sense strand starting at position 3238 of SEQ ID NO: 3506
cagguuugccuugagcagu

SEQ ID NO: 272919 - RNA, 19 nt, Artificial Sequence
  Description of Artificial Sequence: Synthetic oligonucleotide
  Antisense strand to SEQ ID NO: 272918
acugcucaaggcaaaccug

SEQ ID NO: 272920 - RNA, 19 nt, Artificial Sequence
  Description of Artificial Sequence: Synthetic oligonucleotide
  Sense strand starting at position 3370 of SEQ ID NO: 3506
uaccguaugggacauuauu

SEQ ID NO: 272921 - RNA, 19 nt, Artificial Sequence
  Description of Artificial Sequence: Synthetic oligonucleotide
  Antisense strand to SEQ ID NO: 272920
aauaaugucccauacggua

SEQ ID NO: 272922 - RNA, 19 nt, Artificial Sequence
  Description of Artificial Sequence: Synthetic oligonucleotide
  Sense strand starting at position 3395 of SEQ ID NO: 3506
gccagacagcuuugucaaa

SEQ ID NO: 272923 - RNA, 19 nt, Artificial Sequence
  Description of Artificial Sequence: Synthetic oligonucleotide
  Antisense strand to SEQ ID NO: 272922
uuugacaaagcugucuggc

SEQ ID NO: 272924 - RNA, 19 nt, Artificial Sequence
  Description of Artificial Sequence: Synthetic oligonucleotide
  Sense strand starting at position 3405 of SEQ ID NO: 3506
uuugucaaaccugguauca

SEQ ID NO: 272925 - RNA, 19 nt, Artificial Sequence
  Description of Artificial Sequence: Synthetic oligonucleotide
  Antisense strand to SEQ ID NO: 272924
ugauaccagguuugacaaa

SEQ ID NO: 272926 - RNA, 19 nt, Artificial Sequence
  Description of Artificial Sequence: Synthetic oligonucleotide
  Sense strand starting at position 3454 of SEQ ID NO: 3506
uuggcaaauuuccagauau

SEQ ID NO: 272927 - RNA, 19 nt, Artificial Sequence
  Description of Artificial Sequence: Synthetic oligonucleotide
  Antisense strand to SEQ ID NO: 272926
auaucuggaaauuugccaa

SEQ ID NO: 272928 - RNA, 19 nt, Artificial Sequence
  Description of Artificial Sequence: Synthetic oligonucleotide
  Sense strand starting at position 3464 of SEQ ID NO: 3506
uccagauaucuuugcugag

SEQ ID NO: 272929 - RNA, 19 nt, Artificial Sequence
  Description of Artificial Sequence: Synthetic oligonucleotide
  Antisense strand to SEQ ID NO: 272928
cucagcaaagauaucugga

SEQ ID NO: 272930 - RNA, 19 nt, Artificial Sequence
  Description of Artificial Sequence: Synthetic oligonucleotide
  Sense strand starting at position 3465 of SEQ ID NO: 3506
ccagauaucuuugcugagu

SEQ ID NO: 272931 - RNA, 19 nt, Artificial Sequence
  Description of Artificial Sequence: Synthetic oligonucleotide
  Antisense strand to SEQ ID NO: 272930
acucagcaaagauaucugg

SEQ ID NO: 272932 - RNA, 19 nt, Artificial Sequence
  Description of Artificial Sequence: Synthetic oligonucleotide
  Sense strand starting at position 3466 of SEQ ID NO: 3506
cagauaucuuugcugagug

SEQ ID NO: 272933 - RNA, 19 nt, Artificial Sequence
  Description of Artificial Sequence: Synthetic oligonucleotide
  Antisense strand to SEQ ID NO: 272932
cacucagcaaagauaucug

SEQ ID NO: 272934 - RNA, 19 nt, Artificial Sequence
  Description of Artificial Sequence: Synthetic oligonucleotide
  Sense strand starting at position 3511 of SEQ ID NO: 3506
guuucaaugggaugugcuu

SEQ ID NO: 272935 - RNA, 19 nt, Artificial Sequence
  Description of Artificial Sequence: Synthetic oligonucleotide
  Antisense strand to SEQ ID NO: 272934
aagcacaucccauugaaac

SEQ ID NO: 272936 - RNA, 19 nt, Artificial Sequence
  Description of Artificial Sequence: Synthetic oligonucleotide
  Sense strand starting at position 3517 of SEQ ID NO: 3506
augggaugugcuugggaau

SEQ ID NO: 272937 - RNA, 19 nt, Artificial Sequence
  Description of Artificial Sequence: Synthetic oligonucleotide
  Antisense strand to SEQ ID NO: 272936
auucccaagcacaucccau

SEQ ID NO: 272938 - RNA, 19 nt, Artificial Sequence
  Description of Artificial Sequence: Synthetic oligonucleotide
  Sense strand starting at position 3530 of SEQ ID NO: 3506
gggaauguugaugguguca

SEQ ID NO: 272939 - RNA, 19 nt, Artificial Sequence
  Description of Artificial Sequence: Synthetic oligonucleotide
  Antisense strand to SEQ ID NO: 272938
ugacaccaucaacauuccc

SEQ ID NO: 272940 - RNA, 19 nt, Artificial Sequence
  Description of Artificial Sequence: Synthetic oligonucleotide
  Sense strand starting at position 3543 of SEQ ID NO: 3506
gugucaccaccucauugau

SEQ ID NO: 272941 - RNA, 19 nt, Artificial Sequence
  Description of Artificial Sequence: Synthetic oligonucleotide
  Antisense strand to SEQ ID NO: 272940
aucaaugagguggugacac

SEQ ID NO: 272942 - RNA, 19 nt, Artificial Sequence
  Description of Artificial Sequence: Synthetic oligonucleotide
  Sense strand starting at position 3590 of SEQ ID NO: 3506
ccuucuucugcgggaccua

SEQ ID NO: 272943 - RNA, 19 nt, Artificial Sequence
  Description of Artificial Sequence: Synthetic oligonucleotide
  Antisense strand to SEQ ID NO: 272942
uaggucccgcagaagaagg

SEQ ID NO: 272944 - RNA, 19 nt, Artificial Sequence
  Description of Artificial Sequence: Synthetic oligonucleotide
  Sense strand starting at position 3602 of SEQ ID NO: 3506
ggaccuaaguuggaaagaa

SEQ ID NO: 272945 - RNA, 19 nt, Artificial Sequence
  Description of Artificial Sequence: Synthetic oligonucleotide
  Antisense strand to SEQ ID NO: 272944
uucuuuccaacuuaggucc

SEQ ID NO: 272946 - RNA, 19 nt, Artificial Sequence
  Description of Artificial Sequence: Synthetic oligonucleotide
  Sense strand starting at position 3731 of SEQ ID NO: 3506
cuagauuauucccugagcu

SEQ ID NO: 272947 - RNA, 19 nt, Artificial Sequence
  Description of Artificial Sequence: Synthetic oligonucleotide
  Antisense strand to SEQ ID NO: 272946
agcucagggaauaaucuag

SEQ ID NO: 272948 - RNA, 19 nt, Artificial Sequence
  Description of Artificial Sequence: Synthetic oligonucleotide
  Sense strand starting at position 3749 of SEQ ID NO: 3506
uccaaagucuugucacuuu

SEQ ID NO: 272949 - RNA, 19 nt, Artificial Sequence
  Description of Artificial Sequence: Synthetic oligonucleotide
  Antisense strand to SEQ ID NO: 272948
aaagugacaagacuuugga

SEQ ID NO: 272950 - RNA, 19 nt, Artificial Sequence
  Description of Artificial Sequence: Synthetic oligonucleotide
  Sense strand starting at position 3839 of SEQ ID NO: 3506
agaugcucagcugaacauu

SEQ ID NO: 272951 - RNA, 19 nt, Artificial Sequence
  Description of Artificial Sequence: Synthetic oligonucleotide
  Antisense strand to SEQ ID NO: 272950
aauguucagcugagcaucu

SEQ ID NO: 272952 - RNA, 19 nt, Artificial Sequence
  Description of Artificial Sequence: Synthetic oligonucleotide
  Sense strand starting at position 3842 of SEQ ID NO: 3506
ugcucagcugaacauuaau

SEQ ID NO: 272953 - RNA, 19 nt, Artificial Sequence
  Description of Artificial Sequence: Synthetic oligonucleotide
  Antisense strand to SEQ ID NO: 272952
auuaauguucagcugagca

SEQ ID NO: 272954 - RNA, 19 nt, Artificial Sequence
  Description of Artificial Sequence: Synthetic oligonucleotide
  Sense strand starting at position 3854 of SEQ ID NO: 3506
cauuaauuugcgugaaagu

SEQ ID NO: 272955 - RNA, 19 nt, Artificial Sequence
  Description of Artificial Sequence: Synthetic oligonucleotide
  Antisense strand to SEQ ID NO: 272954
acuuucacgcaaauuaaug

SEQ ID NO: 272956 - RNA, 19 nt, Artificial Sequence
  Description of Artificial Sequence: Synthetic oligonucleotide
  Sense strand starting at position 190 of SEQ ID NO: 3507
gaaugcuauuagguuuaga

SEQ ID NO: 272957 - RNA, 19 nt, Artificial Sequence
  Description of Artificial Sequence: Synthetic oligonucleotide
  Antisense strand to SEQ ID NO: 272956
ucuaaaccuaauagcauuc

SEQ ID NO: 272958 - RNA, 19 nt, Artificial Sequence
  Description of Artificial Sequence: Synthetic oligonucleotide
  Sense strand starting at position 193 of SEQ ID NO: 3507
ugcuauuagguuuagaauu

SEQ ID NO: 272959 - RNA, 19 nt, Artificial Sequence
  Description of Artificial Sequence: Synthetic oligonucleotide
  Antisense strand to SEQ ID NO: 272958
aauucuaaaccuaauagca

SEQ ID NO: 272960 - RNA, 19 nt, Artificial Sequence
  Description of Artificial Sequence: Synthetic oligonucleotide
  Sense strand starting at position 232 of SEQ ID NO: 3507
guaugcauuucuccaagua

SEQ ID NO: 272961 - RNA, 19 nt, Artificial Sequence
  Description of Artificial Sequence: Synthetic oligonucleotide
  Antisense strand to SEQ ID NO: 272960
uacuuggagaaaugcauac

SEQ ID NO: 272962 - RNA, 19 nt, Artificial Sequence
  Description of Artificial Sequence: Synthetic oligonucleotide
  Sense strand starting at position 663 of SEQ ID NO: 3507
agacuacauccuugcauga

SEQ ID NO: 272963 - RNA, 19 nt, Artificial Sequence
  Description of Artificial Sequence: Synthetic oligonucleotide
  Antisense strand to SEQ ID NO: 272962
ucaugcaaggauguagucu

SEQ ID NO: 272964 - RNA, 19 nt, Artificial Sequence
  Description of Artificial Sequence: Synthetic oligonucleotide
  Sense strand starting at position 730 of SEQ ID NO: 3507
ugucauagagcauaaacau

SEQ ID NO: 272965 - RNA, 19 nt, Artificial Sequence
  Description of Artificial Sequence: Synthetic oligonucleotide
  Antisense strand to SEQ ID NO: 272964
auguuuaugcucuaugaca

SEQ ID NO: 272966 - RNA, 19 nt, Artificial Sequence
  Description of Artificial Sequence: Synthetic oligonucleotide
  Sense strand starting at position 785 of SEQ ID NO: 3507
uccagaaaguuuguaauaa

SEQ ID NO: 272967 - RNA, 19 nt, Artificial Sequence
  Description of Artificial Sequence: Synthetic oligonucleotide
  Antisense strand to SEQ ID NO: 272966
uuauuacaaacuuucugga

SEQ ID NO: 272968 - RNA, 19 nt, Artificial Sequence
  Description of Artificial Sequence: Synthetic oligonucleotide
  Sense strand starting at position 932 of SEQ ID NO: 3507
uguuucuugccugucugua

SEQ ID NO: 272969 - RNA, 19 nt, Artificial Sequence
  Description of Artificial Sequence: Synthetic oligonucleotide
  Antisense strand to SEQ ID NO: 272968
uacagacaggcaagaaaca

SEQ ID NO: 272970 - RNA, 19 nt, Artificial Sequence
  Description of Artificial Sequence: Synthetic oligonucleotide
  Sense strand starting at position 971 of SEQ ID NO: 3507
aguccauaccauuagucua

SEQ ID NO: 272971 - RNA, 19 nt, Artificial Sequence
  Description of Artificial Sequence: Synthetic oligonucleotide
  Antisense strand to SEQ ID NO: 272970
uagacuaaugguauggacu

SEQ ID NO: 272972 - RNA, 19 nt, Artificial Sequence
  Description of Artificial Sequence: Synthetic oligonucleotide
  Sense strand starting at position 1029 of SEQ ID NO: 3507
agagcucuuuauguauaag

SEQ ID NO: 272973 - RNA, 19 nt, Artificial Sequence
  Description of Artificial Sequence: Synthetic oligonucleotide
  Antisense strand to SEQ ID NO: 272972
cuuauacauaaagagcucu

SEQ ID NO: 272974 - RNA, 19 nt, Artificial Sequence
  Description of Artificial Sequence: Synthetic oligonucleotide
  Sense strand starting at position 1303 of SEQ ID NO: 3507
gguuuauucccucacuuau

SEQ ID NO: 272975 - RNA, 19 nt, Artificial Sequence
  Description of Artificial Sequence: Synthetic oligonucleotide
  Antisense strand to SEQ ID NO: 272974
auaagugagggaauaaacc

SEQ ID NO: 272976 - RNA, 19 nt, Artificial Sequence
  Description of Artificial Sequence: Synthetic oligonucleotide
  Sense strand starting at position 1314 of SEQ ID NO: 3507
ucacuuauguguuuacaaa

SEQ ID NO: 272977 - RNA, 19 nt, Artificial Sequence
  Description of Artificial Sequence: Synthetic oligonucleotide
  Antisense strand to SEQ ID NO: 272976
uuuguaaacacauaaguga

SEQ ID NO: 272978 - RNA, 19 nt, Artificial Sequence
  Description of Artificial Sequence: Synthetic oligonucleotide
  Sense strand starting at position 1371 of SEQ ID NO: 3507
auuuccuugcugugguuaa

SEQ ID NO: 272979 - RNA, 19 nt, Artificial Sequence
  Description of Artificial Sequence: Synthetic oligonucleotide
  Antisense strand to SEQ ID NO: 272978
uuaaccacagcaaggaaau

SEQ ID NO: 272980 - RNA, 19 nt, Artificial Sequence
  Description of Artificial Sequence: Synthetic oligonucleotide
  Sense strand starting at position 1375 of SEQ ID NO: 3507
ccuugcugugguuaagaga

SEQ ID NO: 272981 - RNA, 19 nt, Artificial Sequence
  Description of Artificial Sequence: Synthetic oligonucleotide
  Antisense strand to SEQ ID NO: 272980
ucucuuaaccacagcaagg

SEQ ID NO: 272982 - RNA, 19 nt, Artificial Sequence
  Description of Artificial Sequence: Synthetic oligonucleotide
  Sense strand starting at position 1382 of SEQ ID NO: 3507
gugguuaagagaugugaga

SEQ ID NO: 272983 - RNA, 19 nt, Artificial Sequence
  Description of Artificial Sequence: Synthetic oligonucleotide
  Antisense strand to SEQ ID NO: 272982
ucucacaucucuuaaccac

SEQ ID NO: 272984 - RNA, 19 nt, Artificial Sequence
  Description of Artificial Sequence: Synthetic oligonucleotide
  Sense strand starting at position 1662 of SEQ ID NO: 3507
cguaauuucgcccacaccu

SEQ ID NO: 272985 - RNA, 19 nt, Artificial Sequence
  Description of Artificial Sequence: Synthetic oligonucleotide
  Antisense strand to SEQ ID NO: 272984
aggugugggcgaaauuacg

SEQ ID NO: 272986 - RNA, 19 nt, Artificial Sequence
  Description of Artificial Sequence: Synthetic oligonucleotide
  Sense strand starting at position 2164 of SEQ ID NO: 3507
gugagacugcucguucguu

SEQ ID NO: 272987 - RNA, 19 nt, Artificial Sequence
  Description of Artificial Sequence: Synthetic oligonucleotide
  Antisense strand to SEQ ID NO: 272986
aacgaacgagcagucucac

SEQ ID NO: 272988 - RNA, 19 nt, Artificial Sequence
  Description of Artificial Sequence: Synthetic oligonucleotide
  Sense strand starting at position 2170 of SEQ ID NO: 3507
cugcucguucguuucuuua

SEQ ID NO: 272989 - RNA, 19 nt, Artificial Sequence
  Description of Artificial Sequence: Synthetic oligonucleotide
  Antisense strand to SEQ ID NO: 272988
uaaagaaacgaacgagcag

SEQ ID NO: 272990 - RNA, 19 nt, Artificial Sequence
  Description of Artificial Sequence: Synthetic oligonucleotide
  Sense strand starting at position 2295 of SEQ ID NO: 3507
ugaagcucucacgauuaau

SEQ ID NO: 272991 - RNA, 19 nt, Artificial Sequence
  Description of Artificial Sequence: Synthetic oligonucleotide
  Antisense strand to SEQ ID NO: 272990
auuaaucgugagagcuuca

SEQ ID NO: 272992 - RNA, 19 nt, Artificial Sequence
  Description of Artificial Sequence: Synthetic oligonucleotide
  Sense strand starting at position 2298 of SEQ ID NO: 3507
agcucucacgauuaauuaa

SEQ ID NO: 272993 - RNA, 19 nt, Artificial Sequence
  Description of Artificial Sequence: Synthetic oligonucleotide
  Antisense strand to SEQ ID NO: 272992
uuaauuaaucgugagagcu

SEQ ID NO: 272994 - RNA, 19 nt, Artificial Sequence
  Description of Artificial Sequence: Synthetic oligonucleotide
  Sense strand starting at position 2649 of SEQ ID NO: 3507
agaucaucuuuaccagguu

SEQ ID NO: 272995 - RNA, 19 nt, Artificial Sequence
  Description of Artificial Sequence: Synthetic oligonucleotide
  Antisense strand to SEQ ID NO: 272994
aaccugguaaagaugaucu

SEQ ID NO: 272996 - RNA, 19 nt, Artificial Sequence
  Description of Artificial Sequence: Synthetic oligonucleotide
  Sense strand starting at position 2652 of SEQ ID NO: 3507
ucaucuuuaccagguuuga

SEQ ID NO: 272997 - RNA, 19 nt, Artificial Sequence
  Description of Artificial Sequence: Synthetic oligonucleotide
  Antisense strand to SEQ ID NO: 272996
ucaaaccugguaaagauga

SEQ ID NO: 272998 - RNA, 19 nt, Artificial Sequence
  Description of Artificial Sequence: Synthetic oligonucleotide
  Sense strand starting at position 2663 of SEQ ID NO: 3507
agguuugagaccugaucca

SEQ ID NO: 272999 - RNA, 19 nt, Artificial Sequence
  Description of Artificial Sequence: Synthetic oligonucleotide
  Antisense strand to SEQ ID NO: 272998
uggaucaggucucaaaccu

SEQ ID NO: 273000 - RNA, 19 nt, Artificial Sequence
  Description of Artificial Sequence: Synthetic oligonucleotide
  Sense strand starting at position 2714 of SEQ ID NO: 3507
ggaucuuuccuugaagggu

SEQ ID NO: 273001 - RNA, 19 nt, Artificial Sequence
  Description of Artificial Sequence: Synthetic oligonucleotide
  Antisense strand to SEQ ID NO: 273000
acccuucaaggaaagaucc

SEQ ID NO: 273002 - RNA, 19 nt, Artificial Sequence
  Description of Artificial Sequence: Synthetic oligonucleotide
  Sense strand starting at position 2826 of SEQ ID NO: 3507
aaauuucucgucuguguua

SEQ ID NO: 273003 - RNA, 19 nt, Artificial Sequence
  Description of Artificial Sequence: Synthetic oligonucleotide
  Antisense strand to SEQ ID NO: 273002
uaacacagacgagaaauuu

SEQ ID NO: 273004 - RNA, 19 nt, Artificial Sequence
  Description of Artificial Sequence: Synthetic oligonucleotide
  Sense strand starting at position 2827 of SEQ ID NO: 3507
aauuucucgucuguguuau

SEQ ID NO: 273005 - RNA, 19 nt, Artificial Sequence
  Description of Artificial Sequence: Synthetic oligonucleotide
  Antisense strand to SEQ ID NO: 273004
auaacacagacgagaaauu

SEQ ID NO: 273006 - RNA, 19 nt, Artificial Sequence
  Description of Artificial Sequence: Synthetic oligonucleotide
  Sense strand starting at position 2959 of SEQ ID NO: 3507
cccuaagaacuuggucgaa

SEQ ID NO: 273007 - RNA, 19 nt, Artificial Sequence
  Description of Artificial Sequence: Synthetic oligonucleotide
  Antisense strand to SEQ ID NO: 273006
uucgaccaaguucuuaggg

SEQ ID NO: 273008 - RNA, 19 nt, Artificial Sequence
  Description of Artificial Sequence: Synthetic oligonucleotide
  Sense strand starting at position 2961 of SEQ ID NO: 3507
cuaagaacuuggucgaaug

SEQ ID NO: 273009 - RNA, 19 nt, Artificial Sequence
  Description of Artificial Sequence: Synthetic oligonucleotide
  Antisense strand to SEQ ID NO: 273008
cauucgaccaaguucuuag

SEQ ID NO: 273010 - RNA, 19 nt, Artificial Sequence
  Description of Artificial Sequence: Synthetic oligonucleotide
  Sense strand starting at position 2962 of SEQ ID NO: 3507
uaagaacuuggucgaaugu

SEQ ID NO: 273011 - RNA, 19 nt, Artificial Sequence
  Description of Artificial Sequence: Synthetic oligonucleotide
  Antisense strand to SEQ ID NO: 273010
acauucgaccaaguucuua

SEQ ID NO: 273012 - RNA, 19 nt, Artificial Sequence
  Description of Artificial Sequence: Synthetic oligonucleotide
  Sense strand starting at position 3027 of SEQ ID NO: 3507
ggcuguugucagaguguug

SEQ ID NO: 273013 - RNA, 19 nt, Artificial Sequence
  Description of Artificial Sequence: Synthetic oligonucleotide
  Antisense strand to SEQ ID NO: 273012
caacacucugacaacagcc

SEQ ID NO: 273014 - RNA, 19 nt, Artificial Sequence
  Description of Artificial Sequence: Synthetic oligonucleotide
  Sense strand starting at position 3139 of SEQ ID NO: 3507
uggaaaugggucugguuga

SEQ ID NO: 273015 - RNA, 19 nt, Artificial Sequence
  Description of Artificial Sequence: Synthetic oligonucleotide
  Antisense strand to SEQ ID NO: 273014
ucaaccagacccauuucca

SEQ ID NO: 273016 - RNA, 19 nt, Artificial Sequence
  Description of Artificial Sequence: Synthetic oligonucleotide
  Sense strand starting at position 3296 of SEQ ID NO: 3507
aucuuuguugcugacagau

SEQ ID NO: 273017 - RNA, 19 nt, Artificial Sequence
  Description of Artificial Sequence: Synthetic oligonucleotide
  Antisense strand to SEQ ID NO: 273016
aucugucagcaacaaagau

SEQ ID NO: 273018 - RNA, 19 nt, Artificial Sequence
  Description of Artificial Sequence: Synthetic oligonucleotide
  Sense strand starting at position 3338 of SEQ ID NO: 3507
aggaauaaaucuccugguu

SEQ ID NO: 273019 - RNA, 19 nt, Artificial Sequence
  Description of Artificial Sequence: Synthetic oligonucleotide
  Antisense strand to SEQ ID NO: 273018
aaccaggagauuuauuccu

SEQ ID NO: 273020 - RNA, 19 nt, Artificial Sequence
  Description of Artificial Sequence: Synthetic oligonucleotide
  Sense strand starting at position 3365 of SEQ ID NO: 3507
cuagauaguuuauccagga

SEQ ID NO: 273021 - RNA, 19 nt, Artificial Sequence
  Description of Artificial Sequence: Synthetic oligonucleotide
  Antisense strand to SEQ ID NO: 273020
uccuggauaaacuaucuag

SEQ ID NO: 273022 - RNA, 19 nt, Artificial Sequence
  Description of Artificial Sequence: Synthetic oligonucleotide
  Sense strand starting at position 3366 of SEQ ID NO: 3507
uagauaguuuauccaggaa

SEQ ID NO: 273023 - RNA, 19 nt, Artificial Sequence
  Description of Artificial Sequence: Synthetic oligonucleotide
  Antisense strand to SEQ ID NO: 273022
uuccuggauaaacuaucua

SEQ ID NO: 273024 - RNA, 19 nt, Artificial Sequence
  Description of Artificial Sequence: Synthetic oligonucleotide
  Sense strand starting at position 3369 of SEQ ID NO: 3507
auaguuuauccaggaauca

SEQ ID NO: 273025 - RNA, 19 nt, Artificial Sequence
  Description of Artificial Sequence: Synthetic oligonucleotide
  Antisense strand to SEQ ID NO: 273024
ugauuccuggauaaacuau

SEQ ID NO: 273026 - RNA, 19 nt, Artificial Sequence
  Description of Artificial Sequence: Synthetic oligonucleotide
  Sense strand starting at position 3404 of SEQ ID NO: 3507
aagucaauucuguaguuag

SEQ ID NO: 273027 - RNA, 19 nt, Artificial Sequence
  Description of Artificial Sequence: Synthetic oligonucleotide
  Antisense strand to SEQ ID NO: 273026
cuaacuacagaauugacuu

SEQ ID NO: 273028 - RNA, 19 nt, Artificial Sequence
  Description of Artificial Sequence: Synthetic oligonucleotide
  Sense strand starting at position 3493 of SEQ ID NO: 3507
aguguuguugcagaaacau

SEQ ID NO: 273029 - RNA, 19 nt, Artificial Sequence
  Description of Artificial Sequence: Synthetic oligonucleotide
  Antisense strand to SEQ ID NO: 273028
auguuucugcaacaacacu

SEQ ID NO: 273030 - RNA, 19 nt, Artificial Sequence
  Description of Artificial Sequence: Synthetic oligonucleotide
  Sense strand starting at position 3525 of SEQ ID NO: 3507
guuugaucccaaugacaag

SEQ ID NO: 273031 - RNA, 19 nt, Artificial Sequence
  Description of Artificial Sequence: Synthetic oligonucleotide
  Antisense strand to SEQ ID NO: 273030
cuugucauugggaucaaac

SEQ ID NO: 273032 - RNA, 19 nt, Artificial Sequence
  Description of Artificial Sequence: Synthetic oligonucleotide
  Sense strand starting at position 3684 of SEQ ID NO: 3507
ugauuuaugcccuggucug

SEQ ID NO: 273033 - RNA, 19 nt, Artificial Sequence
  Description of Artificial Sequence: Synthetic oligonucleotide
  Antisense strand to SEQ ID NO: 273032
cagaccagggcauaaauca

SEQ ID NO: 273034 - RNA, 19 nt, Artificial Sequence
  Description of Artificial Sequence: Synthetic oligonucleotide
  Sense strand starting at position 3802 of SEQ ID NO: 3507
gaugucuuccagugaaaca

SEQ ID NO: 273035 - RNA, 19 nt, Artificial Sequence
  Description of Artificial Sequence: Synthetic oligonucleotide
  Antisense strand to SEQ ID NO: 273034
uguuucacuggaagacauc

SEQ ID NO: 273036 - RNA, 19 nt, Artificial Sequence
  Description of Artificial Sequence: Synthetic oligonucleotide
  Sense strand starting at position 66 of SEQ ID NO: 3508
uaaauaagguccucagagu

SEQ ID NO: 273037 - RNA, 19 nt, Artificial Sequence
  Description of Artificial Sequence: Synthetic oligonucleotide
  Antisense strand to SEQ ID NO: 273036
acucugaggaccuuauuua

SEQ ID NO: 273038 - RNA, 19 nt, Artificial Sequence
  Description of Artificial Sequence: Synthetic oligonucleotide
  Sense strand starting at position 325 of SEQ ID NO: 3508
uauccuuaaguguaagagu

SEQ ID NO: 273039 - RNA, 19 nt, Artificial Sequence
  Description of Artificial Sequence: Synthetic oligonucleotide
  Antisense strand to SEQ ID NO: 273038
acucuuacacuuaaggaua

SEQ ID NO: 273040 - RNA, 19 nt, Artificial Sequence
  Description of Artificial Sequence: Synthetic oligonucleotide
  Sense strand starting at position 436 of SEQ ID NO: 3508
aaguaaagagccugugaac

SEQ ID NO: 273041 - RNA, 19 nt, Artificial Sequence
  Description of Artificial Sequence: Synthetic oligonucleotide
  Antisense strand to SEQ ID NO: 273040
guucacaggcucuuuacuu

SEQ ID NO: 273042 - RNA, 19 nt, Artificial Sequence
  Description of Artificial Sequence: Synthetic oligonucleotide
  Sense strand starting at position 507 of SEQ ID NO: 3508
gcaccuuaugaauaaaguu

SEQ ID NO: 273043 - RNA, 19 nt, Artificial Sequence
  Description of Artificial Sequence: Synthetic oligonucleotide
  Antisense strand to SEQ ID NO: 273042
aacuuuauucauaaggugc

SEQ ID NO: 273044 - RNA, 19 nt, Artificial Sequence
  Description of Artificial Sequence: Synthetic oligonucleotide
  Sense strand starting at position 540 of SEQ ID NO: 3508
uugauauacuguuugauga

SEQ ID NO: 273045 - RNA, 19 nt, Artificial Sequence
  Description of Artificial Sequence: Synthetic oligonucleotide
  Antisense strand to SEQ ID NO: 273044
ucaucaaacaguauaucaa

SEQ ID NO: 273046 - RNA, 19 nt, Artificial Sequence
  Description of Artificial Sequence: Synthetic oligonucleotide
  Sense strand starting at position 541 of SEQ ID NO: 3508
ugauauacuguuugaugac

SEQ ID NO: 273047 - RNA, 19 nt, Artificial Sequence
  Description of Artificial Sequence: Synthetic oligonucleotide
  Antisense strand to SEQ ID NO: 273046
gucaucaaacaguauauca

SEQ ID NO: 273048 - RNA, 19 nt, Artificial Sequence
  Description of Artificial Sequence: Synthetic oligonucleotide
  Sense strand starting at position 548 of SEQ ID NO: 3508
cuguuugaugacuaaacga

SEQ ID NO: 273049 - RNA, 19 nt, Artificial Sequence
  Description of Artificial Sequence: Synthetic oligonucleotide
  Antisense strand to SEQ ID NO: 273048
ucguuuagucaucaaacag

SEQ ID NO: 273050 - RNA, 19 nt, Artificial Sequence
  Description of Artificial Sequence: Synthetic oligonucleotide
  Sense strand starting at position 597 of SEQ ID NO: 3508
ggcacauuuccuugugugu

SEQ ID NO: 273051 - RNA, 19 nt, Artificial Sequence
  Description of Artificial Sequence: Synthetic oligonucleotide
  Antisense strand to SEQ ID NO: 273050
acacacaaggaaaugugcc

SEQ ID NO: 273052 - RNA, 19 nt, Artificial Sequence
  Description of Artificial Sequence: Synthetic oligonucleotide
  Sense strand starting at position 772 of SEQ ID NO: 3508
ucacuaagucuuuagaggu

SEQ ID NO: 273053 - RNA, 19 nt, Artificial Sequence
  Description of Artificial Sequence: Synthetic oligonucleotide
  Antisense strand to SEQ ID NO: 273052
accucuaaagacuuaguga

SEQ ID NO: 273054 - RNA, 19 nt, Artificial Sequence
  Description of Artificial Sequence: Synthetic oligonucleotide
  Sense strand starting at position 816 of SEQ ID NO: 3508
agaauuaugguuugaacua

SEQ ID NO: 273055 - RNA, 19 nt, Artificial Sequence
  Description of Artificial Sequence: Synthetic oligonucleotide
  Antisense strand to SEQ ID NO: 273054
uaguucaaaccauaauucu

SEQ ID NO: 273056 - RNA, 19 nt, Artificial Sequence
  Description of Artificial Sequence: Synthetic oligonucleotide
  Sense strand starting at position 823 of SEQ ID NO: 3508
ugguuugaacuacguaaca

SEQ ID NO: 273057 - RNA, 19 nt, Artificial Sequence
  Description of Artificial Sequence: Synthetic oligonucleotide
  Antisense strand to SEQ ID NO: 273056
uguuacguaguucaaacca

SEQ ID NO: 273058 - RNA, 19 nt, Artificial Sequence
  Description of Artificial Sequence: Synthetic oligonucleotide
  Sense strand starting at position 835 of SEQ ID NO: 3508
cguaacaauuaccuagaca

SEQ ID NO: 273059 - RNA, 19 nt, Artificial Sequence
  Description of Artificial Sequence: Synthetic oligonucleotide
  Antisense strand to SEQ ID NO: 273058
ugucuagguaauuguuacg

SEQ ID NO: 273060 - RNA, 19 nt, Artificial Sequence
  Description of Artificial Sequence: Synthetic oligonucleotide
  Sense strand starting at position 865 of SEQ ID NO: 3508
ucaguuaaccuguaaguaa

SEQ ID NO: 273061 - RNA, 19 nt, Artificial Sequence
  Description of Artificial Sequence: Synthetic oligonucleotide
  Antisense strand to SEQ ID NO: 273060
uuacuuacagguuaacuga

SEQ ID NO: 273062 - RNA, 19 nt, Artificial Sequence
  Description of Artificial Sequence: Synthetic oligonucleotide
  Sense strand starting at position 921 of SEQ ID NO: 3508
acggguucuuccucauaaa

SEQ ID NO: 273063 - RNA, 19 nt, Artificial Sequence
  Description of Artificial Sequence: Synthetic oligonucleotide
  Antisense strand to SEQ ID NO: 273062
uuuaugaggaagaacccgu

SEQ ID NO: 273064 - RNA, 19 nt, Artificial Sequence
  Description of Artificial Sequence: Synthetic oligonucleotide
  Sense strand starting at position 922 of SEQ ID NO: 3508
cggguucuuccucauaaac

SEQ ID NO: 273065 - RNA, 19 nt, Artificial Sequence
  Description of Artificial Sequence: Synthetic oligonucleotide
  Antisense strand to SEQ ID NO: 273064
guuuaugaggaagaacccg

SEQ ID NO: 273066 - RNA, 19 nt, Artificial Sequence
  Description of Artificial Sequence: Synthetic oligonucleotide
  Sense strand starting at position 972 of SEQ ID NO: 3508
gaagaucaagcguauccau

SEQ ID NO: 273067 - RNA, 19 nt, Artificial Sequence
  Description of Artificial Sequence: Synthetic oligonucleotide
  Antisense strand to SEQ ID NO: 273066
auggauacgcuugaucuuc

SEQ ID NO: 273068 - RNA, 19 nt, Artificial Sequence
  Description of Artificial Sequence: Synthetic oligonucleotide
  Sense strand starting at position 1030 of SEQ ID NO: 3508
gggaaacgggcguauuaac

SEQ ID NO: 273069 - RNA, 19 nt, Artificial Sequence
  Description of Artificial Sequence: Synthetic oligonucleotide
  Antisense strand to SEQ ID NO: 273068
guuaauacgcccguuuccc

SEQ ID NO: 273070 - RNA, 19 nt, Artificial Sequence
  Description of Artificial Sequence: Synthetic oligonucleotide
  Sense strand starting at position 1125 of SEQ ID NO: 3508
gugaaagacgcgcagagau

SEQ ID NO: 273071 - RNA, 19 nt, Artificial Sequence
  Description of Artificial Sequence: Synthetic oligonucleotide
  Antisense strand to SEQ ID NO: 273070
aucucugcgcgucuuucac

SEQ ID NO: 273072 - RNA, 19 nt, Artificial Sequence
  Description of Artificial Sequence: Synthetic oligonucleotide
  Sense strand starting at position 2068 of SEQ ID NO: 3508
aguucuccgguugaagaaa

SEQ ID NO: 273073 - RNA, 19 nt, Artificial Sequence
  Description of Artificial Sequence: Synthetic oligonucleotide
  Antisense strand to SEQ ID NO: 273072
uuucuucaaccggagaacu

SEQ ID NO: 273074 - RNA, 19 nt, Artificial Sequence
  Description of Artificial Sequence: Synthetic oligonucleotide
  Sense strand starting at position 2321 of SEQ ID NO: 3508
agucauaaguacccaguga

SEQ ID NO: 273075 - RNA, 19 nt, Artificial Sequence
  Description of Artificial Sequence: Synthetic oligonucleotide
  Antisense strand to SEQ ID NO: 273074
ucacuggguacuuaugacu

SEQ ID NO: 273076 - RNA, 19 nt, Artificial Sequence
  Description of Artificial Sequence: Synthetic oligonucleotide
  Sense strand starting at position 2368 of SEQ ID NO: 3508
uucccugcugcguaauuua

SEQ ID NO: 273077 - RNA, 19 nt, Artificial Sequence
  Description of Artificial Sequence: Synthetic oligonucleotide
  Antisense strand to SEQ ID NO: 273076
uaaauuacgcagcagggaa

SEQ ID NO: 273078 - RNA, 19 nt, Artificial Sequence
  Description of Artificial Sequence: Synthetic oligonucleotide
  Sense strand starting at position 2375 of SEQ ID NO: 3508
cugcguaauuuaucuucca

SEQ ID NO: 273079 - RNA, 19 nt, Artificial Sequence
  Description of Artificial Sequence: Synthetic oligonucleotide
  Antisense strand to SEQ ID NO: 273078
uggaagauaaauuacgcag

SEQ ID NO: 273080 - RNA, 19 nt, Artificial Sequence
  Description of Artificial Sequence: Synthetic oligonucleotide
  Sense strand starting at position 2470 of SEQ ID NO: 3508
accuaagacuugucgaaau

SEQ ID NO: 273081 - RNA, 19 nt, Artificial Sequence
  Description of Artificial Sequence: Synthetic oligonucleotide
  Antisense strand to SEQ ID NO: 273080
auuucgacaagucuuaggu

SEQ ID NO: 273082 - RNA, 19 nt, Artificial Sequence
  Description of Artificial Sequence: Synthetic oligonucleotide
  Sense strand starting at position 2472 of SEQ ID NO: 3508
cuaagacuugucgaaaugu

SEQ ID NO: 273083 - RNA, 19 nt, Artificial Sequence
  Description of Artificial Sequence: Synthetic oligonucleotide
  Antisense strand to SEQ ID NO: 273082
acauuucgacaagucuuag

SEQ ID NO: 273084 - RNA, 19 nt, Artificial Sequence
  Description of Artificial Sequence: Synthetic oligonucleotide
  Sense strand starting at position 2491 of SEQ ID NO: 3508
aguuguuuccaguaauuga

SEQ ID NO: 273085 - RNA, 19 nt, Artificial Sequence
  Description of Artificial Sequence: Synthetic oligonucleotide
  Antisense strand to SEQ ID NO: 273084
ucaauuacuggaaacaacu

SEQ ID NO: 273086 - RNA, 19 nt, Artificial Sequence
  Description of Artificial Sequence: Synthetic oligonucleotide
  Sense strand starting at position 2545 of SEQ ID NO: 3508
aucaaagucccguaauuaa

SEQ ID NO: 273087 - RNA, 19 nt, Artificial Sequence
  Description of Artificial Sequence: Synthetic oligonucleotide
  Antisense strand to SEQ ID NO: 273086
uuaauuacgggacuuugau

SEQ ID NO: 273088 - RNA, 19 nt, Artificial Sequence
  Description of Artificial Sequence: Synthetic oligonucleotide
  Sense strand starting at position 2758 of SEQ ID NO: 3508
ccaacuuuaguuugguaau

SEQ ID NO: 273089 - RNA, 19 nt, Artificial Sequence
  Description of Artificial Sequence: Synthetic oligonucleotide
  Antisense strand to SEQ ID NO: 273088
auuaccaaacuaaaguugg

SEQ ID NO: 273090 - RNA, 19 nt, Artificial Sequence
  Description of Artificial Sequence: Synthetic oligonucleotide
  Sense strand starting at position 3189 of SEQ ID NO: 3508
gugcuuacuaugcaaagga

SEQ ID NO: 273091 - RNA, 19 nt, Artificial Sequence
  Description of Artificial Sequence: Synthetic oligonucleotide
  Antisense strand to SEQ ID NO: 273090
uccuuugcauaguaagcac

SEQ ID NO: 273092 - RNA, 19 nt, Artificial Sequence
  Description of Artificial Sequence: Synthetic oligonucleotide
  Sense strand starting at position 3221 of SEQ ID NO: 3508
uagacuuaauuugagaagu

SEQ ID NO: 273093 - RNA, 19 nt, Artificial Sequence
  Description of Artificial Sequence: Synthetic oligonucleotide
  Antisense strand to SEQ ID NO: 273092
acuucucaaauuaagucua

SEQ ID NO: 273094 - RNA, 19 nt, Artificial Sequence
  Description of Artificial Sequence: Synthetic oligonucleotide
  Sense strand starting at position 3308 of SEQ ID NO: 3508
ugagauaacuaggaauuaa

SEQ ID NO: 273095 - RNA, 19 nt, Artificial Sequence
  Description of Artificial Sequence: Synthetic oligonucleotide
  Antisense strand to SEQ ID NO: 273094
uuaauuccuaguuaucuca

SEQ ID NO: 273096 - RNA, 19 nt, Artificial Sequence
  Description of Artificial Sequence: Synthetic oligonucleotide
  Sense strand starting at position 3320 of SEQ ID NO: 3508
gaauuaacauguuugugua

SEQ ID NO: 273097 - RNA, 19 nt, Artificial Sequence
  Description of Artificial Sequence: Synthetic oligonucleotide
  Antisense strand to SEQ ID NO: 273096
uacacaaacauguuaauuc

SEQ ID NO: 273098 - RNA, 19 nt, Artificial Sequence
  Description of Artificial Sequence: Synthetic oligonucleotide
  Sense strand starting at position 3523 of SEQ ID NO: 3508
gagacagcuuagguaauga

SEQ ID NO: 273099 - RNA, 19 nt, Artificial Sequence
  Description of Artificial Sequence: Synthetic oligonucleotide
  Antisense strand to SEQ ID NO: 273098
ucauuaccuaagcugucuc

SEQ ID NO: 273100 - RNA, 19 nt, Artificial Sequence
  Description of Artificial Sequence: Synthetic oligonucleotide
  Sense strand starting at position 3603 of SEQ ID NO: 3508
caaggauuguaagcagaug

SEQ ID NO: 273101 - RNA, 19 nt, Artificial Sequence
  Description of Artificial Sequence: Synthetic oligonucleotide
  Antisense strand to SEQ ID NO: 273100
caucugcuuacaauccuug

SEQ ID NO: 273102 - RNA, 19 nt, Artificial Sequence
  Description of Artificial Sequence: Synthetic oligonucleotide
  Sense strand starting at position 3608 of SEQ ID NO: 3508
auuguaagcagauggaauu

SEQ ID NO: 273103 - RNA, 19 nt, Artificial Sequence
  Description of Artificial Sequence: Synthetic oligonucleotide
  Antisense strand to SEQ ID NO: 273102
aauuccaucugcuuacaau

SEQ ID NO: 273104 - RNA, 19 nt, Artificial Sequence
  Description of Artificial Sequence: Synthetic oligonucleotide
  Sense strand starting at position 3663 of SEQ ID NO: 3508
gagugugguauguauggga

SEQ ID NO: 273105 - RNA, 19 nt, Artificial Sequence
  Description of Artificial Sequence: Synthetic oligonucleotide
  Antisense strand to SEQ ID NO: 273104
ucccauacauaccacacuc

SEQ ID NO: 273106 - RNA, 19 nt, Artificial Sequence
  Description of Artificial Sequence: Synthetic oligonucleotide
  Sense strand starting at position 3672 of SEQ ID NO: 3508
auguaugggaccuguuaca

SEQ ID NO: 273107 - RNA, 19 nt, Artificial Sequence
  Description of Artificial Sequence: Synthetic oligonucleotide
  Antisense strand to SEQ ID NO: 273106
uguaacaggucccauacau

SEQ ID NO: 273108 - RNA, 19 nt, Artificial Sequence
  Description of Artificial Sequence: Synthetic oligonucleotide
  Sense strand starting at position 3799 of SEQ ID NO: 3508
ugacuaauugccuagguuu

SEQ ID NO: 273109 - RNA, 19 nt, Artificial Sequence
  Description of Artificial Sequence: Synthetic oligonucleotide
  Antisense strand to SEQ ID NO: 273108
aaaccuaggcaauuaguca

SEQ ID NO: 273110 - RNA, 19 nt, Artificial Sequence
  Description of Artificial Sequence: Synthetic oligonucleotide
  Sense strand starting at position 3917 of SEQ ID NO: 3508
ugaaccaucuagcuagaaa

SEQ ID NO: 273111 - RNA, 19 nt, Artificial Sequence
  Description of Artificial Sequence: Synthetic oligonucleotide
  Antisense strand to SEQ ID NO: 273110
uuucuagcuagaugguuca

SEQ ID NO: 273112 - RNA, 19 nt, Artificial Sequence
  Description of Artificial Sequence: Synthetic oligonucleotide
  Sense strand starting at position 3920 of SEQ ID NO: 3508
accaucuagcuagaaaguu

SEQ ID NO: 273113 - RNA, 19 nt, Artificial Sequence
  Description of Artificial Sequence: Synthetic oligonucleotide
  Antisense strand to SEQ ID NO: 273112
aacuuucuagcuagauggu

SEQ ID NO: 273114 - RNA, 19 nt, Artificial Sequence
  Description of Artificial Sequence: Synthetic oligonucleotide
  Sense strand starting at position 3949 of SEQ ID NO: 3508
gcagucuauagggaugacu

SEQ ID NO: 273115 - RNA, 19 nt, Artificial Sequence
  Description of Artificial Sequence: Synthetic oligonucleotide
  Antisense strand to SEQ ID NO: 273114
agucaucccuauagacugc

SEQ ID NO: 273116 - RNA, 19 nt, Artificial Sequence
  Description of Artificial Sequence: Synthetic oligonucleotide
  Sense strand starting at position 15 of SEQ ID NO: 3509
gccagcuuuccagaagugu

SEQ ID NO: 273117 - RNA, 19 nt, Artificial Sequence
  Description of Artificial Sequence: Synthetic oligonucleotide
  Antisense strand to SEQ ID NO: 273116
acacuucuggaaagcuggc

SEQ ID NO: 273118 - RNA, 19 nt, Artificial Sequence
  Description of Artificial Sequence: Synthetic oligonucleotide
  Sense strand starting at position 55 of SEQ ID NO: 3509
uauggaauuguguguuucu

SEQ ID NO: 273119 - RNA, 19 nt, Artificial Sequence
  Description of Artificial Sequence: Synthetic oligonucleotide
  Antisense strand to SEQ ID NO: 273118
agaaacacacaauuccaua

SEQ ID NO: 273120 - RNA, 19 nt, Artificial Sequence
  Description of Artificial Sequence: Synthetic oligonucleotide
  Sense strand starting at position 123 of SEQ ID NO: 3509
gagccugucuuucuucuga

SEQ ID NO: 273121 - RNA, 19 nt, Artificial Sequence
  Description of Artificial Sequence: Synthetic oligonucleotide
  Antisense strand to SEQ ID NO: 273120
ucagaagaaagacaggcuc

SEQ ID NO: 273122 - RNA, 19 nt, Artificial Sequence
  Description of Artificial Sequence: Synthetic oligonucleotide
  Sense strand starting at position 197 of SEQ ID NO: 3509
ccgaguccuggugaaguua

SEQ ID NO: 273123 - RNA, 19 nt, Artificial Sequence
  Description of Artificial Sequence: Synthetic oligonucleotide
  Antisense strand to SEQ ID NO: 273122
uaacuucaccaggacucgg

SEQ ID NO: 273124 - RNA, 19 nt, Artificial Sequence
  Description of Artificial Sequence: Synthetic oligonucleotide
  Sense strand starting at position 209 of SEQ ID NO: 3509
gaaguuacaucaucgcuua

SEQ ID NO: 273125 - RNA, 19 nt, Artificial Sequence
  Description of Artificial Sequence: Synthetic oligonucleotide
  Antisense strand to SEQ ID NO: 273124
uaagcgaugauguaacuuc

SEQ ID NO: 273126 - RNA, 19 nt, Artificial Sequence
  Description of Artificial Sequence: Synthetic oligonucleotide
  Sense strand starting at position 256 of SEQ ID NO: 3509
ugagaaaguucagugggua

SEQ ID NO: 273127 - RNA, 19 nt, Artificial Sequence
  Description of Artificial Sequence: Synthetic oligonucleotide
  Antisense strand to SEQ ID NO: 273126
uacccacugaacuuucuca

SEQ ID NO: 273128 - RNA, 19 nt, Artificial Sequence
  Description of Artificial Sequence: Synthetic oligonucleotide
  Sense strand starting at position 257 of SEQ ID NO: 3509
gagaaaguucaguggguac

SEQ ID NO: 273129 - RNA, 19 nt, Artificial Sequence
  Description of Artificial Sequence: Synthetic oligonucleotide
  Antisense strand to SEQ ID NO: 273128
guacccacugaacuuucuc

SEQ ID NO: 273130 - RNA, 19 nt, Artificial Sequence
  Description of Artificial Sequence: Synthetic oligonucleotide
  Sense strand starting at position 259 of SEQ ID NO: 3509
gaaaguucaguggguacga

SEQ ID NO: 273131 - RNA, 19 nt, Artificial Sequence
  Description of Artificial Sequence: Synthetic oligonucleotide
  Antisense strand to SEQ ID NO: 273130
ucguacccacugaacuuuc

SEQ ID NO: 273132 - RNA, 19 nt, Artificial Sequence
  Description of Artificial Sequence: Synthetic oligonucleotide
  Sense strand starting at position 343 of SEQ ID NO: 3509
agaacauuacuuggcccaa

SEQ ID NO: 273133 - RNA, 19 nt, Artificial Sequence
  Description of Artificial Sequence: Synthetic oligonucleotide
  Antisense strand to SEQ ID NO: 273132
uugggccaaguaauguucu

SEQ ID NO: 273134 - RNA, 19 nt, Artificial Sequence
  Description of Artificial Sequence: Synthetic oligonucleotide
  Sense strand starting at position 392 of SEQ ID NO: 3509
cugcgagaaaccugggaaa

SEQ ID NO: 273135 - RNA, 19 nt, Artificial Sequence
  Description of Artificial Sequence: Synthetic oligonucleotide
  Antisense strand to SEQ ID NO: 273134
uuucccagguuucucgcag

SEQ ID NO: 273136 - RNA, 19 nt, Artificial Sequence
  Description of Artificial Sequence: Synthetic oligonucleotide
  Sense strand starting at position 452 of SEQ ID NO: 3509
aaaguagaccucugagacu

SEQ ID NO: 273137 - RNA, 19 nt, Artificial Sequence
  Description of Artificial Sequence: Synthetic oligonucleotide
  Antisense strand to SEQ ID NO: 273136
agucucagaggucuacuuu

SEQ ID NO: 273138 - RNA, 19 nt, Artificial Sequence
  Description of Artificial Sequence: Synthetic oligonucleotide
  Sense strand starting at position 619 of SEQ ID NO: 3509
gaaucauaccaaggcgaca

SEQ ID NO: 273139 - RNA, 19 nt, Artificial Sequence
  Description of Artificial Sequence: Synthetic oligonucleotide
  Antisense strand to SEQ ID NO: 273138
ugucgccuugguaugauuc

SEQ ID NO: 273140 - RNA, 19 nt, Artificial Sequence
  Description of Artificial Sequence: Synthetic oligonucleotide
  Sense strand starting at position 632 of SEQ ID NO: 3509
gcgacagugacagauaacu

SEQ ID NO: 273141 - RNA, 19 nt, Artificial Sequence
  Description of Artificial Sequence: Synthetic oligonucleotide
  Antisense strand to SEQ ID NO: 273140
aguuaucugucacugucgc

SEQ ID NO: 273142 - RNA, 19 nt, Artificial Sequence
  Description of Artificial Sequence: Synthetic oligonucleotide
  Sense strand starting at position 869 of SEQ ID NO: 3509
ggccaagaagucuagcagu

SEQ ID NO: 273143 - RNA, 19 nt, Artificial Sequence
  Description of Artificial Sequence: Synthetic oligonucleotide
  Antisense strand to SEQ ID NO: 273142
acugcuagacuucuuggcc

SEQ ID NO: 273144 - RNA, 19 nt, Artificial Sequence
  Description of Artificial Sequence: Synthetic oligonucleotide
  Sense strand starting at position 894 of SEQ ID NO: 3509
gugccauauacaggugaga

SEQ ID NO: 273145 - RNA, 19 nt, Artificial Sequence
  Description of Artificial Sequence: Synthetic oligonucleotide
  Antisense strand to SEQ ID NO: 273144
ucucaccuguauauggcac

SEQ ID NO: 273146 - RNA, 19 nt, Artificial Sequence
  Description of Artificial Sequence: Synthetic oligonucleotide
  Sense strand starting at position 1159 of SEQ ID NO: 3509
cucuguuguucuguaugaa

SEQ ID NO: 273147 - RNA, 19 nt, Artificial Sequence
  Description of Artificial Sequence: Synthetic oligonucleotide
  Antisense strand to SEQ ID NO: 273146
uucauacagaacaacagag

SEQ ID NO: 273148 - RNA, 19 nt, Artificial Sequence
  Description of Artificial Sequence: Synthetic oligonucleotide
  Sense strand starting at position 1160 of SEQ ID NO: 3509
ucuguuguucuguaugaau

SEQ ID NO: 273149 - RNA, 19 nt, Artificial Sequence
  Description of Artificial Sequence: Synthetic oligonucleotide
  Antisense strand to SEQ ID NO: 273148
auucauacagaacaacaga

SEQ ID NO: 273150 - RNA, 19 nt, Artificial Sequence
  Description of Artificial Sequence: Synthetic oligonucleotide
  Sense strand starting at position 1162 of SEQ ID NO: 3509
uguuguucuguaugaauca

SEQ ID NO: 273151 - RNA, 19 nt, Artificial Sequence
  Description of Artificial Sequence: Synthetic oligonucleotide
  Antisense strand to SEQ ID NO: 273150
ugauucauacagaacaaca

SEQ ID NO: 273152 - RNA, 19 nt, Artificial Sequence
  Description of Artificial Sequence: Synthetic oligonucleotide
  Sense strand starting at position 1194 of SEQ ID NO: 3509
guuccuucuguguagguua

SEQ ID NO: 273153 - RNA, 19 nt, Artificial Sequence
  Description of Artificial Sequence: Synthetic oligonucleotide
  Antisense strand to SEQ ID NO: 273152
uaaccuacacagaaggaac

SEQ ID NO: 273154 - RNA, 19 nt, Artificial Sequence
  Description of Artificial Sequence: Synthetic oligonucleotide
  Sense strand starting at position 1199 of SEQ ID NO: 3509
uucuguguagguuacagaa

SEQ ID NO: 273155 - RNA, 19 nt, Artificial Sequence
  Description of Artificial Sequence: Synthetic oligonucleotide
  Antisense strand to SEQ ID NO: 273154
uucuguaaccuacacagaa

SEQ ID NO: 273156 - RNA, 19 nt, Artificial Sequence
  Description of Artificial Sequence: Synthetic oligonucleotide
  Sense strand starting at position 1290 of SEQ ID NO: 3509
ggucuaugucugggacuug

SEQ ID NO: 273157 - RNA, 19 nt, Artificial Sequence
  Description of Artificial Sequence: Synthetic oligonucleotide
  Antisense strand to SEQ ID NO: 273156
caagucccagacauagacc

SEQ ID NO: 273158 - RNA, 19 nt, Artificial Sequence
  Description of Artificial Sequence: Synthetic oligonucleotide
  Sense strand starting at position 1302 of SEQ ID NO: 3509
ggacuuggcagccaaagua

SEQ ID NO: 273159 - RNA, 19 nt, Artificial Sequence
  Description of Artificial Sequence: Synthetic oligonucleotide
  Antisense strand to SEQ ID NO: 273158
uacuuuggcugccaagucc

SEQ ID NO: 273160 - RNA, 19 nt, Artificial Sequence
  Description of Artificial Sequence: Synthetic oligonucleotide
  Sense strand starting at position 1709 of SEQ ID NO: 3509
aagagaaucgcccacggaa

SEQ ID NO: 273161 - RNA, 19 nt, Artificial Sequence
  Description of Artificial Sequence: Synthetic oligonucleotide
  Antisense strand to SEQ ID NO: 273160
uuccgugggcgauucucuu

SEQ ID NO: 273162 - RNA, 19 nt, Artificial Sequence
  Description of Artificial Sequence: Synthetic oligonucleotide
  Sense strand starting at position 2289 of SEQ ID NO: 3509
ccgucucaucugcauacau

SEQ ID NO: 273163 - RNA, 19 nt, Artificial Sequence
  Description of Artificial Sequence: Synthetic oligonucleotide
  Antisense strand to SEQ ID NO: 273162
auguaugcagaugagacgg

SEQ ID NO: 273164 - RNA, 19 nt, Artificial Sequence
  Description of Artificial Sequence: Synthetic oligonucleotide
  Sense strand starting at position 2291 of SEQ ID NO: 3509
gucucaucugcauacauga

SEQ ID NO: 273165 - RNA, 19 nt, Artificial Sequence
  Description of Artificial Sequence: Synthetic oligonucleotide
  Antisense strand to SEQ ID NO: 273164
ucauguaugcagaugagac

SEQ ID NO: 273166 - RNA, 19 nt, Artificial Sequence
  Description of Artificial Sequence: Synthetic oligonucleotide
  Sense strand starting at position 2917 of SEQ ID NO: 3509
gaaauagagucauuguuac

SEQ ID NO: 273167 - RNA, 19 nt, Artificial Sequence
  Description of Artificial Sequence: Synthetic oligonucleotide
  Antisense strand to SEQ ID NO: 273166
guaacaaugacucuauuuc

SEQ ID NO: 273168 - RNA, 19 nt, Artificial Sequence
  Description of Artificial Sequence: Synthetic oligonucleotide
  Sense strand starting at position 3043 of SEQ ID NO: 3509
ggcgaugugggcuauaaau

SEQ ID NO: 273169 - RNA, 19 nt, Artificial Sequence
  Description of Artificial Sequence: Synthetic oligonucleotide
  Antisense strand to SEQ ID NO: 273168
auuuauagcccacaucgcc

SEQ ID NO: 273170 - RNA, 19 nt, Artificial Sequence
  Description of Artificial Sequence: Synthetic oligonucleotide
  Sense strand starting at position 3045 of SEQ ID NO: 3509
cgaugugggcuauaaauua

SEQ ID NO: 273171 - RNA, 19 nt, Artificial Sequence
  Description of Artificial Sequence: Synthetic oligonucleotide
  Antisense strand to SEQ ID NO: 273170
uaauuuauagcccacaucg

SEQ ID NO: 273172 - RNA, 19 nt, Artificial Sequence
  Description of Artificial Sequence: Synthetic oligonucleotide
  Sense strand starting at position 3184 of SEQ ID NO: 3509
ggagguuguccugggagac

SEQ ID NO: 273173 - RNA, 19 nt, Artificial Sequence
  Description of Artificial Sequence: Synthetic oligonucleotide
  Antisense strand to SEQ ID NO: 273172
gucucccaggacaaccucc

SEQ ID NO: 273174 - RNA, 19 nt, Artificial Sequence
  Description of Artificial Sequence: Synthetic oligonucleotide
  Sense strand starting at position 3185 of SEQ ID NO: 3509
gagguuguccugggagaca

SEQ ID NO: 273175 - RNA, 19 nt, Artificial Sequence
  Description of Artificial Sequence: Synthetic oligonucleotide
  Antisense strand to SEQ ID NO: 273174
ugucucccaggacaaccuc

SEQ ID NO: 273176 - RNA, 19 nt, Artificial Sequence
  Description of Artificial Sequence: Synthetic oligonucleotide
  Sense strand starting at position 3270 of SEQ ID NO: 3509
cauuuaaagugucaggaga

SEQ ID NO: 273177 - RNA, 19 nt, Artificial Sequence
  Description of Artificial Sequence: Synthetic oligonucleotide
  Antisense strand to SEQ ID NO: 273176
ucuccugacacuuuaaaug

SEQ ID NO: 273178 - RNA, 19 nt, Artificial Sequence
  Description of Artificial Sequence: Synthetic oligonucleotide
  Sense strand starting at position 3311 of SEQ ID NO: 3509
uggguagaagccugagacu

SEQ ID NO: 273179 - RNA, 19 nt, Artificial Sequence
  Description of Artificial Sequence: Synthetic oligonucleotide
  Antisense strand to SEQ ID NO: 273178
agucucaggcuucuaccca

SEQ ID NO: 273180 - RNA, 19 nt, Artificial Sequence
  Description of Artificial Sequence: Synthetic oligonucleotide
  Sense strand starting at position 3397 of SEQ ID NO: 3509
aggcgagacuguccaagaa

SEQ ID NO: 273181 - RNA, 19 nt, Artificial Sequence
  Description of Artificial Sequence: Synthetic oligonucleotide
  Antisense strand to SEQ ID NO: 273180
uucuuggacagucucgccu

SEQ ID NO: 273182 - RNA, 19 nt, Artificial Sequence
  Description of Artificial Sequence: Synthetic oligonucleotide
  Sense strand starting at position 3516 of SEQ ID NO: 3509
ucaggaauuccugagugug

SEQ ID NO: 273183 - RNA, 19 nt, Artificial Sequence
  Description of Artificial Sequence: Synthetic oligonucleotide
  Antisense strand to SEQ ID NO: 273182
cacacucaggaauuccuga

SEQ ID NO: 273184 - RNA, 19 nt, Artificial Sequence
  Description of Artificial Sequence: Synthetic oligonucleotide
  Sense strand starting at position 3518 of SEQ ID NO: 3509
aggaauuccugagugugau

SEQ ID NO: 273185 - RNA, 19 nt, Artificial Sequence
  Description of Artificial Sequence: Synthetic oligonucleotide
  Antisense strand to SEQ ID NO: 273184
aucacacucaggaauuccu

SEQ ID NO: 273186 - RNA, 19 nt, Artificial Sequence
  Description of Artificial Sequence: Synthetic oligonucleotide
  Sense strand starting at position 3519 of SEQ ID NO: 3509
ggaauuccugagugugaua

SEQ ID NO: 273187 - RNA, 19 nt, Artificial Sequence
  Description of Artificial Sequence: Synthetic oligonucleotide
  Antisense strand to SEQ ID NO: 273186
uaucacacucaggaauucc

SEQ ID NO: 273188 - RNA, 19 nt, Artificial Sequence
  Description of Artificial Sequence: Synthetic oligonucleotide
  Sense strand starting at position 3521 of SEQ ID NO: 3509
aauuccugagugugauaac

SEQ ID NO: 273189 - RNA, 19 nt, Artificial Sequence
  Description of Artificial Sequence: Synthetic oligonucleotide
  Antisense strand to SEQ ID NO: 273188
guuaucacacucaggaauu

SEQ ID NO: 273190 - RNA, 19 nt, Artificial Sequence
  Description of Artificial Sequence: Synthetic oligonucleotide
  Sense strand starting at position 3566 of SEQ ID NO: 3509
gugugcaacuucucagaug

SEQ ID NO: 273191 - RNA, 19 nt, Artificial Sequence
  Description of Artificial Sequence: Synthetic oligonucleotide
  Antisense strand to SEQ ID NO: 273190
caucugagaaguugcacac

SEQ ID NO: 273192 - RNA, 19 nt, Artificial Sequence
  Description of Artificial Sequence: Synthetic oligonucleotide
  Sense strand starting at position 3837 of SEQ ID NO: 3509
gagcuccauuguucuggaa

SEQ ID NO: 273193 - RNA, 19 nt, Artificial Sequence
  Description of Artificial Sequence: Synthetic oligonucleotide
  Antisense strand to SEQ ID NO: 273192
uuccagaacaauggagcuc

SEQ ID NO: 273194 - RNA, 19 nt, Artificial Sequence
  Description of Artificial Sequence: Synthetic oligonucleotide
  Sense strand starting at position 3881 of SEQ ID NO: 3509
acaccuuaccgagauucuu

SEQ ID NO: 273195 - RNA, 19 nt, Artificial Sequence
  Description of Artificial Sequence: Synthetic oligonucleotide
  Antisense strand to SEQ ID NO: 273194
aagaaucucgguaaggugu

SEQ ID NO: 273196 - RNA, 19 nt, Artificial Sequence
  Description of Artificial Sequence: Synthetic oligonucleotide
  Sense strand starting at position 103 of SEQ ID NO: 3510
caguuccauguggauuaaa

SEQ ID NO: 273197 - RNA, 19 nt, Artificial Sequence
  Description of Artificial Sequence: Synthetic oligonucleotide
  Antisense strand to SEQ ID NO: 273196
uuuaauccacauggaacug

SEQ ID NO: 273198 - RNA, 19 nt, Artificial Sequence
  Description of Artificial Sequence: Synthetic oligonucleotide
  Sense strand starting at position 579 of SEQ ID NO: 3510
ggacaauagucaccacuau

SEQ ID NO: 273199 - RNA, 19 nt, Artificial Sequence
  Description of Artificial Sequence: Synthetic oligonucleotide
  Antisense strand to SEQ ID NO: 273198
auaguggugacuauugucc

SEQ ID NO: 273200 - RNA, 19 nt, Artificial Sequence
  Description of Artificial Sequence: Synthetic oligonucleotide
  Sense strand starting at position 661 of SEQ ID NO: 3510
guuaacacuguuuaaaguu

SEQ ID NO: 273201 - RNA, 19 nt, Artificial Sequence
  Description of Artificial Sequence: Synthetic oligonucleotide
  Antisense strand to SEQ ID NO: 273200
aacuuuaaacaguguuaac

SEQ ID NO: 273202 - RNA, 19 nt, Artificial Sequence
  Description of Artificial Sequence: Synthetic oligonucleotide
  Sense strand starting at position 696 of SEQ ID NO: 3510
gguauuaucuuacucucua

SEQ ID NO: 273203 - RNA, 19 nt, Artificial Sequence
  Description of Artificial Sequence: Synthetic oligonucleotide
  Antisense strand to SEQ ID NO: 273202
uagagaguaagauaauacc

SEQ ID NO: 273204 - RNA, 19 nt, Artificial Sequence
  Description of Artificial Sequence: Synthetic oligonucleotide
  Sense strand starting at position 881 of SEQ ID NO: 3510
ggcuuaccagccuaaucaa

SEQ ID NO: 273205 - RNA, 19 nt, Artificial Sequence
  Description of Artificial Sequence: Synthetic oligonucleotide
  Antisense strand to SEQ ID NO: 273204
uugauuaggcugguaagcc

SEQ ID NO: 273206 - RNA, 19 nt, Artificial Sequence
  Description of Artificial Sequence: Synthetic oligonucleotide
  Sense strand starting at position 1036 of SEQ ID NO: 3510
ccuacaauaguaggugauu

SEQ ID NO: 273207 - RNA, 19 nt, Artificial Sequence
  Description of Artificial Sequence: Synthetic oligonucleotide
  Antisense strand to SEQ ID NO: 273206
aaucaccuacuauuguagg

SEQ ID NO: 273208 - RNA, 19 nt, Artificial Sequence
  Description of Artificial Sequence: Synthetic oligonucleotide
  Sense strand starting at position 1078 of SEQ ID NO: 3510
gaauuaagauguccagcac

SEQ ID NO: 273209 - RNA, 19 nt, Artificial Sequence
  Description of Artificial Sequence: Synthetic oligonucleotide
  Antisense strand to SEQ ID NO: 273208
gugcuggacaucuuaauuc

SEQ ID NO: 273210 - RNA, 19 nt, Artificial Sequence
  Description of Artificial Sequence: Synthetic oligonucleotide
  Sense strand starting at position 1308 of SEQ ID NO: 3510
gaaacacuggcugaguuau

SEQ ID NO: 273211 - RNA, 19 nt, Artificial Sequence
  Description of Artificial Sequence: Synthetic oligonucleotide
  Antisense strand to SEQ ID NO: 273210
auaacucagccaguguuuc

SEQ ID NO: 273212 - RNA, 19 nt, Artificial Sequence
  Description of Artificial Sequence: Synthetic oligonucleotide
  Sense strand starting at position 1354 of SEQ ID NO: 3510
gcuugaguuccuguugcgu

SEQ ID NO: 273213 - RNA, 19 nt, Artificial Sequence
  Description of Artificial Sequence: Synthetic oligonucleotide
  Antisense strand to SEQ ID NO: 273212
acgcaacaggaacucaagc

SEQ ID NO: 273214 - RNA, 19 nt, Artificial Sequence
  Description of Artificial Sequence: Synthetic oligonucleotide
  Sense strand starting at position 1390 of SEQ ID NO: 3510
cagcaacuucucgagaggu

SEQ ID NO: 273215 - RNA, 19 nt, Artificial Sequence
  Description of Artificial Sequence: Synthetic oligonucleotide
  Antisense strand to SEQ ID NO: 273214
accucucgagaaguugcug

SEQ ID NO: 273216 - RNA, 19 nt, Artificial Sequence
  Description of Artificial Sequence: Synthetic oligonucleotide
  Sense strand starting at position 1392 of SEQ ID NO: 3510
gcaacuucucgagagguua

SEQ ID NO: 273217 - RNA, 19 nt, Artificial Sequence
  Description of Artificial Sequence: Synthetic oligonucleotide
  Antisense strand to SEQ ID NO: 273216
uaaccucucgagaaguugc

SEQ ID NO: 273218 - RNA, 19 nt, Artificial Sequence
  Description of Artificial Sequence: Synthetic oligonucleotide
  Sense strand starting at position 1486 of SEQ ID NO: 3510
aagucuacgcuuuaaagau

SEQ ID NO: 273219 - RNA, 19 nt, Artificial Sequence
  Description of Artificial Sequence: Synthetic oligonucleotide
  Antisense strand to SEQ ID NO: 273218
aucuuuaaagcguagacuu

SEQ ID NO: 273220 - RNA, 19 nt, Artificial Sequence
  Description of Artificial Sequence: Synthetic oligonucleotide
  Sense strand starting at position 1635 of SEQ ID NO: 3510
gucagaaacagcugugaga

SEQ ID NO: 273221 - RNA, 19 nt, Artificial Sequence
  Description of Artificial Sequence: Synthetic oligonucleotide
  Antisense strand to SEQ ID NO: 273220
ucucacagcuguuucugac

SEQ ID NO: 273222 - RNA, 19 nt, Artificial Sequence
  Description of Artificial Sequence: Synthetic oligonucleotide
  Sense strand starting at position 2043 of SEQ ID NO: 3510
caggacaaggcuugaguua

SEQ ID NO: 273223 - RNA, 19 nt, Artificial Sequence
  Description of Artificial Sequence: Synthetic oligonucleotide
  Antisense strand to SEQ ID NO: 273222
uaacucaagccuuguccug

SEQ ID NO: 273224 - RNA, 19 nt, Artificial Sequence
  Description of Artificial Sequence: Synthetic oligonucleotide
  Sense strand starting at position 2097 of SEQ ID NO: 3510
acuaauuuguaggaagaaa

SEQ ID NO: 273225 - RNA, 19 nt, Artificial Sequence
  Description of Artificial Sequence: Synthetic oligonucleotide
  Antisense strand to SEQ ID NO: 273224
uuucuuccuacaaauuagu

SEQ ID NO: 273226 - RNA, 19 nt, Artificial Sequence
  Description of Artificial Sequence: Synthetic oligonucleotide
  Sense strand starting at position 2149 of SEQ ID NO: 3510
cuuucuaaaccucagggua

SEQ ID NO: 273227 - RNA, 19 nt, Artificial Sequence
  Description of Artificial Sequence: Synthetic oligonucleotide
  Antisense strand to SEQ ID NO: 273226
uacccugagguuuagaaag

SEQ ID NO: 273228 - RNA, 19 nt, Artificial Sequence
  Description of Artificial Sequence: Synthetic oligonucleotide
  Sense strand starting at position 2162 of SEQ ID NO: 3510
aggguaaaggcucaucgau

SEQ ID NO: 273229 - RNA, 19 nt, Artificial Sequence
  Description of Artificial Sequence: Synthetic oligonucleotide
  Antisense strand to SEQ ID NO: 273228
aucgaugagccuuuacccu

SEQ ID NO: 273230 - RNA, 19 nt, Artificial Sequence
  Description of Artificial Sequence: Synthetic oligonucleotide
  Sense strand starting at position 2349 of SEQ ID NO: 3510
gggagaagcucacuuaguc

SEQ ID NO: 273231 - RNA, 19 nt, Artificial Sequence
  Description of Artificial Sequence: Synthetic oligonucleotide
  Antisense strand to SEQ ID NO: 273230
gacuaagugagcuucuccc

SEQ ID NO: 273232 - RNA, 19 nt, Artificial Sequence
  Description of Artificial Sequence: Synthetic oligonucleotide
  Sense strand starting at position 2420 of SEQ ID NO: 3510
acagaauugcuagacgcaa

SEQ ID NO: 273233 - RNA, 19 nt, Artificial Sequence
  Description of Artificial Sequence: Synthetic oligonucleotide
  Antisense strand to SEQ ID NO: 273232
uugcgucuagcaauucugu

SEQ ID NO: 273234 - RNA, 19 nt, Artificial Sequence
  Description of Artificial Sequence: Synthetic oligonucleotide
  Sense strand starting at position 2435 of SEQ ID NO: 3510
gcaauaggugcguugucuu

SEQ ID NO: 273235 - RNA, 19 nt, Artificial Sequence
  Description of Artificial Sequence: Synthetic oligonucleotide
  Antisense strand to SEQ ID NO: 273234
aagacaacgcaccuauugc

SEQ ID NO: 273236 - RNA, 19 nt, Artificial Sequence
  Description of Artificial Sequence: Synthetic oligonucleotide
  Sense strand starting at position 2688 of SEQ ID NO: 3510
gaggcuugagguuagaucu

SEQ ID NO: 273237 - RNA, 19 nt, Artificial Sequence
  Description of Artificial Sequence: Synthetic oligonucleotide
  Antisense strand to SEQ ID NO: 273236
agaucuaaccucaagccuc

SEQ ID NO: 273238 - RNA, 19 nt, Artificial Sequence
  Description of Artificial Sequence: Synthetic oligonucleotide
  Sense strand starting at position 2696 of SEQ ID NO: 3510
agguuagaucucgggauga

SEQ ID NO: 273239 - RNA, 19 nt, Artificial Sequence
  Description of Artificial Sequence: Synthetic oligonucleotide
  Antisense strand to SEQ ID NO: 273238
ucaucccgagaucuaaccu

SEQ ID NO: 273240 - RNA, 19 nt, Artificial Sequence
  Description of Artificial Sequence: Synthetic oligonucleotide
  Sense strand starting at position 2698 of SEQ ID NO: 3510
guuagaucucgggaugaac

SEQ ID NO: 273241 - RNA, 19 nt, Artificial Sequence
  Description of Artificial Sequence: Synthetic oligonucleotide
  Antisense strand to SEQ ID NO: 273240
guucaucccgagaucuaac

SEQ ID NO: 273242 - RNA, 19 nt, Artificial Sequence
  Description of Artificial Sequence: Synthetic oligonucleotide
  Sense strand starting at position 2700 of SEQ ID NO: 3510
uagaucucgggaugaacuu

SEQ ID NO: 273243 - RNA, 19 nt, Artificial Sequence
  Description of Artificial Sequence: Synthetic oligonucleotide
  Antisense strand to SEQ ID NO: 273242
aaguucaucccgagaucua

SEQ ID NO: 273244 - RNA, 19 nt, Artificial Sequence
  Description of Artificial Sequence: Synthetic oligonucleotide
  Sense strand starting at position 2831 of SEQ ID NO: 3510
cacccuucgguagggaaau

SEQ ID NO: 273245 - RNA, 19 nt, Artificial Sequence
  Description of Artificial Sequence: Synthetic oligonucleotide
  Antisense strand to SEQ ID NO: 273244
auuucccuaccgaagggug

SEQ ID NO: 273246 - RNA, 19 nt, Artificial Sequence
  Description of Artificial Sequence: Synthetic oligonucleotide
  Sense strand starting at position 2837 of SEQ ID NO: 3510
ucgguagggaaaugaguuu

SEQ ID NO: 273247 - RNA, 19 nt, Artificial Sequence
  Description of Artificial Sequence: Synthetic oligonucleotide
  Antisense strand to SEQ ID NO: 273246
aaacucauuucccuaccga

SEQ ID NO: 273248 - RNA, 19 nt, Artificial Sequence
  Description of Artificial Sequence: Synthetic oligonucleotide
  Sense strand starting at position 2944 of SEQ ID NO: 3510
uuuguaaucguccaagagg

SEQ ID NO: 273249 - RNA, 19 nt, Artificial Sequence
  Description of Artificial Sequence: Synthetic oligonucleotide
  Antisense strand to SEQ ID NO: 273248
ccucuuggacgauuacaaa

SEQ ID NO: 273250 - RNA, 19 nt, Artificial Sequence
  Description of Artificial Sequence: Synthetic oligonucleotide
  Sense strand starting at position 2947 of SEQ ID NO: 3510
guaaucguccaagagguga

SEQ ID NO: 273251 - RNA, 19 nt, Artificial Sequence
  Description of Artificial Sequence: Synthetic oligonucleotide
  Antisense strand to SEQ ID NO: 273250
ucaccucuuggacgauuac

SEQ ID NO: 273252 - RNA, 19 nt, Artificial Sequence
  Description of Artificial Sequence: Synthetic oligonucleotide
  Sense strand starting at position 3006 of SEQ ID NO: 3510
gcuaguuauccuugauuug

SEQ ID NO: 273253 - RNA, 19 nt, Artificial Sequence
  Description of Artificial Sequence: Synthetic oligonucleotide
  Antisense strand to SEQ ID NO: 273252
caaaucaaggauaacuagc

SEQ ID NO: 273254 - RNA, 19 nt, Artificial Sequence
  Description of Artificial Sequence: Synthetic oligonucleotide
  Sense strand starting at position 3241 of SEQ ID NO: 3510
augaaauccuggcauuuaa

SEQ ID NO: 273255 - RNA, 19 nt, Artificial Sequence
  Description of Artificial Sequence: Synthetic oligonucleotide
  Antisense strand to SEQ ID NO: 273254
uuaaaugccaggauuucau

SEQ ID NO: 273256 - RNA, 19 nt, Artificial Sequence
  Description of Artificial Sequence: Synthetic oligonucleotide
  Sense strand starting at position 3313 of SEQ ID NO: 3510
auguuaacauucuugagaa

SEQ ID NO: 273257 - RNA, 19 nt, Artificial Sequence
  Description of Artificial Sequence: Synthetic oligonucleotide
  Antisense strand to SEQ ID NO: 273256
uucucaagaauguuaacau

SEQ ID NO: 273258 - RNA, 19 nt, Artificial Sequence
  Description of Artificial Sequence: Synthetic oligonucleotide
  Sense strand starting at position 3315 of SEQ ID NO: 3510
guuaacauucuugagaagu

SEQ ID NO: 273259 - RNA, 19 nt, Artificial Sequence
  Description of Artificial Sequence: Synthetic oligonucleotide
  Antisense strand to SEQ ID NO: 273258
acuucucaagaauguuaac

SEQ ID NO: 273260 - RNA, 19 nt, Artificial Sequence
  Description of Artificial Sequence: Synthetic oligonucleotide
  Sense strand starting at position 3498 of SEQ ID NO: 3510
uucucagagccaggagauu

SEQ ID NO: 273261 - RNA, 19 nt, Artificial Sequence
  Description of Artificial Sequence: Synthetic oligonucleotide
  Antisense strand to SEQ ID NO: 273260
aaucuccuggcucugagaa

SEQ ID NO: 273262 - RNA, 19 nt, Artificial Sequence
  Description of Artificial Sequence: Synthetic oligonucleotide
  Sense strand starting at position 3628 of SEQ ID NO: 3510
uuaaguaucgagggaaauc

SEQ ID NO: 273263 - RNA, 19 nt, Artificial Sequence
  Description of Artificial Sequence: Synthetic oligonucleotide
  Antisense strand to SEQ ID NO: 273262
gauuucccucgauacuuaa

SEQ ID NO: 273264 - RNA, 19 nt, Artificial Sequence
  Description of Artificial Sequence: Synthetic oligonucleotide
  Sense strand starting at position 3691 of SEQ ID NO: 3510
ggguguauuucuucugucu

SEQ ID NO: 273265 - RNA, 19 nt, Artificial Sequence
  Description of Artificial Sequence: Synthetic oligonucleotide
  Antisense strand to SEQ ID NO: 273264
agacagaagaaauacaccc

SEQ ID NO: 273266 - RNA, 19 nt, Artificial Sequence
  Description of Artificial Sequence: Synthetic oligonucleotide
  Sense strand starting at position 3717 of SEQ ID NO: 3510
aguuaaauguuacuucuga

SEQ ID NO: 273267 - RNA, 19 nt, Artificial Sequence
  Description of Artificial Sequence: Synthetic oligonucleotide
  Antisense strand to SEQ ID NO: 273266
ucagaaguaacauuuaacu

SEQ ID NO: 273268 - RNA, 19 nt, Artificial Sequence
  Description of Artificial Sequence: Synthetic oligonucleotide
  Sense strand starting at position 3718 of SEQ ID NO: 3510
guuaaauguuacuucugaa

SEQ ID NO: 273269 - RNA, 19 nt, Artificial Sequence
  Description of Artificial Sequence: Synthetic oligonucleotide
  Antisense strand to SEQ ID NO: 273268
uucagaaguaacauuuaac

SEQ ID NO: 273270 - RNA, 19 nt, Artificial Sequence
  Description of Artificial Sequence: Synthetic oligonucleotide
  Sense strand starting at position 3778 of SEQ ID NO: 3510
cuuagaguaacaggugaaa

SEQ ID NO: 273271 - RNA, 19 nt, Artificial Sequence
  Description of Artificial Sequence: Synthetic oligonucleotide
  Antisense strand to SEQ ID NO: 273270
uuucaccuguuacucuaag

SEQ ID NO: 273272 - RNA, 19 nt, Artificial Sequence
  Description of Artificial Sequence: Synthetic oligonucleotide
  Sense strand starting at position 3812 of SEQ ID NO: 3510
uguguauguagucagagau

SEQ ID NO: 273273 - RNA, 19 nt, Artificial Sequence
  Description of Artificial Sequence: Synthetic oligonucleotide
  Antisense strand to SEQ ID NO: 273272
aucucugacuacauacaca

SEQ ID NO: 273274 - RNA, 19 nt, Artificial Sequence
  Description of Artificial Sequence: Synthetic oligonucleotide
  Sense strand starting at position 3912 of SEQ ID NO: 3510
ggauccagaucacuaguaa

SEQ ID NO: 273275 - RNA, 19 nt, Artificial Sequence
  Description of Artificial Sequence: Synthetic oligonucleotide
  Antisense strand to SEQ ID NO: 273274
uuacuagugaucuggaucc

SEQ ID NO: 273276 - RNA, 19 nt, Artificial Sequence
  Description of Artificial Sequence: Synthetic oligonucleotide
  Sense strand starting at position 11 of SEQ ID NO: 3511
gggcguuaccuggagaggu

SEQ ID NO: 273277 - RNA, 19 nt, Artificial Sequence
  Description of Artificial Sequence: Synthetic oligonucleotide
  Antisense strand to SEQ ID NO: 273276
accucuccagguaacgccc

SEQ ID NO: 273278 - RNA, 19 nt, Artificial Sequence
  Description of Artificial Sequence: Synthetic oligonucleotide
  Sense strand starting at position 13 of SEQ ID NO: 3511
gcguuaccuggagagguua

SEQ ID NO: 273279 - RNA, 19 nt, Artificial Sequence
  Description of Artificial Sequence: Synthetic oligonucleotide
  Antisense strand to SEQ ID NO: 273278
uaaccucuccagguaacgc

SEQ ID NO: 273280 - RNA, 19 nt, Artificial Sequence
  Description of Artificial Sequence: Synthetic oligonucleotide
  Sense strand starting at position 161 of SEQ ID NO: 3511
agaauaacacuucgugaca

SEQ ID NO: 273281 - RNA, 19 nt, Artificial Sequence
  Description of Artificial Sequence: Synthetic oligonucleotide
  Antisense strand to SEQ ID NO: 273280
ugucacgaaguguuauucu

SEQ ID NO: 273282 - RNA, 19 nt, Artificial Sequence
  Description of Artificial Sequence: Synthetic oligonucleotide
  Sense strand starting at position 162 of SEQ ID NO: 3511
gaauaacacuucgugacac

SEQ ID NO: 273283 - RNA, 19 nt, Artificial Sequence
  Description of Artificial Sequence: Synthetic oligonucleotide
  Antisense strand to SEQ ID NO: 273282
gugucacgaaguguuauuc

SEQ ID NO: 273284 - RNA, 19 nt, Artificial Sequence
  Description of Artificial Sequence: Synthetic oligonucleotide
  Sense strand starting at position 164 of SEQ ID NO: 3511
auaacacuucgugacacuu

SEQ ID NO: 273285 - RNA, 19 nt, Artificial Sequence
  Description of Artificial Sequence: Synthetic oligonucleotide
  Antisense strand to SEQ ID NO: 273284
aagugucacgaaguguuau

SEQ ID NO: 273286 - RNA, 19 nt, Artificial Sequence
  Description of Artificial Sequence: Synthetic oligonucleotide
  Sense strand starting at position 277 of SEQ ID NO: 3511
ucuacaauugcagaguuga

SEQ ID NO: 273287 - RNA, 19 nt, Artificial Sequence
  Description of Artificial Sequence: Synthetic oligonucleotide
  Antisense strand to SEQ ID NO: 273286
ucaacucugcaauuguaga

SEQ ID NO: 273288 - RNA, 19 nt, Artificial Sequence
  Description of Artificial Sequence: Synthetic oligonucleotide
  Sense strand starting at position 345 of SEQ ID NO: 3511
guugaaaucugauucccag

SEQ ID NO: 273289 - RNA, 19 nt, Artificial Sequence
  Description of Artificial Sequence: Synthetic oligonucleotide
  Antisense strand to SEQ ID NO: 273288
cugggaaucagauuucaac

SEQ ID NO: 273290 - RNA, 19 nt, Artificial Sequence
  Description of Artificial Sequence: Synthetic oligonucleotide
  Sense strand starting at position 389 of SEQ ID NO: 3511
guauuuggaucaugaauag

SEQ ID NO: 273291 - RNA, 19 nt, Artificial Sequence
  Description of Artificial Sequence: Synthetic oligonucleotide
  Antisense strand to SEQ ID NO: 273290
cuauucaugauccaaauac

SEQ ID NO: 273292 - RNA, 19 nt, Artificial Sequence
  Description of Artificial Sequence: Synthetic oligonucleotide
  Sense strand starting at position 451 of SEQ ID NO: 3511
cuguauuuguuccaggaga

SEQ ID NO: 273293 - RNA, 19 nt, Artificial Sequence
  Description of Artificial Sequence: Synthetic oligonucleotide
  Antisense strand to SEQ ID NO: 273292
ucuccuggaacaaauacag

SEQ ID NO: 273294 - RNA, 19 nt, Artificial Sequence
  Description of Artificial Sequence: Synthetic oligonucleotide
  Sense strand starting at position 604 of SEQ ID NO: 3511
accagucuuccaggcagua

SEQ ID NO: 273295 - RNA, 19 nt, Artificial Sequence
  Description of Artificial Sequence: Synthetic oligonucleotide
  Antisense strand to SEQ ID NO: 273294
uacugccuggaagacuggu

SEQ ID NO: 273296 - RNA, 19 nt, Artificial Sequence
  Description of Artificial Sequence: Synthetic oligonucleotide
  Sense strand starting at position 724 of SEQ ID NO: 3511
uuauguagcucuuuacaga

SEQ ID NO: 273297 - RNA, 19 nt, Artificial Sequence
  Description of Artificial Sequence: Synthetic oligonucleotide
  Antisense strand to SEQ ID NO: 273296
ucuguaaagagcuacauaa

SEQ ID NO: 273298 - RNA, 19 nt, Artificial Sequence
  Description of Artificial Sequence: Synthetic oligonucleotide
  Sense strand starting at position 955 of SEQ ID NO: 3511
gcucaagaaucgcuugaga

SEQ ID NO: 273299 - RNA, 19 nt, Artificial Sequence
  Description of Artificial Sequence: Synthetic oligonucleotide
  Antisense strand to SEQ ID NO: 273298
ucucaagcgauucuugagc

SEQ ID NO: 273300 - RNA, 19 nt, Artificial Sequence
  Description of Artificial Sequence: Synthetic oligonucleotide
  Sense strand starting at position 957 of SEQ ID NO: 3511
ucaagaaucgcuugagagg

SEQ ID NO: 273301 - RNA, 19 nt, Artificial Sequence
  Description of Artificial Sequence: Synthetic oligonucleotide
  Antisense strand to SEQ ID NO: 273300
ccucucaagcgauucuuga

SEQ ID NO: 273302 - RNA, 19 nt, Artificial Sequence
  Description of Artificial Sequence: Synthetic oligonucleotide
  Sense strand starting at position 1215 of SEQ ID NO: 3511
ccaagagggugucuaacaa

SEQ ID NO: 273303 - RNA, 19 nt, Artificial Sequence
  Description of Artificial Sequence: Synthetic oligonucleotide
  Antisense strand to SEQ ID NO: 273302
uuguuagacacccucuugg

SEQ ID NO: 273304 - RNA, 19 nt, Artificial Sequence
  Description of Artificial Sequence: Synthetic oligonucleotide
  Sense strand starting at position 1283 of SEQ ID NO: 3511
aguugaagccauugacucu

SEQ ID NO: 273305 - RNA, 19 nt, Artificial Sequence
  Description of Artificial Sequence: Synthetic oligonucleotide
  Antisense strand to SEQ ID NO: 273304
agagucaauggcuucaacu

SEQ ID NO: 273306 - RNA, 19 nt, Artificial Sequence
  Description of Artificial Sequence: Synthetic oligonucleotide
  Sense strand starting at position 1365 of SEQ ID NO: 3511
cagcaaguguacuuugaaa

SEQ ID NO: 273307 - RNA, 19 nt, Artificial Sequence
  Description of Artificial Sequence: Synthetic oligonucleotide
  Antisense strand to SEQ ID NO: 273306
uuucaaaguacacuugcug

SEQ ID NO: 273308 - RNA, 19 nt, Artificial Sequence
  Description of Artificial Sequence: Synthetic oligonucleotide
  Sense strand starting at position 1478 of SEQ ID NO: 3511
agguuaugaagcugaguuu

SEQ ID NO: 273309 - RNA, 19 nt, Artificial Sequence
  Description of Artificial Sequence: Synthetic oligonucleotide
  Antisense strand to SEQ ID NO: 273308
aaacucagcuucauaaccu

SEQ ID NO: 273310 - RNA, 19 nt, Artificial Sequence
  Description of Artificial Sequence: Synthetic oligonucleotide
  Sense strand starting at position 1481 of SEQ ID NO: 3511
uuaugaagcugaguuugga

SEQ ID NO: 273311 - RNA, 19 nt, Artificial Sequence
  Description of Artificial Sequence: Synthetic oligonucleotide
  Antisense strand to SEQ ID NO: 273310
uccaaacucagcuucauaa

SEQ ID NO: 273312 - RNA, 19 nt, Artificial Sequence
  Description of Artificial Sequence: Synthetic oligonucleotide
  Sense strand starting at position 1500 of SEQ ID NO: 3511
aaaucacagccuggugauu

SEQ ID NO: 273313 - RNA, 19 nt, Artificial Sequence
  Description of Artificial Sequence: Synthetic oligonucleotide
  Antisense strand to SEQ ID NO: 273312
aaucaccaggcugugauuu

SEQ ID NO: 273314 - RNA, 19 nt, Artificial Sequence
  Description of Artificial Sequence: Synthetic oligonucleotide
  Sense strand starting at position 1525 of SEQ ID NO: 3511
cuaugucaaugguuuacau

SEQ ID NO: 273315 - RNA, 19 nt, Artificial Sequence
  Description of Artificial Sequence: Synthetic oligonucleotide
  Antisense strand to SEQ ID NO: 273314
auguaaaccauugacauag

SEQ ID NO: 273316 - RNA, 19 nt, Artificial Sequence
  Description of Artificial Sequence: Synthetic oligonucleotide
  Sense strand starting at position 1527 of SEQ ID NO: 3511
augucaaugguuuacauca

SEQ ID NO: 273317 - RNA, 19 nt, Artificial Sequence
  Description of Artificial Sequence: Synthetic oligonucleotide
  Antisense strand to SEQ ID NO: 273316
ugauguaaaccauugacau

SEQ ID NO: 273318 - RNA, 19 nt, Artificial Sequence
  Description of Artificial Sequence: Synthetic oligonucleotide
  Sense strand starting at position 1545 of SEQ ID NO: 3511
aggauuaucugcgauuuaa

SEQ ID NO: 273319 - RNA, 19 nt, Artificial Sequence
  Description of Artificial Sequence: Synthetic oligonucleotide
  Antisense strand to SEQ ID NO: 273318
uuaaaucgcagauaauccu

SEQ ID NO: 273320 - RNA, 19 nt, Artificial Sequence
  Description of Artificial Sequence: Synthetic oligonucleotide
  Sense strand starting at position 1670 of SEQ ID NO: 3511
aagagauuaugcguggcca

SEQ ID NO: 273321 - RNA, 19 nt, Artificial Sequence
  Description of Artificial Sequence: Synthetic oligonucleotide
  Antisense strand to SEQ ID NO: 273320
uggccacgcauaaucucuu

SEQ ID NO: 273322 - RNA, 19 nt, Artificial Sequence
  Description of Artificial Sequence: Synthetic oligonucleotide
  Sense strand starting at position 1730 of SEQ ID NO: 3511
agcuaugaacgcugaucaa

SEQ ID NO: 273323 - RNA, 19 nt, Artificial Sequence
  Description of Artificial Sequence: Synthetic oligonucleotide
  Antisense strand to SEQ ID NO: 273322
uugaucagcguucauagcu

SEQ ID NO: 273324 - RNA, 19 nt, Artificial Sequence
  Description of Artificial Sequence: Synthetic oligonucleotide
  Sense strand starting at position 2609 of SEQ ID NO: 3511
cgcucagagcucgaagacu

SEQ ID NO: 273325 - RNA, 19 nt, Artificial Sequence
  Description of Artificial Sequence: Synthetic oligonucleotide
  Antisense strand to SEQ ID NO: 273324
agucuucgagcucugagcg

SEQ ID NO: 273326 - RNA, 19 nt, Artificial Sequence
  Description of Artificial Sequence: Synthetic oligonucleotide
  Sense strand starting at position 2852 of SEQ ID NO: 3511
agcaucucgccugcuuaua

SEQ ID NO: 273327 - RNA, 19 nt, Artificial Sequence
  Description of Artificial Sequence: Synthetic oligonucleotide
  Antisense strand to SEQ ID NO: 273326
uauaagcaggcgagaugcu

SEQ ID NO: 273328 - RNA, 19 nt, Artificial Sequence
  Description of Artificial Sequence: Synthetic oligonucleotide
  Sense strand starting at position 2853 of SEQ ID NO: 3511
gcaucucgccugcuuauaa

SEQ ID NO: 273329 - RNA, 19 nt, Artificial Sequence
  Description of Artificial Sequence: Synthetic oligonucleotide
  Antisense strand to SEQ ID NO: 273328
uuauaagcaggcgagaugc

SEQ ID NO: 273330 - RNA, 19 nt, Artificial Sequence
  Description of Artificial Sequence: Synthetic oligonucleotide
  Sense strand starting at position 2911 of SEQ ID NO: 3511
gaaggccucuuguuaggga

SEQ ID NO: 273331 - RNA, 19 nt, Artificial Sequence
  Description of Artificial Sequence: Synthetic oligonucleotide
  Antisense strand to SEQ ID NO: 273330
ucccuaacaagaggccuuc

SEQ ID NO: 273332 - RNA, 19 nt, Artificial Sequence
  Description of Artificial Sequence: Synthetic oligonucleotide
  Sense strand starting at position 3176 of SEQ ID NO: 3511
ggagguauauaucaaauag

SEQ ID NO: 273333 - RNA, 19 nt, Artificial Sequence
  Description of Artificial Sequence: Synthetic oligonucleotide
  Antisense strand to SEQ ID NO: 273332
cuauuugauauauaccucc

SEQ ID NO: 273334 - RNA, 19 nt, Artificial Sequence
  Description of Artificial Sequence: Synthetic oligonucleotide
  Sense strand starting at position 3180 of SEQ ID NO: 3511
guauauaucaaauagugug

SEQ ID NO: 273335 - RNA, 19 nt, Artificial Sequence
  Description of Artificial Sequence: Synthetic oligonucleotide
  Antisense strand to SEQ ID NO: 273334
cacacuauuugauauauac

SEQ ID NO: 273336 - RNA, 19 nt, Artificial Sequence
  Description of Artificial Sequence: Synthetic oligonucleotide
  Sense strand starting at position 3185 of SEQ ID NO: 3511
uaucaaauagugugggauu

SEQ ID NO: 273337 - RNA, 19 nt, Artificial Sequence
  Description of Artificial Sequence: Synthetic oligonucleotide
  Antisense strand to SEQ ID NO: 273336
aaucccacacuauuugaua

SEQ ID NO: 273338 - RNA, 19 nt, Artificial Sequence
  Description of Artificial Sequence: Synthetic oligonucleotide
  Sense strand starting at position 3349 of SEQ ID NO: 3511
acaucuuaagguggaauca

SEQ ID NO: 273339 - RNA, 19 nt, Artificial Sequence
  Description of Artificial Sequence: Synthetic oligonucleotide
  Antisense strand to SEQ ID NO: 273338
ugauuccaccuuaagaugu

SEQ ID NO: 273340 - RNA, 19 nt, Artificial Sequence
  Description of Artificial Sequence: Synthetic oligonucleotide
  Sense strand starting at position 3358 of SEQ ID NO: 3511
gguggaaucauaggucauu

SEQ ID NO: 273341 - RNA, 19 nt, Artificial Sequence
  Description of Artificial Sequence: Synthetic oligonucleotide
  Antisense strand to SEQ ID NO: 273340
aaugaccuaugauuccacc

SEQ ID NO: 273342 - RNA, 19 nt, Artificial Sequence
  Description of Artificial Sequence: Synthetic oligonucleotide
  Sense strand starting at position 3359 of SEQ ID NO: 3511
guggaaucauaggucauug

SEQ ID NO: 273343 - RNA, 19 nt, Artificial Sequence
  Description of Artificial Sequence: Synthetic oligonucleotide
  Antisense strand to SEQ ID NO: 273342
caaugaccuaugauuccac

SEQ ID NO: 273344 - RNA, 19 nt, Artificial Sequence
  Description of Artificial Sequence: Synthetic oligonucleotide
  Sense strand starting at position 3364 of SEQ ID NO: 3511
aucauaggucauugauuau

SEQ ID NO: 273345 - RNA, 19 nt, Artificial Sequence
  Description of Artificial Sequence: Synthetic oligonucleotide
  Antisense strand to SEQ ID NO: 273344
auaaucaaugaccuaugau

SEQ ID NO: 273346 - RNA, 19 nt, Artificial Sequence
  Description of Artificial Sequence: Synthetic oligonucleotide
  Sense strand starting at position 3397 of SEQ ID NO: 3511
guaacauagcuauaaguuu

SEQ ID NO: 273347 - RNA, 19 nt, Artificial Sequence
  Description of Artificial Sequence: Synthetic oligonucleotide
  Antisense strand to SEQ ID NO: 273346
aaacuuauagcuauguuac

SEQ ID NO: 273348 - RNA, 19 nt, Artificial Sequence
  Description of Artificial Sequence: Synthetic oligonucleotide
  Sense strand starting at position 3404 of SEQ ID NO: 3511
agcuauaaguuucucuuga

SEQ ID NO: 273349 - RNA, 19 nt, Artificial Sequence
  Description of Artificial Sequence: Synthetic oligonucleotide
  Antisense strand to SEQ ID NO: 273348
ucaagagaaacuuauagcu

SEQ ID NO: 273350 - RNA, 19 nt, Artificial Sequence
  Description of Artificial Sequence: Synthetic oligonucleotide
  Sense strand starting at position 3405 of SEQ ID NO: 3511
gcuauaaguuucucuugag

SEQ ID NO: 273351 - RNA, 19 nt, Artificial Sequence
  Description of Artificial Sequence: Synthetic oligonucleotide
  Antisense strand to SEQ ID NO: 273350
cucaagagaaacuuauagc

SEQ ID NO: 273352 - RNA, 19 nt, Artificial Sequence
  Description of Artificial Sequence: Synthetic oligonucleotide
  Sense strand starting at position 3502 of SEQ ID NO: 3511
auguuuccuccuggaauca

SEQ ID NO: 273353 - RNA, 19 nt, Artificial Sequence
  Description of Artificial Sequence: Synthetic oligonucleotide
  Antisense strand to SEQ ID NO: 273352
ugauuccaggaggaaacau

SEQ ID NO: 273354 - RNA, 19 nt, Artificial Sequence
  Description of Artificial Sequence: Synthetic oligonucleotide
  Sense strand starting at position 3503 of SEQ ID NO: 3511
uguuuccuccuggaaucaa

SEQ ID NO: 273355 - RNA, 19 nt, Artificial Sequence
  Description of Artificial Sequence: Synthetic oligonucleotide
  Antisense strand to SEQ ID NO: 273354
uugauuccaggaggaaaca

SEQ ID NO: 273356 - RNA, 19 nt, Artificial Sequence
  Description of Artificial Sequence: Synthetic oligonucleotide
  Sense strand starting at position 65 of SEQ ID NO: 3512
cugugagauccauaugcuu

SEQ ID NO: 273357 - RNA, 19 nt, Artificial Sequence
  Description of Artificial Sequence: Synthetic oligonucleotide
  Antisense strand to SEQ ID NO: 273356
aagcauauggaucucacag

SEQ ID NO: 273358 - RNA, 19 nt, Artificial Sequence
  Description of Artificial Sequence: Synthetic oligonucleotide
  Sense strand starting at position 254 of SEQ ID NO: 3512
ggaguuuccuaauuauuaa

SEQ ID NO: 273359 - RNA, 19 nt, Artificial Sequence
  Description of Artificial Sequence: Synthetic oligonucleotide
  Antisense strand to SEQ ID NO: 273358
uuaauaauuaggaaacucc

SEQ ID NO: 273360 - RNA, 19 nt, Artificial Sequence
  Description of Artificial Sequence: Synthetic oligonucleotide
  Sense strand starting at position 548 of SEQ ID NO: 3512
auaauagcagcguaaucaa

SEQ ID NO: 273361 - RNA, 19 nt, Artificial Sequence
  Description of Artificial Sequence: Synthetic oligonucleotide
  Antisense strand to SEQ ID NO: 273360
uugauuacgcugcuauuau

SEQ ID NO: 273362 - RNA, 19 nt, Artificial Sequence
  Description of Artificial Sequence: Synthetic oligonucleotide
  Sense strand starting at position 570 of SEQ ID NO: 3512
acaggcuuccuccauaaug

SEQ ID NO: 273363 - RNA, 19 nt, Artificial Sequence
  Description of Artificial Sequence: Synthetic oligonucleotide
  Antisense strand to SEQ ID NO: 273362
cauuauggaggaagccugu

SEQ ID NO: 273364 - RNA, 19 nt, Artificial Sequence
  Description of Artificial Sequence: Synthetic oligonucleotide
  Sense strand starting at position 572 of SEQ ID NO: 3512
aggcuuccuccauaaugac

SEQ ID NO: 273365 - RNA, 19 nt, Artificial Sequence
  Description of Artificial Sequence: Synthetic oligonucleotide
  Antisense strand to SEQ ID NO: 273364
gucauuauggaggaagccu

SEQ ID NO: 273366 - RNA, 19 nt, Artificial Sequence
  Description of Artificial Sequence: Synthetic oligonucleotide
  Sense strand starting at position 686 of SEQ ID NO: 3512
uguuauagugcauauacau

SEQ ID NO: 273367 - RNA, 19 nt, Artificial Sequence
  Description of Artificial Sequence: Synthetic oligonucleotide
  Antisense strand to SEQ ID NO: 273366
auguauaugcacuauaaca

SEQ ID NO: 273368 - RNA, 19 nt, Artificial Sequence
  Description of Artificial Sequence: Synthetic oligonucleotide
  Sense strand starting at position 730 of SEQ ID NO: 3512
gguaguccauaauuaagag

SEQ ID NO: 273369 - RNA, 19 nt, Artificial Sequence
  Description of Artificial Sequence: Synthetic oligonucleotide
  Antisense strand to SEQ ID NO: 273368
cucuuaauuauggacuacc

SEQ ID NO: 273370 - RNA, 19 nt, Artificial Sequence
  Description of Artificial Sequence: Synthetic oligonucleotide
  Sense strand starting at position 827 of SEQ ID NO: 3512
gcuagucaugaaugaaauu

SEQ ID NO: 273371 - RNA, 19 nt, Artificial Sequence
  Description of Artificial Sequence: Synthetic oligonucleotide
  Antisense strand to SEQ ID NO: 273370
aauuucauucaugacuagc

SEQ ID NO: 273372 - RNA, 19 nt, Artificial Sequence
  Description of Artificial Sequence: Synthetic oligonucleotide
  Sense strand starting at position 867 of SEQ ID NO: 3512
uaacgaagccauugauuga

SEQ ID NO: 273373 - RNA, 19 nt, Artificial Sequence
  Description of Artificial Sequence: Synthetic oligonucleotide
  Antisense strand to SEQ ID NO: 273372
ucaaucaauggcuucguua

SEQ ID NO: 273374 - RNA, 19 nt, Artificial Sequence
  Description of Artificial Sequence: Synthetic oligonucleotide
  Sense strand starting at position 1020 of SEQ ID NO: 3512
ugcugagagacaugcauaa

SEQ ID NO: 273375 - RNA, 19 nt, Artificial Sequence
  Description of Artificial Sequence: Synthetic oligonucleotide
  Antisense strand to SEQ ID NO: 273374
uuaugcaugucucucagca

SEQ ID NO: 273376 - RNA, 19 nt, Artificial Sequence
  Description of Artificial Sequence: Synthetic oligonucleotide
  Sense strand starting at position 1202 of SEQ ID NO: 3512
ggaacuaucuagccaauau

SEQ ID NO: 273377 - RNA, 19 nt, Artificial Sequence
  Description of Artificial Sequence: Synthetic oligonucleotide
  Antisense strand to SEQ ID NO: 273376
auauuggcuagauaguucc

SEQ ID NO: 273378 - RNA, 19 nt, Artificial Sequence
  Description of Artificial Sequence: Synthetic oligonucleotide
  Sense strand starting at position 1255 of SEQ ID NO: 3512
gcgaaaucugacgagcaga

SEQ ID NO: 273379 - RNA, 19 nt, Artificial Sequence
  Description of Artificial Sequence: Synthetic oligonucleotide
  Antisense strand to SEQ ID NO: 273378
ucugcucgucagauuucgc

SEQ ID NO: 273380 - RNA, 19 nt, Artificial Sequence
  Description of Artificial Sequence: Synthetic oligonucleotide
  Sense strand starting at position 1289 of SEQ ID NO: 3512
ggaauuuaggcgcguggga

SEQ ID NO: 273381 - RNA, 19 nt, Artificial Sequence
  Description of Artificial Sequence: Synthetic oligonucleotide
  Antisense strand to SEQ ID NO: 273380
ucccacgcgccuaaauucc

SEQ ID NO: 273382 - RNA, 19 nt, Artificial Sequence
  Description of Artificial Sequence: Synthetic oligonucleotide
  Sense strand starting at position 1431 of SEQ ID NO: 3512
agagcuugugcccaggauu

SEQ ID NO: 273383 - RNA, 19 nt, Artificial Sequence
  Description of Artificial Sequence: Synthetic oligonucleotide
  Antisense strand to SEQ ID NO: 273382
aauccugggcacaagcucu

SEQ ID NO: 273384 - RNA, 19 nt, Artificial Sequence
  Description of Artificial Sequence: Synthetic oligonucleotide
  Sense strand starting at position 1502 of SEQ ID NO: 3512
gaggaugcucucgggaaau

SEQ ID NO: 273385 - RNA, 19 nt, Artificial Sequence
  Description of Artificial Sequence: Synthetic oligonucleotide
  Antisense strand to SEQ ID NO: 273384
auuucccgagagcauccuc

SEQ ID NO: 273386 - RNA, 19 nt, Artificial Sequence
  Description of Artificial Sequence: Synthetic oligonucleotide
  Sense strand starting at position 1513 of SEQ ID NO: 3512
cgggaaaucgucuaacaaa

SEQ ID NO: 273387 - RNA, 19 nt, Artificial Sequence
  Description of Artificial Sequence: Synthetic oligonucleotide
  Antisense strand to SEQ ID NO: 273386
uuuguuagacgauuucccg

SEQ ID NO: 273388 - RNA, 19 nt, Artificial Sequence
  Description of Artificial Sequence: Synthetic oligonucleotide
  Sense strand starting at position 1727 of SEQ ID NO: 3512
ggcagaaccuuaccugaua

SEQ ID NO: 273389 - RNA, 19 nt, Artificial Sequence
  Description of Artificial Sequence: Synthetic oligonucleotide
  Antisense strand to SEQ ID NO: 273388
uaucagguaagguucugcc

SEQ ID NO: 273390 - RNA, 19 nt, Artificial Sequence
  Description of Artificial Sequence: Synthetic oligonucleotide
  Sense strand starting at position 1741 of SEQ ID NO: 3512
ugauacuccggguacucaa

SEQ ID NO: 273391 - RNA, 19 nt, Artificial Sequence
  Description of Artificial Sequence: Synthetic oligonucleotide
  Antisense strand to SEQ ID NO: 273390
uugaguacccggaguauca

SEQ ID NO: 273392 - RNA, 19 nt, Artificial Sequence
  Description of Artificial Sequence: Synthetic oligonucleotide
  Sense strand starting at position 2341 of SEQ ID NO: 3512
gggugucagaugggugaau

SEQ ID NO: 273393 - RNA, 19 nt, Artificial Sequence
  Description of Artificial Sequence: Synthetic oligonucleotide
  Antisense strand to SEQ ID NO: 273392
auucacccaucugacaccc

SEQ ID NO: 273394 - RNA, 19 nt, Artificial Sequence
  Description of Artificial Sequence: Synthetic oligonucleotide
  Sense strand starting at position 2599 of SEQ ID NO: 3512
gggaacaaauggcuuuauu

SEQ ID NO: 273395 - RNA, 19 nt, Artificial Sequence
  Description of Artificial Sequence: Synthetic oligonucleotide
  Antisense strand to SEQ ID NO: 273394
aauaaagccauuuguuccc

SEQ ID NO: 273396 - RNA, 19 nt, Artificial Sequence
  Description of Artificial Sequence: Synthetic oligonucleotide
  Sense strand starting at position 2735 of SEQ ID NO: 3512
cuugguaucagaugaaagc

SEQ ID NO: 273397 - RNA, 19 nt, Artificial Sequence
  Description of Artificial Sequence: Synthetic oligonucleotide
  Antisense strand to SEQ ID NO: 273396
gcuuucaucugauaccaag

SEQ ID NO: 273398 - RNA, 19 nt, Artificial Sequence
  Description of Artificial Sequence: Synthetic oligonucleotide
  Sense strand starting at position 2913 of SEQ ID NO: 3512
gaggcaauuucguccagcu

SEQ ID NO: 273399 - RNA, 19 nt, Artificial Sequence
  Description of Artificial Sequence: Synthetic oligonucleotide
  Antisense strand to SEQ ID NO: 273398
agcuggacgaaauugccuc

SEQ ID NO: 273400 - RNA, 19 nt, Artificial Sequence
  Description of Artificial Sequence: Synthetic oligonucleotide
  Sense strand starting at position 2941 of SEQ ID NO: 3512
acucgcaaaugacuuaauu

SEQ ID NO: 273401 - RNA, 19 nt, Artificial Sequence
  Description of Artificial Sequence: Synthetic oligonucleotide
  Antisense strand to SEQ ID NO: 273400
aauuaagucauuugcgagu

SEQ ID NO: 273402 - RNA, 19 nt, Artificial Sequence
  Description of Artificial Sequence: Synthetic oligonucleotide
  Sense strand starting at position 3133 of SEQ ID NO: 3512
ggauucuuagaauggucuu

SEQ ID NO: 273403 - RNA, 19 nt, Artificial Sequence
  Description of Artificial Sequence: Synthetic oligonucleotide
  Antisense strand to SEQ ID NO: 273402
aagaccauucuaagaaucc

SEQ ID NO: 273404 - RNA, 19 nt, Artificial Sequence
  Description of Artificial Sequence: Synthetic oligonucleotide
  Sense strand starting at position 3139 of SEQ ID NO: 3512
uuagaauggucuuuggcac

SEQ ID NO: 273405 - RNA, 19 nt, Artificial Sequence
  Description of Artificial Sequence: Synthetic oligonucleotide
  Antisense strand to SEQ ID NO: 273404
gugccaaagaccauucuaa

SEQ ID NO: 273406 - RNA, 19 nt, Artificial Sequence
  Description of Artificial Sequence: Synthetic oligonucleotide
  Sense strand starting at position 3146 of SEQ ID NO: 3512
ggucuuuggcacuaaauga

SEQ ID NO: 273407 - RNA, 19 nt, Artificial Sequence
  Description of Artificial Sequence: Synthetic oligonucleotide
  Antisense strand to SEQ ID NO: 273406
ucauuuagugccaaagacc

SEQ ID NO: 273408 - RNA, 19 nt, Artificial Sequence
  Description of Artificial Sequence: Synthetic oligonucleotide
  Sense strand starting at position 3169 of SEQ ID NO: 3512
cauugaacuugggcugauu

SEQ ID NO: 273409 - RNA, 19 nt, Artificial Sequence
  Description of Artificial Sequence: Synthetic oligonucleotide
  Antisense strand to SEQ ID NO: 273408
aaucagcccaaguucaaug

SEQ ID NO: 273410 - RNA, 19 nt, Artificial Sequence
  Description of Artificial Sequence: Synthetic oligonucleotide
  Sense strand starting at position 3208 of SEQ ID NO: 3512
agaggaaguuuggcuacaa

SEQ ID NO: 273411 - RNA, 19 nt, Artificial Sequence
  Description of Artificial Sequence: Synthetic oligonucleotide
  Antisense strand to SEQ ID NO: 273410
uuguagccaaacuuccucu

SEQ ID NO: 273412 - RNA, 19 nt, Artificial Sequence
  Description of Artificial Sequence: Synthetic oligonucleotide
  Sense strand starting at position 3209 of SEQ ID NO: 3512
gaggaaguuuggcuacaau

SEQ ID NO: 273413 - RNA, 19 nt, Artificial Sequence
  Description of Artificial Sequence: Synthetic oligonucleotide
  Antisense strand to SEQ ID NO: 273412
auuguagccaaacuuccuc

SEQ ID NO: 273414 - RNA, 19 nt, Artificial Sequence
  Description of Artificial Sequence: Synthetic oligonucleotide
  Sense strand starting at position 3212 of SEQ ID NO: 3512
gaaguuuggcuacaauaca

SEQ ID NO: 273415 - RNA, 19 nt, Artificial Sequence
  Description of Artificial Sequence: Synthetic oligonucleotide
  Antisense strand to SEQ ID NO: 273414
uguauuguagccaaacuuc

SEQ ID NO: 273416 - RNA, 19 nt, Artificial Sequence
  Description of Artificial Sequence: Synthetic oligonucleotide
  Sense strand starting at position 3258 of SEQ ID NO: 3512
ggaagcuuauaguuuaucu

SEQ ID NO: 273417 - RNA, 19 nt, Artificial Sequence
  Description of Artificial Sequence: Synthetic oligonucleotide
  Antisense strand to SEQ ID NO: 273416
agauaaacuauaagcuucc

SEQ ID NO: 273418 - RNA, 19 nt, Artificial Sequence
  Description of Artificial Sequence: Synthetic oligonucleotide
  Sense strand starting at position 3277 of SEQ ID NO: 3512
uguacaacacccugauguu

SEQ ID NO: 273419 - RNA, 19 nt, Artificial Sequence
  Description of Artificial Sequence: Synthetic oligonucleotide
  Antisense strand to SEQ ID NO: 273418
aacaucaggguguuguaca

SEQ ID NO: 273420 - RNA, 19 nt, Artificial Sequence
  Description of Artificial Sequence: Synthetic oligonucleotide
  Sense strand starting at position 3347 of SEQ ID NO: 3512
gucuuuacccugcacagaa

SEQ ID NO: 273421 - RNA, 19 nt, Artificial Sequence
  Description of Artificial Sequence: Synthetic oligonucleotide
  Antisense strand to SEQ ID NO: 273420
uucugugcaggguaaagac

SEQ ID NO: 273422 - RNA, 19 nt, Artificial Sequence
  Description of Artificial Sequence: Synthetic oligonucleotide
  Sense strand starting at position 3406 of SEQ ID NO: 3512
uggaguauugacggagaaa

SEQ ID NO: 273423 - RNA, 19 nt, Artificial Sequence
  Description of Artificial Sequence: Synthetic oligonucleotide
  Antisense strand to SEQ ID NO: 273422
uuucuccgucaauacucca

SEQ ID NO: 273424 - RNA, 19 nt, Artificial Sequence
  Description of Artificial Sequence: Synthetic oligonucleotide
  Sense strand starting at position 3513 of SEQ ID NO: 3512
uacugaucaggagggcaau

SEQ ID NO: 273425 - RNA, 19 nt, Artificial Sequence
  Description of Artificial Sequence: Synthetic oligonucleotide
  Antisense strand to SEQ ID NO: 273424
auugcccuccugaucagua

SEQ ID NO: 273426 - RNA, 19 nt, Artificial Sequence
  Description of Artificial Sequence: Synthetic oligonucleotide
  Sense strand starting at position 3523 of SEQ ID NO: 3512
gagggcaauuaaguaauau

SEQ ID NO: 273427 - RNA, 19 nt, Artificial Sequence
  Description of Artificial Sequence: Synthetic oligonucleotide
  Antisense strand to SEQ ID NO: 273426
auauuacuuaauugcccuc

SEQ ID NO: 273428 - RNA, 19 nt, Artificial Sequence
  Description of Artificial Sequence: Synthetic oligonucleotide
  Sense strand starting at position 3535 of SEQ ID NO: 3512
guaauaugucauugaagua

SEQ ID NO: 273429 - RNA, 19 nt, Artificial Sequence
  Description of Artificial Sequence: Synthetic oligonucleotide
  Antisense strand to SEQ ID NO: 273428
uacuucaaugacauauuac

SEQ ID NO: 273430 - RNA, 19 nt, Artificial Sequence
  Description of Artificial Sequence: Synthetic oligonucleotide
  Sense strand starting at position 3549 of SEQ ID NO: 3512
aaguaaguccuguaugaga

SEQ ID NO: 273431 - RNA, 19 nt, Artificial Sequence
  Description of Artificial Sequence: Synthetic oligonucleotide
  Antisense strand to SEQ ID NO: 273430
ucucauacaggacuuacuu

SEQ ID NO: 273432 - RNA, 19 nt, Artificial Sequence
  Description of Artificial Sequence: Synthetic oligonucleotide
  Sense strand starting at position 3559 of SEQ ID NO: 3512
uguaugagacgugucguuu

SEQ ID NO: 273433 - RNA, 19 nt, Artificial Sequence
  Description of Artificial Sequence: Synthetic oligonucleotide
  Antisense strand to SEQ ID NO: 273432
aaacgacacgucucauaca

SEQ ID NO: 273434 - RNA, 19 nt, Artificial Sequence
  Description of Artificial Sequence: Synthetic oligonucleotide
  Sense strand starting at position 3830 of SEQ ID NO: 3512
ggauucaagugauccuggu

SEQ ID NO: 273435 - RNA, 19 nt, Artificial Sequence
  Description of Artificial Sequence: Synthetic oligonucleotide
  Antisense strand to SEQ ID NO: 273434
accaggaucacuugaaucc

SEQ ID NO: 273436 - RNA, 19 nt, Artificial Sequence
  Description of Artificial Sequence: Synthetic oligonucleotide
  Sense strand starting at position 26 of SEQ ID NO: 3513
uaguguguacaguauaauc

SEQ ID NO: 273437 - RNA, 19 nt, Artificial Sequence
  Description of Artificial Sequence: Synthetic oligonucleotide
  Antisense strand to SEQ ID NO: 273436
gauuauacuguacacacua

SEQ ID NO: 273438 - RNA, 19 nt, Artificial Sequence
  Description of Artificial Sequence: Synthetic oligonucleotide
  Sense strand starting at position 254 of SEQ ID NO: 3513
uagauugacuugguuguga

SEQ ID NO: 273439 - RNA, 19 nt, Artificial Sequence
  Description of Artificial Sequence: Synthetic oligonucleotide
  Antisense strand to SEQ ID NO: 273438
ucacaaccaagucaaucua

SEQ ID NO: 273440 - RNA, 19 nt, Artificial Sequence
  Description of Artificial Sequence: Synthetic oligonucleotide
  Sense strand starting at position 256 of SEQ ID NO: 3513
gauugacuugguugugaca

SEQ ID NO: 273441 - RNA, 19 nt, Artificial Sequence
  Description of Artificial Sequence: Synthetic oligonucleotide
  Antisense strand to SEQ ID NO: 273440
ugucacaaccaagucaauc

SEQ ID NO: 273442 - RNA, 19 nt, Artificial Sequence
  Description of Artificial Sequence: Synthetic oligonucleotide
  Sense strand starting at position 299 of SEQ ID NO: 3513
cgagucugaagucaaauua

SEQ ID NO: 273443 - RNA, 19 nt, Artificial Sequence
  Description of Artificial Sequence: Synthetic oligonucleotide
  Antisense strand to SEQ ID NO: 273442
uaauuugacuucagacucg

SEQ ID NO: 273444 - RNA, 19 nt, Artificial Sequence
  Description of Artificial Sequence: Synthetic oligonucleotide
  Sense strand starting at position 476 of SEQ ID NO: 3513
ucuagacuauugucucaag

SEQ ID NO: 273445 - RNA, 19 nt, Artificial Sequence
  Description of Artificial Sequence: Synthetic oligonucleotide
  Antisense strand to SEQ ID NO: 273444
cuugagacaauagucuaga

SEQ ID NO: 273446 - RNA, 19 nt, Artificial Sequence
  Description of Artificial Sequence: Synthetic oligonucleotide
  Sense strand starting at position 488 of SEQ ID NO: 3513
ucucaaggauguuuguaca

SEQ ID NO: 273447 - RNA, 19 nt, Artificial Sequence
  Description of Artificial Sequence: Synthetic oligonucleotide
  Antisense strand to SEQ ID NO: 273446
uguacaaacauccuugaga

SEQ ID NO: 273448 - RNA, 19 nt, Artificial Sequence
  Description of Artificial Sequence: Synthetic oligonucleotide
  Sense strand starting at position 506 of SEQ ID NO: 3513
acuggacagccuugagaaa

SEQ ID NO: 273449 - RNA, 19 nt, Artificial Sequence
  Description of Artificial Sequence: Synthetic oligonucleotide
  Antisense strand to SEQ ID NO: 273448
uuucucaaggcuguccagu

SEQ ID NO: 273450 - RNA, 19 nt, Artificial Sequence
  Description of Artificial Sequence: Synthetic oligonucleotide
  Sense strand starting at position 655 of SEQ ID NO: 3513
agggaacucaggcgaaauu

SEQ ID NO: 273451 - RNA, 19 nt, Artificial Sequence
  Description of Artificial Sequence: Synthetic oligonucleotide
  Antisense strand to SEQ ID NO: 273450
aauuucgccugaguucccu

SEQ ID NO: 273452 - RNA, 19 nt, Artificial Sequence
  Description of Artificial Sequence: Synthetic oligonucleotide
  Sense strand starting at position 726 of SEQ ID NO: 3513
ugugucuuccaugaaacug

SEQ ID NO: 273453 - RNA, 19 nt, Artificial Sequence
  Description of Artificial Sequence: Synthetic oligonucleotide
  Antisense strand to SEQ ID NO: 273452
caguuucauggaagacaca

SEQ ID NO: 273454 - RNA, 19 nt, Artificial Sequence
  Description of Artificial Sequence: Synthetic oligonucleotide
  Sense strand starting at position 1345 of SEQ ID NO: 3513
agagccaacuuguuaguaa

SEQ ID NO: 273455 - RNA, 19 nt, Artificial Sequence
  Description of Artificial Sequence: Synthetic oligonucleotide
  Antisense strand to SEQ ID NO: 273454
uuacuaacaaguuggcucu

SEQ ID NO: 273456 - RNA, 19 nt, Artificial Sequence
  Description of Artificial Sequence: Synthetic oligonucleotide
  Sense strand starting at position 1364 of SEQ ID NO: 3513
ugaaguuaucuguacauca

SEQ ID NO: 273457 - RNA, 19 nt, Artificial Sequence
  Description of Artificial Sequence: Synthetic oligonucleotide
  Antisense strand to SEQ ID NO: 273456
ugauguacagauaacuuca

SEQ ID NO: 273458 - RNA, 19 nt, Artificial Sequence
  Description of Artificial Sequence: Synthetic oligonucleotide
  Sense strand starting at position 1374 of SEQ ID NO: 3513
uguacaucaauguguuaga

SEQ ID NO: 273459 - RNA, 19 nt, Artificial Sequence
  Description of Artificial Sequence: Synthetic oligonucleotide
  Antisense strand to SEQ ID NO: 273458
ucuaacacauugauguaca

SEQ ID NO: 273460 - RNA, 19 nt, Artificial Sequence
  Description of Artificial Sequence: Synthetic oligonucleotide
  Sense strand starting at position 1375 of SEQ ID NO: 3513
guacaucaauguguuagaa

SEQ ID NO: 273461 - RNA, 19 nt, Artificial Sequence
  Description of Artificial Sequence: Synthetic oligonucleotide
  Antisense strand to SEQ ID NO: 273460
uucuaacacauugauguac

SEQ ID NO: 273462 - RNA, 19 nt, Artificial Sequence
  Description of Artificial Sequence: Synthetic oligonucleotide
  Sense strand starting at position 2047 of SEQ ID NO: 3513
cgcgugguacgaguaacaa

SEQ ID NO: 273463 - RNA, 19 nt, Artificial Sequence
  Description of Artificial Sequence: Synthetic oligonucleotide
  Antisense strand to SEQ ID NO: 273462
uuguuacucguaccacgcg

SEQ ID NO: 273464 - RNA, 19 nt, Artificial Sequence
  Description of Artificial Sequence: Synthetic oligonucleotide
  Sense strand starting at position 2108 of SEQ ID NO: 3513
uuuccagaucuaggagcau

SEQ ID NO: 273465 - RNA, 19 nt, Artificial Sequence
  Description of Artificial Sequence: Synthetic oligonucleotide
  Antisense strand to SEQ ID NO: 273464
augcuccuagaucuggaaa

SEQ ID NO: 273466 - RNA, 19 nt, Artificial Sequence
  Description of Artificial Sequence: Synthetic oligonucleotide
  Sense strand starting at position 2128 of SEQ ID NO: 3513
auggacaccucgucagaga

SEQ ID NO: 273467 - RNA, 19 nt, Artificial Sequence
  Description of Artificial Sequence: Synthetic oligonucleotide
  Antisense strand to SEQ ID NO: 273466
ucucugacgagguguccau

SEQ ID NO: 273468 - RNA, 19 nt, Artificial Sequence
  Description of Artificial Sequence: Synthetic oligonucleotide
  Sense strand starting at position 2129 of SEQ ID NO: 3513
uggacaccucgucagagau

SEQ ID NO: 273469 - RNA, 19 nt, Artificial Sequence
  Description of Artificial Sequence: Synthetic oligonucleotide
  Antisense strand to SEQ ID NO: 273468
aucucugacgaggugucca

SEQ ID NO: 273470 - RNA, 19 nt, Artificial Sequence
  Description of Artificial Sequence: Synthetic oligonucleotide
  Sense strand starting at position 2311 of SEQ ID NO: 3513
ucgaaagcauccucaauaa

SEQ ID NO: 273471 - RNA, 19 nt, Artificial Sequence
  Description of Artificial Sequence: Synthetic oligonucleotide
  Antisense strand to SEQ ID NO: 273470
uuauugaggaugcuuucga

SEQ ID NO: 273472 - RNA, 19 nt, Artificial Sequence
  Description of Artificial Sequence: Synthetic oligonucleotide
  Sense strand starting at position 2411 of SEQ ID NO: 3513
gugggagaauguuuacaga

SEQ ID NO: 273473 - RNA, 19 nt, Artificial Sequence
  Description of Artificial Sequence: Synthetic oligonucleotide
  Antisense strand to SEQ ID NO: 273472
ucuguaaacauucucccac

SEQ ID NO: 273474 - RNA, 19 nt, Artificial Sequence
  Description of Artificial Sequence: Synthetic oligonucleotide
  Sense strand starting at position 2496 of SEQ ID NO: 3513
cgcaguugcagcucugaga

SEQ ID NO: 273475 - RNA, 19 nt, Artificial Sequence
  Description of Artificial Sequence: Synthetic oligonucleotide
  Antisense strand to SEQ ID NO: 273474
ucucagagcugcaacugcg

SEQ ID NO: 273476 - RNA, 19 nt, Artificial Sequence
  Description of Artificial Sequence: Synthetic oligonucleotide
  Sense strand starting at position 2527 of SEQ ID NO: 3513
uuaaauuucccgcacgcuu

SEQ ID NO: 273477 - RNA, 19 nt, Artificial Sequence
  Description of Artificial Sequence: Synthetic oligonucleotide
  Antisense strand to SEQ ID NO: 273476
aagcgugcgggaaauuuaa

SEQ ID NO: 273478 - RNA, 19 nt, Artificial Sequence
  Description of Artificial Sequence: Synthetic oligonucleotide
  Sense strand starting at position 2538 of SEQ ID NO: 3513
gcacgcuuaaaguuuguua

SEQ ID NO: 273479 - RNA, 19 nt, Artificial Sequence
  Description of Artificial Sequence: Synthetic oligonucleotide
  Antisense strand to SEQ ID NO: 273478
uaacaaacuuuaagcgugc

SEQ ID NO: 273480 - RNA, 19 nt, Artificial Sequence
  Description of Artificial Sequence: Synthetic oligonucleotide
  Sense strand starting at position 2631 of SEQ ID NO: 3513
cugauuggucuuuacuaaa

SEQ ID NO: 273481 - RNA, 19 nt, Artificial Sequence
  Description of Artificial Sequence: Synthetic oligonucleotide
  Antisense strand to SEQ ID NO: 273480
uuuaguaaagaccaaucag

SEQ ID NO: 273482 - RNA, 19 nt, Artificial Sequence
  Description of Artificial Sequence: Synthetic oligonucleotide
  Sense strand starting at position 2846 of SEQ ID NO: 3513
uucuuacgucuguaaauua

SEQ ID NO: 273483 - RNA, 19 nt, Artificial Sequence
  Description of Artificial Sequence: Synthetic oligonucleotide
  Antisense strand to SEQ ID NO: 273482
uaauuuacagacguaagaa

SEQ ID NO: 273484 - RNA, 19 nt, Artificial Sequence
  Description of Artificial Sequence: Synthetic oligonucleotide
  Sense strand starting at position 2873 of SEQ ID NO: 3513
uguugucauggugacaacu

SEQ ID NO: 273485 - RNA, 19 nt, Artificial Sequence
  Description of Artificial Sequence: Synthetic oligonucleotide
  Antisense strand to SEQ ID NO: 273484
aguugucaccaugacaaca

SEQ ID NO: 273486 - RNA, 19 nt, Artificial Sequence
  Description of Artificial Sequence: Synthetic oligonucleotide
  Sense strand starting at position 3000 of SEQ ID NO: 3513
uauuuaugcaguggagguu

SEQ ID NO: 273487 - RNA, 19 nt, Artificial Sequence
  Description of Artificial Sequence: Synthetic oligonucleotide
  Antisense strand to SEQ ID NO: 273486
aaccuccacugcauaaaua

SEQ ID NO: 273488 - RNA, 19 nt, Artificial Sequence
  Description of Artificial Sequence: Synthetic oligonucleotide
  Sense strand starting at position 3309 of SEQ ID NO: 3513
aagauuuagugggaugaca

SEQ ID NO: 273489 - RNA, 19 nt, Artificial Sequence
  Description of Artificial Sequence: Synthetic oligonucleotide
  Antisense strand to SEQ ID NO: 273488
ugucaucccacuaaaucuu

SEQ ID NO: 273490 - RNA, 19 nt, Artificial Sequence
  Description of Artificial Sequence: Synthetic oligonucleotide
  Sense strand starting at position 3323 of SEQ ID NO: 3513
ugacaucagccagaauggu

SEQ ID NO: 273491 - RNA, 19 nt, Artificial Sequence
  Description of Artificial Sequence: Synthetic oligonucleotide
  Antisense strand to SEQ ID NO: 273490
accauucuggcugauguca

SEQ ID NO: 273492 - RNA, 19 nt, Artificial Sequence
  Description of Artificial Sequence: Synthetic oligonucleotide
  Sense strand starting at position 3347 of SEQ ID NO: 3513
aggaucuaugccugaaauc

SEQ ID NO: 273493 - RNA, 19 nt, Artificial Sequence
  Description of Artificial Sequence: Synthetic oligonucleotide
  Antisense strand to SEQ ID NO: 273492
gauuucaggcauagauccu

SEQ ID NO: 273494 - RNA, 19 nt, Artificial Sequence
  Description of Artificial Sequence: Synthetic oligonucleotide
  Sense strand starting at position 3348 of SEQ ID NO: 3513
ggaucuaugccugaaaucc

SEQ ID NO: 273495 - RNA, 19 nt, Artificial Sequence
  Description of Artificial Sequence: Synthetic oligonucleotide
  Antisense strand to SEQ ID NO: 273494
ggauuucaggcauagaucc

SEQ ID NO: 273496 - RNA, 19 nt, Artificial Sequence
  Description of Artificial Sequence: Synthetic oligonucleotide
  Sense strand starting at position 3600 of SEQ ID NO: 3513
ugacuuagcaacugguaga

SEQ ID NO: 273497 - RNA, 19 nt, Artificial Sequence
  Description of Artificial Sequence: Synthetic oligonucleotide
  Antisense strand to SEQ ID NO: 273496
ucuaccaguugcuaaguca

SEQ ID NO: 273498 - RNA, 19 nt, Artificial Sequence
  Description of Artificial Sequence: Synthetic oligonucleotide
  Sense strand starting at position 3661 of SEQ ID NO: 3513
guuauuauucgacauguuu

SEQ ID NO: 273499 - RNA, 19 nt, Artificial Sequence
  Description of Artificial Sequence: Synthetic oligonucleotide
  Antisense strand to SEQ ID NO: 273498
aaacaugucgaauaauaac

SEQ ID NO: 273500 - RNA, 19 nt, Artificial Sequence
  Description of Artificial Sequence: Synthetic oligonucleotide
  Sense strand starting at position 3676 of SEQ ID NO: 3513
guuugauaguuccuuggaa

SEQ ID NO: 273501 - RNA, 19 nt, Artificial Sequence
  Description of Artificial Sequence: Synthetic oligonucleotide
  Antisense strand to SEQ ID NO: 273500
uuccaaggaacuaucaaac

SEQ ID NO: 273502 - RNA, 19 nt, Artificial Sequence
  Description of Artificial Sequence: Synthetic oligonucleotide
  Sense strand starting at position 3677 of SEQ ID NO: 3513
uuugauaguuccuuggaaa

SEQ ID NO: 273503 - RNA, 19 nt, Artificial Sequence
  Description of Artificial Sequence: Synthetic oligonucleotide
  Antisense strand to SEQ ID NO: 273502
uuuccaaggaacuaucaaa

SEQ ID NO: 273504 - RNA, 19 nt, Artificial Sequence
  Description of Artificial Sequence: Synthetic oligonucleotide
  Sense strand starting at position 3701 of SEQ ID NO: 3513
acucaugaggcuuauuguu

SEQ ID NO: 273505 - RNA, 19 nt, Artificial Sequence
  Description of Artificial Sequence: Synthetic oligonucleotide
  Antisense strand to SEQ ID NO: 273504
aacaauaagccucaugagu

SEQ ID NO: 273506 - RNA, 19 nt, Artificial Sequence
  Description of Artificial Sequence: Synthetic oligonucleotide
  Sense strand starting at position 3709 of SEQ ID NO: 3513
ggcuuauuguuauuuaguc

SEQ ID NO: 273507 - RNA, 19 nt, Artificial Sequence
  Description of Artificial Sequence: Synthetic oligonucleotide
  Antisense strand to SEQ ID NO: 273506
gacuaaauaacaauaagcc

SEQ ID NO: 273508 - RNA, 19 nt, Artificial Sequence
  Description of Artificial Sequence: Synthetic oligonucleotide
  Sense strand starting at position 3710 of SEQ ID NO: 3513
gcuuauuguuauuuagucu

SEQ ID NO: 273509 - RNA, 19 nt, Artificial Sequence
  Description of Artificial Sequence: Synthetic oligonucleotide
  Antisense strand to SEQ ID NO: 273508
agacuaaauaacaauaagc

SEQ ID NO: 273510 - RNA, 19 nt, Artificial Sequence
  Description of Artificial Sequence: Synthetic oligonucleotide
  Sense strand starting at position 3716 of SEQ ID NO: 3513
uguuauuuagucugacuuc

SEQ ID NO: 273511 - RNA, 19 nt, Artificial Sequence
  Description of Artificial Sequence: Synthetic oligonucleotide
  Antisense strand to SEQ ID NO: 273510
gaagucagacuaaauaaca

SEQ ID NO: 273512 - RNA, 19 nt, Artificial Sequence
  Description of Artificial Sequence: Synthetic oligonucleotide
  Sense strand starting at position 3743 of SEQ ID NO: 3513
caaguauguuugucaaaug

SEQ ID NO: 273513 - RNA, 19 nt, Artificial Sequence
  Description of Artificial Sequence: Synthetic oligonucleotide
  Antisense strand to SEQ ID NO: 273512
cauuugacaaacauacuug

SEQ ID NO: 273514 - RNA, 19 nt, Artificial Sequence
  Description of Artificial Sequence: Synthetic oligonucleotide
  Sense strand starting at position 3794 of SEQ ID NO: 3513
gaggcaugugugggaacuu

SEQ ID NO: 273515 - RNA, 19 nt, Artificial Sequence
  Description of Artificial Sequence: Synthetic oligonucleotide
  Antisense strand to SEQ ID NO: 273514
aaguucccacacaugccuc

SEQ ID NO: 273516 - RNA, 19 nt, Artificial Sequence
  Description of Artificial Sequence: Synthetic oligonucleotide
  Sense strand starting at position 26 of SEQ ID NO: 3513
uaguguguacaguauaauc

SEQ ID NO: 273517 - RNA, 19 nt, Artificial Sequence
  Description of Artificial Sequence: Synthetic oligonucleotide
  Antisense strand to SEQ ID NO: 273516
gauuauacuguacacacua

SEQ ID NO: 273518 - RNA, 19 nt, Artificial Sequence
  Description of Artificial Sequence: Synthetic oligonucleotide
  Sense strand starting at position 254 of SEQ ID NO: 3513
uagauugacuugguuguga

SEQ ID NO: 273519 - RNA, 19 nt, Artificial Sequence
  Description of Artificial Sequence: Synthetic oligonucleotide
  Antisense strand to SEQ ID NO: 273518
ucacaaccaagucaaucua

SEQ ID NO: 273520 - RNA, 19 nt, Artificial Sequence
  Description of Artificial Sequence: Synthetic oligonucleotide
  Sense strand starting at position 256 of SEQ ID NO: 3513
gauugacuugguugugaca

SEQ ID NO: 273521 - RNA, 19 nt, Artificial Sequence
  Description of Artificial Sequence: Synthetic oligonucleotide
  Antisense strand to SEQ ID NO: 273520
ugucacaaccaagucaauc

SEQ ID NO: 273522 - RNA, 19 nt, Artificial Sequence
  Description of Artificial Sequence: Synthetic oligonucleotide
  Sense strand starting at position 299 of SEQ ID NO: 3513
cgagucugaagucaaauua

SEQ ID NO: 273523 - RNA, 19 nt, Artificial Sequence
  Description of Artificial Sequence: Synthetic oligonucleotide
  Antisense strand to SEQ ID NO: 273522
uaauuugacuucagacucg

SEQ ID NO: 273524 - RNA, 19 nt, Artificial Sequence
  Description of Artificial Sequence: Synthetic oligonucleotide
  Sense strand starting at position 476 of SEQ ID NO: 3513
ucuagacuauugucucaag

SEQ ID NO: 273525 - RNA, 19 nt, Artificial Sequence
  Description of Artificial Sequence: Synthetic oligonucleotide
  Antisense strand to SEQ ID NO: 273524
cuugagacaauagucuaga

SEQ ID NO: 273526 - RNA, 19 nt, Artificial Sequence
  Description of Artificial Sequence: Synthetic oligonucleotide
  Sense strand starting at position 488 of SEQ ID NO: 3513
ucucaaggauguuuguaca

SEQ ID NO: 273527 - RNA, 19 nt, Artificial Sequence
  Description of Artificial Sequence: Synthetic oligonucleotide
  Antisense strand to SEQ ID NO: 273526
uguacaaacauccuugaga

SEQ ID NO: 273528 - RNA, 19 nt, Artificial Sequence
  Description of Artificial Sequence: Synthetic oligonucleotide
  Sense strand starting at position 506 of SEQ ID NO: 3513
acuggacagccuugagaaa

SEQ ID NO: 273529 - RNA, 19 nt, Artificial Sequence
  Description of Artificial Sequence: Synthetic oligonucleotide
  Antisense strand to SEQ ID NO: 273528
uuucucaaggcuguccagu

SEQ ID NO: 273530 - RNA, 19 nt, Artificial Sequence
  Description of Artificial Sequence: Synthetic oligonucleotide
  Sense strand starting at position 655 of SEQ ID NO: 3513
agggaacucaggcgaaauu

SEQ ID NO: 273531 - RNA, 19 nt, Artificial Sequence
  Description of Artificial Sequence: Synthetic oligonucleotide
  Antisense strand to SEQ ID NO: 273530
aauuucgccugaguucccu

SEQ ID NO: 273532 - RNA, 19 nt, Artificial Sequence
  Description of Artificial Sequence: Synthetic oligonucleotide
  Sense strand starting at position 726 of SEQ ID NO: 3513
ugugucuuccaugaaacug

SEQ ID NO: 273533 - RNA, 19 nt, Artificial Sequence
  Description of Artificial Sequence: Synthetic oligonucleotide
  Antisense strand to SEQ ID NO: 273532
caguuucauggaagacaca

SEQ ID NO: 273534 - RNA, 19 nt, Artificial Sequence
  Description of Artificial Sequence: Synthetic oligonucleotide
  Sense strand starting at position 1345 of SEQ ID NO: 3513
agagccaacuuguuaguaa

SEQ ID NO: 273535 - RNA, 19 nt, Artificial Sequence
  Description of Artificial Sequence: Synthetic oligonucleotide
  Antisense strand to SEQ ID NO: 273534
uuacuaacaaguuggcucu

SEQ ID NO: 273536 - RNA, 19 nt, Artificial Sequence
  Description of Artificial Sequence: Synthetic oligonucleotide
  Sense strand starting at position 1364 of SEQ ID NO: 3513
ugaaguuaucuguacauca

SEQ ID NO: 273537 - RNA, 19 nt, Artificial Sequence
  Description of Artificial Sequence: Synthetic oligonucleotide
  Antisense strand to SEQ ID NO: 273536
ugauguacagauaacuuca

SEQ ID NO: 273538 - RNA, 19 nt, Artificial Sequence
  Description of Artificial Sequence: Synthetic oligonucleotide
  Sense strand starting at position 1374 of SEQ ID NO: 3513
uguacaucaauguguuaga

SEQ ID NO: 273539 - RNA, 19 nt, Artificial Sequence
  Description of Artificial Sequence: Synthetic oligonucleotide
  Antisense strand to SEQ ID NO: 273538
ucuaacacauugauguaca

SEQ ID NO: 273540 - RNA, 19 nt, Artificial Sequence
  Description of Artificial Sequence: Synthetic oligonucleotide
  Sense strand starting at position 1375 of SEQ ID NO: 3513
guacaucaauguguuagaa

SEQ ID NO: 273541 - RNA, 19 nt, Artificial Sequence
  Description of Artificial Sequence: Synthetic oligonucleotide
  Antisense strand to SEQ ID NO: 273540
uucuaacacauugauguac

SEQ ID NO: 273542 - RNA, 19 nt, Artificial Sequence
  Description of Artificial Sequence: Synthetic oligonucleotide
  Sense strand starting at position 2047 of SEQ ID NO: 3513
cgcgugguacgaguaacaa

SEQ ID NO: 273543 - RNA, 19 nt, Artificial Sequence
  Description of Artificial Sequence: Synthetic oligonucleotide
  Antisense strand to SEQ ID NO: 273542
uuguuacucguaccacgcg

SEQ ID NO: 273544 - RNA, 19 nt, Artificial Sequence
  Description of Artificial Sequence: Synthetic oligonucleotide
  Sense strand starting at position 2108 of SEQ ID NO: 3513
uuuccagaucuaggagcau

SEQ ID NO: 273545 - RNA, 19 nt, Artificial Sequence
  Description of Artificial Sequence: Synthetic oligonucleotide
  Antisense strand to SEQ ID NO: 273544
augcuccuagaucuggaaa

SEQ ID NO: 273546 - RNA, 19 nt, Artificial Sequence
  Description of Artificial Sequence: Synthetic oligonucleotide
  Sense strand starting at position 2128 of SEQ ID NO: 3513
auggacaccucgucagaga

SEQ ID NO: 273547 - RNA, 19 nt, Artificial Sequence
  Description of Artificial Sequence: Synthetic oligonucleotide
  Antisense strand to SEQ ID NO: 273546
ucucugacgagguguccau

SEQ ID NO: 273548 - RNA, 19 nt, Artificial Sequence
  Description of Artificial Sequence: Synthetic oligonucleotide
  Sense strand starting at position 2129 of SEQ ID NO: 3513
uggacaccucgucagagau

SEQ ID NO: 273549 - RNA, 19 nt, Artificial Sequence
  Description of Artificial Sequence: Synthetic oligonucleotide
  Antisense strand to SEQ ID NO: 273548
aucucugacgaggugucca

SEQ ID NO: 273550 - RNA, 19 nt, Artificial Sequence
  Description of Artificial Sequence: Synthetic oligonucleotide
  Sense strand starting at position 2311 of SEQ ID NO: 3513
ucgaaagcauccucaauaa

SEQ ID NO: 273551 - RNA, 19 nt, Artificial Sequence
  Description of Artificial Sequence: Synthetic oligonucleotide
  Antisense strand to SEQ ID NO: 273550
uuauugaggaugcuuucga

SEQ ID NO: 273552 - RNA, 19 nt, Artificial Sequence
  Description of Artificial Sequence: Synthetic oligonucleotide
  Sense strand starting at position 2411 of SEQ ID NO: 3513
gugggagaauguuuacaga

SEQ ID NO: 273553 - RNA, 19 nt, Artificial Sequence
  Description of Artificial Sequence: Synthetic oligonucleotide
  Antisense strand to SEQ ID NO: 273552
ucuguaaacauucucccac

SEQ ID NO: 273554 - RNA, 19 nt, Artificial Sequence
  Description of Artificial Sequence: Synthetic oligonucleotide
  Sense strand starting at position 2496 of SEQ ID NO: 3513
cgcaguugcagcucugaga

SEQ ID NO: 273555 - RNA, 19 nt, Artificial Sequence
  Description of Artificial Sequence: Synthetic oligonucleotide
  Antisense strand to SEQ ID NO: 273554
ucucagagcugcaacugcg

SEQ ID NO: 273556 - RNA, 19 nt, Artificial Sequence
  Description of Artificial Sequence: Synthetic oligonucleotide
  Sense strand starting at position 2527 of SEQ ID NO: 3513
uuaaauuucccgcacgcuu

SEQ ID NO: 273557 - RNA, 19 nt, Artificial Sequence
  Description of Artificial Sequence: Synthetic oligonucleotide
  Antisense strand to SEQ ID NO: 273556
aagcgugcgggaaauuuaa

SEQ ID NO: 273558 - RNA, 19 nt, Artificial Sequence
  Description of Artificial Sequence: Synthetic oligonucleotide
  Sense strand starting at position 2538 of SEQ ID NO: 3513
gcacgcuuaaaguuuguua

SEQ ID NO: 273559 - RNA, 19 nt, Artificial Sequence
  Description of Artificial Sequence: Synthetic oligonucleotide
  Antisense strand to SEQ ID NO: 273558
uaacaaacuuuaagcgugc

SEQ ID NO: 273560 - RNA, 19 nt, Artificial Sequence
  Description of Artificial Sequence: Synthetic oligonucleotide
  Sense strand starting at position 2631 of SEQ ID NO: 3513
cugauuggucuuuacuaaa

SEQ ID NO: 273561 - RNA, 19 nt, Artificial Sequence
  Description of Artificial Sequence: Synthetic oligonucleotide
  Antisense strand to SEQ ID NO: 273560
uuuaguaaagaccaaucag

SEQ ID NO: 273562 - RNA, 19 nt, Artificial Sequence
  Description of Artificial Sequence: Synthetic oligonucleotide
  Sense strand starting at position 2846 of SEQ ID NO: 3513
uucuuacgucuguaaauua

SEQ ID NO: 273563 - RNA, 19 nt, Artificial Sequence
  Description of Artificial Sequence: Synthetic oligonucleotide
  Antisense strand to SEQ ID NO: 273562
uaauuuacagacguaagaa

SEQ ID NO: 273564 - RNA, 19 nt, Artificial Sequence
  Description of Artificial Sequence: Synthetic oligonucleotide
  Sense strand starting at position 2873 of SEQ ID NO: 3513
uguugucauggugacaacu

SEQ ID NO: 273565 - RNA, 19 nt, Artificial Sequence
  Description of Artificial Sequence: Synthetic oligonucleotide
  Antisense strand to SEQ ID NO: 273564
aguugucaccaugacaaca

SEQ ID NO: 273566 - RNA, 19 nt, Artificial Sequence
  Description of Artificial Sequence: Synthetic oligonucleotide
  Sense strand starting at position 3000 of SEQ ID NO: 3513
uauuuaugcaguggagguu

SEQ ID NO: 273567 - RNA, 19 nt, Artificial Sequence
  Description of Artificial Sequence: Synthetic oligonucleotide
  Antisense strand to SEQ ID NO: 273566
aaccuccacugcauaaaua

SEQ ID NO: 273568 - RNA, 19 nt, Artificial Sequence
  Description of Artificial Sequence: Synthetic oligonucleotide
  Sense strand starting at position 3309 of SEQ ID NO: 3513
aagauuuagugggaugaca

SEQ ID NO: 273569 - RNA, 19 nt, Artificial Sequence
  Description of Artificial Sequence: Synthetic oligonucleotide
  Antisense strand to SEQ ID NO: 273568
ugucaucccacuaaaucuu

SEQ ID NO: 273570 - RNA, 19 nt, Artificial Sequence
  Description of Artificial Sequence: Synthetic oligonucleotide
  Sense strand starting at position 3323 of SEQ ID NO: 3513
ugacaucagccagaauggu

SEQ ID NO: 273571 - RNA, 19 nt, Artificial Sequence
  Description of Artificial Sequence: Synthetic oligonucleotide
  Antisense strand to SEQ ID NO: 273570
accauucuggcugauguca

SEQ ID NO: 273572 - RNA, 19 nt, Artificial Sequence
  Description of Artificial Sequence: Synthetic oligonucleotide
  Sense strand starting at position 3347 of SEQ ID NO: 3513
aggaucuaugccugaaauc

SEQ ID NO: 273573 - RNA, 19 nt, Artificial Sequence
  Description of Artificial Sequence: Synthetic oligonucleotide
  Antisense strand to SEQ ID NO: 273572
gauuucaggcauagauccu

SEQ ID NO: 273574 - RNA, 19 nt, Artificial Sequence
  Description of Artificial Sequence: Synthetic oligonucleotide
  Sense strand starting at position 3348 of SEQ ID NO: 3513
ggaucuaugccugaaaucc

SEQ ID NO: 273575 - RNA, 19 nt, Artificial Sequence
  Description of Artificial Sequence: Synthetic oligonucleotide
  Antisense strand to SEQ ID NO: 273574
ggauuucaggcauagaucc

SEQ ID NO: 273576 - RNA, 19 nt, Artificial Sequence
  Description of Artificial Sequence: Synthetic oligonucleotide
  Sense strand starting at position 3600 of SEQ ID NO: 3513
ugacuuagcaacugguaga

SEQ ID NO: 273577 - RNA, 19 nt, Artificial Sequence
  Description of Artificial Sequence: Synthetic oligonucleotide
  Antisense strand to SEQ ID NO: 273576
ucuaccaguugcuaaguca

SEQ ID NO: 273578 - RNA, 19 nt, Artificial Sequence
  Description of Artificial Sequence: Synthetic oligonucleotide
  Sense strand starting at position 3661 of SEQ ID NO: 3513
guuauuauucgacauguuu

SEQ ID NO: 273579 - RNA, 19 nt, Artificial Sequence
  Description of Artificial Sequence: Synthetic oligonucleotide
  Antisense strand to SEQ ID NO: 273578
aaacaugucgaauaauaac

SEQ ID NO: 273580 - RNA, 19 nt, Artificial Sequence
  Description of Artificial Sequence: Synthetic oligonucleotide
  Sense strand starting at position 3676 of SEQ ID NO: 3513
guuugauaguuccuuggaa

SEQ ID NO: 273581 - RNA, 19 nt, Artificial Sequence
  Description of Artificial Sequence: Synthetic oligonucleotide
  Antisense strand to SEQ ID NO: 273580
uuccaaggaacuaucaaac

SEQ ID NO: 273582 - RNA, 19 nt, Artificial Sequence
  Description of Artificial Sequence: Synthetic oligonucleotide
  Sense strand starting at position 3677 of SEQ ID NO: 3513
uuugauaguuccuuggaaa

SEQ ID NO: 273583 - RNA, 19 nt, Artificial Sequence
  Description of Artificial Sequence: Synthetic oligonucleotide
  Antisense strand to SEQ ID NO: 273582
uuuccaaggaacuaucaaa

SEQ ID NO: 273584 - RNA, 19 nt, Artificial Sequence
  Description of Artificial Sequence: Synthetic oligonucleotide
  Sense strand starting at position 3701 of SEQ ID NO: 3513
acucaugaggcuuauuguu

SEQ ID NO: 273585 - RNA, 19 nt, Artificial Sequence
  Description of Artificial Sequence: Synthetic oligonucleotide
  Antisense strand to SEQ ID NO: 273584
aacaauaagccucaugagu

SEQ ID NO: 273586 - RNA, 19 nt, Artificial Sequence
  Description of Artificial Sequence: Synthetic oligonucleotide
  Sense strand starting at position 3709 of SEQ ID NO: 3513
ggcuuauuguuauuuaguc

SEQ ID NO: 273587 - RNA, 19 nt, Artificial Sequence
  Description of Artificial Sequence: Synthetic oligonucleotide
  Antisense strand to SEQ ID NO: 273586
gacuaaauaacaauaagcc

SEQ ID NO: 273588 - RNA, 19 nt, Artificial Sequence
  Description of Artificial Sequence: Synthetic oligonucleotide
  Sense strand starting at position 3710 of SEQ ID NO: 3513
gcuuauuguuauuuagucu

SEQ ID NO: 273589 - RNA, 19 nt, Artificial Sequence
  Description of Artificial Sequence: Synthetic oligonucleotide
  Antisense strand to SEQ ID NO: 273588
agacuaaauaacaauaagc

SEQ ID NO: 273590 - RNA, 19 nt, Artificial Sequence
  Description of Artificial Sequence: Synthetic oligonucleotide
  Sense strand starting at position 3716 of SEQ ID NO: 3513
uguuauuuagucugacuuc

SEQ ID NO: 273591 - RNA, 19 nt, Artificial Sequence
  Description of Artificial Sequence: Synthetic oligonucleotide
  Antisense strand to SEQ ID NO: 273590
gaagucagacuaaauaaca

SEQ ID NO: 273592 - RNA, 19 nt, Artificial Sequence
  Description of Artificial Sequence: Synthetic oligonucleotide
  Sense strand starting at position 3743 of SEQ ID NO: 3513
caaguauguuugucaaaug

SEQ ID NO: 273593 - RNA, 19 nt, Artificial Sequence
  Description of Artificial Sequence: Synthetic oligonucleotide
  Antisense strand to SEQ ID NO: 273592
cauuugacaaacauacuug

SEQ ID NO: 273594 - RNA, 19 nt, Artificial Sequence
  Description of Artificial Sequence: Synthetic oligonucleotide
  Sense strand starting at position 3794 of SEQ ID NO: 3513
gaggcaugugugggaacuu

SEQ ID NO: 273595 - RNA, 19 nt, Artificial Sequence
  Description of Artificial Sequence: Synthetic oligonucleotide
  Antisense strand to SEQ ID NO: 273594
aaguucccacacaugccuc

SEQ ID NO: 273596 - RNA, 19 nt, Artificial Sequence
  Description of Artificial Sequence: Synthetic oligonucleotide
  Sense strand starting at position 63 of SEQ ID NO: 3514
aggauucccuaagugaaac

SEQ ID NO: 273597 - RNA, 19 nt, Artificial Sequence
  Description of Artificial Sequence: Synthetic oligonucleotide
  Antisense strand to SEQ ID NO: 273596
guuucacuuagggaauccu

SEQ ID NO: 273598 - RNA, 19 nt, Artificial Sequence
  Description of Artificial Sequence: Synthetic oligonucleotide
  Sense strand starting at position 173 of SEQ ID NO: 3514
ggucacaucucucuaagga

SEQ ID NO: 273599 - RNA, 19 nt, Artificial Sequence
  Description of Artificial Sequence: Synthetic oligonucleotide
  Antisense strand to SEQ ID NO: 273598
uccuuagagagaugugacc

SEQ ID NO: 273600 - RNA, 19 nt, Artificial Sequence
  Description of Artificial Sequence: Synthetic oligonucleotide
  Sense strand starting at position 174 of SEQ ID NO: 3514
gucacaucucucuaaggac

SEQ ID NO: 273601 - RNA, 19 nt, Artificial Sequence
  Description of Artificial Sequence: Synthetic oligonucleotide
  Antisense strand to SEQ ID NO: 273600
guccuuagagagaugugac

SEQ ID NO: 273602 - RNA, 19 nt, Artificial Sequence
  Description of Artificial Sequence: Synthetic oligonucleotide
  Sense strand starting at position 245 of SEQ ID NO: 3514
ucauucugcuccuuuggaa

SEQ ID NO: 273603 - RNA, 19 nt, Artificial Sequence
  Description of Artificial Sequence: Synthetic oligonucleotide
  Antisense strand to SEQ ID NO: 273602
uuccaaaggagcagaauga

SEQ ID NO: 273604 - RNA, 19 nt, Artificial Sequence
  Description of Artificial Sequence: Synthetic oligonucleotide
  Sense strand starting at position 252 of SEQ ID NO: 3514
gcuccuuuggaauagaagu

SEQ ID NO: 273605 - RNA, 19 nt, Artificial Sequence
  Description of Artificial Sequence: Synthetic oligonucleotide
  Antisense strand to SEQ ID NO: 273604
acuucuauuccaaaggagc

SEQ ID NO: 273606 - RNA, 19 nt, Artificial Sequence
  Description of Artificial Sequence: Synthetic oligonucleotide
  Sense strand starting at position 262 of SEQ ID NO: 3514
aauagaaguuacgccuuua

SEQ ID NO: 273607 - RNA, 19 nt, Artificial Sequence
  Description of Artificial Sequence: Synthetic oligonucleotide
  Antisense strand to SEQ ID NO: 273606
uaaaggcguaacuucuauu

SEQ ID NO: 273608 - RNA, 19 nt, Artificial Sequence
  Description of Artificial Sequence: Synthetic oligonucleotide
  Sense strand starting at position 371 of SEQ ID NO: 3514
ugcugauauucucuuagua

SEQ ID NO: 273609 - RNA, 19 nt, Artificial Sequence
  Description of Artificial Sequence: Synthetic oligonucleotide
  Antisense strand to SEQ ID NO: 273608
uacuaagagaauaucagca

SEQ ID NO: 273610 - RNA, 19 nt, Artificial Sequence
  Description of Artificial Sequence: Synthetic oligonucleotide
  Sense strand starting at position 401 of SEQ ID NO: 3514
ggguuaggagguuggucau

SEQ ID NO: 273611 - RNA, 19 nt, Artificial Sequence
  Description of Artificial Sequence: Synthetic oligonucleotide
  Antisense strand to SEQ ID NO: 273610
augaccaaccuccuaaccc

SEQ ID NO: 273612 - RNA, 19 nt, Artificial Sequence
  Description of Artificial Sequence: Synthetic oligonucleotide
  Sense strand starting at position 457 of SEQ ID NO: 3514
uguuuauucuacuugagac

SEQ ID NO: 273613 - RNA, 19 nt, Artificial Sequence
  Description of Artificial Sequence: Synthetic oligonucleotide
  Antisense strand to SEQ ID NO: 273612
gucucaaguagaauaaaca

SEQ ID NO: 273614 - RNA, 19 nt, Artificial Sequence
  Description of Artificial Sequence: Synthetic oligonucleotide
  Sense strand starting at position 494 of SEQ ID NO: 3514
ugucucaggcucugauaaa

SEQ ID NO: 273615 - RNA, 19 nt, Artificial Sequence
  Description of Artificial Sequence: Synthetic oligonucleotide
  Antisense strand to SEQ ID NO: 273614
uuuaucagagccugagaca

SEQ ID NO: 273616 - RNA, 19 nt, Artificial Sequence
  Description of Artificial Sequence: Synthetic oligonucleotide
  Sense strand starting at position 687 of SEQ ID NO: 3514
uugagaagccuccaaccua

SEQ ID NO: 273617 - RNA, 19 nt, Artificial Sequence
  Description of Artificial Sequence: Synthetic oligonucleotide
  Antisense strand to SEQ ID NO: 273616
uagguuggaggcuucucaa

SEQ ID NO: 273618 - RNA, 19 nt, Artificial Sequence
  Description of Artificial Sequence: Synthetic oligonucleotide
  Sense strand starting at position 828 of SEQ ID NO: 3514
aaaguuuaacugcaggauu

SEQ ID NO: 273619 - RNA, 19 nt, Artificial Sequence
  Description of Artificial Sequence: Synthetic oligonucleotide
  Antisense strand to SEQ ID NO: 273618
aauccugcaguuaaacuuu

SEQ ID NO: 273620 - RNA, 19 nt, Artificial Sequence
  Description of Artificial Sequence: Synthetic oligonucleotide
  Sense strand starting at position 961 of SEQ ID NO: 3514
ggaguucuucugggaaagg

SEQ ID NO: 273621 - RNA, 19 nt, Artificial Sequence
  Description of Artificial Sequence: Synthetic oligonucleotide
  Antisense strand to SEQ ID NO: 273620
ccuuucccagaagaacucc

SEQ ID NO: 273622 - RNA, 19 nt, Artificial Sequence
  Description of Artificial Sequence: Synthetic oligonucleotide
  Sense strand starting at position 1095 of SEQ ID NO: 3514
auaaauauuccuggcugaa

SEQ ID NO: 273623 - RNA, 19 nt, Artificial Sequence
  Description of Artificial Sequence: Synthetic oligonucleotide
  Antisense strand to SEQ ID NO: 273622
uucagccaggaauauuuau

SEQ ID NO: 273624 - RNA, 19 nt, Artificial Sequence
  Description of Artificial Sequence: Synthetic oligonucleotide
  Sense strand starting at position 1126 of SEQ ID NO: 3514
ucuuaaauaucugaaggag

SEQ ID NO: 273625 - RNA, 19 nt, Artificial Sequence
  Description of Artificial Sequence: Synthetic oligonucleotide
  Antisense strand to SEQ ID NO: 273624
cuccuucagauauuuaaga

SEQ ID NO: 273626 - RNA, 19 nt, Artificial Sequence
  Description of Artificial Sequence: Synthetic oligonucleotide
  Sense strand starting at position 1463 of SEQ ID NO: 3514
gccugaacccgugcguuua

SEQ ID NO: 273627 - RNA, 19 nt, Artificial Sequence
  Description of Artificial Sequence: Synthetic oligonucleotide
  Antisense strand to SEQ ID NO: 273626
uaaacgcacggguucaggc

SEQ ID NO: 273628 - RNA, 19 nt, Artificial Sequence
  Description of Artificial Sequence: Synthetic oligonucleotide
  Sense strand starting at position 1547 of SEQ ID NO: 3514
gccaucgaugcgucuuaca

SEQ ID NO: 273629 - RNA, 19 nt, Artificial Sequence
  Description of Artificial Sequence: Synthetic oligonucleotide
  Antisense strand to SEQ ID NO: 273628
uguaagacgcaucgauggc

SEQ ID NO: 273630 - RNA, 19 nt, Artificial Sequence
  Description of Artificial Sequence: Synthetic oligonucleotide
  Sense strand starting at position 1555 of SEQ ID NO: 3514
ugcgucuuacaagaugguu

SEQ ID NO: 273631 - RNA, 19 nt, Artificial Sequence
  Description of Artificial Sequence: Synthetic oligonucleotide
  Antisense strand to SEQ ID NO: 273630
aaccaucuuguaagacgca

SEQ ID NO: 273632 - RNA, 19 nt, Artificial Sequence
  Description of Artificial Sequence: Synthetic oligonucleotide
  Sense strand starting at position 2469 of SEQ ID NO: 3514
agagaauguuccuucucuc

SEQ ID NO: 273633 - RNA, 19 nt, Artificial Sequence
  Description of Artificial Sequence: Synthetic oligonucleotide
  Antisense strand to SEQ ID NO: 273632
gagagaaggaacauucucu

SEQ ID NO: 273634 - RNA, 19 nt, Artificial Sequence
  Description of Artificial Sequence: Synthetic oligonucleotide
  Sense strand starting at position 2513 of SEQ ID NO: 3514
gagagucgugacugagcaa

SEQ ID NO: 273635 - RNA, 19 nt, Artificial Sequence
  Description of Artificial Sequence: Synthetic oligonucleotide
  Antisense strand to SEQ ID NO: 273634
uugcucagucacgacucuc

SEQ ID NO: 273636 - RNA, 19 nt, Artificial Sequence
  Description of Artificial Sequence: Synthetic oligonucleotide
  Sense strand starting at position 2514 of SEQ ID NO: 3514
agagucgugacugagcaaa

SEQ ID NO: 273637 - RNA, 19 nt, Artificial Sequence
  Description of Artificial Sequence: Synthetic oligonucleotide
  Antisense strand to SEQ ID NO: 273636
uuugcucagucacgacucu

SEQ ID NO: 273638 - RNA, 19 nt, Artificial Sequence
  Description of Artificial Sequence: Synthetic oligonucleotide
  Sense strand starting at position 2516 of SEQ ID NO: 3514
agucgugacugagcaaaca

SEQ ID NO: 273639 - RNA, 19 nt, Artificial Sequence
  Description of Artificial Sequence: Synthetic oligonucleotide
  Antisense strand to SEQ ID NO: 273638
uguuugcucagucacgacu

SEQ ID NO: 273640 - RNA, 19 nt, Artificial Sequence
  Description of Artificial Sequence: Synthetic oligonucleotide
  Sense strand starting at position 2963 of SEQ ID NO: 3514
gcuuauaagguuuagguca

SEQ ID NO: 273641 - RNA, 19 nt, Artificial Sequence
  Description of Artificial Sequence: Synthetic oligonucleotide
  Antisense strand to SEQ ID NO: 273640
ugaccuaaaccuuauaagc

SEQ ID NO: 273642 - RNA, 19 nt, Artificial Sequence
  Description of Artificial Sequence: Synthetic oligonucleotide
  Sense strand starting at position 3126 of SEQ ID NO: 3514
uuggcaagucagggauacu

SEQ ID NO: 273643 - RNA, 19 nt, Artificial Sequence
  Description of Artificial Sequence: Synthetic oligonucleotide
  Antisense strand to SEQ ID NO: 273642
aguaucccugacuugccaa

SEQ ID NO: 273644 - RNA, 19 nt, Artificial Sequence
  Description of Artificial Sequence: Synthetic oligonucleotide
  Sense strand starting at position 3135 of SEQ ID NO: 3514
cagggauacuaagcugauu

SEQ ID NO: 273645 - RNA, 19 nt, Artificial Sequence
  Description of Artificial Sequence: Synthetic oligonucleotide
  Antisense strand to SEQ ID NO: 273644
aaucagcuuaguaucccug

SEQ ID NO: 273646 - RNA, 19 nt, Artificial Sequence
  Description of Artificial Sequence: Synthetic oligonucleotide
  Sense strand starting at position 3137 of SEQ ID NO: 3514
gggauacuaagcugauucu

SEQ ID NO: 273647 - RNA, 19 nt, Artificial Sequence
  Description of Artificial Sequence: Synthetic oligonucleotide
  Antisense strand to SEQ ID NO: 273646
agaaucagcuuaguauccc

SEQ ID NO: 273648 - RNA, 19 nt, Artificial Sequence
  Description of Artificial Sequence: Synthetic oligonucleotide
  Sense strand starting at position 3149 of SEQ ID NO: 3514
ugauucucgagcugaugaa

SEQ ID NO: 273649 - RNA, 19 nt, Artificial Sequence
  Description of Artificial Sequence: Synthetic oligonucleotide
  Antisense strand to SEQ ID NO: 273648
uucaucagcucgagaauca

SEQ ID NO: 273650 - RNA, 19 nt, Artificial Sequence
  Description of Artificial Sequence: Synthetic oligonucleotide
  Sense strand starting at position 3153 of SEQ ID NO: 3514
ucucgagcugaugaagagu

SEQ ID NO: 273651 - RNA, 19 nt, Artificial Sequence
  Description of Artificial Sequence: Synthetic oligonucleotide
  Antisense strand to SEQ ID NO: 273650
acucuucaucagcucgaga

SEQ ID NO: 273652 - RNA, 19 nt, Artificial Sequence
  Description of Artificial Sequence: Synthetic oligonucleotide
  Sense strand starting at position 3230 of SEQ ID NO: 3514
gagagaacacaauguuugu

SEQ ID NO: 273653 - RNA, 19 nt, Artificial Sequence
  Description of Artificial Sequence: Synthetic oligonucleotide
  Antisense strand to SEQ ID NO: 273652
acaaacauuguguucucuc

SEQ ID NO: 273654 - RNA, 19 nt, Artificial Sequence
  Description of Artificial Sequence: Synthetic oligonucleotide
  Sense strand starting at position 3340 of SEQ ID NO: 3514
ccgugagcuacucaugcaa

SEQ ID NO: 273655 - RNA, 19 nt, Artificial Sequence
  Description of Artificial Sequence: Synthetic oligonucleotide
  Antisense strand to SEQ ID NO: 273654
uugcaugaguagcucacgg

SEQ ID NO: 273656 - RNA, 19 nt, Artificial Sequence
  Description of Artificial Sequence: Synthetic oligonucleotide
  Sense strand starting at position 3384 of SEQ ID NO: 3514
gaaggaggaucuguccauu

SEQ ID NO: 273657 - RNA, 19 nt, Artificial Sequence
  Description of Artificial Sequence: Synthetic oligonucleotide
  Antisense strand to SEQ ID NO: 273656
aauggacagauccuccuuc

SEQ ID NO: 273658 - RNA, 19 nt, Artificial Sequence
  Description of Artificial Sequence: Synthetic oligonucleotide
  Sense strand starting at position 3408 of SEQ ID NO: 3514
uguucugcaugacuacaau

SEQ ID NO: 273659 - RNA, 19 nt, Artificial Sequence
  Description of Artificial Sequence: Synthetic oligonucleotide
  Antisense strand to SEQ ID NO: 273658
auuguagucaugcagaaca

SEQ ID NO: 273660 - RNA, 19 nt, Artificial Sequence
  Description of Artificial Sequence: Synthetic oligonucleotide
  Sense strand starting at position 3411 of SEQ ID NO: 3514
ucugcaugacuacaaugau

SEQ ID NO: 273661 - RNA, 19 nt, Artificial Sequence
  Description of Artificial Sequence: Synthetic oligonucleotide
  Antisense strand to SEQ ID NO: 273660
aucauuguagucaugcaga

SEQ ID NO: 273662 - RNA, 19 nt, Artificial Sequence
  Description of Artificial Sequence: Synthetic oligonucleotide
  Sense strand starting at position 3483 of SEQ ID NO: 3514
agcaacucuccgugggaca

SEQ ID NO: 273663 - RNA, 19 nt, Artificial Sequence
  Description of Artificial Sequence: Synthetic oligonucleotide
  Antisense strand to SEQ ID NO: 273662
ugucccacggagaguugcu

SEQ ID NO: 273664 - RNA, 19 nt, Artificial Sequence
  Description of Artificial Sequence: Synthetic oligonucleotide
  Sense strand starting at position 3557 of SEQ ID NO: 3514
gggaguuacaauggcgauu

SEQ ID NO: 273665 - RNA, 19 nt, Artificial Sequence
  Description of Artificial Sequence: Synthetic oligonucleotide
  Antisense strand to SEQ ID NO: 273664
aaucgccauuguaacuccc

SEQ ID NO: 273666 - RNA, 19 nt, Artificial Sequence
  Description of Artificial Sequence: Synthetic oligonucleotide
  Sense strand starting at position 3697 of SEQ ID NO: 3514
cucugaagagcuugucucu

SEQ ID NO: 273667 - RNA, 19 nt, Artificial Sequence
  Description of Artificial Sequence: Synthetic oligonucleotide
  Antisense strand to SEQ ID NO: 273666
agagacaagcucuucagag

SEQ ID NO: 273668 - RNA, 19 nt, Artificial Sequence
  Description of Artificial Sequence: Synthetic oligonucleotide
  Sense strand starting at position 3710 of SEQ ID NO: 3514
gucucugucucccuggaua

SEQ ID NO: 273669 - RNA, 19 nt, Artificial Sequence
  Description of Artificial Sequence: Synthetic oligonucleotide
  Antisense strand to SEQ ID NO: 273668
uauccagggagacagagac

SEQ ID NO: 273670 - RNA, 19 nt, Artificial Sequence
  Description of Artificial Sequence: Synthetic oligonucleotide
  Sense strand starting at position 3856 of SEQ ID NO: 3514
acagacaugugccucacau

SEQ ID NO: 273671 - RNA, 19 nt, Artificial Sequence
  Description of Artificial Sequence: Synthetic oligonucleotide
  Antisense strand to SEQ ID NO: 273670
augugaggcacaugucugu

SEQ ID NO: 273672 - RNA, 19 nt, Artificial Sequence
  Description of Artificial Sequence: Synthetic oligonucleotide
  Sense strand starting at position 3867 of SEQ ID NO: 3514
ccucacaugcuuggugaua

SEQ ID NO: 273673 - RNA, 19 nt, Artificial Sequence
  Description of Artificial Sequence: Synthetic oligonucleotide
  Antisense strand to SEQ ID NO: 273672
uaucaccaagcaugugagg

SEQ ID NO: 273674 - RNA, 19 nt, Artificial Sequence
  Description of Artificial Sequence: Synthetic oligonucleotide
  Sense strand starting at position 3868 of SEQ ID NO: 3514
cucacaugcuuggugauau

SEQ ID NO: 273675 - RNA, 19 nt, Artificial Sequence
  Description of Artificial Sequence: Synthetic oligonucleotide
  Antisense strand to SEQ ID NO: 273674
auaucaccaagcaugugag

SEQ ID NO: 273676 - RNA, 19 nt, Artificial Sequence
  Description of Artificial Sequence: Synthetic oligonucleotide
  Sense strand starting at position 31 of SEQ ID NO: 3515
ucuugauaucguuaucuuu

SEQ ID NO: 273677 - RNA, 19 nt, Artificial Sequence
  Description of Artificial Sequence: Synthetic oligonucleotide
  Antisense strand to SEQ ID NO: 273676
aaagauaacgauaucaaga

SEQ ID NO: 273678 - RNA, 19 nt, Artificial Sequence
  Description of Artificial Sequence: Synthetic oligonucleotide
  Sense strand starting at position 316 of SEQ ID NO: 3515
uaaauauugugacugguuu

SEQ ID NO: 273679 - RNA, 19 nt, Artificial Sequence
  Description of Artificial Sequence: Synthetic oligonucleotide
  Antisense strand to SEQ ID NO: 273678
aaaccagucacaauauuua

SEQ ID NO: 273680 - RNA, 19 nt, Artificial Sequence
  Description of Artificial Sequence: Synthetic oligonucleotide
  Sense strand starting at position 344 of SEQ ID NO: 3515
ggucauguccuaggaccaa

SEQ ID NO: 273681 - RNA, 19 nt, Artificial Sequence
  Description of Artificial Sequence: Synthetic oligonucleotide
  Antisense strand to SEQ ID NO: 273680
uugguccuaggacaugacc

SEQ ID NO: 273682 - RNA, 19 nt, Artificial Sequence
  Description of Artificial Sequence: Synthetic oligonucleotide
  Sense strand starting at position 405 of SEQ ID NO: 3515
ugaaaucaacuguguggau

SEQ ID NO: 273683 - RNA, 19 nt, Artificial Sequence
  Description of Artificial Sequence: Synthetic oligonucleotide
  Antisense strand to SEQ ID NO: 273682
auccacacaguugauuuca

SEQ ID NO: 273684 - RNA, 19 nt, Artificial Sequence
  Description of Artificial Sequence: Synthetic oligonucleotide
  Sense strand starting at position 406 of SEQ ID NO: 3515
gaaaucaacuguguggauu

SEQ ID NO: 273685 - RNA, 19 nt, Artificial Sequence
  Description of Artificial Sequence: Synthetic oligonucleotide
  Antisense strand to SEQ ID NO: 273684
aauccacacaguugauuuc

SEQ ID NO: 273686 - RNA, 19 nt, Artificial Sequence
  Description of Artificial Sequence: Synthetic oligonucleotide
  Sense strand starting at position 407 of SEQ ID NO: 3515
aaaucaacuguguggauua

SEQ ID NO: 273687 - RNA, 19 nt, Artificial Sequence
  Description of Artificial Sequence: Synthetic oligonucleotide
  Antisense strand to SEQ ID NO: 273686
uaauccacacaguugauuu

SEQ ID NO: 273688 - RNA, 19 nt, Artificial Sequence
  Description of Artificial Sequence: Synthetic oligonucleotide
  Sense strand starting at position 477 of SEQ ID NO: 3515
uagaaugcauagguuauaa

SEQ ID NO: 273689 - RNA, 19 nt, Artificial Sequence
  Description of Artificial Sequence: Synthetic oligonucleotide
  Antisense strand to SEQ ID NO: 273688
uuauaaccuaugcauucua

SEQ ID NO: 273690 - RNA, 19 nt, Artificial Sequence
  Description of Artificial Sequence: Synthetic oligonucleotide
  Sense strand starting at position 479 of SEQ ID NO: 3515
gaaugcauagguuauaauu

SEQ ID NO: 273691 - RNA, 19 nt, Artificial Sequence
  Description of Artificial Sequence: Synthetic oligonucleotide
  Antisense strand to SEQ ID NO: 273690
aauuauaaccuaugcauuc

SEQ ID NO: 273692 - RNA, 19 nt, Artificial Sequence
  Description of Artificial Sequence: Synthetic oligonucleotide
  Sense strand starting at position 522 of SEQ ID NO: 3515
ggcugaauuguugguauuu

SEQ ID NO: 273693 - RNA, 19 nt, Artificial Sequence
  Description of Artificial Sequence: Synthetic oligonucleotide
  Antisense strand to SEQ ID NO: 273692
aaauaccaacaauucagcc

SEQ ID NO: 273694 - RNA, 19 nt, Artificial Sequence
  Description of Artificial Sequence: Synthetic oligonucleotide
  Sense strand starting at position 550 of SEQ ID NO: 3515
cuugucuaacauuacagua

SEQ ID NO: 273695 - RNA, 19 nt, Artificial Sequence
  Description of Artificial Sequence: Synthetic oligonucleotide
  Antisense strand to SEQ ID NO: 273694
uacuguaauguuagacaag

SEQ ID NO: 273696 - RNA, 19 nt, Artificial Sequence
  Description of Artificial Sequence: Synthetic oligonucleotide
  Sense strand starting at position 793 of SEQ ID NO: 3515
uuuaaauuaccugagagcu

SEQ ID NO: 273697 - RNA, 19 nt, Artificial Sequence
  Description of Artificial Sequence: Synthetic oligonucleotide
  Antisense strand to SEQ ID NO: 273696
agcucucagguaauuuaaa

SEQ ID NO: 273698 - RNA, 19 nt, Artificial Sequence
  Description of Artificial Sequence: Synthetic oligonucleotide
  Sense strand starting at position 803 of SEQ ID NO: 3515
cugagagcugacuaauugu

SEQ ID NO: 273699 - RNA, 19 nt, Artificial Sequence
  Description of Artificial Sequence: Synthetic oligonucleotide
  Antisense strand to SEQ ID NO: 273698
acaauuagucagcucucag

SEQ ID NO: 273700 - RNA, 19 nt, Artificial Sequence
  Description of Artificial Sequence: Synthetic oligonucleotide
  Sense strand starting at position 806 of SEQ ID NO: 3515
agagcugacuaauuguacu

SEQ ID NO: 273701 - RNA, 19 nt, Artificial Sequence
  Description of Artificial Sequence: Synthetic oligonucleotide
  Antisense strand to SEQ ID NO: 273700
aguacaauuagucagcucu

SEQ ID NO: 273702 - RNA, 19 nt, Artificial Sequence
  Description of Artificial Sequence: Synthetic oligonucleotide
  Sense strand starting at position 851 of SEQ ID NO: 3515
aguaacagucaauauguua

SEQ ID NO: 273703 - RNA, 19 nt, Artificial Sequence
  Description of Artificial Sequence: Synthetic oligonucleotide
  Antisense strand to SEQ ID NO: 273702
uaacauauugacuguuacu

SEQ ID NO: 273704 - RNA, 19 nt, Artificial Sequence
  Description of Artificial Sequence: Synthetic oligonucleotide
  Sense strand starting at position 1304 of SEQ ID NO: 3515
gcagcagauguggauguaa

SEQ ID NO: 273705 - RNA, 19 nt, Artificial Sequence
  Description of Artificial Sequence: Synthetic oligonucleotide
  Antisense strand to SEQ ID NO: 273704
uuacauccacaucugcugc

SEQ ID NO: 273706 - RNA, 19 nt, Artificial Sequence
  Description of Artificial Sequence: Synthetic oligonucleotide
  Sense strand starting at position 1306 of SEQ ID NO: 3515
agcagauguggauguaaua

SEQ ID NO: 273707 - RNA, 19 nt, Artificial Sequence
  Description of Artificial Sequence: Synthetic oligonucleotide
  Antisense strand to SEQ ID NO: 273706
uauuacauccacaucugcu

SEQ ID NO: 273708 - RNA, 19 nt, Artificial Sequence
  Description of Artificial Sequence: Synthetic oligonucleotide
  Sense strand starting at position 1316 of SEQ ID NO: 3515
gauguaauacagugagcag

SEQ ID NO: 273709 - RNA, 19 nt, Artificial Sequence
  Description of Artificial Sequence: Synthetic oligonucleotide
  Antisense strand to SEQ ID NO: 273708
cugcucacuguauuacauc

SEQ ID NO: 273710 - RNA, 19 nt, Artificial Sequence
  Description of Artificial Sequence: Synthetic oligonucleotide
  Sense strand starting at position 2238 of SEQ ID NO: 3515
gagcucucccgggaacuuu

SEQ ID NO: 273711 - RNA, 19 nt, Artificial Sequence
  Description of Artificial Sequence: Synthetic oligonucleotide
  Antisense strand to SEQ ID NO: 273710
aaaguucccgggagagcuc

SEQ ID NO: 273712 - RNA, 19 nt, Artificial Sequence
  Description of Artificial Sequence: Synthetic oligonucleotide
  Sense strand starting at position 2497 of SEQ ID NO: 3515
uuggcaauucuugaucuuu

SEQ ID NO: 273713 - RNA, 19 nt, Artificial Sequence
  Description of Artificial Sequence: Synthetic oligonucleotide
  Antisense strand to SEQ ID NO: 273712
aaagaucaagaauugccaa

SEQ ID NO: 273714 - RNA, 19 nt, Artificial Sequence
  Description of Artificial Sequence: Synthetic oligonucleotide
  Sense strand starting at position 2548 of SEQ ID NO: 3515
ugccaaaugcuagacacua

SEQ ID NO: 273715 - RNA, 19 nt, Artificial Sequence
  Description of Artificial Sequence: Synthetic oligonucleotide
  Antisense strand to SEQ ID NO: 273714
uagugucuagcauuuggca

SEQ ID NO: 273716 - RNA, 19 nt, Artificial Sequence
  Description of Artificial Sequence: Synthetic oligonucleotide
  Sense strand starting at position 2600 of SEQ ID NO: 3515
cucauuagucauuaugcca

SEQ ID NO: 273717 - RNA, 19 nt, Artificial Sequence
  Description of Artificial Sequence: Synthetic oligonucleotide
  Antisense strand to SEQ ID NO: 273716
uggcauaaugacuaaugag

SEQ ID NO: 273718 - RNA, 19 nt, Artificial Sequence
  Description of Artificial Sequence: Synthetic oligonucleotide
  Sense strand starting at position 2607 of SEQ ID NO: 3515
gucauuaugccaggauaug

SEQ ID NO: 273719 - RNA, 19 nt, Artificial Sequence
  Description of Artificial Sequence: Synthetic oligonucleotide
  Antisense strand to SEQ ID NO: 273718
cauauccuggcauaaugac

SEQ ID NO: 273720 - RNA, 19 nt, Artificial Sequence
  Description of Artificial Sequence: Synthetic oligonucleotide
  Sense strand starting at position 2638 of SEQ ID NO: 3515
cccagaagaugcuugaauu

SEQ ID NO: 273721 - RNA, 19 nt, Artificial Sequence
  Description of Artificial Sequence: Synthetic oligonucleotide
  Antisense strand to SEQ ID NO: 273720
aauucaagcaucuucuggg

SEQ ID NO: 273722 - RNA, 19 nt, Artificial Sequence
  Description of Artificial Sequence: Synthetic oligonucleotide
  Sense strand starting at position 2639 of SEQ ID NO: 3515
ccagaagaugcuugaauug

SEQ ID NO: 273723 - RNA, 19 nt, Artificial Sequence
  Description of Artificial Sequence: Synthetic oligonucleotide
  Antisense strand to SEQ ID NO: 273722
caauucaagcaucuucugg

SEQ ID NO: 273724 - RNA, 19 nt, Artificial Sequence
  Description of Artificial Sequence: Synthetic oligonucleotide
  Sense strand starting at position 2897 of SEQ ID NO: 3515
gaauguguccuuuaucuag

SEQ ID NO: 273725 - RNA, 19 nt, Artificial Sequence
  Description of Artificial Sequence: Synthetic oligonucleotide
  Antisense strand to SEQ ID NO: 273724
cuagauaaaggacacauuc

SEQ ID NO: 273726 - RNA, 19 nt, Artificial Sequence
  Description of Artificial Sequence: Synthetic oligonucleotide
  Sense strand starting at position 3024 of SEQ ID NO: 3515
aggguuauuucuuccugca

SEQ ID NO: 273727 - RNA, 19 nt, Artificial Sequence
  Description of Artificial Sequence: Synthetic oligonucleotide
  Antisense strand to SEQ ID NO: 273726
ugcaggaagaaauaacccu

SEQ ID NO: 273728 - RNA, 19 nt, Artificial Sequence
  Description of Artificial Sequence: Synthetic oligonucleotide
  Sense strand starting at position 3026 of SEQ ID NO: 3515
gguuauuucuuccugcaug

SEQ ID NO: 273729 - RNA, 19 nt, Artificial Sequence
  Description of Artificial Sequence: Synthetic oligonucleotide
  Antisense strand to SEQ ID NO: 273728
caugcaggaagaaauaacc

SEQ ID NO: 273730 - RNA, 19 nt, Artificial Sequence
  Description of Artificial Sequence: Synthetic oligonucleotide
  Sense strand starting at position 3062 of SEQ ID NO: 3515
uuagcugucgauuauuaua

SEQ ID NO: 273731 - RNA, 19 nt, Artificial Sequence
  Description of Artificial Sequence: Synthetic oligonucleotide
  Antisense strand to SEQ ID NO: 273730
uauaauaaucgacagcuaa

SEQ ID NO: 273732 - RNA, 19 nt, Artificial Sequence
  Description of Artificial Sequence: Synthetic oligonucleotide
  Sense strand starting at position 3281 of SEQ ID NO: 3515
aagaaauuaguguacugua

SEQ ID NO: 273733 - RNA, 19 nt, Artificial Sequence
  Description of Artificial Sequence: Synthetic oligonucleotide
  Antisense strand to SEQ ID NO: 273732
uacaguacacuaauuucuu

SEQ ID NO: 273734 - RNA, 19 nt, Artificial Sequence
  Description of Artificial Sequence: Synthetic oligonucleotide
  Sense strand starting at position 3362 of SEQ ID NO: 3515
caugauagaugcuuaguau

SEQ ID NO: 273735 - RNA, 19 nt, Artificial Sequence
  Description of Artificial Sequence: Synthetic oligonucleotide
  Antisense strand to SEQ ID NO: 273734
auacuaagcaucuaucaug

SEQ ID NO: 273736 - RNA, 19 nt, Artificial Sequence
  Description of Artificial Sequence: Synthetic oligonucleotide
  Sense strand starting at position 3363 of SEQ ID NO: 3515
augauagaugcuuaguaua

SEQ ID NO: 273737 - RNA, 19 nt, Artificial Sequence
  Description of Artificial Sequence: Synthetic oligonucleotide
  Antisense strand to SEQ ID NO: 273736
uauacuaagcaucuaucau

SEQ ID NO: 273738 - RNA, 19 nt, Artificial Sequence
  Description of Artificial Sequence: Synthetic oligonucleotide
  Sense strand starting at position 3365 of SEQ ID NO: 3515
gauagaugcuuaguauaua

SEQ ID NO: 273739 - RNA, 19 nt, Artificial Sequence
  Description of Artificial Sequence: Synthetic oligonucleotide
  Antisense strand to SEQ ID NO: 273738
uauauacuaagcaucuauc

SEQ ID NO: 273740 - RNA, 19 nt, Artificial Sequence
  Description of Artificial Sequence: Synthetic oligonucleotide
  Sense strand starting at position 3432 of SEQ ID NO: 3515
agugaaagcuuauuauaag

SEQ ID NO: 273741 - RNA, 19 nt, Artificial Sequence
  Description of Artificial Sequence: Synthetic oligonucleotide
  Antisense strand to SEQ ID NO: 273740
cuuauaauaagcuuucacu

SEQ ID NO: 273742 - RNA, 19 nt, Artificial Sequence
  Description of Artificial Sequence: Synthetic oligonucleotide
  Sense strand starting at position 3507 of SEQ ID NO: 3515
auaugagucucaguugauu

SEQ ID NO: 273743 - RNA, 19 nt, Artificial Sequence
  Description of Artificial Sequence: Synthetic oligonucleotide
  Antisense strand to SEQ ID NO: 273742
aaucaacugagacucauau

SEQ ID NO: 273744 - RNA, 19 nt, Artificial Sequence
  Description of Artificial Sequence: Synthetic oligonucleotide
  Sense strand starting at position 3566 of SEQ ID NO: 3515
auugauagucgauaccauu

SEQ ID NO: 273745 - RNA, 19 nt, Artificial Sequence
  Description of Artificial Sequence: Synthetic oligonucleotide
  Antisense strand to SEQ ID NO: 273744
aaugguaucgacuaucaau

SEQ ID NO: 273746 - RNA, 19 nt, Artificial Sequence
  Description of Artificial Sequence: Synthetic oligonucleotide
  Sense strand starting at position 3587 of SEQ ID NO: 3515
gaaccuuaggcacaaugua

SEQ ID NO: 273747 - RNA, 19 nt, Artificial Sequence
  Description of Artificial Sequence: Synthetic oligonucleotide
  Antisense strand to SEQ ID NO: 273746
uacauugugccuaagguuc

SEQ ID NO: 273748 - RNA, 19 nt, Artificial Sequence
  Description of Artificial Sequence: Synthetic oligonucleotide
  Sense strand starting at position 3757 of SEQ ID NO: 3515
accgaauacuuacugugaa

SEQ ID NO: 273749 - RNA, 19 nt, Artificial Sequence
  Description of Artificial Sequence: Synthetic oligonucleotide
  Antisense strand to SEQ ID NO: 273748
uucacaguaaguauucggu

SEQ ID NO: 273750 - RNA, 19 nt, Artificial Sequence
  Description of Artificial Sequence: Synthetic oligonucleotide
  Sense strand starting at position 3770 of SEQ ID NO: 3515
ugugaauaauaccuuaguu

SEQ ID NO: 273751 - RNA, 19 nt, Artificial Sequence
  Description of Artificial Sequence: Synthetic oligonucleotide
  Antisense strand to SEQ ID NO: 273750
aacuaagguauuauucaca

SEQ ID NO: 273752 - RNA, 19 nt, Artificial Sequence
  Description of Artificial Sequence: Synthetic oligonucleotide
  Sense strand starting at position 3848 of SEQ ID NO: 3515
aaagaauacuggguccuca

SEQ ID NO: 273753 - RNA, 19 nt, Artificial Sequence
  Description of Artificial Sequence: Synthetic oligonucleotide
  Antisense strand to SEQ ID NO: 273752
ugaggacccaguauucuuu

SEQ ID NO: 273754 - RNA, 19 nt, Artificial Sequence
  Description of Artificial Sequence: Synthetic oligonucleotide
  Sense strand starting at position 3938 of SEQ ID NO: 3515
auuaaaugauugucaagug

SEQ ID NO: 273755 - RNA, 19 nt, Artificial Sequence
  Description of Artificial Sequence: Synthetic oligonucleotide
  Antisense strand to SEQ ID NO: 273754
cacuugacaaucauuuaau

SEQ ID NO: 273756 - RNA, 19 nt, Artificial Sequence
  Description of Artificial Sequence: Synthetic oligonucleotide
  Sense strand starting at position 50 of SEQ ID NO: 3516
aaguguagucucugaaaua

SEQ ID NO: 273757 - RNA, 19 nt, Artificial Sequence
  Description of Artificial Sequence: Synthetic oligonucleotide
  Antisense strand to SEQ ID NO: 273756
uauuucagagacuacacuu

SEQ ID NO: 273758 - RNA, 19 nt, Artificial Sequence
  Description of Artificial Sequence: Synthetic oligonucleotide
  Sense strand starting at position 181 of SEQ ID NO: 3516
uuaggacucuuuccugagu

SEQ ID NO: 273759 - RNA, 19 nt, Artificial Sequence
  Description of Artificial Sequence: Synthetic oligonucleotide
  Antisense strand to SEQ ID NO: 273758
acucaggaaagaguccuaa

SEQ ID NO: 273760 - RNA, 19 nt, Artificial Sequence
  Description of Artificial Sequence: Synthetic oligonucleotide
  Sense strand starting at position 184 of SEQ ID NO: 3516
ggacucuuuccugaguggu

SEQ ID NO: 273761 - RNA, 19 nt, Artificial Sequence
  Description of Artificial Sequence: Synthetic oligonucleotide
  Antisense strand to SEQ ID NO: 273760
accacucaggaaagagucc

SEQ ID NO: 273762 - RNA, 19 nt, Artificial Sequence
  Description of Artificial Sequence: Synthetic oligonucleotide
  Sense strand starting at position 186 of SEQ ID NO: 3516
acucuuuccugagugguaa

SEQ ID NO: 273763 - RNA, 19 nt, Artificial Sequence
  Description of Artificial Sequence: Synthetic oligonucleotide
  Antisense strand to SEQ ID NO: 273762
uuaccacucaggaaagagu

SEQ ID NO: 273764 - RNA, 19 nt, Artificial Sequence
  Description of Artificial Sequence: Synthetic oligonucleotide
  Sense strand starting at position 766 of SEQ ID NO: 3516
cuggcaauguaauaauuua

SEQ ID NO: 273765 - RNA, 19 nt, Artificial Sequence
  Description of Artificial Sequence: Synthetic oligonucleotide
  Antisense strand to SEQ ID NO: 273764
uaaauuauuacauugccag

SEQ ID NO: 273766 - RNA, 19 nt, Artificial Sequence
  Description of Artificial Sequence: Synthetic oligonucleotide
  Sense strand starting at position 774 of SEQ ID NO: 3516
guaauaauuuaggaaagcu

SEQ ID NO: 273767 - RNA, 19 nt, Artificial Sequence
  Description of Artificial Sequence: Synthetic oligonucleotide
  Antisense strand to SEQ ID NO: 273766
agcuuuccuaaauuauuac

SEQ ID NO: 273768 - RNA, 19 nt, Artificial Sequence
  Description of Artificial Sequence: Synthetic oligonucleotide
  Sense strand starting at position 798 of SEQ ID NO: 3516
uuggaaauguuagcuucua

SEQ ID NO: 273769 - RNA, 19 nt, Artificial Sequence
  Description of Artificial Sequence: Synthetic oligonucleotide
  Antisense strand to SEQ ID NO: 273768
uagaagcuaacauuuccaa

SEQ ID NO: 273770 - RNA, 19 nt, Artificial Sequence
  Description of Artificial Sequence: Synthetic oligonucleotide
  Sense strand starting at position 799 of SEQ ID NO: 3516
uggaaauguuagcuucuau

SEQ ID NO: 273771 - RNA, 19 nt, Artificial Sequence
  Description of Artificial Sequence: Synthetic oligonucleotide
  Antisense strand to SEQ ID NO: 273770
auagaagcuaacauuucca

SEQ ID NO: 273772 - RNA, 19 nt, Artificial Sequence
  Description of Artificial Sequence: Synthetic oligonucleotide
  Sense strand starting at position 905 of SEQ ID NO: 3516
ggaaauuagccuugcucca

SEQ ID NO: 273773 - RNA, 19 nt, Artificial Sequence
  Description of Artificial Sequence: Synthetic oligonucleotide
  Antisense strand to SEQ ID NO: 273772
uggagcaaggcuaauuucc

SEQ ID NO: 273774 - RNA, 19 nt, Artificial Sequence
  Description of Artificial Sequence: Synthetic oligonucleotide
  Sense strand starting at position 912 of SEQ ID NO: 3516
agccuugcuccacagaaga

SEQ ID NO: 273775 - RNA, 19 nt, Artificial Sequence
  Description of Artificial Sequence: Synthetic oligonucleotide
  Antisense strand to SEQ ID NO: 273774
ucuucuguggagcaaggcu

SEQ ID NO: 273776 - RNA, 19 nt, Artificial Sequence
  Description of Artificial Sequence: Synthetic oligonucleotide
  Sense strand starting at position 1114 of SEQ ID NO: 3516
gcgucaauaguagauaaug

SEQ ID NO: 273777 - RNA, 19 nt, Artificial Sequence
  Description of Artificial Sequence: Synthetic oligonucleotide
  Antisense strand to SEQ ID NO: 273776
cauuaucuacuauugacgc

SEQ ID NO: 273778 - RNA, 19 nt, Artificial Sequence
  Description of Artificial Sequence: Synthetic oligonucleotide
  Sense strand starting at position 1158 of SEQ ID NO: 3516
acgaauaacuugcuuuaua

SEQ ID NO: 273779 - RNA, 19 nt, Artificial Sequence
  Description of Artificial Sequence: Synthetic oligonucleotide
  Antisense strand to SEQ ID NO: 273778
uauaaagcaaguuauucgu

SEQ ID NO: 273780 - RNA, 19 nt, Artificial Sequence
  Description of Artificial Sequence: Synthetic oligonucleotide
  Sense strand starting at position 1159 of SEQ ID NO: 3516
cgaauaacuugcuuuauac

SEQ ID NO: 273781 - RNA, 19 nt, Artificial Sequence
  Description of Artificial Sequence: Synthetic oligonucleotide
  Antisense strand to SEQ ID NO: 273780
guauaaagcaaguuauucg

SEQ ID NO: 273782 - RNA, 19 nt, Artificial Sequence
  Description of Artificial Sequence: Synthetic oligonucleotide
  Sense strand starting at position 1199 of SEQ ID NO: 3516
uuucuugacugucuuagga

SEQ ID NO: 273783 - RNA, 19 nt, Artificial Sequence
  Description of Artificial Sequence: Synthetic oligonucleotide
  Antisense strand to SEQ ID NO: 273782
uccuaagacagucaagaaa

SEQ ID NO: 273784 - RNA, 19 nt, Artificial Sequence
  Description of Artificial Sequence: Synthetic oligonucleotide
  Sense strand starting at position 1221 of SEQ ID NO: 3516
accucugauugggcagaaa

SEQ ID NO: 273785 - RNA, 19 nt, Artificial Sequence
  Description of Artificial Sequence: Synthetic oligonucleotide
  Antisense strand to SEQ ID NO: 273784
uuucugcccaaucagaggu

SEQ ID NO: 273786 - RNA, 19 nt, Artificial Sequence
  Description of Artificial Sequence: Synthetic oligonucleotide
  Sense strand starting at position 1323 of SEQ ID NO: 3516
gggaaauaaugcuccuccu

SEQ ID NO: 273787 - RNA, 19 nt, Artificial Sequence
  Description of Artificial Sequence: Synthetic oligonucleotide
  Antisense strand to SEQ ID NO: 273786
aggaggagcauuauuuccc

SEQ ID NO: 273788 - RNA, 19 nt, Artificial Sequence
  Description of Artificial Sequence: Synthetic oligonucleotide
  Sense strand starting at position 1363 of SEQ ID NO: 3516
uugaaauggaaucgucuca

SEQ ID NO: 273789 - RNA, 19 nt, Artificial Sequence
  Description of Artificial Sequence: Synthetic oligonucleotide
  Antisense strand to SEQ ID NO: 273788
ugagacgauuccauuucaa

SEQ ID NO: 273790 - RNA, 19 nt, Artificial Sequence
  Description of Artificial Sequence: Synthetic oligonucleotide
  Sense strand starting at position 2373 of SEQ ID NO: 3516
accggaguuagcgaugacu

SEQ ID NO: 273791 - RNA, 19 nt, Artificial Sequence
  Description of Artificial Sequence: Synthetic oligonucleotide
  Antisense strand to SEQ ID NO: 273790
agucaucgcuaacuccggu

SEQ ID NO: 273792 - RNA, 19 nt, Artificial Sequence
  Description of Artificial Sequence: Synthetic oligonucleotide
  Sense strand starting at position 2384 of SEQ ID NO: 3516
cgaugacucuguuuccaga

SEQ ID NO: 273793 - RNA, 19 nt, Artificial Sequence
  Description of Artificial Sequence: Synthetic oligonucleotide
  Antisense strand to SEQ ID NO: 273792
ucuggaaacagagucaucg

SEQ ID NO: 273794 - RNA, 19 nt, Artificial Sequence
  Description of Artificial Sequence: Synthetic oligonucleotide
  Sense strand starting at position 2468 of SEQ ID NO: 3516
agaccucugguguguaaag

SEQ ID NO: 273795 - RNA, 19 nt, Artificial Sequence
  Description of Artificial Sequence: Synthetic oligonucleotide
  Antisense strand to SEQ ID NO: 273794
cuuuacacaccagaggucu

SEQ ID NO: 273796 - RNA, 19 nt, Artificial Sequence
  Description of Artificial Sequence: Synthetic oligonucleotide
  Sense strand starting at position 2585 of SEQ ID NO: 3516
ucggcuuuauaguuaauuu

SEQ ID NO: 273797 - RNA, 19 nt, Artificial Sequence
  Description of Artificial Sequence: Synthetic oligonucleotide
  Antisense strand to SEQ ID NO: 273796
aaauuaacuauaaagccga

SEQ ID NO: 273798 - RNA, 19 nt, Artificial Sequence
  Description of Artificial Sequence: Synthetic oligonucleotide
  Sense strand starting at position 2671 of SEQ ID NO: 3516
ucagcuuggcuagaguuau

SEQ ID NO: 273799 - RNA, 19 nt, Artificial Sequence
  Description of Artificial Sequence: Synthetic oligonucleotide
  Antisense strand to SEQ ID NO: 273798
auaacucuagccaagcuga

SEQ ID NO: 273800 - RNA, 19 nt, Artificial Sequence
  Description of Artificial Sequence: Synthetic oligonucleotide
  Sense strand starting at position 2681 of SEQ ID NO: 3516
uagaguuauucgucauuuc

SEQ ID NO: 273801 - RNA, 19 nt, Artificial Sequence
  Description of Artificial Sequence: Synthetic oligonucleotide
  Antisense strand to SEQ ID NO: 273800
gaaaugacgaauaacucua

SEQ ID NO: 273802 - RNA, 19 nt, Artificial Sequence
  Description of Artificial Sequence: Synthetic oligonucleotide
  Sense strand starting at position 2684 of SEQ ID NO: 3516
aguuauucgucauuucugu

SEQ ID NO: 273803 - RNA, 19 nt, Artificial Sequence
  Description of Artificial Sequence: Synthetic oligonucleotide
  Antisense strand to SEQ ID NO: 273802
acagaaaugacgaauaacu

SEQ ID NO: 273804 - RNA, 19 nt, Artificial Sequence
  Description of Artificial Sequence: Synthetic oligonucleotide
  Sense strand starting at position 3092 of SEQ ID NO: 3516
gggcgugacccuuaacaag

SEQ ID NO: 273805 - RNA, 19 nt, Artificial Sequence
  Description of Artificial Sequence: Synthetic oligonucleotide
  Antisense strand to SEQ ID NO: 273804
cuuguuaagggucacgccc

SEQ ID NO: 273806 - RNA, 19 nt, Artificial Sequence
  Description of Artificial Sequence: Synthetic oligonucleotide
  Sense strand starting at position 3171 of SEQ ID NO: 3516
cccucaucucucugaggaa

SEQ ID NO: 273807 - RNA, 19 nt, Artificial Sequence
  Description of Artificial Sequence: Synthetic oligonucleotide
  Antisense strand to SEQ ID NO: 273806
uuccucagagagaugaggg

SEQ ID NO: 273808 - RNA, 19 nt, Artificial Sequence
  Description of Artificial Sequence: Synthetic oligonucleotide
  Sense strand starting at position 3378 of SEQ ID NO: 3516
ucguaauuaucacccuaug

SEQ ID NO: 273809 - RNA, 19 nt, Artificial Sequence
  Description of Artificial Sequence: Synthetic oligonucleotide
  Antisense strand to SEQ ID NO: 273808
cauagggugauaauuacga

SEQ ID NO: 273810 - RNA, 19 nt, Artificial Sequence
  Description of Artificial Sequence: Synthetic oligonucleotide
  Sense strand starting at position 3526 of SEQ ID NO: 3516
aagugcacuccgcaaauau

SEQ ID NO: 273811 - RNA, 19 nt, Artificial Sequence
  Description of Artificial Sequence: Synthetic oligonucleotide
  Antisense strand to SEQ ID NO: 273810
auauuugcggagugcacuu

SEQ ID NO: 273812 - RNA, 19 nt, Artificial Sequence
  Description of Artificial Sequence: Synthetic oligonucleotide
  Sense strand starting at position 3572 of SEQ ID NO: 3516
guguuaguuauagaagcac

SEQ ID NO: 273813 - RNA, 19 nt, Artificial Sequence
  Description of Artificial Sequence: Synthetic oligonucleotide
  Antisense strand to SEQ ID NO: 273812
gugcuucuauaacuaacac

SEQ ID NO: 273814 - RNA, 19 nt, Artificial Sequence
  Description of Artificial Sequence: Synthetic oligonucleotide
  Sense strand starting at position 3673 of SEQ ID NO: 3516
aguccauguccucaagaag

SEQ ID NO: 273815 - RNA, 19 nt, Artificial Sequence
  Description of Artificial Sequence: Synthetic oligonucleotide
  Antisense strand to SEQ ID NO: 273814
cuucuugaggacauggacu

SEQ ID NO: 273816 - RNA, 19 nt, Artificial Sequence
  Description of Artificial Sequence: Synthetic oligonucleotide
  Sense strand starting at position 3706 of SEQ ID NO: 3516
ucuauauuagcuuacaguu

SEQ ID NO: 273817 - RNA, 19 nt, Artificial Sequence
  Description of Artificial Sequence: Synthetic oligonucleotide
  Antisense strand to SEQ ID NO: 273816
aacuguaagcuaauauaga

SEQ ID NO: 273818 - RNA, 19 nt, Artificial Sequence
  Description of Artificial Sequence: Synthetic oligonucleotide
  Sense strand starting at position 3844 of SEQ ID NO: 3516
agauuauuugucuguguau

SEQ ID NO: 273819 - RNA, 19 nt, Artificial Sequence
  Description of Artificial Sequence: Synthetic oligonucleotide
  Antisense strand to SEQ ID NO: 273818
auacacagacaaauaaucu

SEQ ID NO: 273820 - RNA, 19 nt, Artificial Sequence
  Description of Artificial Sequence: Synthetic oligonucleotide
  Sense strand starting at position 3845 of SEQ ID NO: 3516
gauuauuugucuguguaua

SEQ ID NO: 273821 - RNA, 19 nt, Artificial Sequence
  Description of Artificial Sequence: Synthetic oligonucleotide
  Antisense strand to SEQ ID NO: 273820
uauacacagacaaauaauc

SEQ ID NO: 273822 - RNA, 19 nt, Artificial Sequence
  Description of Artificial Sequence: Synthetic oligonucleotide
  Sense strand starting at position 3857 of SEQ ID NO: 3516
guguauauauccuccucaa

SEQ ID NO: 273823 - RNA, 19 nt, Artificial Sequence
  Description of Artificial Sequence: Synthetic oligonucleotide
  Antisense strand to SEQ ID NO: 273822
uugaggaggauauauacac

SEQ ID NO: 273824 - RNA, 19 nt, Artificial Sequence
  Description of Artificial Sequence: Synthetic oligonucleotide
  Sense strand starting at position 3898 of SEQ ID NO: 3516
uuaggauucuugcugaauc

SEQ ID NO: 273825 - RNA, 19 nt, Artificial Sequence
  Description of Artificial Sequence: Synthetic oligonucleotide
  Antisense strand to SEQ ID NO: 273824
gauucagcaagaauccuaa

SEQ ID NO: 273826 - RNA, 19 nt, Artificial Sequence
  Description of Artificial Sequence: Synthetic oligonucleotide
  Sense strand starting at position 3913 of SEQ ID NO: 3516
aaucaauuauuguucgaug

SEQ ID NO: 273827 - RNA, 19 nt, Artificial Sequence
  Description of Artificial Sequence: Synthetic oligonucleotide
  Antisense strand to SEQ ID NO: 273826
caucgaacaauaauugauu

SEQ ID NO: 273828 - RNA, 19 nt, Artificial Sequence
  Description of Artificial Sequence: Synthetic oligonucleotide
  Sense strand starting at position 3914 of SEQ ID NO: 3516
aucaauuauuguucgauga

SEQ ID NO: 273829 - RNA, 19 nt, Artificial Sequence
  Description of Artificial Sequence: Synthetic oligonucleotide
  Antisense strand to SEQ ID NO: 273828
ucaucgaacaauaauugau

SEQ ID NO: 273830 - RNA, 19 nt, Artificial Sequence
  Description of Artificial Sequence: Synthetic oligonucleotide
  Sense strand starting at position 3915 of SEQ ID NO: 3516
ucaauuauuguucgaugau

SEQ ID NO: 273831 - RNA, 19 nt, Artificial Sequence
  Description of Artificial Sequence: Synthetic oligonucleotide
  Antisense strand to SEQ ID NO: 273830
aucaucgaacaauaauuga

SEQ ID NO: 273832 - RNA, 19 nt, Artificial Sequence
  Description of Artificial Sequence: Synthetic oligonucleotide
  Sense strand starting at position 3942 of SEQ ID NO: 3516
ucuauuccucuguauguau

SEQ ID NO: 273833 - RNA, 19 nt, Artificial Sequence
  Description of Artificial Sequence: Synthetic oligonucleotide
  Antisense strand to SEQ ID NO: 273832
auacauacagaggaauaga

SEQ ID NO: 273834 - RNA, 19 nt, Artificial Sequence
  Description of Artificial Sequence: Synthetic oligonucleotide
  Sense strand starting at position 3951 of SEQ ID NO: 3516
cuguauguauuaguugaau

SEQ ID NO: 273835 - RNA, 19 nt, Artificial Sequence
  Description of Artificial Sequence: Synthetic oligonucleotide
  Antisense strand to SEQ ID NO: 273834
auucaacuaauacauacag

SEQ ID NO: 273836 - RNA, 19 nt, Artificial Sequence
  Description of Artificial Sequence: Synthetic oligonucleotide
  Sense strand starting at position 10 of SEQ ID NO: 3517
ggugccaucucacuccuaa

SEQ ID NO: 273837 - RNA, 19 nt, Artificial Sequence
  Description of Artificial Sequence: Synthetic oligonucleotide
  Antisense strand to SEQ ID NO: 273836
uuaggagugagauggcacc

SEQ ID NO: 273838 - RNA, 19 nt, Artificial Sequence
  Description of Artificial Sequence: Synthetic oligonucleotide
  Sense strand starting at position 59 of SEQ ID NO: 3517
gucauuucugcugggugca

SEQ ID NO: 273839 - RNA, 19 nt, Artificial Sequence
  Description of Artificial Sequence: Synthetic oligonucleotide
  Antisense strand to SEQ ID NO: 273838
ugcacccagcagaaaugac

SEQ ID NO: 273840 - RNA, 19 nt, Artificial Sequence
  Description of Artificial Sequence: Synthetic oligonucleotide
  Sense strand starting at position 62 of SEQ ID NO: 3517
auuucugcugggugcagaa

SEQ ID NO: 273841 - RNA, 19 nt, Artificial Sequence
  Description of Artificial Sequence: Synthetic oligonucleotide
  Antisense strand to SEQ ID NO: 273840
uucugcacccagcagaaau

SEQ ID NO: 273842 - RNA, 19 nt, Artificial Sequence
  Description of Artificial Sequence: Synthetic oligonucleotide
  Sense strand starting at position 76 of SEQ ID NO: 3517
cagaaagguuaguuugagu

SEQ ID NO: 273843 - RNA, 19 nt, Artificial Sequence
  Description of Artificial Sequence: Synthetic oligonucleotide
  Antisense strand to SEQ ID NO: 273842
acucaaacuaaccuuucug

SEQ ID NO: 273844 - RNA, 19 nt, Artificial Sequence
  Description of Artificial Sequence: Synthetic oligonucleotide
  Sense strand starting at position 195 of SEQ ID NO: 3517
ugcucagacaugugcaaag

SEQ ID NO: 273845 - RNA, 19 nt, Artificial Sequence
  Description of Artificial Sequence: Synthetic oligonucleotide
  Antisense strand to SEQ ID NO: 273844
cuuugcacaugucugagca

SEQ ID NO: 273846 - RNA, 19 nt, Artificial Sequence
  Description of Artificial Sequence: Synthetic oligonucleotide
  Sense strand starting at position 211 of SEQ ID NO: 3517
aagggaauagucugucuaa

SEQ ID NO: 273847 - RNA, 19 nt, Artificial Sequence
  Description of Artificial Sequence: Synthetic oligonucleotide
  Antisense strand to SEQ ID NO: 273846
uuagacagacuauucccuu

SEQ ID NO: 273848 - RNA, 19 nt, Artificial Sequence
  Description of Artificial Sequence: Synthetic oligonucleotide
  Sense strand starting at position 212 of SEQ ID NO: 3517
agggaauagucugucuaau

SEQ ID NO: 273849 - RNA, 19 nt, Artificial Sequence
  Description of Artificial Sequence: Synthetic oligonucleotide
  Antisense strand to SEQ ID NO: 273848
auuagacagacuauucccu

SEQ ID NO: 273850 - RNA, 19 nt, Artificial Sequence
  Description of Artificial Sequence: Synthetic oligonucleotide
  Sense strand starting at position 214 of SEQ ID NO: 3517
ggaauagucugucuaaucu

SEQ ID NO: 273851 - RNA, 19 nt, Artificial Sequence
  Description of Artificial Sequence: Synthetic oligonucleotide
  Antisense strand to SEQ ID NO: 273850
agauuagacagacuauucc

SEQ ID NO: 273852 - RNA, 19 nt, Artificial Sequence
  Description of Artificial Sequence: Synthetic oligonucleotide
  Sense strand starting at position 349 of SEQ ID NO: 3517
cugugucuccagugaacag

SEQ ID NO: 273853 - RNA, 19 nt, Artificial Sequence
  Description of Artificial Sequence: Synthetic oligonucleotide
  Antisense strand to SEQ ID NO: 273852
cuguucacuggagacacag

SEQ ID NO: 273854 - RNA, 19 nt, Artificial Sequence
  Description of Artificial Sequence: Synthetic oligonucleotide
  Sense strand starting at position 385 of SEQ ID NO: 3517
ugaguaggaaccugagcau

SEQ ID NO: 273855 - RNA, 19 nt, Artificial Sequence
  Description of Artificial Sequence: Synthetic oligonucleotide
  Antisense strand to SEQ ID NO: 273854
augcucagguuccuacuca

SEQ ID NO: 273856 - RNA, 19 nt, Artificial Sequence
  Description of Artificial Sequence: Synthetic oligonucleotide
  Sense strand starting at position 556 of SEQ ID NO: 3517
aguucacuucugggaagga

SEQ ID NO: 273857 - RNA, 19 nt, Artificial Sequence
  Description of Artificial Sequence: Synthetic oligonucleotide
  Antisense strand to SEQ ID NO: 273856
uccuucccagaagugaacu

SEQ ID NO: 273858 - RNA, 19 nt, Artificial Sequence
  Description of Artificial Sequence: Synthetic oligonucleotide
  Sense strand starting at position 569 of SEQ ID NO: 3517
gaaggacuguguucccuuu

SEQ ID NO: 273859 - RNA, 19 nt, Artificial Sequence
  Description of Artificial Sequence: Synthetic oligonucleotide
  Antisense strand to SEQ ID NO: 273858
aaagggaacacaguccuuc

SEQ ID NO: 273860 - RNA, 19 nt, Artificial Sequence
  Description of Artificial Sequence: Synthetic oligonucleotide
  Sense strand starting at position 662 of SEQ ID NO: 3517
aggaaucaagccugacaca

SEQ ID NO: 273861 - RNA, 19 nt, Artificial Sequence
  Description of Artificial Sequence: Synthetic oligonucleotide
  Antisense strand to SEQ ID NO: 273860
ugugucaggcuugauuccu

SEQ ID NO: 273862 - RNA, 19 nt, Artificial Sequence
  Description of Artificial Sequence: Synthetic oligonucleotide
  Sense strand starting at position 709 of SEQ ID NO: 3517
acugcugucccgucucauu

SEQ ID NO: 273863 - RNA, 19 nt, Artificial Sequence
  Description of Artificial Sequence: Synthetic oligonucleotide
  Antisense strand to SEQ ID NO: 273862
aaugagacgggacagcagu

SEQ ID NO: 273864 - RNA, 19 nt, Artificial Sequence
  Description of Artificial Sequence: Synthetic oligonucleotide
  Sense strand starting at position 795 of SEQ ID NO: 3517
uuggaauucugacucaagu

SEQ ID NO: 273865 - RNA, 19 nt, Artificial Sequence
  Description of Artificial Sequence: Synthetic oligonucleotide
  Antisense strand to SEQ ID NO: 273864
acuugagucagaauuccaa

SEQ ID NO: 273866 - RNA, 19 nt, Artificial Sequence
  Description of Artificial Sequence: Synthetic oligonucleotide
  Sense strand starting at position 797 of SEQ ID NO: 3517
ggaauucugacucaagugu

SEQ ID NO: 273867 - RNA, 19 nt, Artificial Sequence
  Description of Artificial Sequence: Synthetic oligonucleotide
  Antisense strand to SEQ ID NO: 273866
acacuugagucagaauucc

SEQ ID NO: 273868 - RNA, 19 nt, Artificial Sequence
  Description of Artificial Sequence: Synthetic oligonucleotide
  Sense strand starting at position 841 of SEQ ID NO: 3517
ggguaauaucccugguguu

SEQ ID NO: 273869 - RNA, 19 nt, Artificial Sequence
  Description of Artificial Sequence: Synthetic oligonucleotide
  Antisense strand to SEQ ID NO: 273868
aacaccagggauauuaccc

SEQ ID NO: 273870 - RNA, 19 nt, Artificial Sequence
  Description of Artificial Sequence: Synthetic oligonucleotide
  Sense strand starting at position 940 of SEQ ID NO: 3517
cuggccugucuuuaagaga

SEQ ID NO: 273871 - RNA, 19 nt, Artificial Sequence
  Description of Artificial Sequence: Synthetic oligonucleotide
  Antisense strand to SEQ ID NO: 273870
ucucuuaaagacaggccag

SEQ ID NO: 273872 - RNA, 19 nt, Artificial Sequence
  Description of Artificial Sequence: Synthetic oligonucleotide
  Sense strand starting at position 945 of SEQ ID NO: 3517
cugucuuuaagagaugugu

SEQ ID NO: 273873 - RNA, 19 nt, Artificial Sequence
  Description of Artificial Sequence: Synthetic oligonucleotide
  Antisense strand to SEQ ID NO: 273872
acacaucucuuaaagacag

SEQ ID NO: 273874 - RNA, 19 nt, Artificial Sequence
  Description of Artificial Sequence: Synthetic oligonucleotide
  Sense strand starting at position 949 of SEQ ID NO: 3517
cuuuaagagauguguggaa

SEQ ID NO: 273875 - RNA, 19 nt, Artificial Sequence
  Description of Artificial Sequence: Synthetic oligonucleotide
  Antisense strand to SEQ ID NO: 273874
uuccacacaucucuuaaag

SEQ ID NO: 273876 - RNA, 19 nt, Artificial Sequence
  Description of Artificial Sequence: Synthetic oligonucleotide
  Sense strand starting at position 978 of SEQ ID NO: 3517
ccaggaguucuccgguaaa

SEQ ID NO: 273877 - RNA, 19 nt, Artificial Sequence
  Description of Artificial Sequence: Synthetic oligonucleotide
  Antisense strand to SEQ ID NO: 273876
uuuaccggagaacuccugg

SEQ ID NO: 273878 - RNA, 19 nt, Artificial Sequence
  Description of Artificial Sequence: Synthetic oligonucleotide
  Sense strand starting at position 981 of SEQ ID NO: 3517
ggaguucuccgguaaaggg

SEQ ID NO: 273879 - RNA, 19 nt, Artificial Sequence
  Description of Artificial Sequence: Synthetic oligonucleotide
  Antisense strand to SEQ ID NO: 273878
cccuuuaccggagaacucc

SEQ ID NO: 273880 - RNA, 19 nt, Artificial Sequence
  Description of Artificial Sequence: Synthetic oligonucleotide
  Sense strand starting at position 2491 of SEQ ID NO: 3517
cggagauccgagugaucuc

SEQ ID NO: 273881 - RNA, 19 nt, Artificial Sequence
  Description of Artificial Sequence: Synthetic oligonucleotide
  Antisense strand to SEQ ID NO: 273880
gagaucacucggaucuccg

SEQ ID NO: 273882 - RNA, 19 nt, Artificial Sequence
  Description of Artificial Sequence: Synthetic oligonucleotide
  Sense strand starting at position 2492 of SEQ ID NO: 3517
ggagauccgagugaucuca

SEQ ID NO: 273883 - RNA, 19 nt, Artificial Sequence
  Description of Artificial Sequence: Synthetic oligonucleotide
  Antisense strand to SEQ ID NO: 273882
ugagaucacucggaucucc

SEQ ID NO: 273884 - RNA, 19 nt, Artificial Sequence
  Description of Artificial Sequence: Synthetic oligonucleotide
  Sense strand starting at position 2695 of SEQ ID NO: 3517
gagcucuaggcauagagga

SEQ ID NO: 273885 - RNA, 19 nt, Artificial Sequence
  Description of Artificial Sequence: Synthetic oligonucleotide
  Antisense strand to SEQ ID NO: 273884
uccucuaugccuagagcuc

SEQ ID NO: 273886 - RNA, 19 nt, Artificial Sequence
  Description of Artificial Sequence: Synthetic oligonucleotide
  Sense strand starting at position 2697 of SEQ ID NO: 3517
gcucuaggcauagaggaau

SEQ ID NO: 273887 - RNA, 19 nt, Artificial Sequence
  Description of Artificial Sequence: Synthetic oligonucleotide
  Antisense strand to SEQ ID NO: 273886
auuccucuaugccuagagc

SEQ ID NO: 273888 - RNA, 19 nt, Artificial Sequence
  Description of Artificial Sequence: Synthetic oligonucleotide
  Sense strand starting at position 2754 of SEQ ID NO: 3517
uuaccaaaguguuucugau

SEQ ID NO: 273889 - RNA, 19 nt, Artificial Sequence
  Description of Artificial Sequence: Synthetic oligonucleotide
  Antisense strand to SEQ ID NO: 273888
aucagaaacacuuugguaa

SEQ ID NO: 273890 - RNA, 19 nt, Artificial Sequence
  Description of Artificial Sequence: Synthetic oligonucleotide
  Sense strand starting at position 3039 of SEQ ID NO: 3517
cccugauugcaucauuagu

SEQ ID NO: 273891 - RNA, 19 nt, Artificial Sequence
  Description of Artificial Sequence: Synthetic oligonucleotide
  Antisense strand to SEQ ID NO: 273890
acuaaugaugcaaucaggg

SEQ ID NO: 273892 - RNA, 19 nt, Artificial Sequence
  Description of Artificial Sequence: Synthetic oligonucleotide
  Sense strand starting at position 3223 of SEQ ID NO: 3517
cccucugggccagguuaau

SEQ ID NO: 273893 - RNA, 19 nt, Artificial Sequence
  Description of Artificial Sequence: Synthetic oligonucleotide
  Antisense strand to SEQ ID NO: 273892
auuaaccuggcccagaggg

SEQ ID NO: 273894 - RNA, 19 nt, Artificial Sequence
  Description of Artificial Sequence: Synthetic oligonucleotide
  Sense strand starting at position 3483 of SEQ ID NO: 3517
cuaugaucccacugaggug

SEQ ID NO: 273895 - RNA, 19 nt, Artificial Sequence
  Description of Artificial Sequence: Synthetic oligonucleotide
  Antisense strand to SEQ ID NO: 273894
caccucagugggaucauag

SEQ ID NO: 273896 - RNA, 19 nt, Artificial Sequence
  Description of Artificial Sequence: Synthetic oligonucleotide
  Sense strand starting at position 3591 of SEQ ID NO: 3517
agccaugauuccuccgaga

SEQ ID NO: 273897 - RNA, 19 nt, Artificial Sequence
  Description of Artificial Sequence: Synthetic oligonucleotide
  Antisense strand to SEQ ID NO: 273896
ucucggaggaaucauggcu

SEQ ID NO: 273898 - RNA, 19 nt, Artificial Sequence
  Description of Artificial Sequence: Synthetic oligonucleotide
  Sense strand starting at position 3593 of SEQ ID NO: 3517
ccaugauuccuccgagaac

SEQ ID NO: 273899 - RNA, 19 nt, Artificial Sequence
  Description of Artificial Sequence: Synthetic oligonucleotide
  Antisense strand to SEQ ID NO: 273898
guucucggaggaaucaugg

SEQ ID NO: 273900 - RNA, 19 nt, Artificial Sequence
  Description of Artificial Sequence: Synthetic oligonucleotide
  Sense strand starting at position 3596 of SEQ ID NO: 3517
ugauuccuccgagaacacu

SEQ ID NO: 273901 - RNA, 19 nt, Artificial Sequence
  Description of Artificial Sequence: Synthetic oligonucleotide
  Antisense strand to SEQ ID NO: 273900
aguguucucggaggaauca

SEQ ID NO: 273902 - RNA, 19 nt, Artificial Sequence
  Description of Artificial Sequence: Synthetic oligonucleotide
  Sense strand starting at position 3625 of SEQ ID NO: 3517
gagucaggucuguaccgau

SEQ ID NO: 273903 - RNA, 19 nt, Artificial Sequence
  Description of Artificial Sequence: Synthetic oligonucleotide
  Antisense strand to SEQ ID NO: 273902
aucgguacagaccugacuc

SEQ ID NO: 273904 - RNA, 19 nt, Artificial Sequence
  Description of Artificial Sequence: Synthetic oligonucleotide
  Sense strand starting at position 3733 of SEQ ID NO: 3517
accagaugucuuuggucua

SEQ ID NO: 273905 - RNA, 19 nt, Artificial Sequence
  Description of Artificial Sequence: Synthetic oligonucleotide
  Antisense strand to SEQ ID NO: 273904
uagaccaaagacaucuggu

SEQ ID NO: 273906 - RNA, 19 nt, Artificial Sequence
  Description of Artificial Sequence: Synthetic oligonucleotide
  Sense strand starting at position 3736 of SEQ ID NO: 3517
agaugucuuuggucuaauu

SEQ ID NO: 273907 - RNA, 19 nt, Artificial Sequence
  Description of Artificial Sequence: Synthetic oligonucleotide
  Antisense strand to SEQ ID NO: 273906
aauuagaccaaagacaucu

SEQ ID NO: 273908 - RNA, 19 nt, Artificial Sequence
  Description of Artificial Sequence: Synthetic oligonucleotide
  Sense strand starting at position 3738 of SEQ ID NO: 3517
augucuuuggucuaauuaa

SEQ ID NO: 273909 - RNA, 19 nt, Artificial Sequence
  Description of Artificial Sequence: Synthetic oligonucleotide
  Antisense strand to SEQ ID NO: 273908
uuaauuagaccaaagacau

SEQ ID NO: 273910 - RNA, 19 nt, Artificial Sequence
  Description of Artificial Sequence: Synthetic oligonucleotide
  Sense strand starting at position 3749 of SEQ ID NO: 3517
cuaauuaacugugcuggga

SEQ ID NO: 273911 - RNA, 19 nt, Artificial Sequence
  Description of Artificial Sequence: Synthetic oligonucleotide
  Antisense strand to SEQ ID NO: 273910
ucccagcacaguuaauuag

SEQ ID NO: 273912 - RNA, 19 nt, Artificial Sequence
  Description of Artificial Sequence: Synthetic oligonucleotide
  Sense strand starting at position 3789 of SEQ ID NO: 3517
cagagcuacuggcuaaagu

SEQ ID NO: 273913 - RNA, 19 nt, Artificial Sequence
  Description of Artificial Sequence: Synthetic oligonucleotide
  Antisense strand to SEQ ID NO: 273912
acuuuagccaguagcucug

SEQ ID NO: 273914 - RNA, 19 nt, Artificial Sequence
  Description of Artificial Sequence: Synthetic oligonucleotide
  Sense strand starting at position 3968 of SEQ ID NO: 3517
cugcuaguuccuuaucagu

SEQ ID NO: 273915 - RNA, 19 nt, Artificial Sequence
  Description of Artificial Sequence: Synthetic oligonucleotide
  Antisense strand to SEQ ID NO: 273914
acugauaaggaacuagcag

SEQ ID NO: 273916 - RNA, 19 nt, Artificial Sequence
  Description of Artificial Sequence: Synthetic oligonucleotide
  Sense strand starting at position 149 of SEQ ID NO: 3518
uuaacuguaccagacaguu

SEQ ID NO: 273917 - RNA, 19 nt, Artificial Sequence
  Description of Artificial Sequence: Synthetic oligonucleotide
  Antisense strand to SEQ ID NO: 273916
aacugucugguacaguuaa

SEQ ID NO: 273918 - RNA, 19 nt, Artificial Sequence
  Description of Artificial Sequence: Synthetic oligonucleotide
  Sense strand starting at position 162 of SEQ ID NO: 3518
acaguucuaucugucccau

SEQ ID NO: 273919 - RNA, 19 nt, Artificial Sequence
  Description of Artificial Sequence: Synthetic oligonucleotide
  Antisense strand to SEQ ID NO: 273918
augggacagauagaacugu

SEQ ID NO: 273920 - RNA, 19 nt, Artificial Sequence
  Description of Artificial Sequence: Synthetic oligonucleotide
  Sense strand starting at position 218 of SEQ ID NO: 3518
uguauuauacgaggucuaa

SEQ ID NO: 273921 - RNA, 19 nt, Artificial Sequence
  Description of Artificial Sequence: Synthetic oligonucleotide
  Antisense strand to SEQ ID NO: 273920
uuagaccucguauaauaca

SEQ ID NO: 273922 - RNA, 19 nt, Artificial Sequence
  Description of Artificial Sequence: Synthetic oligonucleotide
  Sense strand starting at position 367 of SEQ ID NO: 3518
gcugcaagcucauuacucu

SEQ ID NO: 273923 - RNA, 19 nt, Artificial Sequence
  Description of Artificial Sequence: Synthetic oligonucleotide
  Antisense strand to SEQ ID NO: 273922
agaguaaugagcuugcagc

SEQ ID NO: 273924 - RNA, 19 nt, Artificial Sequence
  Description of Artificial Sequence: Synthetic oligonucleotide
  Sense strand starting at position 478 of SEQ ID NO: 3518
agcccugugcaaugaucaa

SEQ ID NO: 273925 - RNA, 19 nt, Artificial Sequence
  Description of Artificial Sequence: Synthetic oligonucleotide
  Antisense strand to SEQ ID NO: 273924
uugaucauugcacagggcu

SEQ ID NO: 273926 - RNA, 19 nt, Artificial Sequence
  Description of Artificial Sequence: Synthetic oligonucleotide
  Sense strand starting at position 765 of SEQ ID NO: 3518
cucgcauuccugcacaauc

SEQ ID NO: 273927 - RNA, 19 nt, Artificial Sequence
  Description of Artificial Sequence: Synthetic oligonucleotide
  Antisense strand to SEQ ID NO: 273926
gauugugcaggaaugcgag

SEQ ID NO: 273928 - RNA, 19 nt, Artificial Sequence
  Description of Artificial Sequence: Synthetic oligonucleotide
  Sense strand starting at position 2198 of SEQ ID NO: 3518
gguuucaggucgccauaga

SEQ ID NO: 273929 - RNA, 19 nt, Artificial Sequence
  Description of Artificial Sequence: Synthetic oligonucleotide
  Antisense strand to SEQ ID NO: 273928
ucuauggcgaccugaaacc

SEQ ID NO: 273930 - RNA, 19 nt, Artificial Sequence
  Description of Artificial Sequence: Synthetic oligonucleotide
  Sense strand starting at position 2211 of SEQ ID NO: 3518
cauagagaccgaugcuguu

SEQ ID NO: 273931 - RNA, 19 nt, Artificial Sequence
  Description of Artificial Sequence: Synthetic oligonucleotide
  Antisense strand to SEQ ID NO: 273930
aacagcaucggucucuaug

SEQ ID NO: 273932 - RNA, 19 nt, Artificial Sequence
  Description of Artificial Sequence: Synthetic oligonucleotide
  Sense strand starting at position 2263 of SEQ ID NO: 3518
gagagaaggugucucaggu

SEQ ID NO: 273933 - RNA, 19 nt, Artificial Sequence
  Description of Artificial Sequence: Synthetic oligonucleotide
  Antisense strand to SEQ ID NO: 273932
accugagacaccuucucuc

SEQ ID NO: 273934 - RNA, 19 nt, Artificial Sequence
  Description of Artificial Sequence: Synthetic oligonucleotide
  Sense strand starting at position 2538 of SEQ ID NO: 3518
ucugcuucuccaggugagu

SEQ ID NO: 273935 - RNA, 19 nt, Artificial Sequence
  Description of Artificial Sequence: Synthetic oligonucleotide
  Antisense strand to SEQ ID NO: 273934
acucaccuggagaagcaga

SEQ ID NO: 273936 - RNA, 19 nt, Artificial Sequence
  Description of Artificial Sequence: Synthetic oligonucleotide
  Sense strand starting at position 2540 of SEQ ID NO: 3518
ugcuucuccaggugaguuu

SEQ ID NO: 273937 - RNA, 19 nt, Artificial Sequence
  Description of Artificial Sequence: Synthetic oligonucleotide
  Antisense strand to SEQ ID NO: 273936
aaacucaccuggagaagca

SEQ ID NO: 273938 - RNA, 19 nt, Artificial Sequence
  Description of Artificial Sequence: Synthetic oligonucleotide
  Sense strand starting at position 2656 of SEQ ID NO: 3518
guggaucuuuccucaacgu

SEQ ID NO: 273939 - RNA, 19 nt, Artificial Sequence
  Description of Artificial Sequence: Synthetic oligonucleotide
  Antisense strand to SEQ ID NO: 273938
acguugaggaaagauccac

SEQ ID NO: 273940 - RNA, 19 nt, Artificial Sequence
  Description of Artificial Sequence: Synthetic oligonucleotide
  Sense strand starting at position 2657 of SEQ ID NO: 3518
uggaucuuuccucaacguu

SEQ ID NO: 273941 - RNA, 19 nt, Artificial Sequence
  Description of Artificial Sequence: Synthetic oligonucleotide
  Antisense strand to SEQ ID NO: 273940
aacguugaggaaagaucca

SEQ ID NO: 273942 - RNA, 19 nt, Artificial Sequence
  Description of Artificial Sequence: Synthetic oligonucleotide
  Sense strand starting at position 2716 of SEQ ID NO: 3518
aggauuuccuuugaggaua

SEQ ID NO: 273943 - RNA, 19 nt, Artificial Sequence
  Description of Artificial Sequence: Synthetic oligonucleotide
  Antisense strand to SEQ ID NO: 273942
uauccucaaaggaaauccu

SEQ ID NO: 273944 - RNA, 19 nt, Artificial Sequence
  Description of Artificial Sequence: Synthetic oligonucleotide
  Sense strand starting at position 2718 of SEQ ID NO: 3518
gauuuccuuugaggauauu

SEQ ID NO: 273945 - RNA, 19 nt, Artificial Sequence
  Description of Artificial Sequence: Synthetic oligonucleotide
  Antisense strand to SEQ ID NO: 273944
aauauccucaaaggaaauc

SEQ ID NO: 273946 - RNA, 19 nt, Artificial Sequence
  Description of Artificial Sequence: Synthetic oligonucleotide
  Sense strand starting at position 2917 of SEQ ID NO: 3518
agguuacaggcuuguuaaa

SEQ ID NO: 273947 - RNA, 19 nt, Artificial Sequence
  Description of Artificial Sequence: Synthetic oligonucleotide
  Antisense strand to SEQ ID NO: 273946
uuuaacaagccuguaaccu

SEQ ID NO: 273948 - RNA, 19 nt, Artificial Sequence
  Description of Artificial Sequence: Synthetic oligonucleotide
  Sense strand starting at position 2919 of SEQ ID NO: 3518
guuacaggcuuguuaaaga

SEQ ID NO: 273949 - RNA, 19 nt, Artificial Sequence
  Description of Artificial Sequence: Synthetic oligonucleotide
  Antisense strand to SEQ ID NO: 273948
ucuuuaacaagccuguaac

SEQ ID NO: 273950 - RNA, 19 nt, Artificial Sequence
  Description of Artificial Sequence: Synthetic oligonucleotide
  Sense strand starting at position 3000 of SEQ ID NO: 3518
gauuacaguugauggauuu

SEQ ID NO: 273951 - RNA, 19 nt, Artificial Sequence
  Description of Artificial Sequence: Synthetic oligonucleotide
  Antisense strand to SEQ ID NO: 273950
aaauccaucaacuguaauc

SEQ ID NO: 273952 - RNA, 19 nt, Artificial Sequence
  Description of Artificial Sequence: Synthetic oligonucleotide
  Sense strand starting at position 3138 of SEQ ID NO: 3518
uguggugguuuaucaauac

SEQ ID NO: 273953 - RNA, 19 nt, Artificial Sequence
  Description of Artificial Sequence: Synthetic oligonucleotide
  Antisense strand to SEQ ID NO: 273952
guauugauaaaccaccaca

SEQ ID NO: 273954 - RNA, 19 nt, Artificial Sequence
  Description of Artificial Sequence: Synthetic oligonucleotide
  Sense strand starting at position 3142 of SEQ ID NO: 3518
gugguuuaucaauacuaau

SEQ ID NO: 273955 - RNA, 19 nt, Artificial Sequence
  Description of Artificial Sequence: Synthetic oligonucleotide
  Antisense strand to SEQ ID NO: 273954
auuaguauugauaaaccac

SEQ ID NO: 273956 - RNA, 19 nt, Artificial Sequence
  Description of Artificial Sequence: Synthetic oligonucleotide
  Sense strand starting at position 3217 of SEQ ID NO: 3518
ugaacauauuaggcuuuaa

SEQ ID NO: 273957 - RNA, 19 nt, Artificial Sequence
  Description of Artificial Sequence: Synthetic oligonucleotide
  Antisense strand to SEQ ID NO: 273956
uuaaagccuaauauguuca

SEQ ID NO: 273958 - RNA, 19 nt, Artificial Sequence
  Description of Artificial Sequence: Synthetic oligonucleotide
  Sense strand starting at position 3239 of SEQ ID NO: 3518
augauauugcucuagccua

SEQ ID NO: 273959 - RNA, 19 nt, Artificial Sequence
  Description of Artificial Sequence: Synthetic oligonucleotide
  Antisense strand to SEQ ID NO: 273958
uaggcuagagcaauaucau

SEQ ID NO: 273960 - RNA, 19 nt, Artificial Sequence
  Description of Artificial Sequence: Synthetic oligonucleotide
  Sense strand starting at position 3253 of SEQ ID NO: 3518
gccuauagccacugauauu

SEQ ID NO: 273961 - RNA, 19 nt, Artificial Sequence
  Description of Artificial Sequence: Synthetic oligonucleotide
  Antisense strand to SEQ ID NO: 273960
aauaucaguggcuauaggc

SEQ ID NO: 273962 - RNA, 19 nt, Artificial Sequence
  Description of Artificial Sequence: Synthetic oligonucleotide
  Sense strand starting at position 3306 of SEQ ID NO: 3518
cuaaucucuuuaguaagga

SEQ ID NO: 273963 - RNA, 19 nt, Artificial Sequence
  Description of Artificial Sequence: Synthetic oligonucleotide
  Antisense strand to SEQ ID NO: 273962
uccuuacuaaagagauuag

SEQ ID NO: 273964 - RNA, 19 nt, Artificial Sequence
  Description of Artificial Sequence: Synthetic oligonucleotide
  Sense strand starting at position 3319 of SEQ ID NO: 3518
uaaggagacuauguuacua

SEQ ID NO: 273965 - RNA, 19 nt, Artificial Sequence
  Description of Artificial Sequence: Synthetic oligonucleotide
  Antisense strand to SEQ ID NO: 273964
uaguaacauagucuccuua

SEQ ID NO: 273966 - RNA, 19 nt, Artificial Sequence
  Description of Artificial Sequence: Synthetic oligonucleotide
  Sense strand starting at position 3434 of SEQ ID NO: 3518
agcugcauaugucuaagua

SEQ ID NO: 273967 - RNA, 19 nt, Artificial Sequence
  Description of Artificial Sequence: Synthetic oligonucleotide
  Antisense strand to SEQ ID NO: 273966
uacuuagacauaugcagcu

SEQ ID NO: 273968 - RNA, 19 nt, Artificial Sequence
  Description of Artificial Sequence: Synthetic oligonucleotide
  Sense strand starting at position 3435 of SEQ ID NO: 3518
gcugcauaugucuaaguau

SEQ ID NO: 273969 - RNA, 19 nt, Artificial Sequence
  Description of Artificial Sequence: Synthetic oligonucleotide
  Antisense strand to SEQ ID NO: 273968
auacuuagacauaugcagc

SEQ ID NO: 273970 - RNA, 19 nt, Artificial Sequence
  Description of Artificial Sequence: Synthetic oligonucleotide
  Sense strand starting at position 3438 of SEQ ID NO: 3518
gcauaugucuaaguauugu

SEQ ID NO: 273971 - RNA, 19 nt, Artificial Sequence
  Description of Artificial Sequence: Synthetic oligonucleotide
  Antisense strand to SEQ ID NO: 273970
acaauacuuagacauaugc

SEQ ID NO: 273972 - RNA, 19 nt, Artificial Sequence
  Description of Artificial Sequence: Synthetic oligonucleotide
  Sense strand starting at position 3444 of SEQ ID NO: 3518
gucuaaguauuguucugaa

SEQ ID NO: 273973 - RNA, 19 nt, Artificial Sequence
  Description of Artificial Sequence: Synthetic oligonucleotide
  Antisense strand to SEQ ID NO: 273972
uucagaacaauacuuagac

SEQ ID NO: 273974 - RNA, 19 nt, Artificial Sequence
  Description of Artificial Sequence: Synthetic oligonucleotide
  Sense strand starting at position 3473 of SEQ ID NO: 3518
ggugauaugcuuugcuacu

SEQ ID NO: 273975 - RNA, 19 nt, Artificial Sequence
  Description of Artificial Sequence: Synthetic oligonucleotide
  Antisense strand to SEQ ID NO: 273974
aguagcaaagcauaucacc

SEQ ID NO: 273976 - RNA, 19 nt, Artificial Sequence
  Description of Artificial Sequence: Synthetic oligonucleotide
  Sense strand starting at position 3474 of SEQ ID NO: 3518
gugauaugcuuugcuacug

SEQ ID NO: 273977 - RNA, 19 nt, Artificial Sequence
  Description of Artificial Sequence: Synthetic oligonucleotide
  Antisense strand to SEQ ID NO: 273976
caguagcaaagcauaucac

SEQ ID NO: 273978 - RNA, 19 nt, Artificial Sequence
  Description of Artificial Sequence: Synthetic oligonucleotide
  Sense strand starting at position 3525 of SEQ ID NO: 3518
gauguaaccuaagaaaugu

SEQ ID NO: 273979 - RNA, 19 nt, Artificial Sequence
  Description of Artificial Sequence: Synthetic oligonucleotide
  Antisense strand to SEQ ID NO: 273978
acauuucuuagguuacauc

SEQ ID NO: 273980 - RNA, 19 nt, Artificial Sequence
  Description of Artificial Sequence: Synthetic oligonucleotide
  Sense strand starting at position 3543 of SEQ ID NO: 3518
uuaauauggugccuugauu

SEQ ID NO: 273981 - RNA, 19 nt, Artificial Sequence
  Description of Artificial Sequence: Synthetic oligonucleotide
  Antisense strand to SEQ ID NO: 273980
aaucaaggcaccauauuaa

SEQ ID NO: 273982 - RNA, 19 nt, Artificial Sequence
  Description of Artificial Sequence: Synthetic oligonucleotide
  Sense strand starting at position 3577 of SEQ ID NO: 3518
ucuccacauuuguaguaaa

SEQ ID NO: 273983 - RNA, 19 nt, Artificial Sequence
  Description of Artificial Sequence: Synthetic oligonucleotide
  Antisense strand to SEQ ID NO: 273982
uuuacuacaaauguggaga

SEQ ID NO: 273984 - RNA, 19 nt, Artificial Sequence
  Description of Artificial Sequence: Synthetic oligonucleotide
  Sense strand starting at position 3597 of SEQ ID NO: 3518
ugugaacucaguugacagu

SEQ ID NO: 273985 - RNA, 19 nt, Artificial Sequence
  Description of Artificial Sequence: Synthetic oligonucleotide
  Antisense strand to SEQ ID NO: 273984
acugucaacugaguucaca

SEQ ID NO: 273986 - RNA, 19 nt, Artificial Sequence
  Description of Artificial Sequence: Synthetic oligonucleotide
  Sense strand starting at position 3726 of SEQ ID NO: 3518
gcuggccaucauggaaaua

SEQ ID NO: 273987 - RNA, 19 nt, Artificial Sequence
  Description of Artificial Sequence: Synthetic oligonucleotide
  Antisense strand to SEQ ID NO: 273986
uauuuccaugauggccagc

SEQ ID NO: 273988 - RNA, 19 nt, Artificial Sequence
  Description of Artificial Sequence: Synthetic oligonucleotide
  Sense strand starting at position 3815 of SEQ ID NO: 3518
auuguuauaugagacacau

SEQ ID NO: 273989 - RNA, 19 nt, Artificial Sequence
  Description of Artificial Sequence: Synthetic oligonucleotide
  Antisense strand to SEQ ID NO: 273988
augugucucauauaacaau

SEQ ID NO: 273990 - RNA, 19 nt, Artificial Sequence
  Description of Artificial Sequence: Synthetic oligonucleotide
  Sense strand starting at position 3824 of SEQ ID NO: 3518
ugagacacauguuuaauga

SEQ ID NO: 273991 - RNA, 19 nt, Artificial Sequence
  Description of Artificial Sequence: Synthetic oligonucleotide
  Antisense strand to SEQ ID NO: 273990
ucauuaaacaugugucuca

SEQ ID NO: 273992 - RNA, 19 nt, Artificial Sequence
  Description of Artificial Sequence: Synthetic oligonucleotide
  Sense strand starting at position 3891 of SEQ ID NO: 3518
aaugaaaguugugucuaau

SEQ ID NO: 273993 - RNA, 19 nt, Artificial Sequence
  Description of Artificial Sequence: Synthetic oligonucleotide
  Antisense strand to SEQ ID NO: 273992
auuagacacaacuuucauu

SEQ ID NO: 273994 - RNA, 19 nt, Artificial Sequence
  Description of Artificial Sequence: Synthetic oligonucleotide
  Sense strand starting at position 3894 of SEQ ID NO: 3518
gaaaguugugucuaaugga

SEQ ID NO: 273995 - RNA, 19 nt, Artificial Sequence
  Description of Artificial Sequence: Synthetic oligonucleotide
  Antisense strand to SEQ ID NO: 273994
uccauuagacacaacuuuc

SEQ ID NO: 273996 - RNA, 19 nt, Artificial Sequence
  Description of Artificial Sequence: Synthetic oligonucleotide
  Sense strand starting at position 31 of SEQ ID NO: 3519
gagugcccuugacuacuaa

SEQ ID NO: 273997 - RNA, 19 nt, Artificial Sequence
  Description of Artificial Sequence: Synthetic oligonucleotide
  Antisense strand to SEQ ID NO: 273996
uuaguagucaagggcacuc

SEQ ID NO: 273998 - RNA, 19 nt, Artificial Sequence
  Description of Artificial Sequence: Synthetic oligonucleotide
  Sense strand starting at position 32 of SEQ ID NO: 3519
agugcccuugacuacuaaa

SEQ ID NO: 273999 - RNA, 19 nt, Artificial Sequence
  Description of Artificial Sequence: Synthetic oligonucleotide
  Antisense strand to SEQ ID NO: 273998
uuuaguagucaagggcacu

SEQ ID NO: 274000 - RNA, 19 nt, Artificial Sequence
  Description of Artificial Sequence: Synthetic oligonucleotide
  Sense strand starting at position 80 of SEQ ID NO: 3519
gccaguauuugguucugcu

SEQ ID NO: 274001 - RNA, 19 nt, Artificial Sequence
  Description of Artificial Sequence: Synthetic oligonucleotide
  Antisense strand to SEQ ID NO: 274000
agcagaaccaaauacuggc

SEQ ID NO: 274002 - RNA, 19 nt, Artificial Sequence
  Description of Artificial Sequence: Synthetic oligonucleotide
  Sense strand starting at position 84 of SEQ ID NO: 3519
guauuugguucugcuacau

SEQ ID NO: 274003 - RNA, 19 nt, Artificial Sequence
  Description of Artificial Sequence: Synthetic oligonucleotide
  Antisense strand to SEQ ID NO: 274002
auguagcagaaccaaauac

SEQ ID NO: 274004 - RNA, 19 nt, Artificial Sequence
  Description of Artificial Sequence: Synthetic oligonucleotide
  Sense strand starting at position 254 of SEQ ID NO: 3519
augguaaacuuagugggaa

SEQ ID NO: 274005 - RNA, 19 nt, Artificial Sequence
  Description of Artificial Sequence: Synthetic oligonucleotide
  Antisense strand to SEQ ID NO: 274004
uucccacuaaguuuaccau

SEQ ID NO: 274006 - RNA, 19 nt, Artificial Sequence
  Description of Artificial Sequence: Synthetic oligonucleotide
  Sense strand starting at position 339 of SEQ ID NO: 3519
guaagagcaucucugacuu

SEQ ID NO: 274007 - RNA, 19 nt, Artificial Sequence
  Description of Artificial Sequence: Synthetic oligonucleotide
  Antisense strand to SEQ ID NO: 274006
aagucagagaugcucuuac

SEQ ID NO: 274008 - RNA, 19 nt, Artificial Sequence
  Description of Artificial Sequence: Synthetic oligonucleotide
  Sense strand starting at position 352 of SEQ ID NO: 3519
ugacuuuggucacuuuaga

SEQ ID NO: 274009 - RNA, 19 nt, Artificial Sequence
  Description of Artificial Sequence: Synthetic oligonucleotide
  Antisense strand to SEQ ID NO: 274008
ucuaaagugaccaaaguca

SEQ ID NO: 274010 - RNA, 19 nt, Artificial Sequence
  Description of Artificial Sequence: Synthetic oligonucleotide
  Sense strand starting at position 366 of SEQ ID NO: 3519
uuagaauaagaauggucuu

SEQ ID NO: 274011 - RNA, 19 nt, Artificial Sequence
  Description of Artificial Sequence: Synthetic oligonucleotide
  Antisense strand to SEQ ID NO: 274010
aagaccauucuuauucuaa

SEQ ID NO: 274012 - RNA, 19 nt, Artificial Sequence
  Description of Artificial Sequence: Synthetic oligonucleotide
  Sense strand starting at position 461 of SEQ ID NO: 3519
cauauucuacuguggagga

SEQ ID NO: 274013 - RNA, 19 nt, Artificial Sequence
  Description of Artificial Sequence: Synthetic oligonucleotide
  Antisense strand to SEQ ID NO: 274012
uccuccacaguagaauaug

SEQ ID NO: 274014 - RNA, 19 nt, Artificial Sequence
  Description of Artificial Sequence: Synthetic oligonucleotide
  Sense strand starting at position 485 of SEQ ID NO: 3519
ugugaacgcagauauugau

SEQ ID NO: 274015 - RNA, 19 nt, Artificial Sequence
  Description of Artificial Sequence: Synthetic oligonucleotide
  Antisense strand to SEQ ID NO: 274014
aucaauaucugcguucaca

SEQ ID NO: 274016 - RNA, 19 nt, Artificial Sequence
  Description of Artificial Sequence: Synthetic oligonucleotide
  Sense strand starting at position 491 of SEQ ID NO: 3519
cgcagauauugaucacauc

SEQ ID NO: 274017 - RNA, 19 nt, Artificial Sequence
  Description of Artificial Sequence: Synthetic oligonucleotide
  Antisense strand to SEQ ID NO: 274016
gaugugaucaauaucugcg

SEQ ID NO: 274018 - RNA, 19 nt, Artificial Sequence
  Description of Artificial Sequence: Synthetic oligonucleotide
  Sense strand starting at position 492 of SEQ ID NO: 3519
gcagauauugaucacaucu

SEQ ID NO: 274019 - RNA, 19 nt, Artificial Sequence
  Description of Artificial Sequence: Synthetic oligonucleotide
  Antisense strand to SEQ ID NO: 274018
agaugugaucaauaucugc

SEQ ID NO: 274020 - RNA, 19 nt, Artificial Sequence
  Description of Artificial Sequence: Synthetic oligonucleotide
  Sense strand starting at position 1343 of SEQ ID NO: 3519
uugaaacuucuccgacacu

SEQ ID NO: 274021 - RNA, 19 nt, Artificial Sequence
  Description of Artificial Sequence: Synthetic oligonucleotide
  Antisense strand to SEQ ID NO: 274020
agugucggagaaguuucaa

SEQ ID NO: 274022 - RNA, 19 nt, Artificial Sequence
  Description of Artificial Sequence: Synthetic oligonucleotide
  Sense strand starting at position 1395 of SEQ ID NO: 3519
agaggaguuaccugcgaga

SEQ ID NO: 274023 - RNA, 19 nt, Artificial Sequence
  Description of Artificial Sequence: Synthetic oligonucleotide
  Antisense strand to SEQ ID NO: 274022
ucucgcagguaacuccucu

SEQ ID NO: 274024 - RNA, 19 nt, Artificial Sequence
  Description of Artificial Sequence: Synthetic oligonucleotide
  Sense strand starting at position 2209 of SEQ ID NO: 3519
aguugugggugagcgauuu

SEQ ID NO: 274025 - RNA, 19 nt, Artificial Sequence
  Description of Artificial Sequence: Synthetic oligonucleotide
  Antisense strand to SEQ ID NO: 274024
aaaucgcucacccacaacu

SEQ ID NO: 274026 - RNA, 19 nt, Artificial Sequence
  Description of Artificial Sequence: Synthetic oligonucleotide
  Sense strand starting at position 2434 of SEQ ID NO: 3519
gaguaacccggagauucuu

SEQ ID NO: 274027 - RNA, 19 nt, Artificial Sequence
  Description of Artificial Sequence: Synthetic oligonucleotide
  Antisense strand to SEQ ID NO: 274026
aagaaucuccggguuacuc

SEQ ID NO: 274028 - RNA, 19 nt, Artificial Sequence
  Description of Artificial Sequence: Synthetic oligonucleotide
  Sense strand starting at position 2440 of SEQ ID NO: 3519
cccggagauucuucuauuc

SEQ ID NO: 274029 - RNA, 19 nt, Artificial Sequence
  Description of Artificial Sequence: Synthetic oligonucleotide
  Antisense strand to SEQ ID NO: 274028
gaauagaagaaucuccggg

SEQ ID NO: 274030 - RNA, 19 nt, Artificial Sequence
  Description of Artificial Sequence: Synthetic oligonucleotide
  Sense strand starting at position 2696 of SEQ ID NO: 3519
acuggaagcguuuaauauu

SEQ ID NO: 274031 - RNA, 19 nt, Artificial Sequence
  Description of Artificial Sequence: Synthetic oligonucleotide
  Antisense strand to SEQ ID NO: 274030
aauauuaaacgcuuccagu

SEQ ID NO: 274032 - RNA, 19 nt, Artificial Sequence
  Description of Artificial Sequence: Synthetic oligonucleotide
  Sense strand starting at position 2885 of SEQ ID NO: 3519
uggccauggccuuaacaaa

SEQ ID NO: 274033 - RNA, 19 nt, Artificial Sequence
  Description of Artificial Sequence: Synthetic oligonucleotide
  Antisense strand to SEQ ID NO: 274032
uuuguuaaggccauggcca

SEQ ID NO: 274034 - RNA, 19 nt, Artificial Sequence
  Description of Artificial Sequence: Synthetic oligonucleotide
  Sense strand starting at position 2942 of SEQ ID NO: 3519
acugucugucgaggacaaa

SEQ ID NO: 274035 - RNA, 19 nt, Artificial Sequence
  Description of Artificial Sequence: Synthetic oligonucleotide
  Antisense strand to SEQ ID NO: 274034
uuuguccucgacagacagu

SEQ ID NO: 274036 - RNA, 19 nt, Artificial Sequence
  Description of Artificial Sequence: Synthetic oligonucleotide
  Sense strand starting at position 3207 of SEQ ID NO: 3519
ggguugagaggaugugaga

SEQ ID NO: 274037 - RNA, 19 nt, Artificial Sequence
  Description of Artificial Sequence: Synthetic oligonucleotide
  Antisense strand to SEQ ID NO: 274036
ucucacauccucucaaccc

SEQ ID NO: 274038 - RNA, 19 nt, Artificial Sequence
  Description of Artificial Sequence: Synthetic oligonucleotide
  Sense strand starting at position 3235 of SEQ ID NO: 3519
guguguagaguuuauaaca

SEQ ID NO: 274039 - RNA, 19 nt, Artificial Sequence
  Description of Artificial Sequence: Synthetic oligonucleotide
  Antisense strand to SEQ ID NO: 274038
uguuauaaacucuacacac

SEQ ID NO: 274040 - RNA, 19 nt, Artificial Sequence
  Description of Artificial Sequence: Synthetic oligonucleotide
  Sense strand starting at position 3306 of SEQ ID NO: 3519
augcuuuaagccuaguaga

SEQ ID NO: 274041 - RNA, 19 nt, Artificial Sequence
  Description of Artificial Sequence: Synthetic oligonucleotide
  Antisense strand to SEQ ID NO: 274040
ucuacuaggcuuaaagcau

SEQ ID NO: 274042 - RNA, 19 nt, Artificial Sequence
  Description of Artificial Sequence: Synthetic oligonucleotide
  Sense strand starting at position 3361 of SEQ ID NO: 3519
cuccuauggccucagaacu

SEQ ID NO: 274043 - RNA, 19 nt, Artificial Sequence
  Description of Artificial Sequence: Synthetic oligonucleotide
  Antisense strand to SEQ ID NO: 274042
aguucugaggccauaggag

SEQ ID NO: 274044 - RNA, 19 nt, Artificial Sequence
  Description of Artificial Sequence: Synthetic oligonucleotide
  Sense strand starting at position 3377 of SEQ ID NO: 3519
acuacauugcuaugggaau

SEQ ID NO: 274045 - RNA, 19 nt, Artificial Sequence
  Description of Artificial Sequence: Synthetic oligonucleotide
  Antisense strand to SEQ ID NO: 274044
auucccauagcaauguagu

SEQ ID NO: 274046 - RNA, 19 nt, Artificial Sequence
  Description of Artificial Sequence: Synthetic oligonucleotide
  Sense strand starting at position 3444 of SEQ ID NO: 3519
gcauguauugcagcaggca

SEQ ID NO: 274047 - RNA, 19 nt, Artificial Sequence
  Description of Artificial Sequence: Synthetic oligonucleotide
  Antisense strand to SEQ ID NO: 274046
ugccugcugcaauacaugc

SEQ ID NO: 274048 - RNA, 19 nt, Artificial Sequence
  Description of Artificial Sequence: Synthetic oligonucleotide
  Sense strand starting at position 3505 of SEQ ID NO: 3519
ugaugcuaaucucugguga

SEQ ID NO: 274049 - RNA, 19 nt, Artificial Sequence
  Description of Artificial Sequence: Synthetic oligonucleotide
  Antisense strand to SEQ ID NO: 274048
ucaccagagauuagcauca

SEQ ID NO: 274050 - RNA, 19 nt, Artificial Sequence
  Description of Artificial Sequence: Synthetic oligonucleotide
  Sense strand starting at position 3570 of SEQ ID NO: 3519
ggcauagaggccuaacuau

SEQ ID NO: 274051 - RNA, 19 nt, Artificial Sequence
  Description of Artificial Sequence: Synthetic oligonucleotide
  Antisense strand to SEQ ID NO: 274050
auaguuaggccucuaugcc

SEQ ID NO: 274052 - RNA, 19 nt, Artificial Sequence
  Description of Artificial Sequence: Synthetic oligonucleotide
  Sense strand starting at position 3577 of SEQ ID NO: 3519
aggccuaacuaugcucaga

SEQ ID NO: 274053 - RNA, 19 nt, Artificial Sequence
  Description of Artificial Sequence: Synthetic oligonucleotide
  Antisense strand to SEQ ID NO: 274052
ucugagcauaguuaggccu

SEQ ID NO: 274054 - RNA, 19 nt, Artificial Sequence
  Description of Artificial Sequence: Synthetic oligonucleotide
  Sense strand starting at position 3579 of SEQ ID NO: 3519
gccuaacuaugcucagaua

SEQ ID NO: 274055 - RNA, 19 nt, Artificial Sequence
  Description of Artificial Sequence: Synthetic oligonucleotide
  Antisense strand to SEQ ID NO: 274054
uaucugagcauaguuaggc

SEQ ID NO: 274056 - RNA, 19 nt, Artificial Sequence
  Description of Artificial Sequence: Synthetic oligonucleotide
  Sense strand starting at position 3613 of SEQ ID NO: 3519
ggaggaagaggcuguucua

SEQ ID NO: 274057 - RNA, 19 nt, Artificial Sequence
  Description of Artificial Sequence: Synthetic oligonucleotide
  Antisense strand to SEQ ID NO: 274056
uagaacagccucuuccucc

SEQ ID NO: 274058 - RNA, 19 nt, Artificial Sequence
  Description of Artificial Sequence: Synthetic oligonucleotide
  Sense strand starting at position 3616 of SEQ ID NO: 3519
ggaagaggcuguucuagga

SEQ ID NO: 274059 - RNA, 19 nt, Artificial Sequence
  Description of Artificial Sequence: Synthetic oligonucleotide
  Antisense strand to SEQ ID NO: 274058
uccuagaacagccucuucc

SEQ ID NO: 274060 - RNA, 19 nt, Artificial Sequence
  Description of Artificial Sequence: Synthetic oligonucleotide
  Sense strand starting at position 3682 of SEQ ID NO: 3519
acugcuuguaugggagaga

SEQ ID NO: 274061 - RNA, 19 nt, Artificial Sequence
  Description of Artificial Sequence: Synthetic oligonucleotide
  Antisense strand to SEQ ID NO: 274060
ucucucccauacaagcagu

SEQ ID NO: 274062 - RNA, 19 nt, Artificial Sequence
  Description of Artificial Sequence: Synthetic oligonucleotide
  Sense strand starting at position 3706 of SEQ ID NO: 3519
gcaugccuggcugaaauaa

SEQ ID NO: 274063 - RNA, 19 nt, Artificial Sequence
  Description of Artificial Sequence: Synthetic oligonucleotide
  Antisense strand to SEQ ID NO: 274062
uuauuucagccaggcaugc

SEQ ID NO: 274064 - RNA, 19 nt, Artificial Sequence
  Description of Artificial Sequence: Synthetic oligonucleotide
  Sense strand starting at position 3754 of SEQ ID NO: 3519
aggacaguugcugggacau

SEQ ID NO: 274065 - RNA, 19 nt, Artificial Sequence
  Description of Artificial Sequence: Synthetic oligonucleotide
  Antisense strand to SEQ ID NO: 274064
augucccagcaacuguccu

SEQ ID NO: 274066 - RNA, 19 nt, Artificial Sequence
  Description of Artificial Sequence: Synthetic oligonucleotide
  Sense strand starting at position 3864 of SEQ ID NO: 3519
ucccuugacccauagcaga

SEQ ID NO: 274067 - RNA, 19 nt, Artificial Sequence
  Description of Artificial Sequence: Synthetic oligonucleotide
  Antisense strand to SEQ ID NO: 274066
ucugcuaugggucaaggga

SEQ ID NO: 274068 - RNA, 19 nt, Artificial Sequence
  Description of Artificial Sequence: Synthetic oligonucleotide
  Sense strand starting at position 3877 of SEQ ID NO: 3519
agcagaugcuauucugaag

SEQ ID NO: 274069 - RNA, 19 nt, Artificial Sequence
  Description of Artificial Sequence: Synthetic oligonucleotide
  Antisense strand to SEQ ID NO: 274068
cuucagaauagcaucugcu

SEQ ID NO: 274070 - RNA, 19 nt, Artificial Sequence
  Description of Artificial Sequence: Synthetic oligonucleotide
  Sense strand starting at position 3884 of SEQ ID NO: 3519
gcuauucugaaguagcaga

SEQ ID NO: 274071 - RNA, 19 nt, Artificial Sequence
  Description of Artificial Sequence: Synthetic oligonucleotide
  Antisense strand to SEQ ID NO: 274070
ucugcuacuucagaauagc

SEQ ID NO: 274072 - RNA, 19 nt, Artificial Sequence
  Description of Artificial Sequence: Synthetic oligonucleotide
  Sense strand starting at position 3904 of SEQ ID NO: 3519
cuaggucugugaguaggau

SEQ ID NO: 274073 - RNA, 19 nt, Artificial Sequence
  Description of Artificial Sequence: Synthetic oligonucleotide
  Antisense strand to SEQ ID NO: 274072
auccuacucacagaccuag

SEQ ID NO: 274074 - RNA, 19 nt, Artificial Sequence
  Description of Artificial Sequence: Synthetic oligonucleotide
  Sense strand starting at position 3905 of SEQ ID NO: 3519
uaggucugugaguaggaua

SEQ ID NO: 274075 - RNA, 19 nt, Artificial Sequence
  Description of Artificial Sequence: Synthetic oligonucleotide
  Antisense strand to SEQ ID NO: 274074
uauccuacucacagaccua

SEQ ID NO: 274076 - RNA, 19 nt, Artificial Sequence
  Description of Artificial Sequence: Synthetic oligonucleotide
  Sense strand starting at position 467 of SEQ ID NO: 3520
aauggucagguuugguuaa

SEQ ID NO: 274077 - RNA, 19 nt, Artificial Sequence
  Description of Artificial Sequence: Synthetic oligonucleotide
  Antisense strand to SEQ ID NO: 274076
uuaaccaaaccugaccauu

SEQ ID NO: 274078 - RNA, 19 nt, Artificial Sequence
  Description of Artificial Sequence: Synthetic oligonucleotide
  Sense strand starting at position 682 of SEQ ID NO: 3520
cuuugaaucuuggccaaac

SEQ ID NO: 274079 - RNA, 19 nt, Artificial Sequence
  Description of Artificial Sequence: Synthetic oligonucleotide
  Antisense strand to SEQ ID NO: 274078
guuuggccaagauucaaag

SEQ ID NO: 274080 - RNA, 19 nt, Artificial Sequence
  Description of Artificial Sequence: Synthetic oligonucleotide
  Sense strand starting at position 683 of SEQ ID NO: 3520
uuugaaucuuggccaaaca

SEQ ID NO: 274081 - RNA, 19 nt, Artificial Sequence
  Description of Artificial Sequence: Synthetic oligonucleotide
  Antisense strand to SEQ ID NO: 274080
uguuuggccaagauucaaa

SEQ ID NO: 274082 - RNA, 19 nt, Artificial Sequence
  Description of Artificial Sequence: Synthetic oligonucleotide
  Sense strand starting at position 684 of SEQ ID NO: 3520
uugaaucuuggccaaacau

SEQ ID NO: 274083 - RNA, 19 nt, Artificial Sequence
  Description of Artificial Sequence: Synthetic oligonucleotide
  Antisense strand to SEQ ID NO: 274082
auguuuggccaagauucaa

SEQ ID NO: 274084 - RNA, 19 nt, Artificial Sequence
  Description of Artificial Sequence: Synthetic oligonucleotide
  Sense strand starting at position 873 of SEQ ID NO: 3520
gcuaguacacagcauauau

SEQ ID NO: 274085 - RNA, 19 nt, Artificial Sequence
  Description of Artificial Sequence: Synthetic oligonucleotide
  Antisense strand to SEQ ID NO: 274084
auauaugcuguguacuagc

SEQ ID NO: 274086 - RNA, 19 nt, Artificial Sequence
  Description of Artificial Sequence: Synthetic oligonucleotide
  Sense strand starting at position 980 of SEQ ID NO: 3520
uggccucaucaguaaucaa

SEQ ID NO: 274087 - RNA, 19 nt, Artificial Sequence
  Description of Artificial Sequence: Synthetic oligonucleotide
  Antisense strand to SEQ ID NO: 274086
uugauuacugaugaggcca

SEQ ID NO: 274088 - RNA, 19 nt, Artificial Sequence
  Description of Artificial Sequence: Synthetic oligonucleotide
  Sense strand starting at position 1005 of SEQ ID NO: 3520
acaaucauccugugcagaa

SEQ ID NO: 274089 - RNA, 19 nt, Artificial Sequence
  Description of Artificial Sequence: Synthetic oligonucleotide
  Antisense strand to SEQ ID NO: 274088
uucugcacaggaugauugu

SEQ ID NO: 274090 - RNA, 19 nt, Artificial Sequence
  Description of Artificial Sequence: Synthetic oligonucleotide
  Sense strand starting at position 1006 of SEQ ID NO: 3520
caaucauccugugcagaag

SEQ ID NO: 274091 - RNA, 19 nt, Artificial Sequence
  Description of Artificial Sequence: Synthetic oligonucleotide
  Antisense strand to SEQ ID NO: 274090
cuucugcacaggaugauug

SEQ ID NO: 274092 - RNA, 19 nt, Artificial Sequence
  Description of Artificial Sequence: Synthetic oligonucleotide
  Sense strand starting at position 1325 of SEQ ID NO: 3520
acccacagucauuaauguu

SEQ ID NO: 274093 - RNA, 19 nt, Artificial Sequence
  Description of Artificial Sequence: Synthetic oligonucleotide
  Antisense strand to SEQ ID NO: 274092
aacauuaaugacugugggu

SEQ ID NO: 274094 - RNA, 19 nt, Artificial Sequence
  Description of Artificial Sequence: Synthetic oligonucleotide
  Sense strand starting at position 1400 of SEQ ID NO: 3520
ucuguuuagcagcacuaaa

SEQ ID NO: 274095 - RNA, 19 nt, Artificial Sequence
  Description of Artificial Sequence: Synthetic oligonucleotide
  Antisense strand to SEQ ID NO: 274094
uuuagugcugcuaaacaga

SEQ ID NO: 274096 - RNA, 19 nt, Artificial Sequence
  Description of Artificial Sequence: Synthetic oligonucleotide
  Sense strand starting at position 1449 of SEQ ID NO: 3520
cuggaaaucugucuuccuu

SEQ ID NO: 274097 - RNA, 19 nt, Artificial Sequence
  Description of Artificial Sequence: Synthetic oligonucleotide
  Antisense strand to SEQ ID NO: 274096
aaggaagacagauuuccag

SEQ ID NO: 274098 - RNA, 19 nt, Artificial Sequence
  Description of Artificial Sequence: Synthetic oligonucleotide
  Sense strand starting at position 1451 of SEQ ID NO: 3520
ggaaaucugucuuccuuug

SEQ ID NO: 274099 - RNA, 19 nt, Artificial Sequence
  Description of Artificial Sequence: Synthetic oligonucleotide
  Antisense strand to SEQ ID NO: 274098
caaaggaagacagauuucc

SEQ ID NO: 274100 - RNA, 19 nt, Artificial Sequence
  Description of Artificial Sequence: Synthetic oligonucleotide
  Sense strand starting at position 1697 of SEQ ID NO: 3520
cagccuuugggacauguaa

SEQ ID NO: 274101 - RNA, 19 nt, Artificial Sequence
  Description of Artificial Sequence: Synthetic oligonucleotide
  Antisense strand to SEQ ID NO: 274100
uuacaugucccaaaggcug

SEQ ID NO: 274102 - RNA, 19 nt, Artificial Sequence
  Description of Artificial Sequence: Synthetic oligonucleotide
  Sense strand starting at position 2110 of SEQ ID NO: 3520
cgggcuguaaaugauaaau

SEQ ID NO: 274103 - RNA, 19 nt, Artificial Sequence
  Description of Artificial Sequence: Synthetic oligonucleotide
  Antisense strand to SEQ ID NO: 274102
auuuaucauuuacagcccg

SEQ ID NO: 274104 - RNA, 19 nt, Artificial Sequence
  Description of Artificial Sequence: Synthetic oligonucleotide
  Sense strand starting at position 2132 of SEQ ID NO: 3520
aacacuuaggcggaagagu

SEQ ID NO: 274105 - RNA, 19 nt, Artificial Sequence
  Description of Artificial Sequence: Synthetic oligonucleotide
  Antisense strand to SEQ ID NO: 274104
acucuuccgccuaaguguu

SEQ ID NO: 274106 - RNA, 19 nt, Artificial Sequence
  Description of Artificial Sequence: Synthetic oligonucleotide
  Sense strand starting at position 2149 of SEQ ID NO: 3520
guucuuaaggcagaugagu

SEQ ID NO: 274107 - RNA, 19 nt, Artificial Sequence
  Description of Artificial Sequence: Synthetic oligonucleotide
  Antisense strand to SEQ ID NO: 274106
acucaucugccuuaagaac

SEQ ID NO: 274108 - RNA, 19 nt, Artificial Sequence
  Description of Artificial Sequence: Synthetic oligonucleotide
  Sense strand starting at position 2273 of SEQ ID NO: 3520
ucgggucugcugggaagaa

SEQ ID NO: 274109 - RNA, 19 nt, Artificial Sequence
  Description of Artificial Sequence: Synthetic oligonucleotide
  Antisense strand to SEQ ID NO: 274108
uucuucccagcagacccga

SEQ ID NO: 274110 - RNA, 19 nt, Artificial Sequence
  Description of Artificial Sequence: Synthetic oligonucleotide
  Sense strand starting at position 2385 of SEQ ID NO: 3520
ucaguuguaagccaggaga

SEQ ID NO: 274111 - RNA, 19 nt, Artificial Sequence
  Description of Artificial Sequence: Synthetic oligonucleotide
  Antisense strand to SEQ ID NO: 274110
ucuccuggcuuacaacuga

SEQ ID NO: 274112 - RNA, 19 nt, Artificial Sequence
  Description of Artificial Sequence: Synthetic oligonucleotide
  Sense strand starting at position 2387 of SEQ ID NO: 3520
aguuguaagccaggagauc

SEQ ID NO: 274113 - RNA, 19 nt, Artificial Sequence
  Description of Artificial Sequence: Synthetic oligonucleotide
  Antisense strand to SEQ ID NO: 274112
gaucuccuggcuuacaacu

SEQ ID NO: 274114 - RNA, 19 nt, Artificial Sequence
  Description of Artificial Sequence: Synthetic oligonucleotide
  Sense strand starting at position 2388 of SEQ ID NO: 3520
guuguaagccaggagauca

SEQ ID NO: 274115 - RNA, 19 nt, Artificial Sequence
  Description of Artificial Sequence: Synthetic oligonucleotide
  Antisense strand to SEQ ID NO: 274114
ugaucuccuggcuuacaac

SEQ ID NO: 274116 - RNA, 19 nt, Artificial Sequence
  Description of Artificial Sequence: Synthetic oligonucleotide
  Sense strand starting at position 2567 of SEQ ID NO: 3520
gguggaugugcacaccaua

SEQ ID NO: 274117 - RNA, 19 nt, Artificial Sequence
  Description of Artificial Sequence: Synthetic oligonucleotide
  Antisense strand to SEQ ID NO: 274116
uauggugugcacauccacc

SEQ ID NO: 274118 - RNA, 19 nt, Artificial Sequence
  Description of Artificial Sequence: Synthetic oligonucleotide
  Sense strand starting at position 2570 of SEQ ID NO: 3520
ggaugugcacaccauagau

SEQ ID NO: 274119 - RNA, 19 nt, Artificial Sequence
  Description of Artificial Sequence: Synthetic oligonucleotide
  Antisense strand to SEQ ID NO: 274118
aucuauggugugcacaucc

SEQ ID NO: 274120 - RNA, 19 nt, Artificial Sequence
  Description of Artificial Sequence: Synthetic oligonucleotide
  Sense strand starting at position 2583 of SEQ ID NO: 3520
auagauuuguugucugcau

SEQ ID NO: 274121 - RNA, 19 nt, Artificial Sequence
  Description of Artificial Sequence: Synthetic oligonucleotide
  Antisense strand to SEQ ID NO: 274120
augcagacaacaaaucuau

SEQ ID NO: 274122 - RNA, 19 nt, Artificial Sequence
  Description of Artificial Sequence: Synthetic oligonucleotide
  Sense strand starting at position 2584 of SEQ ID NO: 3520
uagauuuguugucugcaug

SEQ ID NO: 274123 - RNA, 19 nt, Artificial Sequence
  Description of Artificial Sequence: Synthetic oligonucleotide
  Antisense strand to SEQ ID NO: 274122
caugcagacaacaaaucua

SEQ ID NO: 274124 - RNA, 19 nt, Artificial Sequence
  Description of Artificial Sequence: Synthetic oligonucleotide
  Sense strand starting at position 2585 of SEQ ID NO: 3520
agauuuguugucugcaugu

SEQ ID NO: 274125 - RNA, 19 nt, Artificial Sequence
  Description of Artificial Sequence: Synthetic oligonucleotide
  Antisense strand to SEQ ID NO: 274124
acaugcagacaacaaaucu

SEQ ID NO: 274126 - RNA, 19 nt, Artificial Sequence
  Description of Artificial Sequence: Synthetic oligonucleotide
  Sense strand starting at position 2657 of SEQ ID NO: 3520
guuuccuuuggguaaacua

SEQ ID NO: 274127 - RNA, 19 nt, Artificial Sequence
  Description of Artificial Sequence: Synthetic oligonucleotide
  Antisense strand to SEQ ID NO: 274126
uaguuuacccaaaggaaac

SEQ ID NO: 274128 - RNA, 19 nt, Artificial Sequence
  Description of Artificial Sequence: Synthetic oligonucleotide
  Sense strand starting at position 2708 of SEQ ID NO: 3520
agacaaagcuggcauuuaa

SEQ ID NO: 274129 - RNA, 19 nt, Artificial Sequence
  Description of Artificial Sequence: Synthetic oligonucleotide
  Antisense strand to SEQ ID NO: 274128
uuaaaugccagcuuugucu

SEQ ID NO: 274130 - RNA, 19 nt, Artificial Sequence
  Description of Artificial Sequence: Synthetic oligonucleotide
  Sense strand starting at position 2722 of SEQ ID NO: 3520
uuuaaagccugagugacaa

SEQ ID NO: 274131 - RNA, 19 nt, Artificial Sequence
  Description of Artificial Sequence: Synthetic oligonucleotide
  Antisense strand to SEQ ID NO: 274130
uugucacucaggcuuuaaa

SEQ ID NO: 274132 - RNA, 19 nt, Artificial Sequence
  Description of Artificial Sequence: Synthetic oligonucleotide
  Sense strand starting at position 2736 of SEQ ID NO: 3520
gacaaauacccuugagagu

SEQ ID NO: 274133 - RNA, 19 nt, Artificial Sequence
  Description of Artificial Sequence: Synthetic oligonucleotide
  Antisense strand to SEQ ID NO: 274132
acucucaaggguauuuguc

SEQ ID NO: 274134 - RNA, 19 nt, Artificial Sequence
  Description of Artificial Sequence: Synthetic oligonucleotide
  Sense strand starting at position 2785 of SEQ ID NO: 3520
aaacaauugccuugguuga

SEQ ID NO: 274135 - RNA, 19 nt, Artificial Sequence
  Description of Artificial Sequence: Synthetic oligonucleotide
  Antisense strand to SEQ ID NO: 274134
ucaaccaaggcaauuguuu

SEQ ID NO: 274136 - RNA, 19 nt, Artificial Sequence
  Description of Artificial Sequence: Synthetic oligonucleotide
  Sense strand starting at position 2786 of SEQ ID NO: 3520
aacaauugccuugguugau

SEQ ID NO: 274137 - RNA, 19 nt, Artificial Sequence
  Description of Artificial Sequence: Synthetic oligonucleotide
  Antisense strand to SEQ ID NO: 274136
aucaaccaaggcaauuguu

SEQ ID NO: 274138 - RNA, 19 nt, Artificial Sequence
  Description of Artificial Sequence: Synthetic oligonucleotide
  Sense strand starting at position 2787 of SEQ ID NO: 3520
acaauugccuugguugaua

SEQ ID NO: 274139 - RNA, 19 nt, Artificial Sequence
  Description of Artificial Sequence: Synthetic oligonucleotide
  Antisense strand to SEQ ID NO: 274138
uaucaaccaaggcaauugu

SEQ ID NO: 274140 - RNA, 19 nt, Artificial Sequence
  Description of Artificial Sequence: Synthetic oligonucleotide
  Sense strand starting at position 2861 of SEQ ID NO: 3520
cugggauccugacuucuga

SEQ ID NO: 274141 - RNA, 19 nt, Artificial Sequence
  Description of Artificial Sequence: Synthetic oligonucleotide
  Antisense strand to SEQ ID NO: 274140
ucagaagucaggaucccag

SEQ ID NO: 274142 - RNA, 19 nt, Artificial Sequence
  Description of Artificial Sequence: Synthetic oligonucleotide
  Sense strand starting at position 2872 of SEQ ID NO: 3520
acuucugaggucuagcuaa

SEQ ID NO: 274143 - RNA, 19 nt, Artificial Sequence
  Description of Artificial Sequence: Synthetic oligonucleotide
  Antisense strand to SEQ ID NO: 274142
uuagcuagaccucagaagu

SEQ ID NO: 274144 - RNA, 19 nt, Artificial Sequence
  Description of Artificial Sequence: Synthetic oligonucleotide
  Sense strand starting at position 3271 of SEQ ID NO: 3520
uguuauaaccucuauuguc

SEQ ID NO: 274145 - RNA, 19 nt, Artificial Sequence
  Description of Artificial Sequence: Synthetic oligonucleotide
  Antisense strand to SEQ ID NO: 274144
gacaauagagguuauaaca

SEQ ID NO: 274146 - RNA, 19 nt, Artificial Sequence
  Description of Artificial Sequence: Synthetic oligonucleotide
  Sense strand starting at position 3280 of SEQ ID NO: 3520
cucuauugucuugaguaga

SEQ ID NO: 274147 - RNA, 19 nt, Artificial Sequence
  Description of Artificial Sequence: Synthetic oligonucleotide
  Antisense strand to SEQ ID NO: 274146
ucuacucaagacaauagag

SEQ ID NO: 274148 - RNA, 19 nt, Artificial Sequence
  Description of Artificial Sequence: Synthetic oligonucleotide
  Sense strand starting at position 3509 of SEQ ID NO: 3520
cagcuaguuccagagccua

SEQ ID NO: 274149 - RNA, 19 nt, Artificial Sequence
  Description of Artificial Sequence: Synthetic oligonucleotide
  Antisense strand to SEQ ID NO: 274148
uaggcucuggaacuagcug

SEQ ID NO: 274150 - RNA, 19 nt, Artificial Sequence
  Description of Artificial Sequence: Synthetic oligonucleotide
  Sense strand starting at position 3626 of SEQ ID NO: 3520
uguagacacuugucaacuu

SEQ ID NO: 274151 - RNA, 19 nt, Artificial Sequence
  Description of Artificial Sequence: Synthetic oligonucleotide
  Antisense strand to SEQ ID NO: 274150
aaguugacaagugucuaca

SEQ ID NO: 274152 - RNA, 19 nt, Artificial Sequence
  Description of Artificial Sequence: Synthetic oligonucleotide
  Sense strand starting at position 3751 of SEQ ID NO: 3520
gaacuugccugggcugaau

SEQ ID NO: 274153 - RNA, 19 nt, Artificial Sequence
  Description of Artificial Sequence: Synthetic oligonucleotide
  Antisense strand to SEQ ID NO: 274152
auucagcccaggcaaguuc

SEQ ID NO: 274154 - RNA, 19 nt, Artificial Sequence
  Description of Artificial Sequence: Synthetic oligonucleotide
  Sense strand starting at position 3974 of SEQ ID NO: 3520
acauuugaauguugggaag

SEQ ID NO: 274155 - RNA, 19 nt, Artificial Sequence
  Description of Artificial Sequence: Synthetic oligonucleotide
  Antisense strand to SEQ ID NO: 274154
cuucccaacauucaaaugu

SEQ ID NO: 274156 - RNA, 19 nt, Artificial Sequence
  Description of Artificial Sequence: Synthetic oligonucleotide
  Sense strand starting at position 23 of SEQ ID NO: 3521
cucuguauccuaggagauu

SEQ ID NO: 274157 - RNA, 19 nt, Artificial Sequence
  Description of Artificial Sequence: Synthetic oligonucleotide
  Antisense strand to SEQ ID NO: 274156
aaucuccuaggauacagag

SEQ ID NO: 274158 - RNA, 19 nt, Artificial Sequence
  Description of Artificial Sequence: Synthetic oligonucleotide
  Sense strand starting at position 58 of SEQ ID NO: 3521
cagacaaugugaguuagaa

SEQ ID NO: 274159 - RNA, 19 nt, Artificial Sequence
  Description of Artificial Sequence: Synthetic oligonucleotide
  Antisense strand to SEQ ID NO: 274158
uucuaacucacauugucug

SEQ ID NO: 274160 - RNA, 19 nt, Artificial Sequence
  Description of Artificial Sequence: Synthetic oligonucleotide
  Sense strand starting at position 70 of SEQ ID NO: 3521
guuagaaccuagguauucu

SEQ ID NO: 274161 - RNA, 19 nt, Artificial Sequence
  Description of Artificial Sequence: Synthetic oligonucleotide
  Antisense strand to SEQ ID NO: 274160
agaauaccuagguucuaac

SEQ ID NO: 274162 - RNA, 19 nt, Artificial Sequence
  Description of Artificial Sequence: Synthetic oligonucleotide
  Sense strand starting at position 170 of SEQ ID NO: 3521
gaacaaaggguuugggagu

SEQ ID NO: 274163 - RNA, 19 nt, Artificial Sequence
  Description of Artificial Sequence: Synthetic oligonucleotide
  Antisense strand to SEQ ID NO: 274162
acucccaaacccuuuguuc

SEQ ID NO: 274164 - RNA, 19 nt, Artificial Sequence
  Description of Artificial Sequence: Synthetic oligonucleotide
  Sense strand starting at position 227 of SEQ ID NO: 3521
auaagaaagguuggucuua

SEQ ID NO: 274165 - RNA, 19 nt, Artificial Sequence
  Description of Artificial Sequence: Synthetic oligonucleotide
  Antisense strand to SEQ ID NO: 274164
uaagaccaaccuuucuuau

SEQ ID NO: 274166 - RNA, 19 nt, Artificial Sequence
  Description of Artificial Sequence: Synthetic oligonucleotide
  Sense strand starting at position 228 of SEQ ID NO: 3521
uaagaaagguuggucuuaa

SEQ ID NO: 274167 - RNA, 19 nt, Artificial Sequence
  Description of Artificial Sequence: Synthetic oligonucleotide
  Antisense strand to SEQ ID NO: 274166
uuaagaccaaccuuucuua

SEQ ID NO: 274168 - RNA, 19 nt, Artificial Sequence
  Description of Artificial Sequence: Synthetic oligonucleotide
  Sense strand starting at position 229 of SEQ ID NO: 3521
aagaaagguuggucuuaaa

SEQ ID NO: 274169 - RNA, 19 nt, Artificial Sequence
  Description of Artificial Sequence: Synthetic oligonucleotide
  Antisense strand to SEQ ID NO: 274168
uuuaagaccaaccuuucuu

SEQ ID NO: 274170 - RNA, 19 nt, Artificial Sequence
  Description of Artificial Sequence: Synthetic oligonucleotide
  Sense strand starting at position 361 of SEQ ID NO: 3521
agcgcaauuugguccucaa

SEQ ID NO: 274171 - RNA, 19 nt, Artificial Sequence
  Description of Artificial Sequence: Synthetic oligonucleotide
  Antisense strand to SEQ ID NO: 274170
uugaggaccaaauugcgcu

SEQ ID NO: 274172 - RNA, 19 nt, Artificial Sequence
  Description of Artificial Sequence: Synthetic oligonucleotide
  Sense strand starting at position 372 of SEQ ID NO: 3521
guccucaauuucuaagaga

SEQ ID NO: 274173 - RNA, 19 nt, Artificial Sequence
  Description of Artificial Sequence: Synthetic oligonucleotide
  Antisense strand to SEQ ID NO: 274172
ucucuuagaaauugaggac

SEQ ID NO: 274174 - RNA, 19 nt, Artificial Sequence
  Description of Artificial Sequence: Synthetic oligonucleotide
  Sense strand starting at position 404 of SEQ ID NO: 3521
agagauggacuuuggcaga

SEQ ID NO: 274175 - RNA, 19 nt, Artificial Sequence
  Description of Artificial Sequence: Synthetic oligonucleotide
  Antisense strand to SEQ ID NO: 274174
ucugccaaaguccaucucu

SEQ ID NO: 274176 - RNA, 19 nt, Artificial Sequence
  Description of Artificial Sequence: Synthetic oligonucleotide
  Sense strand starting at position 440 of SEQ ID NO: 3521
ggagauuacagugggauuc

SEQ ID NO: 274177 - RNA, 19 nt, Artificial Sequence
  Description of Artificial Sequence: Synthetic oligonucleotide
  Antisense strand to SEQ ID NO: 274176
gaaucccacuguaaucucc

SEQ ID NO: 274178 - RNA, 19 nt, Artificial Sequence
  Description of Artificial Sequence: Synthetic oligonucleotide
  Sense strand starting at position 451 of SEQ ID NO: 3521
ugggauucagggugucuca

SEQ ID NO: 274179 - RNA, 19 nt, Artificial Sequence
  Description of Artificial Sequence: Synthetic oligonucleotide
  Antisense strand to SEQ ID NO: 274178
ugagacacccugaauccca

SEQ ID NO: 274180 - RNA, 19 nt, Artificial Sequence
  Description of Artificial Sequence: Synthetic oligonucleotide
  Sense strand starting at position 518 of SEQ ID NO: 3521
ugcuucugagaaggauuau

SEQ ID NO: 274181 - RNA, 19 nt, Artificial Sequence
  Description of Artificial Sequence: Synthetic oligonucleotide
  Antisense strand to SEQ ID NO: 274180
auaauccuucucagaagca

SEQ ID NO: 274182 - RNA, 19 nt, Artificial Sequence
  Description of Artificial Sequence: Synthetic oligonucleotide
  Sense strand starting at position 1105 of SEQ ID NO: 3521
guaucacagaucuggaagu

SEQ ID NO: 274183 - RNA, 19 nt, Artificial Sequence
  Description of Artificial Sequence: Synthetic oligonucleotide
  Antisense strand to SEQ ID NO: 274182
acuuccagaucugugauac

SEQ ID NO: 274184 - RNA, 19 nt, Artificial Sequence
  Description of Artificial Sequence: Synthetic oligonucleotide
  Sense strand starting at position 1283 of SEQ ID NO: 3521
ucucuauuaccagggaucu

SEQ ID NO: 274185 - RNA, 19 nt, Artificial Sequence
  Description of Artificial Sequence: Synthetic oligonucleotide
  Antisense strand to SEQ ID NO: 274184
agaucccugguaauagaga

SEQ ID NO: 274186 - RNA, 19 nt, Artificial Sequence
  Description of Artificial Sequence: Synthetic oligonucleotide
  Sense strand starting at position 1411 of SEQ ID NO: 3521
uggaguucaccucaggagu

SEQ ID NO: 274187 - RNA, 19 nt, Artificial Sequence
  Description of Artificial Sequence: Synthetic oligonucleotide
  Antisense strand to SEQ ID NO: 274186
acuccugaggugaacucca

SEQ ID NO: 274188 - RNA, 19 nt, Artificial Sequence
  Description of Artificial Sequence: Synthetic oligonucleotide
  Sense strand starting at position 1596 of SEQ ID NO: 3521
acaauuuaaucagggugga

SEQ ID NO: 274189 - RNA, 19 nt, Artificial Sequence
  Description of Artificial Sequence: Synthetic oligonucleotide
  Antisense strand to SEQ ID NO: 274188
uccacccugauuaaauugu

SEQ ID NO: 274190 - RNA, 19 nt, Artificial Sequence
  Description of Artificial Sequence: Synthetic oligonucleotide
  Sense strand starting at position 2097 of SEQ ID NO: 3521
aagggaguguccucaguug

SEQ ID NO: 274191 - RNA, 19 nt, Artificial Sequence
  Description of Artificial Sequence: Synthetic oligonucleotide
  Antisense strand to SEQ ID NO: 274190
caacugaggacacucccuu

SEQ ID NO: 274192 - RNA, 19 nt, Artificial Sequence
  Description of Artificial Sequence: Synthetic oligonucleotide
  Sense strand starting at position 2154 of SEQ ID NO: 3521
gcauguaauacggcuguuu

SEQ ID NO: 274193 - RNA, 19 nt, Artificial Sequence
  Description of Artificial Sequence: Synthetic oligonucleotide
  Antisense strand to SEQ ID NO: 274192
aaacagccguauuacaugc

SEQ ID NO: 274194 - RNA, 19 nt, Artificial Sequence
  Description of Artificial Sequence: Synthetic oligonucleotide
  Sense strand starting at position 2331 of SEQ ID NO: 3521
caggaaugaugauagaaug

SEQ ID NO: 274195 - RNA, 19 nt, Artificial Sequence
  Description of Artificial Sequence: Synthetic oligonucleotide
  Antisense strand to SEQ ID NO: 274194
cauucuaucaucauuccug

SEQ ID NO: 274196 - RNA, 19 nt, Artificial Sequence
  Description of Artificial Sequence: Synthetic oligonucleotide
  Sense strand starting at position 2481 of SEQ ID NO: 3521
ucagcaccucuggguuaua

SEQ ID NO: 274197 - RNA, 19 nt, Artificial Sequence
  Description of Artificial Sequence: Synthetic oligonucleotide
  Antisense strand to SEQ ID NO: 274196
uauaacccagaggugcuga

SEQ ID NO: 274198 - RNA, 19 nt, Artificial Sequence
  Description of Artificial Sequence: Synthetic oligonucleotide
  Sense strand starting at position 2482 of SEQ ID NO: 3521
cagcaccucuggguuauaa

SEQ ID NO: 274199 - RNA, 19 nt, Artificial Sequence
  Description of Artificial Sequence: Synthetic oligonucleotide
  Antisense strand to SEQ ID NO: 274198
uuauaacccagaggugcug

SEQ ID NO: 274200 - RNA, 19 nt, Artificial Sequence
  Description of Artificial Sequence: Synthetic oligonucleotide
  Sense strand starting at position 2484 of SEQ ID NO: 3521
gcaccucuggguuauaagu

SEQ ID NO: 274201 - RNA, 19 nt, Artificial Sequence
  Description of Artificial Sequence: Synthetic oligonucleotide
  Antisense strand to SEQ ID NO: 274200
acuuauaacccagaggugc

SEQ ID NO: 274202 - RNA, 19 nt, Artificial Sequence
  Description of Artificial Sequence: Synthetic oligonucleotide
  Sense strand starting at position 2500 of SEQ ID NO: 3521
agucauagcccucagaaug

SEQ ID NO: 274203 - RNA, 19 nt, Artificial Sequence
  Description of Artificial Sequence: Synthetic oligonucleotide
  Antisense strand to SEQ ID NO: 274202
cauucugagggcuaugacu

SEQ ID NO: 274204 - RNA, 19 nt, Artificial Sequence
  Description of Artificial Sequence: Synthetic oligonucleotide
  Sense strand starting at position 2550 of SEQ ID NO: 3521
uuauaaagaugugugcaga

SEQ ID NO: 274205 - RNA, 19 nt, Artificial Sequence
  Description of Artificial Sequence: Synthetic oligonucleotide
  Antisense strand to SEQ ID NO: 274204
ucugcacacaucuuuauaa

SEQ ID NO: 274206 - RNA, 19 nt, Artificial Sequence
  Description of Artificial Sequence: Synthetic oligonucleotide
  Sense strand starting at position 2553 of SEQ ID NO: 3521
uaaagaugugugcagagau

SEQ ID NO: 274207 - RNA, 19 nt, Artificial Sequence
  Description of Artificial Sequence: Synthetic oligonucleotide
  Antisense strand to SEQ ID NO: 274206
aucucugcacacaucuuua

SEQ ID NO: 274208 - RNA, 19 nt, Artificial Sequence
  Description of Artificial Sequence: Synthetic oligonucleotide
  Sense strand starting at position 2592 of SEQ ID NO: 3521
aacugugugaaauggugua

SEQ ID NO: 274209 - RNA, 19 nt, Artificial Sequence
  Description of Artificial Sequence: Synthetic oligonucleotide
  Antisense strand to SEQ ID NO: 274208
uacaccauuucacacaguu

SEQ ID NO: 274210 - RNA, 19 nt, Artificial Sequence
  Description of Artificial Sequence: Synthetic oligonucleotide
  Sense strand starting at position 2638 of SEQ ID NO: 3521
cuaucaugguuuccacaag

SEQ ID NO: 274211 - RNA, 19 nt, Artificial Sequence
  Description of Artificial Sequence: Synthetic oligonucleotide
  Antisense strand to SEQ ID NO: 274210
cuuguggaaaccaugauag

SEQ ID NO: 274212 - RNA, 19 nt, Artificial Sequence
  Description of Artificial Sequence: Synthetic oligonucleotide
  Sense strand starting at position 2681 of SEQ ID NO: 3521
accauuagugauuauagcu

SEQ ID NO: 274213 - RNA, 19 nt, Artificial Sequence
  Description of Artificial Sequence: Synthetic oligonucleotide
  Antisense strand to SEQ ID NO: 274212
agcuauaaucacuaauggu

SEQ ID NO: 274214 - RNA, 19 nt, Artificial Sequence
  Description of Artificial Sequence: Synthetic oligonucleotide
  Sense strand starting at position 2956 of SEQ ID NO: 3521
aucauauaucuguguuaac

SEQ ID NO: 274215 - RNA, 19 nt, Artificial Sequence
  Description of Artificial Sequence: Synthetic oligonucleotide
  Antisense strand to SEQ ID NO: 274214
guuaacacagauauaugau

SEQ ID NO: 274216 - RNA, 19 nt, Artificial Sequence
  Description of Artificial Sequence: Synthetic oligonucleotide
  Sense strand starting at position 3431 of SEQ ID NO: 3521
uuggguugucuauauucuu

SEQ ID NO: 274217 - RNA, 19 nt, Artificial Sequence
  Description of Artificial Sequence: Synthetic oligonucleotide
  Antisense strand to SEQ ID NO: 274216
aagaauauagacaacccaa

SEQ ID NO: 274218 - RNA, 19 nt, Artificial Sequence
  Description of Artificial Sequence: Synthetic oligonucleotide
  Sense strand starting at position 3437 of SEQ ID NO: 3521
ugucuauauucuuuacuga

SEQ ID NO: 274219 - RNA, 19 nt, Artificial Sequence
  Description of Artificial Sequence: Synthetic oligonucleotide
  Antisense strand to SEQ ID NO: 274218
ucaguaaagaauauagaca

SEQ ID NO: 274220 - RNA, 19 nt, Artificial Sequence
  Description of Artificial Sequence: Synthetic oligonucleotide
  Sense strand starting at position 3438 of SEQ ID NO: 3521
gucuauauucuuuacugag

SEQ ID NO: 274221 - RNA, 19 nt, Artificial Sequence
  Description of Artificial Sequence: Synthetic oligonucleotide
  Antisense strand to SEQ ID NO: 274220
cucaguaaagaauauagac

SEQ ID NO: 274222 - RNA, 19 nt, Artificial Sequence
  Description of Artificial Sequence: Synthetic oligonucleotide
  Sense strand starting at position 3440 of SEQ ID NO: 3521
cuauauucuuuacugagag

SEQ ID NO: 274223 - RNA, 19 nt, Artificial Sequence
  Description of Artificial Sequence: Synthetic oligonucleotide
  Antisense strand to SEQ ID NO: 274222
cucucaguaaagaauauag

SEQ ID NO: 274224 - RNA, 19 nt, Artificial Sequence
  Description of Artificial Sequence: Synthetic oligonucleotide
  Sense strand starting at position 3465 of SEQ ID NO: 3521
uugauagaagaguaguagu

SEQ ID NO: 274225 - RNA, 19 nt, Artificial Sequence
  Description of Artificial Sequence: Synthetic oligonucleotide
  Antisense strand to SEQ ID NO: 274224
acuacuacucuucuaucaa

SEQ ID NO: 274226 - RNA, 19 nt, Artificial Sequence
  Description of Artificial Sequence: Synthetic oligonucleotide
  Sense strand starting at position 3473 of SEQ ID NO: 3521
agaguaguaguaugaagga

SEQ ID NO: 274227 - RNA, 19 nt, Artificial Sequence
  Description of Artificial Sequence: Synthetic oligonucleotide
  Antisense strand to SEQ ID NO: 274226
uccuucauacuacuacucu

SEQ ID NO: 274228 - RNA, 19 nt, Artificial Sequence
  Description of Artificial Sequence: Synthetic oligonucleotide
  Sense strand starting at position 3707 of SEQ ID NO: 3521
ccaucuuucugagucacua

SEQ ID NO: 274229 - RNA, 19 nt, Artificial Sequence
  Description of Artificial Sequence: Synthetic oligonucleotide
  Antisense strand to SEQ ID NO: 274228
uagugacucagaaagaugg

SEQ ID NO: 274230 - RNA, 19 nt, Artificial Sequence
  Description of Artificial Sequence: Synthetic oligonucleotide
  Sense strand starting at position 3759 of SEQ ID NO: 3521
ccucuuggguaaucuguga

SEQ ID NO: 274231 - RNA, 19 nt, Artificial Sequence
  Description of Artificial Sequence: Synthetic oligonucleotide
  Antisense strand to SEQ ID NO: 274230
ucacagauuacccaagagg

SEQ ID NO: 274232 - RNA, 19 nt, Artificial Sequence
  Description of Artificial Sequence: Synthetic oligonucleotide
  Sense strand starting at position 3780 of SEQ ID NO: 3521
gguguuaucacucauagug

SEQ ID NO: 274233 - RNA, 19 nt, Artificial Sequence
  Description of Artificial Sequence: Synthetic oligonucleotide
  Antisense strand to SEQ ID NO: 274232
cacuaugagugauaacacc

SEQ ID NO: 274234 - RNA, 19 nt, Artificial Sequence
  Description of Artificial Sequence: Synthetic oligonucleotide
  Sense strand starting at position 3915 of SEQ ID NO: 3521
agguuaguaugguuccaga

SEQ ID NO: 274235 - RNA, 19 nt, Artificial Sequence
  Description of Artificial Sequence: Synthetic oligonucleotide
  Antisense strand to SEQ ID NO: 274234
ucuggaaccauacuaaccu

SEQ ID NO: 274236 - RNA, 19 nt, Artificial Sequence
  Description of Artificial Sequence: Synthetic oligonucleotide
  Sense strand starting at position 12 of SEQ ID NO: 3522
uucugaccuguggguuaaa

SEQ ID NO: 274237 - RNA, 19 nt, Artificial Sequence
  Description of Artificial Sequence: Synthetic oligonucleotide
  Antisense strand to SEQ ID NO: 274236
uuuaacccacaggucagaa

SEQ ID NO: 274238 - RNA, 19 nt, Artificial Sequence
  Description of Artificial Sequence: Synthetic oligonucleotide
  Sense strand starting at position 40 of SEQ ID NO: 3522
guaauuucccuuuguccaa

SEQ ID NO: 274239 - RNA, 19 nt, Artificial Sequence
  Description of Artificial Sequence: Synthetic oligonucleotide
  Antisense strand to SEQ ID NO: 274238
uuggacaaagggaaauuac

SEQ ID NO: 274240 - RNA, 19 nt, Artificial Sequence
  Description of Artificial Sequence: Synthetic oligonucleotide
  Sense strand starting at position 185 of SEQ ID NO: 3522
uuuaaacuuccauguguca

SEQ ID NO: 274241 - RNA, 19 nt, Artificial Sequence
  Description of Artificial Sequence: Synthetic oligonucleotide
  Antisense strand to SEQ ID NO: 274240
ugacacauggaaguuuaaa

SEQ ID NO: 274242 - RNA, 19 nt, Artificial Sequence
  Description of Artificial Sequence: Synthetic oligonucleotide
  Sense strand starting at position 232 of SEQ ID NO: 3522
acauucugugguuagucua

SEQ ID NO: 274243 - RNA, 19 nt, Artificial Sequence
  Description of Artificial Sequence: Synthetic oligonucleotide
  Antisense strand to SEQ ID NO: 274242
uagacuaaccacagaaugu

SEQ ID NO: 274244 - RNA, 19 nt, Artificial Sequence
  Description of Artificial Sequence: Synthetic oligonucleotide
  Sense strand starting at position 377 of SEQ ID NO: 3522
uugucauugagggaugugu

SEQ ID NO: 274245 - RNA, 19 nt, Artificial Sequence
  Description of Artificial Sequence: Synthetic oligonucleotide
  Antisense strand to SEQ ID NO: 274244
acacaucccucaaugacaa

SEQ ID NO: 274246 - RNA, 19 nt, Artificial Sequence
  Description of Artificial Sequence: Synthetic oligonucleotide
  Sense strand starting at position 489 of SEQ ID NO: 3522
ugacauacauuugauugau

SEQ ID NO: 274247 - RNA, 19 nt, Artificial Sequence
  Description of Artificial Sequence: Synthetic oligonucleotide
  Antisense strand to SEQ ID NO: 274246
aucaaucaaauguauguca

SEQ ID NO: 274248 - RNA, 19 nt, Artificial Sequence
  Description of Artificial Sequence: Synthetic oligonucleotide
  Sense strand starting at position 499 of SEQ ID NO: 3522
uugauugauuacucacaug

SEQ ID NO: 274249 - RNA, 19 nt, Artificial Sequence
  Description of Artificial Sequence: Synthetic oligonucleotide
  Antisense strand to SEQ ID NO: 274248
caugugaguaaucaaucaa

SEQ ID NO: 274250 - RNA, 19 nt, Artificial Sequence
  Description of Artificial Sequence: Synthetic oligonucleotide
  Sense strand starting at position 552 of SEQ ID NO: 3522
gaggguucuuuccuaaaua

SEQ ID NO: 274251 - RNA, 19 nt, Artificial Sequence
  Description of Artificial Sequence: Synthetic oligonucleotide
  Antisense strand to SEQ ID NO: 274250
uauuuaggaaagaacccuc

SEQ ID NO: 274252 - RNA, 19 nt, Artificial Sequence
  Description of Artificial Sequence: Synthetic oligonucleotide
  Sense strand starting at position 696 of SEQ ID NO: 3522
gagagaaauucugugaggu

SEQ ID NO: 274253 - RNA, 19 nt, Artificial Sequence
  Description of Artificial Sequence: Synthetic oligonucleotide
  Antisense strand to SEQ ID NO: 274252
accucacagaauuucucuc

SEQ ID NO: 274254 - RNA, 19 nt, Artificial Sequence
  Description of Artificial Sequence: Synthetic oligonucleotide
  Sense strand starting at position 697 of SEQ ID NO: 3522
agagaaauucugugaggug

SEQ ID NO: 274255 - RNA, 19 nt, Artificial Sequence
  Description of Artificial Sequence: Synthetic oligonucleotide
  Antisense strand to SEQ ID NO: 274254
caccucacagaauuucucu

SEQ ID NO: 274256 - RNA, 19 nt, Artificial Sequence
  Description of Artificial Sequence: Synthetic oligonucleotide
  Sense strand starting at position 702 of SEQ ID NO: 3522
aauucugugaggugauuag

SEQ ID NO: 274257 - RNA, 19 nt, Artificial Sequence
  Description of Artificial Sequence: Synthetic oligonucleotide
  Antisense strand to SEQ ID NO: 274256
cuaaucaccucacagaauu

SEQ ID NO: 274258 - RNA, 19 nt, Artificial Sequence
  Description of Artificial Sequence: Synthetic oligonucleotide
  Sense strand starting at position 804 of SEQ ID NO: 3522
gugcuuucugcagcgcaaa

SEQ ID NO: 274259 - RNA, 19 nt, Artificial Sequence
  Description of Artificial Sequence: Synthetic oligonucleotide
  Antisense strand to SEQ ID NO: 274258
uuugcgcugcagaaagcac

SEQ ID NO: 274260 - RNA, 19 nt, Artificial Sequence
  Description of Artificial Sequence: Synthetic oligonucleotide
  Sense strand starting at position 955 of SEQ ID NO: 3522
gagaguaagcugugcauuu

SEQ ID NO: 274261 - RNA, 19 nt, Artificial Sequence
  Description of Artificial Sequence: Synthetic oligonucleotide
  Antisense strand to SEQ ID NO: 274260
aaaugcacagcuuacucuc

SEQ ID NO: 274262 - RNA, 19 nt, Artificial Sequence
  Description of Artificial Sequence: Synthetic oligonucleotide
  Sense strand starting at position 1068 of SEQ ID NO: 3522
ccaucaacgguuuagugaa

SEQ ID NO: 274263 - RNA, 19 nt, Artificial Sequence
  Description of Artificial Sequence: Synthetic oligonucleotide
  Antisense strand to SEQ ID NO: 274262
uucacuaaaccguugaugg

SEQ ID NO: 274264 - RNA, 19 nt, Artificial Sequence
  Description of Artificial Sequence: Synthetic oligonucleotide
  Sense strand starting at position 1354 of SEQ ID NO: 3522
cuuugcuuaccuugaugau

SEQ ID NO: 274265 - RNA, 19 nt, Artificial Sequence
  Description of Artificial Sequence: Synthetic oligonucleotide
  Antisense strand to SEQ ID NO: 274264
aucaucaagguaagcaaag

SEQ ID NO: 274266 - RNA, 19 nt, Artificial Sequence
  Description of Artificial Sequence: Synthetic oligonucleotide
  Sense strand starting at position 2242 of SEQ ID NO: 3522
cgaagaauggaauguguuc

SEQ ID NO: 274267 - RNA, 19 nt, Artificial Sequence
  Description of Artificial Sequence: Synthetic oligonucleotide
  Antisense strand to SEQ ID NO: 274266
gaacacauuccauucuucg

SEQ ID NO: 274268 - RNA, 19 nt, Artificial Sequence
  Description of Artificial Sequence: Synthetic oligonucleotide
  Sense strand starting at position 2247 of SEQ ID NO: 3522
aauggaauguguucugcaa

SEQ ID NO: 274269 - RNA, 19 nt, Artificial Sequence
  Description of Artificial Sequence: Synthetic oligonucleotide
  Antisense strand to SEQ ID NO: 274268
uugcagaacacauuccauu

SEQ ID NO: 274270 - RNA, 19 nt, Artificial Sequence
  Description of Artificial Sequence: Synthetic oligonucleotide
  Sense strand starting at position 2338 of SEQ ID NO: 3522
aggcgcuccguguauauuu

SEQ ID NO: 274271 - RNA, 19 nt, Artificial Sequence
  Description of Artificial Sequence: Synthetic oligonucleotide
  Antisense strand to SEQ ID NO: 274270
aaauauacacggagcgccu

SEQ ID NO: 274272 - RNA, 19 nt, Artificial Sequence
  Description of Artificial Sequence: Synthetic oligonucleotide
  Sense strand starting at position 2373 of SEQ ID NO: 3522
gcgaaaugagccugagaug

SEQ ID NO: 274273 - RNA, 19 nt, Artificial Sequence
  Description of Artificial Sequence: Synthetic oligonucleotide
  Antisense strand to SEQ ID NO: 274272
caucucaggcucauuucgc

SEQ ID NO: 274274 - RNA, 19 nt, Artificial Sequence
  Description of Artificial Sequence: Synthetic oligonucleotide
  Sense strand starting at position 2449 of SEQ ID NO: 3522
caaagcaauuuggaggaaa

SEQ ID NO: 274275 - RNA, 19 nt, Artificial Sequence
  Description of Artificial Sequence: Synthetic oligonucleotide
  Antisense strand to SEQ ID NO: 274274
uuuccuccaaauugcuuug

SEQ ID NO: 274276 - RNA, 19 nt, Artificial Sequence
  Description of Artificial Sequence: Synthetic oligonucleotide
  Sense strand starting at position 2468 of SEQ ID NO: 3522
guggguauugaguaugaau

SEQ ID NO: 274277 - RNA, 19 nt, Artificial Sequence
  Description of Artificial Sequence: Synthetic oligonucleotide
  Antisense strand to SEQ ID NO: 274276
auucauacucaauacccac

SEQ ID NO: 274278 - RNA, 19 nt, Artificial Sequence
  Description of Artificial Sequence: Synthetic oligonucleotide
  Sense strand starting at position 2470 of SEQ ID NO: 3522
ggguauugaguaugaaugu

SEQ ID NO: 274279 - RNA, 19 nt, Artificial Sequence
  Description of Artificial Sequence: Synthetic oligonucleotide
  Antisense strand to SEQ ID NO: 274278
acauucauacucaauaccc

SEQ ID NO: 274280 - RNA, 19 nt, Artificial Sequence
  Description of Artificial Sequence: Synthetic oligonucleotide
  Sense strand starting at position 2588 of SEQ ID NO: 3522
uaggguuuacugggaucuu

SEQ ID NO: 274281 - RNA, 19 nt, Artificial Sequence
  Description of Artificial Sequence: Synthetic oligonucleotide
  Antisense strand to SEQ ID NO: 274280
aagaucccaguaaacccua

SEQ ID NO: 274282 - RNA, 19 nt, Artificial Sequence
  Description of Artificial Sequence: Synthetic oligonucleotide
  Sense strand starting at position 2685 of SEQ ID NO: 3522
gggagucagugaaagagau

SEQ ID NO: 274283 - RNA, 19 nt, Artificial Sequence
  Description of Artificial Sequence: Synthetic oligonucleotide
  Antisense strand to SEQ ID NO: 274282
aucucuuucacugacuccc

SEQ ID NO: 274284 - RNA, 19 nt, Artificial Sequence
  Description of Artificial Sequence: Synthetic oligonucleotide
  Sense strand starting at position 2737 of SEQ ID NO: 3522
uccgaagacugacucuuaa

SEQ ID NO: 274285 - RNA, 19 nt, Artificial Sequence
  Description of Artificial Sequence: Synthetic oligonucleotide
  Antisense strand to SEQ ID NO: 274284
uuaagagucagucuucgga

SEQ ID NO: 274286 - RNA, 19 nt, Artificial Sequence
  Description of Artificial Sequence: Synthetic oligonucleotide
  Sense strand starting at position 2795 of SEQ ID NO: 3522
ggaguuuagucucuauccu

SEQ ID NO: 274287 - RNA, 19 nt, Artificial Sequence
  Description of Artificial Sequence: Synthetic oligonucleotide
  Antisense strand to SEQ ID NO: 274286
aggauagagacuaaacucc

SEQ ID NO: 274288 - RNA, 19 nt, Artificial Sequence
  Description of Artificial Sequence: Synthetic oligonucleotide
  Sense strand starting at position 2921 of SEQ ID NO: 3522
uuuggaugaugaguuaagu

SEQ ID NO: 274289 - RNA, 19 nt, Artificial Sequence
  Description of Artificial Sequence: Synthetic oligonucleotide
  Antisense strand to SEQ ID NO: 274288
acuuaacucaucauccaaa

SEQ ID NO: 274290 - RNA, 19 nt, Artificial Sequence
  Description of Artificial Sequence: Synthetic oligonucleotide
  Sense strand starting at position 2930 of SEQ ID NO: 3522
ugaguuaagucacugaaau

SEQ ID NO: 274291 - RNA, 19 nt, Artificial Sequence
  Description of Artificial Sequence: Synthetic oligonucleotide
  Antisense strand to SEQ ID NO: 274290
auuucagugacuuaacuca

SEQ ID NO: 274292 - RNA, 19 nt, Artificial Sequence
  Description of Artificial Sequence: Synthetic oligonucleotide
  Sense strand starting at position 2931 of SEQ ID NO: 3522
gaguuaagucacugaaauu

SEQ ID NO: 274293 - RNA, 19 nt, Artificial Sequence
  Description of Artificial Sequence: Synthetic oligonucleotide
  Antisense strand to SEQ ID NO: 274292
aauuucagugacuuaacuc

SEQ ID NO: 274294 - RNA, 19 nt, Artificial Sequence
  Description of Artificial Sequence: Synthetic oligonucleotide
  Sense strand starting at position 3126 of SEQ ID NO: 3522
uggcuaacagcaugagaaa

SEQ ID NO: 274295 - RNA, 19 nt, Artificial Sequence
  Description of Artificial Sequence: Synthetic oligonucleotide
  Antisense strand to SEQ ID NO: 274294
uuucucaugcuguuagcca

SEQ ID NO: 274296 - RNA, 19 nt, Artificial Sequence
  Description of Artificial Sequence: Synthetic oligonucleotide
  Sense strand starting at position 3258 of SEQ ID NO: 3522
cagggagucuugucuacua

SEQ ID NO: 274297 - RNA, 19 nt, Artificial Sequence
  Description of Artificial Sequence: Synthetic oligonucleotide
  Antisense strand to SEQ ID NO: 274296
uaguagacaagacucccug

SEQ ID NO: 274298 - RNA, 19 nt, Artificial Sequence
  Description of Artificial Sequence: Synthetic oligonucleotide
  Sense strand starting at position 3260 of SEQ ID NO: 3522
gggagucuugucuacuagu

SEQ ID NO: 274299 - RNA, 19 nt, Artificial Sequence
  Description of Artificial Sequence: Synthetic oligonucleotide
  Antisense strand to SEQ ID NO: 274298
acuaguagacaagacuccc

SEQ ID NO: 274300 - RNA, 19 nt, Artificial Sequence
  Description of Artificial Sequence: Synthetic oligonucleotide
  Sense strand starting at position 3462 of SEQ ID NO: 3522
auaaaugcagccuaguaau

SEQ ID NO: 274301 - RNA, 19 nt, Artificial Sequence
  Description of Artificial Sequence: Synthetic oligonucleotide
  Antisense strand to SEQ ID NO: 274300
auuacuaggcugcauuuau

SEQ ID NO: 274302 - RNA, 19 nt, Artificial Sequence
  Description of Artificial Sequence: Synthetic oligonucleotide
  Sense strand starting at position 3481 of SEQ ID NO: 3522
gaauguacuguagagagua

SEQ ID NO: 274303 - RNA, 19 nt, Artificial Sequence
  Description of Artificial Sequence: Synthetic oligonucleotide
  Antisense strand to SEQ ID NO: 274302
uacucucuacaguacauuc

SEQ ID NO: 274304 - RNA, 19 nt, Artificial Sequence
  Description of Artificial Sequence: Synthetic oligonucleotide
  Sense strand starting at position 3544 of SEQ ID NO: 3522
uucugagaacugcauccau

SEQ ID NO: 274305 - RNA, 19 nt, Artificial Sequence
  Description of Artificial Sequence: Synthetic oligonucleotide
  Antisense strand to SEQ ID NO: 274304
auggaugcaguucucagaa

SEQ ID NO: 274306 - RNA, 19 nt, Artificial Sequence
  Description of Artificial Sequence: Synthetic oligonucleotide
  Sense strand starting at position 3731 of SEQ ID NO: 3522
gggaauuccugucuaugcu

SEQ ID NO: 274307 - RNA, 19 nt, Artificial Sequence
  Description of Artificial Sequence: Synthetic oligonucleotide
  Antisense strand to SEQ ID NO: 274306
agcauagacaggaauuccc

SEQ ID NO: 274308 - RNA, 19 nt, Artificial Sequence
  Description of Artificial Sequence: Synthetic oligonucleotide
  Sense strand starting at position 3732 of SEQ ID NO: 3522
ggaauuccugucuaugcua

SEQ ID NO: 274309 - RNA, 19 nt, Artificial Sequence
  Description of Artificial Sequence: Synthetic oligonucleotide
  Antisense strand to SEQ ID NO: 274308
uagcauagacaggaauucc

SEQ ID NO: 274310 - RNA, 19 nt, Artificial Sequence
  Description of Artificial Sequence: Synthetic oligonucleotide
  Sense strand starting at position 3739 of SEQ ID NO: 3522
cugucuaugcuauauagga

SEQ ID NO: 274311 - RNA, 19 nt, Artificial Sequence
  Description of Artificial Sequence: Synthetic oligonucleotide
  Antisense strand to SEQ ID NO: 274310
uccuauauagcauagacag

SEQ ID NO: 274312 - RNA, 19 nt, Artificial Sequence
  Description of Artificial Sequence: Synthetic oligonucleotide
  Sense strand starting at position 3848 of SEQ ID NO: 3522
gucauuuacaguugucagu

SEQ ID NO: 274313 - RNA, 19 nt, Artificial Sequence
  Description of Artificial Sequence: Synthetic oligonucleotide
  Antisense strand to SEQ ID NO: 274312
acugacaacuguaaaugac

SEQ ID NO: 274314 - RNA, 19 nt, Artificial Sequence
  Description of Artificial Sequence: Synthetic oligonucleotide
  Sense strand starting at position 3947 of SEQ ID NO: 3522
cucauuaucuuguuauagg

SEQ ID NO: 274315 - RNA, 19 nt, Artificial Sequence
  Description of Artificial Sequence: Synthetic oligonucleotide
  Antisense strand to SEQ ID NO: 274314
ccuauaacaagauaaugag

SEQ ID NO: 274316 - RNA, 19 nt, Artificial Sequence
  Description of Artificial Sequence: Synthetic oligonucleotide
  Sense strand starting at position 241 of SEQ ID NO: 3523
uuuguaauuuagggagauu

SEQ ID NO: 274317 - RNA, 19 nt, Artificial Sequence
  Description of Artificial Sequence: Synthetic oligonucleotide
  Antisense strand to SEQ ID NO: 274316
aaucucccuaaauuacaaa

SEQ ID NO: 274318 - RNA, 19 nt, Artificial Sequence
  Description of Artificial Sequence: Synthetic oligonucleotide
  Sense strand starting at position 362 of SEQ ID NO: 3523
ugcucuucucaggauacua

SEQ ID NO: 274319 - RNA, 19 nt, Artificial Sequence
  Description of Artificial Sequence: Synthetic oligonucleotide
  Antisense strand to SEQ ID NO: 274318
uaguauccugagaagagca

SEQ ID NO: 274320 - RNA, 19 nt, Artificial Sequence
  Description of Artificial Sequence: Synthetic oligonucleotide
  Sense strand starting at position 379 of SEQ ID NO: 3523
uagcacaagugaucaggaa

SEQ ID NO: 274321 - RNA, 19 nt, Artificial Sequence
  Description of Artificial Sequence: Synthetic oligonucleotide
  Antisense strand to SEQ ID NO: 274320
uuccugaucacuugugcua

SEQ ID NO: 274322 - RNA, 19 nt, Artificial Sequence
  Description of Artificial Sequence: Synthetic oligonucleotide
  Sense strand starting at position 545 of SEQ ID NO: 3523
gcccacuuauucuccagua

SEQ ID NO: 274323 - RNA, 19 nt, Artificial Sequence
  Description of Artificial Sequence: Synthetic oligonucleotide
  Antisense strand to SEQ ID NO: 274322
uacuggagaauaagugggc

SEQ ID NO: 274324 - RNA, 19 nt, Artificial Sequence
  Description of Artificial Sequence: Synthetic oligonucleotide
  Sense strand starting at position 764 of SEQ ID NO: 3523
ucugcaaaugaaggaauua

SEQ ID NO: 274325 - RNA, 19 nt, Artificial Sequence
  Description of Artificial Sequence: Synthetic oligonucleotide
  Antisense strand to SEQ ID NO: 274324
uaauuccuucauuugcaga

SEQ ID NO: 274326 - RNA, 19 nt, Artificial Sequence
  Description of Artificial Sequence: Synthetic oligonucleotide
  Sense strand starting at position 865 of SEQ ID NO: 3523
uagaacauuguagguuaaa

SEQ ID NO: 274327 - RNA, 19 nt, Artificial Sequence
  Description of Artificial Sequence: Synthetic oligonucleotide
  Antisense strand to SEQ ID NO: 274326
uuuaaccuacaauguucua

SEQ ID NO: 274328 - RNA, 19 nt, Artificial Sequence
  Description of Artificial Sequence: Synthetic oligonucleotide
  Sense strand starting at position 1030 of SEQ ID NO: 3523
agguguugcccacaggaca

SEQ ID NO: 274329 - RNA, 19 nt, Artificial Sequence
  Description of Artificial Sequence: Synthetic oligonucleotide
  Antisense strand to SEQ ID NO: 274328
uguccugugggcaacaccu

SEQ ID NO: 274330 - RNA, 19 nt, Artificial Sequence
  Description of Artificial Sequence: Synthetic oligonucleotide
  Sense strand starting at position 1047 of SEQ ID NO: 3523
caccaaguccuauguguga

SEQ ID NO: 274331 - RNA, 19 nt, Artificial Sequence
  Description of Artificial Sequence: Synthetic oligonucleotide
  Antisense strand to SEQ ID NO: 274330
ucacacauaggacuuggug

SEQ ID NO: 274332 - RNA, 19 nt, Artificial Sequence
  Description of Artificial Sequence: Synthetic oligonucleotide
  Sense strand starting at position 1330 of SEQ ID NO: 3523
agaaauaagccguaauuac

SEQ ID NO: 274333 - RNA, 19 nt, Artificial Sequence
  Description of Artificial Sequence: Synthetic oligonucleotide
  Antisense strand to SEQ ID NO: 274332
guaauuacggcuuauuucu

SEQ ID NO: 274334 - RNA, 19 nt, Artificial Sequence
  Description of Artificial Sequence: Synthetic oligonucleotide
  Sense strand starting at position 1337 of SEQ ID NO: 3523
agccguaauuacucuauca

SEQ ID NO: 274335 - RNA, 19 nt, Artificial Sequence
  Description of Artificial Sequence: Synthetic oligonucleotide
  Antisense strand to SEQ ID NO: 274334
ugauagaguaauuacggcu

SEQ ID NO: 274336 - RNA, 19 nt, Artificial Sequence
  Description of Artificial Sequence: Synthetic oligonucleotide
  Sense strand starting at position 1465 of SEQ ID NO: 3523
agaggaguauaucuucuga

SEQ ID NO: 274337 - RNA, 19 nt, Artificial Sequence
  Description of Artificial Sequence: Synthetic oligonucleotide
  Antisense strand to SEQ ID NO: 274336
ucagaagauauacuccucu

SEQ ID NO: 274338 - RNA, 19 nt, Artificial Sequence
  Description of Artificial Sequence: Synthetic oligonucleotide
  Sense strand starting at position 1467 of SEQ ID NO: 3523
aggaguauaucuucugaca

SEQ ID NO: 274339 - RNA, 19 nt, Artificial Sequence
  Description of Artificial Sequence: Synthetic oligonucleotide
  Antisense strand to SEQ ID NO: 274338
ugucagaagauauacuccu

SEQ ID NO: 274340 - RNA, 19 nt, Artificial Sequence
  Description of Artificial Sequence: Synthetic oligonucleotide
  Sense strand starting at position 1518 of SEQ ID NO: 3523
ucuaaaucuggagggaguu

SEQ ID NO: 274341 - RNA, 19 nt, Artificial Sequence
  Description of Artificial Sequence: Synthetic oligonucleotide
  Antisense strand to SEQ ID NO: 274340
aacucccuccagauuuaga

SEQ ID NO: 274342 - RNA, 19 nt, Artificial Sequence
  Description of Artificial Sequence: Synthetic oligonucleotide
  Sense strand starting at position 1575 of SEQ ID NO: 3523
uucucagacccguaauauc

SEQ ID NO: 274343 - RNA, 19 nt, Artificial Sequence
  Description of Artificial Sequence: Synthetic oligonucleotide
  Antisense strand to SEQ ID NO: 274342
gauauuacgggucugagaa

SEQ ID NO: 274344 - RNA, 19 nt, Artificial Sequence
  Description of Artificial Sequence: Synthetic oligonucleotide
  Sense strand starting at position 1699 of SEQ ID NO: 3523
aggaaacauuccuaagaug

SEQ ID NO: 274345 - RNA, 19 nt, Artificial Sequence
  Description of Artificial Sequence: Synthetic oligonucleotide
  Antisense strand to SEQ ID NO: 274344
caucuuaggaauguuuccu

SEQ ID NO: 274346 - RNA, 19 nt, Artificial Sequence
  Description of Artificial Sequence: Synthetic oligonucleotide
  Sense strand starting at position 2007 of SEQ ID NO: 3523
guuggaagaucagaauaag

SEQ ID NO: 274347 - RNA, 19 nt, Artificial Sequence
  Description of Artificial Sequence: Synthetic oligonucleotide
  Antisense strand to SEQ ID NO: 274346
cuuauucugaucuuccaac

SEQ ID NO: 274348 - RNA, 19 nt, Artificial Sequence
  Description of Artificial Sequence: Synthetic oligonucleotide
  Sense strand starting at position 2052 of SEQ ID NO: 3523
uugcuaaugcuggagacuu

SEQ ID NO: 274349 - RNA, 19 nt, Artificial Sequence
  Description of Artificial Sequence: Synthetic oligonucleotide
  Antisense strand to SEQ ID NO: 274348
aagucuccagcauuagcaa

SEQ ID NO: 274350 - RNA, 19 nt, Artificial Sequence
  Description of Artificial Sequence: Synthetic oligonucleotide
  Sense strand starting at position 2054 of SEQ ID NO: 3523
gcuaaugcuggagacuuau

SEQ ID NO: 274351 - RNA, 19 nt, Artificial Sequence
  Description of Artificial Sequence: Synthetic oligonucleotide
  Antisense strand to SEQ ID NO: 274350
auaagucuccagcauuagc

SEQ ID NO: 274352 - RNA, 19 nt, Artificial Sequence
  Description of Artificial Sequence: Synthetic oligonucleotide
  Sense strand starting at position 2211 of SEQ ID NO: 3523
gaguaaggauuauucuuga

SEQ ID NO: 274353 - RNA, 19 nt, Artificial Sequence
  Description of Artificial Sequence: Synthetic oligonucleotide
  Antisense strand to SEQ ID NO: 274352
ucaagaauaauccuuacuc

SEQ ID NO: 274354 - RNA, 19 nt, Artificial Sequence
  Description of Artificial Sequence: Synthetic oligonucleotide
  Sense strand starting at position 2267 of SEQ ID NO: 3523
agaaccaucugguuagcau

SEQ ID NO: 274355 - RNA, 19 nt, Artificial Sequence
  Description of Artificial Sequence: Synthetic oligonucleotide
  Antisense strand to SEQ ID NO: 274354
augcuaaccagaugguucu

SEQ ID NO: 274356 - RNA, 19 nt, Artificial Sequence
  Description of Artificial Sequence: Synthetic oligonucleotide
  Sense strand starting at position 2268 of SEQ ID NO: 3523
gaaccaucugguuagcaua

SEQ ID NO: 274357 - RNA, 19 nt, Artificial Sequence
  Description of Artificial Sequence: Synthetic oligonucleotide
  Antisense strand to SEQ ID NO: 274356
uaugcuaaccagaugguuc

SEQ ID NO: 274358 - RNA, 19 nt, Artificial Sequence
  Description of Artificial Sequence: Synthetic oligonucleotide
  Sense strand starting at position 2344 of SEQ ID NO: 3523
uguuucucagccuacuuau

SEQ ID NO: 274359 - RNA, 19 nt, Artificial Sequence
  Description of Artificial Sequence: Synthetic oligonucleotide
  Antisense strand to SEQ ID NO: 274358
auaaguaggcugagaaaca

SEQ ID NO: 274360 - RNA, 19 nt, Artificial Sequence
  Description of Artificial Sequence: Synthetic oligonucleotide
  Sense strand starting at position 2848 of SEQ ID NO: 3523
ucacaucaggcaugagaac

SEQ ID NO: 274361 - RNA, 19 nt, Artificial Sequence
  Description of Artificial Sequence: Synthetic oligonucleotide
  Antisense strand to SEQ ID NO: 274360
guucucaugccugauguga

SEQ ID NO: 274362 - RNA, 19 nt, Artificial Sequence
  Description of Artificial Sequence: Synthetic oligonucleotide
  Sense strand starting at position 2962 of SEQ ID NO: 3523
guuggcaacuccucuaaau

SEQ ID NO: 274363 - RNA, 19 nt, Artificial Sequence
  Description of Artificial Sequence: Synthetic oligonucleotide
  Antisense strand to SEQ ID NO: 274362
auuuagaggaguugccaac

SEQ ID NO: 274364 - RNA, 19 nt, Artificial Sequence
  Description of Artificial Sequence: Synthetic oligonucleotide
  Sense strand starting at position 2964 of SEQ ID NO: 3523
uggcaacuccucuaaauga

SEQ ID NO: 274365 - RNA, 19 nt, Artificial Sequence
  Description of Artificial Sequence: Synthetic oligonucleotide
  Antisense strand to SEQ ID NO: 274364
ucauuuagaggaguugcca

SEQ ID NO: 274366 - RNA, 19 nt, Artificial Sequence
  Description of Artificial Sequence: Synthetic oligonucleotide
  Sense strand starting at position 3008 of SEQ ID NO: 3523
gccaaaguacuacaguaaa

SEQ ID NO: 274367 - RNA, 19 nt, Artificial Sequence
  Description of Artificial Sequence: Synthetic oligonucleotide
  Antisense strand to SEQ ID NO: 274366
uuuacuguaguacuuuggc

SEQ ID NO: 274368 - RNA, 19 nt, Artificial Sequence
  Description of Artificial Sequence: Synthetic oligonucleotide
  Sense strand starting at position 3355 of SEQ ID NO: 3523
ggaagaggcacgcaacaau

SEQ ID NO: 274369 - RNA, 19 nt, Artificial Sequence
  Description of Artificial Sequence: Synthetic oligonucleotide
  Antisense strand to SEQ ID NO: 274368
auuguugcgugccucuucc

SEQ ID NO: 274370 - RNA, 19 nt, Artificial Sequence
  Description of Artificial Sequence: Synthetic oligonucleotide
  Sense strand starting at position 3377 of SEQ ID NO: 3523
cuccuagaguugcuauaga

SEQ ID NO: 274371 - RNA, 19 nt, Artificial Sequence
  Description of Artificial Sequence: Synthetic oligonucleotide
  Antisense strand to SEQ ID NO: 274370
ucuauagcaacucuaggag

SEQ ID NO: 274372 - RNA, 19 nt, Artificial Sequence
  Description of Artificial Sequence: Synthetic oligonucleotide
  Sense strand starting at position 3564 of SEQ ID NO: 3523
cguuaaucugaccauguga

SEQ ID NO: 274373 - RNA, 19 nt, Artificial Sequence
  Description of Artificial Sequence: Synthetic oligonucleotide
  Antisense strand to SEQ ID NO: 274372
ucacauggucagauuaacg

SEQ ID NO: 274374 - RNA, 19 nt, Artificial Sequence
  Description of Artificial Sequence: Synthetic oligonucleotide
  Sense strand starting at position 3566 of SEQ ID NO: 3523
uuaaucugaccaugugaaa

SEQ ID NO: 274375 - RNA, 19 nt, Artificial Sequence
  Description of Artificial Sequence: Synthetic oligonucleotide
  Antisense strand to SEQ ID NO: 274374
uuucacauggucagauuaa

SEQ ID NO: 274376 - RNA, 19 nt, Artificial Sequence
  Description of Artificial Sequence: Synthetic oligonucleotide
  Sense strand starting at position 3585 of SEQ ID NO: 3523
augagcaaguuuguuauua

SEQ ID NO: 274377 - RNA, 19 nt, Artificial Sequence
  Description of Artificial Sequence: Synthetic oligonucleotide
  Antisense strand to SEQ ID NO: 274376
uaauaacaaacuugcucau

SEQ ID NO: 274378 - RNA, 19 nt, Artificial Sequence
  Description of Artificial Sequence: Synthetic oligonucleotide
  Sense strand starting at position 3586 of SEQ ID NO: 3523
ugagcaaguuuguuauuac

SEQ ID NO: 274379 - RNA, 19 nt, Artificial Sequence
  Description of Artificial Sequence: Synthetic oligonucleotide
  Antisense strand to SEQ ID NO: 274378
guaauaacaaacuugcuca

SEQ ID NO: 274380 - RNA, 19 nt, Artificial Sequence
  Description of Artificial Sequence: Synthetic oligonucleotide
  Sense strand starting at position 3699 of SEQ ID NO: 3523
uuagaagagugucugaaac

SEQ ID NO: 274381 - RNA, 19 nt, Artificial Sequence
  Description of Artificial Sequence: Synthetic oligonucleotide
  Antisense strand to SEQ ID NO: 274380
guuucagacacucuucuaa

SEQ ID NO: 274382 - RNA, 19 nt, Artificial Sequence
  Description of Artificial Sequence: Synthetic oligonucleotide
  Sense strand starting at position 3756 of SEQ ID NO: 3523
caaggcaaaucuccguuau

SEQ ID NO: 274383 - RNA, 19 nt, Artificial Sequence
  Description of Artificial Sequence: Synthetic oligonucleotide
  Antisense strand to SEQ ID NO: 274382
auaacggagauuugccuug

SEQ ID NO: 274384 - RNA, 19 nt, Artificial Sequence
  Description of Artificial Sequence: Synthetic oligonucleotide
  Sense strand starting at position 3757 of SEQ ID NO: 3523
aaggcaaaucuccguuauc

SEQ ID NO: 274385 - RNA, 19 nt, Artificial Sequence
  Description of Artificial Sequence: Synthetic oligonucleotide
  Antisense strand to SEQ ID NO: 274384
gauaacggagauuugccuu

SEQ ID NO: 274386 - RNA, 19 nt, Artificial Sequence
  Description of Artificial Sequence: Synthetic oligonucleotide
  Sense strand starting at position 3760 of SEQ ID NO: 3523
gcaaaucuccguuauccua

SEQ ID NO: 274387 - RNA, 19 nt, Artificial Sequence
  Description of Artificial Sequence: Synthetic oligonucleotide
  Antisense strand to SEQ ID NO: 274386
uaggauaacggagauuugc

SEQ ID NO: 274388 - RNA, 19 nt, Artificial Sequence
  Description of Artificial Sequence: Synthetic oligonucleotide
  Sense strand starting at position 3767 of SEQ ID NO: 3523
uccguuauccuagagcuga

SEQ ID NO: 274389 - RNA, 19 nt, Artificial Sequence
  Description of Artificial Sequence: Synthetic oligonucleotide
  Antisense strand to SEQ ID NO: 274388
ucagcucuaggauaacgga

SEQ ID NO: 274390 - RNA, 19 nt, Artificial Sequence
  Description of Artificial Sequence: Synthetic oligonucleotide
  Sense strand starting at position 3815 of SEQ ID NO: 3523
gaugaaagcaaucguagga

SEQ ID NO: 274391 - RNA, 19 nt, Artificial Sequence
  Description of Artificial Sequence: Synthetic oligonucleotide
  Antisense strand to SEQ ID NO: 274390
uccuacgauugcuuucauc

SEQ ID NO: 274392 - RNA, 19 nt, Artificial Sequence
  Description of Artificial Sequence: Synthetic oligonucleotide
  Sense strand starting at position 3882 of SEQ ID NO: 3523
agauaacaacucuggcuaa

SEQ ID NO: 274393 - RNA, 19 nt, Artificial Sequence
  Description of Artificial Sequence: Synthetic oligonucleotide
  Antisense strand to SEQ ID NO: 274392
uuagccagaguuguuaucu

SEQ ID NO: 274394 - RNA, 19 nt, Artificial Sequence
  Description of Artificial Sequence: Synthetic oligonucleotide
  Sense strand starting at position 3910 of SEQ ID NO: 3523
auaggaauuuacuggaaga

SEQ ID NO: 274395 - RNA, 19 nt, Artificial Sequence
  Description of Artificial Sequence: Synthetic oligonucleotide
  Antisense strand to SEQ ID NO: 274394
ucuuccaguaaauuccuau

SEQ ID NO: 274396 - RNA, 19 nt, Artificial Sequence
  Description of Artificial Sequence: Synthetic oligonucleotide
  Sense strand starting at position 140 of SEQ ID NO: 3524
guuggucuugagcaagcaa

SEQ ID NO: 274397 - RNA, 19 nt, Artificial Sequence
  Description of Artificial Sequence: Synthetic oligonucleotide
  Antisense strand to SEQ ID NO: 274396
uugcuugcucaagaccaac

SEQ ID NO: 274398 - RNA, 19 nt, Artificial Sequence
  Description of Artificial Sequence: Synthetic oligonucleotide
  Sense strand starting at position 309 of SEQ ID NO: 3524
uuuaaauguuucccguuaa

SEQ ID NO: 274399 - RNA, 19 nt, Artificial Sequence
  Description of Artificial Sequence: Synthetic oligonucleotide
  Antisense strand to SEQ ID NO: 274398
uuaacgggaaacauuuaaa

SEQ ID NO: 274400 - RNA, 19 nt, Artificial Sequence
  Description of Artificial Sequence: Synthetic oligonucleotide
  Sense strand starting at position 452 of SEQ ID NO: 3524
cagguauaacuguagcuca

SEQ ID NO: 274401 - RNA, 19 nt, Artificial Sequence
  Description of Artificial Sequence: Synthetic oligonucleotide
  Antisense strand to SEQ ID NO: 274400
ugagcuacaguuauaccug

SEQ ID NO: 274402 - RNA, 19 nt, Artificial Sequence
  Description of Artificial Sequence: Synthetic oligonucleotide
  Sense strand starting at position 459 of SEQ ID NO: 3524
aacuguagcucagugcuua

SEQ ID NO: 274403 - RNA, 19 nt, Artificial Sequence
  Description of Artificial Sequence: Synthetic oligonucleotide
  Antisense strand to SEQ ID NO: 274402
uaagcacugagcuacaguu

SEQ ID NO: 274404 - RNA, 19 nt, Artificial Sequence
  Description of Artificial Sequence: Synthetic oligonucleotide
  Sense strand starting at position 529 of SEQ ID NO: 3524
ucgagaguaccacacaauu

SEQ ID NO: 274405 - RNA, 19 nt, Artificial Sequence
  Description of Artificial Sequence: Synthetic oligonucleotide
  Antisense strand to SEQ ID NO: 274404
aauugugugguacucucga

SEQ ID NO: 274406 - RNA, 19 nt, Artificial Sequence
  Description of Artificial Sequence: Synthetic oligonucleotide
  Sense strand starting at position 679 of SEQ ID NO: 3524
uagugaggucauggaauuc

SEQ ID NO: 274407 - RNA, 19 nt, Artificial Sequence
  Description of Artificial Sequence: Synthetic oligonucleotide
  Antisense strand to SEQ ID NO: 274406
gaauuccaugaccucacua

SEQ ID NO: 274408 - RNA, 19 nt, Artificial Sequence
  Description of Artificial Sequence: Synthetic oligonucleotide
  Sense strand starting at position 733 of SEQ ID NO: 3524
ucacccuggccuuaucaga

SEQ ID NO: 274409 - RNA, 19 nt, Artificial Sequence
  Description of Artificial Sequence: Synthetic oligonucleotide
  Antisense strand to SEQ ID NO: 274408
ucugauaaggccaggguga

SEQ ID NO: 274410 - RNA, 19 nt, Artificial Sequence
  Description of Artificial Sequence: Synthetic oligonucleotide
  Sense strand starting at position 741 of SEQ ID NO: 3524
gccuuaucagacugagguc

SEQ ID NO: 274411 - RNA, 19 nt, Artificial Sequence
  Description of Artificial Sequence: Synthetic oligonucleotide
  Antisense strand to SEQ ID NO: 274410
gaccucagucugauaaggc

SEQ ID NO: 274412 - RNA, 19 nt, Artificial Sequence
  Description of Artificial Sequence: Synthetic oligonucleotide
  Sense strand starting at position 1205 of SEQ ID NO: 3524
uccgacaacucaguuauua

SEQ ID NO: 274413 - RNA, 19 nt, Artificial Sequence
  Description of Artificial Sequence: Synthetic oligonucleotide
  Antisense strand to SEQ ID NO: 274412
uaauaacugaguugucgga

SEQ ID NO: 274414 - RNA, 19 nt, Artificial Sequence
  Description of Artificial Sequence: Synthetic oligonucleotide
  Sense strand starting at position 1231 of SEQ ID NO: 3524
gcucuuaaaguaugaauac

SEQ ID NO: 274415 - RNA, 19 nt, Artificial Sequence
  Description of Artificial Sequence: Synthetic oligonucleotide
  Antisense strand to SEQ ID NO: 274414
guauucauacuuuaagagc

SEQ ID NO: 274416 - RNA, 19 nt, Artificial Sequence
  Description of Artificial Sequence: Synthetic oligonucleotide
  Sense strand starting at position 1241 of SEQ ID NO: 3524
uaugaauacuaagugugaa

SEQ ID NO: 274417 - RNA, 19 nt, Artificial Sequence
  Description of Artificial Sequence: Synthetic oligonucleotide
  Antisense strand to SEQ ID NO: 274416
uucacacuuaguauucaua

SEQ ID NO: 274418 - RNA, 19 nt, Artificial Sequence
  Description of Artificial Sequence: Synthetic oligonucleotide
  Sense strand starting at position 1244 of SEQ ID NO: 3524
gaauacuaagugugaauaa

SEQ ID NO: 274419 - RNA, 19 nt, Artificial Sequence
  Description of Artificial Sequence: Synthetic oligonucleotide
  Antisense strand to SEQ ID NO: 274418
uuauucacacuuaguauuc

SEQ ID NO: 274420 - RNA, 19 nt, Artificial Sequence
  Description of Artificial Sequence: Synthetic oligonucleotide
  Sense strand starting at position 1245 of SEQ ID NO: 3524
aauacuaagugugaauaag

SEQ ID NO: 274421 - RNA, 19 nt, Artificial Sequence
  Description of Artificial Sequence: Synthetic oligonucleotide
  Antisense strand to SEQ ID NO: 274420
cuuauucacacuuaguauu

SEQ ID NO: 274422 - RNA, 19 nt, Artificial Sequence
  Description of Artificial Sequence: Synthetic oligonucleotide
  Sense strand starting at position 1291 of SEQ ID NO: 3524
gugacugagaauuguuccu

SEQ ID NO: 274423 - RNA, 19 nt, Artificial Sequence
  Description of Artificial Sequence: Synthetic oligonucleotide
  Antisense strand to SEQ ID NO: 274422
aggaacaauucucagucac

SEQ ID NO: 274424 - RNA, 19 nt, Artificial Sequence
  Description of Artificial Sequence: Synthetic oligonucleotide
  Sense strand starting at position 1293 of SEQ ID NO: 3524
gacugagaauuguuccuga

SEQ ID NO: 274425 - RNA, 19 nt, Artificial Sequence
  Description of Artificial Sequence: Synthetic oligonucleotide
  Antisense strand to SEQ ID NO: 274424
ucaggaacaauucucaguc

SEQ ID NO: 274426 - RNA, 19 nt, Artificial Sequence
  Description of Artificial Sequence: Synthetic oligonucleotide
  Sense strand starting at position 1298 of SEQ ID NO: 3524
agaauuguuccugaggcua

SEQ ID NO: 274427 - RNA, 19 nt, Artificial Sequence
  Description of Artificial Sequence: Synthetic oligonucleotide
  Antisense strand to SEQ ID NO: 274426
uagccucaggaacaauucu

SEQ ID NO: 274428 - RNA, 19 nt, Artificial Sequence
  Description of Artificial Sequence: Synthetic oligonucleotide
  Sense strand starting at position 1327 of SEQ ID NO: 3524
ggauuaguauuauuacacu

SEQ ID NO: 274429 - RNA, 19 nt, Artificial Sequence
  Description of Artificial Sequence: Synthetic oligonucleotide
  Antisense strand to SEQ ID NO: 274428
aguguaauaauacuaaucc

SEQ ID NO: 274430 - RNA, 19 nt, Artificial Sequence
  Description of Artificial Sequence: Synthetic oligonucleotide
  Sense strand starting at position 2460 of SEQ ID NO: 3524
auuucuguuugcuucguau

SEQ ID NO: 274431 - RNA, 19 nt, Artificial Sequence
  Description of Artificial Sequence: Synthetic oligonucleotide
  Antisense strand to SEQ ID NO: 274430
auacgaagcaaacagaaau

SEQ ID NO: 274432 - RNA, 19 nt, Artificial Sequence
  Description of Artificial Sequence: Synthetic oligonucleotide
  Sense strand starting at position 2462 of SEQ ID NO: 3524
uucuguuugcuucguauuu

SEQ ID NO: 274433 - RNA, 19 nt, Artificial Sequence
  Description of Artificial Sequence: Synthetic oligonucleotide
  Antisense strand to SEQ ID NO: 274432
aaauacgaagcaaacagaa

SEQ ID NO: 274434 - RNA, 19 nt, Artificial Sequence
  Description of Artificial Sequence: Synthetic oligonucleotide
  Sense strand starting at position 2497 of SEQ ID NO: 3524
gucugaaauuaucuccuag

SEQ ID NO: 274435 - RNA, 19 nt, Artificial Sequence
  Description of Artificial Sequence: Synthetic oligonucleotide
  Antisense strand to SEQ ID NO: 274434
cuaggagauaauuucagac

SEQ ID NO: 274436 - RNA, 19 nt, Artificial Sequence
  Description of Artificial Sequence: Synthetic oligonucleotide
  Sense strand starting at position 2584 of SEQ ID NO: 3524
cgccgauaaccuuggauag

SEQ ID NO: 274437 - RNA, 19 nt, Artificial Sequence
  Description of Artificial Sequence: Synthetic oligonucleotide
  Antisense strand to SEQ ID NO: 274436
cuauccaagguuaucggcg

SEQ ID NO: 274438 - RNA, 19 nt, Artificial Sequence
  Description of Artificial Sequence: Synthetic oligonucleotide
  Sense strand starting at position 2631 of SEQ ID NO: 3524
ggaacucgacuucggaauu

SEQ ID NO: 274439 - RNA, 19 nt, Artificial Sequence
  Description of Artificial Sequence: Synthetic oligonucleotide
  Antisense strand to SEQ ID NO: 274438
aauuccgaagucgaguucc

SEQ ID NO: 274440 - RNA, 19 nt, Artificial Sequence
  Description of Artificial Sequence: Synthetic oligonucleotide
  Sense strand starting at position 2632 of SEQ ID NO: 3524
gaacucgacuucggaauuu

SEQ ID NO: 274441 - RNA, 19 nt, Artificial Sequence
  Description of Artificial Sequence: Synthetic oligonucleotide
  Antisense strand to SEQ ID NO: 274440
aaauuccgaagucgaguuc

SEQ ID NO: 274442 - RNA, 19 nt, Artificial Sequence
  Description of Artificial Sequence: Synthetic oligonucleotide
  Sense strand starting at position 2715 of SEQ ID NO: 3524
ugucaucuugcauaaucga

SEQ ID NO: 274443 - RNA, 19 nt, Artificial Sequence
  Description of Artificial Sequence: Synthetic oligonucleotide
  Antisense strand to SEQ ID NO: 274442
ucgauuaugcaagaugaca

SEQ ID NO: 274444 - RNA, 19 nt, Artificial Sequence
  Description of Artificial Sequence: Synthetic oligonucleotide
  Sense strand starting at position 2722 of SEQ ID NO: 3524
uugcauaaucgacaguaau

SEQ ID NO: 274445 - RNA, 19 nt, Artificial Sequence
  Description of Artificial Sequence: Synthetic oligonucleotide
  Antisense strand to SEQ ID NO: 274444
auuacugucgauuaugcaa

SEQ ID NO: 274446 - RNA, 19 nt, Artificial Sequence
  Description of Artificial Sequence: Synthetic oligonucleotide
  Sense strand starting at position 2811 of SEQ ID NO: 3524
ucgcaucaccgagguagaa

SEQ ID NO: 274447 - RNA, 19 nt, Artificial Sequence
  Description of Artificial Sequence: Synthetic oligonucleotide
  Antisense strand to SEQ ID NO: 274446
uucuaccucggugaugcga

SEQ ID NO: 274448 - RNA, 19 nt, Artificial Sequence
  Description of Artificial Sequence: Synthetic oligonucleotide
  Sense strand starting at position 2813 of SEQ ID NO: 3524
gcaucaccgagguagaaua

SEQ ID NO: 274449 - RNA, 19 nt, Artificial Sequence
  Description of Artificial Sequence: Synthetic oligonucleotide
  Antisense strand to SEQ ID NO: 274448
uauucuaccucggugaugc

SEQ ID NO: 274450 - RNA, 19 nt, Artificial Sequence
  Description of Artificial Sequence: Synthetic oligonucleotide
  Sense strand starting at position 2847 of SEQ ID NO: 3524
gaacuuaauccaggcgaau

SEQ ID NO: 274451 - RNA, 19 nt, Artificial Sequence
  Description of Artificial Sequence: Synthetic oligonucleotide
  Antisense strand to SEQ ID NO: 274450
auucgccuggauuaaguuc

SEQ ID NO: 274452 - RNA, 19 nt, Artificial Sequence
  Description of Artificial Sequence: Synthetic oligonucleotide
  Sense strand starting at position 2893 of SEQ ID NO: 3524
uuggguagucuuuggguau

SEQ ID NO: 274453 - RNA, 19 nt, Artificial Sequence
  Description of Artificial Sequence: Synthetic oligonucleotide
  Antisense strand to SEQ ID NO: 274452
auacccaaagacuacccaa

SEQ ID NO: 274454 - RNA, 19 nt, Artificial Sequence
  Description of Artificial Sequence: Synthetic oligonucleotide
  Sense strand starting at position 2896 of SEQ ID NO: 3524
gguagucuuuggguauuca

SEQ ID NO: 274455 - RNA, 19 nt, Artificial Sequence
  Description of Artificial Sequence: Synthetic oligonucleotide
  Antisense strand to SEQ ID NO: 274454
ugaauacccaaagacuacc

SEQ ID NO: 274456 - RNA, 19 nt, Artificial Sequence
  Description of Artificial Sequence: Synthetic oligonucleotide
  Sense strand starting at position 2925 of SEQ ID NO: 3524
aggcgaauugauggaugga

SEQ ID NO: 274457 - RNA, 19 nt, Artificial Sequence
  Description of Artificial Sequence: Synthetic oligonucleotide
  Antisense strand to SEQ ID NO: 274456
uccauccaucaauucgccu

SEQ ID NO: 274458 - RNA, 19 nt, Artificial Sequence
  Description of Artificial Sequence: Synthetic oligonucleotide
  Sense strand starting at position 3002 of SEQ ID NO: 3524
guggguguaggagaguuua

SEQ ID NO: 274459 - RNA, 19 nt, Artificial Sequence
  Description of Artificial Sequence: Synthetic oligonucleotide
  Antisense strand to SEQ ID NO: 274458
uaaacucuccuacacccac

SEQ ID NO: 274460 - RNA, 19 nt, Artificial Sequence
  Description of Artificial Sequence: Synthetic oligonucleotide
  Sense strand starting at position 3122 of SEQ ID NO: 3524
agcugugagauugggacaa

SEQ ID NO: 274461 - RNA, 19 nt, Artificial Sequence
  Description of Artificial Sequence: Synthetic oligonucleotide
  Antisense strand to SEQ ID NO: 274460
uugucccaaucucacagcu

SEQ ID NO: 274462 - RNA, 19 nt, Artificial Sequence
  Description of Artificial Sequence: Synthetic oligonucleotide
  Sense strand starting at position 3124 of SEQ ID NO: 3524
cugugagauugggacaaca

SEQ ID NO: 274463 - RNA, 19 nt, Artificial Sequence
  Description of Artificial Sequence: Synthetic oligonucleotide
  Antisense strand to SEQ ID NO: 274462
uguugucccaaucucacag

SEQ ID NO: 274464 - RNA, 19 nt, Artificial Sequence
  Description of Artificial Sequence: Synthetic oligonucleotide
  Sense strand starting at position 3180 of SEQ ID NO: 3524
uuacguaucccaugggaug

SEQ ID NO: 274465 - RNA, 19 nt, Artificial Sequence
  Description of Artificial Sequence: Synthetic oligonucleotide
  Antisense strand to SEQ ID NO: 274464
caucccaugggauacguaa

SEQ ID NO: 274466 - RNA, 19 nt, Artificial Sequence
  Description of Artificial Sequence: Synthetic oligonucleotide
  Sense strand starting at position 3407 of SEQ ID NO: 3524
ggaaccucugaaugcaaga

SEQ ID NO: 274467 - RNA, 19 nt, Artificial Sequence
  Description of Artificial Sequence: Synthetic oligonucleotide
  Antisense strand to SEQ ID NO: 274466
ucuugcauucagagguucc

SEQ ID NO: 274468 - RNA, 19 nt, Artificial Sequence
  Description of Artificial Sequence: Synthetic oligonucleotide
  Sense strand starting at position 3617 of SEQ ID NO: 3524
gcuguuuauuucgucuuau

SEQ ID NO: 274469 - RNA, 19 nt, Artificial Sequence
  Description of Artificial Sequence: Synthetic oligonucleotide
  Antisense strand to SEQ ID NO: 274468
auaagacgaaauaaacagc

SEQ ID NO: 274470 - RNA, 19 nt, Artificial Sequence
  Description of Artificial Sequence: Synthetic oligonucleotide
  Sense strand starting at position 3618 of SEQ ID NO: 3524
cuguuuauuucgucuuaug

SEQ ID NO: 274471 - RNA, 19 nt, Artificial Sequence
  Description of Artificial Sequence: Synthetic oligonucleotide
  Antisense strand to SEQ ID NO: 274470
cauaagacgaaauaaacag

SEQ ID NO: 274472 - RNA, 19 nt, Artificial Sequence
  Description of Artificial Sequence: Synthetic oligonucleotide
  Sense strand starting at position 3702 of SEQ ID NO: 3524
cggguuuagcgagaagaag

SEQ ID NO: 274473 - RNA, 19 nt, Artificial Sequence
  Description of Artificial Sequence: Synthetic oligonucleotide
  Antisense strand to SEQ ID NO: 274472
cuucuucucgcuaaacccg

SEQ ID NO: 274474 - RNA, 19 nt, Artificial Sequence
  Description of Artificial Sequence: Synthetic oligonucleotide
  Sense strand starting at position 3731 of SEQ ID NO: 3524
gugcguugcgaucuuaaag

SEQ ID NO: 274475 - RNA, 19 nt, Artificial Sequence
  Description of Artificial Sequence: Synthetic oligonucleotide
  Antisense strand to SEQ ID NO: 274474
cuuuaagaucgcaacgcac

SEQ ID NO: 274476 - RNA, 19 nt, Artificial Sequence
  Description of Artificial Sequence: Synthetic oligonucleotide
  Sense strand starting at position 27 of SEQ ID NO: 3525
cuaugcuguuuauuaggga

SEQ ID NO: 274477 - RNA, 19 nt, Artificial Sequence
  Description of Artificial Sequence: Synthetic oligonucleotide
  Antisense strand to SEQ ID NO: 274476
ucccuaauaaacagcauag

SEQ ID NO: 274478 - RNA, 19 nt, Artificial Sequence
  Description of Artificial Sequence: Synthetic oligonucleotide
  Sense strand starting at position 63 of SEQ ID NO: 3525
ugauuccuguccucaggga

SEQ ID NO: 274479 - RNA, 19 nt, Artificial Sequence
  Description of Artificial Sequence: Synthetic oligonucleotide
  Antisense strand to SEQ ID NO: 274478
ucccugaggacaggaauca

SEQ ID NO: 274480 - RNA, 19 nt, Artificial Sequence
  Description of Artificial Sequence: Synthetic oligonucleotide
  Sense strand starting at position 78 of SEQ ID NO: 3525
gggagaucaguacgaauag

SEQ ID NO: 274481 - RNA, 19 nt, Artificial Sequence
  Description of Artificial Sequence: Synthetic oligonucleotide
  Antisense strand to SEQ ID NO: 274480
cuauucguacugaucuccc

SEQ ID NO: 274482 - RNA, 19 nt, Artificial Sequence
  Description of Artificial Sequence: Synthetic oligonucleotide
  Sense strand starting at position 95 of SEQ ID NO: 3525
agggaagagucgaguaaag

SEQ ID NO: 274483 - RNA, 19 nt, Artificial Sequence
  Description of Artificial Sequence: Synthetic oligonucleotide
  Antisense strand to SEQ ID NO: 274482
cuuuacucgacucuucccu

SEQ ID NO: 274484 - RNA, 19 nt, Artificial Sequence
  Description of Artificial Sequence: Synthetic oligonucleotide
  Sense strand starting at position 413 of SEQ ID NO: 3525
guccuaauuccucauguga

SEQ ID NO: 274485 - RNA, 19 nt, Artificial Sequence
  Description of Artificial Sequence: Synthetic oligonucleotide
  Antisense strand to SEQ ID NO: 274484
ucacaugaggaauuaggac

SEQ ID NO: 274486 - RNA, 19 nt, Artificial Sequence
  Description of Artificial Sequence: Synthetic oligonucleotide
  Sense strand starting at position 427 of SEQ ID NO: 3525
ugugacuucggacaaguca

SEQ ID NO: 274487 - RNA, 19 nt, Artificial Sequence
  Description of Artificial Sequence: Synthetic oligonucleotide
  Antisense strand to SEQ ID NO: 274486
ugacuuguccgaagucaca

SEQ ID NO: 274488 - RNA, 19 nt, Artificial Sequence
  Description of Artificial Sequence: Synthetic oligonucleotide
  Sense strand starting at position 576 of SEQ ID NO: 3525
gaccaugagucaguauuau

SEQ ID NO: 274489 - RNA, 19 nt, Artificial Sequence
  Description of Artificial Sequence: Synthetic oligonucleotide
  Antisense strand to SEQ ID NO: 274488
auaauacugacucaugguc

SEQ ID NO: 274490 - RNA, 19 nt, Artificial Sequence
  Description of Artificial Sequence: Synthetic oligonucleotide
  Sense strand starting at position 670 of SEQ ID NO: 3525
cggucuacauuugagauuu

SEQ ID NO: 274491 - RNA, 19 nt, Artificial Sequence
  Description of Artificial Sequence: Synthetic oligonucleotide
  Antisense strand to SEQ ID NO: 274490
aaaucucaaauguagaccg

SEQ ID NO: 274492 - RNA, 19 nt, Artificial Sequence
  Description of Artificial Sequence: Synthetic oligonucleotide
  Sense strand starting at position 937 of SEQ ID NO: 3525
gcaaguucccuggagcaga

SEQ ID NO: 274493 - RNA, 19 nt, Artificial Sequence
  Description of Artificial Sequence: Synthetic oligonucleotide
  Antisense strand to SEQ ID NO: 274492
ucugcuccagggaacuugc

SEQ ID NO: 274494 - RNA, 19 nt, Artificial Sequence
  Description of Artificial Sequence: Synthetic oligonucleotide
  Sense strand starting at position 1019 of SEQ ID NO: 3525
ggcagucagacauguggga

SEQ ID NO: 274495 - RNA, 19 nt, Artificial Sequence
  Description of Artificial Sequence: Synthetic oligonucleotide
  Antisense strand to SEQ ID NO: 274494
ucccacaugucugacugcc

SEQ ID NO: 274496 - RNA, 19 nt, Artificial Sequence
  Description of Artificial Sequence: Synthetic oligonucleotide
  Sense strand starting at position 1021 of SEQ ID NO: 3525
cagucagacaugugggaca

SEQ ID NO: 274497 - RNA, 19 nt, Artificial Sequence
  Description of Artificial Sequence: Synthetic oligonucleotide
  Antisense strand to SEQ ID NO: 274496
ugucccacaugucugacug

SEQ ID NO: 274498 - RNA, 19 nt, Artificial Sequence
  Description of Artificial Sequence: Synthetic oligonucleotide
  Sense strand starting at position 1367 of SEQ ID NO: 3525
ggcagcucuagaggagaau

SEQ ID NO: 274499 - RNA, 19 nt, Artificial Sequence
  Description of Artificial Sequence: Synthetic oligonucleotide
  Antisense strand to SEQ ID NO: 274498
auucuccucuagagcugcc

SEQ ID NO: 274500 - RNA, 19 nt, Artificial Sequence
  Description of Artificial Sequence: Synthetic oligonucleotide
  Sense strand starting at position 1418 of SEQ ID NO: 3525
uagggucguccggacuaaa

SEQ ID NO: 274501 - RNA, 19 nt, Artificial Sequence
  Description of Artificial Sequence: Synthetic oligonucleotide
  Antisense strand to SEQ ID NO: 274500
uuuaguccggacgacccua

SEQ ID NO: 274502 - RNA, 19 nt, Artificial Sequence
  Description of Artificial Sequence: Synthetic oligonucleotide
  Sense strand starting at position 2013 of SEQ ID NO: 3525
gagcccgugcugcuauaaa

SEQ ID NO: 274503 - RNA, 19 nt, Artificial Sequence
  Description of Artificial Sequence: Synthetic oligonucleotide
  Antisense strand to SEQ ID NO: 274502
uuuauagcagcacgggcuc

SEQ ID NO: 274504 - RNA, 19 nt, Artificial Sequence
  Description of Artificial Sequence: Synthetic oligonucleotide
  Sense strand starting at position 2058 of SEQ ID NO: 3525
gggauaaucuuccuugcag

SEQ ID NO: 274505 - RNA, 19 nt, Artificial Sequence
  Description of Artificial Sequence: Synthetic oligonucleotide
  Antisense strand to SEQ ID NO: 274504
cugcaaggaagauuauccc

SEQ ID NO: 274506 - RNA, 19 nt, Artificial Sequence
  Description of Artificial Sequence: Synthetic oligonucleotide
  Sense strand starting at position 2059 of SEQ ID NO: 3525
ggauaaucuuccuugcaga

SEQ ID NO: 274507 - RNA, 19 nt, Artificial Sequence
  Description of Artificial Sequence: Synthetic oligonucleotide
  Antisense strand to SEQ ID NO: 274506
ucugcaaggaagauuaucc

SEQ ID NO: 274508 - RNA, 19 nt, Artificial Sequence
  Description of Artificial Sequence: Synthetic oligonucleotide
  Sense strand starting at position 2064 of SEQ ID NO: 3525
aucuuccuugcagaggaau

SEQ ID NO: 274509 - RNA, 19 nt, Artificial Sequence
  Description of Artificial Sequence: Synthetic oligonucleotide
  Antisense strand to SEQ ID NO: 274508
auuccucugcaaggaagau

SEQ ID NO: 274510 - RNA, 19 nt, Artificial Sequence
  Description of Artificial Sequence: Synthetic oligonucleotide
  Sense strand starting at position 2156 of SEQ ID NO: 3525
cgaccuuuccaagaguaca

SEQ ID NO: 274511 - RNA, 19 nt, Artificial Sequence
  Description of Artificial Sequence: Synthetic oligonucleotide
  Antisense strand to SEQ ID NO: 274510
uguacucuuggaaaggucg

SEQ ID NO: 274512 - RNA, 19 nt, Artificial Sequence
  Description of Artificial Sequence: Synthetic oligonucleotide
  Sense strand starting at position 2164 of SEQ ID NO: 3525
ccaagaguacaguguggaa

SEQ ID NO: 274513 - RNA, 19 nt, Artificial Sequence
  Description of Artificial Sequence: Synthetic oligonucleotide
  Antisense strand to SEQ ID NO: 274512
uuccacacuguacucuugg

SEQ ID NO: 274514 - RNA, 19 nt, Artificial Sequence
  Description of Artificial Sequence: Synthetic oligonucleotide
  Sense strand starting at position 2193 of SEQ ID NO: 3525
agagccacuccacgugaaa

SEQ ID NO: 274515 - RNA, 19 nt, Artificial Sequence
  Description of Artificial Sequence: Synthetic oligonucleotide
  Antisense strand to SEQ ID NO: 274514
uuucacguggaguggcucu

SEQ ID NO: 274516 - RNA, 19 nt, Artificial Sequence
  Description of Artificial Sequence: Synthetic oligonucleotide
  Sense strand starting at position 2266 of SEQ ID NO: 3525
gugaccucagucuaacuga

SEQ ID NO: 274517 - RNA, 19 nt, Artificial Sequence
  Description of Artificial Sequence: Synthetic oligonucleotide
  Antisense strand to SEQ ID NO: 274516
ucaguuagacugaggucac

SEQ ID NO: 274518 - RNA, 19 nt, Artificial Sequence
  Description of Artificial Sequence: Synthetic oligonucleotide
  Sense strand starting at position 2297 of SEQ ID NO: 3525
agacaaaucucguuugugg

SEQ ID NO: 274519 - RNA, 19 nt, Artificial Sequence
  Description of Artificial Sequence: Synthetic oligonucleotide
  Antisense strand to SEQ ID NO: 274518
ccacaaacgagauuugucu

SEQ ID NO: 274520 - RNA, 19 nt, Artificial Sequence
  Description of Artificial Sequence: Synthetic oligonucleotide
  Sense strand starting at position 2412 of SEQ ID NO: 3525
guagcuaggcuauaaacuu

SEQ ID NO: 274521 - RNA, 19 nt, Artificial Sequence
  Description of Artificial Sequence: Synthetic oligonucleotide
  Antisense strand to SEQ ID NO: 274520
aaguuuauagccuagcuac

SEQ ID NO: 274522 - RNA, 19 nt, Artificial Sequence
  Description of Artificial Sequence: Synthetic oligonucleotide
  Sense strand starting at position 2516 of SEQ ID NO: 3525
uugugugaaggguauacua

SEQ ID NO: 274523 - RNA, 19 nt, Artificial Sequence
  Description of Artificial Sequence: Synthetic oligonucleotide
  Antisense strand to SEQ ID NO: 274522
uaguauacccuucacacaa

SEQ ID NO: 274524 - RNA, 19 nt, Artificial Sequence
  Description of Artificial Sequence: Synthetic oligonucleotide
  Sense strand starting at position 2524 of SEQ ID NO: 3525
aggguauacuagcuuuaua

SEQ ID NO: 274525 - RNA, 19 nt, Artificial Sequence
  Description of Artificial Sequence: Synthetic oligonucleotide
  Antisense strand to SEQ ID NO: 274524
uauaaagcuaguauacccu

SEQ ID NO: 274526 - RNA, 19 nt, Artificial Sequence
  Description of Artificial Sequence: Synthetic oligonucleotide
  Sense strand starting at position 2610 of SEQ ID NO: 3525
auaaauguuagccagguga

SEQ ID NO: 274527 - RNA, 19 nt, Artificial Sequence
  Description of Artificial Sequence: Synthetic oligonucleotide
  Antisense strand to SEQ ID NO: 274526
ucaccuggcuaacauuuau

SEQ ID NO: 274528 - RNA, 19 nt, Artificial Sequence
  Description of Artificial Sequence: Synthetic oligonucleotide
  Sense strand starting at position 2612 of SEQ ID NO: 3525
aaauguuagccaggugaga

SEQ ID NO: 274529 - RNA, 19 nt, Artificial Sequence
  Description of Artificial Sequence: Synthetic oligonucleotide
  Antisense strand to SEQ ID NO: 274528
ucucaccuggcuaacauuu

SEQ ID NO: 274530 - RNA, 19 nt, Artificial Sequence
  Description of Artificial Sequence: Synthetic oligonucleotide
  Sense strand starting at position 2614 of SEQ ID NO: 3525
auguuagccaggugagaug

SEQ ID NO: 274531 - RNA, 19 nt, Artificial Sequence
  Description of Artificial Sequence: Synthetic oligonucleotide
  Antisense strand to SEQ ID NO: 274530
caucucaccuggcuaacau

SEQ ID NO: 274532 - RNA, 19 nt, Artificial Sequence
  Description of Artificial Sequence: Synthetic oligonucleotide
  Sense strand starting at position 2689 of SEQ ID NO: 3525
ccagaaguuugaccugcaa

SEQ ID NO: 274533 - RNA, 19 nt, Artificial Sequence
  Description of Artificial Sequence: Synthetic oligonucleotide
  Antisense strand to SEQ ID NO: 274532
uugcaggucaaacuucugg

SEQ ID NO: 274534 - RNA, 19 nt, Artificial Sequence
  Description of Artificial Sequence: Synthetic oligonucleotide
  Sense strand starting at position 3339 of SEQ ID NO: 3525
uuggaagagcccuauuauu

SEQ ID NO: 274535 - RNA, 19 nt, Artificial Sequence
  Description of Artificial Sequence: Synthetic oligonucleotide
  Antisense strand to SEQ ID NO: 274534
aauaauagggcucuuccaa

SEQ ID NO: 274536 - RNA, 19 nt, Artificial Sequence
  Description of Artificial Sequence: Synthetic oligonucleotide
  Sense strand starting at position 3555 of SEQ ID NO: 3525
cuggaugagcucggguaaa

SEQ ID NO: 274537 - RNA, 19 nt, Artificial Sequence
  Description of Artificial Sequence: Synthetic oligonucleotide
  Antisense strand to SEQ ID NO: 274536
uuuacccgagcucauccag

SEQ ID NO: 274538 - RNA, 19 nt, Artificial Sequence
  Description of Artificial Sequence: Synthetic oligonucleotide
  Sense strand starting at position 3567 of SEQ ID NO: 3525
ggguaaauugccugacauc

SEQ ID NO: 274539 - RNA, 19 nt, Artificial Sequence
  Description of Artificial Sequence: Synthetic oligonucleotide
  Antisense strand to SEQ ID NO: 274538
gaugucaggcaauuuaccc

SEQ ID NO: 274540 - RNA, 19 nt, Artificial Sequence
  Description of Artificial Sequence: Synthetic oligonucleotide
  Sense strand starting at position 3576 of SEQ ID NO: 3525
gccugacaucaacaagcuu

SEQ ID NO: 274541 - RNA, 19 nt, Artificial Sequence
  Description of Artificial Sequence: Synthetic oligonucleotide
  Antisense strand to SEQ ID NO: 274540
aagcuuguugaugucaggc

SEQ ID NO: 274542 - RNA, 19 nt, Artificial Sequence
  Description of Artificial Sequence: Synthetic oligonucleotide
  Sense strand starting at position 3642 of SEQ ID NO: 3525
gucagucuuagggaccuuu

SEQ ID NO: 274543 - RNA, 19 nt, Artificial Sequence
  Description of Artificial Sequence: Synthetic oligonucleotide
  Antisense strand to SEQ ID NO: 274542
aaaggucccuaagacugac

SEQ ID NO: 274544 - RNA, 19 nt, Artificial Sequence
  Description of Artificial Sequence: Synthetic oligonucleotide
  Sense strand starting at position 3652 of SEQ ID NO: 3525
gggaccuuucagggucuga

SEQ ID NO: 274545 - RNA, 19 nt, Artificial Sequence
  Description of Artificial Sequence: Synthetic oligonucleotide
  Antisense strand to SEQ ID NO: 274544
ucagacccugaaagguccc

SEQ ID NO: 274546 - RNA, 19 nt, Artificial Sequence
  Description of Artificial Sequence: Synthetic oligonucleotide
  Sense strand starting at position 3662 of SEQ ID NO: 3525
agggucugaguuuggagua

SEQ ID NO: 274547 - RNA, 19 nt, Artificial Sequence
  Description of Artificial Sequence: Synthetic oligonucleotide
  Antisense strand to SEQ ID NO: 274546
uacuccaaacucagacccu

SEQ ID NO: 274548 - RNA, 19 nt, Artificial Sequence
  Description of Artificial Sequence: Synthetic oligonucleotide
  Sense strand starting at position 3696 of SEQ ID NO: 3525
acacauucucucugaguga

SEQ ID NO: 274549 - RNA, 19 nt, Artificial Sequence
  Description of Artificial Sequence: Synthetic oligonucleotide
  Antisense strand to SEQ ID NO: 274548
ucacucagagagaaugugu

SEQ ID NO: 274550 - RNA, 19 nt, Artificial Sequence
  Description of Artificial Sequence: Synthetic oligonucleotide
  Sense strand starting at position 3709 of SEQ ID NO: 3525
gagugaugggacuguggau

SEQ ID NO: 274551 - RNA, 19 nt, Artificial Sequence
  Description of Artificial Sequence: Synthetic oligonucleotide
  Antisense strand to SEQ ID NO: 274550
auccacagucccaucacuc

SEQ ID NO: 274552 - RNA, 19 nt, Artificial Sequence
  Description of Artificial Sequence: Synthetic oligonucleotide
  Sense strand starting at position 3715 of SEQ ID NO: 3525
ugggacuguggaugacauu

SEQ ID NO: 274553 - RNA, 19 nt, Artificial Sequence
  Description of Artificial Sequence: Synthetic oligonucleotide
  Antisense strand to SEQ ID NO: 274552
aaugucauccacaguccca

SEQ ID NO: 274554 - RNA, 19 nt, Artificial Sequence
  Description of Artificial Sequence: Synthetic oligonucleotide
  Sense strand starting at position 3918 of SEQ ID NO: 3525
ugggacacuuucucuacaa

SEQ ID NO: 274555 - RNA, 19 nt, Artificial Sequence
  Description of Artificial Sequence: Synthetic oligonucleotide
  Antisense strand to SEQ ID NO: 274554
uuguagagaaaguguccca

SEQ ID NO: 274556 - RNA, 19 nt, Artificial Sequence
  Description of Artificial Sequence: Synthetic oligonucleotide
  Sense strand starting at position 10 of SEQ ID NO: 3526
aucuuauaguuugugacuu

SEQ ID NO: 274557 - RNA, 19 nt, Artificial Sequence
  Description of Artificial Sequence: Synthetic oligonucleotide
  Antisense strand to SEQ ID NO: 274556
aagucacaaacuauaagau

SEQ ID NO: 274558 - RNA, 19 nt, Artificial Sequence
  Description of Artificial Sequence: Synthetic oligonucleotide
  Sense strand starting at position 85 of SEQ ID NO: 3526
gcaguuuaaauggauguau

SEQ ID NO: 274559 - RNA, 19 nt, Artificial Sequence
  Description of Artificial Sequence: Synthetic oligonucleotide
  Antisense strand to SEQ ID NO: 274558
auacauccauuuaaacugc

SEQ ID NO: 274560 - RNA, 19 nt, Artificial Sequence
  Description of Artificial Sequence: Synthetic oligonucleotide
  Sense strand starting at position 87 of SEQ ID NO: 3526
aguuuaaauggauguauac

SEQ ID NO: 274561 - RNA, 19 nt, Artificial Sequence
  Description of Artificial Sequence: Synthetic oligonucleotide
  Antisense strand to SEQ ID NO: 274560
guauacauccauuuaaacu

SEQ ID NO: 274562 - RNA, 19 nt, Artificial Sequence
  Description of Artificial Sequence: Synthetic oligonucleotide
  Sense strand starting at position 183 of SEQ ID NO: 3526
uugagagguaacuguuaac

SEQ ID NO: 274563 - RNA, 19 nt, Artificial Sequence
  Description of Artificial Sequence: Synthetic oligonucleotide
  Antisense strand to SEQ ID NO: 274562
guuaacaguuaccucucaa

SEQ ID NO: 274564 - RNA, 19 nt, Artificial Sequence
  Description of Artificial Sequence: Synthetic oligonucleotide
  Sense strand starting at position 244 of SEQ ID NO: 3526
cuuugcuaugaugacauaa

SEQ ID NO: 274565 - RNA, 19 nt, Artificial Sequence
  Description of Artificial Sequence: Synthetic oligonucleotide
  Antisense strand to SEQ ID NO: 274564
uuaugucaucauagcaaag

SEQ ID NO: 274566 - RNA, 19 nt, Artificial Sequence
  Description of Artificial Sequence: Synthetic oligonucleotide
  Sense strand starting at position 328 of SEQ ID NO: 3526
guagcaaagccuuaagaau

SEQ ID NO: 274567 - RNA, 19 nt, Artificial Sequence
  Description of Artificial Sequence: Synthetic oligonucleotide
  Antisense strand to SEQ ID NO: 274566
auucuuaaggcuuugcuac

SEQ ID NO: 274568 - RNA, 19 nt, Artificial Sequence
  Description of Artificial Sequence: Synthetic oligonucleotide
  Sense strand starting at position 377 of SEQ ID NO: 3526
cccuauuaaugggucauaa

SEQ ID NO: 274569 - RNA, 19 nt, Artificial Sequence
  Description of Artificial Sequence: Synthetic oligonucleotide
  Antisense strand to SEQ ID NO: 274568
uuaugacccauuaauaggg

SEQ ID NO: 274570 - RNA, 19 nt, Artificial Sequence
  Description of Artificial Sequence: Synthetic oligonucleotide
  Sense strand starting at position 405 of SEQ ID NO: 3526
acugcaaauugguuggaua

SEQ ID NO: 274571 - RNA, 19 nt, Artificial Sequence
  Description of Artificial Sequence: Synthetic oligonucleotide
  Antisense strand to SEQ ID NO: 274570
uauccaaccaauuugcagu

SEQ ID NO: 274572 - RNA, 19 nt, Artificial Sequence
  Description of Artificial Sequence: Synthetic oligonucleotide
  Sense strand starting at position 406 of SEQ ID NO: 3526
cugcaaauugguuggauaa

SEQ ID NO: 274573 - RNA, 19 nt, Artificial Sequence
  Description of Artificial Sequence: Synthetic oligonucleotide
  Antisense strand to SEQ ID NO: 274572
uuauccaaccaauuugcag

SEQ ID NO: 274574 - RNA, 19 nt, Artificial Sequence
  Description of Artificial Sequence: Synthetic oligonucleotide
  Sense strand starting at position 407 of SEQ ID NO: 3526
ugcaaauugguuggauaau

SEQ ID NO: 274575 - RNA, 19 nt, Artificial Sequence
  Description of Artificial Sequence: Synthetic oligonucleotide
  Antisense strand to SEQ ID NO: 274574
auuauccaaccaauuugca

SEQ ID NO: 274576 - RNA, 19 nt, Artificial Sequence
  Description of Artificial Sequence: Synthetic oligonucleotide
  Sense strand starting at position 419 of SEQ ID NO: 3526
ggauaauggucugcacuga

SEQ ID NO: 274577 - RNA, 19 nt, Artificial Sequence
  Description of Artificial Sequence: Synthetic oligonucleotide
  Antisense strand to SEQ ID NO: 274576
ucagugcagaccauuaucc

SEQ ID NO: 274578 - RNA, 19 nt, Artificial Sequence
  Description of Artificial Sequence: Synthetic oligonucleotide
  Sense strand starting at position 423 of SEQ ID NO: 3526
aauggucugcacugagauc

SEQ ID NO: 274579 - RNA, 19 nt, Artificial Sequence
  Description of Artificial Sequence: Synthetic oligonucleotide
  Antisense strand to SEQ ID NO: 274578
gaucucagugcagaccauu

SEQ ID NO: 274580 - RNA, 19 nt, Artificial Sequence
  Description of Artificial Sequence: Synthetic oligonucleotide
  Sense strand starting at position 516 of SEQ ID NO: 3526
caccaucuuggguaguuaa

SEQ ID NO: 274581 - RNA, 19 nt, Artificial Sequence
  Description of Artificial Sequence: Synthetic oligonucleotide
  Antisense strand to SEQ ID NO: 274580
uuaacuacccaagauggug

SEQ ID NO: 274582 - RNA, 19 nt, Artificial Sequence
  Description of Artificial Sequence: Synthetic oligonucleotide
  Sense strand starting at position 684 of SEQ ID NO: 3526
aucuaucaugucuagauuc

SEQ ID NO: 274583 - RNA, 19 nt, Artificial Sequence
  Description of Artificial Sequence: Synthetic oligonucleotide
  Antisense strand to SEQ ID NO: 274582
gaaucuagacaugauagau

SEQ ID NO: 274584 - RNA, 19 nt, Artificial Sequence
  Description of Artificial Sequence: Synthetic oligonucleotide
  Sense strand starting at position 780 of SEQ ID NO: 3526
ggaaguauuuacugacaua

SEQ ID NO: 274585 - RNA, 19 nt, Artificial Sequence
  Description of Artificial Sequence: Synthetic oligonucleotide
  Antisense strand to SEQ ID NO: 274584
uaugucaguaaauacuucc

SEQ ID NO: 274586 - RNA, 19 nt, Artificial Sequence
  Description of Artificial Sequence: Synthetic oligonucleotide
  Sense strand starting at position 783 of SEQ ID NO: 3526
aguauuuacugacauaaga

SEQ ID NO: 274587 - RNA, 19 nt, Artificial Sequence
  Description of Artificial Sequence: Synthetic oligonucleotide
  Antisense strand to SEQ ID NO: 274586
ucuuaugucaguaaauacu

SEQ ID NO: 274588 - RNA, 19 nt, Artificial Sequence
  Description of Artificial Sequence: Synthetic oligonucleotide
  Sense strand starting at position 912 of SEQ ID NO: 3526
uuaggcuuacccugaugaa

SEQ ID NO: 274589 - RNA, 19 nt, Artificial Sequence
  Description of Artificial Sequence: Synthetic oligonucleotide
  Antisense strand to SEQ ID NO: 274588
uucaucaggguaagccuaa

SEQ ID NO: 274590 - RNA, 19 nt, Artificial Sequence
  Description of Artificial Sequence: Synthetic oligonucleotide
  Sense strand starting at position 935 of SEQ ID NO: 3526
agcguuagucucuaugaua

SEQ ID NO: 274591 - RNA, 19 nt, Artificial Sequence
  Description of Artificial Sequence: Synthetic oligonucleotide
  Antisense strand to SEQ ID NO: 274590
uaucauagagacuaacgcu

SEQ ID NO: 274592 - RNA, 19 nt, Artificial Sequence
  Description of Artificial Sequence: Synthetic oligonucleotide
  Sense strand starting at position 1056 of SEQ ID NO: 3526
aagaucuuucucgacgaga

SEQ ID NO: 274593 - RNA, 19 nt, Artificial Sequence
  Description of Artificial Sequence: Synthetic oligonucleotide
  Antisense strand to SEQ ID NO: 274592
ucucgucgagaaagaucuu

SEQ ID NO: 274594 - RNA, 19 nt, Artificial Sequence
  Description of Artificial Sequence: Synthetic oligonucleotide
  Sense strand starting at position 1058 of SEQ ID NO: 3526
gaucuuucucgacgagacu

SEQ ID NO: 274595 - RNA, 19 nt, Artificial Sequence
  Description of Artificial Sequence: Synthetic oligonucleotide
  Antisense strand to SEQ ID NO: 274594
agucucgucgagaaagauc

SEQ ID NO: 274596 - RNA, 19 nt, Artificial Sequence
  Description of Artificial Sequence: Synthetic oligonucleotide
  Sense strand starting at position 1080 of SEQ ID NO: 3526
gcaugccuuguuuaaggaa

SEQ ID NO: 274597 - RNA, 19 nt, Artificial Sequence
  Description of Artificial Sequence: Synthetic oligonucleotide
  Antisense strand to SEQ ID NO: 274596
uuccuuaaacaaggcaugc

SEQ ID NO: 274598 - RNA, 19 nt, Artificial Sequence
  Description of Artificial Sequence: Synthetic oligonucleotide
  Sense strand starting at position 1172 of SEQ ID NO: 3526
ccgagcuccucacuacaua

SEQ ID NO: 274599 - RNA, 19 nt, Artificial Sequence
  Description of Artificial Sequence: Synthetic oligonucleotide
  Antisense strand to SEQ ID NO: 274598
uauguagugaggagcucgg

SEQ ID NO: 274600 - RNA, 19 nt, Artificial Sequence
  Description of Artificial Sequence: Synthetic oligonucleotide
  Sense strand starting at position 1183 of SEQ ID NO: 3526
acuacauacuccucuggga

SEQ ID NO: 274601 - RNA, 19 nt, Artificial Sequence
  Description of Artificial Sequence: Synthetic oligonucleotide
  Antisense strand to SEQ ID NO: 274600
ucccagaggaguauguagu

SEQ ID NO: 274602 - RNA, 19 nt, Artificial Sequence
  Description of Artificial Sequence: Synthetic oligonucleotide
  Sense strand starting at position 1330 of SEQ ID NO: 3526
caacaauaucgacggguaa

SEQ ID NO: 274603 - RNA, 19 nt, Artificial Sequence
  Description of Artificial Sequence: Synthetic oligonucleotide
  Antisense strand to SEQ ID NO: 274602
uuacccgucgauauuguug

SEQ ID NO: 274604 - RNA, 19 nt, Artificial Sequence
  Description of Artificial Sequence: Synthetic oligonucleotide
  Sense strand starting at position 1331 of SEQ ID NO: 3526
aacaauaucgacggguaaa

SEQ ID NO: 274605 - RNA, 19 nt, Artificial Sequence
  Description of Artificial Sequence: Synthetic oligonucleotide
  Antisense strand to SEQ ID NO: 274604
uuuacccgucgauauuguu

SEQ ID NO: 274606 - RNA, 19 nt, Artificial Sequence
  Description of Artificial Sequence: Synthetic oligonucleotide
  Sense strand starting at position 1433 of SEQ ID NO: 3526
agcaacucgagguguacaa

SEQ ID NO: 274607 - RNA, 19 nt, Artificial Sequence
  Description of Artificial Sequence: Synthetic oligonucleotide
  Antisense strand to SEQ ID NO: 274606
uuguacaccucgaguugcu

SEQ ID NO: 274608 - RNA, 19 nt, Artificial Sequence
  Description of Artificial Sequence: Synthetic oligonucleotide
  Sense strand starting at position 1487 of SEQ ID NO: 3526
cccggagauccugguggau

SEQ ID NO: 274609 - RNA, 19 nt, Artificial Sequence
  Description of Artificial Sequence: Synthetic oligonucleotide
  Antisense strand to SEQ ID NO: 274608
auccaccaggaucuccggg

SEQ ID NO: 274610 - RNA, 19 nt, Artificial Sequence
  Description of Artificial Sequence: Synthetic oligonucleotide
  Sense strand starting at position 1499 of SEQ ID NO: 3526
gguggaucucccgaagccu

SEQ ID NO: 274611 - RNA, 19 nt, Artificial Sequence
  Description of Artificial Sequence: Synthetic oligonucleotide
  Antisense strand to SEQ ID NO: 274610
aggcuucgggagauccacc

SEQ ID NO: 274612 - RNA, 19 nt, Artificial Sequence
  Description of Artificial Sequence: Synthetic oligonucleotide
  Sense strand starting at position 1619 of SEQ ID NO: 3526
ggcccaguguuuccaaaca

SEQ ID NO: 274613 - RNA, 19 nt, Artificial Sequence
  Description of Artificial Sequence: Synthetic oligonucleotide
  Antisense strand to SEQ ID NO: 274612
uguuuggaaacacugggcc

SEQ ID NO: 274614 - RNA, 19 nt, Artificial Sequence
  Description of Artificial Sequence: Synthetic oligonucleotide
  Sense strand starting at position 2073 of SEQ ID NO: 3526
cgguguagccaaugggaga

SEQ ID NO: 274615 - RNA, 19 nt, Artificial Sequence
  Description of Artificial Sequence: Synthetic oligonucleotide
  Antisense strand to SEQ ID NO: 274614
ucucccauuggcuacaccg

SEQ ID NO: 274616 - RNA, 19 nt, Artificial Sequence
  Description of Artificial Sequence: Synthetic oligonucleotide
  Sense strand starting at position 2362 of SEQ ID NO: 3526
ugaugaacagugugccaaa

SEQ ID NO: 274617 - RNA, 19 nt, Artificial Sequence
  Description of Artificial Sequence: Synthetic oligonucleotide
  Antisense strand to SEQ ID NO: 274616
uuuggcacacuguucauca

SEQ ID NO: 274618 - RNA, 19 nt, Artificial Sequence
  Description of Artificial Sequence: Synthetic oligonucleotide
  Sense strand starting at position 2388 of SEQ ID NO: 3526
auuggcuuccguuugcuua

SEQ ID NO: 274619 - RNA, 19 nt, Artificial Sequence
  Description of Artificial Sequence: Synthetic oligonucleotide
  Antisense strand to SEQ ID NO: 274618
uaagcaaacggaagccaau

SEQ ID NO: 274620 - RNA, 19 nt, Artificial Sequence
  Description of Artificial Sequence: Synthetic oligonucleotide
  Sense strand starting at position 2415 of SEQ ID NO: 3526
agaacagauucccuagucu

SEQ ID NO: 274621 - RNA, 19 nt, Artificial Sequence
  Description of Artificial Sequence: Synthetic oligonucleotide
  Antisense strand to SEQ ID NO: 274620
agacuagggaaucuguucu

SEQ ID NO: 274622 - RNA, 19 nt, Artificial Sequence
  Description of Artificial Sequence: Synthetic oligonucleotide
  Sense strand starting at position 2827 of SEQ ID NO: 3526
gcuggaggauugcuuaaac

SEQ ID NO: 274623 - RNA, 19 nt, Artificial Sequence
  Description of Artificial Sequence: Synthetic oligonucleotide
  Antisense strand to SEQ ID NO: 274622
guuuaagcaauccuccagc

SEQ ID NO: 274624 - RNA, 19 nt, Artificial Sequence
  Description of Artificial Sequence: Synthetic oligonucleotide
  Sense strand starting at position 3473 of SEQ ID NO: 3526
gagcauauugcauaaguaa

SEQ ID NO: 274625 - RNA, 19 nt, Artificial Sequence
  Description of Artificial Sequence: Synthetic oligonucleotide
  Antisense strand to SEQ ID NO: 274624
uuacuuaugcaauaugcuc

SEQ ID NO: 274626 - RNA, 19 nt, Artificial Sequence
  Description of Artificial Sequence: Synthetic oligonucleotide
  Sense strand starting at position 3535 of SEQ ID NO: 3526
agggucuggagaggucaau

SEQ ID NO: 274627 - RNA, 19 nt, Artificial Sequence
  Description of Artificial Sequence: Synthetic oligonucleotide
  Antisense strand to SEQ ID NO: 274626
auugaccucuccagacccu

SEQ ID NO: 274628 - RNA, 19 nt, Artificial Sequence
  Description of Artificial Sequence: Synthetic oligonucleotide
  Sense strand starting at position 3570 of SEQ ID NO: 3526
gagaauucugaauguuaug

SEQ ID NO: 274629 - RNA, 19 nt, Artificial Sequence
  Description of Artificial Sequence: Synthetic oligonucleotide
  Antisense strand to SEQ ID NO: 274628
cauaacauucagaauucuc

SEQ ID NO: 274630 - RNA, 19 nt, Artificial Sequence
  Description of Artificial Sequence: Synthetic oligonucleotide
  Sense strand starting at position 3579 of SEQ ID NO: 3526
gaauguuauggauaaucgu

SEQ ID NO: 274631 - RNA, 19 nt, Artificial Sequence
  Description of Artificial Sequence: Synthetic oligonucleotide
  Antisense strand to SEQ ID NO: 274630
acgauuauccauaacauuc

SEQ ID NO: 274632 - RNA, 19 nt, Artificial Sequence
  Description of Artificial Sequence: Synthetic oligonucleotide
  Sense strand starting at position 3623 of SEQ ID NO: 3526
acagauuauucucuuuggu

SEQ ID NO: 274633 - RNA, 19 nt, Artificial Sequence
  Description of Artificial Sequence: Synthetic oligonucleotide
  Antisense strand to SEQ ID NO: 274632
accaaagagaauaaucugu

SEQ ID NO: 274634 - RNA, 19 nt, Artificial Sequence
  Description of Artificial Sequence: Synthetic oligonucleotide
  Sense strand starting at position 3625 of SEQ ID NO: 3526
agauuauucucuuugguuc

SEQ ID NO: 274635 - RNA, 19 nt, Artificial Sequence
  Description of Artificial Sequence: Synthetic oligonucleotide
  Antisense strand to SEQ ID NO: 274634
gaaccaaagagaauaaucu

SEQ ID NO: 274636 - RNA, 19 nt, Artificial Sequence
  Description of Artificial Sequence: Synthetic oligonucleotide
  Sense strand starting at position 355 of SEQ ID NO: 3527
guucuaagccuugagcuca

SEQ ID NO: 274637 - RNA, 19 nt, Artificial Sequence
  Description of Artificial Sequence: Synthetic oligonucleotide
  Antisense strand to SEQ ID NO: 274636
ugagcucaaggcuuagaac

SEQ ID NO: 274638 - RNA, 19 nt, Artificial Sequence
  Description of Artificial Sequence: Synthetic oligonucleotide
  Sense strand starting at position 751 of SEQ ID NO: 3527
gaaguagucuggcuuuaua

SEQ ID NO: 274639 - RNA, 19 nt, Artificial Sequence
  Description of Artificial Sequence: Synthetic oligonucleotide
  Antisense strand to SEQ ID NO: 274638
uauaaagccagacuacuuc

SEQ ID NO: 274640 - RNA, 19 nt, Artificial Sequence
  Description of Artificial Sequence: Synthetic oligonucleotide
  Sense strand starting at position 826 of SEQ ID NO: 3527
aggaauuaguaucauuucu

SEQ ID NO: 274641 - RNA, 19 nt, Artificial Sequence
  Description of Artificial Sequence: Synthetic oligonucleotide
  Antisense strand to SEQ ID NO: 274640
agaaaugauacuaauuccu

SEQ ID NO: 274642 - RNA, 19 nt, Artificial Sequence
  Description of Artificial Sequence: Synthetic oligonucleotide
  Sense strand starting at position 856 of SEQ ID NO: 3527
cuaucuauuguaggugcaa

SEQ ID NO: 274643 - RNA, 19 nt, Artificial Sequence
  Description of Artificial Sequence: Synthetic oligonucleotide
  Antisense strand to SEQ ID NO: 274642
uugcaccuacaauagauag

SEQ ID NO: 274644 - RNA, 19 nt, Artificial Sequence
  Description of Artificial Sequence: Synthetic oligonucleotide
  Sense strand starting at position 857 of SEQ ID NO: 3527
uaucuauuguaggugcaau

SEQ ID NO: 274645 - RNA, 19 nt, Artificial Sequence
  Description of Artificial Sequence: Synthetic oligonucleotide
  Antisense strand to SEQ ID NO: 274644
auugcaccuacaauagaua

SEQ ID NO: 274646 - RNA, 19 nt, Artificial Sequence
  Description of Artificial Sequence: Synthetic oligonucleotide
  Sense strand starting at position 907 of SEQ ID NO: 3527
cuaugugaccaagguuaca

SEQ ID NO: 274647 - RNA, 19 nt, Artificial Sequence
  Description of Artificial Sequence: Synthetic oligonucleotide
  Antisense strand to SEQ ID NO: 274646
uguaaccuuggucacauag

SEQ ID NO: 274648 - RNA, 19 nt, Artificial Sequence
  Description of Artificial Sequence: Synthetic oligonucleotide
  Sense strand starting at position 919 of SEQ ID NO: 3527
gguuacaaaugucuacuga

SEQ ID NO: 274649 - RNA, 19 nt, Artificial Sequence
  Description of Artificial Sequence: Synthetic oligonucleotide
  Antisense strand to SEQ ID NO: 274648
ucaguagacauuuguaacc

SEQ ID NO: 274650 - RNA, 19 nt, Artificial Sequence
  Description of Artificial Sequence: Synthetic oligonucleotide
  Sense strand starting at position 920 of SEQ ID NO: 3527
guuacaaaugucuacugau

SEQ ID NO: 274651 - RNA, 19 nt, Artificial Sequence
  Description of Artificial Sequence: Synthetic oligonucleotide
  Antisense strand to SEQ ID NO: 274650
aucaguagacauuuguaac

SEQ ID NO: 274652 - RNA, 19 nt, Artificial Sequence
  Description of Artificial Sequence: Synthetic oligonucleotide
  Sense strand starting at position 952 of SEQ ID NO: 3527
agauauauagcccagcuuu

SEQ ID NO: 274653 - RNA, 19 nt, Artificial Sequence
  Description of Artificial Sequence: Synthetic oligonucleotide
  Antisense strand to SEQ ID NO: 274652
aaagcugggcuauauaucu

SEQ ID NO: 274654 - RNA, 19 nt, Artificial Sequence
  Description of Artificial Sequence: Synthetic oligonucleotide
  Sense strand starting at position 1138 of SEQ ID NO: 3527
ggucccuuccaaggaagaa

SEQ ID NO: 274655 - RNA, 19 nt, Artificial Sequence
  Description of Artificial Sequence: Synthetic oligonucleotide
  Antisense strand to SEQ ID NO: 274654
uucuuccuuggaagggacc

SEQ ID NO: 274656 - RNA, 19 nt, Artificial Sequence
  Description of Artificial Sequence: Synthetic oligonucleotide
  Sense strand starting at position 1201 of SEQ ID NO: 3527
ggcucaaucucaguuuaac

SEQ ID NO: 274657 - RNA, 19 nt, Artificial Sequence
  Description of Artificial Sequence: Synthetic oligonucleotide
  Antisense strand to SEQ ID NO: 274656
guuaaacugagauugagcc

SEQ ID NO: 274658 - RNA, 19 nt, Artificial Sequence
  Description of Artificial Sequence: Synthetic oligonucleotide
  Sense strand starting at position 1210 of SEQ ID NO: 3527
ucaguuuaaccugguaaau

SEQ ID NO: 274659 - RNA, 19 nt, Artificial Sequence
  Description of Artificial Sequence: Synthetic oligonucleotide
  Antisense strand to SEQ ID NO: 274658
auuuaccagguuaaacuga

SEQ ID NO: 274660 - RNA, 19 nt, Artificial Sequence
  Description of Artificial Sequence: Synthetic oligonucleotide
  Sense strand starting at position 1251 of SEQ ID NO: 3527
gguauacauccagaccagu

SEQ ID NO: 274661 - RNA, 19 nt, Artificial Sequence
  Description of Artificial Sequence: Synthetic oligonucleotide
  Antisense strand to SEQ ID NO: 274660
acuggucuggauguauacc

SEQ ID NO: 274662 - RNA, 19 nt, Artificial Sequence
  Description of Artificial Sequence: Synthetic oligonucleotide
  Sense strand starting at position 1313 of SEQ ID NO: 3527
uuguuuaagggaugagugu

SEQ ID NO: 274663 - RNA, 19 nt, Artificial Sequence
  Description of Artificial Sequence: Synthetic oligonucleotide
  Antisense strand to SEQ ID NO: 274662
acacucaucccuuaaacaa

SEQ ID NO: 274664 - RNA, 19 nt, Artificial Sequence
  Description of Artificial Sequence: Synthetic oligonucleotide
  Sense strand starting at position 1319 of SEQ ID NO: 3527
aagggaugagugugagauu

SEQ ID NO: 274665 - RNA, 19 nt, Artificial Sequence
  Description of Artificial Sequence: Synthetic oligonucleotide
  Antisense strand to SEQ ID NO: 274664
aaucucacacucaucccuu

SEQ ID NO: 274666 - RNA, 19 nt, Artificial Sequence
  Description of Artificial Sequence: Synthetic oligonucleotide
  Sense strand starting at position 1320 of SEQ ID NO: 3527
agggaugagugugagauuu

SEQ ID NO: 274667 - RNA, 19 nt, Artificial Sequence
  Description of Artificial Sequence: Synthetic oligonucleotide
  Antisense strand to SEQ ID NO: 274666
aaaucucacacucaucccu

SEQ ID NO: 274668 - RNA, 19 nt, Artificial Sequence
  Description of Artificial Sequence: Synthetic oligonucleotide
  Sense strand starting at position 1475 of SEQ ID NO: 3527
cagccugauguagguuaaa

SEQ ID NO: 274669 - RNA, 19 nt, Artificial Sequence
  Description of Artificial Sequence: Synthetic oligonucleotide
  Antisense strand to SEQ ID NO: 274668
uuuaaccuacaucaggcug

SEQ ID NO: 274670 - RNA, 19 nt, Artificial Sequence
  Description of Artificial Sequence: Synthetic oligonucleotide
  Sense strand starting at position 1747 of SEQ ID NO: 3527
cucggauauuuacaaugca

SEQ ID NO: 274671 - RNA, 19 nt, Artificial Sequence
  Description of Artificial Sequence: Synthetic oligonucleotide
  Antisense strand to SEQ ID NO: 274670
ugcauuguaaauauccgag

SEQ ID NO: 274672 - RNA, 19 nt, Artificial Sequence
  Description of Artificial Sequence: Synthetic oligonucleotide
  Sense strand starting at position 2139 of SEQ ID NO: 3527
auauacaguuccucuugua

SEQ ID NO: 274673 - RNA, 19 nt, Artificial Sequence
  Description of Artificial Sequence: Synthetic oligonucleotide
  Antisense strand to SEQ ID NO: 274672
uacaagaggaacuguauau

SEQ ID NO: 274674 - RNA, 19 nt, Artificial Sequence
  Description of Artificial Sequence: Synthetic oligonucleotide
  Sense strand starting at position 2151 of SEQ ID NO: 3527
ucuuguacacauugugaaa

SEQ ID NO: 274675 - RNA, 19 nt, Artificial Sequence
  Description of Artificial Sequence: Synthetic oligonucleotide
  Antisense strand to SEQ ID NO: 274674
uuucacaauguguacaaga

SEQ ID NO: 274676 - RNA, 19 nt, Artificial Sequence
  Description of Artificial Sequence: Synthetic oligonucleotide
  Sense strand starting at position 2333 of SEQ ID NO: 3527
gacuauucuggagauugcu

SEQ ID NO: 274677 - RNA, 19 nt, Artificial Sequence
  Description of Artificial Sequence: Synthetic oligonucleotide
  Antisense strand to SEQ ID NO: 274676
agcaaucuccagaauaguc

SEQ ID NO: 274678 - RNA, 19 nt, Artificial Sequence
  Description of Artificial Sequence: Synthetic oligonucleotide
  Sense strand starting at position 2339 of SEQ ID NO: 3527
ucuggagauugcuucucau

SEQ ID NO: 274679 - RNA, 19 nt, Artificial Sequence
  Description of Artificial Sequence: Synthetic oligonucleotide
  Antisense strand to SEQ ID NO: 274678
augagaagcaaucuccaga

SEQ ID NO: 274680 - RNA, 19 nt, Artificial Sequence
  Description of Artificial Sequence: Synthetic oligonucleotide
  Sense strand starting at position 2498 of SEQ ID NO: 3527
gcaggacugccugguaaga

SEQ ID NO: 274681 - RNA, 19 nt, Artificial Sequence
  Description of Artificial Sequence: Synthetic oligonucleotide
  Antisense strand to SEQ ID NO: 274680
ucuuaccaggcaguccugc

SEQ ID NO: 274682 - RNA, 19 nt, Artificial Sequence
  Description of Artificial Sequence: Synthetic oligonucleotide
  Sense strand starting at position 2555 of SEQ ID NO: 3527
cagggauaugcuggucuga

SEQ ID NO: 274683 - RNA, 19 nt, Artificial Sequence
  Description of Artificial Sequence: Synthetic oligonucleotide
  Antisense strand to SEQ ID NO: 274682
ucagaccagcauaucccug

SEQ ID NO: 274684 - RNA, 19 nt, Artificial Sequence
  Description of Artificial Sequence: Synthetic oligonucleotide
  Sense strand starting at position 2557 of SEQ ID NO: 3527
gggauaugcuggucugauu

SEQ ID NO: 274685 - RNA, 19 nt, Artificial Sequence
  Description of Artificial Sequence: Synthetic oligonucleotide
  Antisense strand to SEQ ID NO: 274684
aaucagaccagcauauccc

SEQ ID NO: 274686 - RNA, 19 nt, Artificial Sequence
  Description of Artificial Sequence: Synthetic oligonucleotide
  Sense strand starting at position 2564 of SEQ ID NO: 3527
gcuggucugauuggacaga

SEQ ID NO: 274687 - RNA, 19 nt, Artificial Sequence
  Description of Artificial Sequence: Synthetic oligonucleotide
  Antisense strand to SEQ ID NO: 274686
ucuguccaaucagaccagc

SEQ ID NO: 274688 - RNA, 19 nt, Artificial Sequence
  Description of Artificial Sequence: Synthetic oligonucleotide
  Sense strand starting at position 2577 of SEQ ID NO: 3527
gacagaccuuccuugcagu

SEQ ID NO: 274689 - RNA, 19 nt, Artificial Sequence
  Description of Artificial Sequence: Synthetic oligonucleotide
  Antisense strand to SEQ ID NO: 274688
acugcaaggaaggucuguc

SEQ ID NO: 274690 - RNA, 19 nt, Artificial Sequence
  Description of Artificial Sequence: Synthetic oligonucleotide
  Sense strand starting at position 2590 of SEQ ID NO: 3527
ugcaguuuccugucuguuu

SEQ ID NO: 274691 - RNA, 19 nt, Artificial Sequence
  Description of Artificial Sequence: Synthetic oligonucleotide
  Antisense strand to SEQ ID NO: 274690
aaacagacaggaaacugca

SEQ ID NO: 274692 - RNA, 19 nt, Artificial Sequence
  Description of Artificial Sequence: Synthetic oligonucleotide
  Sense strand starting at position 2911 of SEQ ID NO: 3527
gcaaaucuuuaagcuuuga

SEQ ID NO: 274693 - RNA, 19 nt, Artificial Sequence
  Description of Artificial Sequence: Synthetic oligonucleotide
  Antisense strand to SEQ ID NO: 274692
ucaaagcuuaaagauuugc

SEQ ID NO: 274694 - RNA, 19 nt, Artificial Sequence
  Description of Artificial Sequence: Synthetic oligonucleotide
  Sense strand starting at position 2915 of SEQ ID NO: 3527
aucuuuaagcuuugaguua

SEQ ID NO: 274695 - RNA, 19 nt, Artificial Sequence
  Description of Artificial Sequence: Synthetic oligonucleotide
  Antisense strand to SEQ ID NO: 274694
uaacucaaagcuuaaagau

SEQ ID NO: 274696 - RNA, 19 nt, Artificial Sequence
  Description of Artificial Sequence: Synthetic oligonucleotide
  Sense strand starting at position 3391 of SEQ ID NO: 3527
gccucaggacuuuguacau

SEQ ID NO: 274697 - RNA, 19 nt, Artificial Sequence
  Description of Artificial Sequence: Synthetic oligonucleotide
  Antisense strand to SEQ ID NO: 274696
auguacaaaguccugaggc

SEQ ID NO: 274698 - RNA, 19 nt, Artificial Sequence
  Description of Artificial Sequence: Synthetic oligonucleotide
  Sense strand starting at position 3397 of SEQ ID NO: 3527
ggacuuuguacaugugauu

SEQ ID NO: 274699 - RNA, 19 nt, Artificial Sequence
  Description of Artificial Sequence: Synthetic oligonucleotide
  Antisense strand to SEQ ID NO: 274698
aaucacauguacaaagucc

SEQ ID NO: 274700 - RNA, 19 nt, Artificial Sequence
  Description of Artificial Sequence: Synthetic oligonucleotide
  Sense strand starting at position 3406 of SEQ ID NO: 3527
acaugugauucccucugau

SEQ ID NO: 274701 - RNA, 19 nt, Artificial Sequence
  Description of Artificial Sequence: Synthetic oligonucleotide
  Antisense strand to SEQ ID NO: 274700
aucagagggaaucacaugu

SEQ ID NO: 274702 - RNA, 19 nt, Artificial Sequence
  Description of Artificial Sequence: Synthetic oligonucleotide
  Sense strand starting at position 3409 of SEQ ID NO: 3527
ugugauucccucugaugag

SEQ ID NO: 274703 - RNA, 19 nt, Artificial Sequence
  Description of Artificial Sequence: Synthetic oligonucleotide
  Antisense strand to SEQ ID NO: 274702
cucaucagagggaaucaca

SEQ ID NO: 274704 - RNA, 19 nt, Artificial Sequence
  Description of Artificial Sequence: Synthetic oligonucleotide
  Sense strand starting at position 3451 of SEQ ID NO: 3527
cuuacuuaggcuggcuaau

SEQ ID NO: 274705 - RNA, 19 nt, Artificial Sequence
  Description of Artificial Sequence: Synthetic oligonucleotide
  Antisense strand to SEQ ID NO: 274704
auuagccagccuaaguaag

SEQ ID NO: 274706 - RNA, 19 nt, Artificial Sequence
  Description of Artificial Sequence: Synthetic oligonucleotide
  Sense strand starting at position 3462 of SEQ ID NO: 3527
uggcuaauuucucuuugcu

SEQ ID NO: 274707 - RNA, 19 nt, Artificial Sequence
  Description of Artificial Sequence: Synthetic oligonucleotide
  Antisense strand to SEQ ID NO: 274706
agcaaagagaaauuagcca

SEQ ID NO: 274708 - RNA, 19 nt, Artificial Sequence
  Description of Artificial Sequence: Synthetic oligonucleotide
  Sense strand starting at position 3472 of SEQ ID NO: 3527
cucuuugcucuuuaagaag

SEQ ID NO: 274709 - RNA, 19 nt, Artificial Sequence
  Description of Artificial Sequence: Synthetic oligonucleotide
  Antisense strand to SEQ ID NO: 274708
cuucuuaaagagcaaagag

SEQ ID NO: 274710 - RNA, 19 nt, Artificial Sequence
  Description of Artificial Sequence: Synthetic oligonucleotide
  Sense strand starting at position 3943 of SEQ ID NO: 3527
gcacuagaaucguuuggac

SEQ ID NO: 274711 - RNA, 19 nt, Artificial Sequence
  Description of Artificial Sequence: Synthetic oligonucleotide
  Antisense strand to SEQ ID NO: 274710
guccaaacgauucuagugc

SEQ ID NO: 274712 - RNA, 19 nt, Artificial Sequence
  Description of Artificial Sequence: Synthetic oligonucleotide
  Sense strand starting at position 3945 of SEQ ID NO: 3527
acuagaaucguuuggacuc

SEQ ID NO: 274713 - RNA, 19 nt, Artificial Sequence
  Description of Artificial Sequence: Synthetic oligonucleotide
  Antisense strand to SEQ ID NO: 274712
gaguccaaacgauucuagu

SEQ ID NO: 274714 - RNA, 19 nt, Artificial Sequence
  Description of Artificial Sequence: Synthetic oligonucleotide
  Sense strand starting at position 3951 of SEQ ID NO: 3527
aucguuuggacucaggaga

SEQ ID NO: 274715 - RNA, 19 nt, Artificial Sequence
  Description of Artificial Sequence: Synthetic oligonucleotide
  Antisense strand to SEQ ID NO: 274714
ucuccugaguccaaacgau

SEQ ID NO: 274716 - RNA, 19 nt, Artificial Sequence
  Description of Artificial Sequence: Synthetic oligonucleotide
  Sense strand starting at position 227 of SEQ ID NO: 3528
gacuuaauuugugaaaugg

SEQ ID NO: 274717 - RNA, 19 nt, Artificial Sequence
  Description of Artificial Sequence: Synthetic oligonucleotide
  Antisense strand to SEQ ID NO: 274716
ccauuucacaaauuaaguc

SEQ ID NO: 274718 - RNA, 19 nt, Artificial Sequence
  Description of Artificial Sequence: Synthetic oligonucleotide
  Sense strand starting at position 244 of SEQ ID NO: 3528
ggaagauguuucuccacuu

SEQ ID NO: 274719 - RNA, 19 nt, Artificial Sequence
  Description of Artificial Sequence: Synthetic oligonucleotide
  Antisense strand to SEQ ID NO: 274718
aaguggagaaacaucuucc

SEQ ID NO: 274720 - RNA, 19 nt, Artificial Sequence
  Description of Artificial Sequence: Synthetic oligonucleotide
  Sense strand starting at position 481 of SEQ ID NO: 3528
guuuccaugcauugaaaua

SEQ ID NO: 274721 - RNA, 19 nt, Artificial Sequence
  Description of Artificial Sequence: Synthetic oligonucleotide
  Antisense strand to SEQ ID NO: 274720
uauuucaaugcauggaaac

SEQ ID NO: 274722 - RNA, 19 nt, Artificial Sequence
  Description of Artificial Sequence: Synthetic oligonucleotide
  Sense strand starting at position 572 of SEQ ID NO: 3528
uuugauagcuccuugaaug

SEQ ID NO: 274723 - RNA, 19 nt, Artificial Sequence
  Description of Artificial Sequence: Synthetic oligonucleotide
  Antisense strand to SEQ ID NO: 274722
cauucaaggagcuaucaaa

SEQ ID NO: 274724 - RNA, 19 nt, Artificial Sequence
  Description of Artificial Sequence: Synthetic oligonucleotide
  Sense strand starting at position 573 of SEQ ID NO: 3528
uugauagcuccuugaaugg

SEQ ID NO: 274725 - RNA, 19 nt, Artificial Sequence
  Description of Artificial Sequence: Synthetic oligonucleotide
  Antisense strand to SEQ ID NO: 274724
ccauucaaggagcuaucaa

SEQ ID NO: 274726 - RNA, 19 nt, Artificial Sequence
  Description of Artificial Sequence: Synthetic oligonucleotide
  Sense strand starting at position 894 of SEQ ID NO: 3528
auuggauuguaugccuaaa

SEQ ID NO: 274727 - RNA, 19 nt, Artificial Sequence
  Description of Artificial Sequence: Synthetic oligonucleotide
  Antisense strand to SEQ ID NO: 274726
uuuaggcauacaauccaau

SEQ ID NO: 274728 - RNA, 19 nt, Artificial Sequence
  Description of Artificial Sequence: Synthetic oligonucleotide
  Sense strand starting at position 896 of SEQ ID NO: 3528
uggauuguaugccuaaaug

SEQ ID NO: 274729 - RNA, 19 nt, Artificial Sequence
  Description of Artificial Sequence: Synthetic oligonucleotide
  Antisense strand to SEQ ID NO: 274728
cauuuaggcauacaaucca

SEQ ID NO: 274730 - RNA, 19 nt, Artificial Sequence
  Description of Artificial Sequence: Synthetic oligonucleotide
  Sense strand starting at position 904 of SEQ ID NO: 3528
augccuaaaugggugaauu

SEQ ID NO: 274731 - RNA, 19 nt, Artificial Sequence
  Description of Artificial Sequence: Synthetic oligonucleotide
  Antisense strand to SEQ ID NO: 274730
aauucacccauuuaggcau

SEQ ID NO: 274732 - RNA, 19 nt, Artificial Sequence
  Description of Artificial Sequence: Synthetic oligonucleotide
  Sense strand starting at position 905 of SEQ ID NO: 3528
ugccuaaaugggugaauuc

SEQ ID NO: 274733 - RNA, 19 nt, Artificial Sequence
  Description of Artificial Sequence: Synthetic oligonucleotide
  Antisense strand to SEQ ID NO: 274732
gaauucacccauuuaggca

SEQ ID NO: 274734 - RNA, 19 nt, Artificial Sequence
  Description of Artificial Sequence: Synthetic oligonucleotide
  Sense strand starting at position 906 of SEQ ID NO: 3528
gccuaaaugggugaauucu

SEQ ID NO: 274735 - RNA, 19 nt, Artificial Sequence
  Description of Artificial Sequence: Synthetic oligonucleotide
  Antisense strand to SEQ ID NO: 274734
agaauucacccauuuaggc

SEQ ID NO: 274736 - RNA, 19 nt, Artificial Sequence
  Description of Artificial Sequence: Synthetic oligonucleotide
  Sense strand starting at position 1057 of SEQ ID NO: 3528
ugggaaaccuggcuuaaau

SEQ ID NO: 274737 - RNA, 19 nt, Artificial Sequence
  Description of Artificial Sequence: Synthetic oligonucleotide
  Antisense strand to SEQ ID NO: 274736
auuuaagccagguuuccca

SEQ ID NO: 274738 - RNA, 19 nt, Artificial Sequence
  Description of Artificial Sequence: Synthetic oligonucleotide
  Sense strand starting at position 1097 of SEQ ID NO: 3528
auuugagaauuuggucacu

SEQ ID NO: 274739 - RNA, 19 nt, Artificial Sequence
  Description of Artificial Sequence: Synthetic oligonucleotide
  Antisense strand to SEQ ID NO: 274738
agugaccaaauucucaaau

SEQ ID NO: 274740 - RNA, 19 nt, Artificial Sequence
  Description of Artificial Sequence: Synthetic oligonucleotide
  Sense strand starting at position 1106 of SEQ ID NO: 3528
uuuggucacugagcaaaua

SEQ ID NO: 274741 - RNA, 19 nt, Artificial Sequence
  Description of Artificial Sequence: Synthetic oligonucleotide
  Antisense strand to SEQ ID NO: 274740
uauuugcucagugaccaaa

SEQ ID NO: 274742 - RNA, 19 nt, Artificial Sequence
  Description of Artificial Sequence: Synthetic oligonucleotide
  Sense strand starting at position 1372 of SEQ ID NO: 3528
gaggcaaacguauacugau

SEQ ID NO: 274743 - RNA, 19 nt, Artificial Sequence
  Description of Artificial Sequence: Synthetic oligonucleotide
  Antisense strand to SEQ ID NO: 274742
aucaguauacguuugccuc

SEQ ID NO: 274744 - RNA, 19 nt, Artificial Sequence
  Description of Artificial Sequence: Synthetic oligonucleotide
  Sense strand starting at position 1448 of SEQ ID NO: 3528
ccaccaugaacuggugaga

SEQ ID NO: 274745 - RNA, 19 nt, Artificial Sequence
  Description of Artificial Sequence: Synthetic oligonucleotide
  Antisense strand to SEQ ID NO: 274744
ucucaccaguucauggugg

SEQ ID NO: 274746 - RNA, 19 nt, Artificial Sequence
  Description of Artificial Sequence: Synthetic oligonucleotide
  Sense strand starting at position 1518 of SEQ ID NO: 3528
ggagcaugacaccguaaga

SEQ ID NO: 274747 - RNA, 19 nt, Artificial Sequence
  Description of Artificial Sequence: Synthetic oligonucleotide
  Antisense strand to SEQ ID NO: 274746
ucuuacggugucaugcucc

SEQ ID NO: 274748 - RNA, 19 nt, Artificial Sequence
  Description of Artificial Sequence: Synthetic oligonucleotide
  Sense strand starting at position 1578 of SEQ ID NO: 3528
cuuagccguccuuugcaua

SEQ ID NO: 274749 - RNA, 19 nt, Artificial Sequence
  Description of Artificial Sequence: Synthetic oligonucleotide
  Antisense strand to SEQ ID NO: 274748
uaugcaaaggacggcuaag

SEQ ID NO: 274750 - RNA, 19 nt, Artificial Sequence
  Description of Artificial Sequence: Synthetic oligonucleotide
  Sense strand starting at position 1819 of SEQ ID NO: 3528
uggcauauguauuuguacu

SEQ ID NO: 274751 - RNA, 19 nt, Artificial Sequence
  Description of Artificial Sequence: Synthetic oligonucleotide
  Antisense strand to SEQ ID NO: 274750
aguacaaauacauaugcca

SEQ ID NO: 274752 - RNA, 19 nt, Artificial Sequence
  Description of Artificial Sequence: Synthetic oligonucleotide
  Sense strand starting at position 1834 of SEQ ID NO: 3528
uacugcauugugggagaaa

SEQ ID NO: 274753 - RNA, 19 nt, Artificial Sequence
  Description of Artificial Sequence: Synthetic oligonucleotide
  Antisense strand to SEQ ID NO: 274752
uuucucccacaaugcagua

SEQ ID NO: 274754 - RNA, 19 nt, Artificial Sequence
  Description of Artificial Sequence: Synthetic oligonucleotide
  Sense strand starting at position 2039 of SEQ ID NO: 3528
guuaaugauucucucagac

SEQ ID NO: 274755 - RNA, 19 nt, Artificial Sequence
  Description of Artificial Sequence: Synthetic oligonucleotide
  Antisense strand to SEQ ID NO: 274754
gucugagagaaucauuaac

SEQ ID NO: 274756 - RNA, 19 nt, Artificial Sequence
  Description of Artificial Sequence: Synthetic oligonucleotide
  Sense strand starting at position 2123 of SEQ ID NO: 3528
gaggguggaaucugcaaua

SEQ ID NO: 274757 - RNA, 19 nt, Artificial Sequence
  Description of Artificial Sequence: Synthetic oligonucleotide
  Antisense strand to SEQ ID NO: 274756
uauugcagauuccacccuc

SEQ ID NO: 274758 - RNA, 19 nt, Artificial Sequence
  Description of Artificial Sequence: Synthetic oligonucleotide
  Sense strand starting at position 2136 of SEQ ID NO: 3528
gcaauagaugcugggaagu

SEQ ID NO: 274759 - RNA, 19 nt, Artificial Sequence
  Description of Artificial Sequence: Synthetic oligonucleotide
  Antisense strand to SEQ ID NO: 274758
acuucccagcaucuauugc

SEQ ID NO: 274760 - RNA, 19 nt, Artificial Sequence
  Description of Artificial Sequence: Synthetic oligonucleotide
  Sense strand starting at position 2489 of SEQ ID NO: 3528
ucagguccuggaugacaaa

SEQ ID NO: 274761 - RNA, 19 nt, Artificial Sequence
  Description of Artificial Sequence: Synthetic oligonucleotide
  Antisense strand to SEQ ID NO: 274760
uuugucauccaggaccuga

SEQ ID NO: 274762 - RNA, 19 nt, Artificial Sequence
  Description of Artificial Sequence: Synthetic oligonucleotide
  Sense strand starting at position 2506 of SEQ ID NO: 3528
aacuuaaguuagguguaaa

SEQ ID NO: 274763 - RNA, 19 nt, Artificial Sequence
  Description of Artificial Sequence: Synthetic oligonucleotide
  Antisense strand to SEQ ID NO: 274762
uuuacaccuaacuuaaguu

SEQ ID NO: 274764 - RNA, 19 nt, Artificial Sequence
  Description of Artificial Sequence: Synthetic oligonucleotide
  Sense strand starting at position 2509 of SEQ ID NO: 3528
uuaaguuagguguaaaugu

SEQ ID NO: 274765 - RNA, 19 nt, Artificial Sequence
  Description of Artificial Sequence: Synthetic oligonucleotide
  Antisense strand to SEQ ID NO: 274764
acauuuacaccuaacuuaa

SEQ ID NO: 274766 - RNA, 19 nt, Artificial Sequence
  Description of Artificial Sequence: Synthetic oligonucleotide
  Sense strand starting at position 2564 of SEQ ID NO: 3528
uuacgacauaagugaaagu

SEQ ID NO: 274767 - RNA, 19 nt, Artificial Sequence
  Description of Artificial Sequence: Synthetic oligonucleotide
  Antisense strand to SEQ ID NO: 274766
acuuucacuuaugucguaa

SEQ ID NO: 274768 - RNA, 19 nt, Artificial Sequence
  Description of Artificial Sequence: Synthetic oligonucleotide
  Sense strand starting at position 2673 of SEQ ID NO: 3528
gaacguauggcauauuauu

SEQ ID NO: 274769 - RNA, 19 nt, Artificial Sequence
  Description of Artificial Sequence: Synthetic oligonucleotide
  Antisense strand to SEQ ID NO: 274768
aauaauaugccauacguuc

SEQ ID NO: 274770 - RNA, 19 nt, Artificial Sequence
  Description of Artificial Sequence: Synthetic oligonucleotide
  Sense strand starting at position 2784 of SEQ ID NO: 3528
ggcuuaagucuagagcaac

SEQ ID NO: 274771 - RNA, 19 nt, Artificial Sequence
  Description of Artificial Sequence: Synthetic oligonucleotide
  Antisense strand to SEQ ID NO: 274770
guugcucuagacuuaagcc

SEQ ID NO: 274772 - RNA, 19 nt, Artificial Sequence
  Description of Artificial Sequence: Synthetic oligonucleotide
  Sense strand starting at position 2897 of SEQ ID NO: 3528
accagaaagcauuguuccu

SEQ ID NO: 274773 - RNA, 19 nt, Artificial Sequence
  Description of Artificial Sequence: Synthetic oligonucleotide
  Antisense strand to SEQ ID NO: 274772
aggaacaaugcuuucuggu

SEQ ID NO: 274774 - RNA, 19 nt, Artificial Sequence
  Description of Artificial Sequence: Synthetic oligonucleotide
  Sense strand starting at position 3000 of SEQ ID NO: 3528
uguggaauucccugggauu

SEQ ID NO: 274775 - RNA, 19 nt, Artificial Sequence
  Description of Artificial Sequence: Synthetic oligonucleotide
  Antisense strand to SEQ ID NO: 274774
aaucccagggaauuccaca

SEQ ID NO: 274776 - RNA, 19 nt, Artificial Sequence
  Description of Artificial Sequence: Synthetic oligonucleotide
  Sense strand starting at position 3001 of SEQ ID NO: 3528
guggaauucccugggauug

SEQ ID NO: 274777 - RNA, 19 nt, Artificial Sequence
  Description of Artificial Sequence: Synthetic oligonucleotide
  Antisense strand to SEQ ID NO: 274776
caaucccagggaauuccac

SEQ ID NO: 274778 - RNA, 19 nt, Artificial Sequence
  Description of Artificial Sequence: Synthetic oligonucleotide
  Sense strand starting at position 3346 of SEQ ID NO: 3528
augcuuccagcauguauuu

SEQ ID NO: 274779 - RNA, 19 nt, Artificial Sequence
  Description of Artificial Sequence: Synthetic oligonucleotide
  Antisense strand to SEQ ID NO: 274778
aaauacaugcuggaagcau

SEQ ID NO: 274780 - RNA, 19 nt, Artificial Sequence
  Description of Artificial Sequence: Synthetic oligonucleotide
  Sense strand starting at position 3408 of SEQ ID NO: 3528
gcaucuugggaaugauguu

SEQ ID NO: 274781 - RNA, 19 nt, Artificial Sequence
  Description of Artificial Sequence: Synthetic oligonucleotide
  Antisense strand to SEQ ID NO: 274780
aacaucauucccaagaugc

SEQ ID NO: 274782 - RNA, 19 nt, Artificial Sequence
  Description of Artificial Sequence: Synthetic oligonucleotide
  Sense strand starting at position 3522 of SEQ ID NO: 3528
agguguuagaugcauuaaa

SEQ ID NO: 274783 - RNA, 19 nt, Artificial Sequence
  Description of Artificial Sequence: Synthetic oligonucleotide
  Antisense strand to SEQ ID NO: 274782
uuuaaugcaucuaacaccu

SEQ ID NO: 274784 - RNA, 19 nt, Artificial Sequence
  Description of Artificial Sequence: Synthetic oligonucleotide
  Sense strand starting at position 3643 of SEQ ID NO: 3528
ggacauugagcagaguucu

SEQ ID NO: 274785 - RNA, 19 nt, Artificial Sequence
  Description of Artificial Sequence: Synthetic oligonucleotide
  Antisense strand to SEQ ID NO: 274784
agaacucugcucaaugucc

SEQ ID NO: 274786 - RNA, 19 nt, Artificial Sequence
  Description of Artificial Sequence: Synthetic oligonucleotide
  Sense strand starting at position 3709 of SEQ ID NO: 3528
gaaugaguugcucagguau

SEQ ID NO: 274787 - RNA, 19 nt, Artificial Sequence
  Description of Artificial Sequence: Synthetic oligonucleotide
  Antisense strand to SEQ ID NO: 274786
auaccugagcaacucauuc

SEQ ID NO: 274788 - RNA, 19 nt, Artificial Sequence
  Description of Artificial Sequence: Synthetic oligonucleotide
  Sense strand starting at position 3735 of SEQ ID NO: 3528
gguggaugcauagagacuu

SEQ ID NO: 274789 - RNA, 19 nt, Artificial Sequence
  Description of Artificial Sequence: Synthetic oligonucleotide
  Antisense strand to SEQ ID NO: 274788
aagucucuaugcauccacc

SEQ ID NO: 274790 - RNA, 19 nt, Artificial Sequence
  Description of Artificial Sequence: Synthetic oligonucleotide
  Sense strand starting at position 3746 of SEQ ID NO: 3528
agagacuuccacuguggca

SEQ ID NO: 274791 - RNA, 19 nt, Artificial Sequence
  Description of Artificial Sequence: Synthetic oligonucleotide
  Antisense strand to SEQ ID NO: 274790
ugccacaguggaagucucu

SEQ ID NO: 274792 - RNA, 19 nt, Artificial Sequence
  Description of Artificial Sequence: Synthetic oligonucleotide
  Sense strand starting at position 3929 of SEQ ID NO: 3528
gagagaucucuguguacua

SEQ ID NO: 274793 - RNA, 19 nt, Artificial Sequence
  Description of Artificial Sequence: Synthetic oligonucleotide
  Antisense strand to SEQ ID NO: 274792
uaguacacagagaucucuc

SEQ ID NO: 274794 - RNA, 19 nt, Artificial Sequence
  Description of Artificial Sequence: Synthetic oligonucleotide
  Sense strand starting at position 3930 of SEQ ID NO: 3528
agagaucucuguguacuac

SEQ ID NO: 274795 - RNA, 19 nt, Artificial Sequence
  Description of Artificial Sequence: Synthetic oligonucleotide
  Antisense strand to SEQ ID NO: 274794
guaguacacagagaucucu

SEQ ID NO: 274796 - RNA, 19 nt, Artificial Sequence
  Description of Artificial Sequence: Synthetic oligonucleotide
  Sense strand starting at position 404 of SEQ ID NO: 3529
uugguaauccuguggcgga

SEQ ID NO: 274797 - RNA, 19 nt, Artificial Sequence
  Description of Artificial Sequence: Synthetic oligonucleotide
  Antisense strand to SEQ ID NO: 274796
uccgccacaggauuaccaa

SEQ ID NO: 274798 - RNA, 19 nt, Artificial Sequence
  Description of Artificial Sequence: Synthetic oligonucleotide
  Sense strand starting at position 407 of SEQ ID NO: 3529
guaauccuguggcggagaa

SEQ ID NO: 274799 - RNA, 19 nt, Artificial Sequence
  Description of Artificial Sequence: Synthetic oligonucleotide
  Antisense strand to SEQ ID NO: 274798
uucuccgccacaggauuac

SEQ ID NO: 274800 - RNA, 19 nt, Artificial Sequence
  Description of Artificial Sequence: Synthetic oligonucleotide
  Sense strand starting at position 417 of SEQ ID NO: 3529
ggcggagaaguuuguucua

SEQ ID NO: 274801 - RNA, 19 nt, Artificial Sequence
  Description of Artificial Sequence: Synthetic oligonucleotide
  Antisense strand to SEQ ID NO: 274800
uagaacaaacuucuccgcc

SEQ ID NO: 274802 - RNA, 19 nt, Artificial Sequence
  Description of Artificial Sequence: Synthetic oligonucleotide
  Sense strand starting at position 709 of SEQ ID NO: 3529
ucguaugauuccguucgua

SEQ ID NO: 274803 - RNA, 19 nt, Artificial Sequence
  Description of Artificial Sequence: Synthetic oligonucleotide
  Antisense strand to SEQ ID NO: 274802
uacgaacggaaucauacga

SEQ ID NO: 274804 - RNA, 19 nt, Artificial Sequence
  Description of Artificial Sequence: Synthetic oligonucleotide
  Sense strand starting at position 712 of SEQ ID NO: 3529
uaugauuccguucguauga

SEQ ID NO: 274805 - RNA, 19 nt, Artificial Sequence
  Description of Artificial Sequence: Synthetic oligonucleotide
  Antisense strand to SEQ ID NO: 274804
ucauacgaacggaaucaua

SEQ ID NO: 274806 - RNA, 19 nt, Artificial Sequence
  Description of Artificial Sequence: Synthetic oligonucleotide
  Sense strand starting at position 713 of SEQ ID NO: 3529
augauuccguucguaugaa

SEQ ID NO: 274807 - RNA, 19 nt, Artificial Sequence
  Description of Artificial Sequence: Synthetic oligonucleotide
  Antisense strand to SEQ ID NO: 274806
uucauacgaacggaaucau

SEQ ID NO: 274808 - RNA, 19 nt, Artificial Sequence
  Description of Artificial Sequence: Synthetic oligonucleotide
  Sense strand starting at position 714 of SEQ ID NO: 3529
ugauuccguucguaugaaa

SEQ ID NO: 274809 - RNA, 19 nt, Artificial Sequence
  Description of Artificial Sequence: Synthetic oligonucleotide
  Antisense strand to SEQ ID NO: 274808
uuucauacgaacggaauca

SEQ ID NO: 274810 - RNA, 19 nt, Artificial Sequence
  Description of Artificial Sequence: Synthetic oligonucleotide
  Sense strand starting at position 717 of SEQ ID NO: 3529
uuccguucguaugaaaugu

SEQ ID NO: 274811 - RNA, 19 nt, Artificial Sequence
  Description of Artificial Sequence: Synthetic oligonucleotide
  Antisense strand to SEQ ID NO: 274810
acauuucauacgaacggaa

SEQ ID NO: 274812 - RNA, 19 nt, Artificial Sequence
  Description of Artificial Sequence: Synthetic oligonucleotide
  Sense strand starting at position 1140 of SEQ ID NO: 3529
ugucuagauuucuuuguuu

SEQ ID NO: 274813 - RNA, 19 nt, Artificial Sequence
  Description of Artificial Sequence: Synthetic oligonucleotide
  Antisense strand to SEQ ID NO: 274812
aaacaaagaaaucuagaca

SEQ ID NO: 274814 - RNA, 19 nt, Artificial Sequence
  Description of Artificial Sequence: Synthetic oligonucleotide
  Sense strand starting at position 1168 of SEQ ID NO: 3529
gggugaauaugcuacccua

SEQ ID NO: 274815 - RNA, 19 nt, Artificial Sequence
  Description of Artificial Sequence: Synthetic oligonucleotide
  Antisense strand to SEQ ID NO: 274814
uaggguagcauauucaccc

SEQ ID NO: 274816 - RNA, 19 nt, Artificial Sequence
  Description of Artificial Sequence: Synthetic oligonucleotide
  Sense strand starting at position 1519 of SEQ ID NO: 3529
ggagcaugacaccguaaga

SEQ ID NO: 274817 - RNA, 19 nt, Artificial Sequence
  Description of Artificial Sequence: Synthetic oligonucleotide
  Antisense strand to SEQ ID NO: 274816
ucuuacggugucaugcucc

SEQ ID NO: 274818 - RNA, 19 nt, Artificial Sequence
  Description of Artificial Sequence: Synthetic oligonucleotide
  Sense strand starting at position 2490 of SEQ ID NO: 3529
ucagguccuggaugacaaa

SEQ ID NO: 274819 - RNA, 19 nt, Artificial Sequence
  Description of Artificial Sequence: Synthetic oligonucleotide
  Antisense strand to SEQ ID NO: 274818
uuugucauccaggaccuga

SEQ ID NO: 274820 - RNA, 19 nt, Artificial Sequence
  Description of Artificial Sequence: Synthetic oligonucleotide
  Sense strand starting at position 2510 of SEQ ID NO: 3529
uuaaguuagguguaaaugu

SEQ ID NO: 274821 - RNA, 19 nt, Artificial Sequence
  Description of Artificial Sequence: Synthetic oligonucleotide
  Antisense strand to SEQ ID NO: 274820
acauuuacaccuaacuuaa

SEQ ID NO: 274822 - RNA, 19 nt, Artificial Sequence
  Description of Artificial Sequence: Synthetic oligonucleotide
  Sense strand starting at position 2517 of SEQ ID NO: 3529
agguguaaauguuaauauc

SEQ ID NO: 274823 - RNA, 19 nt, Artificial Sequence
  Description of Artificial Sequence: Synthetic oligonucleotide
  Antisense strand to SEQ ID NO: 274822
gauauuaacauuuacaccu

SEQ ID NO: 274824 - RNA, 19 nt, Artificial Sequence
  Description of Artificial Sequence: Synthetic oligonucleotide
  Sense strand starting at position 2806 of SEQ ID NO: 3529
gguaguauauauguuguaa

SEQ ID NO: 274825 - RNA, 19 nt, Artificial Sequence
  Description of Artificial Sequence: Synthetic oligonucleotide
  Antisense strand to SEQ ID NO: 274824
uuacaacauauauacuacc

SEQ ID NO: 274826 - RNA, 19 nt, Artificial Sequence
  Description of Artificial Sequence: Synthetic oligonucleotide
  Sense strand starting at position 2979 of SEQ ID NO: 3529
aauggucuuggguggaaca

SEQ ID NO: 274827 - RNA, 19 nt, Artificial Sequence
  Description of Artificial Sequence: Synthetic oligonucleotide
  Antisense strand to SEQ ID NO: 274826
uguuccacccaagaccauu

SEQ ID NO: 274828 - RNA, 19 nt, Artificial Sequence
  Description of Artificial Sequence: Synthetic oligonucleotide
  Sense strand starting at position 2991 of SEQ ID NO: 3529
uggaacauccuguggaauu

SEQ ID NO: 274829 - RNA, 19 nt, Artificial Sequence
  Description of Artificial Sequence: Synthetic oligonucleotide
  Antisense strand to SEQ ID NO: 274828
aauuccacaggauguucca

SEQ ID NO: 274830 - RNA, 19 nt, Artificial Sequence
  Description of Artificial Sequence: Synthetic oligonucleotide
  Sense strand starting at position 2992 of SEQ ID NO: 3529
ggaacauccuguggaauuc

SEQ ID NO: 274831 - RNA, 19 nt, Artificial Sequence
  Description of Artificial Sequence: Synthetic oligonucleotide
  Antisense strand to SEQ ID NO: 274830
gaauuccacaggauguucc

SEQ ID NO: 274832 - RNA, 19 nt, Artificial Sequence
  Description of Artificial Sequence: Synthetic oligonucleotide
  Sense strand starting at position 3001 of SEQ ID NO: 3529
uguggaauucccugggauu

SEQ ID NO: 274833 - RNA, 19 nt, Artificial Sequence
  Description of Artificial Sequence: Synthetic oligonucleotide
  Antisense strand to SEQ ID NO: 274832
aaucccagggaauuccaca

SEQ ID NO: 274834 - RNA, 19 nt, Artificial Sequence
  Description of Artificial Sequence: Synthetic oligonucleotide
  Sense strand starting at position 3002 of SEQ ID NO: 3529
guggaauucccugggauug

SEQ ID NO: 274835 - RNA, 19 nt, Artificial Sequence
  Description of Artificial Sequence: Synthetic oligonucleotide
  Antisense strand to SEQ ID NO: 274834
caaucccagggaauuccac

SEQ ID NO: 274836 - RNA, 19 nt, Artificial Sequence
  Description of Artificial Sequence: Synthetic oligonucleotide
  Sense strand starting at position 3406 of SEQ ID NO: 3529
uaaggcaucuugggaauga

SEQ ID NO: 274837 - RNA, 19 nt, Artificial Sequence
  Description of Artificial Sequence: Synthetic oligonucleotide
  Antisense strand to SEQ ID NO: 274836
ucauucccaagaugccuua

SEQ ID NO: 274838 - RNA, 19 nt, Artificial Sequence
  Description of Artificial Sequence: Synthetic oligonucleotide
  Sense strand starting at position 3407 of SEQ ID NO: 3529
aaggcaucuugggaaugau

SEQ ID NO: 274839 - RNA, 19 nt, Artificial Sequence
  Description of Artificial Sequence: Synthetic oligonucleotide
  Antisense strand to SEQ ID NO: 274838
aucauucccaagaugccuu

SEQ ID NO: 274840 - RNA, 19 nt, Artificial Sequence
  Description of Artificial Sequence: Synthetic oligonucleotide
  Sense strand starting at position 3410 of SEQ ID NO: 3529
gcaucuugggaaugauguu

SEQ ID NO: 274841 - RNA, 19 nt, Artificial Sequence
  Description of Artificial Sequence: Synthetic oligonucleotide
  Antisense strand to SEQ ID NO: 274840
aacaucauucccaagaugc

SEQ ID NO: 274842 - RNA, 19 nt, Artificial Sequence
  Description of Artificial Sequence: Synthetic oligonucleotide
  Sense strand starting at position 3522 of SEQ ID NO: 3529
guagguguuggaugcauua

SEQ ID NO: 274843 - RNA, 19 nt, Artificial Sequence
  Description of Artificial Sequence: Synthetic oligonucleotide
  Antisense strand to SEQ ID NO: 274842
uaaugcauccaacaccuac

SEQ ID NO: 274844 - RNA, 19 nt, Artificial Sequence
  Description of Artificial Sequence: Synthetic oligonucleotide
  Sense strand starting at position 3524 of SEQ ID NO: 3529
agguguuggaugcauuaaa

SEQ ID NO: 274845 - RNA, 19 nt, Artificial Sequence
  Description of Artificial Sequence: Synthetic oligonucleotide
  Antisense strand to SEQ ID NO: 274844
uuuaaugcauccaacaccu

SEQ ID NO: 274846 - RNA, 19 nt, Artificial Sequence
  Description of Artificial Sequence: Synthetic oligonucleotide
  Sense strand starting at position 3737 of SEQ ID NO: 3529
gguggaugcauagagacuu

SEQ ID NO: 274847 - RNA, 19 nt, Artificial Sequence
  Description of Artificial Sequence: Synthetic oligonucleotide
  Antisense strand to SEQ ID NO: 274846
aagucucuaugcauccacc

SEQ ID NO: 274848 - RNA, 19 nt, Artificial Sequence
  Description of Artificial Sequence: Synthetic oligonucleotide
  Sense strand starting at position 3748 of SEQ ID NO: 3529
agagacuuccacuguggca

SEQ ID NO: 274849 - RNA, 19 nt, Artificial Sequence
  Description of Artificial Sequence: Synthetic oligonucleotide
  Antisense strand to SEQ ID NO: 274848
ugccacaguggaagucucu

SEQ ID NO: 274850 - RNA, 19 nt, Artificial Sequence
  Description of Artificial Sequence: Synthetic oligonucleotide
  Sense strand starting at position 3832 of SEQ ID NO: 3529
acugcacucuuagacggau

SEQ ID NO: 274851 - RNA, 19 nt, Artificial Sequence
  Description of Artificial Sequence: Synthetic oligonucleotide
  Antisense strand to SEQ ID NO: 274850
auccgucuaagagugcagu

SEQ ID NO: 274852 - RNA, 19 nt, Artificial Sequence
  Description of Artificial Sequence: Synthetic oligonucleotide
  Sense strand starting at position 3882 of SEQ ID NO: 3529
ggugcuuucuaccugaaau

SEQ ID NO: 274853 - RNA, 19 nt, Artificial Sequence
  Description of Artificial Sequence: Synthetic oligonucleotide
  Antisense strand to SEQ ID NO: 274852
auuucagguagaaagcacc

SEQ ID NO: 274854 - RNA, 19 nt, Artificial Sequence
  Description of Artificial Sequence: Synthetic oligonucleotide
  Sense strand starting at position 3894 of SEQ ID NO: 3529
cugaaauaauggcaugaac

SEQ ID NO: 274855 - RNA, 19 nt, Artificial Sequence
  Description of Artificial Sequence: Synthetic oligonucleotide
  Antisense strand to SEQ ID NO: 274854
guucaugccauuauuucag

SEQ ID NO: 274856 - RNA, 19 nt, Artificial Sequence
  Description of Artificial Sequence: Synthetic oligonucleotide
  Sense strand starting at position 223 of SEQ ID NO: 3530
gacuuaauuugugaaaugg

SEQ ID NO: 274857 - RNA, 19 nt, Artificial Sequence
  Description of Artificial Sequence: Synthetic oligonucleotide
  Antisense strand to SEQ ID NO: 274856
ccauuucacaaauuaaguc

SEQ ID NO: 274858 - RNA, 19 nt, Artificial Sequence
  Description of Artificial Sequence: Synthetic oligonucleotide
  Sense strand starting at position 240 of SEQ ID NO: 3530
ggaagauguuucuccacuu

SEQ ID NO: 274859 - RNA, 19 nt, Artificial Sequence
  Description of Artificial Sequence: Synthetic oligonucleotide
  Antisense strand to SEQ ID NO: 274858
aaguggagaaacaucuucc

SEQ ID NO: 274860 - RNA, 19 nt, Artificial Sequence
  Description of Artificial Sequence: Synthetic oligonucleotide
  Sense strand starting at position 477 of SEQ ID NO: 3530
guuuccaugcauugaaaua

SEQ ID NO: 274861 - RNA, 19 nt, Artificial Sequence
  Description of Artificial Sequence: Synthetic oligonucleotide
  Antisense strand to SEQ ID NO: 274860
uauuucaaugcauggaaac

SEQ ID NO: 274862 - RNA, 19 nt, Artificial Sequence
  Description of Artificial Sequence: Synthetic oligonucleotide
  Sense strand starting at position 568 of SEQ ID NO: 3530
uuugauagcuccuugaaug

SEQ ID NO: 274863 - RNA, 19 nt, Artificial Sequence
  Description of Artificial Sequence: Synthetic oligonucleotide
  Antisense strand to SEQ ID NO: 274862
cauucaaggagcuaucaaa

SEQ ID NO: 274864 - RNA, 19 nt, Artificial Sequence
  Description of Artificial Sequence: Synthetic oligonucleotide
  Sense strand starting at position 569 of SEQ ID NO: 3530
uugauagcuccuugaaugg

SEQ ID NO: 274865 - RNA, 19 nt, Artificial Sequence
  Description of Artificial Sequence: Synthetic oligonucleotide
  Antisense strand to SEQ ID NO: 274864
ccauucaaggagcuaucaa

SEQ ID NO: 274866 - RNA, 19 nt, Artificial Sequence
  Description of Artificial Sequence: Synthetic oligonucleotide
  Sense strand starting at position 890 of SEQ ID NO: 3530
auuggauuguaugccuaaa

SEQ ID NO: 274867 - RNA, 19 nt, Artificial Sequence
  Description of Artificial Sequence: Synthetic oligonucleotide
  Antisense strand to SEQ ID NO: 274866
uuuaggcauacaauccaau

SEQ ID NO: 274868 - RNA, 19 nt, Artificial Sequence
  Description of Artificial Sequence: Synthetic oligonucleotide
  Sense strand starting at position 892 of SEQ ID NO: 3530
uggauuguaugccuaaaug

SEQ ID NO: 274869 - RNA, 19 nt, Artificial Sequence
  Description of Artificial Sequence: Synthetic oligonucleotide
  Antisense strand to SEQ ID NO: 274868
cauuuaggcauacaaucca

SEQ ID NO: 274870 - RNA, 19 nt, Artificial Sequence
  Description of Artificial Sequence: Synthetic oligonucleotide
  Sense strand starting at position 900 of SEQ ID NO: 3530
augccuaaaugggugaauu

SEQ ID NO: 274871 - RNA, 19 nt, Artificial Sequence
  Description of Artificial Sequence: Synthetic oligonucleotide
  Antisense strand to SEQ ID NO: 274870
aauucacccauuuaggcau

SEQ ID NO: 274872 - RNA, 19 nt, Artificial Sequence
  Description of Artificial Sequence: Synthetic oligonucleotide
  Sense strand starting at position 901 of SEQ ID NO: 3530
ugccuaaaugggugaauuc

SEQ ID NO: 274873 - RNA, 19 nt, Artificial Sequence
  Description of Artificial Sequence: Synthetic oligonucleotide
  Antisense strand to SEQ ID NO: 274872
gaauucacccauuuaggca

SEQ ID NO: 274874 - RNA, 19 nt, Artificial Sequence
  Description of Artificial Sequence: Synthetic oligonucleotide
  Sense strand starting at position 902 of SEQ ID NO: 3530
gccuaaaugggugaauucu

SEQ ID NO: 274875 - RNA, 19 nt, Artificial Sequence
  Description of Artificial Sequence: Synthetic oligonucleotide
  Antisense strand to SEQ ID NO: 274874
agaauucacccauuuaggc

SEQ ID NO: 274876 - RNA, 19 nt, Artificial Sequence
  Description of Artificial Sequence: Synthetic oligonucleotide
  Sense strand starting at position 1053 of SEQ ID NO: 3530
ugggaaaccuggcuuaaau

SEQ ID NO: 274877 - RNA, 19 nt, Artificial Sequence
  Description of Artificial Sequence: Synthetic oligonucleotide
  Antisense strand to SEQ ID NO: 274876
auuuaagccagguuuccca

SEQ ID NO: 274878 - RNA, 19 nt, Artificial Sequence
  Description of Artificial Sequence: Synthetic oligonucleotide
  Sense strand starting at position 1093 of SEQ ID NO: 3530
auuugagaauuuggucacu

SEQ ID NO: 274879 - RNA, 19 nt, Artificial Sequence
  Description of Artificial Sequence: Synthetic oligonucleotide
  Antisense strand to SEQ ID NO: 274878
agugaccaaauucucaaau

SEQ ID NO: 274880 - RNA, 19 nt, Artificial Sequence
  Description of Artificial Sequence: Synthetic oligonucleotide
  Sense strand starting at position 1102 of SEQ ID NO: 3530
uuuggucacugagcaaaua

SEQ ID NO: 274881 - RNA, 19 nt, Artificial Sequence
  Description of Artificial Sequence: Synthetic oligonucleotide
  Antisense strand to SEQ ID NO: 274880
uauuugcucagugaccaaa

SEQ ID NO: 274882 - RNA, 19 nt, Artificial Sequence
  Description of Artificial Sequence: Synthetic oligonucleotide
  Sense strand starting at position 1368 of SEQ ID NO: 3530
gaggcaaacguauacugau

SEQ ID NO: 274883 - RNA, 19 nt, Artificial Sequence
  Description of Artificial Sequence: Synthetic oligonucleotide
  Antisense strand to SEQ ID NO: 274882
aucaguauacguuugccuc

SEQ ID NO: 274884 - RNA, 19 nt, Artificial Sequence
  Description of Artificial Sequence: Synthetic oligonucleotide
  Sense strand starting at position 1444 of SEQ ID NO: 3530
ccaccaugaacuggugaga

SEQ ID NO: 274885 - RNA, 19 nt, Artificial Sequence
  Description of Artificial Sequence: Synthetic oligonucleotide
  Antisense strand to SEQ ID NO: 274884
ucucaccaguucauggugg

SEQ ID NO: 274886 - RNA, 19 nt, Artificial Sequence
  Description of Artificial Sequence: Synthetic oligonucleotide
  Sense strand starting at position 1514 of SEQ ID NO: 3530
ggagcaugacaccguaaga

SEQ ID NO: 274887 - RNA, 19 nt, Artificial Sequence
  Description of Artificial Sequence: Synthetic oligonucleotide
  Antisense strand to SEQ ID NO: 274886
ucuuacggugucaugcucc

SEQ ID NO: 274888 - RNA, 19 nt, Artificial Sequence
  Description of Artificial Sequence: Synthetic oligonucleotide
  Sense strand starting at position 1574 of SEQ ID NO: 3530
cuuagccguccuuugcaua

SEQ ID NO: 274889 - RNA, 19 nt, Artificial Sequence
  Description of Artificial Sequence: Synthetic oligonucleotide
  Antisense strand to SEQ ID NO: 274888
uaugcaaaggacggcuaag

SEQ ID NO: 274890 - RNA, 19 nt, Artificial Sequence
  Description of Artificial Sequence: Synthetic oligonucleotide
  Sense strand starting at position 1815 of SEQ ID NO: 3530
uggcauauguauuuguacu

SEQ ID NO: 274891 - RNA, 19 nt, Artificial Sequence
  Description of Artificial Sequence: Synthetic oligonucleotide
  Antisense strand to SEQ ID NO: 274890
aguacaaauacauaugcca

SEQ ID NO: 274892 - RNA, 19 nt, Artificial Sequence
  Description of Artificial Sequence: Synthetic oligonucleotide
  Sense strand starting at position 1830 of SEQ ID NO: 3530
uacugcauugugggagaaa

SEQ ID NO: 274893 - RNA, 19 nt, Artificial Sequence
  Description of Artificial Sequence: Synthetic oligonucleotide
  Antisense strand to SEQ ID NO: 274892
uuucucccacaaugcagua

SEQ ID NO: 274894 - RNA, 19 nt, Artificial Sequence
  Description of Artificial Sequence: Synthetic oligonucleotide
  Sense strand starting at position 2035 of SEQ ID NO: 3530
guuaaugauucucucagac

SEQ ID NO: 274895 - RNA, 19 nt, Artificial Sequence
  Description of Artificial Sequence: Synthetic oligonucleotide
  Antisense strand to SEQ ID NO: 274894
gucugagagaaucauuaac

SEQ ID NO: 274896 - RNA, 19 nt, Artificial Sequence
  Description of Artificial Sequence: Synthetic oligonucleotide
  Sense strand starting at position 2119 of SEQ ID NO: 3530
gaggguggaaucugcaaua

SEQ ID NO: 274897 - RNA, 19 nt, Artificial Sequence
  Description of Artificial Sequence: Synthetic oligonucleotide
  Antisense strand to SEQ ID NO: 274896
uauugcagauuccacccuc

SEQ ID NO: 274898 - RNA, 19 nt, Artificial Sequence
  Description of Artificial Sequence: Synthetic oligonucleotide
  Sense strand starting at position 2132 of SEQ ID NO: 3530
gcaauagaugcugggaagu

SEQ ID NO: 274899 - RNA, 19 nt, Artificial Sequence
  Description of Artificial Sequence: Synthetic oligonucleotide
  Antisense strand to SEQ ID NO: 274898
acuucccagcaucuauugc

SEQ ID NO: 274900 - RNA, 19 nt, Artificial Sequence
  Description of Artificial Sequence: Synthetic oligonucleotide
  Sense strand starting at position 2485 of SEQ ID NO: 3530
ucagguccuggaugacaaa

SEQ ID NO: 274901 - RNA, 19 nt, Artificial Sequence
  Description of Artificial Sequence: Synthetic oligonucleotide
  Antisense strand to SEQ ID NO: 274900
uuugucauccaggaccuga

SEQ ID NO: 274902 - RNA, 19 nt, Artificial Sequence
  Description of Artificial Sequence: Synthetic oligonucleotide
  Sense strand starting at position 2502 of SEQ ID NO: 3530
aacuuaaguuagguguaaa

SEQ ID NO: 274903 - RNA, 19 nt, Artificial Sequence
  Description of Artificial Sequence: Synthetic oligonucleotide
  Antisense strand to SEQ ID NO: 274902
uuuacaccuaacuuaaguu

SEQ ID NO: 274904 - RNA, 19 nt, Artificial Sequence
  Description of Artificial Sequence: Synthetic oligonucleotide
  Sense strand starting at position 2505 of SEQ ID NO: 3530
uuaaguuagguguaaaugu

SEQ ID NO: 274905 - RNA, 19 nt, Artificial Sequence
  Description of Artificial Sequence: Synthetic oligonucleotide
  Antisense strand to SEQ ID NO: 274904
acauuuacaccuaacuuaa

SEQ ID NO: 274906 - RNA, 19 nt, Artificial Sequence
  Description of Artificial Sequence: Synthetic oligonucleotide
  Sense strand starting at position 2560 of SEQ ID NO: 3530
uuacgacauaagugaaagu

SEQ ID NO: 274907 - RNA, 19 nt, Artificial Sequence
  Description of Artificial Sequence: Synthetic oligonucleotide
  Antisense strand to SEQ ID NO: 274906
acuuucacuuaugucguaa

SEQ ID NO: 274908 - RNA, 19 nt, Artificial Sequence
  Description of Artificial Sequence: Synthetic oligonucleotide
  Sense strand starting at position 2669 of SEQ ID NO: 3530
gaacguauggcauauuauu

SEQ ID NO: 274909 - RNA, 19 nt, Artificial Sequence
  Description of Artificial Sequence: Synthetic oligonucleotide
  Antisense strand to SEQ ID NO: 274908
aauaauaugccauacguuc

SEQ ID NO: 274910 - RNA, 19 nt, Artificial Sequence
  Description of Artificial Sequence: Synthetic oligonucleotide
  Sense strand starting at position 2780 of SEQ ID NO: 3530
ggcuuaagucuagagcaac

SEQ ID NO: 274911 - RNA, 19 nt, Artificial Sequence
  Description of Artificial Sequence: Synthetic oligonucleotide
  Antisense strand to SEQ ID NO: 274910
guugcucuagacuuaagcc

SEQ ID NO: 274912 - RNA, 19 nt, Artificial Sequence
  Description of Artificial Sequence: Synthetic oligonucleotide
  Sense strand starting at position 2893 of SEQ ID NO: 3530
accagaaagcauuguuccu

SEQ ID NO: 274913 - RNA, 19 nt, Artificial Sequence
  Description of Artificial Sequence: Synthetic oligonucleotide
  Antisense strand to SEQ ID NO: 274912
aggaacaaugcuuucuggu

SEQ ID NO: 274914 - RNA, 19 nt, Artificial Sequence
  Description of Artificial Sequence: Synthetic oligonucleotide
  Sense strand starting at position 2996 of SEQ ID NO: 3530
uguggaauucccugggauu

SEQ ID NO: 274915 - RNA, 19 nt, Artificial Sequence
  Description of Artificial Sequence: Synthetic oligonucleotide
  Antisense strand to SEQ ID NO: 274914
aaucccagggaauuccaca

SEQ ID NO: 274916 - RNA, 19 nt, Artificial Sequence
  Description of Artificial Sequence: Synthetic oligonucleotide
  Sense strand starting at position 2997 of SEQ ID NO: 3530
guggaauucccugggauug

SEQ ID NO: 274917 - RNA, 19 nt, Artificial Sequence
  Description of Artificial Sequence: Synthetic oligonucleotide
  Antisense strand to SEQ ID NO: 274916
caaucccagggaauuccac

SEQ ID NO: 274918 - RNA, 19 nt, Artificial Sequence
  Description of Artificial Sequence: Synthetic oligonucleotide
  Sense strand starting at position 3342 of SEQ ID NO: 3530
augcuuccagcauguauuu

SEQ ID NO: 274919 - RNA, 19 nt, Artificial Sequence
  Description of Artificial Sequence: Synthetic oligonucleotide
  Antisense strand to SEQ ID NO: 274918
aaauacaugcuggaagcau

SEQ ID NO: 274920 - RNA, 19 nt, Artificial Sequence
  Description of Artificial Sequence: Synthetic oligonucleotide
  Sense strand starting at position 3404 of SEQ ID NO: 3530
gcaucuugggaaugauguu

SEQ ID NO: 274921 - RNA, 19 nt, Artificial Sequence
  Description of Artificial Sequence: Synthetic oligonucleotide
  Antisense strand to SEQ ID NO: 274920
aacaucauucccaagaugc

SEQ ID NO: 274922 - RNA, 19 nt, Artificial Sequence
  Description of Artificial Sequence: Synthetic oligonucleotide
  Sense strand starting at position 3518 of SEQ ID NO: 3530
agguguuagaugcauuaaa

SEQ ID NO: 274923 - RNA, 19 nt, Artificial Sequence
  Description of Artificial Sequence: Synthetic oligonucleotide
  Antisense strand to SEQ ID NO: 274922
uuuaaugcaucuaacaccu

SEQ ID NO: 274924 - RNA, 19 nt, Artificial Sequence
  Description of Artificial Sequence: Synthetic oligonucleotide
  Sense strand starting at position 3639 of SEQ ID NO: 3530
ggacauugagcagaguucu

SEQ ID NO: 274925 - RNA, 19 nt, Artificial Sequence
  Description of Artificial Sequence: Synthetic oligonucleotide
  Antisense strand to SEQ ID NO: 274924
agaacucugcucaaugucc

SEQ ID NO: 274926 - RNA, 19 nt, Artificial Sequence
  Description of Artificial Sequence: Synthetic oligonucleotide
  Sense strand starting at position 3705 of SEQ ID NO: 3530
gaaugaguugcucagguau

SEQ ID NO: 274927 - RNA, 19 nt, Artificial Sequence
  Description of Artificial Sequence: Synthetic oligonucleotide
  Antisense strand to SEQ ID NO: 274926
auaccugagcaacucauuc

SEQ ID NO: 274928 - RNA, 19 nt, Artificial Sequence
  Description of Artificial Sequence: Synthetic oligonucleotide
  Sense strand starting at position 3731 of SEQ ID NO: 3530
gguggaugcauagagacuu

SEQ ID NO: 274929 - RNA, 19 nt, Artificial Sequence
  Description of Artificial Sequence: Synthetic oligonucleotide
  Antisense strand to SEQ ID NO: 274928
aagucucuaugcauccacc

SEQ ID NO: 274930 - RNA, 19 nt, Artificial Sequence
  Description of Artificial Sequence: Synthetic oligonucleotide
  Sense strand starting at position 3742 of SEQ ID NO: 3530
agagacuuccacuguggca

SEQ ID NO: 274931 - RNA, 19 nt, Artificial Sequence
  Description of Artificial Sequence: Synthetic oligonucleotide
  Antisense strand to SEQ ID NO: 274930
ugccacaguggaagucucu

SEQ ID NO: 274932 - RNA, 19 nt, Artificial Sequence
  Description of Artificial Sequence: Synthetic oligonucleotide
  Sense strand starting at position 3925 of SEQ ID NO: 3530
gagagaucucuguguacua

SEQ ID NO: 274933 - RNA, 19 nt, Artificial Sequence
  Description of Artificial Sequence: Synthetic oligonucleotide
  Antisense strand to SEQ ID NO: 274932
uaguacacagagaucucuc

SEQ ID NO: 274934 - RNA, 19 nt, Artificial Sequence
  Description of Artificial Sequence: Synthetic oligonucleotide
  Sense strand starting at position 3926 of SEQ ID NO: 3530
agagaucucuguguacuac

SEQ ID NO: 274935 - RNA, 19 nt, Artificial Sequence
  Description of Artificial Sequence: Synthetic oligonucleotide
  Antisense strand to SEQ ID NO: 274934
guaguacacagagaucucu

SEQ ID NO: 274936 - RNA, 19 nt, Artificial Sequence
  Description of Artificial Sequence: Synthetic oligonucleotide
  Sense strand starting at position 400 of SEQ ID NO: 3531
uugguaauccuguggcgga

SEQ ID NO: 274937 - RNA, 19 nt, Artificial Sequence
  Description of Artificial Sequence: Synthetic oligonucleotide
  Antisense strand to SEQ ID NO: 274936
uccgccacaggauuaccaa

SEQ ID NO: 274938 - RNA, 19 nt, Artificial Sequence
  Description of Artificial Sequence: Synthetic oligonucleotide
  Sense strand starting at position 403 of SEQ ID NO: 3531
guaauccuguggcggagaa

SEQ ID NO: 274939 - RNA, 19 nt, Artificial Sequence
  Description of Artificial Sequence: Synthetic oligonucleotide
  Antisense strand to SEQ ID NO: 274938
uucuccgccacaggauuac

SEQ ID NO: 274940 - RNA, 19 nt, Artificial Sequence
  Description of Artificial Sequence: Synthetic oligonucleotide
  Sense strand starting at position 413 of SEQ ID NO: 3531
ggcggagaaguuuguucua

SEQ ID NO: 274941 - RNA, 19 nt, Artificial Sequence
  Description of Artificial Sequence: Synthetic oligonucleotide
  Antisense strand to SEQ ID NO: 274940
uagaacaaacuucuccgcc

SEQ ID NO: 274942 - RNA, 19 nt, Artificial Sequence
  Description of Artificial Sequence: Synthetic oligonucleotide
  Sense strand starting at position 705 of SEQ ID NO: 3531
ucguaugauuccguucgua

SEQ ID NO: 274943 - RNA, 19 nt, Artificial Sequence
  Description of Artificial Sequence: Synthetic oligonucleotide
  Antisense strand to SEQ ID NO: 274942
uacgaacggaaucauacga

SEQ ID NO: 274944 - RNA, 19 nt, Artificial Sequence
  Description of Artificial Sequence: Synthetic oligonucleotide
  Sense strand starting at position 708 of SEQ ID NO: 3531
uaugauuccguucguauga

SEQ ID NO: 274945 - RNA, 19 nt, Artificial Sequence
  Description of Artificial Sequence: Synthetic oligonucleotide
  Antisense strand to SEQ ID NO: 274944
ucauacgaacggaaucaua

SEQ ID NO: 274946 - RNA, 19 nt, Artificial Sequence
  Description of Artificial Sequence: Synthetic oligonucleotide
  Sense strand starting at position 709 of SEQ ID NO: 3531
augauuccguucguaugaa

SEQ ID NO: 274947 - RNA, 19 nt, Artificial Sequence
  Description of Artificial Sequence: Synthetic oligonucleotide
  Antisense strand to SEQ ID NO: 274946
uucauacgaacggaaucau

SEQ ID NO: 274948 - RNA, 19 nt, Artificial Sequence
  Description of Artificial Sequence: Synthetic oligonucleotide
  Sense strand starting at position 710 of SEQ ID NO: 3531
ugauuccguucguaugaaa

SEQ ID NO: 274949 - RNA, 19 nt, Artificial Sequence
  Description of Artificial Sequence: Synthetic oligonucleotide
  Antisense strand to SEQ ID NO: 274948
uuucauacgaacggaauca

SEQ ID NO: 274950 - RNA, 19 nt, Artificial Sequence
  Description of Artificial Sequence: Synthetic oligonucleotide
  Sense strand starting at position 713 of SEQ ID NO: 3531
uuccguucguaugaaaugu

SEQ ID NO: 274951 - RNA, 19 nt, Artificial Sequence
  Description of Artificial Sequence: Synthetic oligonucleotide
  Antisense strand to SEQ ID NO: 274950
acauuucauacgaacggaa

SEQ ID NO: 274952 - RNA, 19 nt, Artificial Sequence
  Description of Artificial Sequence: Synthetic oligonucleotide
  Sense strand starting at position 1136 of SEQ ID NO: 3531
ugucuagauuucuuuguuu

SEQ ID NO: 274953 - RNA, 19 nt, Artificial Sequence
  Description of Artificial Sequence: Synthetic oligonucleotide
  Antisense strand to SEQ ID NO: 274952
aaacaaagaaaucuagaca

SEQ ID NO: 274954 - RNA, 19 nt, Artificial Sequence
  Description of Artificial Sequence: Synthetic oligonucleotide
  Sense strand starting at position 1164 of SEQ ID NO: 3531
gggugaauaugcuacccua

SEQ ID NO: 274955 - RNA, 19 nt, Artificial Sequence
  Description of Artificial Sequence: Synthetic oligonucleotide
  Antisense strand to SEQ ID NO: 274954
uaggguagcauauucaccc

SEQ ID NO: 274956 - RNA, 19 nt, Artificial Sequence
  Description of Artificial Sequence: Synthetic oligonucleotide
  Sense strand starting at position 1515 of SEQ ID NO: 3531
ggagcaugacaccguaaga

SEQ ID NO: 274957 - RNA, 19 nt, Artificial Sequence
  Description of Artificial Sequence: Synthetic oligonucleotide
  Antisense strand to SEQ ID NO: 274956
ucuuacggugucaugcucc

SEQ ID NO: 274958 - RNA, 19 nt, Artificial Sequence
  Description of Artificial Sequence: Synthetic oligonucleotide
  Sense strand starting at position 2486 of SEQ ID NO: 3531
ucagguccuggaugacaaa

SEQ ID NO: 274959 - RNA, 19 nt, Artificial Sequence
  Description of Artificial Sequence: Synthetic oligonucleotide
  Antisense strand to SEQ ID NO: 274958
uuugucauccaggaccuga

SEQ ID NO: 274960 - RNA, 19 nt, Artificial Sequence
  Description of Artificial Sequence: Synthetic oligonucleotide
  Sense strand starting at position 2506 of SEQ ID NO: 3531
uuaaguuagguguaaaugu

SEQ ID NO: 274961 - RNA, 19 nt, Artificial Sequence
  Description of Artificial Sequence: Synthetic oligonucleotide
  Antisense strand to SEQ ID NO: 274960
acauuuacaccuaacuuaa

SEQ ID NO: 274962 - RNA, 19 nt, Artificial Sequence
  Description of Artificial Sequence: Synthetic oligonucleotide
  Sense strand starting at position 2513 of SEQ ID NO: 3531
agguguaaauguuaauauc

SEQ ID NO: 274963 - RNA, 19 nt, Artificial Sequence
  Description of Artificial Sequence: Synthetic oligonucleotide
  Antisense strand to SEQ ID NO: 274962
gauauuaacauuuacaccu

SEQ ID NO: 274964 - RNA, 19 nt, Artificial Sequence
  Description of Artificial Sequence: Synthetic oligonucleotide
  Sense strand starting at position 2802 of SEQ ID NO: 3531
gguaguauauauguuguaa

SEQ ID NO: 274965 - RNA, 19 nt, Artificial Sequence
  Description of Artificial Sequence: Synthetic oligonucleotide
  Antisense strand to SEQ ID NO: 274964
uuacaacauauauacuacc

SEQ ID NO: 274966 - RNA, 19 nt, Artificial Sequence
  Description of Artificial Sequence: Synthetic oligonucleotide
  Sense strand starting at position 2975 of SEQ ID NO: 3531
aauggucuuggguggaaca

SEQ ID NO: 274967 - RNA, 19 nt, Artificial Sequence
  Description of Artificial Sequence: Synthetic oligonucleotide
  Antisense strand to SEQ ID NO: 274966
uguuccacccaagaccauu

SEQ ID NO: 274968 - RNA, 19 nt, Artificial Sequence
  Description of Artificial Sequence: Synthetic oligonucleotide
  Sense strand starting at position 2987 of SEQ ID NO: 3531
uggaacauccuguggaauu

SEQ ID NO: 274969 - RNA, 19 nt, Artificial Sequence
  Description of Artificial Sequence: Synthetic oligonucleotide
  Antisense strand to SEQ ID NO: 274968
aauuccacaggauguucca

SEQ ID NO: 274970 - RNA, 19 nt, Artificial Sequence
  Description of Artificial Sequence: Synthetic oligonucleotide
  Sense strand starting at position 2988 of SEQ ID NO: 3531
ggaacauccuguggaauuc

SEQ ID NO: 274971 - RNA, 19 nt, Artificial Sequence
  Description of Artificial Sequence: Synthetic oligonucleotide
  Antisense strand to SEQ ID NO: 274970
gaauuccacaggauguucc

SEQ ID NO: 274972 - RNA, 19 nt, Artificial Sequence
  Description of Artificial Sequence: Synthetic oligonucleotide
  Sense strand starting at position 2997 of SEQ ID NO: 3531
uguggaauucccugggauu

SEQ ID NO: 274973 - RNA, 19 nt, Artificial Sequence
  Description of Artificial Sequence: Synthetic oligonucleotide
  Antisense strand to SEQ ID NO: 274972
aaucccagggaauuccaca

SEQ ID NO: 274974 - RNA, 19 nt, Artificial Sequence
  Description of Artificial Sequence: Synthetic oligonucleotide
  Sense strand starting at position 2998 of SEQ ID NO: 3531
guggaauucccugggauug

SEQ ID NO: 274975 - RNA, 19 nt, Artificial Sequence
  Description of Artificial Sequence: Synthetic oligonucleotide
  Antisense strand to SEQ ID NO: 274974
caaucccagggaauuccac

SEQ ID NO: 274976 - RNA, 19 nt, Artificial Sequence
  Description of Artificial Sequence: Synthetic oligonucleotide
  Sense strand starting at position 3402 of SEQ ID NO: 3531
uaaggcaucuugggaauga

SEQ ID NO: 274977 - RNA, 19 nt, Artificial Sequence
  Description of Artificial Sequence: Synthetic oligonucleotide
  Antisense strand to SEQ ID NO: 274976
ucauucccaagaugccuua

SEQ ID NO: 274978 - RNA, 19 nt, Artificial Sequence
  Description of Artificial Sequence: Synthetic oligonucleotide
  Sense strand starting at position 3403 of SEQ ID NO: 3531
aaggcaucuugggaaugau

SEQ ID NO: 274979 - RNA, 19 nt, Artificial Sequence
  Description of Artificial Sequence: Synthetic oligonucleotide
  Antisense strand to SEQ ID NO: 274978
aucauucccaagaugccuu

SEQ ID NO: 274980 - RNA, 19 nt, Artificial Sequence
  Description of Artificial Sequence: Synthetic oligonucleotide
  Sense strand starting at position 3406 of SEQ ID NO: 3531
gcaucuugggaaugauguu

SEQ ID NO: 274981 - RNA, 19 nt, Artificial Sequence
  Description of Artificial Sequence: Synthetic oligonucleotide
  Antisense strand to SEQ ID NO: 274980
aacaucauucccaagaugc

SEQ ID NO: 274982 - RNA, 19 nt, Artificial Sequence
  Description of Artificial Sequence: Synthetic oligonucleotide
  Sense strand starting at position 3518 of SEQ ID NO: 3531
guagguguuggaugcauua

SEQ ID NO: 274983 - RNA, 19 nt, Artificial Sequence
  Description of Artificial Sequence: Synthetic oligonucleotide
  Antisense strand to SEQ ID NO: 274982
uaaugcauccaacaccuac

SEQ ID NO: 274984 - RNA, 19 nt, Artificial Sequence
  Description of Artificial Sequence: Synthetic oligonucleotide
  Sense strand starting at position 3520 of SEQ ID NO: 3531
agguguuggaugcauuaaa

SEQ ID NO: 274985 - RNA, 19 nt, Artificial Sequence
  Description of Artificial Sequence: Synthetic oligonucleotide
  Antisense strand to SEQ ID NO: 274984
uuuaaugcauccaacaccu

SEQ ID NO: 274986 - RNA, 19 nt, Artificial Sequence
  Description of Artificial Sequence: Synthetic oligonucleotide
  Sense strand starting at position 3733 of SEQ ID NO: 3531
gguggaugcauagagacuu

SEQ ID NO: 274987 - RNA, 19 nt, Artificial Sequence
  Description of Artificial Sequence: Synthetic oligonucleotide
  Antisense strand to SEQ ID NO: 274986
aagucucuaugcauccacc

SEQ ID NO: 274988 - RNA, 19 nt, Artificial Sequence
  Description of Artificial Sequence: Synthetic oligonucleotide
  Sense strand starting at position 3744 of SEQ ID NO: 3531
agagacuuccacuguggca

SEQ ID NO: 274989 - RNA, 19 nt, Artificial Sequence
  Description of Artificial Sequence: Synthetic oligonucleotide
  Antisense strand to SEQ ID NO: 274988
ugccacaguggaagucucu

SEQ ID NO: 274990 - RNA, 19 nt, Artificial Sequence
  Description of Artificial Sequence: Synthetic oligonucleotide
  Sense strand starting at position 3828 of SEQ ID NO: 3531
acugcacucuuagacggau

SEQ ID NO: 274991 - RNA, 19 nt, Artificial Sequence
  Description of Artificial Sequence: Synthetic oligonucleotide
  Antisense strand to SEQ ID NO: 274990
auccgucuaagagugcagu

SEQ ID NO: 274992 - RNA, 19 nt, Artificial Sequence
  Description of Artificial Sequence: Synthetic oligonucleotide
  Sense strand starting at position 3878 of SEQ ID NO: 3531
ggugcuuucuaccugaaau

SEQ ID NO: 274993 - RNA, 19 nt, Artificial Sequence
  Description of Artificial Sequence: Synthetic oligonucleotide
  Antisense strand to SEQ ID NO: 274992
auuucagguagaaagcacc

SEQ ID NO: 274994 - RNA, 19 nt, Artificial Sequence
  Description of Artificial Sequence: Synthetic oligonucleotide
  Sense strand starting at position 3890 of SEQ ID NO: 3531
cugaaauaauggcaugaac

SEQ ID NO: 274995 - RNA, 19 nt, Artificial Sequence
  Description of Artificial Sequence: Synthetic oligonucleotide
  Antisense strand to SEQ ID NO: 274994
guucaugccauuauuucag

SEQ ID NO: 274996 - RNA, 19 nt, Artificial Sequence
  Description of Artificial Sequence: Synthetic oligonucleotide
  Sense strand starting at position 251 of SEQ ID NO: 3532
cucucuuaacauggugaca

SEQ ID NO: 274997 - RNA, 19 nt, Artificial Sequence
  Description of Artificial Sequence: Synthetic oligonucleotide
  Antisense strand to SEQ ID NO: 274996
ugucaccauguuaagagag

SEQ ID NO: 274998 - RNA, 19 nt, Artificial Sequence
  Description of Artificial Sequence: Synthetic oligonucleotide
  Sense strand starting at position 498 of SEQ ID NO: 3532
cucagaguucuuugaggac

SEQ ID NO: 274999 - RNA, 19 nt, Artificial Sequence
  Description of Artificial Sequence: Synthetic oligonucleotide
  Antisense strand to SEQ ID NO: 274998
guccucaaagaacucugag

SEQ ID NO: 275000 - RNA, 19 nt, Artificial Sequence
  Description of Artificial Sequence: Synthetic oligonucleotide
  Sense strand starting at position 532 of SEQ ID NO: 3532
aucacacaucgcuagcaua

SEQ ID NO: 275001 - RNA, 19 nt, Artificial Sequence
  Description of Artificial Sequence: Synthetic oligonucleotide
  Antisense strand to SEQ ID NO: 275000
uaugcuagcgaugugugau

SEQ ID NO: 275002 - RNA, 19 nt, Artificial Sequence
  Description of Artificial Sequence: Synthetic oligonucleotide
  Sense strand starting at position 600 of SEQ ID NO: 3532
uuauaucgggcuuacaaau

SEQ ID NO: 275003 - RNA, 19 nt, Artificial Sequence
  Description of Artificial Sequence: Synthetic oligonucleotide
  Antisense strand to SEQ ID NO: 275002
auuuguaagcccgauauaa

SEQ ID NO: 275004 - RNA, 19 nt, Artificial Sequence
  Description of Artificial Sequence: Synthetic oligonucleotide
  Sense strand starting at position 911 of SEQ ID NO: 3532
guugaaagcuauuucggca

SEQ ID NO: 275005 - RNA, 19 nt, Artificial Sequence
  Description of Artificial Sequence: Synthetic oligonucleotide
  Antisense strand to SEQ ID NO: 275004
ugccgaaauagcuuucaac

SEQ ID NO: 275006 - RNA, 19 nt, Artificial Sequence
  Description of Artificial Sequence: Synthetic oligonucleotide
  Sense strand starting at position 1004 of SEQ ID NO: 3532
ucaagacuuuccucaggau

SEQ ID NO: 275007 - RNA, 19 nt, Artificial Sequence
  Description of Artificial Sequence: Synthetic oligonucleotide
  Antisense strand to SEQ ID NO: 275006
auccugaggaaagucuuga

SEQ ID NO: 275008 - RNA, 19 nt, Artificial Sequence
  Description of Artificial Sequence: Synthetic oligonucleotide
  Sense strand starting at position 1200 of SEQ ID NO: 3532
acaguugccauggguuaaa

SEQ ID NO: 275009 - RNA, 19 nt, Artificial Sequence
  Description of Artificial Sequence: Synthetic oligonucleotide
  Antisense strand to SEQ ID NO: 275008
uuuaacccauggcaacugu

SEQ ID NO: 275010 - RNA, 19 nt, Artificial Sequence
  Description of Artificial Sequence: Synthetic oligonucleotide
  Sense strand starting at position 1203 of SEQ ID NO: 3532
guugccauggguuaaaucu

SEQ ID NO: 275011 - RNA, 19 nt, Artificial Sequence
  Description of Artificial Sequence: Synthetic oligonucleotide
  Antisense strand to SEQ ID NO: 275010
agauuuaacccauggcaac

SEQ ID NO: 275012 - RNA, 19 nt, Artificial Sequence
  Description of Artificial Sequence: Synthetic oligonucleotide
  Sense strand starting at position 1443 of SEQ ID NO: 3532
ccucgagccaucgaggaua

SEQ ID NO: 275013 - RNA, 19 nt, Artificial Sequence
  Description of Artificial Sequence: Synthetic oligonucleotide
  Antisense strand to SEQ ID NO: 275012
uauccucgauggcucgagg

SEQ ID NO: 275014 - RNA, 19 nt, Artificial Sequence
  Description of Artificial Sequence: Synthetic oligonucleotide
  Sense strand starting at position 1446 of SEQ ID NO: 3532
cgagccaucgaggauauaa

SEQ ID NO: 275015 - RNA, 19 nt, Artificial Sequence
  Description of Artificial Sequence: Synthetic oligonucleotide
  Antisense strand to SEQ ID NO: 275014
uuauauccucgauggcucg

SEQ ID NO: 275016 - RNA, 19 nt, Artificial Sequence
  Description of Artificial Sequence: Synthetic oligonucleotide
  Sense strand starting at position 2375 of SEQ ID NO: 3532
auguucuaaguaugacaua

SEQ ID NO: 275017 - RNA, 19 nt, Artificial Sequence
  Description of Artificial Sequence: Synthetic oligonucleotide
  Antisense strand to SEQ ID NO: 275016
uaugucauacuuagaacau

SEQ ID NO: 275018 - RNA, 19 nt, Artificial Sequence
  Description of Artificial Sequence: Synthetic oligonucleotide
  Sense strand starting at position 2406 of SEQ ID NO: 3532
augauaaaucauggguguu

SEQ ID NO: 275019 - RNA, 19 nt, Artificial Sequence
  Description of Artificial Sequence: Synthetic oligonucleotide
  Antisense strand to SEQ ID NO: 275018
aacacccaugauuuaucau

SEQ ID NO: 275020 - RNA, 19 nt, Artificial Sequence
  Description of Artificial Sequence: Synthetic oligonucleotide
  Sense strand starting at position 2407 of SEQ ID NO: 3532
ugauaaaucauggguguuu

SEQ ID NO: 275021 - RNA, 19 nt, Artificial Sequence
  Description of Artificial Sequence: Synthetic oligonucleotide
  Antisense strand to SEQ ID NO: 275020
aaacacccaugauuuauca

SEQ ID NO: 275022 - RNA, 19 nt, Artificial Sequence
  Description of Artificial Sequence: Synthetic oligonucleotide
  Sense strand starting at position 2408 of SEQ ID NO: 3532
gauaaaucauggguguuua

SEQ ID NO: 275023 - RNA, 19 nt, Artificial Sequence
  Description of Artificial Sequence: Synthetic oligonucleotide
  Antisense strand to SEQ ID NO: 275022
uaaacacccaugauuuauc

SEQ ID NO: 275024 - RNA, 19 nt, Artificial Sequence
  Description of Artificial Sequence: Synthetic oligonucleotide
  Sense strand starting at position 2418 of SEQ ID NO: 3532
ggguguuuagacgaaagau

SEQ ID NO: 275025 - RNA, 19 nt, Artificial Sequence
  Description of Artificial Sequence: Synthetic oligonucleotide
  Antisense strand to SEQ ID NO: 275024
aucuuucgucuaaacaccc

SEQ ID NO: 275026 - RNA, 19 nt, Artificial Sequence
  Description of Artificial Sequence: Synthetic oligonucleotide
  Sense strand starting at position 2428 of SEQ ID NO: 3532
acgaaagauuuacacauau

SEQ ID NO: 275027 - RNA, 19 nt, Artificial Sequence
  Description of Artificial Sequence: Synthetic oligonucleotide
  Antisense strand to SEQ ID NO: 275026
auauguguaaaucuuucgu

SEQ ID NO: 275028 - RNA, 19 nt, Artificial Sequence
  Description of Artificial Sequence: Synthetic oligonucleotide
  Sense strand starting at position 2443 of SEQ ID NO: 3532
auauaaauuggaggcuuua

SEQ ID NO: 275029 - RNA, 19 nt, Artificial Sequence
  Description of Artificial Sequence: Synthetic oligonucleotide
  Antisense strand to SEQ ID NO: 275028
uaaagccuccaauuuauau

SEQ ID NO: 275030 - RNA, 19 nt, Artificial Sequence
  Description of Artificial Sequence: Synthetic oligonucleotide
  Sense strand starting at position 2454 of SEQ ID NO: 3532
aggcuuuagcggucuuagu

SEQ ID NO: 275031 - RNA, 19 nt, Artificial Sequence
  Description of Artificial Sequence: Synthetic oligonucleotide
  Antisense strand to SEQ ID NO: 275030
acuaagaccgcuaaagccu

SEQ ID NO: 275032 - RNA, 19 nt, Artificial Sequence
  Description of Artificial Sequence: Synthetic oligonucleotide
  Sense strand starting at position 2456 of SEQ ID NO: 3532
gcuuuagcggucuuagugu

SEQ ID NO: 275033 - RNA, 19 nt, Artificial Sequence
  Description of Artificial Sequence: Synthetic oligonucleotide
  Antisense strand to SEQ ID NO: 275032
acacuaagaccgcuaaagc

SEQ ID NO: 275034 - RNA, 19 nt, Artificial Sequence
  Description of Artificial Sequence: Synthetic oligonucleotide
  Sense strand starting at position 2533 of SEQ ID NO: 3532
ggagcauuauacuccggaa

SEQ ID NO: 275035 - RNA, 19 nt, Artificial Sequence
  Description of Artificial Sequence: Synthetic oligonucleotide
  Antisense strand to SEQ ID NO: 275034
uuccggaguauaaugcucc

SEQ ID NO: 275036 - RNA, 19 nt, Artificial Sequence
  Description of Artificial Sequence: Synthetic oligonucleotide
  Sense strand starting at position 2535 of SEQ ID NO: 3532
agcauuauacuccggaaac

SEQ ID NO: 275037 - RNA, 19 nt, Artificial Sequence
  Description of Artificial Sequence: Synthetic oligonucleotide
  Antisense strand to SEQ ID NO: 275036
guuuccggaguauaaugcu

SEQ ID NO: 275038 - RNA, 19 nt, Artificial Sequence
  Description of Artificial Sequence: Synthetic oligonucleotide
  Sense strand starting at position 2574 of SEQ ID NO: 3532
agaaauuccucucuguaug

SEQ ID NO: 275039 - RNA, 19 nt, Artificial Sequence
  Description of Artificial Sequence: Synthetic oligonucleotide
  Antisense strand to SEQ ID NO: 275038
cauacagagaggaauuucu

SEQ ID NO: 275040 - RNA, 19 nt, Artificial Sequence
  Description of Artificial Sequence: Synthetic oligonucleotide
  Sense strand starting at position 2590 of SEQ ID NO: 3532
augcuaacuccguaauaca

SEQ ID NO: 275041 - RNA, 19 nt, Artificial Sequence
  Description of Artificial Sequence: Synthetic oligonucleotide
  Antisense strand to SEQ ID NO: 275040
uguauuacggaguuagcau

SEQ ID NO: 275042 - RNA, 19 nt, Artificial Sequence
  Description of Artificial Sequence: Synthetic oligonucleotide
  Sense strand starting at position 2601 of SEQ ID NO: 3532
guaauacaagcguuugugu

SEQ ID NO: 275043 - RNA, 19 nt, Artificial Sequence
  Description of Artificial Sequence: Synthetic oligonucleotide
  Antisense strand to SEQ ID NO: 275042
acacaaacgcuuguauuac

SEQ ID NO: 275044 - RNA, 19 nt, Artificial Sequence
  Description of Artificial Sequence: Synthetic oligonucleotide
  Sense strand starting at position 2683 of SEQ ID NO: 3532
gguguucuucaggacaguu

SEQ ID NO: 275045 - RNA, 19 nt, Artificial Sequence
  Description of Artificial Sequence: Synthetic oligonucleotide
  Antisense strand to SEQ ID NO: 275044
aacuguccugaagaacacc

SEQ ID NO: 275046 - RNA, 19 nt, Artificial Sequence
  Description of Artificial Sequence: Synthetic oligonucleotide
  Sense strand starting at position 2710 of SEQ ID NO: 3532
agcaauucuuagucucaag

SEQ ID NO: 275047 - RNA, 19 nt, Artificial Sequence
  Description of Artificial Sequence: Synthetic oligonucleotide
  Antisense strand to SEQ ID NO: 275046
cuugagacuaagaauugcu

SEQ ID NO: 275048 - RNA, 19 nt, Artificial Sequence
  Description of Artificial Sequence: Synthetic oligonucleotide
  Sense strand starting at position 2948 of SEQ ID NO: 3532
acauuaugucaacagcaug

SEQ ID NO: 275049 - RNA, 19 nt, Artificial Sequence
  Description of Artificial Sequence: Synthetic oligonucleotide
  Antisense strand to SEQ ID NO: 275048
caugcuguugacauaaugu

SEQ ID NO: 275050 - RNA, 19 nt, Artificial Sequence
  Description of Artificial Sequence: Synthetic oligonucleotide
  Sense strand starting at position 2997 of SEQ ID NO: 3532
ugaucugaacucugaccau

SEQ ID NO: 275051 - RNA, 19 nt, Artificial Sequence
  Description of Artificial Sequence: Synthetic oligonucleotide
  Antisense strand to SEQ ID NO: 275050
auggucagaguucagauca

SEQ ID NO: 275052 - RNA, 19 nt, Artificial Sequence
  Description of Artificial Sequence: Synthetic oligonucleotide
  Sense strand starting at position 3041 of SEQ ID NO: 3532
auaagagucugacuacuug

SEQ ID NO: 275053 - RNA, 19 nt, Artificial Sequence
  Description of Artificial Sequence: Synthetic oligonucleotide
  Antisense strand to SEQ ID NO: 275052
caaguagucagacucuuau

SEQ ID NO: 275054 - RNA, 19 nt, Artificial Sequence
  Description of Artificial Sequence: Synthetic oligonucleotide
  Sense strand starting at position 3228 of SEQ ID NO: 3532
uuggaaaggcauuguaacu

SEQ ID NO: 275055 - RNA, 19 nt, Artificial Sequence
  Description of Artificial Sequence: Synthetic oligonucleotide
  Antisense strand to SEQ ID NO: 275054
aguuacaaugccuuuccaa

SEQ ID NO: 275056 - RNA, 19 nt, Artificial Sequence
  Description of Artificial Sequence: Synthetic oligonucleotide
  Sense strand starting at position 3277 of SEQ ID NO: 3532
cuugucuuacccuaaaguc

SEQ ID NO: 275057 - RNA, 19 nt, Artificial Sequence
  Description of Artificial Sequence: Synthetic oligonucleotide
  Antisense strand to SEQ ID NO: 275056
gacuuuaggguaagacaag

SEQ ID NO: 275058 - RNA, 19 nt, Artificial Sequence
  Description of Artificial Sequence: Synthetic oligonucleotide
  Sense strand starting at position 3299 of SEQ ID NO: 3532
ugcugaagauucuuuacug

SEQ ID NO: 275059 - RNA, 19 nt, Artificial Sequence
  Description of Artificial Sequence: Synthetic oligonucleotide
  Antisense strand to SEQ ID NO: 275058
caguaaagaaucuucagca

SEQ ID NO: 275060 - RNA, 19 nt, Artificial Sequence
  Description of Artificial Sequence: Synthetic oligonucleotide
  Sense strand starting at position 3440 of SEQ ID NO: 3532
uugccaguuguaucagugu

SEQ ID NO: 275061 - RNA, 19 nt, Artificial Sequence
  Description of Artificial Sequence: Synthetic oligonucleotide
  Antisense strand to SEQ ID NO: 275060
acacugauacaacuggcaa

SEQ ID NO: 275062 - RNA, 19 nt, Artificial Sequence
  Description of Artificial Sequence: Synthetic oligonucleotide
  Sense strand starting at position 3487 of SEQ ID NO: 3532
aaacaugaacguuggaguu

SEQ ID NO: 275063 - RNA, 19 nt, Artificial Sequence
  Description of Artificial Sequence: Synthetic oligonucleotide
  Antisense strand to SEQ ID NO: 275062
aacuccaacguucauguuu

SEQ ID NO: 275064 - RNA, 19 nt, Artificial Sequence
  Description of Artificial Sequence: Synthetic oligonucleotide
  Sense strand starting at position 3499 of SEQ ID NO: 3532
uggaguugcccacagugaa

SEQ ID NO: 275065 - RNA, 19 nt, Artificial Sequence
  Description of Artificial Sequence: Synthetic oligonucleotide
  Antisense strand to SEQ ID NO: 275064
uucacugugggcaacucca

SEQ ID NO: 275066 - RNA, 19 nt, Artificial Sequence
  Description of Artificial Sequence: Synthetic oligonucleotide
  Sense strand starting at position 3550 of SEQ ID NO: 3532
ggguauguggcugacauau

SEQ ID NO: 275067 - RNA, 19 nt, Artificial Sequence
  Description of Artificial Sequence: Synthetic oligonucleotide
  Antisense strand to SEQ ID NO: 275066
auaugucagccacauaccc

SEQ ID NO: 275068 - RNA, 19 nt, Artificial Sequence
  Description of Artificial Sequence: Synthetic oligonucleotide
  Sense strand starting at position 3561 of SEQ ID NO: 3532
ugacauaugcauugggagu

SEQ ID NO: 275069 - RNA, 19 nt, Artificial Sequence
  Description of Artificial Sequence: Synthetic oligonucleotide
  Antisense strand to SEQ ID NO: 275068
acucccaaugcauauguca

SEQ ID NO: 275070 - RNA, 19 nt, Artificial Sequence
  Description of Artificial Sequence: Synthetic oligonucleotide
  Sense strand starting at position 3630 of SEQ ID NO: 3532
uugcuuggacuuuaacaaa

SEQ ID NO: 275071 - RNA, 19 nt, Artificial Sequence
  Description of Artificial Sequence: Synthetic oligonucleotide
  Antisense strand to SEQ ID NO: 275070
uuuguuaaaguccaagcaa

SEQ ID NO: 275072 - RNA, 19 nt, Artificial Sequence
  Description of Artificial Sequence: Synthetic oligonucleotide
  Sense strand starting at position 3791 of SEQ ID NO: 3532
gagaguucuggauguggau

SEQ ID NO: 275073 - RNA, 19 nt, Artificial Sequence
  Description of Artificial Sequence: Synthetic oligonucleotide
  Antisense strand to SEQ ID NO: 275072
auccacauccagaacucuc

SEQ ID NO: 275074 - RNA, 19 nt, Artificial Sequence
  Description of Artificial Sequence: Synthetic oligonucleotide
  Sense strand starting at position 3797 of SEQ ID NO: 3532
ucuggauguggaugguaau

SEQ ID NO: 275075 - RNA, 19 nt, Artificial Sequence
  Description of Artificial Sequence: Synthetic oligonucleotide
  Antisense strand to SEQ ID NO: 275074
auuaccauccacauccaga

SEQ ID NO: 275076 - RNA, 19 nt, Artificial Sequence
  Description of Artificial Sequence: Synthetic oligonucleotide
  Sense strand starting at position 188 of SEQ ID NO: 3533
cugagacuuggccaaggua

SEQ ID NO: 275077 - RNA, 19 nt, Artificial Sequence
  Description of Artificial Sequence: Synthetic oligonucleotide
  Antisense strand to SEQ ID NO: 275076
uaccuuggccaagucucag

SEQ ID NO: 275078 - RNA, 19 nt, Artificial Sequence
  Description of Artificial Sequence: Synthetic oligonucleotide
  Sense strand starting at position 292 of SEQ ID NO: 3533
aggugagaauccuagcuca

SEQ ID NO: 275079 - RNA, 19 nt, Artificial Sequence
  Description of Artificial Sequence: Synthetic oligonucleotide
  Antisense strand to SEQ ID NO: 275078
ugagcuaggauucucaccu

SEQ ID NO: 275080 - RNA, 19 nt, Artificial Sequence
  Description of Artificial Sequence: Synthetic oligonucleotide
  Sense strand starting at position 295 of SEQ ID NO: 3533
ugagaauccuagcucaguc

SEQ ID NO: 275081 - RNA, 19 nt, Artificial Sequence
  Description of Artificial Sequence: Synthetic oligonucleotide
  Antisense strand to SEQ ID NO: 275080
gacugagcuaggauucuca

SEQ ID NO: 275082 - RNA, 19 nt, Artificial Sequence
  Description of Artificial Sequence: Synthetic oligonucleotide
  Sense strand starting at position 412 of SEQ ID NO: 3533
guugauuucuuccuccuuu

SEQ ID NO: 275083 - RNA, 19 nt, Artificial Sequence
  Description of Artificial Sequence: Synthetic oligonucleotide
  Antisense strand to SEQ ID NO: 275082
aaaggaggaagaaaucaac

SEQ ID NO: 275084 - RNA, 19 nt, Artificial Sequence
  Description of Artificial Sequence: Synthetic oligonucleotide
  Sense strand starting at position 455 of SEQ ID NO: 3533
guauuaaggucagagucag

SEQ ID NO: 275085 - RNA, 19 nt, Artificial Sequence
  Description of Artificial Sequence: Synthetic oligonucleotide
  Antisense strand to SEQ ID NO: 275084
cugacucugaccuuaauac

SEQ ID NO: 275086 - RNA, 19 nt, Artificial Sequence
  Description of Artificial Sequence: Synthetic oligonucleotide
  Sense strand starting at position 495 of SEQ ID NO: 3533
acgccuucugaguacuacu

SEQ ID NO: 275087 - RNA, 19 nt, Artificial Sequence
  Description of Artificial Sequence: Synthetic oligonucleotide
  Antisense strand to SEQ ID NO: 275086
aguaguacucagaaggcgu

SEQ ID NO: 275088 - RNA, 19 nt, Artificial Sequence
  Description of Artificial Sequence: Synthetic oligonucleotide
  Sense strand starting at position 498 of SEQ ID NO: 3533
ccuucugaguacuacuaua

SEQ ID NO: 275089 - RNA, 19 nt, Artificial Sequence
  Description of Artificial Sequence: Synthetic oligonucleotide
  Antisense strand to SEQ ID NO: 275088
uauaguaguacucagaagg

SEQ ID NO: 275090 - RNA, 19 nt, Artificial Sequence
  Description of Artificial Sequence: Synthetic oligonucleotide
  Sense strand starting at position 530 of SEQ ID NO: 3533
cucacaugaucucaacgaa

SEQ ID NO: 275091 - RNA, 19 nt, Artificial Sequence
  Description of Artificial Sequence: Synthetic oligonucleotide
  Antisense strand to SEQ ID NO: 275090
uucguugagaucaugugag

SEQ ID NO: 275092 - RNA, 19 nt, Artificial Sequence
  Description of Artificial Sequence: Synthetic oligonucleotide
  Sense strand starting at position 533 of SEQ ID NO: 3533
acaugaucucaacgaacua

SEQ ID NO: 275093 - RNA, 19 nt, Artificial Sequence
  Description of Artificial Sequence: Synthetic oligonucleotide
  Antisense strand to SEQ ID NO: 275092
uaguucguugagaucaugu

SEQ ID NO: 275094 - RNA, 19 nt, Artificial Sequence
  Description of Artificial Sequence: Synthetic oligonucleotide
  Sense strand starting at position 1005 of SEQ ID NO: 3533
gagaaucccuguggaugga

SEQ ID NO: 275095 - RNA, 19 nt, Artificial Sequence
  Description of Artificial Sequence: Synthetic oligonucleotide
  Antisense strand to SEQ ID NO: 275094
uccauccacagggauucuc

SEQ ID NO: 275096 - RNA, 19 nt, Artificial Sequence
  Description of Artificial Sequence: Synthetic oligonucleotide
  Sense strand starting at position 1118 of SEQ ID NO: 3533
gggagugacugcagucuga

SEQ ID NO: 275097 - RNA, 19 nt, Artificial Sequence
  Description of Artificial Sequence: Synthetic oligonucleotide
  Antisense strand to SEQ ID NO: 275096
ucagacugcagucacuccc

SEQ ID NO: 275098 - RNA, 19 nt, Artificial Sequence
  Description of Artificial Sequence: Synthetic oligonucleotide
  Sense strand starting at position 1122 of SEQ ID NO: 3533
gugacugcagucugaagua

SEQ ID NO: 275099 - RNA, 19 nt, Artificial Sequence
  Description of Artificial Sequence: Synthetic oligonucleotide
  Antisense strand to SEQ ID NO: 275098
uacuucagacugcagucac

SEQ ID NO: 275100 - RNA, 19 nt, Artificial Sequence
  Description of Artificial Sequence: Synthetic oligonucleotide
  Sense strand starting at position 1258 of SEQ ID NO: 3533
gcuguucuuccucagacga

SEQ ID NO: 275101 - RNA, 19 nt, Artificial Sequence
  Description of Artificial Sequence: Synthetic oligonucleotide
  Antisense strand to SEQ ID NO: 275100
ucgucugaggaagaacagc

SEQ ID NO: 275102 - RNA, 19 nt, Artificial Sequence
  Description of Artificial Sequence: Synthetic oligonucleotide
  Sense strand starting at position 1260 of SEQ ID NO: 3533
uguucuuccucagacgaca

SEQ ID NO: 275103 - RNA, 19 nt, Artificial Sequence
  Description of Artificial Sequence: Synthetic oligonucleotide
  Antisense strand to SEQ ID NO: 275102
ugucgucugaggaagaaca

SEQ ID NO: 275104 - RNA, 19 nt, Artificial Sequence
  Description of Artificial Sequence: Synthetic oligonucleotide
  Sense strand starting at position 1292 of SEQ ID NO: 3533
ugcagugggacucacauaa

SEQ ID NO: 275105 - RNA, 19 nt, Artificial Sequence
  Description of Artificial Sequence: Synthetic oligonucleotide
  Antisense strand to SEQ ID NO: 275104
uuaugugagucccacugca

SEQ ID NO: 275106 - RNA, 19 nt, Artificial Sequence
  Description of Artificial Sequence: Synthetic oligonucleotide
  Sense strand starting at position 1439 of SEQ ID NO: 3533
ugcuuugcccaaggucaaa

SEQ ID NO: 275107 - RNA, 19 nt, Artificial Sequence
  Description of Artificial Sequence: Synthetic oligonucleotide
  Antisense strand to SEQ ID NO: 275106
uuugaccuugggcaaagca

SEQ ID NO: 275108 - RNA, 19 nt, Artificial Sequence
  Description of Artificial Sequence: Synthetic oligonucleotide
  Sense strand starting at position 1450 of SEQ ID NO: 3533
aggucaaacugcuaauuau

SEQ ID NO: 275109 - RNA, 19 nt, Artificial Sequence
  Description of Artificial Sequence: Synthetic oligonucleotide
  Antisense strand to SEQ ID NO: 275108
auaauuagcaguuugaccu

SEQ ID NO: 275110 - RNA, 19 nt, Artificial Sequence
  Description of Artificial Sequence: Synthetic oligonucleotide
  Sense strand starting at position 1665 of SEQ ID NO: 3533
acucuaagaucuugcagaa

SEQ ID NO: 275111 - RNA, 19 nt, Artificial Sequence
  Description of Artificial Sequence: Synthetic oligonucleotide
  Antisense strand to SEQ ID NO: 275110
uucugcaagaucuuagagu

SEQ ID NO: 275112 - RNA, 19 nt, Artificial Sequence
  Description of Artificial Sequence: Synthetic oligonucleotide
  Sense strand starting at position 2116 of SEQ ID NO: 3533
gccgcucugugauugguga

SEQ ID NO: 275113 - RNA, 19 nt, Artificial Sequence
  Description of Artificial Sequence: Synthetic oligonucleotide
  Antisense strand to SEQ ID NO: 275112
ucaccaaucacagagcggc

SEQ ID NO: 275114 - RNA, 19 nt, Artificial Sequence
  Description of Artificial Sequence: Synthetic oligonucleotide
  Sense strand starting at position 2266 of SEQ ID NO: 3533
ggcguuugggcccagagaa

SEQ ID NO: 275115 - RNA, 19 nt, Artificial Sequence
  Description of Artificial Sequence: Synthetic oligonucleotide
  Antisense strand to SEQ ID NO: 275114
uucucugggcccaaacgcc

SEQ ID NO: 275116 - RNA, 19 nt, Artificial Sequence
  Description of Artificial Sequence: Synthetic oligonucleotide
  Sense strand starting at position 2267 of SEQ ID NO: 3533
gcguuugggcccagagaag

SEQ ID NO: 275117 - RNA, 19 nt, Artificial Sequence
  Description of Artificial Sequence: Synthetic oligonucleotide
  Antisense strand to SEQ ID NO: 275116
cuucucugggcccaaacgc

SEQ ID NO: 275118 - RNA, 19 nt, Artificial Sequence
  Description of Artificial Sequence: Synthetic oligonucleotide
  Sense strand starting at position 2363 of SEQ ID NO: 3533
aagcuuccauggugaugaa

SEQ ID NO: 275119 - RNA, 19 nt, Artificial Sequence
  Description of Artificial Sequence: Synthetic oligonucleotide
  Antisense strand to SEQ ID NO: 275118
uucaucaccauggaagcuu

SEQ ID NO: 275120 - RNA, 19 nt, Artificial Sequence
  Description of Artificial Sequence: Synthetic oligonucleotide
  Sense strand starting at position 2381 of SEQ ID NO: 3533
agagauuaucgagguggua

SEQ ID NO: 275121 - RNA, 19 nt, Artificial Sequence
  Description of Artificial Sequence: Synthetic oligonucleotide
  Antisense strand to SEQ ID NO: 275120
uaccaccucgauaaucucu

SEQ ID NO: 275122 - RNA, 19 nt, Artificial Sequence
  Description of Artificial Sequence: Synthetic oligonucleotide
  Sense strand starting at position 2383 of SEQ ID NO: 3533
agauuaucgaggugguaga

SEQ ID NO: 275123 - RNA, 19 nt, Artificial Sequence
  Description of Artificial Sequence: Synthetic oligonucleotide
  Antisense strand to SEQ ID NO: 275122
ucuaccaccucgauaaucu

SEQ ID NO: 275124 - RNA, 19 nt, Artificial Sequence
  Description of Artificial Sequence: Synthetic oligonucleotide
  Sense strand starting at position 2384 of SEQ ID NO: 3533
gauuaucgaggugguagaa

SEQ ID NO: 275125 - RNA, 19 nt, Artificial Sequence
  Description of Artificial Sequence: Synthetic oligonucleotide
  Antisense strand to SEQ ID NO: 275124
uucuaccaccucgauaauc

SEQ ID NO: 275126 - RNA, 19 nt, Artificial Sequence
  Description of Artificial Sequence: Synthetic oligonucleotide
  Sense strand starting at position 2396 of SEQ ID NO: 3533
gguagaacuugaucccggu

SEQ ID NO: 275127 - RNA, 19 nt, Artificial Sequence
  Description of Artificial Sequence: Synthetic oligonucleotide
  Antisense strand to SEQ ID NO: 275126
accgggaucaaguucuacc

SEQ ID NO: 275128 - RNA, 19 nt, Artificial Sequence
  Description of Artificial Sequence: Synthetic oligonucleotide
  Sense strand starting at position 2517 of SEQ ID NO: 3533
acuggucauuccuaccgau

SEQ ID NO: 275129 - RNA, 19 nt, Artificial Sequence
  Description of Artificial Sequence: Synthetic oligonucleotide
  Antisense strand to SEQ ID NO: 275128
aucgguaggaaugaccagu

SEQ ID NO: 275130 - RNA, 19 nt, Artificial Sequence
  Description of Artificial Sequence: Synthetic oligonucleotide
  Sense strand starting at position 2520 of SEQ ID NO: 3533
ggucauuccuaccgauauc

SEQ ID NO: 275131 - RNA, 19 nt, Artificial Sequence
  Description of Artificial Sequence: Synthetic oligonucleotide
  Antisense strand to SEQ ID NO: 275130
gauaucgguaggaaugacc

SEQ ID NO: 275132 - RNA, 19 nt, Artificial Sequence
  Description of Artificial Sequence: Synthetic oligonucleotide
  Sense strand starting at position 2875 of SEQ ID NO: 3533
gauggaagauguggacuuu

SEQ ID NO: 275133 - RNA, 19 nt, Artificial Sequence
  Description of Artificial Sequence: Synthetic oligonucleotide
  Antisense strand to SEQ ID NO: 275132
aaaguccacaucuuccauc

SEQ ID NO: 275134 - RNA, 19 nt, Artificial Sequence
  Description of Artificial Sequence: Synthetic oligonucleotide
  Sense strand starting at position 2884 of SEQ ID NO: 3533
uguggacuuugaggaagaa

SEQ ID NO: 275135 - RNA, 19 nt, Artificial Sequence
  Description of Artificial Sequence: Synthetic oligonucleotide
  Antisense strand to SEQ ID NO: 275134
uucuuccucaaaguccaca

SEQ ID NO: 275136 - RNA, 19 nt, Artificial Sequence
  Description of Artificial Sequence: Synthetic oligonucleotide
  Sense strand starting at position 2920 of SEQ ID NO: 3533
cgaagagggcuggguucua

SEQ ID NO: 275137 - RNA, 19 nt, Artificial Sequence
  Description of Artificial Sequence: Synthetic oligonucleotide
  Antisense strand to SEQ ID NO: 275136
uagaacccagcccucuucg

SEQ ID NO: 275138 - RNA, 19 nt, Artificial Sequence
  Description of Artificial Sequence: Synthetic oligonucleotide
  Sense strand starting at position 3014 of SEQ ID NO: 3533
aggucuuugaggcgaucca

SEQ ID NO: 275139 - RNA, 19 nt, Artificial Sequence
  Description of Artificial Sequence: Synthetic oligonucleotide
  Antisense strand to SEQ ID NO: 275138
uggaucgccucaaagaccu

SEQ ID NO: 275140 - RNA, 19 nt, Artificial Sequence
  Description of Artificial Sequence: Synthetic oligonucleotide
  Sense strand starting at position 3053 of SEQ ID NO: 3533
gcguguaagcauuaaacau

SEQ ID NO: 275141 - RNA, 19 nt, Artificial Sequence
  Description of Artificial Sequence: Synthetic oligonucleotide
  Antisense strand to SEQ ID NO: 275140
auguuuaaugcuuacacgc

SEQ ID NO: 275142 - RNA, 19 nt, Artificial Sequence
  Description of Artificial Sequence: Synthetic oligonucleotide
  Sense strand starting at position 3147 of SEQ ID NO: 3533
gggaaaguguggcagaaug

SEQ ID NO: 275143 - RNA, 19 nt, Artificial Sequence
  Description of Artificial Sequence: Synthetic oligonucleotide
  Antisense strand to SEQ ID NO: 275142
cauucugccacacuuuccc

SEQ ID NO: 275144 - RNA, 19 nt, Artificial Sequence
  Description of Artificial Sequence: Synthetic oligonucleotide
  Sense strand starting at position 3165 of SEQ ID NO: 3533
ggaugauugcuuggcuucu

SEQ ID NO: 275145 - RNA, 19 nt, Artificial Sequence
  Description of Artificial Sequence: Synthetic oligonucleotide
  Antisense strand to SEQ ID NO: 275144
agaagccaagcaaucaucc

SEQ ID NO: 275146 - RNA, 19 nt, Artificial Sequence
  Description of Artificial Sequence: Synthetic oligonucleotide
  Sense strand starting at position 3181 of SEQ ID NO: 3533
ucuggcaucagucgagaca

SEQ ID NO: 275147 - RNA, 19 nt, Artificial Sequence
  Description of Artificial Sequence: Synthetic oligonucleotide
  Antisense strand to SEQ ID NO: 275146
ugucucgacugaugccaga

SEQ ID NO: 275148 - RNA, 19 nt, Artificial Sequence
  Description of Artificial Sequence: Synthetic oligonucleotide
  Sense strand starting at position 3200 of SEQ ID NO: 3533
cccucuacuuugccaguua

SEQ ID NO: 275149 - RNA, 19 nt, Artificial Sequence
  Description of Artificial Sequence: Synthetic oligonucleotide
  Antisense strand to SEQ ID NO: 275148
uaacuggcaaaguagaggg

SEQ ID NO: 275150 - RNA, 19 nt, Artificial Sequence
  Description of Artificial Sequence: Synthetic oligonucleotide
  Sense strand starting at position 3211 of SEQ ID NO: 3533
gccaguuaaccuugauuaa

SEQ ID NO: 275151 - RNA, 19 nt, Artificial Sequence
  Description of Artificial Sequence: Synthetic oligonucleotide
  Antisense strand to SEQ ID NO: 275150
uuaaucaagguuaacuggc

SEQ ID NO: 275152 - RNA, 19 nt, Artificial Sequence
  Description of Artificial Sequence: Synthetic oligonucleotide
  Sense strand starting at position 567 of SEQ ID NO: 3534
gagcaaugguaacuuacuu

SEQ ID NO: 275153 - RNA, 19 nt, Artificial Sequence
  Description of Artificial Sequence: Synthetic oligonucleotide
  Antisense strand to SEQ ID NO: 275152
aaguaaguuaccauugcuc

SEQ ID NO: 275154 - RNA, 19 nt, Artificial Sequence
  Description of Artificial Sequence: Synthetic oligonucleotide
  Sense strand starting at position 575 of SEQ ID NO: 3534
guaacuuacuuggcacauu

SEQ ID NO: 275155 - RNA, 19 nt, Artificial Sequence
  Description of Artificial Sequence: Synthetic oligonucleotide
  Antisense strand to SEQ ID NO: 275154
aaugugccaaguaaguuac

SEQ ID NO: 275156 - RNA, 19 nt, Artificial Sequence
  Description of Artificial Sequence: Synthetic oligonucleotide
  Sense strand starting at position 603 of SEQ ID NO: 3534
gcgaccaagguuuaggaua

SEQ ID NO: 275157 - RNA, 19 nt, Artificial Sequence
  Description of Artificial Sequence: Synthetic oligonucleotide
  Antisense strand to SEQ ID NO: 275156
uauccuaaaccuuggucgc

SEQ ID NO: 275158 - RNA, 19 nt, Artificial Sequence
  Description of Artificial Sequence: Synthetic oligonucleotide
  Sense strand starting at position 611 of SEQ ID NO: 3534
gguuuaggauauuagagau

SEQ ID NO: 275159 - RNA, 19 nt, Artificial Sequence
  Description of Artificial Sequence: Synthetic oligonucleotide
  Antisense strand to SEQ ID NO: 275158
aucucuaauauccuaaacc

SEQ ID NO: 275160 - RNA, 19 nt, Artificial Sequence
  Description of Artificial Sequence: Synthetic oligonucleotide
  Sense strand starting at position 720 of SEQ ID NO: 3534
cuuagacugugaguggaau

SEQ ID NO: 275161 - RNA, 19 nt, Artificial Sequence
  Description of Artificial Sequence: Synthetic oligonucleotide
  Antisense strand to SEQ ID NO: 275160
auuccacucacagucuaag

SEQ ID NO: 275162 - RNA, 19 nt, Artificial Sequence
  Description of Artificial Sequence: Synthetic oligonucleotide
  Sense strand starting at position 731 of SEQ ID NO: 3534
aguggaauccugcgccuga

SEQ ID NO: 275163 - RNA, 19 nt, Artificial Sequence
  Description of Artificial Sequence: Synthetic oligonucleotide
  Antisense strand to SEQ ID NO: 275162
ucaggcgcaggauuccacu

SEQ ID NO: 275164 - RNA, 19 nt, Artificial Sequence
  Description of Artificial Sequence: Synthetic oligonucleotide
  Sense strand starting at position 732 of SEQ ID NO: 3534
guggaauccugcgccugaa

SEQ ID NO: 275165 - RNA, 19 nt, Artificial Sequence
  Description of Artificial Sequence: Synthetic oligonucleotide
  Antisense strand to SEQ ID NO: 275164
uucaggcgcaggauuccac

SEQ ID NO: 275166 - RNA, 19 nt, Artificial Sequence
  Description of Artificial Sequence: Synthetic oligonucleotide
  Sense strand starting at position 785 of SEQ ID NO: 3534
gggugaauugcacaauguc

SEQ ID NO: 275167 - RNA, 19 nt, Artificial Sequence
  Description of Artificial Sequence: Synthetic oligonucleotide
  Antisense strand to SEQ ID NO: 275166
gacauugugcaauucaccc

SEQ ID NO: 275168 - RNA, 19 nt, Artificial Sequence
  Description of Artificial Sequence: Synthetic oligonucleotide
  Sense strand starting at position 795 of SEQ ID NO: 3534
cacaaugucugcucggaag

SEQ ID NO: 275169 - RNA, 19 nt, Artificial Sequence
  Description of Artificial Sequence: Synthetic oligonucleotide
  Antisense strand to SEQ ID NO: 275168
cuuccgagcagacauugug

SEQ ID NO: 275170 - RNA, 19 nt, Artificial Sequence
  Description of Artificial Sequence: Synthetic oligonucleotide
  Sense strand starting at position 817 of SEQ ID NO: 3534
gggaaauucccaggcuuag

SEQ ID NO: 275171 - RNA, 19 nt, Artificial Sequence
  Description of Artificial Sequence: Synthetic oligonucleotide
  Antisense strand to SEQ ID NO: 275170
cuaagccugggaauuuccc

SEQ ID NO: 275172 - RNA, 19 nt, Artificial Sequence
  Description of Artificial Sequence: Synthetic oligonucleotide
  Sense strand starting at position 910 of SEQ ID NO: 3534
gcuugagguccugacccau

SEQ ID NO: 275173 - RNA, 19 nt, Artificial Sequence
  Description of Artificial Sequence: Synthetic oligonucleotide
  Antisense strand to SEQ ID NO: 275172
augggucaggaccucaagc

SEQ ID NO: 275174 - RNA, 19 nt, Artificial Sequence
  Description of Artificial Sequence: Synthetic oligonucleotide
  Sense strand starting at position 1125 of SEQ ID NO: 3534
agagucaguugggucagau

SEQ ID NO: 275175 - RNA, 19 nt, Artificial Sequence
  Description of Artificial Sequence: Synthetic oligonucleotide
  Antisense strand to SEQ ID NO: 275174
aucugacccaacugacucu

SEQ ID NO: 275176 - RNA, 19 nt, Artificial Sequence
  Description of Artificial Sequence: Synthetic oligonucleotide
  Sense strand starting at position 1172 of SEQ ID NO: 3534
aggcuuugguuagaaggaa

SEQ ID NO: 275177 - RNA, 19 nt, Artificial Sequence
  Description of Artificial Sequence: Synthetic oligonucleotide
  Antisense strand to SEQ ID NO: 275176
uuccuucuaaccaaagccu

SEQ ID NO: 275178 - RNA, 19 nt, Artificial Sequence
  Description of Artificial Sequence: Synthetic oligonucleotide
  Sense strand starting at position 1218 of SEQ ID NO: 3534
gggacucuugcuugggaca

SEQ ID NO: 275179 - RNA, 19 nt, Artificial Sequence
  Description of Artificial Sequence: Synthetic oligonucleotide
  Antisense strand to SEQ ID NO: 275178
ugucccaagcaagaguccc

SEQ ID NO: 275180 - RNA, 19 nt, Artificial Sequence
  Description of Artificial Sequence: Synthetic oligonucleotide
  Sense strand starting at position 1465 of SEQ ID NO: 3534
guggcacuuugcuccagau

SEQ ID NO: 275181 - RNA, 19 nt, Artificial Sequence
  Description of Artificial Sequence: Synthetic oligonucleotide
  Antisense strand to SEQ ID NO: 275180
aucuggagcaaagugccac

SEQ ID NO: 275182 - RNA, 19 nt, Artificial Sequence
  Description of Artificial Sequence: Synthetic oligonucleotide
  Sense strand starting at position 1467 of SEQ ID NO: 3534
ggcacuuugcuccagaugu

SEQ ID NO: 275183 - RNA, 19 nt, Artificial Sequence
  Description of Artificial Sequence: Synthetic oligonucleotide
  Antisense strand to SEQ ID NO: 275182
acaucuggagcaaagugcc

SEQ ID NO: 275184 - RNA, 19 nt, Artificial Sequence
  Description of Artificial Sequence: Synthetic oligonucleotide
  Sense strand starting at position 2279 of SEQ ID NO: 3534
gcagaaaccugagagauca

SEQ ID NO: 275185 - RNA, 19 nt, Artificial Sequence
  Description of Artificial Sequence: Synthetic oligonucleotide
  Antisense strand to SEQ ID NO: 275184
ugaucucucagguuucugc

SEQ ID NO: 275186 - RNA, 19 nt, Artificial Sequence
  Description of Artificial Sequence: Synthetic oligonucleotide
  Sense strand starting at position 2387 of SEQ ID NO: 3534
ggaggaugcaagggucaaa

SEQ ID NO: 275187 - RNA, 19 nt, Artificial Sequence
  Description of Artificial Sequence: Synthetic oligonucleotide
  Antisense strand to SEQ ID NO: 275186
uuugacccuugcauccucc

SEQ ID NO: 275188 - RNA, 19 nt, Artificial Sequence
  Description of Artificial Sequence: Synthetic oligonucleotide
  Sense strand starting at position 2485 of SEQ ID NO: 3534
auaucuguuuaugcauaca

SEQ ID NO: 275189 - RNA, 19 nt, Artificial Sequence
  Description of Artificial Sequence: Synthetic oligonucleotide
  Antisense strand to SEQ ID NO: 275188
uguaugcauaaacagauau

SEQ ID NO: 275190 - RNA, 19 nt, Artificial Sequence
  Description of Artificial Sequence: Synthetic oligonucleotide
  Sense strand starting at position 2488 of SEQ ID NO: 3534
ucuguuuaugcauacacau

SEQ ID NO: 275191 - RNA, 19 nt, Artificial Sequence
  Description of Artificial Sequence: Synthetic oligonucleotide
  Antisense strand to SEQ ID NO: 275190
auguguaugcauaaacaga

SEQ ID NO: 275192 - RNA, 19 nt, Artificial Sequence
  Description of Artificial Sequence: Synthetic oligonucleotide
  Sense strand starting at position 2504 of SEQ ID NO: 3534
cauacauaugcgcgugaua

SEQ ID NO: 275193 - RNA, 19 nt, Artificial Sequence
  Description of Artificial Sequence: Synthetic oligonucleotide
  Antisense strand to SEQ ID NO: 275192
uaucacgcgcauauguaug

SEQ ID NO: 275194 - RNA, 19 nt, Artificial Sequence
  Description of Artificial Sequence: Synthetic oligonucleotide
  Sense strand starting at position 2506 of SEQ ID NO: 3534
uacauaugcgcgugauaaa

SEQ ID NO: 275195 - RNA, 19 nt, Artificial Sequence
  Description of Artificial Sequence: Synthetic oligonucleotide
  Antisense strand to SEQ ID NO: 275194
uuuaucacgcgcauaugua

SEQ ID NO: 275196 - RNA, 19 nt, Artificial Sequence
  Description of Artificial Sequence: Synthetic oligonucleotide
  Sense strand starting at position 2507 of SEQ ID NO: 3534
acauaugcgcgugauaaau

SEQ ID NO: 275197 - RNA, 19 nt, Artificial Sequence
  Description of Artificial Sequence: Synthetic oligonucleotide
  Antisense strand to SEQ ID NO: 275196
auuuaucacgcgcauaugu

SEQ ID NO: 275198 - RNA, 19 nt, Artificial Sequence
  Description of Artificial Sequence: Synthetic oligonucleotide
  Sense strand starting at position 2513 of SEQ ID NO: 3534
gcgcgugauaaauugcgaa

SEQ ID NO: 275199 - RNA, 19 nt, Artificial Sequence
  Description of Artificial Sequence: Synthetic oligonucleotide
  Antisense strand to SEQ ID NO: 275198
uucgcaauuuaucacgcgc

SEQ ID NO: 275200 - RNA, 19 nt, Artificial Sequence
  Description of Artificial Sequence: Synthetic oligonucleotide
  Sense strand starting at position 2613 of SEQ ID NO: 3534
aaguccugcccugaaggau

SEQ ID NO: 275201 - RNA, 19 nt, Artificial Sequence
  Description of Artificial Sequence: Synthetic oligonucleotide
  Antisense strand to SEQ ID NO: 275200
auccuucagggcaggacuu

SEQ ID NO: 275202 - RNA, 19 nt, Artificial Sequence
  Description of Artificial Sequence: Synthetic oligonucleotide
  Sense strand starting at position 2781 of SEQ ID NO: 3534
ccugauggauucuagaagu

SEQ ID NO: 275203 - RNA, 19 nt, Artificial Sequence
  Description of Artificial Sequence: Synthetic oligonucleotide
  Antisense strand to SEQ ID NO: 275202
acuucuagaauccaucagg

SEQ ID NO: 275204 - RNA, 19 nt, Artificial Sequence
  Description of Artificial Sequence: Synthetic oligonucleotide
  Sense strand starting at position 2799 of SEQ ID NO: 3534
uuguuaaggucccuggaau

SEQ ID NO: 275205 - RNA, 19 nt, Artificial Sequence
  Description of Artificial Sequence: Synthetic oligonucleotide
  Antisense strand to SEQ ID NO: 275204
auuccagggaccuuaacaa

SEQ ID NO: 275206 - RNA, 19 nt, Artificial Sequence
  Description of Artificial Sequence: Synthetic oligonucleotide
  Sense strand starting at position 2800 of SEQ ID NO: 3534
uguuaaggucccuggaaug

SEQ ID NO: 275207 - RNA, 19 nt, Artificial Sequence
  Description of Artificial Sequence: Synthetic oligonucleotide
  Antisense strand to SEQ ID NO: 275206
cauuccagggaccuuaaca

SEQ ID NO: 275208 - RNA, 19 nt, Artificial Sequence
  Description of Artificial Sequence: Synthetic oligonucleotide
  Sense strand starting at position 3310 of SEQ ID NO: 3534
gcggaucgcuaggucaaga

SEQ ID NO: 275209 - RNA, 19 nt, Artificial Sequence
  Description of Artificial Sequence: Synthetic oligonucleotide
  Antisense strand to SEQ ID NO: 275208
ucuugaccuagcgauccgc

SEQ ID NO: 275210 - RNA, 19 nt, Artificial Sequence
  Description of Artificial Sequence: Synthetic oligonucleotide
  Sense strand starting at position 3596 of SEQ ID NO: 3534
ggagaugggugagggauau

SEQ ID NO: 275211 - RNA, 19 nt, Artificial Sequence
  Description of Artificial Sequence: Synthetic oligonucleotide
  Antisense strand to SEQ ID NO: 275210
auaucccucacccaucucc

SEQ ID NO: 275212 - RNA, 19 nt, Artificial Sequence
  Description of Artificial Sequence: Synthetic oligonucleotide
  Sense strand starting at position 3602 of SEQ ID NO: 3534
gggugagggauauguuaaa

SEQ ID NO: 275213 - RNA, 19 nt, Artificial Sequence
  Description of Artificial Sequence: Synthetic oligonucleotide
  Antisense strand to SEQ ID NO: 275212
uuuaacauaucccucaccc

SEQ ID NO: 275214 - RNA, 19 nt, Artificial Sequence
  Description of Artificial Sequence: Synthetic oligonucleotide
  Sense strand starting at position 3650 of SEQ ID NO: 3534
accugaaucuggguuuaau

SEQ ID NO: 275215 - RNA, 19 nt, Artificial Sequence
  Description of Artificial Sequence: Synthetic oligonucleotide
  Antisense strand to SEQ ID NO: 275214
auuaaacccagauucaggu

SEQ ID NO: 275216 - RNA, 19 nt, Artificial Sequence
  Description of Artificial Sequence: Synthetic oligonucleotide
  Sense strand starting at position 3687 of SEQ ID NO: 3534
ccuggaguuucuucuaugu

SEQ ID NO: 275217 - RNA, 19 nt, Artificial Sequence
  Description of Artificial Sequence: Synthetic oligonucleotide
  Antisense strand to SEQ ID NO: 275216
acauagaagaaacuccagg

SEQ ID NO: 275218 - RNA, 19 nt, Artificial Sequence
  Description of Artificial Sequence: Synthetic oligonucleotide
  Sense strand starting at position 3691 of SEQ ID NO: 3534
gaguuucuucuaugugggu

SEQ ID NO: 275219 - RNA, 19 nt, Artificial Sequence
  Description of Artificial Sequence: Synthetic oligonucleotide
  Antisense strand to SEQ ID NO: 275218
acccacauagaagaaacuc

SEQ ID NO: 275220 - RNA, 19 nt, Artificial Sequence
  Description of Artificial Sequence: Synthetic oligonucleotide
  Sense strand starting at position 3692 of SEQ ID NO: 3534
aguuucuucuaugugggua

SEQ ID NO: 275221 - RNA, 19 nt, Artificial Sequence
  Description of Artificial Sequence: Synthetic oligonucleotide
  Antisense strand to SEQ ID NO: 275220
uacccacauagaagaaacu

SEQ ID NO: 275222 - RNA, 19 nt, Artificial Sequence
  Description of Artificial Sequence: Synthetic oligonucleotide
  Sense strand starting at position 3747 of SEQ ID NO: 3534
cugucuccucgccuguaau

SEQ ID NO: 275223 - RNA, 19 nt, Artificial Sequence
  Description of Artificial Sequence: Synthetic oligonucleotide
  Antisense strand to SEQ ID NO: 275222
auuacaggcgaggagacag

SEQ ID NO: 275224 - RNA, 19 nt, Artificial Sequence
  Description of Artificial Sequence: Synthetic oligonucleotide
  Sense strand starting at position 3761 of SEQ ID NO: 3534
guaauuagguugcuucuca

SEQ ID NO: 275225 - RNA, 19 nt, Artificial Sequence
  Description of Artificial Sequence: Synthetic oligonucleotide
  Antisense strand to SEQ ID NO: 275224
ugagaagcaaccuaauuac

SEQ ID NO: 275226 - RNA, 19 nt, Artificial Sequence
  Description of Artificial Sequence: Synthetic oligonucleotide
  Sense strand starting at position 3848 of SEQ ID NO: 3534
gcagaugacccuuguagga

SEQ ID NO: 275227 - RNA, 19 nt, Artificial Sequence
  Description of Artificial Sequence: Synthetic oligonucleotide
  Antisense strand to SEQ ID NO: 275226
uccuacaagggucaucugc

SEQ ID NO: 275228 - RNA, 19 nt, Artificial Sequence
  Description of Artificial Sequence: Synthetic oligonucleotide
  Sense strand starting at position 3936 of SEQ ID NO: 3534
agucauugugcacacaacu

SEQ ID NO: 275229 - RNA, 19 nt, Artificial Sequence
  Description of Artificial Sequence: Synthetic oligonucleotide
  Antisense strand to SEQ ID NO: 275228
aguugugugcacaaugacu

SEQ ID NO: 275230 - RNA, 19 nt, Artificial Sequence
  Description of Artificial Sequence: Synthetic oligonucleotide
  Sense strand starting at position 3947 of SEQ ID NO: 3534
acacaacuuucugcaggua

SEQ ID NO: 275231 - RNA, 19 nt, Artificial Sequence
  Description of Artificial Sequence: Synthetic oligonucleotide
  Antisense strand to SEQ ID NO: 275230
uaccugcagaaaguugugu

SEQ ID NO: 275232 - RNA, 19 nt, Artificial Sequence
  Description of Artificial Sequence: Synthetic oligonucleotide
  Sense strand starting at position 111 of SEQ ID NO: 3535
acucuaucauguucuauga

SEQ ID NO: 275233 - RNA, 19 nt, Artificial Sequence
  Description of Artificial Sequence: Synthetic oligonucleotide
  Antisense strand to SEQ ID NO: 275232
ucauagaacaugauagagu

SEQ ID NO: 275234 - RNA, 19 nt, Artificial Sequence
  Description of Artificial Sequence: Synthetic oligonucleotide
  Sense strand starting at position 269 of SEQ ID NO: 3535
ucgauucugguaugaaauu

SEQ ID NO: 275235 - RNA, 19 nt, Artificial Sequence
  Description of Artificial Sequence: Synthetic oligonucleotide
  Antisense strand to SEQ ID NO: 275234
aauuucauaccagaaucga

SEQ ID NO: 275236 - RNA, 19 nt, Artificial Sequence
  Description of Artificial Sequence: Synthetic oligonucleotide
  Sense strand starting at position 321 of SEQ ID NO: 3535
aaugucuaauucccggauu

SEQ ID NO: 275237 - RNA, 19 nt, Artificial Sequence
  Description of Artificial Sequence: Synthetic oligonucleotide
  Antisense strand to SEQ ID NO: 275236
aauccgggaauuagacauu

SEQ ID NO: 275238 - RNA, 19 nt, Artificial Sequence
  Description of Artificial Sequence: Synthetic oligonucleotide
  Sense strand starting at position 324 of SEQ ID NO: 3535
gucuaauucccggauugau

SEQ ID NO: 275239 - RNA, 19 nt, Artificial Sequence
  Description of Artificial Sequence: Synthetic oligonucleotide
  Antisense strand to SEQ ID NO: 275238
aucaauccgggaauuagac

SEQ ID NO: 275240 - RNA, 19 nt, Artificial Sequence
  Description of Artificial Sequence: Synthetic oligonucleotide
  Sense strand starting at position 415 of SEQ ID NO: 3535
ccgagaugugaucaccuga

SEQ ID NO: 275241 - RNA, 19 nt, Artificial Sequence
  Description of Artificial Sequence: Synthetic oligonucleotide
  Antisense strand to SEQ ID NO: 275240
ucaggugaucacaucucgg

SEQ ID NO: 275242 - RNA, 19 nt, Artificial Sequence
  Description of Artificial Sequence: Synthetic oligonucleotide
  Sense strand starting at position 739 of SEQ ID NO: 3535
gucucauaacaguauaaug

SEQ ID NO: 275243 - RNA, 19 nt, Artificial Sequence
  Description of Artificial Sequence: Synthetic oligonucleotide
  Antisense strand to SEQ ID NO: 275242
cauuauacuguuaugagac

SEQ ID NO: 275244 - RNA, 19 nt, Artificial Sequence
  Description of Artificial Sequence: Synthetic oligonucleotide
  Sense strand starting at position 776 of SEQ ID NO: 3535
gauauauggcacuggauac

SEQ ID NO: 275245 - RNA, 19 nt, Artificial Sequence
  Description of Artificial Sequence: Synthetic oligonucleotide
  Antisense strand to SEQ ID NO: 275244
guauccagugccauauauc

SEQ ID NO: 275246 - RNA, 19 nt, Artificial Sequence
  Description of Artificial Sequence: Synthetic oligonucleotide
  Sense strand starting at position 923 of SEQ ID NO: 3535
auaauauucgcacaaggac

SEQ ID NO: 275247 - RNA, 19 nt, Artificial Sequence
  Description of Artificial Sequence: Synthetic oligonucleotide
  Antisense strand to SEQ ID NO: 275246
guccuugugcgaauauuau

SEQ ID NO: 275248 - RNA, 19 nt, Artificial Sequence
  Description of Artificial Sequence: Synthetic oligonucleotide
  Sense strand starting at position 937 of SEQ ID NO: 3535
aggacuaagucaucugaca

SEQ ID NO: 275249 - RNA, 19 nt, Artificial Sequence
  Description of Artificial Sequence: Synthetic oligonucleotide
  Antisense strand to SEQ ID NO: 275248
ugucagaugacuuaguccu

SEQ ID NO: 275250 - RNA, 19 nt, Artificial Sequence
  Description of Artificial Sequence: Synthetic oligonucleotide
  Sense strand starting at position 1049 of SEQ ID NO: 3535
uggcaaucucuuuacucga

SEQ ID NO: 275251 - RNA, 19 nt, Artificial Sequence
  Description of Artificial Sequence: Synthetic oligonucleotide
  Antisense strand to SEQ ID NO: 275250
ucgaguaaagagauugcca

SEQ ID NO: 275252 - RNA, 19 nt, Artificial Sequence
  Description of Artificial Sequence: Synthetic oligonucleotide
  Sense strand starting at position 1300 of SEQ ID NO: 3535
gagagaaagccugguguau

SEQ ID NO: 275253 - RNA, 19 nt, Artificial Sequence
  Description of Artificial Sequence: Synthetic oligonucleotide
  Antisense strand to SEQ ID NO: 275252
auacaccaggcuuucucuc

SEQ ID NO: 275254 - RNA, 19 nt, Artificial Sequence
  Description of Artificial Sequence: Synthetic oligonucleotide
  Sense strand starting at position 2104 of SEQ ID NO: 3535
guccuaagauaugccugau

SEQ ID NO: 275255 - RNA, 19 nt, Artificial Sequence
  Description of Artificial Sequence: Synthetic oligonucleotide
  Antisense strand to SEQ ID NO: 275254
aucaggcauaucuuaggac

SEQ ID NO: 275256 - RNA, 19 nt, Artificial Sequence
  Description of Artificial Sequence: Synthetic oligonucleotide
  Sense strand starting at position 2107 of SEQ ID NO: 3535
cuaagauaugccugauggu

SEQ ID NO: 275257 - RNA, 19 nt, Artificial Sequence
  Description of Artificial Sequence: Synthetic oligonucleotide
  Antisense strand to SEQ ID NO: 275256
accaucaggcauaucuuag

SEQ ID NO: 275258 - RNA, 19 nt, Artificial Sequence
  Description of Artificial Sequence: Synthetic oligonucleotide
  Sense strand starting at position 2108 of SEQ ID NO: 3535
uaagauaugccugaugguc

SEQ ID NO: 275259 - RNA, 19 nt, Artificial Sequence
  Description of Artificial Sequence: Synthetic oligonucleotide
  Antisense strand to SEQ ID NO: 275258
gaccaucaggcauaucuua

SEQ ID NO: 275260 - RNA, 19 nt, Artificial Sequence
  Description of Artificial Sequence: Synthetic oligonucleotide
  Sense strand starting at position 2228 of SEQ ID NO: 3535
gcuguugugaaggaacauu

SEQ ID NO: 275261 - RNA, 19 nt, Artificial Sequence
  Description of Artificial Sequence: Synthetic oligonucleotide
  Antisense strand to SEQ ID NO: 275260
aauguuccuucacaacagc

SEQ ID NO: 275262 - RNA, 19 nt, Artificial Sequence
  Description of Artificial Sequence: Synthetic oligonucleotide
  Sense strand starting at position 2237 of SEQ ID NO: 3535
aaggaacauucugugcgau

SEQ ID NO: 275263 - RNA, 19 nt, Artificial Sequence
  Description of Artificial Sequence: Synthetic oligonucleotide
  Antisense strand to SEQ ID NO: 275262
aucgcacagaauguuccuu

SEQ ID NO: 275264 - RNA, 19 nt, Artificial Sequence
  Description of Artificial Sequence: Synthetic oligonucleotide
  Sense strand starting at position 2401 of SEQ ID NO: 3535
gcgguugccguagcugaaa

SEQ ID NO: 275265 - RNA, 19 nt, Artificial Sequence
  Description of Artificial Sequence: Synthetic oligonucleotide
  Antisense strand to SEQ ID NO: 275264
uuucagcuacggcaaccgc

SEQ ID NO: 275266 - RNA, 19 nt, Artificial Sequence
  Description of Artificial Sequence: Synthetic oligonucleotide
  Sense strand starting at position 2759 of SEQ ID NO: 3535
aggaauguuuccuauuuaa

SEQ ID NO: 275267 - RNA, 19 nt, Artificial Sequence
  Description of Artificial Sequence: Synthetic oligonucleotide
  Antisense strand to SEQ ID NO: 275266
uuaaauaggaaacauuccu

SEQ ID NO: 275268 - RNA, 19 nt, Artificial Sequence
  Description of Artificial Sequence: Synthetic oligonucleotide
  Sense strand starting at position 2924 of SEQ ID NO: 3535
cugguauucccagggaugu

SEQ ID NO: 275269 - RNA, 19 nt, Artificial Sequence
  Description of Artificial Sequence: Synthetic oligonucleotide
  Antisense strand to SEQ ID NO: 275268
acaucccugggaauaccag

SEQ ID NO: 275270 - RNA, 19 nt, Artificial Sequence
  Description of Artificial Sequence: Synthetic oligonucleotide
  Sense strand starting at position 2925 of SEQ ID NO: 3535
ugguauucccagggaugug

SEQ ID NO: 275271 - RNA, 19 nt, Artificial Sequence
  Description of Artificial Sequence: Synthetic oligonucleotide
  Antisense strand to SEQ ID NO: 275270
cacaucccugggaauacca

SEQ ID NO: 275272 - RNA, 19 nt, Artificial Sequence
  Description of Artificial Sequence: Synthetic oligonucleotide
  Sense strand starting at position 2926 of SEQ ID NO: 3535
gguauucccagggauguga

SEQ ID NO: 275273 - RNA, 19 nt, Artificial Sequence
  Description of Artificial Sequence: Synthetic oligonucleotide
  Antisense strand to SEQ ID NO: 275272
ucacaucccugggaauacc

SEQ ID NO: 275274 - RNA, 19 nt, Artificial Sequence
  Description of Artificial Sequence: Synthetic oligonucleotide
  Sense strand starting at position 2928 of SEQ ID NO: 3535
uauucccagggaugugaau

SEQ ID NO: 275275 - RNA, 19 nt, Artificial Sequence
  Description of Artificial Sequence: Synthetic oligonucleotide
  Antisense strand to SEQ ID NO: 275274
auucacaucccugggaaua

SEQ ID NO: 275276 - RNA, 19 nt, Artificial Sequence
  Description of Artificial Sequence: Synthetic oligonucleotide
  Sense strand starting at position 3127 of SEQ ID NO: 3535
agaagcuaacuaggucaaa

SEQ ID NO: 275277 - RNA, 19 nt, Artificial Sequence
  Description of Artificial Sequence: Synthetic oligonucleotide
  Antisense strand to SEQ ID NO: 275276
uuugaccuaguuagcuucu

SEQ ID NO: 275278 - RNA, 19 nt, Artificial Sequence
  Description of Artificial Sequence: Synthetic oligonucleotide
  Sense strand starting at position 3182 of SEQ ID NO: 3535
caugcagaagcucagugau

SEQ ID NO: 275279 - RNA, 19 nt, Artificial Sequence
  Description of Artificial Sequence: Synthetic oligonucleotide
  Antisense strand to SEQ ID NO: 275278
aucacugagcuucugcaug

SEQ ID NO: 275280 - RNA, 19 nt, Artificial Sequence
  Description of Artificial Sequence: Synthetic oligonucleotide
  Sense strand starting at position 3190 of SEQ ID NO: 3535
agcucagugaugggaagaa

SEQ ID NO: 275281 - RNA, 19 nt, Artificial Sequence
  Description of Artificial Sequence: Synthetic oligonucleotide
  Antisense strand to SEQ ID NO: 275280
uucuucccaucacugagcu

SEQ ID NO: 275282 - RNA, 19 nt, Artificial Sequence
  Description of Artificial Sequence: Synthetic oligonucleotide
  Sense strand starting at position 3202 of SEQ ID NO: 3535
ggaagaaguuuaucuccuu

SEQ ID NO: 275283 - RNA, 19 nt, Artificial Sequence
  Description of Artificial Sequence: Synthetic oligonucleotide
  Antisense strand to SEQ ID NO: 275282
aaggagauaaacuucuucc

SEQ ID NO: 275284 - RNA, 19 nt, Artificial Sequence
  Description of Artificial Sequence: Synthetic oligonucleotide
  Sense strand starting at position 3205 of SEQ ID NO: 3535
agaaguuuaucuccuuaag

SEQ ID NO: 275285 - RNA, 19 nt, Artificial Sequence
  Description of Artificial Sequence: Synthetic oligonucleotide
  Antisense strand to SEQ ID NO: 275284
cuuaaggagauaaacuucu

SEQ ID NO: 275286 - RNA, 19 nt, Artificial Sequence
  Description of Artificial Sequence: Synthetic oligonucleotide
  Sense strand starting at position 3247 of SEQ ID NO: 3535
cagacauugcaagaucugu

SEQ ID NO: 275287 - RNA, 19 nt, Artificial Sequence
  Description of Artificial Sequence: Synthetic oligonucleotide
  Antisense strand to SEQ ID NO: 275286
acagaucuugcaaugucug

SEQ ID NO: 275288 - RNA, 19 nt, Artificial Sequence
  Description of Artificial Sequence: Synthetic oligonucleotide
  Sense strand starting at position 3253 of SEQ ID NO: 3535
uugcaagaucuguaggaca

SEQ ID NO: 275289 - RNA, 19 nt, Artificial Sequence
  Description of Artificial Sequence: Synthetic oligonucleotide
  Antisense strand to SEQ ID NO: 275288
uguccuacagaucuugcaa

SEQ ID NO: 275290 - RNA, 19 nt, Artificial Sequence
  Description of Artificial Sequence: Synthetic oligonucleotide
  Sense strand starting at position 3255 of SEQ ID NO: 3535
gcaagaucuguaggacauu

SEQ ID NO: 275291 - RNA, 19 nt, Artificial Sequence
  Description of Artificial Sequence: Synthetic oligonucleotide
  Antisense strand to SEQ ID NO: 275290
aauguccuacagaucuugc

SEQ ID NO: 275292 - RNA, 19 nt, Artificial Sequence
  Description of Artificial Sequence: Synthetic oligonucleotide
  Sense strand starting at position 3337 of SEQ ID NO: 3535
uggaaagauuagguuugca

SEQ ID NO: 275293 - RNA, 19 nt, Artificial Sequence
  Description of Artificial Sequence: Synthetic oligonucleotide
  Antisense strand to SEQ ID NO: 275292
ugcaaaccuaaucuuucca

SEQ ID NO: 275294 - RNA, 19 nt, Artificial Sequence
  Description of Artificial Sequence: Synthetic oligonucleotide
  Sense strand starting at position 3475 of SEQ ID NO: 3535
uuaucagaucaggguugua

SEQ ID NO: 275295 - RNA, 19 nt, Artificial Sequence
  Description of Artificial Sequence: Synthetic oligonucleotide
  Antisense strand to SEQ ID NO: 275294
uacaacccugaucugauaa

SEQ ID NO: 275296 - RNA, 19 nt, Artificial Sequence
  Description of Artificial Sequence: Synthetic oligonucleotide
  Sense strand starting at position 3478 of SEQ ID NO: 3535
ucagaucaggguuguaaua

SEQ ID NO: 275297 - RNA, 19 nt, Artificial Sequence
  Description of Artificial Sequence: Synthetic oligonucleotide
  Antisense strand to SEQ ID NO: 275296
uauuacaacccugaucuga

SEQ ID NO: 275298 - RNA, 19 nt, Artificial Sequence
  Description of Artificial Sequence: Synthetic oligonucleotide
  Sense strand starting at position 3488 of SEQ ID NO: 3535
guuguaauagacuacaagu

SEQ ID NO: 275299 - RNA, 19 nt, Artificial Sequence
  Description of Artificial Sequence: Synthetic oligonucleotide
  Antisense strand to SEQ ID NO: 275298
acuuguagucuauuacaac

SEQ ID NO: 275300 - RNA, 19 nt, Artificial Sequence
  Description of Artificial Sequence: Synthetic oligonucleotide
  Sense strand starting at position 3543 of SEQ ID NO: 3535
agagaaucugcuuggagga

SEQ ID NO: 275301 - RNA, 19 nt, Artificial Sequence
  Description of Artificial Sequence: Synthetic oligonucleotide
  Antisense strand to SEQ ID NO: 275300
uccuccaagcagauucucu

SEQ ID NO: 275302 - RNA, 19 nt, Artificial Sequence
  Description of Artificial Sequence: Synthetic oligonucleotide
  Sense strand starting at position 3603 of SEQ ID NO: 3535
gacuguuaagccuagaaua

SEQ ID NO: 275303 - RNA, 19 nt, Artificial Sequence
  Description of Artificial Sequence: Synthetic oligonucleotide
  Antisense strand to SEQ ID NO: 275302
uauucuaggcuuaacaguc

SEQ ID NO: 275304 - RNA, 19 nt, Artificial Sequence
  Description of Artificial Sequence: Synthetic oligonucleotide
  Sense strand starting at position 3605 of SEQ ID NO: 3535
cuguuaagccuagaauaga

SEQ ID NO: 275305 - RNA, 19 nt, Artificial Sequence
  Description of Artificial Sequence: Synthetic oligonucleotide
  Antisense strand to SEQ ID NO: 275304
ucuauucuaggcuuaacag

SEQ ID NO: 275306 - RNA, 19 nt, Artificial Sequence
  Description of Artificial Sequence: Synthetic oligonucleotide
  Sense strand starting at position 3648 of SEQ ID NO: 3535
uuaaguuucccugaaugac

SEQ ID NO: 275307 - RNA, 19 nt, Artificial Sequence
  Description of Artificial Sequence: Synthetic oligonucleotide
  Antisense strand to SEQ ID NO: 275306
gucauucagggaaacuuaa

SEQ ID NO: 275308 - RNA, 19 nt, Artificial Sequence
  Description of Artificial Sequence: Synthetic oligonucleotide
  Sense strand starting at position 3651 of SEQ ID NO: 3535
aguuucccugaaugacaaa

SEQ ID NO: 275309 - RNA, 19 nt, Artificial Sequence
  Description of Artificial Sequence: Synthetic oligonucleotide
  Antisense strand to SEQ ID NO: 275308
uuugucauucagggaaacu

SEQ ID NO: 275310 - RNA, 19 nt, Artificial Sequence
  Description of Artificial Sequence: Synthetic oligonucleotide
  Sense strand starting at position 3802 of SEQ ID NO: 3535
cggagugcuguggugcaaa

SEQ ID NO: 275311 - RNA, 19 nt, Artificial Sequence
  Description of Artificial Sequence: Synthetic oligonucleotide
  Antisense strand to SEQ ID NO: 275310
uuugcaccacagcacuccg

SEQ ID NO: 275312 - RNA, 19 nt, Artificial Sequence
  Description of Artificial Sequence: Synthetic oligonucleotide
  Sense strand starting at position 289 of SEQ ID NO: 3536
uucuaaaggguuuguaaac

SEQ ID NO: 275313 - RNA, 19 nt, Artificial Sequence
  Description of Artificial Sequence: Synthetic oligonucleotide
  Antisense strand to SEQ ID NO: 275312
guuuacaaacccuuuagaa

SEQ ID NO: 275314 - RNA, 19 nt, Artificial Sequence
  Description of Artificial Sequence: Synthetic oligonucleotide
  Sense strand starting at position 290 of SEQ ID NO: 3536
ucuaaaggguuuguaaaca

SEQ ID NO: 275315 - RNA, 19 nt, Artificial Sequence
  Description of Artificial Sequence: Synthetic oligonucleotide
  Antisense strand to SEQ ID NO: 275314
uguuuacaaacccuuuaga

SEQ ID NO: 275316 - RNA, 19 nt, Artificial Sequence
  Description of Artificial Sequence: Synthetic oligonucleotide
  Sense strand starting at position 441 of SEQ ID NO: 3536
gucaacuacuuaucaaagu

SEQ ID NO: 275317 - RNA, 19 nt, Artificial Sequence
  Description of Artificial Sequence: Synthetic oligonucleotide
  Antisense strand to SEQ ID NO: 275316
acuuugauaaguaguugac

SEQ ID NO: 275318 - RNA, 19 nt, Artificial Sequence
  Description of Artificial Sequence: Synthetic oligonucleotide
  Sense strand starting at position 464 of SEQ ID NO: 3536
gugcgagaccuggauucaa

SEQ ID NO: 275319 - RNA, 19 nt, Artificial Sequence
  Description of Artificial Sequence: Synthetic oligonucleotide
  Antisense strand to SEQ ID NO: 275318
uugaauccaggucucgcac

SEQ ID NO: 275320 - RNA, 19 nt, Artificial Sequence
  Description of Artificial Sequence: Synthetic oligonucleotide
  Sense strand starting at position 555 of SEQ ID NO: 3536
ugaaguuugcauuagcaau

SEQ ID NO: 275321 - RNA, 19 nt, Artificial Sequence
  Description of Artificial Sequence: Synthetic oligonucleotide
  Antisense strand to SEQ ID NO: 275320
auugcuaaugcaaacuuca

SEQ ID NO: 275322 - RNA, 19 nt, Artificial Sequence
  Description of Artificial Sequence: Synthetic oligonucleotide
  Sense strand starting at position 772 of SEQ ID NO: 3536
guaccuuuacgacagguuu

SEQ ID NO: 275323 - RNA, 19 nt, Artificial Sequence
  Description of Artificial Sequence: Synthetic oligonucleotide
  Antisense strand to SEQ ID NO: 275322
aaaccugucguaaagguac

SEQ ID NO: 275324 - RNA, 19 nt, Artificial Sequence
  Description of Artificial Sequence: Synthetic oligonucleotide
  Sense strand starting at position 804 of SEQ ID NO: 3536
ggaucauauaacuggcguu

SEQ ID NO: 275325 - RNA, 19 nt, Artificial Sequence
  Description of Artificial Sequence: Synthetic oligonucleotide
  Antisense strand to SEQ ID NO: 275324
aacgccaguuauaugaucc

SEQ ID NO: 275326 - RNA, 19 nt, Artificial Sequence
  Description of Artificial Sequence: Synthetic oligonucleotide
  Sense strand starting at position 846 of SEQ ID NO: 3536
cuccuaacccagggucaua

SEQ ID NO: 275327 - RNA, 19 nt, Artificial Sequence
  Description of Artificial Sequence: Synthetic oligonucleotide
  Antisense strand to SEQ ID NO: 275326
uaugacccuggguuaggag

SEQ ID NO: 275328 - RNA, 19 nt, Artificial Sequence
  Description of Artificial Sequence: Synthetic oligonucleotide
  Sense strand starting at position 857 of SEQ ID NO: 3536
gggucauaguggucacacu

SEQ ID NO: 275329 - RNA, 19 nt, Artificial Sequence
  Description of Artificial Sequence: Synthetic oligonucleotide
  Antisense strand to SEQ ID NO: 275328
agugugaccacuaugaccc

SEQ ID NO: 275330 - RNA, 19 nt, Artificial Sequence
  Description of Artificial Sequence: Synthetic oligonucleotide
  Sense strand starting at position 858 of SEQ ID NO: 3536
ggucauaguggucacacuu

SEQ ID NO: 275331 - RNA, 19 nt, Artificial Sequence
  Description of Artificial Sequence: Synthetic oligonucleotide
  Antisense strand to SEQ ID NO: 275330
aagugugaccacuaugacc

SEQ ID NO: 275332 - RNA, 19 nt, Artificial Sequence
  Description of Artificial Sequence: Synthetic oligonucleotide
  Sense strand starting at position 889 of SEQ ID NO: 3536
uagauuggaugacaugaua

SEQ ID NO: 275333 - RNA, 19 nt, Artificial Sequence
  Description of Artificial Sequence: Synthetic oligonucleotide
  Antisense strand to SEQ ID NO: 275332
uaucaugucauccaaucua

SEQ ID NO: 275334 - RNA, 19 nt, Artificial Sequence
  Description of Artificial Sequence: Synthetic oligonucleotide
  Sense strand starting at position 1431 of SEQ ID NO: 3536
ucguuauuccuagguggaa

SEQ ID NO: 275335 - RNA, 19 nt, Artificial Sequence
  Description of Artificial Sequence: Synthetic oligonucleotide
  Antisense strand to SEQ ID NO: 275334
uuccaccuaggaauaacga

SEQ ID NO: 275336 - RNA, 19 nt, Artificial Sequence
  Description of Artificial Sequence: Synthetic oligonucleotide
  Sense strand starting at position 1432 of SEQ ID NO: 3536
cguuauuccuagguggaau

SEQ ID NO: 275337 - RNA, 19 nt, Artificial Sequence
  Description of Artificial Sequence: Synthetic oligonucleotide
  Antisense strand to SEQ ID NO: 275336
auuccaccuaggaauaacg

SEQ ID NO: 275338 - RNA, 19 nt, Artificial Sequence
  Description of Artificial Sequence: Synthetic oligonucleotide
  Sense strand starting at position 1433 of SEQ ID NO: 3536
guuauuccuagguggaaug

SEQ ID NO: 275339 - RNA, 19 nt, Artificial Sequence
  Description of Artificial Sequence: Synthetic oligonucleotide
  Antisense strand to SEQ ID NO: 275338
cauuccaccuaggaauaac

SEQ ID NO: 275340 - RNA, 19 nt, Artificial Sequence
  Description of Artificial Sequence: Synthetic oligonucleotide
  Sense strand starting at position 1443 of SEQ ID NO: 3536
gguggaauguuucccacuu

SEQ ID NO: 275341 - RNA, 19 nt, Artificial Sequence
  Description of Artificial Sequence: Synthetic oligonucleotide
  Antisense strand to SEQ ID NO: 275340
aagugggaaacauuccacc

SEQ ID NO: 275342 - RNA, 19 nt, Artificial Sequence
  Description of Artificial Sequence: Synthetic oligonucleotide
  Sense strand starting at position 1444 of SEQ ID NO: 3536
guggaauguuucccacuua

SEQ ID NO: 275343 - RNA, 19 nt, Artificial Sequence
  Description of Artificial Sequence: Synthetic oligonucleotide
  Antisense strand to SEQ ID NO: 275342
uaagugggaaacauuccac

SEQ ID NO: 275344 - RNA, 19 nt, Artificial Sequence
  Description of Artificial Sequence: Synthetic oligonucleotide
  Sense strand starting at position 1482 of SEQ ID NO: 3536
aaguaaagagaucggaagu

SEQ ID NO: 275345 - RNA, 19 nt, Artificial Sequence
  Description of Artificial Sequence: Synthetic oligonucleotide
  Antisense strand to SEQ ID NO: 275344
acuuccgaucucuuuacuu

SEQ ID NO: 275346 - RNA, 19 nt, Artificial Sequence
  Description of Artificial Sequence: Synthetic oligonucleotide
  Sense strand starting at position 1667 of SEQ ID NO: 3536
ggguuucuacccugggaga

SEQ ID NO: 275347 - RNA, 19 nt, Artificial Sequence
  Description of Artificial Sequence: Synthetic oligonucleotide
  Antisense strand to SEQ ID NO: 275346
ucucccaggguagaaaccc

SEQ ID NO: 275348 - RNA, 19 nt, Artificial Sequence
  Description of Artificial Sequence: Synthetic oligonucleotide
  Sense strand starting at position 1668 of SEQ ID NO: 3536
gguuucuacccugggagau

SEQ ID NO: 275349 - RNA, 19 nt, Artificial Sequence
  Description of Artificial Sequence: Synthetic oligonucleotide
  Antisense strand to SEQ ID NO: 275348
aucucccaggguagaaacc

SEQ ID NO: 275350 - RNA, 19 nt, Artificial Sequence
  Description of Artificial Sequence: Synthetic oligonucleotide
  Sense strand starting at position 1669 of SEQ ID NO: 3536
guuucuacccugggagaug

SEQ ID NO: 275351 - RNA, 19 nt, Artificial Sequence
  Description of Artificial Sequence: Synthetic oligonucleotide
  Antisense strand to SEQ ID NO: 275350
caucucccaggguagaaac

SEQ ID NO: 275352 - RNA, 19 nt, Artificial Sequence
  Description of Artificial Sequence: Synthetic oligonucleotide
  Sense strand starting at position 1680 of SEQ ID NO: 3536
gggagaugaauacgcucaa

SEQ ID NO: 275353 - RNA, 19 nt, Artificial Sequence
  Description of Artificial Sequence: Synthetic oligonucleotide
  Antisense strand to SEQ ID NO: 275352
uugagcguauucaucuccc

SEQ ID NO: 275354 - RNA, 19 nt, Artificial Sequence
  Description of Artificial Sequence: Synthetic oligonucleotide
  Sense strand starting at position 1684 of SEQ ID NO: 3536
gaugaauacgcucaagcug

SEQ ID NO: 275355 - RNA, 19 nt, Artificial Sequence
  Description of Artificial Sequence: Synthetic oligonucleotide
  Antisense strand to SEQ ID NO: 275354
cagcuugagcguauucauc

SEQ ID NO: 275356 - RNA, 19 nt, Artificial Sequence
  Description of Artificial Sequence: Synthetic oligonucleotide
  Sense strand starting at position 2068 of SEQ ID NO: 3536
aaccuaucagaacgcgauu

SEQ ID NO: 275357 - RNA, 19 nt, Artificial Sequence
  Description of Artificial Sequence: Synthetic oligonucleotide
  Antisense strand to SEQ ID NO: 275356
aaucgcguucugauagguu

SEQ ID NO: 275358 - RNA, 19 nt, Artificial Sequence
  Description of Artificial Sequence: Synthetic oligonucleotide
  Sense strand starting at position 2070 of SEQ ID NO: 3536
ccuaucagaacgcgauuau

SEQ ID NO: 275359 - RNA, 19 nt, Artificial Sequence
  Description of Artificial Sequence: Synthetic oligonucleotide
  Antisense strand to SEQ ID NO: 275358
auaaucgcguucugauagg

SEQ ID NO: 275360 - RNA, 19 nt, Artificial Sequence
  Description of Artificial Sequence: Synthetic oligonucleotide
  Sense strand starting at position 2071 of SEQ ID NO: 3536
cuaucagaacgcgauuaug

SEQ ID NO: 275361 - RNA, 19 nt, Artificial Sequence
  Description of Artificial Sequence: Synthetic oligonucleotide
  Antisense strand to SEQ ID NO: 275360
cauaaucgcguucugauag

SEQ ID NO: 275362 - RNA, 19 nt, Artificial Sequence
  Description of Artificial Sequence: Synthetic oligonucleotide
  Sense strand starting at position 2195 of SEQ ID NO: 3536
aauguuuaauaugcagagu

SEQ ID NO: 275363 - RNA, 19 nt, Artificial Sequence
  Description of Artificial Sequence: Synthetic oligonucleotide
  Antisense strand to SEQ ID NO: 275362
acucugcauauuaaacauu

SEQ ID NO: 275364 - RNA, 19 nt, Artificial Sequence
  Description of Artificial Sequence: Synthetic oligonucleotide
  Sense strand starting at position 2198 of SEQ ID NO: 3536
guuuaauaugcagaguaaa

SEQ ID NO: 275365 - RNA, 19 nt, Artificial Sequence
  Description of Artificial Sequence: Synthetic oligonucleotide
  Antisense strand to SEQ ID NO: 275364
uuuacucugcauauuaaac

SEQ ID NO: 275366 - RNA, 19 nt, Artificial Sequence
  Description of Artificial Sequence: Synthetic oligonucleotide
  Sense strand starting at position 2381 of SEQ ID NO: 3536
acuacagcgauuuguguua

SEQ ID NO: 275367 - RNA, 19 nt, Artificial Sequence
  Description of Artificial Sequence: Synthetic oligonucleotide
  Antisense strand to SEQ ID NO: 275366
uaacacaaaucgcuguagu

SEQ ID NO: 275368 - RNA, 19 nt, Artificial Sequence
  Description of Artificial Sequence: Synthetic oligonucleotide
  Sense strand starting at position 2447 of SEQ ID NO: 3536
ucuuuauugucacuucuga

SEQ ID NO: 275369 - RNA, 19 nt, Artificial Sequence
  Description of Artificial Sequence: Synthetic oligonucleotide
  Antisense strand to SEQ ID NO: 275368
ucagaagugacaauaaaga

SEQ ID NO: 275370 - RNA, 19 nt, Artificial Sequence
  Description of Artificial Sequence: Synthetic oligonucleotide
  Sense strand starting at position 3399 of SEQ ID NO: 3536
aaauguugauccgugauga

SEQ ID NO: 275371 - RNA, 19 nt, Artificial Sequence
  Description of Artificial Sequence: Synthetic oligonucleotide
  Antisense strand to SEQ ID NO: 275370
ucaucacggaucaacauuu

SEQ ID NO: 275372 - RNA, 19 nt, Artificial Sequence
  Description of Artificial Sequence: Synthetic oligonucleotide
  Sense strand starting at position 3400 of SEQ ID NO: 3536
aauguugauccgugaugau

SEQ ID NO: 275373 - RNA, 19 nt, Artificial Sequence
  Description of Artificial Sequence: Synthetic oligonucleotide
  Antisense strand to SEQ ID NO: 275372
aucaucacggaucaacauu

SEQ ID NO: 275374 - RNA, 19 nt, Artificial Sequence
  Description of Artificial Sequence: Synthetic oligonucleotide
  Sense strand starting at position 3520 of SEQ ID NO: 3536
ggauuuccauuccaauaga

SEQ ID NO: 275375 - RNA, 19 nt, Artificial Sequence
  Description of Artificial Sequence: Synthetic oligonucleotide
  Antisense strand to SEQ ID NO: 275374
ucuauuggaauggaaaucc

SEQ ID NO: 275376 - RNA, 19 nt, Artificial Sequence
  Description of Artificial Sequence: Synthetic oligonucleotide
  Sense strand starting at position 3780 of SEQ ID NO: 3536
ugggcaguauugccuaaua

SEQ ID NO: 275377 - RNA, 19 nt, Artificial Sequence
  Description of Artificial Sequence: Synthetic oligonucleotide
  Antisense strand to SEQ ID NO: 275376
uauuaggcaauacugccca

SEQ ID NO: 275378 - RNA, 19 nt, Artificial Sequence
  Description of Artificial Sequence: Synthetic oligonucleotide
  Sense strand starting at position 3782 of SEQ ID NO: 3536
ggcaguauugccuaauagu

SEQ ID NO: 275379 - RNA, 19 nt, Artificial Sequence
  Description of Artificial Sequence: Synthetic oligonucleotide
  Antisense strand to SEQ ID NO: 275378
acuauuaggcaauacugcc

SEQ ID NO: 275380 - RNA, 19 nt, Artificial Sequence
  Description of Artificial Sequence: Synthetic oligonucleotide
  Sense strand starting at position 3790 of SEQ ID NO: 3536
ugccuaauaguuuagagca

SEQ ID NO: 275381 - RNA, 19 nt, Artificial Sequence
  Description of Artificial Sequence: Synthetic oligonucleotide
  Antisense strand to SEQ ID NO: 275380
ugcucuaaacuauuaggca

SEQ ID NO: 275382 - RNA, 19 nt, Artificial Sequence
  Description of Artificial Sequence: Synthetic oligonucleotide
  Sense strand starting at position 3797 of SEQ ID NO: 3536
uaguuuagagcauagacuu

SEQ ID NO: 275383 - RNA, 19 nt, Artificial Sequence
  Description of Artificial Sequence: Synthetic oligonucleotide
  Antisense strand to SEQ ID NO: 275382
aagucuaugcucuaaacua

SEQ ID NO: 275384 - RNA, 19 nt, Artificial Sequence
  Description of Artificial Sequence: Synthetic oligonucleotide
  Sense strand starting at position 3803 of SEQ ID NO: 3536
agagcauagacuuggaguu

SEQ ID NO: 275385 - RNA, 19 nt, Artificial Sequence
  Description of Artificial Sequence: Synthetic oligonucleotide
  Antisense strand to SEQ ID NO: 275384
aacuccaagucuaugcucu

SEQ ID NO: 275386 - RNA, 19 nt, Artificial Sequence
  Description of Artificial Sequence: Synthetic oligonucleotide
  Sense strand starting at position 3804 of SEQ ID NO: 3536
gagcauagacuuggaguua

SEQ ID NO: 275387 - RNA, 19 nt, Artificial Sequence
  Description of Artificial Sequence: Synthetic oligonucleotide
  Antisense strand to SEQ ID NO: 275386
uaacuccaagucuaugcuc

SEQ ID NO: 275388 - RNA, 19 nt, Artificial Sequence
  Description of Artificial Sequence: Synthetic oligonucleotide
  Sense strand starting at position 3836 of SEQ ID NO: 3536
ccaaucuugucucuguuaa

SEQ ID NO: 275389 - RNA, 19 nt, Artificial Sequence
  Description of Artificial Sequence: Synthetic oligonucleotide
  Antisense strand to SEQ ID NO: 275388
uuaacagagacaagauugg

SEQ ID NO: 275390 - RNA, 19 nt, Artificial Sequence
  Description of Artificial Sequence: Synthetic oligonucleotide
  Sense strand starting at position 3851 of SEQ ID NO: 3536
uuaauuaccaguuguguga

SEQ ID NO: 275391 - RNA, 19 nt, Artificial Sequence
  Description of Artificial Sequence: Synthetic oligonucleotide
  Antisense strand to SEQ ID NO: 275390
ucacacaacugguaauuaa

SEQ ID NO: 275392 - RNA, 19 nt, Artificial Sequence
  Description of Artificial Sequence: Synthetic oligonucleotide
  Sense strand starting at position 107 of SEQ ID NO: 3537
ucacacagauuguugaaga

SEQ ID NO: 275393 - RNA, 19 nt, Artificial Sequence
  Description of Artificial Sequence: Synthetic oligonucleotide
  Antisense strand to SEQ ID NO: 275392
ucuucaacaaucuguguga

SEQ ID NO: 275394 - RNA, 19 nt, Artificial Sequence
  Description of Artificial Sequence: Synthetic oligonucleotide
  Sense strand starting at position 153 of SEQ ID NO: 3537
uguuaacaauuguuucuga

SEQ ID NO: 275395 - RNA, 19 nt, Artificial Sequence
  Description of Artificial Sequence: Synthetic oligonucleotide
  Antisense strand to SEQ ID NO: 275394
ucagaaacaauuguuaaca

SEQ ID NO: 275396 - RNA, 19 nt, Artificial Sequence
  Description of Artificial Sequence: Synthetic oligonucleotide
  Sense strand starting at position 154 of SEQ ID NO: 3537
guuaacaauuguuucugau

SEQ ID NO: 275397 - RNA, 19 nt, Artificial Sequence
  Description of Artificial Sequence: Synthetic oligonucleotide
  Antisense strand to SEQ ID NO: 275396
aucagaaacaauuguuaac

SEQ ID NO: 275398 - RNA, 19 nt, Artificial Sequence
  Description of Artificial Sequence: Synthetic oligonucleotide
  Sense strand starting at position 163 of SEQ ID NO: 3537
uguuucugaucuguaacau

SEQ ID NO: 275399 - RNA, 19 nt, Artificial Sequence
  Description of Artificial Sequence: Synthetic oligonucleotide
  Antisense strand to SEQ ID NO: 275398
auguuacagaucagaaaca

SEQ ID NO: 275400 - RNA, 19 nt, Artificial Sequence
  Description of Artificial Sequence: Synthetic oligonucleotide
  Sense strand starting at position 164 of SEQ ID NO: 3537
guuucugaucuguaacaug

SEQ ID NO: 275401 - RNA, 19 nt, Artificial Sequence
  Description of Artificial Sequence: Synthetic oligonucleotide
  Antisense strand to SEQ ID NO: 275400
cauguuacagaucagaaac

SEQ ID NO: 275402 - RNA, 19 nt, Artificial Sequence
  Description of Artificial Sequence: Synthetic oligonucleotide
  Sense strand starting at position 169 of SEQ ID NO: 3537
ugaucuguaacaugaugag

SEQ ID NO: 275403 - RNA, 19 nt, Artificial Sequence
  Description of Artificial Sequence: Synthetic oligonucleotide
  Antisense strand to SEQ ID NO: 275402
cucaucauguuacagauca

SEQ ID NO: 275404 - RNA, 19 nt, Artificial Sequence
  Description of Artificial Sequence: Synthetic oligonucleotide
  Sense strand starting at position 208 of SEQ ID NO: 3537
agggauggcgaucaaagua

SEQ ID NO: 275405 - RNA, 19 nt, Artificial Sequence
  Description of Artificial Sequence: Synthetic oligonucleotide
  Antisense strand to SEQ ID NO: 275404
uacuuugaucgccaucccu

SEQ ID NO: 275406 - RNA, 19 nt, Artificial Sequence
  Description of Artificial Sequence: Synthetic oligonucleotide
  Sense strand starting at position 213 of SEQ ID NO: 3537
uggcgaucaaaguaggaau

SEQ ID NO: 275407 - RNA, 19 nt, Artificial Sequence
  Description of Artificial Sequence: Synthetic oligonucleotide
  Antisense strand to SEQ ID NO: 275406
auuccuacuuugaucgcca

SEQ ID NO: 275408 - RNA, 19 nt, Artificial Sequence
  Description of Artificial Sequence: Synthetic oligonucleotide
  Sense strand starting at position 282 of SEQ ID NO: 3537
uuucuuuaugguuagcaau

SEQ ID NO: 275409 - RNA, 19 nt, Artificial Sequence
  Description of Artificial Sequence: Synthetic oligonucleotide
  Antisense strand to SEQ ID NO: 275408
auugcuaaccauaaagaaa

SEQ ID NO: 275410 - RNA, 19 nt, Artificial Sequence
  Description of Artificial Sequence: Synthetic oligonucleotide
  Sense strand starting at position 284 of SEQ ID NO: 3537
ucuuuaugguuagcaauuu

SEQ ID NO: 275411 - RNA, 19 nt, Artificial Sequence
  Description of Artificial Sequence: Synthetic oligonucleotide
  Antisense strand to SEQ ID NO: 275410
aaauugcuaaccauaaaga

SEQ ID NO: 275412 - RNA, 19 nt, Artificial Sequence
  Description of Artificial Sequence: Synthetic oligonucleotide
  Sense strand starting at position 379 of SEQ ID NO: 3537
auagcaagugcggagaauu

SEQ ID NO: 275413 - RNA, 19 nt, Artificial Sequence
  Description of Artificial Sequence: Synthetic oligonucleotide
  Antisense strand to SEQ ID NO: 275412
aauucuccgcacuugcuau

SEQ ID NO: 275414 - RNA, 19 nt, Artificial Sequence
  Description of Artificial Sequence: Synthetic oligonucleotide
  Sense strand starting at position 472 of SEQ ID NO: 3537
ggaaaugauugcccacuga

SEQ ID NO: 275415 - RNA, 19 nt, Artificial Sequence
  Description of Artificial Sequence: Synthetic oligonucleotide
  Antisense strand to SEQ ID NO: 275414
ucagugggcaaucauuucc

SEQ ID NO: 275416 - RNA, 19 nt, Artificial Sequence
  Description of Artificial Sequence: Synthetic oligonucleotide
  Sense strand starting at position 719 of SEQ ID NO: 3537
uuagcugucucccuagaag

SEQ ID NO: 275417 - RNA, 19 nt, Artificial Sequence
  Description of Artificial Sequence: Synthetic oligonucleotide
  Antisense strand to SEQ ID NO: 275416
cuucuagggagacagcuaa

SEQ ID NO: 275418 - RNA, 19 nt, Artificial Sequence
  Description of Artificial Sequence: Synthetic oligonucleotide
  Sense strand starting at position 722 of SEQ ID NO: 3537
gcugucucccuagaagagu

SEQ ID NO: 275419 - RNA, 19 nt, Artificial Sequence
  Description of Artificial Sequence: Synthetic oligonucleotide
  Antisense strand to SEQ ID NO: 275418
acucuucuagggagacagc

SEQ ID NO: 275420 - RNA, 19 nt, Artificial Sequence
  Description of Artificial Sequence: Synthetic oligonucleotide
  Sense strand starting at position 804 of SEQ ID NO: 3537
auuauuuauucgcuuugcu

SEQ ID NO: 275421 - RNA, 19 nt, Artificial Sequence
  Description of Artificial Sequence: Synthetic oligonucleotide
  Antisense strand to SEQ ID NO: 275420
agcaaagcgaauaaauaau

SEQ ID NO: 275422 - RNA, 19 nt, Artificial Sequence
  Description of Artificial Sequence: Synthetic oligonucleotide
  Sense strand starting at position 812 of SEQ ID NO: 3537
uucgcuuugcucuuaaagu

SEQ ID NO: 275423 - RNA, 19 nt, Artificial Sequence
  Description of Artificial Sequence: Synthetic oligonucleotide
  Antisense strand to SEQ ID NO: 275422
acuuuaagagcaaagcgaa

SEQ ID NO: 275424 - RNA, 19 nt, Artificial Sequence
  Description of Artificial Sequence: Synthetic oligonucleotide
  Sense strand starting at position 821 of SEQ ID NO: 3537
cucuuaaaguugucagaga

SEQ ID NO: 275425 - RNA, 19 nt, Artificial Sequence
  Description of Artificial Sequence: Synthetic oligonucleotide
  Antisense strand to SEQ ID NO: 275424
ucucugacaacuuuaagag

SEQ ID NO: 275426 - RNA, 19 nt, Artificial Sequence
  Description of Artificial Sequence: Synthetic oligonucleotide
  Sense strand starting at position 834 of SEQ ID NO: 3537
cagagaagaacguggcaau

SEQ ID NO: 275427 - RNA, 19 nt, Artificial Sequence
  Description of Artificial Sequence: Synthetic oligonucleotide
  Antisense strand to SEQ ID NO: 275426
auugccacguucuucucug

SEQ ID NO: 275428 - RNA, 19 nt, Artificial Sequence
  Description of Artificial Sequence: Synthetic oligonucleotide
  Sense strand starting at position 835 of SEQ ID NO: 3537
agagaagaacguggcaaua

SEQ ID NO: 275429 - RNA, 19 nt, Artificial Sequence
  Description of Artificial Sequence: Synthetic oligonucleotide
  Antisense strand to SEQ ID NO: 275428
uauugccacguucuucucu

SEQ ID NO: 275430 - RNA, 19 nt, Artificial Sequence
  Description of Artificial Sequence: Synthetic oligonucleotide
  Sense strand starting at position 880 of SEQ ID NO: 3537
uacgaaaucuuacccaggu

SEQ ID NO: 275431 - RNA, 19 nt, Artificial Sequence
  Description of Artificial Sequence: Synthetic oligonucleotide
  Antisense strand to SEQ ID NO: 275430
accuggguaagauuucgua

SEQ ID NO: 275432 - RNA, 19 nt, Artificial Sequence
  Description of Artificial Sequence: Synthetic oligonucleotide
  Sense strand starting at position 882 of SEQ ID NO: 3537
cgaaaucuuacccagguga

SEQ ID NO: 275433 - RNA, 19 nt, Artificial Sequence
  Description of Artificial Sequence: Synthetic oligonucleotide
  Antisense strand to SEQ ID NO: 275432
ucaccuggguaagauuucg

SEQ ID NO: 275434 - RNA, 19 nt, Artificial Sequence
  Description of Artificial Sequence: Synthetic oligonucleotide
  Sense strand starting at position 1422 of SEQ ID NO: 3537
uguucuggaagcuaagauu

SEQ ID NO: 275435 - RNA, 19 nt, Artificial Sequence
  Description of Artificial Sequence: Synthetic oligonucleotide
  Antisense strand to SEQ ID NO: 275434
aaucuuagcuuccagaaca

SEQ ID NO: 275436 - RNA, 19 nt, Artificial Sequence
  Description of Artificial Sequence: Synthetic oligonucleotide
  Sense strand starting at position 1430 of SEQ ID NO: 3537
aagcuaagauuguccugga

SEQ ID NO: 275437 - RNA, 19 nt, Artificial Sequence
  Description of Artificial Sequence: Synthetic oligonucleotide
  Antisense strand to SEQ ID NO: 275436
uccaggacaaucuuagcuu

SEQ ID NO: 275438 - RNA, 19 nt, Artificial Sequence
  Description of Artificial Sequence: Synthetic oligonucleotide
  Sense strand starting at position 1434 of SEQ ID NO: 3537
uaagauuguccuggacuuc

SEQ ID NO: 275439 - RNA, 19 nt, Artificial Sequence
  Description of Artificial Sequence: Synthetic oligonucleotide
  Antisense strand to SEQ ID NO: 275438
gaaguccaggacaaucuua

SEQ ID NO: 275440 - RNA, 19 nt, Artificial Sequence
  Description of Artificial Sequence: Synthetic oligonucleotide
  Sense strand starting at position 1521 of SEQ ID NO: 3537
guacgaggcccuggagaua

SEQ ID NO: 275441 - RNA, 19 nt, Artificial Sequence
  Description of Artificial Sequence: Synthetic oligonucleotide
  Antisense strand to SEQ ID NO: 275440
uaucuccagggccucguac

SEQ ID NO: 275442 - RNA, 19 nt, Artificial Sequence
  Description of Artificial Sequence: Synthetic oligonucleotide
  Sense strand starting at position 2310 of SEQ ID NO: 3537
ugcauauuccaaggcuaac

SEQ ID NO: 275443 - RNA, 19 nt, Artificial Sequence
  Description of Artificial Sequence: Synthetic oligonucleotide
  Antisense strand to SEQ ID NO: 275442
guuagccuuggaauaugca

SEQ ID NO: 275444 - RNA, 19 nt, Artificial Sequence
  Description of Artificial Sequence: Synthetic oligonucleotide
  Sense strand starting at position 2429 of SEQ ID NO: 3537
aguuauagaugcucuugaa

SEQ ID NO: 275445 - RNA, 19 nt, Artificial Sequence
  Description of Artificial Sequence: Synthetic oligonucleotide
  Antisense strand to SEQ ID NO: 275444
uucaagagcaucuauaacu

SEQ ID NO: 275446 - RNA, 19 nt, Artificial Sequence
  Description of Artificial Sequence: Synthetic oligonucleotide
  Sense strand starting at position 2624 of SEQ ID NO: 3537
ggucuuaaagauuguuaaa

SEQ ID NO: 275447 - RNA, 19 nt, Artificial Sequence
  Description of Artificial Sequence: Synthetic oligonucleotide
  Antisense strand to SEQ ID NO: 275446
uuuaacaaucuuuaagacc

SEQ ID NO: 275448 - RNA, 19 nt, Artificial Sequence
  Description of Artificial Sequence: Synthetic oligonucleotide
  Sense strand starting at position 2795 of SEQ ID NO: 3537
gucucuaaugucugauuuc

SEQ ID NO: 275449 - RNA, 19 nt, Artificial Sequence
  Description of Artificial Sequence: Synthetic oligonucleotide
  Antisense strand to SEQ ID NO: 275448
gaaaucagacauuagagac

SEQ ID NO: 275450 - RNA, 19 nt, Artificial Sequence
  Description of Artificial Sequence: Synthetic oligonucleotide
  Sense strand starting at position 2812 of SEQ ID NO: 3537
ucaugugagaacuggauuc

SEQ ID NO: 275451 - RNA, 19 nt, Artificial Sequence
  Description of Artificial Sequence: Synthetic oligonucleotide
  Antisense strand to SEQ ID NO: 275450
gaauccaguucucacauga

SEQ ID NO: 275452 - RNA, 19 nt, Artificial Sequence
  Description of Artificial Sequence: Synthetic oligonucleotide
  Sense strand starting at position 3019 of SEQ ID NO: 3537
ggucugauagcguagagga

SEQ ID NO: 275453 - RNA, 19 nt, Artificial Sequence
  Description of Artificial Sequence: Synthetic oligonucleotide
  Antisense strand to SEQ ID NO: 275452
uccucuacgcuaucagacc

SEQ ID NO: 275454 - RNA, 19 nt, Artificial Sequence
  Description of Artificial Sequence: Synthetic oligonucleotide
  Sense strand starting at position 3057 of SEQ ID NO: 3537
gguuuaaucuaagucaauc

SEQ ID NO: 275455 - RNA, 19 nt, Artificial Sequence
  Description of Artificial Sequence: Synthetic oligonucleotide
  Antisense strand to SEQ ID NO: 275454
gauugacuuagauuaaacc

SEQ ID NO: 275456 - RNA, 19 nt, Artificial Sequence
  Description of Artificial Sequence: Synthetic oligonucleotide
  Sense strand starting at position 3330 of SEQ ID NO: 3537
guaaacucugacuggugua

SEQ ID NO: 275457 - RNA, 19 nt, Artificial Sequence
  Description of Artificial Sequence: Synthetic oligonucleotide
  Antisense strand to SEQ ID NO: 275456
uacaccagucagaguuuac

SEQ ID NO: 275458 - RNA, 19 nt, Artificial Sequence
  Description of Artificial Sequence: Synthetic oligonucleotide
  Sense strand starting at position 3335 of SEQ ID NO: 3537
cucugacugguguaggagu

SEQ ID NO: 275459 - RNA, 19 nt, Artificial Sequence
  Description of Artificial Sequence: Synthetic oligonucleotide
  Antisense strand to SEQ ID NO: 275458
acuccuacaccagucagag

SEQ ID NO: 275460 - RNA, 19 nt, Artificial Sequence
  Description of Artificial Sequence: Synthetic oligonucleotide
  Sense strand starting at position 3502 of SEQ ID NO: 3537
uuaugcuuagguuauauga

SEQ ID NO: 275461 - RNA, 19 nt, Artificial Sequence
  Description of Artificial Sequence: Synthetic oligonucleotide
  Antisense strand to SEQ ID NO: 275460
ucauauaaccuaagcauaa

SEQ ID NO: 275462 - RNA, 19 nt, Artificial Sequence
  Description of Artificial Sequence: Synthetic oligonucleotide
  Sense strand starting at position 3523 of SEQ ID NO: 3537
aagggaucgcuguguagaa

SEQ ID NO: 275463 - RNA, 19 nt, Artificial Sequence
  Description of Artificial Sequence: Synthetic oligonucleotide
  Antisense strand to SEQ ID NO: 275462
uucuacacagcgaucccuu

SEQ ID NO: 275464 - RNA, 19 nt, Artificial Sequence
  Description of Artificial Sequence: Synthetic oligonucleotide
  Sense strand starting at position 3524 of SEQ ID NO: 3537
agggaucgcuguguagaaa

SEQ ID NO: 275465 - RNA, 19 nt, Artificial Sequence
  Description of Artificial Sequence: Synthetic oligonucleotide
  Antisense strand to SEQ ID NO: 275464
uuucuacacagcgaucccu

SEQ ID NO: 275466 - RNA, 19 nt, Artificial Sequence
  Description of Artificial Sequence: Synthetic oligonucleotide
  Sense strand starting at position 3525 of SEQ ID NO: 3537
gggaucgcuguguagaaau

SEQ ID NO: 275467 - RNA, 19 nt, Artificial Sequence
  Description of Artificial Sequence: Synthetic oligonucleotide
  Antisense strand to SEQ ID NO: 275466
auuucuacacagcgauccc

SEQ ID NO: 275468 - RNA, 19 nt, Artificial Sequence
  Description of Artificial Sequence: Synthetic oligonucleotide
  Sense strand starting at position 3711 of SEQ ID NO: 3537
cacaaauuagcuggguauu

SEQ ID NO: 275469 - RNA, 19 nt, Artificial Sequence
  Description of Artificial Sequence: Synthetic oligonucleotide
  Antisense strand to SEQ ID NO: 275468
aauacccagcuaauuugug

SEQ ID NO: 275470 - RNA, 19 nt, Artificial Sequence
  Description of Artificial Sequence: Synthetic oligonucleotide
  Sense strand starting at position 3722 of SEQ ID NO: 3537
uggguauugugauccuaua

SEQ ID NO: 275471 - RNA, 19 nt, Artificial Sequence
  Description of Artificial Sequence: Synthetic oligonucleotide
  Antisense strand to SEQ ID NO: 275470
uauaggaucacaauaccca

SEQ ID NO: 275472 - RNA, 19 nt, Artificial Sequence
  Description of Artificial Sequence: Synthetic oligonucleotide
  Sense strand starting at position 643 of SEQ ID NO: 3538
uuaagaucucugugugaaa

SEQ ID NO: 275473 - RNA, 19 nt, Artificial Sequence
  Description of Artificial Sequence: Synthetic oligonucleotide
  Antisense strand to SEQ ID NO: 275472
uuucacacagagaucuuaa

SEQ ID NO: 275474 - RNA, 19 nt, Artificial Sequence
  Description of Artificial Sequence: Synthetic oligonucleotide
  Sense strand starting at position 644 of SEQ ID NO: 3538
uaagaucucugugugaaau

SEQ ID NO: 275475 - RNA, 19 nt, Artificial Sequence
  Description of Artificial Sequence: Synthetic oligonucleotide
  Antisense strand to SEQ ID NO: 275474
auuucacacagagaucuua

SEQ ID NO: 275476 - RNA, 19 nt, Artificial Sequence
  Description of Artificial Sequence: Synthetic oligonucleotide
  Sense strand starting at position 645 of SEQ ID NO: 3538
aagaucucugugugaaauu

SEQ ID NO: 275477 - RNA, 19 nt, Artificial Sequence
  Description of Artificial Sequence: Synthetic oligonucleotide
  Antisense strand to SEQ ID NO: 275476
aauuucacacagagaucuu

SEQ ID NO: 275478 - RNA, 19 nt, Artificial Sequence
  Description of Artificial Sequence: Synthetic oligonucleotide
  Sense strand starting at position 761 of SEQ ID NO: 3538
uggugagauugucuaggga

SEQ ID NO: 275479 - RNA, 19 nt, Artificial Sequence
  Description of Artificial Sequence: Synthetic oligonucleotide
  Antisense strand to SEQ ID NO: 275478
ucccuagacaaucucacca

SEQ ID NO: 275480 - RNA, 19 nt, Artificial Sequence
  Description of Artificial Sequence: Synthetic oligonucleotide
  Sense strand starting at position 828 of SEQ ID NO: 3538
aucaacauuuaaggaguaa

SEQ ID NO: 275481 - RNA, 19 nt, Artificial Sequence
  Description of Artificial Sequence: Synthetic oligonucleotide
  Antisense strand to SEQ ID NO: 275480
uuacuccuuaaauguugau

SEQ ID NO: 275482 - RNA, 19 nt, Artificial Sequence
  Description of Artificial Sequence: Synthetic oligonucleotide
  Sense strand starting at position 909 of SEQ ID NO: 3538
cuggaugcucaauaaaugu

SEQ ID NO: 275483 - RNA, 19 nt, Artificial Sequence
  Description of Artificial Sequence: Synthetic oligonucleotide
  Antisense strand to SEQ ID NO: 275482
acauuuauugagcauccag

SEQ ID NO: 275484 - RNA, 19 nt, Artificial Sequence
  Description of Artificial Sequence: Synthetic oligonucleotide
  Sense strand starting at position 932 of SEQ ID NO: 3538
gagguuauagaucgauaga

SEQ ID NO: 275485 - RNA, 19 nt, Artificial Sequence
  Description of Artificial Sequence: Synthetic oligonucleotide
  Antisense strand to SEQ ID NO: 275484
ucuaucgaucuauaaccuc

SEQ ID NO: 275486 - RNA, 19 nt, Artificial Sequence
  Description of Artificial Sequence: Synthetic oligonucleotide
  Sense strand starting at position 1040 of SEQ ID NO: 3538
ugcauuggagaaugucaaa

SEQ ID NO: 275487 - RNA, 19 nt, Artificial Sequence
  Description of Artificial Sequence: Synthetic oligonucleotide
  Antisense strand to SEQ ID NO: 275486
uuugacauucuccaaugca

SEQ ID NO: 275488 - RNA, 19 nt, Artificial Sequence
  Description of Artificial Sequence: Synthetic oligonucleotide
  Sense strand starting at position 1083 of SEQ ID NO: 3538
uaaagagaguucccuugau

SEQ ID NO: 275489 - RNA, 19 nt, Artificial Sequence
  Description of Artificial Sequence: Synthetic oligonucleotide
  Antisense strand to SEQ ID NO: 275488
aucaagggaacucucuuua

SEQ ID NO: 275490 - RNA, 19 nt, Artificial Sequence
  Description of Artificial Sequence: Synthetic oligonucleotide
  Sense strand starting at position 1117 of SEQ ID NO: 3538
agaauauagcaggguccua

SEQ ID NO: 275491 - RNA, 19 nt, Artificial Sequence
  Description of Artificial Sequence: Synthetic oligonucleotide
  Antisense strand to SEQ ID NO: 275490
uaggacccugcuauauucu

SEQ ID NO: 275492 - RNA, 19 nt, Artificial Sequence
  Description of Artificial Sequence: Synthetic oligonucleotide
  Sense strand starting at position 1129 of SEQ ID NO: 3538
gguccuagcaaagagaagu

SEQ ID NO: 275493 - RNA, 19 nt, Artificial Sequence
  Description of Artificial Sequence: Synthetic oligonucleotide
  Antisense strand to SEQ ID NO: 275492
acuucucuuugcuaggacc

SEQ ID NO: 275494 - RNA, 19 nt, Artificial Sequence
  Description of Artificial Sequence: Synthetic oligonucleotide
  Sense strand starting at position 1144 of SEQ ID NO: 3538
aaguuaacgccugaacuga

SEQ ID NO: 275495 - RNA, 19 nt, Artificial Sequence
  Description of Artificial Sequence: Synthetic oligonucleotide
  Antisense strand to SEQ ID NO: 275494
ucaguucaggcguuaacuu

SEQ ID NO: 275496 - RNA, 19 nt, Artificial Sequence
  Description of Artificial Sequence: Synthetic oligonucleotide
  Sense strand starting at position 1224 of SEQ ID NO: 3538
ucagguacacuaugguuaa

SEQ ID NO: 275497 - RNA, 19 nt, Artificial Sequence
  Description of Artificial Sequence: Synthetic oligonucleotide
  Antisense strand to SEQ ID NO: 275496
uuaaccauaguguaccuga

SEQ ID NO: 275498 - RNA, 19 nt, Artificial Sequence
  Description of Artificial Sequence: Synthetic oligonucleotide
  Sense strand starting at position 1236 of SEQ ID NO: 3538
ugguuaauuccacaaaugc

SEQ ID NO: 275499 - RNA, 19 nt, Artificial Sequence
  Description of Artificial Sequence: Synthetic oligonucleotide
  Antisense strand to SEQ ID NO: 275498
gcauuuguggaauuaacca

SEQ ID NO: 275500 - RNA, 19 nt, Artificial Sequence
  Description of Artificial Sequence: Synthetic oligonucleotide
  Sense strand starting at position 1255 of SEQ ID NO: 3538
uuguuaguuaacgaggaga

SEQ ID NO: 275501 - RNA, 19 nt, Artificial Sequence
  Description of Artificial Sequence: Synthetic oligonucleotide
  Antisense strand to SEQ ID NO: 275500
ucuccucguuaacuaacaa

SEQ ID NO: 275502 - RNA, 19 nt, Artificial Sequence
  Description of Artificial Sequence: Synthetic oligonucleotide
  Sense strand starting at position 1257 of SEQ ID NO: 3538
guuaguuaacgaggagacu

SEQ ID NO: 275503 - RNA, 19 nt, Artificial Sequence
  Description of Artificial Sequence: Synthetic oligonucleotide
  Antisense strand to SEQ ID NO: 275502
agucuccucguuaacuaac

SEQ ID NO: 275504 - RNA, 19 nt, Artificial Sequence
  Description of Artificial Sequence: Synthetic oligonucleotide
  Sense strand starting at position 1469 of SEQ ID NO: 3538
agcgcuucugggaaucgua

SEQ ID NO: 275505 - RNA, 19 nt, Artificial Sequence
  Description of Artificial Sequence: Synthetic oligonucleotide
  Antisense strand to SEQ ID NO: 275504
uacgauucccagaagcgcu

SEQ ID NO: 275506 - RNA, 19 nt, Artificial Sequence
  Description of Artificial Sequence: Synthetic oligonucleotide
  Sense strand starting at position 1530 of SEQ ID NO: 3538
cgaccaacuccuuacuuga

SEQ ID NO: 275507 - RNA, 19 nt, Artificial Sequence
  Description of Artificial Sequence: Synthetic oligonucleotide
  Antisense strand to SEQ ID NO: 275506
ucaaguaaggaguuggucg

SEQ ID NO: 275508 - RNA, 19 nt, Artificial Sequence
  Description of Artificial Sequence: Synthetic oligonucleotide
  Sense strand starting at position 1596 of SEQ ID NO: 3538
cagggcauguucuuggaga

SEQ ID NO: 275509 - RNA, 19 nt, Artificial Sequence
  Description of Artificial Sequence: Synthetic oligonucleotide
  Antisense strand to SEQ ID NO: 275508
ucuccaagaacaugcccug

SEQ ID NO: 275510 - RNA, 19 nt, Artificial Sequence
  Description of Artificial Sequence: Synthetic oligonucleotide
  Sense strand starting at position 1793 of SEQ ID NO: 3538
ggaacaaauaguuguacga

SEQ ID NO: 275511 - RNA, 19 nt, Artificial Sequence
  Description of Artificial Sequence: Synthetic oligonucleotide
  Antisense strand to SEQ ID NO: 275510
ucguacaacuauuuguucc

SEQ ID NO: 275512 - RNA, 19 nt, Artificial Sequence
  Description of Artificial Sequence: Synthetic oligonucleotide
  Sense strand starting at position 2197 of SEQ ID NO: 3538
guaagagacgcuuagggua

SEQ ID NO: 275513 - RNA, 19 nt, Artificial Sequence
  Description of Artificial Sequence: Synthetic oligonucleotide
  Antisense strand to SEQ ID NO: 275512
uacccuaagcgucucuuac

SEQ ID NO: 275514 - RNA, 19 nt, Artificial Sequence
  Description of Artificial Sequence: Synthetic oligonucleotide
  Sense strand starting at position 2209 of SEQ ID NO: 3538
uaggguauccgcgaagaag

SEQ ID NO: 275515 - RNA, 19 nt, Artificial Sequence
  Description of Artificial Sequence: Synthetic oligonucleotide
  Antisense strand to SEQ ID NO: 275514
cuucuucgcggauacccua

SEQ ID NO: 275516 - RNA, 19 nt, Artificial Sequence
  Description of Artificial Sequence: Synthetic oligonucleotide
  Sense strand starting at position 2359 of SEQ ID NO: 3538
uaggauucgcaacgcauuu

SEQ ID NO: 275517 - RNA, 19 nt, Artificial Sequence
  Description of Artificial Sequence: Synthetic oligonucleotide
  Antisense strand to SEQ ID NO: 275516
aaaugcguugcgaauccua

SEQ ID NO: 275518 - RNA, 19 nt, Artificial Sequence
  Description of Artificial Sequence: Synthetic oligonucleotide
  Sense strand starting at position 2361 of SEQ ID NO: 3538
ggauucgcaacgcauuuau

SEQ ID NO: 275519 - RNA, 19 nt, Artificial Sequence
  Description of Artificial Sequence: Synthetic oligonucleotide
  Antisense strand to SEQ ID NO: 275518
auaaaugcguugcgaaucc

SEQ ID NO: 275520 - RNA, 19 nt, Artificial Sequence
  Description of Artificial Sequence: Synthetic oligonucleotide
  Sense strand starting at position 2386 of SEQ ID NO: 3538
gagaaauacuuauugguug

SEQ ID NO: 275521 - RNA, 19 nt, Artificial Sequence
  Description of Artificial Sequence: Synthetic oligonucleotide
  Antisense strand to SEQ ID NO: 275520
caaccaauaaguauuucuc

SEQ ID NO: 275522 - RNA, 19 nt, Artificial Sequence
  Description of Artificial Sequence: Synthetic oligonucleotide
  Sense strand starting at position 2407 of SEQ ID NO: 3538
ugcaauauucuguaguuaa

SEQ ID NO: 275523 - RNA, 19 nt, Artificial Sequence
  Description of Artificial Sequence: Synthetic oligonucleotide
  Antisense strand to SEQ ID NO: 275522
uuaacuacagaauauugca

SEQ ID NO: 275524 - RNA, 19 nt, Artificial Sequence
  Description of Artificial Sequence: Synthetic oligonucleotide
  Sense strand starting at position 2559 of SEQ ID NO: 3538
cguacaagaucuucccaaa

SEQ ID NO: 275525 - RNA, 19 nt, Artificial Sequence
  Description of Artificial Sequence: Synthetic oligonucleotide
  Antisense strand to SEQ ID NO: 275524
uuugggaagaucuuguacg

SEQ ID NO: 275526 - RNA, 19 nt, Artificial Sequence
  Description of Artificial Sequence: Synthetic oligonucleotide
  Sense strand starting at position 2687 of SEQ ID NO: 3538
auaguuauagcuuggaaca

SEQ ID NO: 275527 - RNA, 19 nt, Artificial Sequence
  Description of Artificial Sequence: Synthetic oligonucleotide
  Antisense strand to SEQ ID NO: 275526
uguuccaagcuauaacuau

SEQ ID NO: 275528 - RNA, 19 nt, Artificial Sequence
  Description of Artificial Sequence: Synthetic oligonucleotide
  Sense strand starting at position 2760 of SEQ ID NO: 3538
gggaauaugagaggcagua

SEQ ID NO: 275529 - RNA, 19 nt, Artificial Sequence
  Description of Artificial Sequence: Synthetic oligonucleotide
  Antisense strand to SEQ ID NO: 275528
uacugccucucauauuccc

SEQ ID NO: 275530 - RNA, 19 nt, Artificial Sequence
  Description of Artificial Sequence: Synthetic oligonucleotide
  Sense strand starting at position 2870 of SEQ ID NO: 3538
cagacuagaguugguaaua

SEQ ID NO: 275531 - RNA, 19 nt, Artificial Sequence
  Description of Artificial Sequence: Synthetic oligonucleotide
  Antisense strand to SEQ ID NO: 275530
uauuaccaacucuagucug

SEQ ID NO: 275532 - RNA, 19 nt, Artificial Sequence
  Description of Artificial Sequence: Synthetic oligonucleotide
  Sense strand starting at position 2871 of SEQ ID NO: 3538
agacuagaguugguaauaa

SEQ ID NO: 275533 - RNA, 19 nt, Artificial Sequence
  Description of Artificial Sequence: Synthetic oligonucleotide
  Antisense strand to SEQ ID NO: 275532
uuauuaccaacucuagucu

SEQ ID NO: 275534 - RNA, 19 nt, Artificial Sequence
  Description of Artificial Sequence: Synthetic oligonucleotide
  Sense strand starting at position 2879 of SEQ ID NO: 3538
guugguaauaaccauccga

SEQ ID NO: 275535 - RNA, 19 nt, Artificial Sequence
  Description of Artificial Sequence: Synthetic oligonucleotide
  Antisense strand to SEQ ID NO: 275534
ucggaugguuauuaccaac

SEQ ID NO: 275536 - RNA, 19 nt, Artificial Sequence
  Description of Artificial Sequence: Synthetic oligonucleotide
  Sense strand starting at position 2899 of SEQ ID NO: 3538
aaguuugugagguauaagu

SEQ ID NO: 275537 - RNA, 19 nt, Artificial Sequence
  Description of Artificial Sequence: Synthetic oligonucleotide
  Antisense strand to SEQ ID NO: 275536
acuuauaccucacaaacuu

SEQ ID NO: 275538 - RNA, 19 nt, Artificial Sequence
  Description of Artificial Sequence: Synthetic oligonucleotide
  Sense strand starting at position 3155 of SEQ ID NO: 3538
caaauagugugacuugaaa

SEQ ID NO: 275539 - RNA, 19 nt, Artificial Sequence
  Description of Artificial Sequence: Synthetic oligonucleotide
  Antisense strand to SEQ ID NO: 275538
uuucaagucacacuauuug

SEQ ID NO: 275540 - RNA, 19 nt, Artificial Sequence
  Description of Artificial Sequence: Synthetic oligonucleotide
  Sense strand starting at position 3199 of SEQ ID NO: 3538
guugaucucuuucugaaau

SEQ ID NO: 275541 - RNA, 19 nt, Artificial Sequence
  Description of Artificial Sequence: Synthetic oligonucleotide
  Antisense strand to SEQ ID NO: 275540
auuucagaaagagaucaac

SEQ ID NO: 275542 - RNA, 19 nt, Artificial Sequence
  Description of Artificial Sequence: Synthetic oligonucleotide
  Sense strand starting at position 3211 of SEQ ID NO: 3538
cugaaauguccuuaacgua

SEQ ID NO: 275543 - RNA, 19 nt, Artificial Sequence
  Description of Artificial Sequence: Synthetic oligonucleotide
  Antisense strand to SEQ ID NO: 275542
uacguuaaggacauuucag

SEQ ID NO: 275544 - RNA, 19 nt, Artificial Sequence
  Description of Artificial Sequence: Synthetic oligonucleotide
  Sense strand starting at position 3439 of SEQ ID NO: 3538
ucagucaugggccaaugau

SEQ ID NO: 275545 - RNA, 19 nt, Artificial Sequence
  Description of Artificial Sequence: Synthetic oligonucleotide
  Antisense strand to SEQ ID NO: 275544
aucauuggcccaugacuga

SEQ ID NO: 275546 - RNA, 19 nt, Artificial Sequence
  Description of Artificial Sequence: Synthetic oligonucleotide
  Sense strand starting at position 3553 of SEQ ID NO: 3538
cauucuugauuguugaaag

SEQ ID NO: 275547 - RNA, 19 nt, Artificial Sequence
  Description of Artificial Sequence: Synthetic oligonucleotide
  Antisense strand to SEQ ID NO: 275546
cuuucaacaaucaagaaug

SEQ ID NO: 275548 - RNA, 19 nt, Artificial Sequence
  Description of Artificial Sequence: Synthetic oligonucleotide
  Sense strand starting at position 3579 of SEQ ID NO: 3538
augagaagccaugggucau

SEQ ID NO: 275549 - RNA, 19 nt, Artificial Sequence
  Description of Artificial Sequence: Synthetic oligonucleotide
  Antisense strand to SEQ ID NO: 275548
augacccauggcuucucau

SEQ ID NO: 275550 - RNA, 19 nt, Artificial Sequence
  Description of Artificial Sequence: Synthetic oligonucleotide
  Sense strand starting at position 3709 of SEQ ID NO: 3538
guuccugaaguugaaaguu

SEQ ID NO: 275551 - RNA, 19 nt, Artificial Sequence
  Description of Artificial Sequence: Synthetic oligonucleotide
  Antisense strand to SEQ ID NO: 275550
aacuuucaacuucaggaac

SEQ ID NO: 275552 - RNA, 19 nt, Artificial Sequence
  Description of Artificial Sequence: Synthetic oligonucleotide
  Sense strand starting at position 380 of SEQ ID NO: 3539
ggacgaaaugcacguuucu

SEQ ID NO: 275553 - RNA, 19 nt, Artificial Sequence
  Description of Artificial Sequence: Synthetic oligonucleotide
  Antisense strand to SEQ ID NO: 275552
agaaacgugcauuucgucc

SEQ ID NO: 275554 - RNA, 19 nt, Artificial Sequence
  Description of Artificial Sequence: Synthetic oligonucleotide
  Sense strand starting at position 430 of SEQ ID NO: 3539
cucaaacuccuggauuagu

SEQ ID NO: 275555 - RNA, 19 nt, Artificial Sequence
  Description of Artificial Sequence: Synthetic oligonucleotide
  Antisense strand to SEQ ID NO: 275554
acuaauccaggaguuugag

SEQ ID NO: 275556 - RNA, 19 nt, Artificial Sequence
  Description of Artificial Sequence: Synthetic oligonucleotide
  Sense strand starting at position 496 of SEQ ID NO: 3539
agcaguucucaagaacauu

SEQ ID NO: 275557 - RNA, 19 nt, Artificial Sequence
  Description of Artificial Sequence: Synthetic oligonucleotide
  Antisense strand to SEQ ID NO: 275556
aauguucuugagaacugcu

SEQ ID NO: 275558 - RNA, 19 nt, Artificial Sequence
  Description of Artificial Sequence: Synthetic oligonucleotide
  Sense strand starting at position 803 of SEQ ID NO: 3539
aguaguuucucucuuuaaa

SEQ ID NO: 275559 - RNA, 19 nt, Artificial Sequence
  Description of Artificial Sequence: Synthetic oligonucleotide
  Antisense strand to SEQ ID NO: 275558
uuuaaagagagaaacuacu

SEQ ID NO: 275560 - RNA, 19 nt, Artificial Sequence
  Description of Artificial Sequence: Synthetic oligonucleotide
  Sense strand starting at position 871 of SEQ ID NO: 3539
uacaaauacguucgggauc

SEQ ID NO: 275561 - RNA, 19 nt, Artificial Sequence
  Description of Artificial Sequence: Synthetic oligonucleotide
  Antisense strand to SEQ ID NO: 275560
gaucccgaacguauuugua

SEQ ID NO: 275562 - RNA, 19 nt, Artificial Sequence
  Description of Artificial Sequence: Synthetic oligonucleotide
  Sense strand starting at position 874 of SEQ ID NO: 3539
aaauacguucgggaucuuu

SEQ ID NO: 275563 - RNA, 19 nt, Artificial Sequence
  Description of Artificial Sequence: Synthetic oligonucleotide
  Antisense strand to SEQ ID NO: 275562
aaagaucccgaacguauuu

SEQ ID NO: 275564 - RNA, 19 nt, Artificial Sequence
  Description of Artificial Sequence: Synthetic oligonucleotide
  Sense strand starting at position 884 of SEQ ID NO: 3539
gggaucuuucgagguacgu

SEQ ID NO: 275565 - RNA, 19 nt, Artificial Sequence
  Description of Artificial Sequence: Synthetic oligonucleotide
  Antisense strand to SEQ ID NO: 275564
acguaccucgaaagauccc

SEQ ID NO: 275566 - RNA, 19 nt, Artificial Sequence
  Description of Artificial Sequence: Synthetic oligonucleotide
  Sense strand starting at position 886 of SEQ ID NO: 3539
gaucuuucgagguacguuu

SEQ ID NO: 275567 - RNA, 19 nt, Artificial Sequence
  Description of Artificial Sequence: Synthetic oligonucleotide
  Antisense strand to SEQ ID NO: 275566
aaacguaccucgaaagauc

SEQ ID NO: 275568 - RNA, 19 nt, Artificial Sequence
  Description of Artificial Sequence: Synthetic oligonucleotide
  Sense strand starting at position 908 of SEQ ID NO: 3539
agagguaagucuucaagug

SEQ ID NO: 275569 - RNA, 19 nt, Artificial Sequence
  Description of Artificial Sequence: Synthetic oligonucleotide
  Antisense strand to SEQ ID NO: 275568
cacuugaagacuuaccucu

SEQ ID NO: 275570 - RNA, 19 nt, Artificial Sequence
  Description of Artificial Sequence: Synthetic oligonucleotide
  Sense strand starting at position 991 of SEQ ID NO: 3539
cccgaaacuguccaaacua

SEQ ID NO: 275571 - RNA, 19 nt, Artificial Sequence
  Description of Artificial Sequence: Synthetic oligonucleotide
  Antisense strand to SEQ ID NO: 275570
uaguuuggacaguuucggg

SEQ ID NO: 275572 - RNA, 19 nt, Artificial Sequence
  Description of Artificial Sequence: Synthetic oligonucleotide
  Sense strand starting at position 1040 of SEQ ID NO: 3539
acgaauacaucucuuaaga

SEQ ID NO: 275573 - RNA, 19 nt, Artificial Sequence
  Description of Artificial Sequence: Synthetic oligonucleotide
  Antisense strand to SEQ ID NO: 275572
ucuuaagagauguauucgu

SEQ ID NO: 275574 - RNA, 19 nt, Artificial Sequence
  Description of Artificial Sequence: Synthetic oligonucleotide
  Sense strand starting at position 1089 of SEQ ID NO: 3539
uaccgcguccuguuuaaca

SEQ ID NO: 275575 - RNA, 19 nt, Artificial Sequence
  Description of Artificial Sequence: Synthetic oligonucleotide
  Antisense strand to SEQ ID NO: 275574
uguuaaacaggacgcggua

SEQ ID NO: 275576 - RNA, 19 nt, Artificial Sequence
  Description of Artificial Sequence: Synthetic oligonucleotide
  Sense strand starting at position 2085 of SEQ ID NO: 3539
gggcguccaacuggauuua

SEQ ID NO: 275577 - RNA, 19 nt, Artificial Sequence
  Description of Artificial Sequence: Synthetic oligonucleotide
  Antisense strand to SEQ ID NO: 275576
uaaauccaguuggacgccc

SEQ ID NO: 275578 - RNA, 19 nt, Artificial Sequence
  Description of Artificial Sequence: Synthetic oligonucleotide
  Sense strand starting at position 2211 of SEQ ID NO: 3539
gcuauauugcguuauaacu

SEQ ID NO: 275579 - RNA, 19 nt, Artificial Sequence
  Description of Artificial Sequence: Synthetic oligonucleotide
  Antisense strand to SEQ ID NO: 275578
aguuauaacgcaauauagc

SEQ ID NO: 275580 - RNA, 19 nt, Artificial Sequence
  Description of Artificial Sequence: Synthetic oligonucleotide
  Sense strand starting at position 2249 of SEQ ID NO: 3539
auuuaaaguguacgcguua

SEQ ID NO: 275581 - RNA, 19 nt, Artificial Sequence
  Description of Artificial Sequence: Synthetic oligonucleotide
  Antisense strand to SEQ ID NO: 275580
uaacgcguacacuuuaaau

SEQ ID NO: 275582 - RNA, 19 nt, Artificial Sequence
  Description of Artificial Sequence: Synthetic oligonucleotide
  Sense strand starting at position 2252 of SEQ ID NO: 3539
uaaaguguacgcguuaagu

SEQ ID NO: 275583 - RNA, 19 nt, Artificial Sequence
  Description of Artificial Sequence: Synthetic oligonucleotide
  Antisense strand to SEQ ID NO: 275582
acuuaacgcguacacuuua

SEQ ID NO: 275584 - RNA, 19 nt, Artificial Sequence
  Description of Artificial Sequence: Synthetic oligonucleotide
  Sense strand starting at position 2352 of SEQ ID NO: 3539
cccugauagucccuccuua

SEQ ID NO: 275585 - RNA, 19 nt, Artificial Sequence
  Description of Artificial Sequence: Synthetic oligonucleotide
  Antisense strand to SEQ ID NO: 275584
uaaggagggacuaucaggg

SEQ ID NO: 275586 - RNA, 19 nt, Artificial Sequence
  Description of Artificial Sequence: Synthetic oligonucleotide
  Sense strand starting at position 2551 of SEQ ID NO: 3539
ccaacugaguaguuguagu

SEQ ID NO: 275587 - RNA, 19 nt, Artificial Sequence
  Description of Artificial Sequence: Synthetic oligonucleotide
  Antisense strand to SEQ ID NO: 275586
acuacaacuacucaguugg

SEQ ID NO: 275588 - RNA, 19 nt, Artificial Sequence
  Description of Artificial Sequence: Synthetic oligonucleotide
  Sense strand starting at position 2562 of SEQ ID NO: 3539
guuguaguucuuuauauag

SEQ ID NO: 275589 - RNA, 19 nt, Artificial Sequence
  Description of Artificial Sequence: Synthetic oligonucleotide
  Antisense strand to SEQ ID NO: 275588
cuauauaaagaacuacaac

SEQ ID NO: 275590 - RNA, 19 nt, Artificial Sequence
  Description of Artificial Sequence: Synthetic oligonucleotide
  Sense strand starting at position 2573 of SEQ ID NO: 3539
uuauauagccuauacuagu

SEQ ID NO: 275591 - RNA, 19 nt, Artificial Sequence
  Description of Artificial Sequence: Synthetic oligonucleotide
  Antisense strand to SEQ ID NO: 275590
acuaguauaggcuauauaa

SEQ ID NO: 275592 - RNA, 19 nt, Artificial Sequence
  Description of Artificial Sequence: Synthetic oligonucleotide
  Sense strand starting at position 2731 of SEQ ID NO: 3539
cuaagacaucauuguguaa

SEQ ID NO: 275593 - RNA, 19 nt, Artificial Sequence
  Description of Artificial Sequence: Synthetic oligonucleotide
  Antisense strand to SEQ ID NO: 275592
uuacacaaugaugucuuag

SEQ ID NO: 275594 - RNA, 19 nt, Artificial Sequence
  Description of Artificial Sequence: Synthetic oligonucleotide
  Sense strand starting at position 2784 of SEQ ID NO: 3539
gguacauaauuagcauauu

SEQ ID NO: 275595 - RNA, 19 nt, Artificial Sequence
  Description of Artificial Sequence: Synthetic oligonucleotide
  Antisense strand to SEQ ID NO: 275594
aauaugcuaauuauguacc

SEQ ID NO: 275596 - RNA, 19 nt, Artificial Sequence
  Description of Artificial Sequence: Synthetic oligonucleotide
  Sense strand starting at position 2794 of SEQ ID NO: 3539
uagcauauuuaugagguau

SEQ ID NO: 275597 - RNA, 19 nt, Artificial Sequence
  Description of Artificial Sequence: Synthetic oligonucleotide
  Antisense strand to SEQ ID NO: 275596
auaccucauaaauaugcua

SEQ ID NO: 275598 - RNA, 19 nt, Artificial Sequence
  Description of Artificial Sequence: Synthetic oligonucleotide
  Sense strand starting at position 2830 of SEQ ID NO: 3539
aggcauacgauguaaucau

SEQ ID NO: 275599 - RNA, 19 nt, Artificial Sequence
  Description of Artificial Sequence: Synthetic oligonucleotide
  Antisense strand to SEQ ID NO: 275598
augauuacaucguaugccu

SEQ ID NO: 275600 - RNA, 19 nt, Artificial Sequence
  Description of Artificial Sequence: Synthetic oligonucleotide
  Sense strand starting at position 2841 of SEQ ID NO: 3539
guaaucaucacaggagggu

SEQ ID NO: 275601 - RNA, 19 nt, Artificial Sequence
  Description of Artificial Sequence: Synthetic oligonucleotide
  Antisense strand to SEQ ID NO: 275600
acccuccugugaugauuac

SEQ ID NO: 275602 - RNA, 19 nt, Artificial Sequence
  Description of Artificial Sequence: Synthetic oligonucleotide
  Sense strand starting at position 2913 of SEQ ID NO: 3539
auuguacuuccucaguuau

SEQ ID NO: 275603 - RNA, 19 nt, Artificial Sequence
  Description of Artificial Sequence: Synthetic oligonucleotide
  Antisense strand to SEQ ID NO: 275602
auaacugaggaaguacaau

SEQ ID NO: 275604 - RNA, 19 nt, Artificial Sequence
  Description of Artificial Sequence: Synthetic oligonucleotide
  Sense strand starting at position 2915 of SEQ ID NO: 3539
uguacuuccucaguuauuu

SEQ ID NO: 275605 - RNA, 19 nt, Artificial Sequence
  Description of Artificial Sequence: Synthetic oligonucleotide
  Antisense strand to SEQ ID NO: 275604
aaauaacugaggaaguaca

SEQ ID NO: 275606 - RNA, 19 nt, Artificial Sequence
  Description of Artificial Sequence: Synthetic oligonucleotide
  Sense strand starting at position 3066 of SEQ ID NO: 3539
gucuuugacucauucugag

SEQ ID NO: 275607 - RNA, 19 nt, Artificial Sequence
  Description of Artificial Sequence: Synthetic oligonucleotide
  Antisense strand to SEQ ID NO: 275606
cucagaaugagucaaagac

SEQ ID NO: 275608 - RNA, 19 nt, Artificial Sequence
  Description of Artificial Sequence: Synthetic oligonucleotide
  Sense strand starting at position 3101 of SEQ ID NO: 3539
gugugagaaaggcauauca

SEQ ID NO: 275609 - RNA, 19 nt, Artificial Sequence
  Description of Artificial Sequence: Synthetic oligonucleotide
  Antisense strand to SEQ ID NO: 275608
ugauaugccuuucucacac

SEQ ID NO: 275610 - RNA, 19 nt, Artificial Sequence
  Description of Artificial Sequence: Synthetic oligonucleotide
  Sense strand starting at position 3256 of SEQ ID NO: 3539
ucaguucuauucucuugau

SEQ ID NO: 275611 - RNA, 19 nt, Artificial Sequence
  Description of Artificial Sequence: Synthetic oligonucleotide
  Antisense strand to SEQ ID NO: 275610
aucaagagaauagaacuga

SEQ ID NO: 275612 - RNA, 19 nt, Artificial Sequence
  Description of Artificial Sequence: Synthetic oligonucleotide
  Sense strand starting at position 3262 of SEQ ID NO: 3539
cuauucucuugaucuguau

SEQ ID NO: 275613 - RNA, 19 nt, Artificial Sequence
  Description of Artificial Sequence: Synthetic oligonucleotide
  Antisense strand to SEQ ID NO: 275612
auacagaucaagagaauag

SEQ ID NO: 275614 - RNA, 19 nt, Artificial Sequence
  Description of Artificial Sequence: Synthetic oligonucleotide
  Sense strand starting at position 3266 of SEQ ID NO: 3539
ucucuugaucuguaugucu

SEQ ID NO: 275615 - RNA, 19 nt, Artificial Sequence
  Description of Artificial Sequence: Synthetic oligonucleotide
  Antisense strand to SEQ ID NO: 275614
agacauacagaucaagaga

SEQ ID NO: 275616 - RNA, 19 nt, Artificial Sequence
  Description of Artificial Sequence: Synthetic oligonucleotide
  Sense strand starting at position 3268 of SEQ ID NO: 3539
ucuugaucuguaugucuau

SEQ ID NO: 275617 - RNA, 19 nt, Artificial Sequence
  Description of Artificial Sequence: Synthetic oligonucleotide
  Antisense strand to SEQ ID NO: 275616
auagacauacagaucaaga

SEQ ID NO: 275618 - RNA, 19 nt, Artificial Sequence
  Description of Artificial Sequence: Synthetic oligonucleotide
  Sense strand starting at position 3271 of SEQ ID NO: 3539
ugaucuguaugucuaucua

SEQ ID NO: 275619 - RNA, 19 nt, Artificial Sequence
  Description of Artificial Sequence: Synthetic oligonucleotide
  Antisense strand to SEQ ID NO: 275618
uagauagacauacagauca

SEQ ID NO: 275620 - RNA, 19 nt, Artificial Sequence
  Description of Artificial Sequence: Synthetic oligonucleotide
  Sense strand starting at position 3275 of SEQ ID NO: 3539
cuguaugucuaucuacauu

SEQ ID NO: 275621 - RNA, 19 nt, Artificial Sequence
  Description of Artificial Sequence: Synthetic oligonucleotide
  Antisense strand to SEQ ID NO: 275620
aauguagauagacauacag

SEQ ID NO: 275622 - RNA, 19 nt, Artificial Sequence
  Description of Artificial Sequence: Synthetic oligonucleotide
  Sense strand starting at position 3295 of SEQ ID NO: 3539
aucuguauaucugucuaca

SEQ ID NO: 275623 - RNA, 19 nt, Artificial Sequence
  Description of Artificial Sequence: Synthetic oligonucleotide
  Antisense strand to SEQ ID NO: 275622
uguagacagauauacagau

SEQ ID NO: 275624 - RNA, 19 nt, Artificial Sequence
  Description of Artificial Sequence: Synthetic oligonucleotide
  Sense strand starting at position 3297 of SEQ ID NO: 3539
cuguauaucugucuacaaa

SEQ ID NO: 275625 - RNA, 19 nt, Artificial Sequence
  Description of Artificial Sequence: Synthetic oligonucleotide
  Antisense strand to SEQ ID NO: 275624
uuuguagacagauauacag

SEQ ID NO: 275626 - RNA, 19 nt, Artificial Sequence
  Description of Artificial Sequence: Synthetic oligonucleotide
  Sense strand starting at position 3322 of SEQ ID NO: 3539
agauuugauuaauacagcu

SEQ ID NO: 275627 - RNA, 19 nt, Artificial Sequence
  Description of Artificial Sequence: Synthetic oligonucleotide
  Antisense strand to SEQ ID NO: 275626
agcuguauuaaucaaaucu

SEQ ID NO: 275628 - RNA, 19 nt, Artificial Sequence
  Description of Artificial Sequence: Synthetic oligonucleotide
  Sense strand starting at position 3756 of SEQ ID NO: 3539
cggcccagcuugucaauuu

SEQ ID NO: 275629 - RNA, 19 nt, Artificial Sequence
  Description of Artificial Sequence: Synthetic oligonucleotide
  Antisense strand to SEQ ID NO: 275628
aaauugacaagcugggccg

SEQ ID NO: 275630 - RNA, 19 nt, Artificial Sequence
  Description of Artificial Sequence: Synthetic oligonucleotide
  Sense strand starting at position 3776 of SEQ ID NO: 3539
ugcaaagaaggcugagauu

SEQ ID NO: 275631 - RNA, 19 nt, Artificial Sequence
  Description of Artificial Sequence: Synthetic oligonucleotide
  Antisense strand to SEQ ID NO: 275630
aaucucagccuucuuugca

SEQ ID NO: 275632 - RNA, 19 nt, Artificial Sequence
  Description of Artificial Sequence: Synthetic oligonucleotide
  Sense strand starting at position 501 of SEQ ID NO: 3540
ggacgaaaugcacguuucu

SEQ ID NO: 275633 - RNA, 19 nt, Artificial Sequence
  Description of Artificial Sequence: Synthetic oligonucleotide
  Antisense strand to SEQ ID NO: 275632
agaaacgugcauuucgucc

SEQ ID NO: 275634 - RNA, 19 nt, Artificial Sequence
  Description of Artificial Sequence: Synthetic oligonucleotide
  Sense strand starting at position 551 of SEQ ID NO: 3540
cucaaacuccuggauuagu

SEQ ID NO: 275635 - RNA, 19 nt, Artificial Sequence
  Description of Artificial Sequence: Synthetic oligonucleotide
  Antisense strand to SEQ ID NO: 275634
acuaauccaggaguuugag

SEQ ID NO: 275636 - RNA, 19 nt, Artificial Sequence
  Description of Artificial Sequence: Synthetic oligonucleotide
  Sense strand starting at position 617 of SEQ ID NO: 3540
agcaguucucaagaacauu

SEQ ID NO: 275637 - RNA, 19 nt, Artificial Sequence
  Description of Artificial Sequence: Synthetic oligonucleotide
  Antisense strand to SEQ ID NO: 275636
aauguucuugagaacugcu

SEQ ID NO: 275638 - RNA, 19 nt, Artificial Sequence
  Description of Artificial Sequence: Synthetic oligonucleotide
  Sense strand starting at position 924 of SEQ ID NO: 3540
aguaguuucucucuuuaaa

SEQ ID NO: 275639 - RNA, 19 nt, Artificial Sequence
  Description of Artificial Sequence: Synthetic oligonucleotide
  Antisense strand to SEQ ID NO: 275638
uuuaaagagagaaacuacu

SEQ ID NO: 275640 - RNA, 19 nt, Artificial Sequence
  Description of Artificial Sequence: Synthetic oligonucleotide
  Sense strand starting at position 992 of SEQ ID NO: 3540
uacaaauacguucgggauc

SEQ ID NO: 275641 - RNA, 19 nt, Artificial Sequence
  Description of Artificial Sequence: Synthetic oligonucleotide
  Antisense strand to SEQ ID NO: 275640
gaucccgaacguauuugua

SEQ ID NO: 275642 - RNA, 19 nt, Artificial Sequence
  Description of Artificial Sequence: Synthetic oligonucleotide
  Sense strand starting at position 995 of SEQ ID NO: 3540
aaauacguucgggaucuuu

SEQ ID NO: 275643 - RNA, 19 nt, Artificial Sequence
  Description of Artificial Sequence: Synthetic oligonucleotide
  Antisense strand to SEQ ID NO: 275642
aaagaucccgaacguauuu

SEQ ID NO: 275644 - RNA, 19 nt, Artificial Sequence
  Description of Artificial Sequence: Synthetic oligonucleotide
  Sense strand starting at position 1005 of SEQ ID NO: 3540
gggaucuuucgagguacgu

SEQ ID NO: 275645 - RNA, 19 nt, Artificial Sequence
  Description of Artificial Sequence: Synthetic oligonucleotide
  Antisense strand to SEQ ID NO: 275644
acguaccucgaaagauccc

SEQ ID NO: 275646 - RNA, 19 nt, Artificial Sequence
  Description of Artificial Sequence: Synthetic oligonucleotide
  Sense strand starting at position 1007 of SEQ ID NO: 3540
gaucuuucgagguacguuu

SEQ ID NO: 275647 - RNA, 19 nt, Artificial Sequence
  Description of Artificial Sequence: Synthetic oligonucleotide
  Antisense strand to SEQ ID NO: 275646
aaacguaccucgaaagauc

SEQ ID NO: 275648 - RNA, 19 nt, Artificial Sequence
  Description of Artificial Sequence: Synthetic oligonucleotide
  Sense strand starting at position 1029 of SEQ ID NO: 3540
agagguaagucuucaagug

SEQ ID NO: 275649 - RNA, 19 nt, Artificial Sequence
  Description of Artificial Sequence: Synthetic oligonucleotide
  Antisense strand to SEQ ID NO: 275648
cacuugaagacuuaccucu

SEQ ID NO: 275650 - RNA, 19 nt, Artificial Sequence
  Description of Artificial Sequence: Synthetic oligonucleotide
  Sense strand starting at position 1112 of SEQ ID NO: 3540
cccgaaacuguccaaacua

SEQ ID NO: 275651 - RNA, 19 nt, Artificial Sequence
  Description of Artificial Sequence: Synthetic oligonucleotide
  Antisense strand to SEQ ID NO: 275650
uaguuuggacaguuucggg

SEQ ID NO: 275652 - RNA, 19 nt, Artificial Sequence
  Description of Artificial Sequence: Synthetic oligonucleotide
  Sense strand starting at position 1161 of SEQ ID NO: 3540
acgaauacaucucuuaaga

SEQ ID NO: 275653 - RNA, 19 nt, Artificial Sequence
  Description of Artificial Sequence: Synthetic oligonucleotide
  Antisense strand to SEQ ID NO: 275652
ucuuaagagauguauucgu

SEQ ID NO: 275654 - RNA, 19 nt, Artificial Sequence
  Description of Artificial Sequence: Synthetic oligonucleotide
  Sense strand starting at position 1210 of SEQ ID NO: 3540
uaccgcguccuguuuaaca

SEQ ID NO: 275655 - RNA, 19 nt, Artificial Sequence
  Description of Artificial Sequence: Synthetic oligonucleotide
  Antisense strand to SEQ ID NO: 275654
uguuaaacaggacgcggua

SEQ ID NO: 275656 - RNA, 19 nt, Artificial Sequence
  Description of Artificial Sequence: Synthetic oligonucleotide
  Sense strand starting at position 2206 of SEQ ID NO: 3540
gggcguccaacuggauuua

SEQ ID NO: 275657 - RNA, 19 nt, Artificial Sequence
  Description of Artificial Sequence: Synthetic oligonucleotide
  Antisense strand to SEQ ID NO: 275656
uaaauccaguuggacgccc

SEQ ID NO: 275658 - RNA, 19 nt, Artificial Sequence
  Description of Artificial Sequence: Synthetic oligonucleotide
  Sense strand starting at position 2332 of SEQ ID NO: 3540
gcuauauugcguuauaacu

SEQ ID NO: 275659 - RNA, 19 nt, Artificial Sequence
  Description of Artificial Sequence: Synthetic oligonucleotide
  Antisense strand to SEQ ID NO: 275658
aguuauaacgcaauauagc

SEQ ID NO: 275660 - RNA, 19 nt, Artificial Sequence
  Description of Artificial Sequence: Synthetic oligonucleotide
  Sense strand starting at position 2370 of SEQ ID NO: 3540
auuuaaaguguacgcguua

SEQ ID NO: 275661 - RNA, 19 nt, Artificial Sequence
  Description of Artificial Sequence: Synthetic oligonucleotide
  Antisense strand to SEQ ID NO: 275660
uaacgcguacacuuuaaau

SEQ ID NO: 275662 - RNA, 19 nt, Artificial Sequence
  Description of Artificial Sequence: Synthetic oligonucleotide
  Sense strand starting at position 2373 of SEQ ID NO: 3540
uaaaguguacgcguuaagu

SEQ ID NO: 275663 - RNA, 19 nt, Artificial Sequence
  Description of Artificial Sequence: Synthetic oligonucleotide
  Antisense strand to SEQ ID NO: 275662
acuuaacgcguacacuuua

SEQ ID NO: 275664 - RNA, 19 nt, Artificial Sequence
  Description of Artificial Sequence: Synthetic oligonucleotide
  Sense strand starting at position 2473 of SEQ ID NO: 3540
cccugauagucccuccuua

SEQ ID NO: 275665 - RNA, 19 nt, Artificial Sequence
  Description of Artificial Sequence: Synthetic oligonucleotide
  Antisense strand to SEQ ID NO: 275664
uaaggagggacuaucaggg

SEQ ID NO: 275666 - RNA, 19 nt, Artificial Sequence
  Description of Artificial Sequence: Synthetic oligonucleotide
  Sense strand starting at position 2672 of SEQ ID NO: 3540
ccaacugaguaguuguagu

SEQ ID NO: 275667 - RNA, 19 nt, Artificial Sequence
  Description of Artificial Sequence: Synthetic oligonucleotide
  Antisense strand to SEQ ID NO: 275666
acuacaacuacucaguugg

SEQ ID NO: 275668 - RNA, 19 nt, Artificial Sequence
  Description of Artificial Sequence: Synthetic oligonucleotide
  Sense strand starting at position 2683 of SEQ ID NO: 3540
guuguaguucuuuauauag

SEQ ID NO: 275669 - RNA, 19 nt, Artificial Sequence
  Description of Artificial Sequence: Synthetic oligonucleotide
  Antisense strand to SEQ ID NO: 275668
cuauauaaagaacuacaac

SEQ ID NO: 275670 - RNA, 19 nt, Artificial Sequence
  Description of Artificial Sequence: Synthetic oligonucleotide
  Sense strand starting at position 2694 of SEQ ID NO: 3540
uuauauagccuauacuagu

SEQ ID NO: 275671 - RNA, 19 nt, Artificial Sequence
  Description of Artificial Sequence: Synthetic oligonucleotide
  Antisense strand to SEQ ID NO: 275670
acuaguauaggcuauauaa

SEQ ID NO: 275672 - RNA, 19 nt, Artificial Sequence
  Description of Artificial Sequence: Synthetic oligonucleotide
  Sense strand starting at position 2852 of SEQ ID NO: 3540
cuaagacaucauuguguaa

SEQ ID NO: 275673 - RNA, 19 nt, Artificial Sequence
  Description of Artificial Sequence: Synthetic oligonucleotide
  Antisense strand to SEQ ID NO: 275672
uuacacaaugaugucuuag

SEQ ID NO: 275674 - RNA, 19 nt, Artificial Sequence
  Description of Artificial Sequence: Synthetic oligonucleotide
  Sense strand starting at position 2905 of SEQ ID NO: 3540
gguacauaauuagcauauu

SEQ ID NO: 275675 - RNA, 19 nt, Artificial Sequence
  Description of Artificial Sequence: Synthetic oligonucleotide
  Antisense strand to SEQ ID NO: 275674
aauaugcuaauuauguacc

SEQ ID NO: 275676 - RNA, 19 nt, Artificial Sequence
  Description of Artificial Sequence: Synthetic oligonucleotide
  Sense strand starting at position 2915 of SEQ ID NO: 3540
uagcauauuuaugagguau

SEQ ID NO: 275677 - RNA, 19 nt, Artificial Sequence
  Description of Artificial Sequence: Synthetic oligonucleotide
  Antisense strand to SEQ ID NO: 275676
auaccucauaaauaugcua

SEQ ID NO: 275678 - RNA, 19 nt, Artificial Sequence
  Description of Artificial Sequence: Synthetic oligonucleotide
  Sense strand starting at position 2951 of SEQ ID NO: 3540
aggcauacgauguaaucau

SEQ ID NO: 275679 - RNA, 19 nt, Artificial Sequence
  Description of Artificial Sequence: Synthetic oligonucleotide
  Antisense strand to SEQ ID NO: 275678
augauuacaucguaugccu

SEQ ID NO: 275680 - RNA, 19 nt, Artificial Sequence
  Description of Artificial Sequence: Synthetic oligonucleotide
  Sense strand starting at position 2962 of SEQ ID NO: 3540
guaaucaucacaggagggu

SEQ ID NO: 275681 - RNA, 19 nt, Artificial Sequence
  Description of Artificial Sequence: Synthetic oligonucleotide
  Antisense strand to SEQ ID NO: 275680
acccuccugugaugauuac

SEQ ID NO: 275682 - RNA, 19 nt, Artificial Sequence
  Description of Artificial Sequence: Synthetic oligonucleotide
  Sense strand starting at position 3034 of SEQ ID NO: 3540
auuguacuuccucaguuau

SEQ ID NO: 275683 - RNA, 19 nt, Artificial Sequence
  Description of Artificial Sequence: Synthetic oligonucleotide
  Antisense strand to SEQ ID NO: 275682
auaacugaggaaguacaau

SEQ ID NO: 275684 - RNA, 19 nt, Artificial Sequence
  Description of Artificial Sequence: Synthetic oligonucleotide
  Sense strand starting at position 3036 of SEQ ID NO: 3540
uguacuuccucaguuauuu

SEQ ID NO: 275685 - RNA, 19 nt, Artificial Sequence
  Description of Artificial Sequence: Synthetic oligonucleotide
  Antisense strand to SEQ ID NO: 275684
aaauaacugaggaaguaca

SEQ ID NO: 275686 - RNA, 19 nt, Artificial Sequence
  Description of Artificial Sequence: Synthetic oligonucleotide
  Sense strand starting at position 3187 of SEQ ID NO: 3540
gucuuugacucauucugag

SEQ ID NO: 275687 - RNA, 19 nt, Artificial Sequence
  Description of Artificial Sequence: Synthetic oligonucleotide
  Antisense strand to SEQ ID NO: 275686
cucagaaugagucaaagac

SEQ ID NO: 275688 - RNA, 19 nt, Artificial Sequence
  Description of Artificial Sequence: Synthetic oligonucleotide
  Sense strand starting at position 3222 of SEQ ID NO: 3540
gugugagaaaggcauauca

SEQ ID NO: 275689 - RNA, 19 nt, Artificial Sequence
  Description of Artificial Sequence: Synthetic oligonucleotide
  Antisense strand to SEQ ID NO: 275688
ugauaugccuuucucacac

SEQ ID NO: 275690 - RNA, 19 nt, Artificial Sequence
  Description of Artificial Sequence: Synthetic oligonucleotide
  Sense strand starting at position 3377 of SEQ ID NO: 3540
ucaguucuauucucuugau

SEQ ID NO: 275691 - RNA, 19 nt, Artificial Sequence
  Description of Artificial Sequence: Synthetic oligonucleotide
  Antisense strand to SEQ ID NO: 275690
aucaagagaauagaacuga

SEQ ID NO: 275692 - RNA, 19 nt, Artificial Sequence
  Description of Artificial Sequence: Synthetic oligonucleotide
  Sense strand starting at position 3383 of SEQ ID NO: 3540
cuauucucuugaucuguau

SEQ ID NO: 275693 - RNA, 19 nt, Artificial Sequence
  Description of Artificial Sequence: Synthetic oligonucleotide
  Antisense strand to SEQ ID NO: 275692
auacagaucaagagaauag

SEQ ID NO: 275694 - RNA, 19 nt, Artificial Sequence
  Description of Artificial Sequence: Synthetic oligonucleotide
  Sense strand starting at position 3387 of SEQ ID NO: 3540
ucucuugaucuguaugucu

SEQ ID NO: 275695 - RNA, 19 nt, Artificial Sequence
  Description of Artificial Sequence: Synthetic oligonucleotide
  Antisense strand to SEQ ID NO: 275694
agacauacagaucaagaga

SEQ ID NO: 275696 - RNA, 19 nt, Artificial Sequence
  Description of Artificial Sequence: Synthetic oligonucleotide
  Sense strand starting at position 3389 of SEQ ID NO: 3540
ucuugaucuguaugucuau

SEQ ID NO: 275697 - RNA, 19 nt, Artificial Sequence
  Description of Artificial Sequence: Synthetic oligonucleotide
  Antisense strand to SEQ ID NO: 275696
auagacauacagaucaaga

SEQ ID NO: 275698 - RNA, 19 nt, Artificial Sequence
  Description of Artificial Sequence: Synthetic oligonucleotide
  Sense strand starting at position 3392 of SEQ ID NO: 3540
ugaucuguaugucuaucua

SEQ ID NO: 275699 - RNA, 19 nt, Artificial Sequence
  Description of Artificial Sequence: Synthetic oligonucleotide
  Antisense strand to SEQ ID NO: 275698
uagauagacauacagauca

SEQ ID NO: 275700 - RNA, 19 nt, Artificial Sequence
  Description of Artificial Sequence: Synthetic oligonucleotide
  Sense strand starting at position 3396 of SEQ ID NO: 3540
cuguaugucuaucuacauu

SEQ ID NO: 275701 - RNA, 19 nt, Artificial Sequence
  Description of Artificial Sequence: Synthetic oligonucleotide
  Antisense strand to SEQ ID NO: 275700
aauguagauagacauacag

SEQ ID NO: 275702 - RNA, 19 nt, Artificial Sequence
  Description of Artificial Sequence: Synthetic oligonucleotide
  Sense strand starting at position 3416 of SEQ ID NO: 3540
aucuguauaucugucuaca

SEQ ID NO: 275703 - RNA, 19 nt, Artificial Sequence
  Description of Artificial Sequence: Synthetic oligonucleotide
  Antisense strand to SEQ ID NO: 275702
uguagacagauauacagau

SEQ ID NO: 275704 - RNA, 19 nt, Artificial Sequence
  Description of Artificial Sequence: Synthetic oligonucleotide
  Sense strand starting at position 3418 of SEQ ID NO: 3540
cuguauaucugucuacaaa

SEQ ID NO: 275705 - RNA, 19 nt, Artificial Sequence
  Description of Artificial Sequence: Synthetic oligonucleotide
  Antisense strand to SEQ ID NO: 275704
uuuguagacagauauacag

SEQ ID NO: 275706 - RNA, 19 nt, Artificial Sequence
  Description of Artificial Sequence: Synthetic oligonucleotide
  Sense strand starting at position 3443 of SEQ ID NO: 3540
agauuugauuaauacagcu

SEQ ID NO: 275707 - RNA, 19 nt, Artificial Sequence
  Description of Artificial Sequence: Synthetic oligonucleotide
  Antisense strand to SEQ ID NO: 275706
agcuguauuaaucaaaucu

SEQ ID NO: 275708 - RNA, 19 nt, Artificial Sequence
  Description of Artificial Sequence: Synthetic oligonucleotide
  Sense strand starting at position 3877 of SEQ ID NO: 3540
cggcccagcuugucaauuu

SEQ ID NO: 275709 - RNA, 19 nt, Artificial Sequence
  Description of Artificial Sequence: Synthetic oligonucleotide
  Antisense strand to SEQ ID NO: 275708
aaauugacaagcugggccg

SEQ ID NO: 275710 - RNA, 19 nt, Artificial Sequence
  Description of Artificial Sequence: Synthetic oligonucleotide
  Sense strand starting at position 3897 of SEQ ID NO: 3540
ugcaaagaaggcugagauu

SEQ ID NO: 275711 - RNA, 19 nt, Artificial Sequence
  Description of Artificial Sequence: Synthetic oligonucleotide
  Antisense strand to SEQ ID NO: 275710
aaucucagccuucuuugca

SEQ ID NO: 275712 - RNA, 19 nt, Artificial Sequence
  Description of Artificial Sequence: Synthetic oligonucleotide
  Sense strand starting at position 336 of SEQ ID NO: 3541
gaggcaggauggcuugaaa

SEQ ID NO: 275713 - RNA, 19 nt, Artificial Sequence
  Description of Artificial Sequence: Synthetic oligonucleotide
  Antisense strand to SEQ ID NO: 275712
uuucaagccauccugccuc

SEQ ID NO: 275714 - RNA, 19 nt, Artificial Sequence
  Description of Artificial Sequence: Synthetic oligonucleotide
  Sense strand starting at position 339 of SEQ ID NO: 3541
gcaggauggcuugaaacua

SEQ ID NO: 275715 - RNA, 19 nt, Artificial Sequence
  Description of Artificial Sequence: Synthetic oligonucleotide
  Antisense strand to SEQ ID NO: 275714
uaguuucaagccauccugc

SEQ ID NO: 275716 - RNA, 19 nt, Artificial Sequence
  Description of Artificial Sequence: Synthetic oligonucleotide
  Sense strand starting at position 555 of SEQ ID NO: 3541
uuucuuagaggguaguauu

SEQ ID NO: 275717 - RNA, 19 nt, Artificial Sequence
  Description of Artificial Sequence: Synthetic oligonucleotide
  Antisense strand to SEQ ID NO: 275716
aauacuacccucuaagaaa

SEQ ID NO: 275718 - RNA, 19 nt, Artificial Sequence
  Description of Artificial Sequence: Synthetic oligonucleotide
  Sense strand starting at position 924 of SEQ ID NO: 3541
aggugccgugauuaacuua

SEQ ID NO: 275719 - RNA, 19 nt, Artificial Sequence
  Description of Artificial Sequence: Synthetic oligonucleotide
  Antisense strand to SEQ ID NO: 275718
uaaguuaaucacggcaccu

SEQ ID NO: 275720 - RNA, 19 nt, Artificial Sequence
  Description of Artificial Sequence: Synthetic oligonucleotide
  Sense strand starting at position 1189 of SEQ ID NO: 3541
guguaagacagcuguauac

SEQ ID NO: 275721 - RNA, 19 nt, Artificial Sequence
  Description of Artificial Sequence: Synthetic oligonucleotide
  Antisense strand to SEQ ID NO: 275720
guauacagcugucuuacac

SEQ ID NO: 275722 - RNA, 19 nt, Artificial Sequence
  Description of Artificial Sequence: Synthetic oligonucleotide
  Sense strand starting at position 1191 of SEQ ID NO: 3541
guaagacagcuguauacau

SEQ ID NO: 275723 - RNA, 19 nt, Artificial Sequence
  Description of Artificial Sequence: Synthetic oligonucleotide
  Antisense strand to SEQ ID NO: 275722
auguauacagcugucuuac

SEQ ID NO: 275724 - RNA, 19 nt, Artificial Sequence
  Description of Artificial Sequence: Synthetic oligonucleotide
  Sense strand starting at position 1264 of SEQ ID NO: 3541
uaaagugcgugcgugagaa

SEQ ID NO: 275725 - RNA, 19 nt, Artificial Sequence
  Description of Artificial Sequence: Synthetic oligonucleotide
  Antisense strand to SEQ ID NO: 275724
uucucacgcacgcacuuua

SEQ ID NO: 275726 - RNA, 19 nt, Artificial Sequence
  Description of Artificial Sequence: Synthetic oligonucleotide
  Sense strand starting at position 1515 of SEQ ID NO: 3541
cccagagguucuguacuaa

SEQ ID NO: 275727 - RNA, 19 nt, Artificial Sequence
  Description of Artificial Sequence: Synthetic oligonucleotide
  Antisense strand to SEQ ID NO: 275726
uuaguacagaaccucuggg

SEQ ID NO: 275728 - RNA, 19 nt, Artificial Sequence
  Description of Artificial Sequence: Synthetic oligonucleotide
  Sense strand starting at position 1567 of SEQ ID NO: 3541
ucccuagugcaacaguaua

SEQ ID NO: 275729 - RNA, 19 nt, Artificial Sequence
  Description of Artificial Sequence: Synthetic oligonucleotide
  Antisense strand to SEQ ID NO: 275728
uauacuguugcacuaggga

SEQ ID NO: 275730 - RNA, 19 nt, Artificial Sequence
  Description of Artificial Sequence: Synthetic oligonucleotide
  Sense strand starting at position 1614 of SEQ ID NO: 3541
cugaguguccggcuuuguu

SEQ ID NO: 275731 - RNA, 19 nt, Artificial Sequence
  Description of Artificial Sequence: Synthetic oligonucleotide
  Antisense strand to SEQ ID NO: 275730
aacaaagccggacacucag

SEQ ID NO: 275732 - RNA, 19 nt, Artificial Sequence
  Description of Artificial Sequence: Synthetic oligonucleotide
  Sense strand starting at position 1616 of SEQ ID NO: 3541
gaguguccggcuuuguuua

SEQ ID NO: 275733 - RNA, 19 nt, Artificial Sequence
  Description of Artificial Sequence: Synthetic oligonucleotide
  Antisense strand to SEQ ID NO: 275732
uaaacaaagccggacacuc

SEQ ID NO: 275734 - RNA, 19 nt, Artificial Sequence
  Description of Artificial Sequence: Synthetic oligonucleotide
  Sense strand starting at position 1627 of SEQ ID NO: 3541
uuuguuuaucuuugacaca

SEQ ID NO: 275735 - RNA, 19 nt, Artificial Sequence
  Description of Artificial Sequence: Synthetic oligonucleotide
  Antisense strand to SEQ ID NO: 275734
ugugucaaagauaaacaaa

SEQ ID NO: 275736 - RNA, 19 nt, Artificial Sequence
  Description of Artificial Sequence: Synthetic oligonucleotide
  Sense strand starting at position 1657 of SEQ ID NO: 3541
cuucgcaguuuaucacaua

SEQ ID NO: 275737 - RNA, 19 nt, Artificial Sequence
  Description of Artificial Sequence: Synthetic oligonucleotide
  Antisense strand to SEQ ID NO: 275736
uaugugauaaacugcgaag

SEQ ID NO: 275738 - RNA, 19 nt, Artificial Sequence
  Description of Artificial Sequence: Synthetic oligonucleotide
  Sense strand starting at position 2312 of SEQ ID NO: 3541
uuuauugauuuguggugga

SEQ ID NO: 275739 - RNA, 19 nt, Artificial Sequence
  Description of Artificial Sequence: Synthetic oligonucleotide
  Antisense strand to SEQ ID NO: 275738
uccaccacaaaucaauaaa

SEQ ID NO: 275740 - RNA, 19 nt, Artificial Sequence
  Description of Artificial Sequence: Synthetic oligonucleotide
  Sense strand starting at position 2315 of SEQ ID NO: 3541
auugauuugugguggauua

SEQ ID NO: 275741 - RNA, 19 nt, Artificial Sequence
  Description of Artificial Sequence: Synthetic oligonucleotide
  Antisense strand to SEQ ID NO: 275740
uaauccaccacaaaucaau

SEQ ID NO: 275742 - RNA, 19 nt, Artificial Sequence
  Description of Artificial Sequence: Synthetic oligonucleotide
  Sense strand starting at position 2322 of SEQ ID NO: 3541
ugugguggauuaucugaua

SEQ ID NO: 275743 - RNA, 19 nt, Artificial Sequence
  Description of Artificial Sequence: Synthetic oligonucleotide
  Antisense strand to SEQ ID NO: 275742
uaucagauaauccaccaca

SEQ ID NO: 275744 - RNA, 19 nt, Artificial Sequence
  Description of Artificial Sequence: Synthetic oligonucleotide
  Sense strand starting at position 2325 of SEQ ID NO: 3541
gguggauuaucugauacuu

SEQ ID NO: 275745 - RNA, 19 nt, Artificial Sequence
  Description of Artificial Sequence: Synthetic oligonucleotide
  Antisense strand to SEQ ID NO: 275744
aaguaucagauaauccacc

SEQ ID NO: 275746 - RNA, 19 nt, Artificial Sequence
  Description of Artificial Sequence: Synthetic oligonucleotide
  Sense strand starting at position 2327 of SEQ ID NO: 3541
uggauuaucugauacuucu

SEQ ID NO: 275747 - RNA, 19 nt, Artificial Sequence
  Description of Artificial Sequence: Synthetic oligonucleotide
  Antisense strand to SEQ ID NO: 275746
agaaguaucagauaaucca

SEQ ID NO: 275748 - RNA, 19 nt, Artificial Sequence
  Description of Artificial Sequence: Synthetic oligonucleotide
  Sense strand starting at position 2342 of SEQ ID NO: 3541
uucugaguacgcggacaau

SEQ ID NO: 275749 - RNA, 19 nt, Artificial Sequence
  Description of Artificial Sequence: Synthetic oligonucleotide
  Antisense strand to SEQ ID NO: 275748
auuguccgcguacucagaa

SEQ ID NO: 275750 - RNA, 19 nt, Artificial Sequence
  Description of Artificial Sequence: Synthetic oligonucleotide
  Sense strand starting at position 2345 of SEQ ID NO: 3541
ugaguacgcggacaaugau

SEQ ID NO: 275751 - RNA, 19 nt, Artificial Sequence
  Description of Artificial Sequence: Synthetic oligonucleotide
  Antisense strand to SEQ ID NO: 275750
aucauuguccgcguacuca

SEQ ID NO: 275752 - RNA, 19 nt, Artificial Sequence
  Description of Artificial Sequence: Synthetic oligonucleotide
  Sense strand starting at position 2348 of SEQ ID NO: 3541
guacgcggacaaugauauu

SEQ ID NO: 275753 - RNA, 19 nt, Artificial Sequence
  Description of Artificial Sequence: Synthetic oligonucleotide
  Antisense strand to SEQ ID NO: 275752
aauaucauuguccgcguac

SEQ ID NO: 275754 - RNA, 19 nt, Artificial Sequence
  Description of Artificial Sequence: Synthetic oligonucleotide
  Sense strand starting at position 2389 of SEQ ID NO: 3541
guuggaacauuugggugau

SEQ ID NO: 275755 - RNA, 19 nt, Artificial Sequence
  Description of Artificial Sequence: Synthetic oligonucleotide
  Antisense strand to SEQ ID NO: 275754
aucacccaaauguuccaac

SEQ ID NO: 275756 - RNA, 19 nt, Artificial Sequence
  Description of Artificial Sequence: Synthetic oligonucleotide
  Sense strand starting at position 2797 of SEQ ID NO: 3541
gguaaauaaucauagcuua

SEQ ID NO: 275757 - RNA, 19 nt, Artificial Sequence
  Description of Artificial Sequence: Synthetic oligonucleotide
  Antisense strand to SEQ ID NO: 275756
uaagcuaugauuauuuacc

SEQ ID NO: 275758 - RNA, 19 nt, Artificial Sequence
  Description of Artificial Sequence: Synthetic oligonucleotide
  Sense strand starting at position 2835 of SEQ ID NO: 3541
cucauuagucaacaauguu

SEQ ID NO: 275759 - RNA, 19 nt, Artificial Sequence
  Description of Artificial Sequence: Synthetic oligonucleotide
  Antisense strand to SEQ ID NO: 275758
aacauuguugacuaaugag

SEQ ID NO: 275760 - RNA, 19 nt, Artificial Sequence
  Description of Artificial Sequence: Synthetic oligonucleotide
  Sense strand starting at position 2841 of SEQ ID NO: 3541
agucaacaauguuuagaug

SEQ ID NO: 275761 - RNA, 19 nt, Artificial Sequence
  Description of Artificial Sequence: Synthetic oligonucleotide
  Antisense strand to SEQ ID NO: 275760
caucuaaacauuguugacu

SEQ ID NO: 275762 - RNA, 19 nt, Artificial Sequence
  Description of Artificial Sequence: Synthetic oligonucleotide
  Sense strand starting at position 2847 of SEQ ID NO: 3541
caauguuuagauggucaua

SEQ ID NO: 275763 - RNA, 19 nt, Artificial Sequence
  Description of Artificial Sequence: Synthetic oligonucleotide
  Antisense strand to SEQ ID NO: 275762
uaugaccaucuaaacauug

SEQ ID NO: 275764 - RNA, 19 nt, Artificial Sequence
  Description of Artificial Sequence: Synthetic oligonucleotide
  Sense strand starting at position 2849 of SEQ ID NO: 3541
auguuuagauggucauauu

SEQ ID NO: 275765 - RNA, 19 nt, Artificial Sequence
  Description of Artificial Sequence: Synthetic oligonucleotide
  Antisense strand to SEQ ID NO: 275764
aauaugaccaucuaaacau

SEQ ID NO: 275766 - RNA, 19 nt, Artificial Sequence
  Description of Artificial Sequence: Synthetic oligonucleotide
  Sense strand starting at position 2850 of SEQ ID NO: 3541
uguuuagauggucauauug

SEQ ID NO: 275767 - RNA, 19 nt, Artificial Sequence
  Description of Artificial Sequence: Synthetic oligonucleotide
  Antisense strand to SEQ ID NO: 275766
caauaugaccaucuaaaca

SEQ ID NO: 275768 - RNA, 19 nt, Artificial Sequence
  Description of Artificial Sequence: Synthetic oligonucleotide
  Sense strand starting at position 2852 of SEQ ID NO: 3541
uuuagauggucauauugua

SEQ ID NO: 275769 - RNA, 19 nt, Artificial Sequence
  Description of Artificial Sequence: Synthetic oligonucleotide
  Antisense strand to SEQ ID NO: 275768
uacaauaugaccaucuaaa

SEQ ID NO: 275770 - RNA, 19 nt, Artificial Sequence
  Description of Artificial Sequence: Synthetic oligonucleotide
  Sense strand starting at position 2865 of SEQ ID NO: 3541
auuguaaacucuguugauu

SEQ ID NO: 275771 - RNA, 19 nt, Artificial Sequence
  Description of Artificial Sequence: Synthetic oligonucleotide
  Antisense strand to SEQ ID NO: 275770
aaucaacagaguuuacaau

SEQ ID NO: 275772 - RNA, 19 nt, Artificial Sequence
  Description of Artificial Sequence: Synthetic oligonucleotide
  Sense strand starting at position 2867 of SEQ ID NO: 3541
uguaaacucuguugauuua

SEQ ID NO: 275773 - RNA, 19 nt, Artificial Sequence
  Description of Artificial Sequence: Synthetic oligonucleotide
  Antisense strand to SEQ ID NO: 275772
uaaaucaacagaguuuaca

SEQ ID NO: 275774 - RNA, 19 nt, Artificial Sequence
  Description of Artificial Sequence: Synthetic oligonucleotide
  Sense strand starting at position 2963 of SEQ ID NO: 3541
gcuuuagcuccggaguuga

SEQ ID NO: 275775 - RNA, 19 nt, Artificial Sequence
  Description of Artificial Sequence: Synthetic oligonucleotide
  Antisense strand to SEQ ID NO: 275774
ucaacuccggagcuaaagc

SEQ ID NO: 275776 - RNA, 19 nt, Artificial Sequence
  Description of Artificial Sequence: Synthetic oligonucleotide
  Sense strand starting at position 3087 of SEQ ID NO: 3541
ggguggaucgcuugaggga

SEQ ID NO: 275777 - RNA, 19 nt, Artificial Sequence
  Description of Artificial Sequence: Synthetic oligonucleotide
  Antisense strand to SEQ ID NO: 275776
ucccucaagcgauccaccc

SEQ ID NO: 275778 - RNA, 19 nt, Artificial Sequence
  Description of Artificial Sequence: Synthetic oligonucleotide
  Sense strand starting at position 3088 of SEQ ID NO: 3541
gguggaucgcuugagggau

SEQ ID NO: 275779 - RNA, 19 nt, Artificial Sequence
  Description of Artificial Sequence: Synthetic oligonucleotide
  Antisense strand to SEQ ID NO: 275778
aucccucaagcgauccacc

SEQ ID NO: 275780 - RNA, 19 nt, Artificial Sequence
  Description of Artificial Sequence: Synthetic oligonucleotide
  Sense strand starting at position 3294 of SEQ ID NO: 3541
gaaaucacgucucuacaga

SEQ ID NO: 275781 - RNA, 19 nt, Artificial Sequence
  Description of Artificial Sequence: Synthetic oligonucleotide
  Antisense strand to SEQ ID NO: 275780
ucuguagagacgugauuuc

SEQ ID NO: 275782 - RNA, 19 nt, Artificial Sequence
  Description of Artificial Sequence: Synthetic oligonucleotide
  Sense strand starting at position 3680 of SEQ ID NO: 3541
agcacugcuucucuaagga

SEQ ID NO: 275783 - RNA, 19 nt, Artificial Sequence
  Description of Artificial Sequence: Synthetic oligonucleotide
  Antisense strand to SEQ ID NO: 275782
uccuuagagaagcagugcu

SEQ ID NO: 275784 - RNA, 19 nt, Artificial Sequence
  Description of Artificial Sequence: Synthetic oligonucleotide
  Sense strand starting at position 3779 of SEQ ID NO: 3541
gccgguguucccuuguaca

SEQ ID NO: 275785 - RNA, 19 nt, Artificial Sequence
  Description of Artificial Sequence: Synthetic oligonucleotide
  Antisense strand to SEQ ID NO: 275784
uguacaagggaacaccggc

SEQ ID NO: 275786 - RNA, 19 nt, Artificial Sequence
  Description of Artificial Sequence: Synthetic oligonucleotide
  Sense strand starting at position 3894 of SEQ ID NO: 3541
cuaugacuucucuaagguc

SEQ ID NO: 275787 - RNA, 19 nt, Artificial Sequence
  Description of Artificial Sequence: Synthetic oligonucleotide
  Antisense strand to SEQ ID NO: 275786
gaccuuagagaagucauag

SEQ ID NO: 275788 - RNA, 19 nt, Artificial Sequence
  Description of Artificial Sequence: Synthetic oligonucleotide
  Sense strand starting at position 3950 of SEQ ID NO: 3541
ggaaaugccuuauaaaugg

SEQ ID NO: 275789 - RNA, 19 nt, Artificial Sequence
  Description of Artificial Sequence: Synthetic oligonucleotide
  Antisense strand to SEQ ID NO: 275788
ccauuuauaaggcauuucc

SEQ ID NO: 275790 - RNA, 19 nt, Artificial Sequence
  Description of Artificial Sequence: Synthetic oligonucleotide
  Sense strand starting at position 3971 of SEQ ID NO: 3541
ggaccaagauuugcgcuua

SEQ ID NO: 275791 - RNA, 19 nt, Artificial Sequence
  Description of Artificial Sequence: Synthetic oligonucleotide
  Antisense strand to SEQ ID NO: 275790
uaagcgcaaaucuuggucc

SEQ ID NO: 275792 - RNA, 19 nt, Artificial Sequence
  Description of Artificial Sequence: Synthetic oligonucleotide
  Sense strand starting at position 38 of SEQ ID NO: 3542
agcuuauauucuguugcua

SEQ ID NO: 275793 - RNA, 19 nt, Artificial Sequence
  Description of Artificial Sequence: Synthetic oligonucleotide
  Antisense strand to SEQ ID NO: 275792
uagcaacagaauauaagcu

SEQ ID NO: 275794 - RNA, 19 nt, Artificial Sequence
  Description of Artificial Sequence: Synthetic oligonucleotide
  Sense strand starting at position 49 of SEQ ID NO: 3542
uguugcuaaacugguuaga

SEQ ID NO: 275795 - RNA, 19 nt, Artificial Sequence
  Description of Artificial Sequence: Synthetic oligonucleotide
  Antisense strand to SEQ ID NO: 275794
ucuaaccaguuuagcaaca

SEQ ID NO: 275796 - RNA, 19 nt, Artificial Sequence
  Description of Artificial Sequence: Synthetic oligonucleotide
  Sense strand starting at position 51 of SEQ ID NO: 3542
uugcuaaacugguuagaug

SEQ ID NO: 275797 - RNA, 19 nt, Artificial Sequence
  Description of Artificial Sequence: Synthetic oligonucleotide
  Antisense strand to SEQ ID NO: 275796
caucuaaccaguuuagcaa

SEQ ID NO: 275798 - RNA, 19 nt, Artificial Sequence
  Description of Artificial Sequence: Synthetic oligonucleotide
  Sense strand starting at position 60 of SEQ ID NO: 3542
ugguuagauggcugcuauu

SEQ ID NO: 275799 - RNA, 19 nt, Artificial Sequence
  Description of Artificial Sequence: Synthetic oligonucleotide
  Antisense strand to SEQ ID NO: 275798
aauagcagccaucuaacca

SEQ ID NO: 275800 - RNA, 19 nt, Artificial Sequence
  Description of Artificial Sequence: Synthetic oligonucleotide
  Sense strand starting at position 88 of SEQ ID NO: 3542
ucagauucuucccugaaag

SEQ ID NO: 275801 - RNA, 19 nt, Artificial Sequence
  Description of Artificial Sequence: Synthetic oligonucleotide
  Antisense strand to SEQ ID NO: 275800
cuuucagggaagaaucuga

SEQ ID NO: 275802 - RNA, 19 nt, Artificial Sequence
  Description of Artificial Sequence: Synthetic oligonucleotide
  Sense strand starting at position 149 of SEQ ID NO: 3542
guauuugcuuauguguauu

SEQ ID NO: 275803 - RNA, 19 nt, Artificial Sequence
  Description of Artificial Sequence: Synthetic oligonucleotide
  Antisense strand to SEQ ID NO: 275802
aauacacauaagcaaauac

SEQ ID NO: 275804 - RNA, 19 nt, Artificial Sequence
  Description of Artificial Sequence: Synthetic oligonucleotide
  Sense strand starting at position 231 of SEQ ID NO: 3542
ggaaauaucaaauguugug

SEQ ID NO: 275805 - RNA, 19 nt, Artificial Sequence
  Description of Artificial Sequence: Synthetic oligonucleotide
  Antisense strand to SEQ ID NO: 275804
cacaacauuugauauuucc

SEQ ID NO: 275806 - RNA, 19 nt, Artificial Sequence
  Description of Artificial Sequence: Synthetic oligonucleotide
  Sense strand starting at position 260 of SEQ ID NO: 3542
uagggaaaguauuauaauc

SEQ ID NO: 275807 - RNA, 19 nt, Artificial Sequence
  Description of Artificial Sequence: Synthetic oligonucleotide
  Antisense strand to SEQ ID NO: 275806
gauuauaauacuuucccua

SEQ ID NO: 275808 - RNA, 19 nt, Artificial Sequence
  Description of Artificial Sequence: Synthetic oligonucleotide
  Sense strand starting at position 262 of SEQ ID NO: 3542
gggaaaguauuauaaucca

SEQ ID NO: 275809 - RNA, 19 nt, Artificial Sequence
  Description of Artificial Sequence: Synthetic oligonucleotide
  Antisense strand to SEQ ID NO: 275808
uggauuauaauacuuuccc

SEQ ID NO: 275810 - RNA, 19 nt, Artificial Sequence
  Description of Artificial Sequence: Synthetic oligonucleotide
  Sense strand starting at position 316 of SEQ ID NO: 3542
uuugcucauccugagauua

SEQ ID NO: 275811 - RNA, 19 nt, Artificial Sequence
  Description of Artificial Sequence: Synthetic oligonucleotide
  Antisense strand to SEQ ID NO: 275810
uaaucucaggaugagcaaa

SEQ ID NO: 275812 - RNA, 19 nt, Artificial Sequence
  Description of Artificial Sequence: Synthetic oligonucleotide
  Sense strand starting at position 481 of SEQ ID NO: 3542
guccuuacaccaugacaua

SEQ ID NO: 275813 - RNA, 19 nt, Artificial Sequence
  Description of Artificial Sequence: Synthetic oligonucleotide
  Antisense strand to SEQ ID NO: 275812
uaugucaugguguaaggac

SEQ ID NO: 275814 - RNA, 19 nt, Artificial Sequence
  Description of Artificial Sequence: Synthetic oligonucleotide
  Sense strand starting at position 535 of SEQ ID NO: 3542
acaguaagucauuaaagug

SEQ ID NO: 275815 - RNA, 19 nt, Artificial Sequence
  Description of Artificial Sequence: Synthetic oligonucleotide
  Antisense strand to SEQ ID NO: 275814
cacuuuaaugacuuacugu

SEQ ID NO: 275816 - RNA, 19 nt, Artificial Sequence
  Description of Artificial Sequence: Synthetic oligonucleotide
  Sense strand starting at position 552 of SEQ ID NO: 3542
uggccauaaucugugcaga

SEQ ID NO: 275817 - RNA, 19 nt, Artificial Sequence
  Description of Artificial Sequence: Synthetic oligonucleotide
  Antisense strand to SEQ ID NO: 275816
ucugcacagauuauggcca

SEQ ID NO: 275818 - RNA, 19 nt, Artificial Sequence
  Description of Artificial Sequence: Synthetic oligonucleotide
  Sense strand starting at position 553 of SEQ ID NO: 3542
ggccauaaucugugcagag

SEQ ID NO: 275819 - RNA, 19 nt, Artificial Sequence
  Description of Artificial Sequence: Synthetic oligonucleotide
  Antisense strand to SEQ ID NO: 275818
cucugcacagauuauggcc

SEQ ID NO: 275820 - RNA, 19 nt, Artificial Sequence
  Description of Artificial Sequence: Synthetic oligonucleotide
  Sense strand starting at position 554 of SEQ ID NO: 3542
gccauaaucugugcagagu

SEQ ID NO: 275821 - RNA, 19 nt, Artificial Sequence
  Description of Artificial Sequence: Synthetic oligonucleotide
  Antisense strand to SEQ ID NO: 275820
acucugcacagauuauggc

SEQ ID NO: 275822 - RNA, 19 nt, Artificial Sequence
  Description of Artificial Sequence: Synthetic oligonucleotide
  Sense strand starting at position 555 of SEQ ID NO: 3542
ccauaaucugugcagaguu

SEQ ID NO: 275823 - RNA, 19 nt, Artificial Sequence
  Description of Artificial Sequence: Synthetic oligonucleotide
  Antisense strand to SEQ ID NO: 275822
aacucugcacagauuaugg

SEQ ID NO: 275824 - RNA, 19 nt, Artificial Sequence
  Description of Artificial Sequence: Synthetic oligonucleotide
  Sense strand starting at position 557 of SEQ ID NO: 3542
auaaucugugcagaguuua

SEQ ID NO: 275825 - RNA, 19 nt, Artificial Sequence
  Description of Artificial Sequence: Synthetic oligonucleotide
  Antisense strand to SEQ ID NO: 275824
uaaacucugcacagauuau

SEQ ID NO: 275826 - RNA, 19 nt, Artificial Sequence
  Description of Artificial Sequence: Synthetic oligonucleotide
  Sense strand starting at position 632 of SEQ ID NO: 3542
uccagccauucuguaagaa

SEQ ID NO: 275827 - RNA, 19 nt, Artificial Sequence
  Description of Artificial Sequence: Synthetic oligonucleotide
  Antisense strand to SEQ ID NO: 275826
uucuuacagaauggcugga

SEQ ID NO: 275828 - RNA, 19 nt, Artificial Sequence
  Description of Artificial Sequence: Synthetic oligonucleotide
  Sense strand starting at position 633 of SEQ ID NO: 3542
ccagccauucuguaagaac

SEQ ID NO: 275829 - RNA, 19 nt, Artificial Sequence
  Description of Artificial Sequence: Synthetic oligonucleotide
  Antisense strand to SEQ ID NO: 275828
guucuuacagaauggcugg

SEQ ID NO: 275830 - RNA, 19 nt, Artificial Sequence
  Description of Artificial Sequence: Synthetic oligonucleotide
  Sense strand starting at position 708 of SEQ ID NO: 3542
gucucuccuucgcuggaaa

SEQ ID NO: 275831 - RNA, 19 nt, Artificial Sequence
  Description of Artificial Sequence: Synthetic oligonucleotide
  Antisense strand to SEQ ID NO: 275830
uuuccagcgaaggagagac

SEQ ID NO: 275832 - RNA, 19 nt, Artificial Sequence
  Description of Artificial Sequence: Synthetic oligonucleotide
  Sense strand starting at position 733 of SEQ ID NO: 3542
uuaccugagccuugaucau

SEQ ID NO: 275833 - RNA, 19 nt, Artificial Sequence
  Description of Artificial Sequence: Synthetic oligonucleotide
  Antisense strand to SEQ ID NO: 275832
augaucaaggcucagguaa

SEQ ID NO: 275834 - RNA, 19 nt, Artificial Sequence
  Description of Artificial Sequence: Synthetic oligonucleotide
  Sense strand starting at position 890 of SEQ ID NO: 3542
cagcuaggucuuggagaga

SEQ ID NO: 275835 - RNA, 19 nt, Artificial Sequence
  Description of Artificial Sequence: Synthetic oligonucleotide
  Antisense strand to SEQ ID NO: 275834
ucucuccaagaccuagcug

SEQ ID NO: 275836 - RNA, 19 nt, Artificial Sequence
  Description of Artificial Sequence: Synthetic oligonucleotide
  Sense strand starting at position 1097 of SEQ ID NO: 3542
uugcgauagcguguaugga

SEQ ID NO: 275837 - RNA, 19 nt, Artificial Sequence
  Description of Artificial Sequence: Synthetic oligonucleotide
  Antisense strand to SEQ ID NO: 275836
uccauacacgcuaucgcaa

SEQ ID NO: 275838 - RNA, 19 nt, Artificial Sequence
  Description of Artificial Sequence: Synthetic oligonucleotide
  Sense strand starting at position 1098 of SEQ ID NO: 3542
ugcgauagcguguauggaa

SEQ ID NO: 275839 - RNA, 19 nt, Artificial Sequence
  Description of Artificial Sequence: Synthetic oligonucleotide
  Antisense strand to SEQ ID NO: 275838
uuccauacacgcuaucgca

SEQ ID NO: 275840 - RNA, 19 nt, Artificial Sequence
  Description of Artificial Sequence: Synthetic oligonucleotide
  Sense strand starting at position 1099 of SEQ ID NO: 3542
gcgauagcguguauggaau

SEQ ID NO: 275841 - RNA, 19 nt, Artificial Sequence
  Description of Artificial Sequence: Synthetic oligonucleotide
  Antisense strand to SEQ ID NO: 275840
auuccauacacgcuaucgc

SEQ ID NO: 275842 - RNA, 19 nt, Artificial Sequence
  Description of Artificial Sequence: Synthetic oligonucleotide
  Sense strand starting at position 1661 of SEQ ID NO: 3542
cgcagaaaguuugucgaga

SEQ ID NO: 275843 - RNA, 19 nt, Artificial Sequence
  Description of Artificial Sequence: Synthetic oligonucleotide
  Antisense strand to SEQ ID NO: 275842
ucucgacaaacuuucugcg

SEQ ID NO: 275844 - RNA, 19 nt, Artificial Sequence
  Description of Artificial Sequence: Synthetic oligonucleotide
  Sense strand starting at position 1662 of SEQ ID NO: 3542
gcagaaaguuugucgagaa

SEQ ID NO: 275845 - RNA, 19 nt, Artificial Sequence
  Description of Artificial Sequence: Synthetic oligonucleotide
  Antisense strand to SEQ ID NO: 275844
uucucgacaaacuuucugc

SEQ ID NO: 275846 - RNA, 19 nt, Artificial Sequence
  Description of Artificial Sequence: Synthetic oligonucleotide
  Sense strand starting at position 1903 of SEQ ID NO: 3542
gcuccucuguccuuauaua

SEQ ID NO: 275847 - RNA, 19 nt, Artificial Sequence
  Description of Artificial Sequence: Synthetic oligonucleotide
  Antisense strand to SEQ ID NO: 275846
uauauaaggacagaggagc

SEQ ID NO: 275848 - RNA, 19 nt, Artificial Sequence
  Description of Artificial Sequence: Synthetic oligonucleotide
  Sense strand starting at position 2269 of SEQ ID NO: 3542
uucgcauuuggcgguaaau

SEQ ID NO: 275849 - RNA, 19 nt, Artificial Sequence
  Description of Artificial Sequence: Synthetic oligonucleotide
  Antisense strand to SEQ ID NO: 275848
auuuaccgccaaaugcgaa

SEQ ID NO: 275850 - RNA, 19 nt, Artificial Sequence
  Description of Artificial Sequence: Synthetic oligonucleotide
  Sense strand starting at position 2271 of SEQ ID NO: 3542
cgcauuuggcgguaaauau

SEQ ID NO: 275851 - RNA, 19 nt, Artificial Sequence
  Description of Artificial Sequence: Synthetic oligonucleotide
  Antisense strand to SEQ ID NO: 275850
auauuuaccgccaaaugcg

SEQ ID NO: 275852 - RNA, 19 nt, Artificial Sequence
  Description of Artificial Sequence: Synthetic oligonucleotide
  Sense strand starting at position 2333 of SEQ ID NO: 3542
gaaacugugauguggaagu

SEQ ID NO: 275853 - RNA, 19 nt, Artificial Sequence
  Description of Artificial Sequence: Synthetic oligonucleotide
  Antisense strand to SEQ ID NO: 275852
acuuccacaucacaguuuc

SEQ ID NO: 275854 - RNA, 19 nt, Artificial Sequence
  Description of Artificial Sequence: Synthetic oligonucleotide
  Sense strand starting at position 2357 of SEQ ID NO: 3542
ggaaucauauucucucugu

SEQ ID NO: 275855 - RNA, 19 nt, Artificial Sequence
  Description of Artificial Sequence: Synthetic oligonucleotide
  Antisense strand to SEQ ID NO: 275854
acagagagaauaugauucc

SEQ ID NO: 275856 - RNA, 19 nt, Artificial Sequence
  Description of Artificial Sequence: Synthetic oligonucleotide
  Sense strand starting at position 2748 of SEQ ID NO: 3542
cuaccuuaaccuggaguaa

SEQ ID NO: 275857 - RNA, 19 nt, Artificial Sequence
  Description of Artificial Sequence: Synthetic oligonucleotide
  Antisense strand to SEQ ID NO: 275856
uuacuccagguuaagguag

SEQ ID NO: 275858 - RNA, 19 nt, Artificial Sequence
  Description of Artificial Sequence: Synthetic oligonucleotide
  Sense strand starting at position 2855 of SEQ ID NO: 3542
ugccaaaugccagaacuuu

SEQ ID NO: 275859 - RNA, 19 nt, Artificial Sequence
  Description of Artificial Sequence: Synthetic oligonucleotide
  Antisense strand to SEQ ID NO: 275858
aaaguucuggcauuuggca

SEQ ID NO: 275860 - RNA, 19 nt, Artificial Sequence
  Description of Artificial Sequence: Synthetic oligonucleotide
  Sense strand starting at position 2863 of SEQ ID NO: 3542
gccagaacuuuccugauuc

SEQ ID NO: 275861 - RNA, 19 nt, Artificial Sequence
  Description of Artificial Sequence: Synthetic oligonucleotide
  Antisense strand to SEQ ID NO: 275860
gaaucaggaaaguucuggc

SEQ ID NO: 275862 - RNA, 19 nt, Artificial Sequence
  Description of Artificial Sequence: Synthetic oligonucleotide
  Sense strand starting at position 2934 of SEQ ID NO: 3542
uggugacauuggcuuuaca

SEQ ID NO: 275863 - RNA, 19 nt, Artificial Sequence
  Description of Artificial Sequence: Synthetic oligonucleotide
  Antisense strand to SEQ ID NO: 275862
uguaaagccaaugucacca

SEQ ID NO: 275864 - RNA, 19 nt, Artificial Sequence
  Description of Artificial Sequence: Synthetic oligonucleotide
  Sense strand starting at position 3106 of SEQ ID NO: 3542
gcuagaacauggcuuucuu

SEQ ID NO: 275865 - RNA, 19 nt, Artificial Sequence
  Description of Artificial Sequence: Synthetic oligonucleotide
  Antisense strand to SEQ ID NO: 275864
aagaaagccauguucuagc

SEQ ID NO: 275866 - RNA, 19 nt, Artificial Sequence
  Description of Artificial Sequence: Synthetic oligonucleotide
  Sense strand starting at position 3123 of SEQ ID NO: 3542
uugggucuccauuguccaa

SEQ ID NO: 275867 - RNA, 19 nt, Artificial Sequence
  Description of Artificial Sequence: Synthetic oligonucleotide
  Antisense strand to SEQ ID NO: 275866
uuggacaauggagacccaa

SEQ ID NO: 275868 - RNA, 19 nt, Artificial Sequence
  Description of Artificial Sequence: Synthetic oligonucleotide
  Sense strand starting at position 3183 of SEQ ID NO: 3542
ccaggagcuugacucacau

SEQ ID NO: 275869 - RNA, 19 nt, Artificial Sequence
  Description of Artificial Sequence: Synthetic oligonucleotide
  Antisense strand to SEQ ID NO: 275868
augugagucaagcuccugg

SEQ ID NO: 275870 - RNA, 19 nt, Artificial Sequence
  Description of Artificial Sequence: Synthetic oligonucleotide
  Sense strand starting at position 3826 of SEQ ID NO: 3542
ucaaguaauccacaucagu

SEQ ID NO: 275871 - RNA, 19 nt, Artificial Sequence
  Description of Artificial Sequence: Synthetic oligonucleotide
  Antisense strand to SEQ ID NO: 275870
acugauguggauuacuuga

SEQ ID NO: 275872 - RNA, 19 nt, Artificial Sequence
  Description of Artificial Sequence: Synthetic oligonucleotide
  Sense strand starting at position 173 of SEQ ID NO: 3543
gcauuuguauguuucucuu

SEQ ID NO: 275873 - RNA, 19 nt, Artificial Sequence
  Description of Artificial Sequence: Synthetic oligonucleotide
  Antisense strand to SEQ ID NO: 275872
aagagaaacauacaaaugc

SEQ ID NO: 275874 - RNA, 19 nt, Artificial Sequence
  Description of Artificial Sequence: Synthetic oligonucleotide
  Sense strand starting at position 179 of SEQ ID NO: 3543
guauguuucucuucuggua

SEQ ID NO: 275875 - RNA, 19 nt, Artificial Sequence
  Description of Artificial Sequence: Synthetic oligonucleotide
  Antisense strand to SEQ ID NO: 275874
uaccagaagagaaacauac

SEQ ID NO: 275876 - RNA, 19 nt, Artificial Sequence
  Description of Artificial Sequence: Synthetic oligonucleotide
  Sense strand starting at position 334 of SEQ ID NO: 3543
agcgcuaaauucuuaacau

SEQ ID NO: 275877 - RNA, 19 nt, Artificial Sequence
  Description of Artificial Sequence: Synthetic oligonucleotide
  Antisense strand to SEQ ID NO: 275876
auguuaagaauuuagcgcu

SEQ ID NO: 275878 - RNA, 19 nt, Artificial Sequence
  Description of Artificial Sequence: Synthetic oligonucleotide
  Sense strand starting at position 335 of SEQ ID NO: 3543
gcgcuaaauucuuaacaua

SEQ ID NO: 275879 - RNA, 19 nt, Artificial Sequence
  Description of Artificial Sequence: Synthetic oligonucleotide
  Antisense strand to SEQ ID NO: 275878
uauguuaagaauuuagcgc

SEQ ID NO: 275880 - RNA, 19 nt, Artificial Sequence
  Description of Artificial Sequence: Synthetic oligonucleotide
  Sense strand starting at position 373 of SEQ ID NO: 3543
uuccuauucuguuguauuc

SEQ ID NO: 275881 - RNA, 19 nt, Artificial Sequence
  Description of Artificial Sequence: Synthetic oligonucleotide
  Antisense strand to SEQ ID NO: 275880
gaauacaacagaauaggaa

SEQ ID NO: 275882 - RNA, 19 nt, Artificial Sequence
  Description of Artificial Sequence: Synthetic oligonucleotide
  Sense strand starting at position 1200 of SEQ ID NO: 3543
gucuauuaguguucuauga

SEQ ID NO: 275883 - RNA, 19 nt, Artificial Sequence
  Description of Artificial Sequence: Synthetic oligonucleotide
  Antisense strand to SEQ ID NO: 275882
ucauagaacacuaauagac

SEQ ID NO: 275884 - RNA, 19 nt, Artificial Sequence
  Description of Artificial Sequence: Synthetic oligonucleotide
  Sense strand starting at position 1202 of SEQ ID NO: 3543
cuauuaguguucuaugagg

SEQ ID NO: 275885 - RNA, 19 nt, Artificial Sequence
  Description of Artificial Sequence: Synthetic oligonucleotide
  Antisense strand to SEQ ID NO: 275884
ccucauagaacacuaauag

SEQ ID NO: 275886 - RNA, 19 nt, Artificial Sequence
  Description of Artificial Sequence: Synthetic oligonucleotide
  Sense strand starting at position 1204 of SEQ ID NO: 3543
auuaguguucuaugaggga

SEQ ID NO: 275887 - RNA, 19 nt, Artificial Sequence
  Description of Artificial Sequence: Synthetic oligonucleotide
  Antisense strand to SEQ ID NO: 275886
ucccucauagaacacuaau

SEQ ID NO: 275888 - RNA, 19 nt, Artificial Sequence
  Description of Artificial Sequence: Synthetic oligonucleotide
  Sense strand starting at position 1217 of SEQ ID NO: 3543
gagggaaauuaugauugga

SEQ ID NO: 275889 - RNA, 19 nt, Artificial Sequence
  Description of Artificial Sequence: Synthetic oligonucleotide
  Antisense strand to SEQ ID NO: 275888
uccaaucauaauuucccuc

SEQ ID NO: 275890 - RNA, 19 nt, Artificial Sequence
  Description of Artificial Sequence: Synthetic oligonucleotide
  Sense strand starting at position 2306 of SEQ ID NO: 3543
cgucaauccaagcaggaaa

SEQ ID NO: 275891 - RNA, 19 nt, Artificial Sequence
  Description of Artificial Sequence: Synthetic oligonucleotide
  Antisense strand to SEQ ID NO: 275890
uuuccugcuuggauugacg

SEQ ID NO: 275892 - RNA, 19 nt, Artificial Sequence
  Description of Artificial Sequence: Synthetic oligonucleotide
  Sense strand starting at position 2675 of SEQ ID NO: 3543
aagucuuggcgccacgaau

SEQ ID NO: 275893 - RNA, 19 nt, Artificial Sequence
  Description of Artificial Sequence: Synthetic oligonucleotide
  Antisense strand to SEQ ID NO: 275892
auucguggcgccaagacuu

SEQ ID NO: 275894 - RNA, 19 nt, Artificial Sequence
  Description of Artificial Sequence: Synthetic oligonucleotide
  Sense strand starting at position 2703 of SEQ ID NO: 3543
agccuugaguuccggcaaa

SEQ ID NO: 275895 - RNA, 19 nt, Artificial Sequence
  Description of Artificial Sequence: Synthetic oligonucleotide
  Antisense strand to SEQ ID NO: 275894
uuugccggaacucaaggcu

SEQ ID NO: 275896 - RNA, 19 nt, Artificial Sequence
  Description of Artificial Sequence: Synthetic oligonucleotide
  Sense strand starting at position 2715 of SEQ ID NO: 3543
cggcaaacuucgugggagu

SEQ ID NO: 275897 - RNA, 19 nt, Artificial Sequence
  Description of Artificial Sequence: Synthetic oligonucleotide
  Antisense strand to SEQ ID NO: 275896
acucccacgaaguuugccg

SEQ ID NO: 275898 - RNA, 19 nt, Artificial Sequence
  Description of Artificial Sequence: Synthetic oligonucleotide
  Sense strand starting at position 2717 of SEQ ID NO: 3543
gcaaacuucgugggaguca

SEQ ID NO: 275899 - RNA, 19 nt, Artificial Sequence
  Description of Artificial Sequence: Synthetic oligonucleotide
  Antisense strand to SEQ ID NO: 275898
ugacucccacgaaguuugc

SEQ ID NO: 275900 - RNA, 19 nt, Artificial Sequence
  Description of Artificial Sequence: Synthetic oligonucleotide
  Sense strand starting at position 2753 of SEQ ID NO: 3543
cugagaagccucuggugaa

SEQ ID NO: 275901 - RNA, 19 nt, Artificial Sequence
  Description of Artificial Sequence: Synthetic oligonucleotide
  Antisense strand to SEQ ID NO: 275900
uucaccagaggcuucucag

SEQ ID NO: 275902 - RNA, 19 nt, Artificial Sequence
  Description of Artificial Sequence: Synthetic oligonucleotide
  Sense strand starting at position 2801 of SEQ ID NO: 3543
gggcuaagcgucuggaacu

SEQ ID NO: 275903 - RNA, 19 nt, Artificial Sequence
  Description of Artificial Sequence: Synthetic oligonucleotide
  Antisense strand to SEQ ID NO: 275902
aguuccagacgcuuagccc

SEQ ID NO: 275904 - RNA, 19 nt, Artificial Sequence
  Description of Artificial Sequence: Synthetic oligonucleotide
  Sense strand starting at position 2802 of SEQ ID NO: 3543
ggcuaagcgucuggaacuu

SEQ ID NO: 275905 - RNA, 19 nt, Artificial Sequence
  Description of Artificial Sequence: Synthetic oligonucleotide
  Antisense strand to SEQ ID NO: 275904
aaguuccagacgcuuagcc

SEQ ID NO: 275906 - RNA, 19 nt, Artificial Sequence
  Description of Artificial Sequence: Synthetic oligonucleotide
  Sense strand starting at position 2828 of SEQ ID NO: 3543
cugacagccuccuuugaaa

SEQ ID NO: 275907 - RNA, 19 nt, Artificial Sequence
  Description of Artificial Sequence: Synthetic oligonucleotide
  Antisense strand to SEQ ID NO: 275906
uuucaaaggaggcugucag

SEQ ID NO: 275908 - RNA, 19 nt, Artificial Sequence
  Description of Artificial Sequence: Synthetic oligonucleotide
  Sense strand starting at position 2914 of SEQ ID NO: 3543
gacggagcuggcugcaaau

SEQ ID NO: 275909 - RNA, 19 nt, Artificial Sequence
  Description of Artificial Sequence: Synthetic oligonucleotide
  Antisense strand to SEQ ID NO: 275908
auuugcagccagcuccguc

SEQ ID NO: 275910 - RNA, 19 nt, Artificial Sequence
  Description of Artificial Sequence: Synthetic oligonucleotide
  Sense strand starting at position 3541 of SEQ ID NO: 3543
uauaguuacgugugacuua

SEQ ID NO: 275911 - RNA, 19 nt, Artificial Sequence
  Description of Artificial Sequence: Synthetic oligonucleotide
  Antisense strand to SEQ ID NO: 275910
uaagucacacguaacuaua

SEQ ID NO: 275912 - RNA, 19 nt, Artificial Sequence
  Description of Artificial Sequence: Synthetic oligonucleotide
  Sense strand starting at position 3544 of SEQ ID NO: 3543
aguuacgugugacuuacua

SEQ ID NO: 275913 - RNA, 19 nt, Artificial Sequence
  Description of Artificial Sequence: Synthetic oligonucleotide
  Antisense strand to SEQ ID NO: 275912
uaguaagucacacguaacu

SEQ ID NO: 275914 - RNA, 19 nt, Artificial Sequence
  Description of Artificial Sequence: Synthetic oligonucleotide
  Sense strand starting at position 3548 of SEQ ID NO: 3543
acgugugacuuacuacuuu

SEQ ID NO: 275915 - RNA, 19 nt, Artificial Sequence
  Description of Artificial Sequence: Synthetic oligonucleotide
  Antisense strand to SEQ ID NO: 275914
aaaguaguaagucacacgu

SEQ ID NO: 275916 - RNA, 19 nt, Artificial Sequence
  Description of Artificial Sequence: Synthetic oligonucleotide
  Sense strand starting at position 3689 of SEQ ID NO: 3543
cauggacauuucuguuguu

SEQ ID NO: 275917 - RNA, 19 nt, Artificial Sequence
  Description of Artificial Sequence: Synthetic oligonucleotide
  Antisense strand to SEQ ID NO: 275916
aacaacagaaauguccaug

SEQ ID NO: 275918 - RNA, 19 nt, Artificial Sequence
  Description of Artificial Sequence: Synthetic oligonucleotide
  Sense strand starting at position 3730 of SEQ ID NO: 3543
uaccuuuauguguaaggca

SEQ ID NO: 275919 - RNA, 19 nt, Artificial Sequence
  Description of Artificial Sequence: Synthetic oligonucleotide
  Antisense strand to SEQ ID NO: 275918
ugccuuacacauaaaggua

SEQ ID NO: 275920 - RNA, 19 nt, Artificial Sequence
  Description of Artificial Sequence: Synthetic oligonucleotide
  Sense strand starting at position 3768 of SEQ ID NO: 3543
gguguauacauaggaguga

SEQ ID NO: 275921 - RNA, 19 nt, Artificial Sequence
  Description of Artificial Sequence: Synthetic oligonucleotide
  Antisense strand to SEQ ID NO: 275920
ucacuccuauguauacacc

SEQ ID NO: 275922 - RNA, 19 nt, Artificial Sequence
  Description of Artificial Sequence: Synthetic oligonucleotide
  Sense strand starting at position 3867 of SEQ ID NO: 3543
ccagcagcauauguugaau

SEQ ID NO: 275923 - RNA, 19 nt, Artificial Sequence
  Description of Artificial Sequence: Synthetic oligonucleotide
  Antisense strand to SEQ ID NO: 275922
auucaacauaugcugcugg

SEQ ID NO: 275924 - RNA, 19 nt, Artificial Sequence
  Description of Artificial Sequence: Synthetic oligonucleotide
  Sense strand starting at position 3922 of SEQ ID NO: 3543
aagauuagguagucugaug

SEQ ID NO: 275925 - RNA, 19 nt, Artificial Sequence
  Description of Artificial Sequence: Synthetic oligonucleotide
  Antisense strand to SEQ ID NO: 275924
caucagacuaccuaaucuu

SEQ ID NO: 275926 - RNA, 19 nt, Artificial Sequence
  Description of Artificial Sequence: Synthetic oligonucleotide
  Sense strand starting at position 190 of SEQ ID NO: 3544
acucaugccuggcucagaa

SEQ ID NO: 275927 - RNA, 19 nt, Artificial Sequence
  Description of Artificial Sequence: Synthetic oligonucleotide
  Antisense strand to SEQ ID NO: 275926
uucugagccaggcaugagu

SEQ ID NO: 275928 - RNA, 19 nt, Artificial Sequence
  Description of Artificial Sequence: Synthetic oligonucleotide
  Sense strand starting at position 412 of SEQ ID NO: 3544
aauugcugucgccaucaau

SEQ ID NO: 275929 - RNA, 19 nt, Artificial Sequence
  Description of Artificial Sequence: Synthetic oligonucleotide
  Antisense strand to SEQ ID NO: 275928
auugauggcgacagcaauu

SEQ ID NO: 275930 - RNA, 19 nt, Artificial Sequence
  Description of Artificial Sequence: Synthetic oligonucleotide
  Sense strand starting at position 566 of SEQ ID NO: 3544
cagcguaccacaggugauu

SEQ ID NO: 275931 - RNA, 19 nt, Artificial Sequence
  Description of Artificial Sequence: Synthetic oligonucleotide
  Antisense strand to SEQ ID NO: 275930
aaucaccugugguacgcug

SEQ ID NO: 275932 - RNA, 19 nt, Artificial Sequence
  Description of Artificial Sequence: Synthetic oligonucleotide
  Sense strand starting at position 797 of SEQ ID NO: 3544
gugagugccuaugcugaaa

SEQ ID NO: 275933 - RNA, 19 nt, Artificial Sequence
  Description of Artificial Sequence: Synthetic oligonucleotide
  Antisense strand to SEQ ID NO: 275932
uuucagcauaggcacucac

SEQ ID NO: 275934 - RNA, 19 nt, Artificial Sequence
  Description of Artificial Sequence: Synthetic oligonucleotide
  Sense strand starting at position 829 of SEQ ID NO: 3544
ggugcaacuggccagaaau

SEQ ID NO: 275935 - RNA, 19 nt, Artificial Sequence
  Description of Artificial Sequence: Synthetic oligonucleotide
  Antisense strand to SEQ ID NO: 275934
auuucuggccaguugcacc

SEQ ID NO: 275936 - RNA, 19 nt, Artificial Sequence
  Description of Artificial Sequence: Synthetic oligonucleotide
  Sense strand starting at position 1089 of SEQ ID NO: 3544
cccugcccugcucaagauu

SEQ ID NO: 275937 - RNA, 19 nt, Artificial Sequence
  Description of Artificial Sequence: Synthetic oligonucleotide
  Antisense strand to SEQ ID NO: 275936
aaucuugagcagggcaggg

SEQ ID NO: 275938 - RNA, 19 nt, Artificial Sequence
  Description of Artificial Sequence: Synthetic oligonucleotide
  Sense strand starting at position 1395 of SEQ ID NO: 3544
gguguugcugcacaagaca

SEQ ID NO: 275939 - RNA, 19 nt, Artificial Sequence
  Description of Artificial Sequence: Synthetic oligonucleotide
  Antisense strand to SEQ ID NO: 275938
ugucuugugcagcaacacc

SEQ ID NO: 275940 - RNA, 19 nt, Artificial Sequence
  Description of Artificial Sequence: Synthetic oligonucleotide
  Sense strand starting at position 1525 of SEQ ID NO: 3544
ccagcauuguagcuccaaa

SEQ ID NO: 275941 - RNA, 19 nt, Artificial Sequence
  Description of Artificial Sequence: Synthetic oligonucleotide
  Antisense strand to SEQ ID NO: 275940
uuuggagcuacaaugcugg

SEQ ID NO: 275942 - RNA, 19 nt, Artificial Sequence
  Description of Artificial Sequence: Synthetic oligonucleotide
  Sense strand starting at position 2144 of SEQ ID NO: 3544
ugcuuuaccuacugagguu

SEQ ID NO: 275943 - RNA, 19 nt, Artificial Sequence
  Description of Artificial Sequence: Synthetic oligonucleotide
  Antisense strand to SEQ ID NO: 275942
aaccucaguagguaaagca

SEQ ID NO: 275944 - RNA, 19 nt, Artificial Sequence
  Description of Artificial Sequence: Synthetic oligonucleotide
  Sense strand starting at position 2167 of SEQ ID NO: 3544
acaugugguucccagacua

SEQ ID NO: 275945 - RNA, 19 nt, Artificial Sequence
  Description of Artificial Sequence: Synthetic oligonucleotide
  Antisense strand to SEQ ID NO: 275944
uagucugggaaccacaugu

SEQ ID NO: 275946 - RNA, 19 nt, Artificial Sequence
  Description of Artificial Sequence: Synthetic oligonucleotide
  Sense strand starting at position 2261 of SEQ ID NO: 3544
ucuuaagacuggcucucau

SEQ ID NO: 275947 - RNA, 19 nt, Artificial Sequence
  Description of Artificial Sequence: Synthetic oligonucleotide
  Antisense strand to SEQ ID NO: 275946
augagagccagucuuaaga

SEQ ID NO: 275948 - RNA, 19 nt, Artificial Sequence
  Description of Artificial Sequence: Synthetic oligonucleotide
  Sense strand starting at position 2310 of SEQ ID NO: 3544
caaguaacccuggaggguu

SEQ ID NO: 275949 - RNA, 19 nt, Artificial Sequence
  Description of Artificial Sequence: Synthetic oligonucleotide
  Antisense strand to SEQ ID NO: 275948
aacccuccaggguuacuug

SEQ ID NO: 275950 - RNA, 19 nt, Artificial Sequence
  Description of Artificial Sequence: Synthetic oligonucleotide
  Sense strand starting at position 2367 of SEQ ID NO: 3544
uguauauaaucucgguaua

SEQ ID NO: 275951 - RNA, 19 nt, Artificial Sequence
  Description of Artificial Sequence: Synthetic oligonucleotide
  Antisense strand to SEQ ID NO: 275950
uauaccgagauuauauaca

SEQ ID NO: 275952 - RNA, 19 nt, Artificial Sequence
  Description of Artificial Sequence: Synthetic oligonucleotide
  Sense strand starting at position 2368 of SEQ ID NO: 3544
guauauaaucucgguauau

SEQ ID NO: 275953 - RNA, 19 nt, Artificial Sequence
  Description of Artificial Sequence: Synthetic oligonucleotide
  Antisense strand to SEQ ID NO: 275952
auauaccgagauuauauac

SEQ ID NO: 275954 - RNA, 19 nt, Artificial Sequence
  Description of Artificial Sequence: Synthetic oligonucleotide
  Sense strand starting at position 2369 of SEQ ID NO: 3544
uauauaaucucgguauaug

SEQ ID NO: 275955 - RNA, 19 nt, Artificial Sequence
  Description of Artificial Sequence: Synthetic oligonucleotide
  Antisense strand to SEQ ID NO: 275954
cauauaccgagauuauaua

SEQ ID NO: 275956 - RNA, 19 nt, Artificial Sequence
  Description of Artificial Sequence: Synthetic oligonucleotide
  Sense strand starting at position 2370 of SEQ ID NO: 3544
auauaaucucgguauauga

SEQ ID NO: 275957 - RNA, 19 nt, Artificial Sequence
  Description of Artificial Sequence: Synthetic oligonucleotide
  Antisense strand to SEQ ID NO: 275956
ucauauaccgagauuauau

SEQ ID NO: 275958 - RNA, 19 nt, Artificial Sequence
  Description of Artificial Sequence: Synthetic oligonucleotide
  Sense strand starting at position 2372 of SEQ ID NO: 3544
auaaucucgguauaugacu

SEQ ID NO: 275959 - RNA, 19 nt, Artificial Sequence
  Description of Artificial Sequence: Synthetic oligonucleotide
  Antisense strand to SEQ ID NO: 275958
agucauauaccgagauuau

SEQ ID NO: 275960 - RNA, 19 nt, Artificial Sequence
  Description of Artificial Sequence: Synthetic oligonucleotide
  Sense strand starting at position 2381 of SEQ ID NO: 3544
guauaugacugcugcugaa

SEQ ID NO: 275961 - RNA, 19 nt, Artificial Sequence
  Description of Artificial Sequence: Synthetic oligonucleotide
  Antisense strand to SEQ ID NO: 275960
uucagcagcagucauauac

SEQ ID NO: 275962 - RNA, 19 nt, Artificial Sequence
  Description of Artificial Sequence: Synthetic oligonucleotide
  Sense strand starting at position 2768 of SEQ ID NO: 3544
gcagaaagaugguggguaa

SEQ ID NO: 275963 - RNA, 19 nt, Artificial Sequence
  Description of Artificial Sequence: Synthetic oligonucleotide
  Antisense strand to SEQ ID NO: 275962
uuacccaccaucuuucugc

SEQ ID NO: 275964 - RNA, 19 nt, Artificial Sequence
  Description of Artificial Sequence: Synthetic oligonucleotide
  Sense strand starting at position 2786 of SEQ ID NO: 3544
aaauguuuauggguagaug

SEQ ID NO: 275965 - RNA, 19 nt, Artificial Sequence
  Description of Artificial Sequence: Synthetic oligonucleotide
  Antisense strand to SEQ ID NO: 275964
caucuacccauaaacauuu

SEQ ID NO: 275966 - RNA, 19 nt, Artificial Sequence
  Description of Artificial Sequence: Synthetic oligonucleotide
  Sense strand starting at position 3633 of SEQ ID NO: 3544
cagagaaggcuuugcgaaa

SEQ ID NO: 275967 - RNA, 19 nt, Artificial Sequence
  Description of Artificial Sequence: Synthetic oligonucleotide
  Antisense strand to SEQ ID NO: 275966
uuucgcaaagccuucucug

SEQ ID NO: 275968 - RNA, 19 nt, Artificial Sequence
  Description of Artificial Sequence: Synthetic oligonucleotide
  Sense strand starting at position 3757 of SEQ ID NO: 3544
aaauaauggugggagacaa

SEQ ID NO: 275969 - RNA, 19 nt, Artificial Sequence
  Description of Artificial Sequence: Synthetic oligonucleotide
  Antisense strand to SEQ ID NO: 275968
uugucucccaccauuauuu

SEQ ID NO: 275970 - RNA, 19 nt, Artificial Sequence
  Description of Artificial Sequence: Synthetic oligonucleotide
  Sense strand starting at position 3903 of SEQ ID NO: 3544
guuguuucuucguucuacu

SEQ ID NO: 275971 - RNA, 19 nt, Artificial Sequence
  Description of Artificial Sequence: Synthetic oligonucleotide
  Antisense strand to SEQ ID NO: 275970
aguagaacgaagaaacaac

SEQ ID NO: 275972 - RNA, 19 nt, Artificial Sequence
  Description of Artificial Sequence: Synthetic oligonucleotide
  Sense strand starting at position 3906 of SEQ ID NO: 3544
guuucuucguucuacugau

SEQ ID NO: 275973 - RNA, 19 nt, Artificial Sequence
  Description of Artificial Sequence: Synthetic oligonucleotide
  Antisense strand to SEQ ID NO: 275972
aucaguagaacgaagaaac

SEQ ID NO: 275974 - RNA, 19 nt, Artificial Sequence
  Description of Artificial Sequence: Synthetic oligonucleotide
  Sense strand starting at position 3920 of SEQ ID NO: 3544
cugauuucuuccugugcuu

SEQ ID NO: 275975 - RNA, 19 nt, Artificial Sequence
  Description of Artificial Sequence: Synthetic oligonucleotide
  Antisense strand to SEQ ID NO: 275974
aagcacaggaagaaaucag

SEQ ID NO: 275976 - RNA, 19 nt, Artificial Sequence
  Description of Artificial Sequence: Synthetic oligonucleotide
  Sense strand starting at position 3927 of SEQ ID NO: 3544
cuuccugugcuuugcagaa

SEQ ID NO: 275977 - RNA, 19 nt, Artificial Sequence
  Description of Artificial Sequence: Synthetic oligonucleotide
  Antisense strand to SEQ ID NO: 275976
uucugcaaagcacaggaag

SEQ ID NO: 275978 - RNA, 19 nt, Artificial Sequence
  Description of Artificial Sequence: Synthetic oligonucleotide
  Sense strand starting at position 1034 of SEQ ID NO: 3545
guauuuacauaggguacau

SEQ ID NO: 275979 - RNA, 19 nt, Artificial Sequence
  Description of Artificial Sequence: Synthetic oligonucleotide
  Antisense strand to SEQ ID NO: 275978
auguacccuauguaaauac

SEQ ID NO: 275980 - RNA, 19 nt, Artificial Sequence
  Description of Artificial Sequence: Synthetic oligonucleotide
  Sense strand starting at position 1244 of SEQ ID NO: 3545
gucuauuaguguucuacga

SEQ ID NO: 275981 - RNA, 19 nt, Artificial Sequence
  Description of Artificial Sequence: Synthetic oligonucleotide
  Antisense strand to SEQ ID NO: 275980
ucguagaacacuaauagac

SEQ ID NO: 275982 - RNA, 19 nt, Artificial Sequence
  Description of Artificial Sequence: Synthetic oligonucleotide
  Sense strand starting at position 1248 of SEQ ID NO: 3545
auuaguguucuacgaggga

SEQ ID NO: 275983 - RNA, 19 nt, Artificial Sequence
  Description of Artificial Sequence: Synthetic oligonucleotide
  Antisense strand to SEQ ID NO: 275982
ucccucguagaacacuaau

SEQ ID NO: 275984 - RNA, 19 nt, Artificial Sequence
  Description of Artificial Sequence: Synthetic oligonucleotide
  Sense strand starting at position 1251 of SEQ ID NO: 3545
aguguucuacgagggaaau

SEQ ID NO: 275985 - RNA, 19 nt, Artificial Sequence
  Description of Artificial Sequence: Synthetic oligonucleotide
  Antisense strand to SEQ ID NO: 275984
auuucccucguagaacacu

SEQ ID NO: 275986 - RNA, 19 nt, Artificial Sequence
  Description of Artificial Sequence: Synthetic oligonucleotide
  Sense strand starting at position 1252 of SEQ ID NO: 3545
guguucuacgagggaaauu

SEQ ID NO: 275987 - RNA, 19 nt, Artificial Sequence
  Description of Artificial Sequence: Synthetic oligonucleotide
  Antisense strand to SEQ ID NO: 275986
aauuucccucguagaacac

SEQ ID NO: 275988 - RNA, 19 nt, Artificial Sequence
  Description of Artificial Sequence: Synthetic oligonucleotide
  Sense strand starting at position 1532 of SEQ ID NO: 3545
gauccuuucuggcgacuuu

SEQ ID NO: 275989 - RNA, 19 nt, Artificial Sequence
  Description of Artificial Sequence: Synthetic oligonucleotide
  Antisense strand to SEQ ID NO: 275988
aaagucgccagaaaggauc

SEQ ID NO: 275990 - RNA, 19 nt, Artificial Sequence
  Description of Artificial Sequence: Synthetic oligonucleotide
  Sense strand starting at position 1533 of SEQ ID NO: 3545
auccuuucuggcgacuuua

SEQ ID NO: 275991 - RNA, 19 nt, Artificial Sequence
  Description of Artificial Sequence: Synthetic oligonucleotide
  Antisense strand to SEQ ID NO: 275990
uaaagucgccagaaaggau

SEQ ID NO: 275992 - RNA, 19 nt, Artificial Sequence
  Description of Artificial Sequence: Synthetic oligonucleotide
  Sense strand starting at position 1850 of SEQ ID NO: 3545
cguccuggucuccagaagu

SEQ ID NO: 275993 - RNA, 19 nt, Artificial Sequence
  Description of Artificial Sequence: Synthetic oligonucleotide
  Antisense strand to SEQ ID NO: 275992
acuucuggagaccaggacg

SEQ ID NO: 275994 - RNA, 19 nt, Artificial Sequence
  Description of Artificial Sequence: Synthetic oligonucleotide
  Sense strand starting at position 1928 of SEQ ID NO: 3545
ccaucuugcuccugagaac

SEQ ID NO: 275995 - RNA, 19 nt, Artificial Sequence
  Description of Artificial Sequence: Synthetic oligonucleotide
  Antisense strand to SEQ ID NO: 275994
guucucaggagcaagaugg

SEQ ID NO: 275996 - RNA, 19 nt, Artificial Sequence
  Description of Artificial Sequence: Synthetic oligonucleotide
  Sense strand starting at position 2024 of SEQ ID NO: 3545
ccgguaguagcgagcagau

SEQ ID NO: 275997 - RNA, 19 nt, Artificial Sequence
  Description of Artificial Sequence: Synthetic oligonucleotide
  Antisense strand to SEQ ID NO: 275996
aucugcucgcuacuaccgg

SEQ ID NO: 275998 - RNA, 19 nt, Artificial Sequence
  Description of Artificial Sequence: Synthetic oligonucleotide
  Sense strand starting at position 2333 of SEQ ID NO: 3545
acgucaauccaaggaggaa

SEQ ID NO: 275999 - RNA, 19 nt, Artificial Sequence
  Description of Artificial Sequence: Synthetic oligonucleotide
  Antisense strand to SEQ ID NO: 275998
uuccuccuuggauugacgu

SEQ ID NO: 276000 - RNA, 19 nt, Artificial Sequence
  Description of Artificial Sequence: Synthetic oligonucleotide
  Sense strand starting at position 2668 of SEQ ID NO: 3545
gcgugcaaccgcguguuua

SEQ ID NO: 276001 - RNA, 19 nt, Artificial Sequence
  Description of Artificial Sequence: Synthetic oligonucleotide
  Antisense strand to SEQ ID NO: 276000
uaaacacgcgguugcacgc

SEQ ID NO: 276002 - RNA, 19 nt, Artificial Sequence
  Description of Artificial Sequence: Synthetic oligonucleotide
  Sense strand starting at position 2669 of SEQ ID NO: 3545
cgugcaaccgcguguuuaa

SEQ ID NO: 276003 - RNA, 19 nt, Artificial Sequence
  Description of Artificial Sequence: Synthetic oligonucleotide
  Antisense strand to SEQ ID NO: 276002
uuaaacacgcgguugcacg

SEQ ID NO: 276004 - RNA, 19 nt, Artificial Sequence
  Description of Artificial Sequence: Synthetic oligonucleotide
  Sense strand starting at position 2670 of SEQ ID NO: 3545
gugcaaccgcguguuuaaa

SEQ ID NO: 276005 - RNA, 19 nt, Artificial Sequence
  Description of Artificial Sequence: Synthetic oligonucleotide
  Antisense strand to SEQ ID NO: 276004
uuuaaacacgcgguugcac

SEQ ID NO: 276006 - RNA, 19 nt, Artificial Sequence
  Description of Artificial Sequence: Synthetic oligonucleotide
  Sense strand starting at position 2671 of SEQ ID NO: 3545
ugcaaccgcguguuuaaau

SEQ ID NO: 276007 - RNA, 19 nt, Artificial Sequence
  Description of Artificial Sequence: Synthetic oligonucleotide
  Antisense strand to SEQ ID NO: 276006
auuuaaacacgcgguugca

SEQ ID NO: 276008 - RNA, 19 nt, Artificial Sequence
  Description of Artificial Sequence: Synthetic oligonucleotide
  Sense strand starting at position 2681 of SEQ ID NO: 3545
uguuuaaaucuuggcgcca

SEQ ID NO: 276009 - RNA, 19 nt, Artificial Sequence
  Description of Artificial Sequence: Synthetic oligonucleotide
  Antisense strand to SEQ ID NO: 276008
uggcgccaagauuuaaaca

SEQ ID NO: 276010 - RNA, 19 nt, Artificial Sequence
  Description of Artificial Sequence: Synthetic oligonucleotide
  Sense strand starting at position 2686 of SEQ ID NO: 3545
aaaucuuggcgccacgaau

SEQ ID NO: 276011 - RNA, 19 nt, Artificial Sequence
  Description of Artificial Sequence: Synthetic oligonucleotide
  Antisense strand to SEQ ID NO: 276010
auucguggcgccaagauuu

SEQ ID NO: 276012 - RNA, 19 nt, Artificial Sequence
  Description of Artificial Sequence: Synthetic oligonucleotide
  Sense strand starting at position 2714 of SEQ ID NO: 3545
agccuuauguuccuggcaa

SEQ ID NO: 276013 - RNA, 19 nt, Artificial Sequence
  Description of Artificial Sequence: Synthetic oligonucleotide
  Antisense strand to SEQ ID NO: 276012
uugccaggaacauaaggcu

SEQ ID NO: 276014 - RNA, 19 nt, Artificial Sequence
  Description of Artificial Sequence: Synthetic oligonucleotide
  Sense strand starting at position 2715 of SEQ ID NO: 3545
gccuuauguuccuggcaaa

SEQ ID NO: 276015 - RNA, 19 nt, Artificial Sequence
  Description of Artificial Sequence: Synthetic oligonucleotide
  Antisense strand to SEQ ID NO: 276014
uuugccaggaacauaaggc

SEQ ID NO: 276016 - RNA, 19 nt, Artificial Sequence
  Description of Artificial Sequence: Synthetic oligonucleotide
  Sense strand starting at position 2716 of SEQ ID NO: 3545
ccuuauguuccuggcaaac

SEQ ID NO: 276017 - RNA, 19 nt, Artificial Sequence
  Description of Artificial Sequence: Synthetic oligonucleotide
  Antisense strand to SEQ ID NO: 276016
guuugccaggaacauaagg

SEQ ID NO: 276018 - RNA, 19 nt, Artificial Sequence
  Description of Artificial Sequence: Synthetic oligonucleotide
  Sense strand starting at position 2718 of SEQ ID NO: 3545
uuauguuccuggcaaacuu

SEQ ID NO: 276019 - RNA, 19 nt, Artificial Sequence
  Description of Artificial Sequence: Synthetic oligonucleotide
  Antisense strand to SEQ ID NO: 276018
aaguuugccaggaacauaa

SEQ ID NO: 276020 - RNA, 19 nt, Artificial Sequence
  Description of Artificial Sequence: Synthetic oligonucleotide
  Sense strand starting at position 2922 of SEQ ID NO: 3545
ggaggagcuggcugcaaau

SEQ ID NO: 276021 - RNA, 19 nt, Artificial Sequence
  Description of Artificial Sequence: Synthetic oligonucleotide
  Antisense strand to SEQ ID NO: 276020
auuugcagccagcuccucc

SEQ ID NO: 276022 - RNA, 19 nt, Artificial Sequence
  Description of Artificial Sequence: Synthetic oligonucleotide
  Sense strand starting at position 3742 of SEQ ID NO: 3545
caacgugucuucccugcau

SEQ ID NO: 276023 - RNA, 19 nt, Artificial Sequence
  Description of Artificial Sequence: Synthetic oligonucleotide
  Antisense strand to SEQ ID NO: 276022
augcagggaagacacguug

SEQ ID NO: 276024 - RNA, 19 nt, Artificial Sequence
  Description of Artificial Sequence: Synthetic oligonucleotide
  Sense strand starting at position 3744 of SEQ ID NO: 3545
acgugucuucccugcauua

SEQ ID NO: 276025 - RNA, 19 nt, Artificial Sequence
  Description of Artificial Sequence: Synthetic oligonucleotide
  Antisense strand to SEQ ID NO: 276024
uaaugcagggaagacacgu

SEQ ID NO: 276026 - RNA, 19 nt, Artificial Sequence
  Description of Artificial Sequence: Synthetic oligonucleotide
  Sense strand starting at position 3746 of SEQ ID NO: 3545
gugucuucccugcauuacu

SEQ ID NO: 276027 - RNA, 19 nt, Artificial Sequence
  Description of Artificial Sequence: Synthetic oligonucleotide
  Antisense strand to SEQ ID NO: 276026
aguaaugcagggaagacac

SEQ ID NO: 276028 - RNA, 19 nt, Artificial Sequence
  Description of Artificial Sequence: Synthetic oligonucleotide
  Sense strand starting at position 3756 of SEQ ID NO: 3545
ugcauuacugcagaaggau

SEQ ID NO: 276029 - RNA, 19 nt, Artificial Sequence
  Description of Artificial Sequence: Synthetic oligonucleotide
  Antisense strand to SEQ ID NO: 276028
auccuucugcaguaaugca

SEQ ID NO: 276030 - RNA, 19 nt, Artificial Sequence
  Description of Artificial Sequence: Synthetic oligonucleotide
  Sense strand starting at position 3981 of SEQ ID NO: 3545
ggucucgucuuaccuugaa

SEQ ID NO: 276031 - RNA, 19 nt, Artificial Sequence
  Description of Artificial Sequence: Synthetic oligonucleotide
  Antisense strand to SEQ ID NO: 276030
uucaagguaagacgagacc

SEQ ID NO: 276032 - RNA, 19 nt, Artificial Sequence
  Description of Artificial Sequence: Synthetic oligonucleotide
  Sense strand starting at position 1146 of SEQ ID NO: 3546
guauuuacauaggguacau

SEQ ID NO: 276033 - RNA, 19 nt, Artificial Sequence
  Description of Artificial Sequence: Synthetic oligonucleotide
  Antisense strand to SEQ ID NO: 276032
auguacccuauguaaauac

SEQ ID NO: 276034 - RNA, 19 nt, Artificial Sequence
  Description of Artificial Sequence: Synthetic oligonucleotide
  Sense strand starting at position 1360 of SEQ ID NO: 3546
auuaguguucuacgaggga

SEQ ID NO: 276035 - RNA, 19 nt, Artificial Sequence
  Description of Artificial Sequence: Synthetic oligonucleotide
  Antisense strand to SEQ ID NO: 276034
ucccucguagaacacuaau

SEQ ID NO: 276036 - RNA, 19 nt, Artificial Sequence
  Description of Artificial Sequence: Synthetic oligonucleotide
  Sense strand starting at position 1363 of SEQ ID NO: 3546
aguguucuacgagggaaau

SEQ ID NO: 276037 - RNA, 19 nt, Artificial Sequence
  Description of Artificial Sequence: Synthetic oligonucleotide
  Antisense strand to SEQ ID NO: 276036
auuucccucguagaacacu

SEQ ID NO: 276038 - RNA, 19 nt, Artificial Sequence
  Description of Artificial Sequence: Synthetic oligonucleotide
  Sense strand starting at position 1364 of SEQ ID NO: 3546
guguucuacgagggaaauu

SEQ ID NO: 276039 - RNA, 19 nt, Artificial Sequence
  Description of Artificial Sequence: Synthetic oligonucleotide
  Antisense strand to SEQ ID NO: 276038
aauuucccucguagaacac

SEQ ID NO: 276040 - RNA, 19 nt, Artificial Sequence
  Description of Artificial Sequence: Synthetic oligonucleotide
  Sense strand starting at position 1419 of SEQ ID NO: 3546
guguguugcuguucauaaa

SEQ ID NO: 276041 - RNA, 19 nt, Artificial Sequence
  Description of Artificial Sequence: Synthetic oligonucleotide
  Antisense strand to SEQ ID NO: 276040
uuuaugaacagcaacacac

SEQ ID NO: 276042 - RNA, 19 nt, Artificial Sequence
  Description of Artificial Sequence: Synthetic oligonucleotide
  Sense strand starting at position 2684 of SEQ ID NO: 3546
gcgugcaaccgcguguuua

SEQ ID NO: 276043 - RNA, 19 nt, Artificial Sequence
  Description of Artificial Sequence: Synthetic oligonucleotide
  Antisense strand to SEQ ID NO: 276042
uaaacacgcgguugcacgc

SEQ ID NO: 276044 - RNA, 19 nt, Artificial Sequence
  Description of Artificial Sequence: Synthetic oligonucleotide
  Sense strand starting at position 2685 of SEQ ID NO: 3546
cgugcaaccgcguguuuaa

SEQ ID NO: 276045 - RNA, 19 nt, Artificial Sequence
  Description of Artificial Sequence: Synthetic oligonucleotide
  Antisense strand to SEQ ID NO: 276044
uuaaacacgcgguugcacg

SEQ ID NO: 276046 - RNA, 19 nt, Artificial Sequence
  Description of Artificial Sequence: Synthetic oligonucleotide
  Sense strand starting at position 2686 of SEQ ID NO: 3546
gugcaaccgcguguuuaaa

SEQ ID NO: 276047 - RNA, 19 nt, Artificial Sequence
  Description of Artificial Sequence: Synthetic oligonucleotide
  Antisense strand to SEQ ID NO: 276046
uuuaaacacgcgguugcac

SEQ ID NO: 276048 - RNA, 19 nt, Artificial Sequence
  Description of Artificial Sequence: Synthetic oligonucleotide
  Sense strand starting at position 2687 of SEQ ID NO: 3546
ugcaaccgcguguuuaaau

SEQ ID NO: 276049 - RNA, 19 nt, Artificial Sequence
  Description of Artificial Sequence: Synthetic oligonucleotide
  Antisense strand to SEQ ID NO: 276048
auuuaaacacgcgguugca

SEQ ID NO: 276050 - RNA, 19 nt, Artificial Sequence
  Description of Artificial Sequence: Synthetic oligonucleotide
  Sense strand starting at position 2697 of SEQ ID NO: 3546
uguuuaaaucuuggcgcca

SEQ ID NO: 276051 - RNA, 19 nt, Artificial Sequence
  Description of Artificial Sequence: Synthetic oligonucleotide
  Antisense strand to SEQ ID NO: 276050
uggcgccaagauuuaaaca

SEQ ID NO: 276052 - RNA, 19 nt, Artificial Sequence
  Description of Artificial Sequence: Synthetic oligonucleotide
  Sense strand starting at position 2702 of SEQ ID NO: 3546
aaaucuuggcgccacgaau

SEQ ID NO: 276053 - RNA, 19 nt, Artificial Sequence
  Description of Artificial Sequence: Synthetic oligonucleotide
  Antisense strand to SEQ ID NO: 276052
auucguggcgccaagauuu

SEQ ID NO: 276054 - RNA, 19 nt, Artificial Sequence
  Description of Artificial Sequence: Synthetic oligonucleotide
  Sense strand starting at position 2730 of SEQ ID NO: 3546
agccuuauguuccuggcaa

SEQ ID NO: 276055 - RNA, 19 nt, Artificial Sequence
  Description of Artificial Sequence: Synthetic oligonucleotide
  Antisense strand to SEQ ID NO: 276054
uugccaggaacauaaggcu

SEQ ID NO: 276056 - RNA, 19 nt, Artificial Sequence
  Description of Artificial Sequence: Synthetic oligonucleotide
  Sense strand starting at position 2731 of SEQ ID NO: 3546
gccuuauguuccuggcaaa

SEQ ID NO: 276057 - RNA, 19 nt, Artificial Sequence
  Description of Artificial Sequence: Synthetic oligonucleotide
  Antisense strand to SEQ ID NO: 276056
uuugccaggaacauaaggc

SEQ ID NO: 276058 - RNA, 19 nt, Artificial Sequence
  Description of Artificial Sequence: Synthetic oligonucleotide
  Sense strand starting at position 2732 of SEQ ID NO: 3546
ccuuauguuccuggcaaac

SEQ ID NO: 276059 - RNA, 19 nt, Artificial Sequence
  Description of Artificial Sequence: Synthetic oligonucleotide
  Antisense strand to SEQ ID NO: 276058
guuugccaggaacauaagg

SEQ ID NO: 276060 - RNA, 19 nt, Artificial Sequence
  Description of Artificial Sequence: Synthetic oligonucleotide
  Sense strand starting at position 2734 of SEQ ID NO: 3546
uuauguuccuggcaaacuu

SEQ ID NO: 276061 - RNA, 19 nt, Artificial Sequence
  Description of Artificial Sequence: Synthetic oligonucleotide
  Antisense strand to SEQ ID NO: 276060
aaguuugccaggaacauaa

SEQ ID NO: 276062 - RNA, 19 nt, Artificial Sequence
  Description of Artificial Sequence: Synthetic oligonucleotide
  Sense strand starting at position 2743 of SEQ ID NO: 3546
uggcaaacuucaugggagu

SEQ ID NO: 276063 - RNA, 19 nt, Artificial Sequence
  Description of Artificial Sequence: Synthetic oligonucleotide
  Antisense strand to SEQ ID NO: 276062
acucccaugaaguuugcca

SEQ ID NO: 276064 - RNA, 19 nt, Artificial Sequence
  Description of Artificial Sequence: Synthetic oligonucleotide
  Sense strand starting at position 2754 of SEQ ID NO: 3546
augggagucagcugagcuu

SEQ ID NO: 276065 - RNA, 19 nt, Artificial Sequence
  Description of Artificial Sequence: Synthetic oligonucleotide
  Antisense strand to SEQ ID NO: 276064
aagcucagcugacucccau

SEQ ID NO: 276066 - RNA, 19 nt, Artificial Sequence
  Description of Artificial Sequence: Synthetic oligonucleotide
  Sense strand starting at position 2938 of SEQ ID NO: 3546
ggaggagcuggcugcaaau

SEQ ID NO: 276067 - RNA, 19 nt, Artificial Sequence
  Description of Artificial Sequence: Synthetic oligonucleotide
  Antisense strand to SEQ ID NO: 276066
auuugcagccagcuccucc

SEQ ID NO: 276068 - RNA, 19 nt, Artificial Sequence
  Description of Artificial Sequence: Synthetic oligonucleotide
  Sense strand starting at position 3754 of SEQ ID NO: 3546
caacgugucuucccugcau

SEQ ID NO: 276069 - RNA, 19 nt, Artificial Sequence
  Description of Artificial Sequence: Synthetic oligonucleotide
  Antisense strand to SEQ ID NO: 276068
augcagggaagacacguug

SEQ ID NO: 276070 - RNA, 19 nt, Artificial Sequence
  Description of Artificial Sequence: Synthetic oligonucleotide
  Sense strand starting at position 3756 of SEQ ID NO: 3546
acgugucuucccugcauua

SEQ ID NO: 276071 - RNA, 19 nt, Artificial Sequence
  Description of Artificial Sequence: Synthetic oligonucleotide
  Antisense strand to SEQ ID NO: 276070
uaaugcagggaagacacgu

SEQ ID NO: 276072 - RNA, 19 nt, Artificial Sequence
  Description of Artificial Sequence: Synthetic oligonucleotide
  Sense strand starting at position 3758 of SEQ ID NO: 3546
gugucuucccugcauuacu

SEQ ID NO: 276073 - RNA, 19 nt, Artificial Sequence
  Description of Artificial Sequence: Synthetic oligonucleotide
  Antisense strand to SEQ ID NO: 276072
aguaaugcagggaagacac

SEQ ID NO: 276074 - RNA, 19 nt, Artificial Sequence
  Description of Artificial Sequence: Synthetic oligonucleotide
  Sense strand starting at position 3768 of SEQ ID NO: 3546
ugcauuacugcagaaggau

SEQ ID NO: 276075 - RNA, 19 nt, Artificial Sequence
  Description of Artificial Sequence: Synthetic oligonucleotide
  Antisense strand to SEQ ID NO: 276074
auccuucugcaguaaugca

SEQ ID NO: 276076 - RNA, 19 nt, Artificial Sequence
  Description of Artificial Sequence: Synthetic oligonucleotide
  Sense strand starting at position 30 of SEQ ID NO: 3547
aggucaucucaggguggaa

SEQ ID NO: 276077 - RNA, 19 nt, Artificial Sequence
  Description of Artificial Sequence: Synthetic oligonucleotide
  Antisense strand to SEQ ID NO: 276076
uuccacccugagaugaccu

SEQ ID NO: 276078 - RNA, 19 nt, Artificial Sequence
  Description of Artificial Sequence: Synthetic oligonucleotide
  Sense strand starting at position 199 of SEQ ID NO: 3547
cagucuggguguuuauuau

SEQ ID NO: 276079 - RNA, 19 nt, Artificial Sequence
  Description of Artificial Sequence: Synthetic oligonucleotide
  Antisense strand to SEQ ID NO: 276078
auaauaaacacccagacug

SEQ ID NO: 276080 - RNA, 19 nt, Artificial Sequence
  Description of Artificial Sequence: Synthetic oligonucleotide
  Sense strand starting at position 203 of SEQ ID NO: 3547
cuggguguuuauuaugcuu

SEQ ID NO: 276081 - RNA, 19 nt, Artificial Sequence
  Description of Artificial Sequence: Synthetic oligonucleotide
  Antisense strand to SEQ ID NO: 276080
aagcauaauaaacacccag

SEQ ID NO: 276082 - RNA, 19 nt, Artificial Sequence
  Description of Artificial Sequence: Synthetic oligonucleotide
  Sense strand starting at position 2691 of SEQ ID NO: 3547
uuucccuuagaguaguaaa

SEQ ID NO: 276083 - RNA, 19 nt, Artificial Sequence
  Description of Artificial Sequence: Synthetic oligonucleotide
  Antisense strand to SEQ ID NO: 276082
uuuacuacucuaagggaaa

SEQ ID NO: 276084 - RNA, 19 nt, Artificial Sequence
  Description of Artificial Sequence: Synthetic oligonucleotide
  Sense strand starting at position 2809 of SEQ ID NO: 3547
uuuguucuguccuaggaaa

SEQ ID NO: 276085 - RNA, 19 nt, Artificial Sequence
  Description of Artificial Sequence: Synthetic oligonucleotide
  Antisense strand to SEQ ID NO: 276084
uuuccuaggacagaacaaa

SEQ ID NO: 276086 - RNA, 19 nt, Artificial Sequence
  Description of Artificial Sequence: Synthetic oligonucleotide
  Sense strand starting at position 2839 of SEQ ID NO: 3547
uggugcauuucucugaagu

SEQ ID NO: 276087 - RNA, 19 nt, Artificial Sequence
  Description of Artificial Sequence: Synthetic oligonucleotide
  Antisense strand to SEQ ID NO: 276086
acuucagagaaaugcacca

SEQ ID NO: 276088 - RNA, 19 nt, Artificial Sequence
  Description of Artificial Sequence: Synthetic oligonucleotide
  Sense strand starting at position 2840 of SEQ ID NO: 3547
ggugcauuucucugaaguu

SEQ ID NO: 276089 - RNA, 19 nt, Artificial Sequence
  Description of Artificial Sequence: Synthetic oligonucleotide
  Antisense strand to SEQ ID NO: 276088
aacuucagagaaaugcacc

SEQ ID NO: 276090 - RNA, 19 nt, Artificial Sequence
  Description of Artificial Sequence: Synthetic oligonucleotide
  Sense strand starting at position 2841 of SEQ ID NO: 3547
gugcauuucucugaaguug

SEQ ID NO: 276091 - RNA, 19 nt, Artificial Sequence
  Description of Artificial Sequence: Synthetic oligonucleotide
  Antisense strand to SEQ ID NO: 276090
caacuucagagaaaugcac

SEQ ID NO: 276092 - RNA, 19 nt, Artificial Sequence
  Description of Artificial Sequence: Synthetic oligonucleotide
  Sense strand starting at position 2874 of SEQ ID NO: 3547
cuugguugccucugaaaca

SEQ ID NO: 276093 - RNA, 19 nt, Artificial Sequence
  Description of Artificial Sequence: Synthetic oligonucleotide
  Antisense strand to SEQ ID NO: 276092
uguuucagaggcaaccaag

SEQ ID NO: 276094 - RNA, 19 nt, Artificial Sequence
  Description of Artificial Sequence: Synthetic oligonucleotide
  Sense strand starting at position 2875 of SEQ ID NO: 3547
uugguugccucugaaacaa

SEQ ID NO: 276095 - RNA, 19 nt, Artificial Sequence
  Description of Artificial Sequence: Synthetic oligonucleotide
  Antisense strand to SEQ ID NO: 276094
uuguuucagaggcaaccaa

SEQ ID NO: 276096 - RNA, 19 nt, Artificial Sequence
  Description of Artificial Sequence: Synthetic oligonucleotide
  Sense strand starting at position 2904 of SEQ ID NO: 3547
ucauucuccucgcaacagu

SEQ ID NO: 276097 - RNA, 19 nt, Artificial Sequence
  Description of Artificial Sequence: Synthetic oligonucleotide
  Antisense strand to SEQ ID NO: 276096
acuguugcgaggagaauga

SEQ ID NO: 276098 - RNA, 19 nt, Artificial Sequence
  Description of Artificial Sequence: Synthetic oligonucleotide
  Sense strand starting at position 2921 of SEQ ID NO: 3547
gucacagucugaugcgaca

SEQ ID NO: 276099 - RNA, 19 nt, Artificial Sequence
  Description of Artificial Sequence: Synthetic oligonucleotide
  Antisense strand to SEQ ID NO: 276098
ugucgcaucagacugugac

SEQ ID NO: 276100 - RNA, 19 nt, Artificial Sequence
  Description of Artificial Sequence: Synthetic oligonucleotide
  Sense strand starting at position 2952 of SEQ ID NO: 3547
ggcagaaauuaggaaacaa

SEQ ID NO: 276101 - RNA, 19 nt, Artificial Sequence
  Description of Artificial Sequence: Synthetic oligonucleotide
  Antisense strand to SEQ ID NO: 276100
uuguuuccuaauuucugcc

SEQ ID NO: 276102 - RNA, 19 nt, Artificial Sequence
  Description of Artificial Sequence: Synthetic oligonucleotide
  Sense strand starting at position 3008 of SEQ ID NO: 3547
ugucgaaucgcucuguuac

SEQ ID NO: 276103 - RNA, 19 nt, Artificial Sequence
  Description of Artificial Sequence: Synthetic oligonucleotide
  Antisense strand to SEQ ID NO: 276102
guaacagagcgauucgaca

SEQ ID NO: 276104 - RNA, 19 nt, Artificial Sequence
  Description of Artificial Sequence: Synthetic oligonucleotide
  Sense strand starting at position 3009 of SEQ ID NO: 3547
gucgaaucgcucuguuacc

SEQ ID NO: 276105 - RNA, 19 nt, Artificial Sequence
  Description of Artificial Sequence: Synthetic oligonucleotide
  Antisense strand to SEQ ID NO: 276104
gguaacagagcgauucgac

SEQ ID NO: 276106 - RNA, 19 nt, Artificial Sequence
  Description of Artificial Sequence: Synthetic oligonucleotide
  Sense strand starting at position 3066 of SEQ ID NO: 3547
ccagcaguugucuggagaa

SEQ ID NO: 276107 - RNA, 19 nt, Artificial Sequence
  Description of Artificial Sequence: Synthetic oligonucleotide
  Antisense strand to SEQ ID NO: 276106
uucuccagacaacugcugg

SEQ ID NO: 276108 - RNA, 19 nt, Artificial Sequence
  Description of Artificial Sequence: Synthetic oligonucleotide
  Sense strand starting at position 3069 of SEQ ID NO: 3547
gcaguugucuggagaagga

SEQ ID NO: 276109 - RNA, 19 nt, Artificial Sequence
  Description of Artificial Sequence: Synthetic oligonucleotide
  Antisense strand to SEQ ID NO: 276108
uccuucuccagacaacugc

SEQ ID NO: 276110 - RNA, 19 nt, Artificial Sequence
  Description of Artificial Sequence: Synthetic oligonucleotide
  Sense strand starting at position 3138 of SEQ ID NO: 3547
gggaucgauccuugauaca

SEQ ID NO: 276111 - RNA, 19 nt, Artificial Sequence
  Description of Artificial Sequence: Synthetic oligonucleotide
  Antisense strand to SEQ ID NO: 276110
uguaucaaggaucgauccc

SEQ ID NO: 276112 - RNA, 19 nt, Artificial Sequence
  Description of Artificial Sequence: Synthetic oligonucleotide
  Sense strand starting at position 3141 of SEQ ID NO: 3547
aucgauccuugauacacaa

SEQ ID NO: 276113 - RNA, 19 nt, Artificial Sequence
  Description of Artificial Sequence: Synthetic oligonucleotide
  Antisense strand to SEQ ID NO: 276112
uuguguaucaaggaucgau

SEQ ID NO: 276114 - RNA, 19 nt, Artificial Sequence
  Description of Artificial Sequence: Synthetic oligonucleotide
  Sense strand starting at position 3385 of SEQ ID NO: 3547
gggacugucgaauguuuac

SEQ ID NO: 276115 - RNA, 19 nt, Artificial Sequence
  Description of Artificial Sequence: Synthetic oligonucleotide
  Antisense strand to SEQ ID NO: 276114
guaaacauucgacaguccc

SEQ ID NO: 276116 - RNA, 19 nt, Artificial Sequence
  Description of Artificial Sequence: Synthetic oligonucleotide
  Sense strand starting at position 3580 of SEQ ID NO: 3547
cgucguagaagcuggaaau

SEQ ID NO: 276117 - RNA, 19 nt, Artificial Sequence
  Description of Artificial Sequence: Synthetic oligonucleotide
  Antisense strand to SEQ ID NO: 276116
auuuccagcuucuacgacg

SEQ ID NO: 276118 - RNA, 19 nt, Artificial Sequence
  Description of Artificial Sequence: Synthetic oligonucleotide
  Sense strand starting at position 3593 of SEQ ID NO: 3547
ggaaaucugucguccucca

SEQ ID NO: 276119 - RNA, 19 nt, Artificial Sequence
  Description of Artificial Sequence: Synthetic oligonucleotide
  Antisense strand to SEQ ID NO: 276118
uggaggacgacagauuucc

SEQ ID NO: 276120 - RNA, 19 nt, Artificial Sequence
  Description of Artificial Sequence: Synthetic oligonucleotide
  Sense strand starting at position 3723 of SEQ ID NO: 3547
gggcguucgcaauaggucu

SEQ ID NO: 276121 - RNA, 19 nt, Artificial Sequence
  Description of Artificial Sequence: Synthetic oligonucleotide
  Antisense strand to SEQ ID NO: 276120
agaccuauugcgaacgccc

SEQ ID NO: 276122 - RNA, 19 nt, Artificial Sequence
  Description of Artificial Sequence: Synthetic oligonucleotide
  Sense strand starting at position 3791 of SEQ ID NO: 3547
ggaagagaaucagaaggaa

SEQ ID NO: 276123 - RNA, 19 nt, Artificial Sequence
  Description of Artificial Sequence: Synthetic oligonucleotide
  Antisense strand to SEQ ID NO: 276122
uuccuucugauucucuucc

SEQ ID NO: 276124 - RNA, 19 nt, Artificial Sequence
  Description of Artificial Sequence: Synthetic oligonucleotide
  Sense strand starting at position 247 of SEQ ID NO: 3548
ugucccaacucguuaacau

SEQ ID NO: 276125 - RNA, 19 nt, Artificial Sequence
  Description of Artificial Sequence: Synthetic oligonucleotide
  Antisense strand to SEQ ID NO: 276124
auguuaacgaguugggaca

SEQ ID NO: 276126 - RNA, 19 nt, Artificial Sequence
  Description of Artificial Sequence: Synthetic oligonucleotide
  Sense strand starting at position 248 of SEQ ID NO: 3548
gucccaacucguuaacaua

SEQ ID NO: 276127 - RNA, 19 nt, Artificial Sequence
  Description of Artificial Sequence: Synthetic oligonucleotide
  Antisense strand to SEQ ID NO: 276126
uauguuaacgaguugggac

SEQ ID NO: 276128 - RNA, 19 nt, Artificial Sequence
  Description of Artificial Sequence: Synthetic oligonucleotide
  Sense strand starting at position 560 of SEQ ID NO: 3548
ucuaauuguucuuuggaca

SEQ ID NO: 276129 - RNA, 19 nt, Artificial Sequence
  Description of Artificial Sequence: Synthetic oligonucleotide
  Antisense strand to SEQ ID NO: 276128
uguccaaagaacaauuaga

SEQ ID NO: 276130 - RNA, 19 nt, Artificial Sequence
  Description of Artificial Sequence: Synthetic oligonucleotide
  Sense strand starting at position 561 of SEQ ID NO: 3548
cuaauuguucuuuggacaa

SEQ ID NO: 276131 - RNA, 19 nt, Artificial Sequence
  Description of Artificial Sequence: Synthetic oligonucleotide
  Antisense strand to SEQ ID NO: 276130
uuguccaaagaacaauuag

SEQ ID NO: 276132 - RNA, 19 nt, Artificial Sequence
  Description of Artificial Sequence: Synthetic oligonucleotide
  Sense strand starting at position 565 of SEQ ID NO: 3548
uuguucuuuggacaacuau

SEQ ID NO: 276133 - RNA, 19 nt, Artificial Sequence
  Description of Artificial Sequence: Synthetic oligonucleotide
  Antisense strand to SEQ ID NO: 276132
auaguuguccaaagaacaa

SEQ ID NO: 276134 - RNA, 19 nt, Artificial Sequence
  Description of Artificial Sequence: Synthetic oligonucleotide
  Sense strand starting at position 571 of SEQ ID NO: 3548
uuuggacaacuauguuagu

SEQ ID NO: 276135 - RNA, 19 nt, Artificial Sequence
  Description of Artificial Sequence: Synthetic oligonucleotide
  Antisense strand to SEQ ID NO: 276134
acuaacauaguuguccaaa

SEQ ID NO: 276136 - RNA, 19 nt, Artificial Sequence
  Description of Artificial Sequence: Synthetic oligonucleotide
  Sense strand starting at position 572 of SEQ ID NO: 3548
uuggacaacuauguuagua

SEQ ID NO: 276137 - RNA, 19 nt, Artificial Sequence
  Description of Artificial Sequence: Synthetic oligonucleotide
  Antisense strand to SEQ ID NO: 276136
uacuaacauaguuguccaa

SEQ ID NO: 276138 - RNA, 19 nt, Artificial Sequence
  Description of Artificial Sequence: Synthetic oligonucleotide
  Sense strand starting at position 576 of SEQ ID NO: 3548
acaacuauguuaguaccaa

SEQ ID NO: 276139 - RNA, 19 nt, Artificial Sequence
  Description of Artificial Sequence: Synthetic oligonucleotide
  Antisense strand to SEQ ID NO: 276138
uugguacuaacauaguugu

SEQ ID NO: 276140 - RNA, 19 nt, Artificial Sequence
  Description of Artificial Sequence: Synthetic oligonucleotide
  Sense strand starting at position 657 of SEQ ID NO: 3548
aagggcuaucguggaaaga

SEQ ID NO: 276141 - RNA, 19 nt, Artificial Sequence
  Description of Artificial Sequence: Synthetic oligonucleotide
  Antisense strand to SEQ ID NO: 276140
ucuuuccacgauagcccuu

SEQ ID NO: 276142 - RNA, 19 nt, Artificial Sequence
  Description of Artificial Sequence: Synthetic oligonucleotide
  Sense strand starting at position 658 of SEQ ID NO: 3548
agggcuaucguggaaagaa

SEQ ID NO: 276143 - RNA, 19 nt, Artificial Sequence
  Description of Artificial Sequence: Synthetic oligonucleotide
  Antisense strand to SEQ ID NO: 276142
uucuuuccacgauagcccu

SEQ ID NO: 276144 - RNA, 19 nt, Artificial Sequence
  Description of Artificial Sequence: Synthetic oligonucleotide
  Sense strand starting at position 752 of SEQ ID NO: 3548
agacuuugcuccuuaagac

SEQ ID NO: 276145 - RNA, 19 nt, Artificial Sequence
  Description of Artificial Sequence: Synthetic oligonucleotide
  Antisense strand to SEQ ID NO: 276144
gucuuaaggagcaaagucu

SEQ ID NO: 276146 - RNA, 19 nt, Artificial Sequence
  Description of Artificial Sequence: Synthetic oligonucleotide
  Sense strand starting at position 1178 of SEQ ID NO: 3548
gcucacagcuccuccgaaa

SEQ ID NO: 276147 - RNA, 19 nt, Artificial Sequence
  Description of Artificial Sequence: Synthetic oligonucleotide
  Antisense strand to SEQ ID NO: 276146
uuucggaggagcugugagc

SEQ ID NO: 276148 - RNA, 19 nt, Artificial Sequence
  Description of Artificial Sequence: Synthetic oligonucleotide
  Sense strand starting at position 1203 of SEQ ID NO: 3548
ggaacuucgcgagagcuca

SEQ ID NO: 276149 - RNA, 19 nt, Artificial Sequence
  Description of Artificial Sequence: Synthetic oligonucleotide
  Antisense strand to SEQ ID NO: 276148
ugagcucucgcgaaguucc

SEQ ID NO: 276150 - RNA, 19 nt, Artificial Sequence
  Description of Artificial Sequence: Synthetic oligonucleotide
  Sense strand starting at position 1560 of SEQ ID NO: 3548
gggaggugugcgccugagu

SEQ ID NO: 276151 - RNA, 19 nt, Artificial Sequence
  Description of Artificial Sequence: Synthetic oligonucleotide
  Antisense strand to SEQ ID NO: 276150
acucaggcgcacaccuccc

SEQ ID NO: 276152 - RNA, 19 nt, Artificial Sequence
  Description of Artificial Sequence: Synthetic oligonucleotide
  Sense strand starting at position 1711 of SEQ ID NO: 3548
cgauaccucgagggaaaga

SEQ ID NO: 276153 - RNA, 19 nt, Artificial Sequence
  Description of Artificial Sequence: Synthetic oligonucleotide
  Antisense strand to SEQ ID NO: 276152
ucuuucccucgagguaucg

SEQ ID NO: 276154 - RNA, 19 nt, Artificial Sequence
  Description of Artificial Sequence: Synthetic oligonucleotide
  Sense strand starting at position 2095 of SEQ ID NO: 3548
cuaguuuauagguggccua

SEQ ID NO: 276155 - RNA, 19 nt, Artificial Sequence
  Description of Artificial Sequence: Synthetic oligonucleotide
  Antisense strand to SEQ ID NO: 276154
uaggccaccuauaaacuag

SEQ ID NO: 276156 - RNA, 19 nt, Artificial Sequence
  Description of Artificial Sequence: Synthetic oligonucleotide
  Sense strand starting at position 2096 of SEQ ID NO: 3548
uaguuuauagguggccuaa

SEQ ID NO: 276157 - RNA, 19 nt, Artificial Sequence
  Description of Artificial Sequence: Synthetic oligonucleotide
  Antisense strand to SEQ ID NO: 276156
uuaggccaccuauaaacua

SEQ ID NO: 276158 - RNA, 19 nt, Artificial Sequence
  Description of Artificial Sequence: Synthetic oligonucleotide
  Sense strand starting at position 2098 of SEQ ID NO: 3548
guuuauagguggccuaaug

SEQ ID NO: 276159 - RNA, 19 nt, Artificial Sequence
  Description of Artificial Sequence: Synthetic oligonucleotide
  Antisense strand to SEQ ID NO: 276158
cauuaggccaccuauaaac

SEQ ID NO: 276160 - RNA, 19 nt, Artificial Sequence
  Description of Artificial Sequence: Synthetic oligonucleotide
  Sense strand starting at position 2108 of SEQ ID NO: 3548
ggccuaaugcuuuguggau

SEQ ID NO: 276161 - RNA, 19 nt, Artificial Sequence
  Description of Artificial Sequence: Synthetic oligonucleotide
  Antisense strand to SEQ ID NO: 276160
auccacaaagcauuaggcc

SEQ ID NO: 276162 - RNA, 19 nt, Artificial Sequence
  Description of Artificial Sequence: Synthetic oligonucleotide
  Sense strand starting at position 2109 of SEQ ID NO: 3548
gccuaaugcuuuguggaug

SEQ ID NO: 276163 - RNA, 19 nt, Artificial Sequence
  Description of Artificial Sequence: Synthetic oligonucleotide
  Antisense strand to SEQ ID NO: 276162
cauccacaaagcauuaggc

SEQ ID NO: 276164 - RNA, 19 nt, Artificial Sequence
  Description of Artificial Sequence: Synthetic oligonucleotide
  Sense strand starting at position 2159 of SEQ ID NO: 3548
ugccauauccuuugugaag

SEQ ID NO: 276165 - RNA, 19 nt, Artificial Sequence
  Description of Artificial Sequence: Synthetic oligonucleotide
  Antisense strand to SEQ ID NO: 276164
cuucacaaaggauauggca

SEQ ID NO: 276166 - RNA, 19 nt, Artificial Sequence
  Description of Artificial Sequence: Synthetic oligonucleotide
  Sense strand starting at position 2160 of SEQ ID NO: 3548
gccauauccuuugugaagu

SEQ ID NO: 276167 - RNA, 19 nt, Artificial Sequence
  Description of Artificial Sequence: Synthetic oligonucleotide
  Antisense strand to SEQ ID NO: 276166
acuucacaaaggauauggc

SEQ ID NO: 276168 - RNA, 19 nt, Artificial Sequence
  Description of Artificial Sequence: Synthetic oligonucleotide
  Sense strand starting at position 2200 of SEQ ID NO: 3548
auuuauugaucuuacgcua

SEQ ID NO: 276169 - RNA, 19 nt, Artificial Sequence
  Description of Artificial Sequence: Synthetic oligonucleotide
  Antisense strand to SEQ ID NO: 276168
uagcguaagaucaauaaau

SEQ ID NO: 276170 - RNA, 19 nt, Artificial Sequence
  Description of Artificial Sequence: Synthetic oligonucleotide
  Sense strand starting at position 2203 of SEQ ID NO: 3548
uauugaucuuacgcuaggu

SEQ ID NO: 276171 - RNA, 19 nt, Artificial Sequence
  Description of Artificial Sequence: Synthetic oligonucleotide
  Antisense strand to SEQ ID NO: 276170
accuagcguaagaucaaua

SEQ ID NO: 276172 - RNA, 19 nt, Artificial Sequence
  Description of Artificial Sequence: Synthetic oligonucleotide
  Sense strand starting at position 2205 of SEQ ID NO: 3548
uugaucuuacgcuagguua

SEQ ID NO: 276173 - RNA, 19 nt, Artificial Sequence
  Description of Artificial Sequence: Synthetic oligonucleotide
  Antisense strand to SEQ ID NO: 276172
uaaccuagcguaagaucaa

SEQ ID NO: 276174 - RNA, 19 nt, Artificial Sequence
  Description of Artificial Sequence: Synthetic oligonucleotide
  Sense strand starting at position 2207 of SEQ ID NO: 3548
gaucuuacgcuagguuauc

SEQ ID NO: 276175 - RNA, 19 nt, Artificial Sequence
  Description of Artificial Sequence: Synthetic oligonucleotide
  Antisense strand to SEQ ID NO: 276174
gauaaccuagcguaagauc

SEQ ID NO: 276176 - RNA, 19 nt, Artificial Sequence
  Description of Artificial Sequence: Synthetic oligonucleotide
  Sense strand starting at position 2212 of SEQ ID NO: 3548
uacgcuagguuaucagaaa

SEQ ID NO: 276177 - RNA, 19 nt, Artificial Sequence
  Description of Artificial Sequence: Synthetic oligonucleotide
  Antisense strand to SEQ ID NO: 276176
uuucugauaaccuagcgua

SEQ ID NO: 276178 - RNA, 19 nt, Artificial Sequence
  Description of Artificial Sequence: Synthetic oligonucleotide
  Sense strand starting at position 2248 of SEQ ID NO: 3548
ggagcuuccaguuaagcuu

SEQ ID NO: 276179 - RNA, 19 nt, Artificial Sequence
  Description of Artificial Sequence: Synthetic oligonucleotide
  Antisense strand to SEQ ID NO: 276178
aagcuuaacuggaagcucc

SEQ ID NO: 276180 - RNA, 19 nt, Artificial Sequence
  Description of Artificial Sequence: Synthetic oligonucleotide
  Sense strand starting at position 2266 of SEQ ID NO: 3548
uccacuuaacgcuaggaua

SEQ ID NO: 276181 - RNA, 19 nt, Artificial Sequence
  Description of Artificial Sequence: Synthetic oligonucleotide
  Antisense strand to SEQ ID NO: 276180
uauccuagcguuaagugga

SEQ ID NO: 276182 - RNA, 19 nt, Artificial Sequence
  Description of Artificial Sequence: Synthetic oligonucleotide
  Sense strand starting at position 2306 of SEQ ID NO: 3548
ugagcaaaguguuauuuga

SEQ ID NO: 276183 - RNA, 19 nt, Artificial Sequence
  Description of Artificial Sequence: Synthetic oligonucleotide
  Antisense strand to SEQ ID NO: 276182
ucaaauaacacuuugcuca

SEQ ID NO: 276184 - RNA, 19 nt, Artificial Sequence
  Description of Artificial Sequence: Synthetic oligonucleotide
  Sense strand starting at position 2313 of SEQ ID NO: 3548
aguguuauuugaggaaaga

SEQ ID NO: 276185 - RNA, 19 nt, Artificial Sequence
  Description of Artificial Sequence: Synthetic oligonucleotide
  Antisense strand to SEQ ID NO: 276184
ucuuuccucaaauaacacu

SEQ ID NO: 276186 - RNA, 19 nt, Artificial Sequence
  Description of Artificial Sequence: Synthetic oligonucleotide
  Sense strand starting at position 2341 of SEQ ID NO: 3548
uacaaagagcuuugauguu

SEQ ID NO: 276187 - RNA, 19 nt, Artificial Sequence
  Description of Artificial Sequence: Synthetic oligonucleotide
  Antisense strand to SEQ ID NO: 276186
aacaucaaagcucuuugua

SEQ ID NO: 276188 - RNA, 19 nt, Artificial Sequence
  Description of Artificial Sequence: Synthetic oligonucleotide
  Sense strand starting at position 2424 of SEQ ID NO: 3548
acuguucuugaaugccaaa

SEQ ID NO: 276189 - RNA, 19 nt, Artificial Sequence
  Description of Artificial Sequence: Synthetic oligonucleotide
  Antisense strand to SEQ ID NO: 276188
uuuggcauucaagaacagu

SEQ ID NO: 276190 - RNA, 19 nt, Artificial Sequence
  Description of Artificial Sequence: Synthetic oligonucleotide
  Sense strand starting at position 2647 of SEQ ID NO: 3548
auuguucugucguuuaaag

SEQ ID NO: 276191 - RNA, 19 nt, Artificial Sequence
  Description of Artificial Sequence: Synthetic oligonucleotide
  Antisense strand to SEQ ID NO: 276190
cuuuaaacgacagaacaau

SEQ ID NO: 276192 - RNA, 19 nt, Artificial Sequence
  Description of Artificial Sequence: Synthetic oligonucleotide
  Sense strand starting at position 2658 of SEQ ID NO: 3548
guuuaaaggcaacguaaau

SEQ ID NO: 276193 - RNA, 19 nt, Artificial Sequence
  Description of Artificial Sequence: Synthetic oligonucleotide
  Antisense strand to SEQ ID NO: 276192
auuuacguugccuuuaaac

SEQ ID NO: 276194 - RNA, 19 nt, Artificial Sequence
  Description of Artificial Sequence: Synthetic oligonucleotide
  Sense strand starting at position 2828 of SEQ ID NO: 3548
gucauugcccuuuauugca

SEQ ID NO: 276195 - RNA, 19 nt, Artificial Sequence
  Description of Artificial Sequence: Synthetic oligonucleotide
  Antisense strand to SEQ ID NO: 276194
ugcaauaaagggcaaugac

SEQ ID NO: 276196 - RNA, 19 nt, Artificial Sequence
  Description of Artificial Sequence: Synthetic oligonucleotide
  Sense strand starting at position 3430 of SEQ ID NO: 3548
gaauauaaguuguucuguu

SEQ ID NO: 276197 - RNA, 19 nt, Artificial Sequence
  Description of Artificial Sequence: Synthetic oligonucleotide
  Antisense strand to SEQ ID NO: 276196
aacagaacaacuuauauuc

SEQ ID NO: 276198 - RNA, 19 nt, Artificial Sequence
  Description of Artificial Sequence: Synthetic oligonucleotide
  Sense strand starting at position 3757 of SEQ ID NO: 3548
ggccuaucagaguguagac

SEQ ID NO: 276199 - RNA, 19 nt, Artificial Sequence
  Description of Artificial Sequence: Synthetic oligonucleotide
  Antisense strand to SEQ ID NO: 276198
gucuacacucugauaggcc

SEQ ID NO: 276200 - RNA, 19 nt, Artificial Sequence
  Description of Artificial Sequence: Synthetic oligonucleotide
  Sense strand starting at position 3936 of SEQ ID NO: 3548
aggauacuguauguauagu

SEQ ID NO: 276201 - RNA, 19 nt, Artificial Sequence
  Description of Artificial Sequence: Synthetic oligonucleotide
  Antisense strand to SEQ ID NO: 276200
acuauacauacaguauccu

SEQ ID NO: 276202 - RNA, 19 nt, Artificial Sequence
  Description of Artificial Sequence: Synthetic oligonucleotide
  Sense strand starting at position 3972 of SEQ ID NO: 3548
uuuguuauccuauaguuuc

SEQ ID NO: 276203 - RNA, 19 nt, Artificial Sequence
  Description of Artificial Sequence: Synthetic oligonucleotide
  Antisense strand to SEQ ID NO: 276202
gaaacuauaggauaacaaa

SEQ ID NO: 276204 - RNA, 19 nt, Artificial Sequence
  Description of Artificial Sequence: Synthetic oligonucleotide
  Sense strand starting at position 273 of SEQ ID NO: 3549
aagguaaauucugugcauu

SEQ ID NO: 276205 - RNA, 19 nt, Artificial Sequence
  Description of Artificial Sequence: Synthetic oligonucleotide
  Antisense strand to SEQ ID NO: 276204
aaugcacagaauuuaccuu

SEQ ID NO: 276206 - RNA, 19 nt, Artificial Sequence
  Description of Artificial Sequence: Synthetic oligonucleotide
  Sense strand starting at position 274 of SEQ ID NO: 3549
agguaaauucugugcauuu

SEQ ID NO: 276207 - RNA, 19 nt, Artificial Sequence
  Description of Artificial Sequence: Synthetic oligonucleotide
  Antisense strand to SEQ ID NO: 276206
aaaugcacagaauuuaccu

SEQ ID NO: 276208 - RNA, 19 nt, Artificial Sequence
  Description of Artificial Sequence: Synthetic oligonucleotide
  Sense strand starting at position 508 of SEQ ID NO: 3549
caggaaggacuacgugauu

SEQ ID NO: 276209 - RNA, 19 nt, Artificial Sequence
  Description of Artificial Sequence: Synthetic oligonucleotide
  Antisense strand to SEQ ID NO: 276208
aaucacguaguccuuccug

SEQ ID NO: 276210 - RNA, 19 nt, Artificial Sequence
  Description of Artificial Sequence: Synthetic oligonucleotide
  Sense strand starting at position 517 of SEQ ID NO: 3549
cuacgugauuucucagucu

SEQ ID NO: 276211 - RNA, 19 nt, Artificial Sequence
  Description of Artificial Sequence: Synthetic oligonucleotide
  Antisense strand to SEQ ID NO: 276210
agacugagaaaucacguag

SEQ ID NO: 276212 - RNA, 19 nt, Artificial Sequence
  Description of Artificial Sequence: Synthetic oligonucleotide
  Sense strand starting at position 520 of SEQ ID NO: 3549
cgugauuucucagucuuac

SEQ ID NO: 276213 - RNA, 19 nt, Artificial Sequence
  Description of Artificial Sequence: Synthetic oligonucleotide
  Antisense strand to SEQ ID NO: 276212
guaagacugagaaaucacg

SEQ ID NO: 276214 - RNA, 19 nt, Artificial Sequence
  Description of Artificial Sequence: Synthetic oligonucleotide
  Sense strand starting at position 552 of SEQ ID NO: 3549
auaagucucuagucccaaa

SEQ ID NO: 276215 - RNA, 19 nt, Artificial Sequence
  Description of Artificial Sequence: Synthetic oligonucleotide
  Antisense strand to SEQ ID NO: 276214
uuugggacuagagacuuau

SEQ ID NO: 276216 - RNA, 19 nt, Artificial Sequence
  Description of Artificial Sequence: Synthetic oligonucleotide
  Sense strand starting at position 1740 of SEQ ID NO: 3549
gcaguaucccaagaacuaa

SEQ ID NO: 276217 - RNA, 19 nt, Artificial Sequence
  Description of Artificial Sequence: Synthetic oligonucleotide
  Antisense strand to SEQ ID NO: 276216
uuaguucuugggauacugc

SEQ ID NO: 276218 - RNA, 19 nt, Artificial Sequence
  Description of Artificial Sequence: Synthetic oligonucleotide
  Sense strand starting at position 1782 of SEQ ID NO: 3549
caagcauucgaauaaguga

SEQ ID NO: 276219 - RNA, 19 nt, Artificial Sequence
  Description of Artificial Sequence: Synthetic oligonucleotide
  Antisense strand to SEQ ID NO: 276218
ucacuuauucgaaugcuug

SEQ ID NO: 276220 - RNA, 19 nt, Artificial Sequence
  Description of Artificial Sequence: Synthetic oligonucleotide
  Sense strand starting at position 1849 of SEQ ID NO: 3549
cuagcacagccguuguuaa

SEQ ID NO: 276221 - RNA, 19 nt, Artificial Sequence
  Description of Artificial Sequence: Synthetic oligonucleotide
  Antisense strand to SEQ ID NO: 276220
uuaacaacggcugugcuag

SEQ ID NO: 276222 - RNA, 19 nt, Artificial Sequence
  Description of Artificial Sequence: Synthetic oligonucleotide
  Sense strand starting at position 1850 of SEQ ID NO: 3549
uagcacagccguuguuaaa

SEQ ID NO: 276223 - RNA, 19 nt, Artificial Sequence
  Description of Artificial Sequence: Synthetic oligonucleotide
  Antisense strand to SEQ ID NO: 276222
uuuaacaacggcugugcua

SEQ ID NO: 276224 - RNA, 19 nt, Artificial Sequence
  Description of Artificial Sequence: Synthetic oligonucleotide
  Sense strand starting at position 1898 of SEQ ID NO: 3549
agaggucuguugguucaaa

SEQ ID NO: 276225 - RNA, 19 nt, Artificial Sequence
  Description of Artificial Sequence: Synthetic oligonucleotide
  Antisense strand to SEQ ID NO: 276224
uuugaaccaacagaccucu

SEQ ID NO: 276226 - RNA, 19 nt, Artificial Sequence
  Description of Artificial Sequence: Synthetic oligonucleotide
  Sense strand starting at position 2047 of SEQ ID NO: 3549
ccggaaauuugacagugaa

SEQ ID NO: 276227 - RNA, 19 nt, Artificial Sequence
  Description of Artificial Sequence: Synthetic oligonucleotide
  Antisense strand to SEQ ID NO: 276226
uucacugucaaauuuccgg

SEQ ID NO: 276228 - RNA, 19 nt, Artificial Sequence
  Description of Artificial Sequence: Synthetic oligonucleotide
  Sense strand starting at position 2097 of SEQ ID NO: 3549
agaaguguaaggcgaaacu

SEQ ID NO: 276229 - RNA, 19 nt, Artificial Sequence
  Description of Artificial Sequence: Synthetic oligonucleotide
  Antisense strand to SEQ ID NO: 276228
aguuucgccuuacacuucu

SEQ ID NO: 276230 - RNA, 19 nt, Artificial Sequence
  Description of Artificial Sequence: Synthetic oligonucleotide
  Sense strand starting at position 2249 of SEQ ID NO: 3549
agaaguuuccgggacuggu

SEQ ID NO: 276231 - RNA, 19 nt, Artificial Sequence
  Description of Artificial Sequence: Synthetic oligonucleotide
  Antisense strand to SEQ ID NO: 276230
accagucccggaaacuucu

SEQ ID NO: 276232 - RNA, 19 nt, Artificial Sequence
  Description of Artificial Sequence: Synthetic oligonucleotide
  Sense strand starting at position 2541 of SEQ ID NO: 3549
gcgguuugcagguugcaaa

SEQ ID NO: 276233 - RNA, 19 nt, Artificial Sequence
  Description of Artificial Sequence: Synthetic oligonucleotide
  Antisense strand to SEQ ID NO: 276232
uuugcaaccugcaaaccgc

SEQ ID NO: 276234 - RNA, 19 nt, Artificial Sequence
  Description of Artificial Sequence: Synthetic oligonucleotide
  Sense strand starting at position 2568 of SEQ ID NO: 3549
acugaugcugcuuaauagu

SEQ ID NO: 276235 - RNA, 19 nt, Artificial Sequence
  Description of Artificial Sequence: Synthetic oligonucleotide
  Antisense strand to SEQ ID NO: 276234
acuauuaagcagcaucagu

SEQ ID NO: 276236 - RNA, 19 nt, Artificial Sequence
  Description of Artificial Sequence: Synthetic oligonucleotide
  Sense strand starting at position 2585 of SEQ ID NO: 3549
guaaacagugcuuacucua

SEQ ID NO: 276237 - RNA, 19 nt, Artificial Sequence
  Description of Artificial Sequence: Synthetic oligonucleotide
  Antisense strand to SEQ ID NO: 276236
uagaguaagcacuguuuac

SEQ ID NO: 276238 - RNA, 19 nt, Artificial Sequence
  Description of Artificial Sequence: Synthetic oligonucleotide
  Sense strand starting at position 2588 of SEQ ID NO: 3549
aacagugcuuacucuagga

SEQ ID NO: 276239 - RNA, 19 nt, Artificial Sequence
  Description of Artificial Sequence: Synthetic oligonucleotide
  Antisense strand to SEQ ID NO: 276238
uccuagaguaagcacuguu

SEQ ID NO: 276240 - RNA, 19 nt, Artificial Sequence
  Description of Artificial Sequence: Synthetic oligonucleotide
  Sense strand starting at position 2620 of SEQ ID NO: 3549
cagcuuuacguguaaaucu

SEQ ID NO: 276241 - RNA, 19 nt, Artificial Sequence
  Description of Artificial Sequence: Synthetic oligonucleotide
  Antisense strand to SEQ ID NO: 276240
agauuuacacguaaagcug

SEQ ID NO: 276242 - RNA, 19 nt, Artificial Sequence
  Description of Artificial Sequence: Synthetic oligonucleotide
  Sense strand starting at position 2628 of SEQ ID NO: 3549
cguguaaaucucgcgauau

SEQ ID NO: 276243 - RNA, 19 nt, Artificial Sequence
  Description of Artificial Sequence: Synthetic oligonucleotide
  Antisense strand to SEQ ID NO: 276242
auaucgcgagauuuacacg

SEQ ID NO: 276244 - RNA, 19 nt, Artificial Sequence
  Description of Artificial Sequence: Synthetic oligonucleotide
  Sense strand starting at position 2630 of SEQ ID NO: 3549
uguaaaucucgcgauauug

SEQ ID NO: 276245 - RNA, 19 nt, Artificial Sequence
  Description of Artificial Sequence: Synthetic oligonucleotide
  Antisense strand to SEQ ID NO: 276244
caauaucgcgagauuuaca

SEQ ID NO: 276246 - RNA, 19 nt, Artificial Sequence
  Description of Artificial Sequence: Synthetic oligonucleotide
  Sense strand starting at position 2714 of SEQ ID NO: 3549
cagcucuggcucuaggauu

SEQ ID NO: 276247 - RNA, 19 nt, Artificial Sequence
  Description of Artificial Sequence: Synthetic oligonucleotide
  Antisense strand to SEQ ID NO: 276246
aauccuagagccagagcug

SEQ ID NO: 276248 - RNA, 19 nt, Artificial Sequence
  Description of Artificial Sequence: Synthetic oligonucleotide
  Sense strand starting at position 2751 of SEQ ID NO: 3549
ggugcucuuaaccgccaua

SEQ ID NO: 276249 - RNA, 19 nt, Artificial Sequence
  Description of Artificial Sequence: Synthetic oligonucleotide
  Antisense strand to SEQ ID NO: 276248
uauggcgguuaagagcacc

SEQ ID NO: 276250 - RNA, 19 nt, Artificial Sequence
  Description of Artificial Sequence: Synthetic oligonucleotide
  Sense strand starting at position 2754 of SEQ ID NO: 3549
gcucuuaaccgccauacua

SEQ ID NO: 276251 - RNA, 19 nt, Artificial Sequence
  Description of Artificial Sequence: Synthetic oligonucleotide
  Antisense strand to SEQ ID NO: 276250
uaguauggcgguuaagagc

SEQ ID NO: 276252 - RNA, 19 nt, Artificial Sequence
  Description of Artificial Sequence: Synthetic oligonucleotide
  Sense strand starting at position 2823 of SEQ ID NO: 3549
ccucaucuguaacaguaaa

SEQ ID NO: 276253 - RNA, 19 nt, Artificial Sequence
  Description of Artificial Sequence: Synthetic oligonucleotide
  Antisense strand to SEQ ID NO: 276252
uuuacuguuacagaugagg

SEQ ID NO: 276254 - RNA, 19 nt, Artificial Sequence
  Description of Artificial Sequence: Synthetic oligonucleotide
  Sense strand starting at position 2916 of SEQ ID NO: 3549
ggaguacuaugaggaccau

SEQ ID NO: 276255 - RNA, 19 nt, Artificial Sequence
  Description of Artificial Sequence: Synthetic oligonucleotide
  Antisense strand to SEQ ID NO: 276254
augguccucauaguacucc

SEQ ID NO: 276256 - RNA, 19 nt, Artificial Sequence
  Description of Artificial Sequence: Synthetic oligonucleotide
  Sense strand starting at position 2972 of SEQ ID NO: 3549
cuguaaucccgguacucuu

SEQ ID NO: 276257 - RNA, 19 nt, Artificial Sequence
  Description of Artificial Sequence: Synthetic oligonucleotide
  Antisense strand to SEQ ID NO: 276256
aagaguaccgggauuacag

SEQ ID NO: 276258 - RNA, 19 nt, Artificial Sequence
  Description of Artificial Sequence: Synthetic oligonucleotide
  Sense strand starting at position 3095 of SEQ ID NO: 3549
gguguuuagcgccuguagu

SEQ ID NO: 276259 - RNA, 19 nt, Artificial Sequence
  Description of Artificial Sequence: Synthetic oligonucleotide
  Antisense strand to SEQ ID NO: 276258
acuacaggcgcuaaacacc

SEQ ID NO: 276260 - RNA, 19 nt, Artificial Sequence
  Description of Artificial Sequence: Synthetic oligonucleotide
  Sense strand starting at position 3139 of SEQ ID NO: 3549
ggaggaucugcuugagcuc

SEQ ID NO: 276261 - RNA, 19 nt, Artificial Sequence
  Description of Artificial Sequence: Synthetic oligonucleotide
  Antisense strand to SEQ ID NO: 276260
gagcucaagcagauccucc

SEQ ID NO: 276262 - RNA, 19 nt, Artificial Sequence
  Description of Artificial Sequence: Synthetic oligonucleotide
  Sense strand starting at position 3399 of SEQ ID NO: 3549
ggcuaugcuuucuuauugu

SEQ ID NO: 276263 - RNA, 19 nt, Artificial Sequence
  Description of Artificial Sequence: Synthetic oligonucleotide
  Antisense strand to SEQ ID NO: 276262
acaauaagaaagcauagcc

SEQ ID NO: 276264 - RNA, 19 nt, Artificial Sequence
  Description of Artificial Sequence: Synthetic oligonucleotide
  Sense strand starting at position 3407 of SEQ ID NO: 3549
uuucuuauugugcauacua

SEQ ID NO: 276265 - RNA, 19 nt, Artificial Sequence
  Description of Artificial Sequence: Synthetic oligonucleotide
  Antisense strand to SEQ ID NO: 276264
uaguaugcacaauaagaaa

SEQ ID NO: 276266 - RNA, 19 nt, Artificial Sequence
  Description of Artificial Sequence: Synthetic oligonucleotide
  Sense strand starting at position 3414 of SEQ ID NO: 3549
uugugcauacuaugaaaug

SEQ ID NO: 276267 - RNA, 19 nt, Artificial Sequence
  Description of Artificial Sequence: Synthetic oligonucleotide
  Antisense strand to SEQ ID NO: 276266
cauuucauaguaugcacaa

SEQ ID NO: 276268 - RNA, 19 nt, Artificial Sequence
  Description of Artificial Sequence: Synthetic oligonucleotide
  Sense strand starting at position 3445 of SEQ ID NO: 3549
aaguguuuauaagugguaa

SEQ ID NO: 276269 - RNA, 19 nt, Artificial Sequence
  Description of Artificial Sequence: Synthetic oligonucleotide
  Antisense strand to SEQ ID NO: 276268
uuaccacuuauaaacacuu

SEQ ID NO: 276270 - RNA, 19 nt, Artificial Sequence
  Description of Artificial Sequence: Synthetic oligonucleotide
  Sense strand starting at position 3446 of SEQ ID NO: 3549
aguguuuauaagugguaag

SEQ ID NO: 276271 - RNA, 19 nt, Artificial Sequence
  Description of Artificial Sequence: Synthetic oligonucleotide
  Antisense strand to SEQ ID NO: 276270
cuuaccacuuauaaacacu

SEQ ID NO: 276272 - RNA, 19 nt, Artificial Sequence
  Description of Artificial Sequence: Synthetic oligonucleotide
  Sense strand starting at position 3447 of SEQ ID NO: 3549
guguuuauaagugguaagu

SEQ ID NO: 276273 - RNA, 19 nt, Artificial Sequence
  Description of Artificial Sequence: Synthetic oligonucleotide
  Antisense strand to SEQ ID NO: 276272
acuuaccacuuauaaacac

SEQ ID NO: 276274 - RNA, 19 nt, Artificial Sequence
  Description of Artificial Sequence: Synthetic oligonucleotide
  Sense strand starting at position 3476 of SEQ ID NO: 3549
gguugacagcauuaucuuu

SEQ ID NO: 276275 - RNA, 19 nt, Artificial Sequence
  Description of Artificial Sequence: Synthetic oligonucleotide
  Antisense strand to SEQ ID NO: 276274
aaagauaaugcugucaacc

SEQ ID NO: 276276 - RNA, 19 nt, Artificial Sequence
  Description of Artificial Sequence: Synthetic oligonucleotide
  Sense strand starting at position 3603 of SEQ ID NO: 3549
uuccuuguuggauguagau

SEQ ID NO: 276277 - RNA, 19 nt, Artificial Sequence
  Description of Artificial Sequence: Synthetic oligonucleotide
  Antisense strand to SEQ ID NO: 276276
aucuacauccaacaaggaa

SEQ ID NO: 276278 - RNA, 19 nt, Artificial Sequence
  Description of Artificial Sequence: Synthetic oligonucleotide
  Sense strand starting at position 3688 of SEQ ID NO: 3549
cuggccuuuguguagcaaa

SEQ ID NO: 276279 - RNA, 19 nt, Artificial Sequence
  Description of Artificial Sequence: Synthetic oligonucleotide
  Antisense strand to SEQ ID NO: 276278
uuugcuacacaaaggccag

SEQ ID NO: 276280 - RNA, 19 nt, Artificial Sequence
  Description of Artificial Sequence: Synthetic oligonucleotide
  Sense strand starting at position 3764 of SEQ ID NO: 3549
gagugaccugccuauguau

SEQ ID NO: 276281 - RNA, 19 nt, Artificial Sequence
  Description of Artificial Sequence: Synthetic oligonucleotide
  Antisense strand to SEQ ID NO: 276280
auacauaggcaggucacuc

SEQ ID NO: 276282 - RNA, 19 nt, Artificial Sequence
  Description of Artificial Sequence: Synthetic oligonucleotide
  Sense strand starting at position 3773 of SEQ ID NO: 3549
gccuauguauuccuugauu

SEQ ID NO: 276283 - RNA, 19 nt, Artificial Sequence
  Description of Artificial Sequence: Synthetic oligonucleotide
  Antisense strand to SEQ ID NO: 276282
aaucaaggaauacauaggc

SEQ ID NO: 276284 - RNA, 19 nt, Artificial Sequence
  Description of Artificial Sequence: Synthetic oligonucleotide
  Sense strand starting at position 139 of SEQ ID NO: 3550
uuugcuauugcacaacaga

SEQ ID NO: 276285 - RNA, 19 nt, Artificial Sequence
  Description of Artificial Sequence: Synthetic oligonucleotide
  Antisense strand to SEQ ID NO: 276284
ucuguugugcaauagcaaa

SEQ ID NO: 276286 - RNA, 19 nt, Artificial Sequence
  Description of Artificial Sequence: Synthetic oligonucleotide
  Sense strand starting at position 142 of SEQ ID NO: 3550
gcuauugcacaacagagaa

SEQ ID NO: 276287 - RNA, 19 nt, Artificial Sequence
  Description of Artificial Sequence: Synthetic oligonucleotide
  Antisense strand to SEQ ID NO: 276286
uucucuguugugcaauagc

SEQ ID NO: 276288 - RNA, 19 nt, Artificial Sequence
  Description of Artificial Sequence: Synthetic oligonucleotide
  Sense strand starting at position 289 of SEQ ID NO: 3550
uaaagacaguuccuguguu

SEQ ID NO: 276289 - RNA, 19 nt, Artificial Sequence
  Description of Artificial Sequence: Synthetic oligonucleotide
  Antisense strand to SEQ ID NO: 276288
aacacaggaacugucuuua

SEQ ID NO: 276290 - RNA, 19 nt, Artificial Sequence
  Description of Artificial Sequence: Synthetic oligonucleotide
  Sense strand starting at position 303 of SEQ ID NO: 3550
guguuaaucccacaguaag

SEQ ID NO: 276291 - RNA, 19 nt, Artificial Sequence
  Description of Artificial Sequence: Synthetic oligonucleotide
  Antisense strand to SEQ ID NO: 276290
cuuacugugggauuaacac

SEQ ID NO: 276292 - RNA, 19 nt, Artificial Sequence
  Description of Artificial Sequence: Synthetic oligonucleotide
  Sense strand starting at position 344 of SEQ ID NO: 3550
guaguuguaaacguuuguu

SEQ ID NO: 276293 - RNA, 19 nt, Artificial Sequence
  Description of Artificial Sequence: Synthetic oligonucleotide
  Antisense strand to SEQ ID NO: 276292
aacaaacguuuacaacuac

SEQ ID NO: 276294 - RNA, 19 nt, Artificial Sequence
  Description of Artificial Sequence: Synthetic oligonucleotide
  Sense strand starting at position 630 of SEQ ID NO: 3550
gccgaauaagaugggcaaa

SEQ ID NO: 276295 - RNA, 19 nt, Artificial Sequence
  Description of Artificial Sequence: Synthetic oligonucleotide
  Antisense strand to SEQ ID NO: 276294
uuugcccaucuuauucggc

SEQ ID NO: 276296 - RNA, 19 nt, Artificial Sequence
  Description of Artificial Sequence: Synthetic oligonucleotide
  Sense strand starting at position 667 of SEQ ID NO: 3550
ucugauaugagaggucaug

SEQ ID NO: 276297 - RNA, 19 nt, Artificial Sequence
  Description of Artificial Sequence: Synthetic oligonucleotide
  Antisense strand to SEQ ID NO: 276296
caugaccucucauaucaga

SEQ ID NO: 276298 - RNA, 19 nt, Artificial Sequence
  Description of Artificial Sequence: Synthetic oligonucleotide
  Sense strand starting at position 799 of SEQ ID NO: 3550
gguuguuaggcuuaaacua

SEQ ID NO: 276299 - RNA, 19 nt, Artificial Sequence
  Description of Artificial Sequence: Synthetic oligonucleotide
  Antisense strand to SEQ ID NO: 276298
uaguuuaagccuaacaacc

SEQ ID NO: 276300 - RNA, 19 nt, Artificial Sequence
  Description of Artificial Sequence: Synthetic oligonucleotide
  Sense strand starting at position 846 of SEQ ID NO: 3550
gucagucuauacucuuaau

SEQ ID NO: 276301 - RNA, 19 nt, Artificial Sequence
  Description of Artificial Sequence: Synthetic oligonucleotide
  Antisense strand to SEQ ID NO: 276300
auuaagaguauagacugac

SEQ ID NO: 276302 - RNA, 19 nt, Artificial Sequence
  Description of Artificial Sequence: Synthetic oligonucleotide
  Sense strand starting at position 921 of SEQ ID NO: 3550
cacuguuaggaaugacauc

SEQ ID NO: 276303 - RNA, 19 nt, Artificial Sequence
  Description of Artificial Sequence: Synthetic oligonucleotide
  Antisense strand to SEQ ID NO: 276302
gaugucauuccuaacagug

SEQ ID NO: 276304 - RNA, 19 nt, Artificial Sequence
  Description of Artificial Sequence: Synthetic oligonucleotide
  Sense strand starting at position 1205 of SEQ ID NO: 3550
gaaagagaugcuugcagac

SEQ ID NO: 276305 - RNA, 19 nt, Artificial Sequence
  Description of Artificial Sequence: Synthetic oligonucleotide
  Antisense strand to SEQ ID NO: 276304
gucugcaagcaucucuuuc

SEQ ID NO: 276306 - RNA, 19 nt, Artificial Sequence
  Description of Artificial Sequence: Synthetic oligonucleotide
  Sense strand starting at position 1240 of SEQ ID NO: 3550
gagaaucagucagcuucca

SEQ ID NO: 276307 - RNA, 19 nt, Artificial Sequence
  Description of Artificial Sequence: Synthetic oligonucleotide
  Antisense strand to SEQ ID NO: 276306
uggaagcugacugauucuc

SEQ ID NO: 276308 - RNA, 19 nt, Artificial Sequence
  Description of Artificial Sequence: Synthetic oligonucleotide
  Sense strand starting at position 2032 of SEQ ID NO: 3550
cugggagucuugucaauca

SEQ ID NO: 276309 - RNA, 19 nt, Artificial Sequence
  Description of Artificial Sequence: Synthetic oligonucleotide
  Antisense strand to SEQ ID NO: 276308
ugauugacaagacucccag

SEQ ID NO: 276310 - RNA, 19 nt, Artificial Sequence
  Description of Artificial Sequence: Synthetic oligonucleotide
  Sense strand starting at position 2118 of SEQ ID NO: 3550
gccucuggguuucuaauuu

SEQ ID NO: 276311 - RNA, 19 nt, Artificial Sequence
  Description of Artificial Sequence: Synthetic oligonucleotide
  Antisense strand to SEQ ID NO: 276310
aaauuagaaacccagaggc

SEQ ID NO: 276312 - RNA, 19 nt, Artificial Sequence
  Description of Artificial Sequence: Synthetic oligonucleotide
  Sense strand starting at position 2171 of SEQ ID NO: 3550
aggucagcuguccaucaaa

SEQ ID NO: 276313 - RNA, 19 nt, Artificial Sequence
  Description of Artificial Sequence: Synthetic oligonucleotide
  Antisense strand to SEQ ID NO: 276312
uuugauggacagcugaccu

SEQ ID NO: 276314 - RNA, 19 nt, Artificial Sequence
  Description of Artificial Sequence: Synthetic oligonucleotide
  Sense strand starting at position 2385 of SEQ ID NO: 3550
gguccaacucgugauccga

SEQ ID NO: 276315 - RNA, 19 nt, Artificial Sequence
  Description of Artificial Sequence: Synthetic oligonucleotide
  Antisense strand to SEQ ID NO: 276314
ucggaucacgaguuggacc

SEQ ID NO: 276316 - RNA, 19 nt, Artificial Sequence
  Description of Artificial Sequence: Synthetic oligonucleotide
  Sense strand starting at position 2428 of SEQ ID NO: 3550
gggucagucacugagccaa

SEQ ID NO: 276317 - RNA, 19 nt, Artificial Sequence
  Description of Artificial Sequence: Synthetic oligonucleotide
  Antisense strand to SEQ ID NO: 276316
uuggcucagugacugaccc

SEQ ID NO: 276318 - RNA, 19 nt, Artificial Sequence
  Description of Artificial Sequence: Synthetic oligonucleotide
  Sense strand starting at position 2543 of SEQ ID NO: 3550
ccggagagucuguacggau

SEQ ID NO: 276319 - RNA, 19 nt, Artificial Sequence
  Description of Artificial Sequence: Synthetic oligonucleotide
  Antisense strand to SEQ ID NO: 276318
auccguacagacucuccgg

SEQ ID NO: 276320 - RNA, 19 nt, Artificial Sequence
  Description of Artificial Sequence: Synthetic oligonucleotide
  Sense strand starting at position 2601 of SEQ ID NO: 3550
ccucuaagccucgcguaaa

SEQ ID NO: 276321 - RNA, 19 nt, Artificial Sequence
  Description of Artificial Sequence: Synthetic oligonucleotide
  Antisense strand to SEQ ID NO: 276320
uuuacgcgaggcuuagagg

SEQ ID NO: 276322 - RNA, 19 nt, Artificial Sequence
  Description of Artificial Sequence: Synthetic oligonucleotide
  Sense strand starting at position 2697 of SEQ ID NO: 3550
ggcuacugauuggcuaaga

SEQ ID NO: 276323 - RNA, 19 nt, Artificial Sequence
  Description of Artificial Sequence: Synthetic oligonucleotide
  Antisense strand to SEQ ID NO: 276322
ucuuagccaaucaguagcc

SEQ ID NO: 276324 - RNA, 19 nt, Artificial Sequence
  Description of Artificial Sequence: Synthetic oligonucleotide
  Sense strand starting at position 2698 of SEQ ID NO: 3550
gcuacugauuggcuaagaa

SEQ ID NO: 276325 - RNA, 19 nt, Artificial Sequence
  Description of Artificial Sequence: Synthetic oligonucleotide
  Antisense strand to SEQ ID NO: 276324
uucuuagccaaucaguagc

SEQ ID NO: 276326 - RNA, 19 nt, Artificial Sequence
  Description of Artificial Sequence: Synthetic oligonucleotide
  Sense strand starting at position 2728 of SEQ ID NO: 3550
gcccucauuggaggaucua

SEQ ID NO: 276327 - RNA, 19 nt, Artificial Sequence
  Description of Artificial Sequence: Synthetic oligonucleotide
  Antisense strand to SEQ ID NO: 276326
uagauccuccaaugagggc

SEQ ID NO: 276328 - RNA, 19 nt, Artificial Sequence
  Description of Artificial Sequence: Synthetic oligonucleotide
  Sense strand starting at position 2910 of SEQ ID NO: 3550
cccggauguucccuaacaa

SEQ ID NO: 276329 - RNA, 19 nt, Artificial Sequence
  Description of Artificial Sequence: Synthetic oligonucleotide
  Antisense strand to SEQ ID NO: 276328
uuguuagggaacauccggg

SEQ ID NO: 276330 - RNA, 19 nt, Artificial Sequence
  Description of Artificial Sequence: Synthetic oligonucleotide
  Sense strand starting at position 2911 of SEQ ID NO: 3550
ccggauguucccuaacaau

SEQ ID NO: 276331 - RNA, 19 nt, Artificial Sequence
  Description of Artificial Sequence: Synthetic oligonucleotide
  Antisense strand to SEQ ID NO: 276330
auuguuagggaacauccgg

SEQ ID NO: 276332 - RNA, 19 nt, Artificial Sequence
  Description of Artificial Sequence: Synthetic oligonucleotide
  Sense strand starting at position 2930 of SEQ ID NO: 3550
gaaaucaucgccgaccuau

SEQ ID NO: 276333 - RNA, 19 nt, Artificial Sequence
  Description of Artificial Sequence: Synthetic oligonucleotide
  Antisense strand to SEQ ID NO: 276332
auaggucggcgaugauuuc

SEQ ID NO: 276334 - RNA, 19 nt, Artificial Sequence
  Description of Artificial Sequence: Synthetic oligonucleotide
  Sense strand starting at position 2995 of SEQ ID NO: 3550
agaagagugggcgggaaau

SEQ ID NO: 276335 - RNA, 19 nt, Artificial Sequence
  Description of Artificial Sequence: Synthetic oligonucleotide
  Antisense strand to SEQ ID NO: 276334
auuucccgcccacucuucu

SEQ ID NO: 276336 - RNA, 19 nt, Artificial Sequence
  Description of Artificial Sequence: Synthetic oligonucleotide
  Sense strand starting at position 3032 of SEQ ID NO: 3550
uggaaagcaacgugagaaa

SEQ ID NO: 276337 - RNA, 19 nt, Artificial Sequence
  Description of Artificial Sequence: Synthetic oligonucleotide
  Antisense strand to SEQ ID NO: 276336
uuucucacguugcuuucca

SEQ ID NO: 276338 - RNA, 19 nt, Artificial Sequence
  Description of Artificial Sequence: Synthetic oligonucleotide
  Sense strand starting at position 3111 of SEQ ID NO: 3550
ccuugacauuuccguauuu

SEQ ID NO: 276339 - RNA, 19 nt, Artificial Sequence
  Description of Artificial Sequence: Synthetic oligonucleotide
  Antisense strand to SEQ ID NO: 276338
aaauacggaaaugucaagg

SEQ ID NO: 276340 - RNA, 19 nt, Artificial Sequence
  Description of Artificial Sequence: Synthetic oligonucleotide
  Sense strand starting at position 3128 of SEQ ID NO: 3550
uuuguuucucagucggcau

SEQ ID NO: 276341 - RNA, 19 nt, Artificial Sequence
  Description of Artificial Sequence: Synthetic oligonucleotide
  Antisense strand to SEQ ID NO: 276340
augccgacugagaaacaaa

SEQ ID NO: 276342 - RNA, 19 nt, Artificial Sequence
  Description of Artificial Sequence: Synthetic oligonucleotide
  Sense strand starting at position 3136 of SEQ ID NO: 3550
ucagucggcauugauauua

SEQ ID NO: 276343 - RNA, 19 nt, Artificial Sequence
  Description of Artificial Sequence: Synthetic oligonucleotide
  Antisense strand to SEQ ID NO: 276342
uaauaucaaugccgacuga

SEQ ID NO: 276344 - RNA, 19 nt, Artificial Sequence
  Description of Artificial Sequence: Synthetic oligonucleotide
  Sense strand starting at position 3221 of SEQ ID NO: 3550
ccagguacuguauguagaa

SEQ ID NO: 276345 - RNA, 19 nt, Artificial Sequence
  Description of Artificial Sequence: Synthetic oligonucleotide
  Antisense strand to SEQ ID NO: 276344
uucuacauacaguaccugg

SEQ ID NO: 276346 - RNA, 19 nt, Artificial Sequence
  Description of Artificial Sequence: Synthetic oligonucleotide
  Sense strand starting at position 3230 of SEQ ID NO: 3550
guauguagaacuggagaua

SEQ ID NO: 276347 - RNA, 19 nt, Artificial Sequence
  Description of Artificial Sequence: Synthetic oligonucleotide
  Antisense strand to SEQ ID NO: 276346
uaucuccaguucuacauac

SEQ ID NO: 276348 - RNA, 19 nt, Artificial Sequence
  Description of Artificial Sequence: Synthetic oligonucleotide
  Sense strand starting at position 3261 of SEQ ID NO: 3550
aggcaaucgcaguacaaga

SEQ ID NO: 276349 - RNA, 19 nt, Artificial Sequence
  Description of Artificial Sequence: Synthetic oligonucleotide
  Antisense strand to SEQ ID NO: 276348
ucuuguacugcgauugccu

SEQ ID NO: 276350 - RNA, 19 nt, Artificial Sequence
  Description of Artificial Sequence: Synthetic oligonucleotide
  Sense strand starting at position 3341 of SEQ ID NO: 3550
ugcauagguuuaccaagaa

SEQ ID NO: 276351 - RNA, 19 nt, Artificial Sequence
  Description of Artificial Sequence: Synthetic oligonucleotide
  Antisense strand to SEQ ID NO: 276350
uucuugguaaaccuaugca

SEQ ID NO: 276352 - RNA, 19 nt, Artificial Sequence
  Description of Artificial Sequence: Synthetic oligonucleotide
  Sense strand starting at position 3428 of SEQ ID NO: 3550
ggacaugacuccuccagcu

SEQ ID NO: 276353 - RNA, 19 nt, Artificial Sequence
  Description of Artificial Sequence: Synthetic oligonucleotide
  Antisense strand to SEQ ID NO: 276352
agcuggaggagucaugucc

SEQ ID NO: 276354 - RNA, 19 nt, Artificial Sequence
  Description of Artificial Sequence: Synthetic oligonucleotide
  Sense strand starting at position 3468 of SEQ ID NO: 3550
auguuaauucuccaaacga

SEQ ID NO: 276355 - RNA, 19 nt, Artificial Sequence
  Description of Artificial Sequence: Synthetic oligonucleotide
  Antisense strand to SEQ ID NO: 276354
ucguuuggagaauuaacau

SEQ ID NO: 276356 - RNA, 19 nt, Artificial Sequence
  Description of Artificial Sequence: Synthetic oligonucleotide
  Sense strand starting at position 3496 of SEQ ID NO: 3550
guguaauagagguauucua

SEQ ID NO: 276357 - RNA, 19 nt, Artificial Sequence
  Description of Artificial Sequence: Synthetic oligonucleotide
  Antisense strand to SEQ ID NO: 276356
uagaauaccucuauuacac

SEQ ID NO: 276358 - RNA, 19 nt, Artificial Sequence
  Description of Artificial Sequence: Synthetic oligonucleotide
  Sense strand starting at position 3589 of SEQ ID NO: 3550
uuuccuacuuugguguaaa

SEQ ID NO: 276359 - RNA, 19 nt, Artificial Sequence
  Description of Artificial Sequence: Synthetic oligonucleotide
  Antisense strand to SEQ ID NO: 276358
uuuacaccaaaguaggaaa

SEQ ID NO: 276360 - RNA, 19 nt, Artificial Sequence
  Description of Artificial Sequence: Synthetic oligonucleotide
  Sense strand starting at position 3608 of SEQ ID NO: 3550
augguuugggcagacaauu

SEQ ID NO: 276361 - RNA, 19 nt, Artificial Sequence
  Description of Artificial Sequence: Synthetic oligonucleotide
  Antisense strand to SEQ ID NO: 276360
aauugucugcccaaaccau

SEQ ID NO: 276362 - RNA, 19 nt, Artificial Sequence
  Description of Artificial Sequence: Synthetic oligonucleotide
  Sense strand starting at position 3635 of SEQ ID NO: 3550
gacccaacagagugcuauu

SEQ ID NO: 276363 - RNA, 19 nt, Artificial Sequence
  Description of Artificial Sequence: Synthetic oligonucleotide
  Antisense strand to SEQ ID NO: 276362
aauagcacucuguuggguc

SEQ ID NO: 276364 - RNA, 19 nt, Artificial Sequence
  Description of Artificial Sequence: Synthetic oligonucleotide
  Sense strand starting at position 51 of SEQ ID NO: 3551
ggccucaauuucuuagcua

SEQ ID NO: 276365 - RNA, 19 nt, Artificial Sequence
  Description of Artificial Sequence: Synthetic oligonucleotide
  Antisense strand to SEQ ID NO: 276364
uagcuaagaaauugaggcc

SEQ ID NO: 276366 - RNA, 19 nt, Artificial Sequence
  Description of Artificial Sequence: Synthetic oligonucleotide
  Sense strand starting at position 449 of SEQ ID NO: 3551
uguuauuaaggucaguuau

SEQ ID NO: 276367 - RNA, 19 nt, Artificial Sequence
  Description of Artificial Sequence: Synthetic oligonucleotide
  Antisense strand to SEQ ID NO: 276366
auaacugaccuuaauaaca

SEQ ID NO: 276368 - RNA, 19 nt, Artificial Sequence
  Description of Artificial Sequence: Synthetic oligonucleotide
  Sense strand starting at position 451 of SEQ ID NO: 3551
uuauuaaggucaguuauga

SEQ ID NO: 276369 - RNA, 19 nt, Artificial Sequence
  Description of Artificial Sequence: Synthetic oligonucleotide
  Antisense strand to SEQ ID NO: 276368
ucauaacugaccuuaauaa

SEQ ID NO: 276370 - RNA, 19 nt, Artificial Sequence
  Description of Artificial Sequence: Synthetic oligonucleotide
  Sense strand starting at position 510 of SEQ ID NO: 3551
acugucauuccagagcuaa

SEQ ID NO: 276371 - RNA, 19 nt, Artificial Sequence
  Description of Artificial Sequence: Synthetic oligonucleotide
  Antisense strand to SEQ ID NO: 276370
uuagcucuggaaugacagu

SEQ ID NO: 276372 - RNA, 19 nt, Artificial Sequence
  Description of Artificial Sequence: Synthetic oligonucleotide
  Sense strand starting at position 539 of SEQ ID NO: 3551
gagcgagggaucugaaaca

SEQ ID NO: 276373 - RNA, 19 nt, Artificial Sequence
  Description of Artificial Sequence: Synthetic oligonucleotide
  Antisense strand to SEQ ID NO: 276372
uguuucagaucccucgcuc

SEQ ID NO: 276374 - RNA, 19 nt, Artificial Sequence
  Description of Artificial Sequence: Synthetic oligonucleotide
  Sense strand starting at position 570 of SEQ ID NO: 3551
gacaguauuucgcuguuac

SEQ ID NO: 276375 - RNA, 19 nt, Artificial Sequence
  Description of Artificial Sequence: Synthetic oligonucleotide
  Antisense strand to SEQ ID NO: 276374
guaacagcgaaauacuguc

SEQ ID NO: 276376 - RNA, 19 nt, Artificial Sequence
  Description of Artificial Sequence: Synthetic oligonucleotide
  Sense strand starting at position 631 of SEQ ID NO: 3551
agaguauuucccuggcccu

SEQ ID NO: 276377 - RNA, 19 nt, Artificial Sequence
  Description of Artificial Sequence: Synthetic oligonucleotide
  Antisense strand to SEQ ID NO: 276376
agggccagggaaauacucu

SEQ ID NO: 276378 - RNA, 19 nt, Artificial Sequence
  Description of Artificial Sequence: Synthetic oligonucleotide
  Sense strand starting at position 632 of SEQ ID NO: 3551
gaguauuucccuggcccuu

SEQ ID NO: 276379 - RNA, 19 nt, Artificial Sequence
  Description of Artificial Sequence: Synthetic oligonucleotide
  Antisense strand to SEQ ID NO: 276378
aagggccagggaaauacuc

SEQ ID NO: 276380 - RNA, 19 nt, Artificial Sequence
  Description of Artificial Sequence: Synthetic oligonucleotide
  Sense strand starting at position 916 of SEQ ID NO: 3551
gagaauuacugauuaaguu

SEQ ID NO: 276381 - RNA, 19 nt, Artificial Sequence
  Description of Artificial Sequence: Synthetic oligonucleotide
  Antisense strand to SEQ ID NO: 276380
aacuuaaucaguaauucuc

SEQ ID NO: 276382 - RNA, 19 nt, Artificial Sequence
  Description of Artificial Sequence: Synthetic oligonucleotide
  Sense strand starting at position 938 of SEQ ID NO: 3551
gagaaauccuaagagagaa

SEQ ID NO: 276383 - RNA, 19 nt, Artificial Sequence
  Description of Artificial Sequence: Synthetic oligonucleotide
  Antisense strand to SEQ ID NO: 276382
uucucucuuaggauuucuc

SEQ ID NO: 276384 - RNA, 19 nt, Artificial Sequence
  Description of Artificial Sequence: Synthetic oligonucleotide
  Sense strand starting at position 1040 of SEQ ID NO: 3551
gugcaaaugagugacaacu

SEQ ID NO: 276385 - RNA, 19 nt, Artificial Sequence
  Description of Artificial Sequence: Synthetic oligonucleotide
  Antisense strand to SEQ ID NO: 276384
aguugucacucauuugcac

SEQ ID NO: 276386 - RNA, 19 nt, Artificial Sequence
  Description of Artificial Sequence: Synthetic oligonucleotide
  Sense strand starting at position 1176 of SEQ ID NO: 3551
ggcuucccacaucagauau

SEQ ID NO: 276387 - RNA, 19 nt, Artificial Sequence
  Description of Artificial Sequence: Synthetic oligonucleotide
  Antisense strand to SEQ ID NO: 276386
auaucugaugugggaagcc

SEQ ID NO: 276388 - RNA, 19 nt, Artificial Sequence
  Description of Artificial Sequence: Synthetic oligonucleotide
  Sense strand starting at position 1979 of SEQ ID NO: 3551
ggcagucauuuccuuagca

SEQ ID NO: 276389 - RNA, 19 nt, Artificial Sequence
  Description of Artificial Sequence: Synthetic oligonucleotide
  Antisense strand to SEQ ID NO: 276388
ugcuaaggaaaugacugcc

SEQ ID NO: 276390 - RNA, 19 nt, Artificial Sequence
  Description of Artificial Sequence: Synthetic oligonucleotide
  Sense strand starting at position 1980 of SEQ ID NO: 3551
gcagucauuuccuuagcaa

SEQ ID NO: 276391 - RNA, 19 nt, Artificial Sequence
  Description of Artificial Sequence: Synthetic oligonucleotide
  Antisense strand to SEQ ID NO: 276390
uugcuaaggaaaugacugc

SEQ ID NO: 276392 - RNA, 19 nt, Artificial Sequence
  Description of Artificial Sequence: Synthetic oligonucleotide
  Sense strand starting at position 2283 of SEQ ID NO: 3551
auuaaaguugaccaguauu

SEQ ID NO: 276393 - RNA, 19 nt, Artificial Sequence
  Description of Artificial Sequence: Synthetic oligonucleotide
  Antisense strand to SEQ ID NO: 276392
aauacuggucaacuuuaau

SEQ ID NO: 276394 - RNA, 19 nt, Artificial Sequence
  Description of Artificial Sequence: Synthetic oligonucleotide
  Sense strand starting at position 2334 of SEQ ID NO: 3551
augcgaggccuauaugaga

SEQ ID NO: 276395 - RNA, 19 nt, Artificial Sequence
  Description of Artificial Sequence: Synthetic oligonucleotide
  Antisense strand to SEQ ID NO: 276394
ucucauauaggccucgcau

SEQ ID NO: 276396 - RNA, 19 nt, Artificial Sequence
  Description of Artificial Sequence: Synthetic oligonucleotide
  Sense strand starting at position 2347 of SEQ ID NO: 3551
augagaagaaugugagucu

SEQ ID NO: 276397 - RNA, 19 nt, Artificial Sequence
  Description of Artificial Sequence: Synthetic oligonucleotide
  Antisense strand to SEQ ID NO: 276396
agacucacauucuucucau

SEQ ID NO: 276398 - RNA, 19 nt, Artificial Sequence
  Description of Artificial Sequence: Synthetic oligonucleotide
  Sense strand starting at position 2379 of SEQ ID NO: 3551
agaccucgaucugugauau

SEQ ID NO: 276399 - RNA, 19 nt, Artificial Sequence
  Description of Artificial Sequence: Synthetic oligonucleotide
  Antisense strand to SEQ ID NO: 276398
auaucacagaucgaggucu

SEQ ID NO: 276400 - RNA, 19 nt, Artificial Sequence
  Description of Artificial Sequence: Synthetic oligonucleotide
  Sense strand starting at position 2380 of SEQ ID NO: 3551
gaccucgaucugugauaua

SEQ ID NO: 276401 - RNA, 19 nt, Artificial Sequence
  Description of Artificial Sequence: Synthetic oligonucleotide
  Antisense strand to SEQ ID NO: 276400
uauaucacagaucgagguc

SEQ ID NO: 276402 - RNA, 19 nt, Artificial Sequence
  Description of Artificial Sequence: Synthetic oligonucleotide
  Sense strand starting at position 2403 of SEQ ID NO: 3551
gaguuaauacaauguagaa

SEQ ID NO: 276403 - RNA, 19 nt, Artificial Sequence
  Description of Artificial Sequence: Synthetic oligonucleotide
  Antisense strand to SEQ ID NO: 276402
uucuacauuguauuaacuc

SEQ ID NO: 276404 - RNA, 19 nt, Artificial Sequence
  Description of Artificial Sequence: Synthetic oligonucleotide
  Sense strand starting at position 2420 of SEQ ID NO: 3551
aaauguuugguacagccua

SEQ ID NO: 276405 - RNA, 19 nt, Artificial Sequence
  Description of Artificial Sequence: Synthetic oligonucleotide
  Antisense strand to SEQ ID NO: 276404
uaggcuguaccaaacauuu

SEQ ID NO: 276406 - RNA, 19 nt, Artificial Sequence
  Description of Artificial Sequence: Synthetic oligonucleotide
  Sense strand starting at position 2433 of SEQ ID NO: 3551
agccuauucugggugggaa

SEQ ID NO: 276407 - RNA, 19 nt, Artificial Sequence
  Description of Artificial Sequence: Synthetic oligonucleotide
  Antisense strand to SEQ ID NO: 276406
uucccacccagaauaggcu

SEQ ID NO: 276408 - RNA, 19 nt, Artificial Sequence
  Description of Artificial Sequence: Synthetic oligonucleotide
  Sense strand starting at position 2434 of SEQ ID NO: 3551
gccuauucugggugggaaa

SEQ ID NO: 276409 - RNA, 19 nt, Artificial Sequence
  Description of Artificial Sequence: Synthetic oligonucleotide
  Antisense strand to SEQ ID NO: 276408
uuucccacccagaauaggc

SEQ ID NO: 276410 - RNA, 19 nt, Artificial Sequence
  Description of Artificial Sequence: Synthetic oligonucleotide
  Sense strand starting at position 2475 of SEQ ID NO: 3551
cuguuucuuggaggauuga

SEQ ID NO: 276411 - RNA, 19 nt, Artificial Sequence
  Description of Artificial Sequence: Synthetic oligonucleotide
  Antisense strand to SEQ ID NO: 276410
ucaauccuccaagaaacag

SEQ ID NO: 276412 - RNA, 19 nt, Artificial Sequence
  Description of Artificial Sequence: Synthetic oligonucleotide
  Sense strand starting at position 2512 of SEQ ID NO: 3551
agaggaugccucuggauug

SEQ ID NO: 276413 - RNA, 19 nt, Artificial Sequence
  Description of Artificial Sequence: Synthetic oligonucleotide
  Antisense strand to SEQ ID NO: 276412
caauccagaggcauccucu

SEQ ID NO: 276414 - RNA, 19 nt, Artificial Sequence
  Description of Artificial Sequence: Synthetic oligonucleotide
  Sense strand starting at position 2522 of SEQ ID NO: 3551
ucuggauugcauuaugcca

SEQ ID NO: 276415 - RNA, 19 nt, Artificial Sequence
  Description of Artificial Sequence: Synthetic oligonucleotide
  Antisense strand to SEQ ID NO: 276414
uggcauaaugcaauccaga

SEQ ID NO: 276416 - RNA, 19 nt, Artificial Sequence
  Description of Artificial Sequence: Synthetic oligonucleotide
  Sense strand starting at position 2529 of SEQ ID NO: 3551
ugcauuaugccacaggaaa

SEQ ID NO: 276417 - RNA, 19 nt, Artificial Sequence
  Description of Artificial Sequence: Synthetic oligonucleotide
  Antisense strand to SEQ ID NO: 276416
uuuccuguggcauaaugca

SEQ ID NO: 276418 - RNA, 19 nt, Artificial Sequence
  Description of Artificial Sequence: Synthetic oligonucleotide
  Sense strand starting at position 2557 of SEQ ID NO: 3551
uguuauaagguuuggagga

SEQ ID NO: 276419 - RNA, 19 nt, Artificial Sequence
  Description of Artificial Sequence: Synthetic oligonucleotide
  Antisense strand to SEQ ID NO: 276418
uccuccaaaccuuauaaca

SEQ ID NO: 276420 - RNA, 19 nt, Artificial Sequence
  Description of Artificial Sequence: Synthetic oligonucleotide
  Sense strand starting at position 2622 of SEQ ID NO: 3551
cuggcuggacucggagaau

SEQ ID NO: 276421 - RNA, 19 nt, Artificial Sequence
  Description of Artificial Sequence: Synthetic oligonucleotide
  Antisense strand to SEQ ID NO: 276420
auucuccgaguccagccag

SEQ ID NO: 276422 - RNA, 19 nt, Artificial Sequence
  Description of Artificial Sequence: Synthetic oligonucleotide
  Sense strand starting at position 2625 of SEQ ID NO: 3551
gcuggacucggagaaugau

SEQ ID NO: 276423 - RNA, 19 nt, Artificial Sequence
  Description of Artificial Sequence: Synthetic oligonucleotide
  Antisense strand to SEQ ID NO: 276422
aucauucuccgaguccagc

SEQ ID NO: 276424 - RNA, 19 nt, Artificial Sequence
  Description of Artificial Sequence: Synthetic oligonucleotide
  Sense strand starting at position 2631 of SEQ ID NO: 3551
cucggagaaugauuguaag

SEQ ID NO: 276425 - RNA, 19 nt, Artificial Sequence
  Description of Artificial Sequence: Synthetic oligonucleotide
  Antisense strand to SEQ ID NO: 276424
cuuacaaucauucuccgag

SEQ ID NO: 276426 - RNA, 19 nt, Artificial Sequence
  Description of Artificial Sequence: Synthetic oligonucleotide
  Sense strand starting at position 2637 of SEQ ID NO: 3551
gaaugauuguaagugguaa

SEQ ID NO: 276427 - RNA, 19 nt, Artificial Sequence
  Description of Artificial Sequence: Synthetic oligonucleotide
  Antisense strand to SEQ ID NO: 276426
uuaccacuuacaaucauuc

SEQ ID NO: 276428 - RNA, 19 nt, Artificial Sequence
  Description of Artificial Sequence: Synthetic oligonucleotide
  Sense strand starting at position 2639 of SEQ ID NO: 3551
augauuguaagugguaaua

SEQ ID NO: 276429 - RNA, 19 nt, Artificial Sequence
  Description of Artificial Sequence: Synthetic oligonucleotide
  Antisense strand to SEQ ID NO: 276428
uauuaccacuuacaaucau

SEQ ID NO: 276430 - RNA, 19 nt, Artificial Sequence
  Description of Artificial Sequence: Synthetic oligonucleotide
  Sense strand starting at position 2650 of SEQ ID NO: 3551
ugguaauauuaacuagcua

SEQ ID NO: 276431 - RNA, 19 nt, Artificial Sequence
  Description of Artificial Sequence: Synthetic oligonucleotide
  Antisense strand to SEQ ID NO: 276430
uagcuaguuaauauuacca

SEQ ID NO: 276432 - RNA, 19 nt, Artificial Sequence
  Description of Artificial Sequence: Synthetic oligonucleotide
  Sense strand starting at position 2690 of SEQ ID NO: 3551
agaugagugacuuggacuu

SEQ ID NO: 276433 - RNA, 19 nt, Artificial Sequence
  Description of Artificial Sequence: Synthetic oligonucleotide
  Antisense strand to SEQ ID NO: 276432
aaguccaagucacucaucu

SEQ ID NO: 276434 - RNA, 19 nt, Artificial Sequence
  Description of Artificial Sequence: Synthetic oligonucleotide
  Sense strand starting at position 3363 of SEQ ID NO: 3551
cacugcuacuaguuagaga

SEQ ID NO: 276435 - RNA, 19 nt, Artificial Sequence
  Description of Artificial Sequence: Synthetic oligonucleotide
  Antisense strand to SEQ ID NO: 276434
ucucuaacuaguagcagug

SEQ ID NO: 276436 - RNA, 19 nt, Artificial Sequence
  Description of Artificial Sequence: Synthetic oligonucleotide
  Sense strand starting at position 3484 of SEQ ID NO: 3551
uaagacagauuugguaaua

SEQ ID NO: 276437 - RNA, 19 nt, Artificial Sequence
  Description of Artificial Sequence: Synthetic oligonucleotide
  Antisense strand to SEQ ID NO: 276436
uauuaccaaaucugucuua

SEQ ID NO: 276438 - RNA, 19 nt, Artificial Sequence
  Description of Artificial Sequence: Synthetic oligonucleotide
  Sense strand starting at position 3489 of SEQ ID NO: 3551
cagauuugguaauaaauug

SEQ ID NO: 276439 - RNA, 19 nt, Artificial Sequence
  Description of Artificial Sequence: Synthetic oligonucleotide
  Antisense strand to SEQ ID NO: 276438
caauuuauuaccaaaucug

SEQ ID NO: 276440 - RNA, 19 nt, Artificial Sequence
  Description of Artificial Sequence: Synthetic oligonucleotide
  Sense strand starting at position 3915 of SEQ ID NO: 3551
aguccaaauuccuuauagu

SEQ ID NO: 276441 - RNA, 19 nt, Artificial Sequence
  Description of Artificial Sequence: Synthetic oligonucleotide
  Antisense strand to SEQ ID NO: 276440
acuauaaggaauuuggacu

SEQ ID NO: 276442 - RNA, 19 nt, Artificial Sequence
  Description of Artificial Sequence: Synthetic oligonucleotide
  Sense strand starting at position 3916 of SEQ ID NO: 3551
guccaaauuccuuauaguu

SEQ ID NO: 276443 - RNA, 19 nt, Artificial Sequence
  Description of Artificial Sequence: Synthetic oligonucleotide
  Antisense strand to SEQ ID NO: 276442
aacuauaaggaauuuggac

SEQ ID NO: 276444 - RNA, 19 nt, Artificial Sequence
  Description of Artificial Sequence: Synthetic oligonucleotide
  Sense strand starting at position 172 of SEQ ID NO: 3553
gucuuagguagugaacacu

SEQ ID NO: 276445 - RNA, 19 nt, Artificial Sequence
  Description of Artificial Sequence: Synthetic oligonucleotide
  Antisense strand to SEQ ID NO: 276444
aguguucacuaccuaagac

SEQ ID NO: 276446 - RNA, 19 nt, Artificial Sequence
  Description of Artificial Sequence: Synthetic oligonucleotide
  Sense strand starting at position 217 of SEQ ID NO: 3553
ggaauaacuugauaguaaa

SEQ ID NO: 276447 - RNA, 19 nt, Artificial Sequence
  Description of Artificial Sequence: Synthetic oligonucleotide
  Antisense strand to SEQ ID NO: 276446
uuuacuaucaaguuauucc

SEQ ID NO: 276448 - RNA, 19 nt, Artificial Sequence
  Description of Artificial Sequence: Synthetic oligonucleotide
  Sense strand starting at position 220 of SEQ ID NO: 3553
auaacuugauaguaaagga

SEQ ID NO: 276449 - RNA, 19 nt, Artificial Sequence
  Description of Artificial Sequence: Synthetic oligonucleotide
  Antisense strand to SEQ ID NO: 276448
uccuuuacuaucaaguuau

SEQ ID NO: 276450 - RNA, 19 nt, Artificial Sequence
  Description of Artificial Sequence: Synthetic oligonucleotide
  Sense strand starting at position 245 of SEQ ID NO: 3553
aaauaagaguuccugguaa

SEQ ID NO: 276451 - RNA, 19 nt, Artificial Sequence
  Description of Artificial Sequence: Synthetic oligonucleotide
  Antisense strand to SEQ ID NO: 276450
uuaccaggaacucuuauuu

SEQ ID NO: 276452 - RNA, 19 nt, Artificial Sequence
  Description of Artificial Sequence: Synthetic oligonucleotide
  Sense strand starting at position 327 of SEQ ID NO: 3553
aguauuuaguuacagaaca

SEQ ID NO: 276453 - RNA, 19 nt, Artificial Sequence
  Description of Artificial Sequence: Synthetic oligonucleotide
  Antisense strand to SEQ ID NO: 276452
uguucuguaacuaaauacu

SEQ ID NO: 276454 - RNA, 19 nt, Artificial Sequence
  Description of Artificial Sequence: Synthetic oligonucleotide
  Sense strand starting at position 364 of SEQ ID NO: 3553
guuugagauaccgacacau

SEQ ID NO: 276455 - RNA, 19 nt, Artificial Sequence
  Description of Artificial Sequence: Synthetic oligonucleotide
  Antisense strand to SEQ ID NO: 276454
augugucgguaucucaaac

SEQ ID NO: 276456 - RNA, 19 nt, Artificial Sequence
  Description of Artificial Sequence: Synthetic oligonucleotide
  Sense strand starting at position 620 of SEQ ID NO: 3553
gacuguuuggcagaagacu

SEQ ID NO: 276457 - RNA, 19 nt, Artificial Sequence
  Description of Artificial Sequence: Synthetic oligonucleotide
  Antisense strand to SEQ ID NO: 276456
agucuucugccaaacaguc

SEQ ID NO: 276458 - RNA, 19 nt, Artificial Sequence
  Description of Artificial Sequence: Synthetic oligonucleotide
  Sense strand starting at position 677 of SEQ ID NO: 3553
cauuuaacucccggcuagu

SEQ ID NO: 276459 - RNA, 19 nt, Artificial Sequence
  Description of Artificial Sequence: Synthetic oligonucleotide
  Antisense strand to SEQ ID NO: 276458
acuagccgggaguuaaaug

SEQ ID NO: 276460 - RNA, 19 nt, Artificial Sequence
  Description of Artificial Sequence: Synthetic oligonucleotide
  Sense strand starting at position 752 of SEQ ID NO: 3553
acacuugagcccggaaagu

SEQ ID NO: 276461 - RNA, 19 nt, Artificial Sequence
  Description of Artificial Sequence: Synthetic oligonucleotide
  Antisense strand to SEQ ID NO: 276460
acuuuccgggcucaagugu

SEQ ID NO: 276462 - RNA, 19 nt, Artificial Sequence
  Description of Artificial Sequence: Synthetic oligonucleotide
  Sense strand starting at position 837 of SEQ ID NO: 3553
uaaguuugugcagaaauua

SEQ ID NO: 276463 - RNA, 19 nt, Artificial Sequence
  Description of Artificial Sequence: Synthetic oligonucleotide
  Antisense strand to SEQ ID NO: 276462
uaauuucugcacaaacuua

SEQ ID NO: 276464 - RNA, 19 nt, Artificial Sequence
  Description of Artificial Sequence: Synthetic oligonucleotide
  Sense strand starting at position 987 of SEQ ID NO: 3553
guagauuaauucccgcuaa

SEQ ID NO: 276465 - RNA, 19 nt, Artificial Sequence
  Description of Artificial Sequence: Synthetic oligonucleotide
  Antisense strand to SEQ ID NO: 276464
uuagcgggaauuaaucuac

SEQ ID NO: 276466 - RNA, 19 nt, Artificial Sequence
  Description of Artificial Sequence: Synthetic oligonucleotide
  Sense strand starting at position 1034 of SEQ ID NO: 3553
ucuauauagcauuguguaa

SEQ ID NO: 276467 - RNA, 19 nt, Artificial Sequence
  Description of Artificial Sequence: Synthetic oligonucleotide
  Antisense strand to SEQ ID NO: 276466
uuacacaaugcuauauaga

SEQ ID NO: 276468 - RNA, 19 nt, Artificial Sequence
  Description of Artificial Sequence: Synthetic oligonucleotide
  Sense strand starting at position 1077 of SEQ ID NO: 3553
cuguuaaggacagguuuau

SEQ ID NO: 276469 - RNA, 19 nt, Artificial Sequence
  Description of Artificial Sequence: Synthetic oligonucleotide
  Antisense strand to SEQ ID NO: 276468
auaaaccuguccuuaacag

SEQ ID NO: 276470 - RNA, 19 nt, Artificial Sequence
  Description of Artificial Sequence: Synthetic oligonucleotide
  Sense strand starting at position 1174 of SEQ ID NO: 3553
cagugauuccacggacgca

SEQ ID NO: 276471 - RNA, 19 nt, Artificial Sequence
  Description of Artificial Sequence: Synthetic oligonucleotide
  Antisense strand to SEQ ID NO: 276470
ugcguccguggaaucacug

SEQ ID NO: 276472 - RNA, 19 nt, Artificial Sequence
  Description of Artificial Sequence: Synthetic oligonucleotide
  Sense strand starting at position 2392 of SEQ ID NO: 3553
ggguuugcgcguguggaaa

SEQ ID NO: 276473 - RNA, 19 nt, Artificial Sequence
  Description of Artificial Sequence: Synthetic oligonucleotide
  Antisense strand to SEQ ID NO: 276472
uuuccacacgcgcaaaccc

SEQ ID NO: 276474 - RNA, 19 nt, Artificial Sequence
  Description of Artificial Sequence: Synthetic oligonucleotide
  Sense strand starting at position 2428 of SEQ ID NO: 3553
gcuggaguucgacauugca

SEQ ID NO: 276475 - RNA, 19 nt, Artificial Sequence
  Description of Artificial Sequence: Synthetic oligonucleotide
  Antisense strand to SEQ ID NO: 276474
ugcaaugucgaacuccagc

SEQ ID NO: 276476 - RNA, 19 nt, Artificial Sequence
  Description of Artificial Sequence: Synthetic oligonucleotide
  Sense strand starting at position 2431 of SEQ ID NO: 3553
ggaguucgacauugcaaau

SEQ ID NO: 276477 - RNA, 19 nt, Artificial Sequence
  Description of Artificial Sequence: Synthetic oligonucleotide
  Antisense strand to SEQ ID NO: 276476
auuugcaaugucgaacucc

SEQ ID NO: 276478 - RNA, 19 nt, Artificial Sequence
  Description of Artificial Sequence: Synthetic oligonucleotide
  Sense strand starting at position 2437 of SEQ ID NO: 3553
cgacauugcaaauaaaggu

SEQ ID NO: 276479 - RNA, 19 nt, Artificial Sequence
  Description of Artificial Sequence: Synthetic oligonucleotide
  Antisense strand to SEQ ID NO: 276478
accuuuauuugcaaugucg

SEQ ID NO: 276480 - RNA, 19 nt, Artificial Sequence
  Description of Artificial Sequence: Synthetic oligonucleotide
  Sense strand starting at position 2478 of SEQ ID NO: 3553
aaauuaguucugcagggau

SEQ ID NO: 276481 - RNA, 19 nt, Artificial Sequence
  Description of Artificial Sequence: Synthetic oligonucleotide
  Antisense strand to SEQ ID NO: 276480
aucccugcagaacuaauuu

SEQ ID NO: 276482 - RNA, 19 nt, Artificial Sequence
  Description of Artificial Sequence: Synthetic oligonucleotide
  Sense strand starting at position 2500 of SEQ ID NO: 3553
gguugaaagaagcguuaaa

SEQ ID NO: 276483 - RNA, 19 nt, Artificial Sequence
  Description of Artificial Sequence: Synthetic oligonucleotide
  Antisense strand to SEQ ID NO: 276482
uuuaacgcuucuuucaacc

SEQ ID NO: 276484 - RNA, 19 nt, Artificial Sequence
  Description of Artificial Sequence: Synthetic oligonucleotide
  Sense strand starting at position 2524 of SEQ ID NO: 3553
ccuuguaggagucagcaau

SEQ ID NO: 276485 - RNA, 19 nt, Artificial Sequence
  Description of Artificial Sequence: Synthetic oligonucleotide
  Antisense strand to SEQ ID NO: 276484
auugcugacuccuacaagg

SEQ ID NO: 276486 - RNA, 19 nt, Artificial Sequence
  Description of Artificial Sequence: Synthetic oligonucleotide
  Sense strand starting at position 2646 of SEQ ID NO: 3553
uguugcugccuccaguaua

SEQ ID NO: 276487 - RNA, 19 nt, Artificial Sequence
  Description of Artificial Sequence: Synthetic oligonucleotide
  Antisense strand to SEQ ID NO: 276486
uauacuggaggcagcaaca

SEQ ID NO: 276488 - RNA, 19 nt, Artificial Sequence
  Description of Artificial Sequence: Synthetic oligonucleotide
  Sense strand starting at position 2788 of SEQ ID NO: 3553
acguaauacugccucuaga

SEQ ID NO: 276489 - RNA, 19 nt, Artificial Sequence
  Description of Artificial Sequence: Synthetic oligonucleotide
  Antisense strand to SEQ ID NO: 276488
ucuagaggcaguauuacgu

SEQ ID NO: 276490 - RNA, 19 nt, Artificial Sequence
  Description of Artificial Sequence: Synthetic oligonucleotide
  Sense strand starting at position 2885 of SEQ ID NO: 3553
uuacuuauuccacaagugu

SEQ ID NO: 276491 - RNA, 19 nt, Artificial Sequence
  Description of Artificial Sequence: Synthetic oligonucleotide
  Antisense strand to SEQ ID NO: 276490
acacuuguggaauaaguaa

SEQ ID NO: 276492 - RNA, 19 nt, Artificial Sequence
  Description of Artificial Sequence: Synthetic oligonucleotide
  Sense strand starting at position 2907 of SEQ ID NO: 3553
uccagaaacucagacuuga

SEQ ID NO: 276493 - RNA, 19 nt, Artificial Sequence
  Description of Artificial Sequence: Synthetic oligonucleotide
  Antisense strand to SEQ ID NO: 276492
ucaagucugaguuucugga

SEQ ID NO: 276494 - RNA, 19 nt, Artificial Sequence
  Description of Artificial Sequence: Synthetic oligonucleotide
  Sense strand starting at position 2920 of SEQ ID NO: 3553
acuugauauugccucaagu

SEQ ID NO: 276495 - RNA, 19 nt, Artificial Sequence
  Description of Artificial Sequence: Synthetic oligonucleotide
  Antisense strand to SEQ ID NO: 276494
acuugaggcaauaucaagu

SEQ ID NO: 276496 - RNA, 19 nt, Artificial Sequence
  Description of Artificial Sequence: Synthetic oligonucleotide
  Sense strand starting at position 3088 of SEQ ID NO: 3553
uuaucucuacuuuguagau

SEQ ID NO: 276497 - RNA, 19 nt, Artificial Sequence
  Description of Artificial Sequence: Synthetic oligonucleotide
  Antisense strand to SEQ ID NO: 276496
aucuacaaaguagagauaa

SEQ ID NO: 276498 - RNA, 19 nt, Artificial Sequence
  Description of Artificial Sequence: Synthetic oligonucleotide
  Sense strand starting at position 3094 of SEQ ID NO: 3553
cuacuuuguagaugggauu

SEQ ID NO: 276499 - RNA, 19 nt, Artificial Sequence
  Description of Artificial Sequence: Synthetic oligonucleotide
  Antisense strand to SEQ ID NO: 276498
aaucccaucuacaaaguag

SEQ ID NO: 276500 - RNA, 19 nt, Artificial Sequence
  Description of Artificial Sequence: Synthetic oligonucleotide
  Sense strand starting at position 3219 of SEQ ID NO: 3553
ccgugaaugugggcugaga

SEQ ID NO: 276501 - RNA, 19 nt, Artificial Sequence
  Description of Artificial Sequence: Synthetic oligonucleotide
  Antisense strand to SEQ ID NO: 276500
ucucagcccacauucacgg

SEQ ID NO: 276502 - RNA, 19 nt, Artificial Sequence
  Description of Artificial Sequence: Synthetic oligonucleotide
  Sense strand starting at position 3221 of SEQ ID NO: 3553
gugaaugugggcugagaug

SEQ ID NO: 276503 - RNA, 19 nt, Artificial Sequence
  Description of Artificial Sequence: Synthetic oligonucleotide
  Antisense strand to SEQ ID NO: 276502
caucucagcccacauucac

SEQ ID NO: 276504 - RNA, 19 nt, Artificial Sequence
  Description of Artificial Sequence: Synthetic oligonucleotide
  Sense strand starting at position 3289 of SEQ ID NO: 3553
gcuuucuaauguccagaug

SEQ ID NO: 276505 - RNA, 19 nt, Artificial Sequence
  Description of Artificial Sequence: Synthetic oligonucleotide
  Antisense strand to SEQ ID NO: 276504
caucuggacauuagaaagc

SEQ ID NO: 276506 - RNA, 19 nt, Artificial Sequence
  Description of Artificial Sequence: Synthetic oligonucleotide
  Sense strand starting at position 3290 of SEQ ID NO: 3553
cuuucuaauguccagauga

SEQ ID NO: 276507 - RNA, 19 nt, Artificial Sequence
  Description of Artificial Sequence: Synthetic oligonucleotide
  Antisense strand to SEQ ID NO: 276506
ucaucuggacauuagaaag

SEQ ID NO: 276508 - RNA, 19 nt, Artificial Sequence
  Description of Artificial Sequence: Synthetic oligonucleotide
  Sense strand starting at position 3318 of SEQ ID NO: 3553
aggauuuccuaaugucuuu

SEQ ID NO: 276509 - RNA, 19 nt, Artificial Sequence
  Description of Artificial Sequence: Synthetic oligonucleotide
  Antisense strand to SEQ ID NO: 276508
aaagacauuaggaaauccu

SEQ ID NO: 276510 - RNA, 19 nt, Artificial Sequence
  Description of Artificial Sequence: Synthetic oligonucleotide
  Sense strand starting at position 3361 of SEQ ID NO: 3553
caggguugaguuugugcau

SEQ ID NO: 276511 - RNA, 19 nt, Artificial Sequence
  Description of Artificial Sequence: Synthetic oligonucleotide
  Antisense strand to SEQ ID NO: 276510
augcacaaacucaacccug

SEQ ID NO: 276512 - RNA, 19 nt, Artificial Sequence
  Description of Artificial Sequence: Synthetic oligonucleotide
  Sense strand starting at position 3522 of SEQ ID NO: 3553
gagugaagaccuggcucau

SEQ ID NO: 276513 - RNA, 19 nt, Artificial Sequence
  Description of Artificial Sequence: Synthetic oligonucleotide
  Antisense strand to SEQ ID NO: 276512
augagccaggucuucacuc

SEQ ID NO: 276514 - RNA, 19 nt, Artificial Sequence
  Description of Artificial Sequence: Synthetic oligonucleotide
  Sense strand starting at position 3618 of SEQ ID NO: 3553
aaauguguacaucagggua

SEQ ID NO: 276515 - RNA, 19 nt, Artificial Sequence
  Description of Artificial Sequence: Synthetic oligonucleotide
  Antisense strand to SEQ ID NO: 276514
uacccugauguacacauuu

SEQ ID NO: 276516 - RNA, 19 nt, Artificial Sequence
  Description of Artificial Sequence: Synthetic oligonucleotide
  Sense strand starting at position 3621 of SEQ ID NO: 3553
uguguacaucaggguaaau

SEQ ID NO: 276517 - RNA, 19 nt, Artificial Sequence
  Description of Artificial Sequence: Synthetic oligonucleotide
  Antisense strand to SEQ ID NO: 276516
auuuacccugauguacaca

SEQ ID NO: 276518 - RNA, 19 nt, Artificial Sequence
  Description of Artificial Sequence: Synthetic oligonucleotide
  Sense strand starting at position 3737 of SEQ ID NO: 3553
guccuauugguuugcugga

SEQ ID NO: 276519 - RNA, 19 nt, Artificial Sequence
  Description of Artificial Sequence: Synthetic oligonucleotide
  Antisense strand to SEQ ID NO: 276518
uccagcaaaccaauaggac

SEQ ID NO: 276520 - RNA, 19 nt, Artificial Sequence
  Description of Artificial Sequence: Synthetic oligonucleotide
  Sense strand starting at position 3803 of SEQ ID NO: 3553
aucaguugcaaucggagua

SEQ ID NO: 276521 - RNA, 19 nt, Artificial Sequence
  Description of Artificial Sequence: Synthetic oligonucleotide
  Antisense strand to SEQ ID NO: 276520
uacuccgauugcaacugau

SEQ ID NO: 276522 - RNA, 19 nt, Artificial Sequence
  Description of Artificial Sequence: Synthetic oligonucleotide
  Sense strand starting at position 3896 of SEQ ID NO: 3553
ccaugagccucuuuaagug

SEQ ID NO: 276523 - RNA, 19 nt, Artificial Sequence
  Description of Artificial Sequence: Synthetic oligonucleotide
  Antisense strand to SEQ ID NO: 276522
cacuuaaagaggcucaugg

SEQ ID NO: 276524 - RNA, 19 nt, Artificial Sequence
  Description of Artificial Sequence: Synthetic oligonucleotide
  Sense strand starting at position 184 of SEQ ID NO: 3552
gucuuagguagugaacacu

SEQ ID NO: 276525 - RNA, 19 nt, Artificial Sequence
  Description of Artificial Sequence: Synthetic oligonucleotide
  Antisense strand to SEQ ID NO: 276524
aguguucacuaccuaagac

SEQ ID NO: 276526 - RNA, 19 nt, Artificial Sequence
  Description of Artificial Sequence: Synthetic oligonucleotide
  Sense strand starting at position 229 of SEQ ID NO: 3552
ggaauaacuugauaguaaa

SEQ ID NO: 276527 - RNA, 19 nt, Artificial Sequence
  Description of Artificial Sequence: Synthetic oligonucleotide
  Antisense strand to SEQ ID NO: 276526
uuuacuaucaaguuauucc

SEQ ID NO: 276528 - RNA, 19 nt, Artificial Sequence
  Description of Artificial Sequence: Synthetic oligonucleotide
  Sense strand starting at position 232 of SEQ ID NO: 3552
auaacuugauaguaaagga

SEQ ID NO: 276529 - RNA, 19 nt, Artificial Sequence
  Description of Artificial Sequence: Synthetic oligonucleotide
  Antisense strand to SEQ ID NO: 276528
uccuuuacuaucaaguuau

SEQ ID NO: 276530 - RNA, 19 nt, Artificial Sequence
  Description of Artificial Sequence: Synthetic oligonucleotide
  Sense strand starting at position 257 of SEQ ID NO: 3552
aaauaagaguuccugguaa

SEQ ID NO: 276531 - RNA, 19 nt, Artificial Sequence
  Description of Artificial Sequence: Synthetic oligonucleotide
  Antisense strand to SEQ ID NO: 276530
uuaccaggaacucuuauuu

SEQ ID NO: 276532 - RNA, 19 nt, Artificial Sequence
  Description of Artificial Sequence: Synthetic oligonucleotide
  Sense strand starting at position 339 of SEQ ID NO: 3552
aguauuuaguuacagaaca

SEQ ID NO: 276533 - RNA, 19 nt, Artificial Sequence
  Description of Artificial Sequence: Synthetic oligonucleotide
  Antisense strand to SEQ ID NO: 276532
uguucuguaacuaaauacu

SEQ ID NO: 276534 - RNA, 19 nt, Artificial Sequence
  Description of Artificial Sequence: Synthetic oligonucleotide
  Sense strand starting at position 376 of SEQ ID NO: 3552
guuugagauaccgacacau

SEQ ID NO: 276535 - RNA, 19 nt, Artificial Sequence
  Description of Artificial Sequence: Synthetic oligonucleotide
  Antisense strand to SEQ ID NO: 276534
augugucgguaucucaaac

SEQ ID NO: 276536 - RNA, 19 nt, Artificial Sequence
  Description of Artificial Sequence: Synthetic oligonucleotide
  Sense strand starting at position 632 of SEQ ID NO: 3552
gacuguuuggcagaagacu

SEQ ID NO: 276537 - RNA, 19 nt, Artificial Sequence
  Description of Artificial Sequence: Synthetic oligonucleotide
  Antisense strand to SEQ ID NO: 276536
agucuucugccaaacaguc

SEQ ID NO: 276538 - RNA, 19 nt, Artificial Sequence
  Description of Artificial Sequence: Synthetic oligonucleotide
  Sense strand starting at position 689 of SEQ ID NO: 3552
cauuuaacucccggcuagu

SEQ ID NO: 276539 - RNA, 19 nt, Artificial Sequence
  Description of Artificial Sequence: Synthetic oligonucleotide
  Antisense strand to SEQ ID NO: 276538
acuagccgggaguuaaaug

SEQ ID NO: 276540 - RNA, 19 nt, Artificial Sequence
  Description of Artificial Sequence: Synthetic oligonucleotide
  Sense strand starting at position 764 of SEQ ID NO: 3552
acacuugagcccggaaagu

SEQ ID NO: 276541 - RNA, 19 nt, Artificial Sequence
  Description of Artificial Sequence: Synthetic oligonucleotide
  Antisense strand to SEQ ID NO: 276540
acuuuccgggcucaagugu

SEQ ID NO: 276542 - RNA, 19 nt, Artificial Sequence
  Description of Artificial Sequence: Synthetic oligonucleotide
  Sense strand starting at position 849 of SEQ ID NO: 3552
uaaguuugugcagaaauua

SEQ ID NO: 276543 - RNA, 19 nt, Artificial Sequence
  Description of Artificial Sequence: Synthetic oligonucleotide
  Antisense strand to SEQ ID NO: 276542
uaauuucugcacaaacuua

SEQ ID NO: 276544 - RNA, 19 nt, Artificial Sequence
  Description of Artificial Sequence: Synthetic oligonucleotide
  Sense strand starting at position 999 of SEQ ID NO: 3552
guagauuaauucccgcuaa

SEQ ID NO: 276545 - RNA, 19 nt, Artificial Sequence
  Description of Artificial Sequence: Synthetic oligonucleotide
  Antisense strand to SEQ ID NO: 276544
uuagcgggaauuaaucuac

SEQ ID NO: 276546 - RNA, 19 nt, Artificial Sequence
  Description of Artificial Sequence: Synthetic oligonucleotide
  Sense strand starting at position 1046 of SEQ ID NO: 3552
ucuauauagcauuguguaa

SEQ ID NO: 276547 - RNA, 19 nt, Artificial Sequence
  Description of Artificial Sequence: Synthetic oligonucleotide
  Antisense strand to SEQ ID NO: 276546
uuacacaaugcuauauaga

SEQ ID NO: 276548 - RNA, 19 nt, Artificial Sequence
  Description of Artificial Sequence: Synthetic oligonucleotide
  Sense strand starting at position 1089 of SEQ ID NO: 3552
cuguuaaggacagguuuau

SEQ ID NO: 276549 - RNA, 19 nt, Artificial Sequence
  Description of Artificial Sequence: Synthetic oligonucleotide
  Antisense strand to SEQ ID NO: 276548
auaaaccuguccuuaacag

SEQ ID NO: 276550 - RNA, 19 nt, Artificial Sequence
  Description of Artificial Sequence: Synthetic oligonucleotide
  Sense strand starting at position 1186 of SEQ ID NO: 3552
cagugauuccacggacgca

SEQ ID NO: 276551 - RNA, 19 nt, Artificial Sequence
  Description of Artificial Sequence: Synthetic oligonucleotide
  Antisense strand to SEQ ID NO: 276550
ugcguccguggaaucacug

SEQ ID NO: 276552 - RNA, 19 nt, Artificial Sequence
  Description of Artificial Sequence: Synthetic oligonucleotide
  Sense strand starting at position 2404 of SEQ ID NO: 3552
ggguuugcgcguguggaaa

SEQ ID NO: 276553 - RNA, 19 nt, Artificial Sequence
  Description of Artificial Sequence: Synthetic oligonucleotide
  Antisense strand to SEQ ID NO: 276552
uuuccacacgcgcaaaccc

SEQ ID NO: 276554 - RNA, 19 nt, Artificial Sequence
  Description of Artificial Sequence: Synthetic oligonucleotide
  Sense strand starting at position 2440 of SEQ ID NO: 3552
gcuggaguucgacauugca

SEQ ID NO: 276555 - RNA, 19 nt, Artificial Sequence
  Description of Artificial Sequence: Synthetic oligonucleotide
  Antisense strand to SEQ ID NO: 276554
ugcaaugucgaacuccagc

SEQ ID NO: 276556 - RNA, 19 nt, Artificial Sequence
  Description of Artificial Sequence: Synthetic oligonucleotide
  Sense strand starting at position 2443 of SEQ ID NO: 3552
ggaguucgacauugcaaau

SEQ ID NO: 276557 - RNA, 19 nt, Artificial Sequence
  Description of Artificial Sequence: Synthetic oligonucleotide
  Antisense strand to SEQ ID NO: 276556
auuugcaaugucgaacucc

SEQ ID NO: 276558 - RNA, 19 nt, Artificial Sequence
  Description of Artificial Sequence: Synthetic oligonucleotide
  Sense strand starting at position 2449 of SEQ ID NO: 3552
cgacauugcaaauaaaggu

SEQ ID NO: 276559 - RNA, 19 nt, Artificial Sequence
  Description of Artificial Sequence: Synthetic oligonucleotide
  Antisense strand to SEQ ID NO: 276558
accuuuauuugcaaugucg

SEQ ID NO: 276560 - RNA, 19 nt, Artificial Sequence
  Description of Artificial Sequence: Synthetic oligonucleotide
  Sense strand starting at position 2490 of SEQ ID NO: 3552
aaauuaguucugcagggau

SEQ ID NO: 276561 - RNA, 19 nt, Artificial Sequence
  Description of Artificial Sequence: Synthetic oligonucleotide
  Antisense strand to SEQ ID NO: 276560
aucccugcagaacuaauuu

SEQ ID NO: 276562 - RNA, 19 nt, Artificial Sequence
  Description of Artificial Sequence: Synthetic oligonucleotide
  Sense strand starting at position 2512 of SEQ ID NO: 3552
gguugaaagaagcguuaaa

SEQ ID NO: 276563 - RNA, 19 nt, Artificial Sequence
  Description of Artificial Sequence: Synthetic oligonucleotide
  Antisense strand to SEQ ID NO: 276562
uuuaacgcuucuuucaacc

SEQ ID NO: 276564 - RNA, 19 nt, Artificial Sequence
  Description of Artificial Sequence: Synthetic oligonucleotide
  Sense strand starting at position 2536 of SEQ ID NO: 3552
ccuuguaggagucagcaau

SEQ ID NO: 276565 - RNA, 19 nt, Artificial Sequence
  Description of Artificial Sequence: Synthetic oligonucleotide
  Antisense strand to SEQ ID NO: 276564
auugcugacuccuacaagg

SEQ ID NO: 276566 - RNA, 19 nt, Artificial Sequence
  Description of Artificial Sequence: Synthetic oligonucleotide
  Sense strand starting at position 2658 of SEQ ID NO: 3552
uguugcugccuccaguaua

SEQ ID NO: 276567 - RNA, 19 nt, Artificial Sequence
  Description of Artificial Sequence: Synthetic oligonucleotide
  Antisense strand to SEQ ID NO: 276566
uauacuggaggcagcaaca

SEQ ID NO: 276568 - RNA, 19 nt, Artificial Sequence
  Description of Artificial Sequence: Synthetic oligonucleotide
  Sense strand starting at position 2800 of SEQ ID NO: 3552
acguaauacugccucuaga

SEQ ID NO: 276569 - RNA, 19 nt, Artificial Sequence
  Description of Artificial Sequence: Synthetic oligonucleotide
  Antisense strand to SEQ ID NO: 276568
ucuagaggcaguauuacgu

SEQ ID NO: 276570 - RNA, 19 nt, Artificial Sequence
  Description of Artificial Sequence: Synthetic oligonucleotide
  Sense strand starting at position 2897 of SEQ ID NO: 3552
uuacuuauuccacaagugu

SEQ ID NO: 276571 - RNA, 19 nt, Artificial Sequence
  Description of Artificial Sequence: Synthetic oligonucleotide
  Antisense strand to SEQ ID NO: 276570
acacuuguggaauaaguaa

SEQ ID NO: 276572 - RNA, 19 nt, Artificial Sequence
  Description of Artificial Sequence: Synthetic oligonucleotide
  Sense strand starting at position 2919 of SEQ ID NO: 3552
uccagaaacucagacuuga

SEQ ID NO: 276573 - RNA, 19 nt, Artificial Sequence
  Description of Artificial Sequence: Synthetic oligonucleotide
  Antisense strand to SEQ ID NO: 276572
ucaagucugaguuucugga

SEQ ID NO: 276574 - RNA, 19 nt, Artificial Sequence
  Description of Artificial Sequence: Synthetic oligonucleotide
  Sense strand starting at position 2932 of SEQ ID NO: 3552
acuugauauugccucaagu

SEQ ID NO: 276575 - RNA, 19 nt, Artificial Sequence
  Description of Artificial Sequence: Synthetic oligonucleotide
  Antisense strand to SEQ ID NO: 276574
acuugaggcaauaucaagu

SEQ ID NO: 276576 - RNA, 19 nt, Artificial Sequence
  Description of Artificial Sequence: Synthetic oligonucleotide
  Sense strand starting at position 3100 of SEQ ID NO: 3552
uuaucucuacuuuguagau

SEQ ID NO: 276577 - RNA, 19 nt, Artificial Sequence
  Description of Artificial Sequence: Synthetic oligonucleotide
  Antisense strand to SEQ ID NO: 276576
aucuacaaaguagagauaa

SEQ ID NO: 276578 - RNA, 19 nt, Artificial Sequence
  Description of Artificial Sequence: Synthetic oligonucleotide
  Sense strand starting at position 3106 of SEQ ID NO: 3552
cuacuuuguagaugggauu

SEQ ID NO: 276579 - RNA, 19 nt, Artificial Sequence
  Description of Artificial Sequence: Synthetic oligonucleotide
  Antisense strand to SEQ ID NO: 276578
aaucccaucuacaaaguag

SEQ ID NO: 276580 - RNA, 19 nt, Artificial Sequence
  Description of Artificial Sequence: Synthetic oligonucleotide
  Sense strand starting at position 3231 of SEQ ID NO: 3552
ccgugaaugugggcugaga

SEQ ID NO: 276581 - RNA, 19 nt, Artificial Sequence
  Description of Artificial Sequence: Synthetic oligonucleotide
  Antisense strand to SEQ ID NO: 276580
ucucagcccacauucacgg

SEQ ID NO: 276582 - RNA, 19 nt, Artificial Sequence
  Description of Artificial Sequence: Synthetic oligonucleotide
  Sense strand starting at position 3233 of SEQ ID NO: 3552
gugaaugugggcugagaug

SEQ ID NO: 276583 - RNA, 19 nt, Artificial Sequence
  Description of Artificial Sequence: Synthetic oligonucleotide
  Antisense strand to SEQ ID NO: 276582
caucucagcccacauucac

SEQ ID NO: 276584 - RNA, 19 nt, Artificial Sequence
  Description of Artificial Sequence: Synthetic oligonucleotide
  Sense strand starting at position 3301 of SEQ ID NO: 3552
gcuuucuaauguccagaug

SEQ ID NO: 276585 - RNA, 19 nt, Artificial Sequence
  Description of Artificial Sequence: Synthetic oligonucleotide
  Antisense strand to SEQ ID NO: 276584
caucuggacauuagaaagc

SEQ ID NO: 276586 - RNA, 19 nt, Artificial Sequence
  Description of Artificial Sequence: Synthetic oligonucleotide
  Sense strand starting at position 3302 of SEQ ID NO: 3552
cuuucuaauguccagauga

SEQ ID NO: 276587 - RNA, 19 nt, Artificial Sequence
  Description of Artificial Sequence: Synthetic oligonucleotide
  Antisense strand to SEQ ID NO: 276586
ucaucuggacauuagaaag

SEQ ID NO: 276588 - RNA, 19 nt, Artificial Sequence
  Description of Artificial Sequence: Synthetic oligonucleotide
  Sense strand starting at position 3330 of SEQ ID NO: 3552
aggauuuccuaaugucuuu

SEQ ID NO: 276589 - RNA, 19 nt, Artificial Sequence
  Description of Artificial Sequence: Synthetic oligonucleotide
  Antisense strand to SEQ ID NO: 276588
aaagacauuaggaaauccu

SEQ ID NO: 276590 - RNA, 19 nt, Artificial Sequence
  Description of Artificial Sequence: Synthetic oligonucleotide
  Sense strand starting at position 3373 of SEQ ID NO: 3552
caggguugaguuugugcau

SEQ ID NO: 276591 - RNA, 19 nt, Artificial Sequence
  Description of Artificial Sequence: Synthetic oligonucleotide
  Antisense strand to SEQ ID NO: 276590
augcacaaacucaacccug

SEQ ID NO: 276592 - RNA, 19 nt, Artificial Sequence
  Description of Artificial Sequence: Synthetic oligonucleotide
  Sense strand starting at position 3534 of SEQ ID NO: 3552
gagugaagaccuggcucau

SEQ ID NO: 276593 - RNA, 19 nt, Artificial Sequence
  Description of Artificial Sequence: Synthetic oligonucleotide
  Antisense strand to SEQ ID NO: 276592
augagccaggucuucacuc

SEQ ID NO: 276594 - RNA, 19 nt, Artificial Sequence
  Description of Artificial Sequence: Synthetic oligonucleotide
  Sense strand starting at position 3630 of SEQ ID NO: 3552
aaauguguacaucagggua

SEQ ID NO: 276595 - RNA, 19 nt, Artificial Sequence
  Description of Artificial Sequence: Synthetic oligonucleotide
  Antisense strand to SEQ ID NO: 276594
uacccugauguacacauuu

SEQ ID NO: 276596 - RNA, 19 nt, Artificial Sequence
  Description of Artificial Sequence: Synthetic oligonucleotide
  Sense strand starting at position 3633 of SEQ ID NO: 3552
uguguacaucaggguaaau

SEQ ID NO: 276597 - RNA, 19 nt, Artificial Sequence
  Description of Artificial Sequence: Synthetic oligonucleotide
  Antisense strand to SEQ ID NO: 276596
auuuacccugauguacaca

SEQ ID NO: 276598 - RNA, 19 nt, Artificial Sequence
  Description of Artificial Sequence: Synthetic oligonucleotide
  Sense strand starting at position 3749 of SEQ ID NO: 3552
guccuauugguuugcugga

SEQ ID NO: 276599 - RNA, 19 nt, Artificial Sequence
  Description of Artificial Sequence: Synthetic oligonucleotide
  Antisense strand to SEQ ID NO: 276598
uccagcaaaccaauaggac

SEQ ID NO: 276600 - RNA, 19 nt, Artificial Sequence
  Description of Artificial Sequence: Synthetic oligonucleotide
  Sense strand starting at position 3815 of SEQ ID NO: 3552
aucaguugcaaucggagua

SEQ ID NO: 276601 - RNA, 19 nt, Artificial Sequence
  Description of Artificial Sequence: Synthetic oligonucleotide
  Antisense strand to SEQ ID NO: 276600
uacuccgauugcaacugau

SEQ ID NO: 276602 - RNA, 19 nt, Artificial Sequence
  Description of Artificial Sequence: Synthetic oligonucleotide
  Sense strand starting at position 3908 of SEQ ID NO: 3552
ccaugagccucuuuaagug

SEQ ID NO: 276603 - RNA, 19 nt, Artificial Sequence
  Description of Artificial Sequence: Synthetic oligonucleotide
  Antisense strand to SEQ ID NO: 276602
cacuuaaagaggcucaugg

SEQ ID NO: 276604 - RNA, 19 nt, Artificial Sequence
  Description of Artificial Sequence: Synthetic oligonucleotide
  Sense strand starting at position 9 of SEQ ID NO: 3554
uaauaucagugaguauuag

SEQ ID NO: 276605 - RNA, 19 nt, Artificial Sequence
  Description of Artificial Sequence: Synthetic oligonucleotide
  Antisense strand to SEQ ID NO: 276604
cuaauacucacugauauua

SEQ ID NO: 276606 - RNA, 19 nt, Artificial Sequence
  Description of Artificial Sequence: Synthetic oligonucleotide
  Sense strand starting at position 25 of SEQ ID NO: 3554
uagacacugcuccagguua

SEQ ID NO: 276607 - RNA, 19 nt, Artificial Sequence
  Description of Artificial Sequence: Synthetic oligonucleotide
  Antisense strand to SEQ ID NO: 276606
uaaccuggagcagugucua

SEQ ID NO: 276608 - RNA, 19 nt, Artificial Sequence
  Description of Artificial Sequence: Synthetic oligonucleotide
  Sense strand starting at position 114 of SEQ ID NO: 3554
auggaaggugcucacuaau

SEQ ID NO: 276609 - RNA, 19 nt, Artificial Sequence
  Description of Artificial Sequence: Synthetic oligonucleotide
  Antisense strand to SEQ ID NO: 276608
auuagugagcaccuuccau

SEQ ID NO: 276610 - RNA, 19 nt, Artificial Sequence
  Description of Artificial Sequence: Synthetic oligonucleotide
  Sense strand starting at position 161 of SEQ ID NO: 3554
aauugaacugucugauaga

SEQ ID NO: 276611 - RNA, 19 nt, Artificial Sequence
  Description of Artificial Sequence: Synthetic oligonucleotide
  Antisense strand to SEQ ID NO: 276610
ucuaucagacaguucaauu

SEQ ID NO: 276612 - RNA, 19 nt, Artificial Sequence
  Description of Artificial Sequence: Synthetic oligonucleotide
  Sense strand starting at position 516 of SEQ ID NO: 3554
uuaugagaauaugcaacuu

SEQ ID NO: 276613 - RNA, 19 nt, Artificial Sequence
  Description of Artificial Sequence: Synthetic oligonucleotide
  Antisense strand to SEQ ID NO: 276612
aaguugcauauucucauaa

SEQ ID NO: 276614 - RNA, 19 nt, Artificial Sequence
  Description of Artificial Sequence: Synthetic oligonucleotide
  Sense strand starting at position 566 of SEQ ID NO: 3554
uuaagaguuacaggagcau

SEQ ID NO: 276615 - RNA, 19 nt, Artificial Sequence
  Description of Artificial Sequence: Synthetic oligonucleotide
  Antisense strand to SEQ ID NO: 276614
augcuccuguaacucuuaa

SEQ ID NO: 276616 - RNA, 19 nt, Artificial Sequence
  Description of Artificial Sequence: Synthetic oligonucleotide
  Sense strand starting at position 570 of SEQ ID NO: 3554
gaguuacaggagcauagua

SEQ ID NO: 276617 - RNA, 19 nt, Artificial Sequence
  Description of Artificial Sequence: Synthetic oligonucleotide
  Antisense strand to SEQ ID NO: 276616
uacuaugcuccuguaacuc

SEQ ID NO: 276618 - RNA, 19 nt, Artificial Sequence
  Description of Artificial Sequence: Synthetic oligonucleotide
  Sense strand starting at position 572 of SEQ ID NO: 3554
guuacaggagcauaguauu

SEQ ID NO: 276619 - RNA, 19 nt, Artificial Sequence
  Description of Artificial Sequence: Synthetic oligonucleotide
  Antisense strand to SEQ ID NO: 276618
aauacuaugcuccuguaac

SEQ ID NO: 276620 - RNA, 19 nt, Artificial Sequence
  Description of Artificial Sequence: Synthetic oligonucleotide
  Sense strand starting at position 589 of SEQ ID NO: 3554
uugucagaaucccuugaau

SEQ ID NO: 276621 - RNA, 19 nt, Artificial Sequence
  Description of Artificial Sequence: Synthetic oligonucleotide
  Antisense strand to SEQ ID NO: 276620
auucaagggauucugacaa

SEQ ID NO: 276622 - RNA, 19 nt, Artificial Sequence
  Description of Artificial Sequence: Synthetic oligonucleotide
  Sense strand starting at position 591 of SEQ ID NO: 3554
gucagaaucccuugaauau

SEQ ID NO: 276623 - RNA, 19 nt, Artificial Sequence
  Description of Artificial Sequence: Synthetic oligonucleotide
  Antisense strand to SEQ ID NO: 276622
auauucaagggauucugac

SEQ ID NO: 276624 - RNA, 19 nt, Artificial Sequence
  Description of Artificial Sequence: Synthetic oligonucleotide
  Sense strand starting at position 662 of SEQ ID NO: 3554
gugucaguaggauagauaa

SEQ ID NO: 276625 - RNA, 19 nt, Artificial Sequence
  Description of Artificial Sequence: Synthetic oligonucleotide
  Antisense strand to SEQ ID NO: 276624
uuaucuauccuacugacac

SEQ ID NO: 276626 - RNA, 19 nt, Artificial Sequence
  Description of Artificial Sequence: Synthetic oligonucleotide
  Sense strand starting at position 693 of SEQ ID NO: 3554
augacauccuguccaagau

SEQ ID NO: 276627 - RNA, 19 nt, Artificial Sequence
  Description of Artificial Sequence: Synthetic oligonucleotide
  Antisense strand to SEQ ID NO: 276626
aucuuggacaggaugucau

SEQ ID NO: 276628 - RNA, 19 nt, Artificial Sequence
  Description of Artificial Sequence: Synthetic oligonucleotide
  Sense strand starting at position 759 of SEQ ID NO: 3554
auuuaucuggccugagucu

SEQ ID NO: 276629 - RNA, 19 nt, Artificial Sequence
  Description of Artificial Sequence: Synthetic oligonucleotide
  Antisense strand to SEQ ID NO: 276628
agacucaggccagauaaau

SEQ ID NO: 276630 - RNA, 19 nt, Artificial Sequence
  Description of Artificial Sequence: Synthetic oligonucleotide
  Sense strand starting at position 807 of SEQ ID NO: 3554
ccugaaacacuaugaguca

SEQ ID NO: 276631 - RNA, 19 nt, Artificial Sequence
  Description of Artificial Sequence: Synthetic oligonucleotide
  Antisense strand to SEQ ID NO: 276630
ugacucauaguguuucagg

SEQ ID NO: 276632 - RNA, 19 nt, Artificial Sequence
  Description of Artificial Sequence: Synthetic oligonucleotide
  Sense strand starting at position 914 of SEQ ID NO: 3554
gguugauguccucauaaau

SEQ ID NO: 276633 - RNA, 19 nt, Artificial Sequence
  Description of Artificial Sequence: Synthetic oligonucleotide
  Antisense strand to SEQ ID NO: 276632
auuuaugaggacaucaacc

SEQ ID NO: 276634 - RNA, 19 nt, Artificial Sequence
  Description of Artificial Sequence: Synthetic oligonucleotide
  Sense strand starting at position 972 of SEQ ID NO: 3554
augccauugcaucaagaau

SEQ ID NO: 276635 - RNA, 19 nt, Artificial Sequence
  Description of Artificial Sequence: Synthetic oligonucleotide
  Antisense strand to SEQ ID NO: 276634
auucuugaugcaauggcau

SEQ ID NO: 276636 - RNA, 19 nt, Artificial Sequence
  Description of Artificial Sequence: Synthetic oligonucleotide
  Sense strand starting at position 1012 of SEQ ID NO: 3554
aggugauacagauguaaac

SEQ ID NO: 276637 - RNA, 19 nt, Artificial Sequence
  Description of Artificial Sequence: Synthetic oligonucleotide
  Antisense strand to SEQ ID NO: 276636
guuuacaucuguaucaccu

SEQ ID NO: 276638 - RNA, 19 nt, Artificial Sequence
  Description of Artificial Sequence: Synthetic oligonucleotide
  Sense strand starting at position 2210 of SEQ ID NO: 3554
aggguuuagguauggaauc

SEQ ID NO: 276639 - RNA, 19 nt, Artificial Sequence
  Description of Artificial Sequence: Synthetic oligonucleotide
  Antisense strand to SEQ ID NO: 276638
gauuccauaccuaaacccu

SEQ ID NO: 276640 - RNA, 19 nt, Artificial Sequence
  Description of Artificial Sequence: Synthetic oligonucleotide
  Sense strand starting at position 2212 of SEQ ID NO: 3554
gguuuagguauggaaucau

SEQ ID NO: 276641 - RNA, 19 nt, Artificial Sequence
  Description of Artificial Sequence: Synthetic oligonucleotide
  Antisense strand to SEQ ID NO: 276640
augauuccauaccuaaacc

SEQ ID NO: 276642 - RNA, 19 nt, Artificial Sequence
  Description of Artificial Sequence: Synthetic oligonucleotide
  Sense strand starting at position 2238 of SEQ ID NO: 3554
agcaacuuauaagucagau

SEQ ID NO: 276643 - RNA, 19 nt, Artificial Sequence
  Description of Artificial Sequence: Synthetic oligonucleotide
  Antisense strand to SEQ ID NO: 276642
aucugacuuauaaguugcu

SEQ ID NO: 276644 - RNA, 19 nt, Artificial Sequence
  Description of Artificial Sequence: Synthetic oligonucleotide
  Sense strand starting at position 2333 of SEQ ID NO: 3554
auguuuaugcuauaagauc

SEQ ID NO: 276645 - RNA, 19 nt, Artificial Sequence
  Description of Artificial Sequence: Synthetic oligonucleotide
  Antisense strand to SEQ ID NO: 276644
gaucuuauagcauaaacau

SEQ ID NO: 276646 - RNA, 19 nt, Artificial Sequence
  Description of Artificial Sequence: Synthetic oligonucleotide
  Sense strand starting at position 2344 of SEQ ID NO: 3554
auaagaucugguuaguuua

SEQ ID NO: 276647 - RNA, 19 nt, Artificial Sequence
  Description of Artificial Sequence: Synthetic oligonucleotide
  Antisense strand to SEQ ID NO: 276646
uaaacuaaccagaucuuau

SEQ ID NO: 276648 - RNA, 19 nt, Artificial Sequence
  Description of Artificial Sequence: Synthetic oligonucleotide
  Sense strand starting at position 2346 of SEQ ID NO: 3554
aagaucugguuaguuuaaa

SEQ ID NO: 276649 - RNA, 19 nt, Artificial Sequence
  Description of Artificial Sequence: Synthetic oligonucleotide
  Antisense strand to SEQ ID NO: 276648
uuuaaacuaaccagaucuu

SEQ ID NO: 276650 - RNA, 19 nt, Artificial Sequence
  Description of Artificial Sequence: Synthetic oligonucleotide
  Sense strand starting at position 2347 of SEQ ID NO: 3554
agaucugguuaguuuaaac

SEQ ID NO: 276651 - RNA, 19 nt, Artificial Sequence
  Description of Artificial Sequence: Synthetic oligonucleotide
  Antisense strand to SEQ ID NO: 276650
guuuaaacuaaccagaucu

SEQ ID NO: 276652 - RNA, 19 nt, Artificial Sequence
  Description of Artificial Sequence: Synthetic oligonucleotide
  Sense strand starting at position 2739 of SEQ ID NO: 3554
accuaaugguagucaacau

SEQ ID NO: 276653 - RNA, 19 nt, Artificial Sequence
  Description of Artificial Sequence: Synthetic oligonucleotide
  Antisense strand to SEQ ID NO: 276652
auguugacuaccauuaggu

SEQ ID NO: 276654 - RNA, 19 nt, Artificial Sequence
  Description of Artificial Sequence: Synthetic oligonucleotide
  Sense strand starting at position 2765 of SEQ ID NO: 3554
uguugucaacaguagaaau

SEQ ID NO: 276655 - RNA, 19 nt, Artificial Sequence
  Description of Artificial Sequence: Synthetic oligonucleotide
  Antisense strand to SEQ ID NO: 276654
auuucuacuguugacaaca

SEQ ID NO: 276656 - RNA, 19 nt, Artificial Sequence
  Description of Artificial Sequence: Synthetic oligonucleotide
  Sense strand starting at position 2776 of SEQ ID NO: 3554
guagaaauguauguaaaga

SEQ ID NO: 276657 - RNA, 19 nt, Artificial Sequence
  Description of Artificial Sequence: Synthetic oligonucleotide
  Antisense strand to SEQ ID NO: 276656
ucuuuacauacauuucuac

SEQ ID NO: 276658 - RNA, 19 nt, Artificial Sequence
  Description of Artificial Sequence: Synthetic oligonucleotide
  Sense strand starting at position 2993 of SEQ ID NO: 3554
uuucuugagaggcauuaug

SEQ ID NO: 276659 - RNA, 19 nt, Artificial Sequence
  Description of Artificial Sequence: Synthetic oligonucleotide
  Antisense strand to SEQ ID NO: 276658
cauaaugccucucaagaaa

SEQ ID NO: 276660 - RNA, 19 nt, Artificial Sequence
  Description of Artificial Sequence: Synthetic oligonucleotide
  Sense strand starting at position 3000 of SEQ ID NO: 3554
agaggcauuaugugaugaa

SEQ ID NO: 276661 - RNA, 19 nt, Artificial Sequence
  Description of Artificial Sequence: Synthetic oligonucleotide
  Antisense strand to SEQ ID NO: 276660
uucaucacauaaugccucu

SEQ ID NO: 276662 - RNA, 19 nt, Artificial Sequence
  Description of Artificial Sequence: Synthetic oligonucleotide
  Sense strand starting at position 3004 of SEQ ID NO: 3554
gcauuaugugaugaauacu

SEQ ID NO: 276663 - RNA, 19 nt, Artificial Sequence
  Description of Artificial Sequence: Synthetic oligonucleotide
  Antisense strand to SEQ ID NO: 276662
aguauucaucacauaaugc

SEQ ID NO: 276664 - RNA, 19 nt, Artificial Sequence
  Description of Artificial Sequence: Synthetic oligonucleotide
  Sense strand starting at position 3160 of SEQ ID NO: 3554
cauucuguugaaggaauau

SEQ ID NO: 276665 - RNA, 19 nt, Artificial Sequence
  Description of Artificial Sequence: Synthetic oligonucleotide
  Antisense strand to SEQ ID NO: 276664
auauuccuucaacagaaug

SEQ ID NO: 276666 - RNA, 19 nt, Artificial Sequence
  Description of Artificial Sequence: Synthetic oligonucleotide
  Sense strand starting at position 3185 of SEQ ID NO: 3554
gaauaugcauuauugaagu

SEQ ID NO: 276667 - RNA, 19 nt, Artificial Sequence
  Description of Artificial Sequence: Synthetic oligonucleotide
  Antisense strand to SEQ ID NO: 276666
acuucaauaaugcauauuc

SEQ ID NO: 276668 - RNA, 19 nt, Artificial Sequence
  Description of Artificial Sequence: Synthetic oligonucleotide
  Sense strand starting at position 3272 of SEQ ID NO: 3554
gcugacuagcaagaaaucu

SEQ ID NO: 276669 - RNA, 19 nt, Artificial Sequence
  Description of Artificial Sequence: Synthetic oligonucleotide
  Antisense strand to SEQ ID NO: 276668
agauuucuugcuagucagc

SEQ ID NO: 276670 - RNA, 19 nt, Artificial Sequence
  Description of Artificial Sequence: Synthetic oligonucleotide
  Sense strand starting at position 3285 of SEQ ID NO: 3554
aaaucuugugaugaguuua

SEQ ID NO: 276671 - RNA, 19 nt, Artificial Sequence
  Description of Artificial Sequence: Synthetic oligonucleotide
  Antisense strand to SEQ ID NO: 276670
uaaacucaucacaagauuu

SEQ ID NO: 276672 - RNA, 19 nt, Artificial Sequence
  Description of Artificial Sequence: Synthetic oligonucleotide
  Sense strand starting at position 3297 of SEQ ID NO: 3554
gaguuuauccguguagugu

SEQ ID NO: 276673 - RNA, 19 nt, Artificial Sequence
  Description of Artificial Sequence: Synthetic oligonucleotide
  Antisense strand to SEQ ID NO: 276672
acacuacacggauaaacuc

SEQ ID NO: 276674 - RNA, 19 nt, Artificial Sequence
  Description of Artificial Sequence: Synthetic oligonucleotide
  Sense strand starting at position 3588 of SEQ ID NO: 3554
ucuugugagguuuagauua

SEQ ID NO: 276675 - RNA, 19 nt, Artificial Sequence
  Description of Artificial Sequence: Synthetic oligonucleotide
  Antisense strand to SEQ ID NO: 276674
uaaucuaaaccucacaaga

SEQ ID NO: 276676 - RNA, 19 nt, Artificial Sequence
  Description of Artificial Sequence: Synthetic oligonucleotide
  Sense strand starting at position 3595 of SEQ ID NO: 3554
agguuuagauuacucaauu

SEQ ID NO: 276677 - RNA, 19 nt, Artificial Sequence
  Description of Artificial Sequence: Synthetic oligonucleotide
  Antisense strand to SEQ ID NO: 276676
aauugaguaaucuaaaccu

SEQ ID NO: 276678 - RNA, 19 nt, Artificial Sequence
  Description of Artificial Sequence: Synthetic oligonucleotide
  Sense strand starting at position 3596 of SEQ ID NO: 3554
gguuuagauuacucaauuc

SEQ ID NO: 276679 - RNA, 19 nt, Artificial Sequence
  Description of Artificial Sequence: Synthetic oligonucleotide
  Antisense strand to SEQ ID NO: 276678
gaauugaguaaucuaaacc

SEQ ID NO: 276680 - RNA, 19 nt, Artificial Sequence
  Description of Artificial Sequence: Synthetic oligonucleotide
  Sense strand starting at position 3749 of SEQ ID NO: 3554
uuggaauaauuugauucca

SEQ ID NO: 276681 - RNA, 19 nt, Artificial Sequence
  Description of Artificial Sequence: Synthetic oligonucleotide
  Antisense strand to SEQ ID NO: 276680
uggaaucaaauuauuccaa

SEQ ID NO: 276682 - RNA, 19 nt, Artificial Sequence
  Description of Artificial Sequence: Synthetic oligonucleotide
  Sense strand starting at position 3803 of SEQ ID NO: 3554
auguguuugguauaaauac

SEQ ID NO: 276683 - RNA, 19 nt, Artificial Sequence
  Description of Artificial Sequence: Synthetic oligonucleotide
  Antisense strand to SEQ ID NO: 276682
guauuuauaccaaacacau

SEQ ID NO: 276684 - RNA, 19 nt, Artificial Sequence
  Description of Artificial Sequence: Synthetic oligonucleotide
  Sense strand starting at position 143 of SEQ ID NO: 3555
cuugucguacuauaucaua

SEQ ID NO: 276685 - RNA, 19 nt, Artificial Sequence
  Description of Artificial Sequence: Synthetic oligonucleotide
  Antisense strand to SEQ ID NO: 276684
uaugauauaguacgacaag

SEQ ID NO: 276686 - RNA, 19 nt, Artificial Sequence
  Description of Artificial Sequence: Synthetic oligonucleotide
  Sense strand starting at position 161 of SEQ ID NO: 3555
aacuauguacuacguuaga

SEQ ID NO: 276687 - RNA, 19 nt, Artificial Sequence
  Description of Artificial Sequence: Synthetic oligonucleotide
  Antisense strand to SEQ ID NO: 276686
ucuaacguaguacauaguu

SEQ ID NO: 276688 - RNA, 19 nt, Artificial Sequence
  Description of Artificial Sequence: Synthetic oligonucleotide
  Sense strand starting at position 164 of SEQ ID NO: 3555
uauguacuacguuagaaua

SEQ ID NO: 276689 - RNA, 19 nt, Artificial Sequence
  Description of Artificial Sequence: Synthetic oligonucleotide
  Antisense strand to SEQ ID NO: 276688
uauucuaacguaguacaua

SEQ ID NO: 276690 - RNA, 19 nt, Artificial Sequence
  Description of Artificial Sequence: Synthetic oligonucleotide
  Sense strand starting at position 172 of SEQ ID NO: 3555
acguuagaauauuccauua

SEQ ID NO: 276691 - RNA, 19 nt, Artificial Sequence
  Description of Artificial Sequence: Synthetic oligonucleotide
  Antisense strand to SEQ ID NO: 276690
uaauggaauauucuaacgu

SEQ ID NO: 276692 - RNA, 19 nt, Artificial Sequence
  Description of Artificial Sequence: Synthetic oligonucleotide
  Sense strand starting at position 186 of SEQ ID NO: 3555
cauuaaaggugacuuguua

SEQ ID NO: 276693 - RNA, 19 nt, Artificial Sequence
  Description of Artificial Sequence: Synthetic oligonucleotide
  Antisense strand to SEQ ID NO: 276692
uaacaagucaccuuuaaug

SEQ ID NO: 276694 - RNA, 19 nt, Artificial Sequence
  Description of Artificial Sequence: Synthetic oligonucleotide
  Sense strand starting at position 190 of SEQ ID NO: 3555
aaaggugacuuguuaagcu

SEQ ID NO: 276695 - RNA, 19 nt, Artificial Sequence
  Description of Artificial Sequence: Synthetic oligonucleotide
  Antisense strand to SEQ ID NO: 276694
agcuuaacaagucaccuuu

SEQ ID NO: 276696 - RNA, 19 nt, Artificial Sequence
  Description of Artificial Sequence: Synthetic oligonucleotide
  Sense strand starting at position 306 of SEQ ID NO: 3555
auuacuuugggaggcuaua

SEQ ID NO: 276697 - RNA, 19 nt, Artificial Sequence
  Description of Artificial Sequence: Synthetic oligonucleotide
  Antisense strand to SEQ ID NO: 276696
uauagccucccaaaguaau

SEQ ID NO: 276698 - RNA, 19 nt, Artificial Sequence
  Description of Artificial Sequence: Synthetic oligonucleotide
  Sense strand starting at position 404 of SEQ ID NO: 3555
gcuggcuuucuggagaaga

SEQ ID NO: 276699 - RNA, 19 nt, Artificial Sequence
  Description of Artificial Sequence: Synthetic oligonucleotide
  Antisense strand to SEQ ID NO: 276698
ucuucuccagaaagccagc

SEQ ID NO: 276700 - RNA, 19 nt, Artificial Sequence
  Description of Artificial Sequence: Synthetic oligonucleotide
  Sense strand starting at position 567 of SEQ ID NO: 3555
auggauuuguuccaaacaa

SEQ ID NO: 276701 - RNA, 19 nt, Artificial Sequence
  Description of Artificial Sequence: Synthetic oligonucleotide
  Antisense strand to SEQ ID NO: 276700
uuguuuggaacaaauccau

SEQ ID NO: 276702 - RNA, 19 nt, Artificial Sequence
  Description of Artificial Sequence: Synthetic oligonucleotide
  Sense strand starting at position 678 of SEQ ID NO: 3555
uggaaaugcaacgaaguuu

SEQ ID NO: 276703 - RNA, 19 nt, Artificial Sequence
  Description of Artificial Sequence: Synthetic oligonucleotide
  Antisense strand to SEQ ID NO: 276702
aaacuucguugcauuucca

SEQ ID NO: 276704 - RNA, 19 nt, Artificial Sequence
  Description of Artificial Sequence: Synthetic oligonucleotide
  Sense strand starting at position 741 of SEQ ID NO: 3555
cuccuaugugauggugaag

SEQ ID NO: 276705 - RNA, 19 nt, Artificial Sequence
  Description of Artificial Sequence: Synthetic oligonucleotide
  Antisense strand to SEQ ID NO: 276704
cuucaccaucacauaggag

SEQ ID NO: 276706 - RNA, 19 nt, Artificial Sequence
  Description of Artificial Sequence: Synthetic oligonucleotide
  Sense strand starting at position 1340 of SEQ ID NO: 3555
ucauaucaucccuguggga

SEQ ID NO: 276707 - RNA, 19 nt, Artificial Sequence
  Description of Artificial Sequence: Synthetic oligonucleotide
  Antisense strand to SEQ ID NO: 276706
ucccacagggaugauauga

SEQ ID NO: 276708 - RNA, 19 nt, Artificial Sequence
  Description of Artificial Sequence: Synthetic oligonucleotide
  Sense strand starting at position 1419 of SEQ ID NO: 3555
aggagugguccacaccuuu

SEQ ID NO: 276709 - RNA, 19 nt, Artificial Sequence
  Description of Artificial Sequence: Synthetic oligonucleotide
  Antisense strand to SEQ ID NO: 276708
aaagguguggaccacuccu

SEQ ID NO: 276710 - RNA, 19 nt, Artificial Sequence
  Description of Artificial Sequence: Synthetic oligonucleotide
  Sense strand starting at position 1445 of SEQ ID NO: 3555
cuucucagccagcauuaga

SEQ ID NO: 276711 - RNA, 19 nt, Artificial Sequence
  Description of Artificial Sequence: Synthetic oligonucleotide
  Antisense strand to SEQ ID NO: 276710
ucuaaugcuggcugagaag

SEQ ID NO: 276712 - RNA, 19 nt, Artificial Sequence
  Description of Artificial Sequence: Synthetic oligonucleotide
  Sense strand starting at position 2139 of SEQ ID NO: 3555
cuugacucaugguccaaga

SEQ ID NO: 276713 - RNA, 19 nt, Artificial Sequence
  Description of Artificial Sequence: Synthetic oligonucleotide
  Antisense strand to SEQ ID NO: 276712
ucuuggaccaugagucaag

SEQ ID NO: 276714 - RNA, 19 nt, Artificial Sequence
  Description of Artificial Sequence: Synthetic oligonucleotide
  Sense strand starting at position 2283 of SEQ ID NO: 3555
uucuaagcgcaucaagaau

SEQ ID NO: 276715 - RNA, 19 nt, Artificial Sequence
  Description of Artificial Sequence: Synthetic oligonucleotide
  Antisense strand to SEQ ID NO: 276714
auucuugaugcgcuuagaa

SEQ ID NO: 276716 - RNA, 19 nt, Artificial Sequence
  Description of Artificial Sequence: Synthetic oligonucleotide
  Sense strand starting at position 2295 of SEQ ID NO: 3555
caagaauucuggccgacuc

SEQ ID NO: 276717 - RNA, 19 nt, Artificial Sequence
  Description of Artificial Sequence: Synthetic oligonucleotide
  Antisense strand to SEQ ID NO: 276716
gagucggccagaauucuug

SEQ ID NO: 276718 - RNA, 19 nt, Artificial Sequence
  Description of Artificial Sequence: Synthetic oligonucleotide
  Sense strand starting at position 2369 of SEQ ID NO: 3555
agcacaagcguggaaagau

SEQ ID NO: 276719 - RNA, 19 nt, Artificial Sequence
  Description of Artificial Sequence: Synthetic oligonucleotide
  Antisense strand to SEQ ID NO: 276718
aucuuuccacgcuugugcu

SEQ ID NO: 276720 - RNA, 19 nt, Artificial Sequence
  Description of Artificial Sequence: Synthetic oligonucleotide
  Sense strand starting at position 2377 of SEQ ID NO: 3555
cguggaaagauuuguguau

SEQ ID NO: 276721 - RNA, 19 nt, Artificial Sequence
  Description of Artificial Sequence: Synthetic oligonucleotide
  Antisense strand to SEQ ID NO: 276720
auacacaaaucuuuccacg

SEQ ID NO: 276722 - RNA, 19 nt, Artificial Sequence
  Description of Artificial Sequence: Synthetic oligonucleotide
  Sense strand starting at position 2384 of SEQ ID NO: 3555
agauuuguguauucggcua

SEQ ID NO: 276723 - RNA, 19 nt, Artificial Sequence
  Description of Artificial Sequence: Synthetic oligonucleotide
  Antisense strand to SEQ ID NO: 276722
uagccgaauacacaaaucu

SEQ ID NO: 276724 - RNA, 19 nt, Artificial Sequence
  Description of Artificial Sequence: Synthetic oligonucleotide
  Sense strand starting at position 2405 of SEQ ID NO: 3555
uugucauccgcauaugaua

SEQ ID NO: 276725 - RNA, 19 nt, Artificial Sequence
  Description of Artificial Sequence: Synthetic oligonucleotide
  Antisense strand to SEQ ID NO: 276724
uaucauaugcggaugacaa

SEQ ID NO: 276726 - RNA, 19 nt, Artificial Sequence
  Description of Artificial Sequence: Synthetic oligonucleotide
  Sense strand starting at position 2429 of SEQ ID NO: 3555
ggacaugcucugcacugua

SEQ ID NO: 276727 - RNA, 19 nt, Artificial Sequence
  Description of Artificial Sequence: Synthetic oligonucleotide
  Antisense strand to SEQ ID NO: 276726
uacagugcagagcaugucc

SEQ ID NO: 276728 - RNA, 19 nt, Artificial Sequence
  Description of Artificial Sequence: Synthetic oligonucleotide
  Sense strand starting at position 2641 of SEQ ID NO: 3555
agguaucgauuccuucuau

SEQ ID NO: 276729 - RNA, 19 nt, Artificial Sequence
  Description of Artificial Sequence: Synthetic oligonucleotide
  Antisense strand to SEQ ID NO: 276728
auagaaggaaucgauaccu

SEQ ID NO: 276730 - RNA, 19 nt, Artificial Sequence
  Description of Artificial Sequence: Synthetic oligonucleotide
  Sense strand starting at position 2658 of SEQ ID NO: 3555
augcaugcagaguagauau

SEQ ID NO: 276731 - RNA, 19 nt, Artificial Sequence
  Description of Artificial Sequence: Synthetic oligonucleotide
  Antisense strand to SEQ ID NO: 276730
auaucuacucugcaugcau

SEQ ID NO: 276732 - RNA, 19 nt, Artificial Sequence
  Description of Artificial Sequence: Synthetic oligonucleotide
  Sense strand starting at position 2710 of SEQ ID NO: 3555
cagaaauagucugccugag

SEQ ID NO: 276733 - RNA, 19 nt, Artificial Sequence
  Description of Artificial Sequence: Synthetic oligonucleotide
  Antisense strand to SEQ ID NO: 276732
cucaggcagacuauuucug

SEQ ID NO: 276734 - RNA, 19 nt, Artificial Sequence
  Description of Artificial Sequence: Synthetic oligonucleotide
  Sense strand starting at position 2712 of SEQ ID NO: 3555
gaaauagucugccugagag

SEQ ID NO: 276735 - RNA, 19 nt, Artificial Sequence
  Description of Artificial Sequence: Synthetic oligonucleotide
  Antisense strand to SEQ ID NO: 276734
cucucaggcagacuauuuc

SEQ ID NO: 276736 - RNA, 19 nt, Artificial Sequence
  Description of Artificial Sequence: Synthetic oligonucleotide
  Sense strand starting at position 2714 of SEQ ID NO: 3555
aauagucugccugagagau

SEQ ID NO: 276737 - RNA, 19 nt, Artificial Sequence
  Description of Artificial Sequence: Synthetic oligonucleotide
  Antisense strand to SEQ ID NO: 276736
aucucucaggcagacuauu

SEQ ID NO: 276738 - RNA, 19 nt, Artificial Sequence
  Description of Artificial Sequence: Synthetic oligonucleotide
  Sense strand starting at position 2737 of SEQ ID NO: 3555
uguggauacugcuugaauu

SEQ ID NO: 276739 - RNA, 19 nt, Artificial Sequence
  Description of Artificial Sequence: Synthetic oligonucleotide
  Antisense strand to SEQ ID NO: 276738
aauucaagcaguauccaca

SEQ ID NO: 276740 - RNA, 19 nt, Artificial Sequence
  Description of Artificial Sequence: Synthetic oligonucleotide
  Sense strand starting at position 2738 of SEQ ID NO: 3555
guggauacugcuugaauua

SEQ ID NO: 276741 - RNA, 19 nt, Artificial Sequence
  Description of Artificial Sequence: Synthetic oligonucleotide
  Antisense strand to SEQ ID NO: 276740
uaauucaagcaguauccac

SEQ ID NO: 276742 - RNA, 19 nt, Artificial Sequence
  Description of Artificial Sequence: Synthetic oligonucleotide
  Sense strand starting at position 2789 of SEQ ID NO: 3555
gauauucuucuagguauug

SEQ ID NO: 276743 - RNA, 19 nt, Artificial Sequence
  Description of Artificial Sequence: Synthetic oligonucleotide
  Antisense strand to SEQ ID NO: 276742
caauaccuagaagaauauc

SEQ ID NO: 276744 - RNA, 19 nt, Artificial Sequence
  Description of Artificial Sequence: Synthetic oligonucleotide
  Sense strand starting at position 2790 of SEQ ID NO: 3555
auauucuucuagguauugu

SEQ ID NO: 276745 - RNA, 19 nt, Artificial Sequence
  Description of Artificial Sequence: Synthetic oligonucleotide
  Antisense strand to SEQ ID NO: 276744
acaauaccuagaagaauau

SEQ ID NO: 276746 - RNA, 19 nt, Artificial Sequence
  Description of Artificial Sequence: Synthetic oligonucleotide
  Sense strand starting at position 2958 of SEQ ID NO: 3555
agcaaauugcaguaugcua

SEQ ID NO: 276747 - RNA, 19 nt, Artificial Sequence
  Description of Artificial Sequence: Synthetic oligonucleotide
  Antisense strand to SEQ ID NO: 276746
uagcauacugcaauuugcu

SEQ ID NO: 276748 - RNA, 19 nt, Artificial Sequence
  Description of Artificial Sequence: Synthetic oligonucleotide
  Sense strand starting at position 3076 of SEQ ID NO: 3555
ucaaauucuggauaguagu

SEQ ID NO: 276749 - RNA, 19 nt, Artificial Sequence
  Description of Artificial Sequence: Synthetic oligonucleotide
  Antisense strand to SEQ ID NO: 276748
acuacuauccagaauuuga

SEQ ID NO: 276750 - RNA, 19 nt, Artificial Sequence
  Description of Artificial Sequence: Synthetic oligonucleotide
  Sense strand starting at position 3217 of SEQ ID NO: 3555
uagguacaggaauguuaua

SEQ ID NO: 276751 - RNA, 19 nt, Artificial Sequence
  Description of Artificial Sequence: Synthetic oligonucleotide
  Antisense strand to SEQ ID NO: 276750
uauaacauuccuguaccua

SEQ ID NO: 276752 - RNA, 19 nt, Artificial Sequence
  Description of Artificial Sequence: Synthetic oligonucleotide
  Sense strand starting at position 3241 of SEQ ID NO: 3555
acuuuagaaugcuugcaaa

SEQ ID NO: 276753 - RNA, 19 nt, Artificial Sequence
  Description of Artificial Sequence: Synthetic oligonucleotide
  Antisense strand to SEQ ID NO: 276752
uuugcaagcauucuaaagu

SEQ ID NO: 276754 - RNA, 19 nt, Artificial Sequence
  Description of Artificial Sequence: Synthetic oligonucleotide
  Sense strand starting at position 3295 of SEQ ID NO: 3555
uuugacuauuagccaggaa

SEQ ID NO: 276755 - RNA, 19 nt, Artificial Sequence
  Description of Artificial Sequence: Synthetic oligonucleotide
  Antisense strand to SEQ ID NO: 276754
uuccuggcuaauagucaaa

SEQ ID NO: 276756 - RNA, 19 nt, Artificial Sequence
  Description of Artificial Sequence: Synthetic oligonucleotide
  Sense strand starting at position 3319 of SEQ ID NO: 3555
uagugaagggcugagucua

SEQ ID NO: 276757 - RNA, 19 nt, Artificial Sequence
  Description of Artificial Sequence: Synthetic oligonucleotide
  Antisense strand to SEQ ID NO: 276756
uagacucagcccuucacua

SEQ ID NO: 276758 - RNA, 19 nt, Artificial Sequence
  Description of Artificial Sequence: Synthetic oligonucleotide
  Sense strand starting at position 3352 of SEQ ID NO: 3555
cacuguaguguguaagaga

SEQ ID NO: 276759 - RNA, 19 nt, Artificial Sequence
  Description of Artificial Sequence: Synthetic oligonucleotide
  Antisense strand to SEQ ID NO: 276758
ucucuuacacacuacagug

SEQ ID NO: 276760 - RNA, 19 nt, Artificial Sequence
  Description of Artificial Sequence: Synthetic oligonucleotide
  Sense strand starting at position 3507 of SEQ ID NO: 3555
uuguaaguguaucucaaug

SEQ ID NO: 276761 - RNA, 19 nt, Artificial Sequence
  Description of Artificial Sequence: Synthetic oligonucleotide
  Antisense strand to SEQ ID NO: 276760
cauugagauacacuuacaa

SEQ ID NO: 276762 - RNA, 19 nt, Artificial Sequence
  Description of Artificial Sequence: Synthetic oligonucleotide
  Sense strand starting at position 3908 of SEQ ID NO: 3555
ugcaguguuagccagagag

SEQ ID NO: 276763 - RNA, 19 nt, Artificial Sequence
  Description of Artificial Sequence: Synthetic oligonucleotide
  Antisense strand to SEQ ID NO: 276762
cucucuggcuaacacugca

SEQ ID NO: 276764 - RNA, 19 nt, Artificial Sequence
  Description of Artificial Sequence: Synthetic oligonucleotide
  Sense strand starting at position 39 of SEQ ID NO: 3557
cuccgucuugagugauucu

SEQ ID NO: 276765 - RNA, 19 nt, Artificial Sequence
  Description of Artificial Sequence: Synthetic oligonucleotide
  Antisense strand to SEQ ID NO: 276764
agaaucacucaagacggag

SEQ ID NO: 276766 - RNA, 19 nt, Artificial Sequence
  Description of Artificial Sequence: Synthetic oligonucleotide
  Sense strand starting at position 40 of SEQ ID NO: 3557
uccgucuugagugauucuu

SEQ ID NO: 276767 - RNA, 19 nt, Artificial Sequence
  Description of Artificial Sequence: Synthetic oligonucleotide
  Antisense strand to SEQ ID NO: 276766
aagaaucacucaagacgga

SEQ ID NO: 276768 - RNA, 19 nt, Artificial Sequence
  Description of Artificial Sequence: Synthetic oligonucleotide
  Sense strand starting at position 89 of SEQ ID NO: 3557
guugccuucgaguuauucu

SEQ ID NO: 276769 - RNA, 19 nt, Artificial Sequence
  Description of Artificial Sequence: Synthetic oligonucleotide
  Antisense strand to SEQ ID NO: 276768
agaauaacucgaaggcaac

SEQ ID NO: 276770 - RNA, 19 nt, Artificial Sequence
  Description of Artificial Sequence: Synthetic oligonucleotide
  Sense strand starting at position 238 of SEQ ID NO: 3557
agugacugcucuucuggga

SEQ ID NO: 276771 - RNA, 19 nt, Artificial Sequence
  Description of Artificial Sequence: Synthetic oligonucleotide
  Antisense strand to SEQ ID NO: 276770
ucccagaagagcagucacu

SEQ ID NO: 276772 - RNA, 19 nt, Artificial Sequence
  Description of Artificial Sequence: Synthetic oligonucleotide
  Sense strand starting at position 291 of SEQ ID NO: 3557
aguacuuaagcugaugaca

SEQ ID NO: 276773 - RNA, 19 nt, Artificial Sequence
  Description of Artificial Sequence: Synthetic oligonucleotide
  Antisense strand to SEQ ID NO: 276772
ugucaucagcuuaaguacu

SEQ ID NO: 276774 - RNA, 19 nt, Artificial Sequence
  Description of Artificial Sequence: Synthetic oligonucleotide
  Sense strand starting at position 377 of SEQ ID NO: 3557
auaugacuguaccuacaga

SEQ ID NO: 276775 - RNA, 19 nt, Artificial Sequence
  Description of Artificial Sequence: Synthetic oligonucleotide
  Antisense strand to SEQ ID NO: 276774
ucuguagguacagucauau

SEQ ID NO: 276776 - RNA, 19 nt, Artificial Sequence
  Description of Artificial Sequence: Synthetic oligonucleotide
  Sense strand starting at position 412 of SEQ ID NO: 3557
aacacauguguacguauaa

SEQ ID NO: 276777 - RNA, 19 nt, Artificial Sequence
  Description of Artificial Sequence: Synthetic oligonucleotide
  Antisense strand to SEQ ID NO: 276776
uuauacguacacauguguu

SEQ ID NO: 276778 - RNA, 19 nt, Artificial Sequence
  Description of Artificial Sequence: Synthetic oligonucleotide
  Sense strand starting at position 435 of SEQ ID NO: 3557
uacauauaugcaugugguu

SEQ ID NO: 276779 - RNA, 19 nt, Artificial Sequence
  Description of Artificial Sequence: Synthetic oligonucleotide
  Antisense strand to SEQ ID NO: 276778
aaccacaugcauauaugua

SEQ ID NO: 276780 - RNA, 19 nt, Artificial Sequence
  Description of Artificial Sequence: Synthetic oligonucleotide
  Sense strand starting at position 528 of SEQ ID NO: 3557
cagguaucaccuuguguaa

SEQ ID NO: 276781 - RNA, 19 nt, Artificial Sequence
  Description of Artificial Sequence: Synthetic oligonucleotide
  Antisense strand to SEQ ID NO: 276780
uuacacaaggugauaccug

SEQ ID NO: 276782 - RNA, 19 nt, Artificial Sequence
  Description of Artificial Sequence: Synthetic oligonucleotide
  Sense strand starting at position 2064 of SEQ ID NO: 3557
gugcuagucgcugugcgau

SEQ ID NO: 276783 - RNA, 19 nt, Artificial Sequence
  Description of Artificial Sequence: Synthetic oligonucleotide
  Antisense strand to SEQ ID NO: 276782
aucgcacagcgacuagcac

SEQ ID NO: 276784 - RNA, 19 nt, Artificial Sequence
  Description of Artificial Sequence: Synthetic oligonucleotide
  Sense strand starting at position 2079 of SEQ ID NO: 3557
cgauuggucggugggauaa

SEQ ID NO: 276785 - RNA, 19 nt, Artificial Sequence
  Description of Artificial Sequence: Synthetic oligonucleotide
  Antisense strand to SEQ ID NO: 276784
uuaucccaccgaccaaucg

SEQ ID NO: 276786 - RNA, 19 nt, Artificial Sequence
  Description of Artificial Sequence: Synthetic oligonucleotide
  Sense strand starting at position 2148 of SEQ ID NO: 3557
ucgccugauccaggugaga

SEQ ID NO: 276787 - RNA, 19 nt, Artificial Sequence
  Description of Artificial Sequence: Synthetic oligonucleotide
  Antisense strand to SEQ ID NO: 276786
ucucaccuggaucaggcga

SEQ ID NO: 276788 - RNA, 19 nt, Artificial Sequence
  Description of Artificial Sequence: Synthetic oligonucleotide
  Sense strand starting at position 2150 of SEQ ID NO: 3557
gccugauccaggugagaua

SEQ ID NO: 276789 - RNA, 19 nt, Artificial Sequence
  Description of Artificial Sequence: Synthetic oligonucleotide
  Antisense strand to SEQ ID NO: 276788
uaucucaccuggaucaggc

SEQ ID NO: 276790 - RNA, 19 nt, Artificial Sequence
  Description of Artificial Sequence: Synthetic oligonucleotide
  Sense strand starting at position 2731 of SEQ ID NO: 3557
uccgcaucucaguaccauu

SEQ ID NO: 276791 - RNA, 19 nt, Artificial Sequence
  Description of Artificial Sequence: Synthetic oligonucleotide
  Antisense strand to SEQ ID NO: 276790
aaugguacugagaugcgga

SEQ ID NO: 276792 - RNA, 19 nt, Artificial Sequence
  Description of Artificial Sequence: Synthetic oligonucleotide
  Sense strand starting at position 2741 of SEQ ID NO: 3557
aguaccauucgauguccau

SEQ ID NO: 276793 - RNA, 19 nt, Artificial Sequence
  Description of Artificial Sequence: Synthetic oligonucleotide
  Antisense strand to SEQ ID NO: 276792
auggacaucgaaugguacu

SEQ ID NO: 276794 - RNA, 19 nt, Artificial Sequence
  Description of Artificial Sequence: Synthetic oligonucleotide
  Sense strand starting at position 2870 of SEQ ID NO: 3557
ccgacauggucccuggagu

SEQ ID NO: 276795 - RNA, 19 nt, Artificial Sequence
  Description of Artificial Sequence: Synthetic oligonucleotide
  Antisense strand to SEQ ID NO: 276794
acuccagggaccaugucgg

SEQ ID NO: 276796 - RNA, 19 nt, Artificial Sequence
  Description of Artificial Sequence: Synthetic oligonucleotide
  Sense strand starting at position 2871 of SEQ ID NO: 3557
cgacauggucccuggagua

SEQ ID NO: 276797 - RNA, 19 nt, Artificial Sequence
  Description of Artificial Sequence: Synthetic oligonucleotide
  Antisense strand to SEQ ID NO: 276796
uacuccagggaccaugucg

SEQ ID NO: 276798 - RNA, 19 nt, Artificial Sequence
  Description of Artificial Sequence: Synthetic oligonucleotide
  Sense strand starting at position 2901 of SEQ ID NO: 3557
augcauaucuggccauguu

SEQ ID NO: 276799 - RNA, 19 nt, Artificial Sequence
  Description of Artificial Sequence: Synthetic oligonucleotide
  Antisense strand to SEQ ID NO: 276798
aacauggccagauaugcau

SEQ ID NO: 276800 - RNA, 19 nt, Artificial Sequence
  Description of Artificial Sequence: Synthetic oligonucleotide
  Sense strand starting at position 2902 of SEQ ID NO: 3557
ugcauaucuggccauguua

SEQ ID NO: 276801 - RNA, 19 nt, Artificial Sequence
  Description of Artificial Sequence: Synthetic oligonucleotide
  Antisense strand to SEQ ID NO: 276800
uaacauggccagauaugca

SEQ ID NO: 276802 - RNA, 19 nt, Artificial Sequence
  Description of Artificial Sequence: Synthetic oligonucleotide
  Sense strand starting at position 2916 of SEQ ID NO: 3557
uguuacuccuaagcauuga

SEQ ID NO: 276803 - RNA, 19 nt, Artificial Sequence
  Description of Artificial Sequence: Synthetic oligonucleotide
  Antisense strand to SEQ ID NO: 276802
ucaaugcuuaggaguaaca

SEQ ID NO: 276804 - RNA, 19 nt, Artificial Sequence
  Description of Artificial Sequence: Synthetic oligonucleotide
  Sense strand starting at position 3029 of SEQ ID NO: 3557
cuacucuucuggguacuga

SEQ ID NO: 276805 - RNA, 19 nt, Artificial Sequence
  Description of Artificial Sequence: Synthetic oligonucleotide
  Antisense strand to SEQ ID NO: 276804
ucaguacccagaagaguag

SEQ ID NO: 276806 - RNA, 19 nt, Artificial Sequence
  Description of Artificial Sequence: Synthetic oligonucleotide
  Sense strand starting at position 3030 of SEQ ID NO: 3557
uacucuucuggguacugaa

SEQ ID NO: 276807 - RNA, 19 nt, Artificial Sequence
  Description of Artificial Sequence: Synthetic oligonucleotide
  Antisense strand to SEQ ID NO: 276806
uucaguacccagaagagua

SEQ ID NO: 276808 - RNA, 19 nt, Artificial Sequence
  Description of Artificial Sequence: Synthetic oligonucleotide
  Sense strand starting at position 3061 of SEQ ID NO: 3557
aggcuuugccucugaaaga

SEQ ID NO: 276809 - RNA, 19 nt, Artificial Sequence
  Description of Artificial Sequence: Synthetic oligonucleotide
  Antisense strand to SEQ ID NO: 276808
ucuuucagaggcaaagccu

SEQ ID NO: 276810 - RNA, 19 nt, Artificial Sequence
  Description of Artificial Sequence: Synthetic oligonucleotide
  Sense strand starting at position 3227 of SEQ ID NO: 3557
gggagcuguuugcuucuua

SEQ ID NO: 276811 - RNA, 19 nt, Artificial Sequence
  Description of Artificial Sequence: Synthetic oligonucleotide
  Antisense strand to SEQ ID NO: 276810
uaagaagcaaacagcuccc

SEQ ID NO: 276812 - RNA, 19 nt, Artificial Sequence
  Description of Artificial Sequence: Synthetic oligonucleotide
  Sense strand starting at position 3278 of SEQ ID NO: 3557
ucuagaaguucgccgagau

SEQ ID NO: 276813 - RNA, 19 nt, Artificial Sequence
  Description of Artificial Sequence: Synthetic oligonucleotide
  Antisense strand to SEQ ID NO: 276812
aucucggcgaacuucuaga

SEQ ID NO: 276814 - RNA, 19 nt, Artificial Sequence
  Description of Artificial Sequence: Synthetic oligonucleotide
  Sense strand starting at position 3279 of SEQ ID NO: 3557
cuagaaguucgccgagaug

SEQ ID NO: 276815 - RNA, 19 nt, Artificial Sequence
  Description of Artificial Sequence: Synthetic oligonucleotide
  Antisense strand to SEQ ID NO: 276814
caucucggcgaacuucuag

SEQ ID NO: 276816 - RNA, 19 nt, Artificial Sequence
  Description of Artificial Sequence: Synthetic oligonucleotide
  Sense strand starting at position 3281 of SEQ ID NO: 3557
agaaguucgccgagaugcu

SEQ ID NO: 276817 - RNA, 19 nt, Artificial Sequence
  Description of Artificial Sequence: Synthetic oligonucleotide
  Antisense strand to SEQ ID NO: 276816
agcaucucggcgaacuucu

SEQ ID NO: 276818 - RNA, 19 nt, Artificial Sequence
  Description of Artificial Sequence: Synthetic oligonucleotide
  Sense strand starting at position 3290 of SEQ ID NO: 3557
ccgagaugcucccugcaaa

SEQ ID NO: 276819 - RNA, 19 nt, Artificial Sequence
  Description of Artificial Sequence: Synthetic oligonucleotide
  Antisense strand to SEQ ID NO: 276818
uuugcagggagcaucucgg

SEQ ID NO: 276820 - RNA, 19 nt, Artificial Sequence
  Description of Artificial Sequence: Synthetic oligonucleotide
  Sense strand starting at position 3291 of SEQ ID NO: 3557
cgagaugcucccugcaaag

SEQ ID NO: 276821 - RNA, 19 nt, Artificial Sequence
  Description of Artificial Sequence: Synthetic oligonucleotide
  Antisense strand to SEQ ID NO: 276820
cuuugcagggagcaucucg

SEQ ID NO: 276822 - RNA, 19 nt, Artificial Sequence
  Description of Artificial Sequence: Synthetic oligonucleotide
  Sense strand starting at position 3293 of SEQ ID NO: 3557
agaugcucccugcaaaguu

SEQ ID NO: 276823 - RNA, 19 nt, Artificial Sequence
  Description of Artificial Sequence: Synthetic oligonucleotide
  Antisense strand to SEQ ID NO: 276822
aacuuugcagggagcaucu

SEQ ID NO: 276824 - RNA, 19 nt, Artificial Sequence
  Description of Artificial Sequence: Synthetic oligonucleotide
  Sense strand starting at position 3303 of SEQ ID NO: 3557
ugcaaaguuguccuugcuu

SEQ ID NO: 276825 - RNA, 19 nt, Artificial Sequence
  Description of Artificial Sequence: Synthetic oligonucleotide
  Antisense strand to SEQ ID NO: 276824
aagcaaggacaacuuugca

SEQ ID NO: 276826 - RNA, 19 nt, Artificial Sequence
  Description of Artificial Sequence: Synthetic oligonucleotide
  Sense strand starting at position 3342 of SEQ ID NO: 3557
ucacuugugucuucuggaa

SEQ ID NO: 276827 - RNA, 19 nt, Artificial Sequence
  Description of Artificial Sequence: Synthetic oligonucleotide
  Antisense strand to SEQ ID NO: 276826
uuccagaagacacaaguga

SEQ ID NO: 276828 - RNA, 19 nt, Artificial Sequence
  Description of Artificial Sequence: Synthetic oligonucleotide
  Sense strand starting at position 3346 of SEQ ID NO: 3557
uugugucuucuggaaucaa

SEQ ID NO: 276829 - RNA, 19 nt, Artificial Sequence
  Description of Artificial Sequence: Synthetic oligonucleotide
  Antisense strand to SEQ ID NO: 276828
uugauuccagaagacacaa

SEQ ID NO: 276830 - RNA, 19 nt, Artificial Sequence
  Description of Artificial Sequence: Synthetic oligonucleotide
  Sense strand starting at position 3490 of SEQ ID NO: 3557
agguauuucugguuaacgu

SEQ ID NO: 276831 - RNA, 19 nt, Artificial Sequence
  Description of Artificial Sequence: Synthetic oligonucleotide
  Antisense strand to SEQ ID NO: 276830
acguuaaccagaaauaccu

SEQ ID NO: 276832 - RNA, 19 nt, Artificial Sequence
  Description of Artificial Sequence: Synthetic oligonucleotide
  Sense strand starting at position 3491 of SEQ ID NO: 3557
gguauuucugguuaacguc

SEQ ID NO: 276833 - RNA, 19 nt, Artificial Sequence
  Description of Artificial Sequence: Synthetic oligonucleotide
  Antisense strand to SEQ ID NO: 276832
gacguuaaccagaaauacc

SEQ ID NO: 276834 - RNA, 19 nt, Artificial Sequence
  Description of Artificial Sequence: Synthetic oligonucleotide
  Sense strand starting at position 3498 of SEQ ID NO: 3557
cugguuaacgucugaguca

SEQ ID NO: 276835 - RNA, 19 nt, Artificial Sequence
  Description of Artificial Sequence: Synthetic oligonucleotide
  Antisense strand to SEQ ID NO: 276834
ugacucagacguuaaccag

SEQ ID NO: 276836 - RNA, 19 nt, Artificial Sequence
  Description of Artificial Sequence: Synthetic oligonucleotide
  Sense strand starting at position 3524 of SEQ ID NO: 3557
gugaucuaaggucauguga

SEQ ID NO: 276837 - RNA, 19 nt, Artificial Sequence
  Description of Artificial Sequence: Synthetic oligonucleotide
  Antisense strand to SEQ ID NO: 276836
ucacaugaccuuagaucac

SEQ ID NO: 276838 - RNA, 19 nt, Artificial Sequence
  Description of Artificial Sequence: Synthetic oligonucleotide
  Sense strand starting at position 3731 of SEQ ID NO: 3557
ccuggauaggcuuguaacu

SEQ ID NO: 276839 - RNA, 19 nt, Artificial Sequence
  Description of Artificial Sequence: Synthetic oligonucleotide
  Antisense strand to SEQ ID NO: 276838
aguuacaagccuauccagg

SEQ ID NO: 276840 - RNA, 19 nt, Artificial Sequence
  Description of Artificial Sequence: Synthetic oligonucleotide
  Sense strand starting at position 3743 of SEQ ID NO: 3557
uguaacucucaguaaccua

SEQ ID NO: 276841 - RNA, 19 nt, Artificial Sequence
  Description of Artificial Sequence: Synthetic oligonucleotide
  Antisense strand to SEQ ID NO: 276840
uagguuacugagaguuaca

SEQ ID NO: 276842 - RNA, 19 nt, Artificial Sequence
  Description of Artificial Sequence: Synthetic oligonucleotide
  Sense strand starting at position 3771 of SEQ ID NO: 3557
ccacaacuuuaguugguau

SEQ ID NO: 276843 - RNA, 19 nt, Artificial Sequence
  Description of Artificial Sequence: Synthetic oligonucleotide
  Antisense strand to SEQ ID NO: 276842
auaccaacuaaaguugugg

SEQ ID NO: 276844 - RNA, 19 nt, Artificial Sequence
  Description of Artificial Sequence: Synthetic oligonucleotide
  Sense strand starting at position 75 of SEQ ID NO: 3556
cacauacgauuuggucaaa

SEQ ID NO: 276845 - RNA, 19 nt, Artificial Sequence
  Description of Artificial Sequence: Synthetic oligonucleotide
  Antisense strand to SEQ ID NO: 276844
uuugaccaaaucguaugug

SEQ ID NO: 276846 - RNA, 19 nt, Artificial Sequence
  Description of Artificial Sequence: Synthetic oligonucleotide
  Sense strand starting at position 125 of SEQ ID NO: 3556
uccgucuugagugauucuu

SEQ ID NO: 276847 - RNA, 19 nt, Artificial Sequence
  Description of Artificial Sequence: Synthetic oligonucleotide
  Antisense strand to SEQ ID NO: 276846
aagaaucacucaagacgga

SEQ ID NO: 276848 - RNA, 19 nt, Artificial Sequence
  Description of Artificial Sequence: Synthetic oligonucleotide
  Sense strand starting at position 174 of SEQ ID NO: 3556
guugccuucgaguuauucu

SEQ ID NO: 276849 - RNA, 19 nt, Artificial Sequence
  Description of Artificial Sequence: Synthetic oligonucleotide
  Antisense strand to SEQ ID NO: 276848
agaauaacucgaaggcaac

SEQ ID NO: 276850 - RNA, 19 nt, Artificial Sequence
  Description of Artificial Sequence: Synthetic oligonucleotide
  Sense strand starting at position 323 of SEQ ID NO: 3556
agugacugcucuucuggga

SEQ ID NO: 276851 - RNA, 19 nt, Artificial Sequence
  Description of Artificial Sequence: Synthetic oligonucleotide
  Antisense strand to SEQ ID NO: 276850
ucccagaagagcagucacu

SEQ ID NO: 276852 - RNA, 19 nt, Artificial Sequence
  Description of Artificial Sequence: Synthetic oligonucleotide
  Sense strand starting at position 376 of SEQ ID NO: 3556
aguacuuaagcugaugaca

SEQ ID NO: 276853 - RNA, 19 nt, Artificial Sequence
  Description of Artificial Sequence: Synthetic oligonucleotide
  Antisense strand to SEQ ID NO: 276852
ugucaucagcuuaaguacu

SEQ ID NO: 276854 - RNA, 19 nt, Artificial Sequence
  Description of Artificial Sequence: Synthetic oligonucleotide
  Sense strand starting at position 462 of SEQ ID NO: 3556
auaugacuguaccuacaga

SEQ ID NO: 276855 - RNA, 19 nt, Artificial Sequence
  Description of Artificial Sequence: Synthetic oligonucleotide
  Antisense strand to SEQ ID NO: 276854
ucuguagguacagucauau

SEQ ID NO: 276856 - RNA, 19 nt, Artificial Sequence
  Description of Artificial Sequence: Synthetic oligonucleotide
  Sense strand starting at position 497 of SEQ ID NO: 3556
aacacauguguacguauaa

SEQ ID NO: 276857 - RNA, 19 nt, Artificial Sequence
  Description of Artificial Sequence: Synthetic oligonucleotide
  Antisense strand to SEQ ID NO: 276856
uuauacguacacauguguu

SEQ ID NO: 276858 - RNA, 19 nt, Artificial Sequence
  Description of Artificial Sequence: Synthetic oligonucleotide
  Sense strand starting at position 520 of SEQ ID NO: 3556
uacauauaugcaugugguu

SEQ ID NO: 276859 - RNA, 19 nt, Artificial Sequence
  Description of Artificial Sequence: Synthetic oligonucleotide
  Antisense strand to SEQ ID NO: 276858
aaccacaugcauauaugua

SEQ ID NO: 276860 - RNA, 19 nt, Artificial Sequence
  Description of Artificial Sequence: Synthetic oligonucleotide
  Sense strand starting at position 613 of SEQ ID NO: 3556
cagguaucaccuuguguaa

SEQ ID NO: 276861 - RNA, 19 nt, Artificial Sequence
  Description of Artificial Sequence: Synthetic oligonucleotide
  Antisense strand to SEQ ID NO: 276860
uuacacaaggugauaccug

SEQ ID NO: 276862 - RNA, 19 nt, Artificial Sequence
  Description of Artificial Sequence: Synthetic oligonucleotide
  Sense strand starting at position 2149 of SEQ ID NO: 3556
gugcuagucgcugugcgau

SEQ ID NO: 276863 - RNA, 19 nt, Artificial Sequence
  Description of Artificial Sequence: Synthetic oligonucleotide
  Antisense strand to SEQ ID NO: 276862
aucgcacagcgacuagcac

SEQ ID NO: 276864 - RNA, 19 nt, Artificial Sequence
  Description of Artificial Sequence: Synthetic oligonucleotide
  Sense strand starting at position 2164 of SEQ ID NO: 3556
cgauuggucggugggauaa

SEQ ID NO: 276865 - RNA, 19 nt, Artificial Sequence
  Description of Artificial Sequence: Synthetic oligonucleotide
  Antisense strand to SEQ ID NO: 276864
uuaucccaccgaccaaucg

SEQ ID NO: 276866 - RNA, 19 nt, Artificial Sequence
  Description of Artificial Sequence: Synthetic oligonucleotide
  Sense strand starting at position 2233 of SEQ ID NO: 3556
ucgccugauccaggugaga

SEQ ID NO: 276867 - RNA, 19 nt, Artificial Sequence
  Description of Artificial Sequence: Synthetic oligonucleotide
  Antisense strand to SEQ ID NO: 276866
ucucaccuggaucaggcga

SEQ ID NO: 276868 - RNA, 19 nt, Artificial Sequence
  Description of Artificial Sequence: Synthetic oligonucleotide
  Sense strand starting at position 2235 of SEQ ID NO: 3556
gccugauccaggugagaua

SEQ ID NO: 276869 - RNA, 19 nt, Artificial Sequence
  Description of Artificial Sequence: Synthetic oligonucleotide
  Antisense strand to SEQ ID NO: 276868
uaucucaccuggaucaggc

SEQ ID NO: 276870 - RNA, 19 nt, Artificial Sequence
  Description of Artificial Sequence: Synthetic oligonucleotide
  Sense strand starting at position 2816 of SEQ ID NO: 3556
uccgcaucucaguaccauu

SEQ ID NO: 276871 - RNA, 19 nt, Artificial Sequence
  Description of Artificial Sequence: Synthetic oligonucleotide
  Antisense strand to SEQ ID NO: 276870
aaugguacugagaugcgga

SEQ ID NO: 276872 - RNA, 19 nt, Artificial Sequence
  Description of Artificial Sequence: Synthetic oligonucleotide
  Sense strand starting at position 2826 of SEQ ID NO: 3556
aguaccauucgauguccau

SEQ ID NO: 276873 - RNA, 19 nt, Artificial Sequence
  Description of Artificial Sequence: Synthetic oligonucleotide
  Antisense strand to SEQ ID NO: 276872
auggacaucgaaugguacu

SEQ ID NO: 276874 - RNA, 19 nt, Artificial Sequence
  Description of Artificial Sequence: Synthetic oligonucleotide
  Sense strand starting at position 2955 of SEQ ID NO: 3556
ccgacauggucccuggagu

SEQ ID NO: 276875 - RNA, 19 nt, Artificial Sequence
  Description of Artificial Sequence: Synthetic oligonucleotide
  Antisense strand to SEQ ID NO: 276874
acuccagggaccaugucgg

SEQ ID NO: 276876 - RNA, 19 nt, Artificial Sequence
  Description of Artificial Sequence: Synthetic oligonucleotide
  Sense strand starting at position 2956 of SEQ ID NO: 3556
cgacauggucccuggagua

SEQ ID NO: 276877 - RNA, 19 nt, Artificial Sequence
  Description of Artificial Sequence: Synthetic oligonucleotide
  Antisense strand to SEQ ID NO: 276876
uacuccagggaccaugucg

SEQ ID NO: 276878 - RNA, 19 nt, Artificial Sequence
  Description of Artificial Sequence: Synthetic oligonucleotide
  Sense strand starting at position 2986 of SEQ ID NO: 3556
augcauaucuggccauguu

SEQ ID NO: 276879 - RNA, 19 nt, Artificial Sequence
  Description of Artificial Sequence: Synthetic oligonucleotide
  Antisense strand to SEQ ID NO: 276878
aacauggccagauaugcau

SEQ ID NO: 276880 - RNA, 19 nt, Artificial Sequence
  Description of Artificial Sequence: Synthetic oligonucleotide
  Sense strand starting at position 2987 of SEQ ID NO: 3556
ugcauaucuggccauguua

SEQ ID NO: 276881 - RNA, 19 nt, Artificial Sequence
  Description of Artificial Sequence: Synthetic oligonucleotide
  Antisense strand to SEQ ID NO: 276880
uaacauggccagauaugca

SEQ ID NO: 276882 - RNA, 19 nt, Artificial Sequence
  Description of Artificial Sequence: Synthetic oligonucleotide
  Sense strand starting at position 3001 of SEQ ID NO: 3556
uguuacuccuaagcauuga

SEQ ID NO: 276883 - RNA, 19 nt, Artificial Sequence
  Description of Artificial Sequence: Synthetic oligonucleotide
  Antisense strand to SEQ ID NO: 276882
ucaaugcuuaggaguaaca

SEQ ID NO: 276884 - RNA, 19 nt, Artificial Sequence
  Description of Artificial Sequence: Synthetic oligonucleotide
  Sense strand starting at position 3114 of SEQ ID NO: 3556
cuacucuucuggguacuga

SEQ ID NO: 276885 - RNA, 19 nt, Artificial Sequence
  Description of Artificial Sequence: Synthetic oligonucleotide
  Antisense strand to SEQ ID NO: 276884
ucaguacccagaagaguag

SEQ ID NO: 276886 - RNA, 19 nt, Artificial Sequence
  Description of Artificial Sequence: Synthetic oligonucleotide
  Sense strand starting at position 3115 of SEQ ID NO: 3556
uacucuucuggguacugaa

SEQ ID NO: 276887 - RNA, 19 nt, Artificial Sequence
  Description of Artificial Sequence: Synthetic oligonucleotide
  Antisense strand to SEQ ID NO: 276886
uucaguacccagaagagua

SEQ ID NO: 276888 - RNA, 19 nt, Artificial Sequence
  Description of Artificial Sequence: Synthetic oligonucleotide
  Sense strand starting at position 3146 of SEQ ID NO: 3556
aggcuuugccucugaaaga

SEQ ID NO: 276889 - RNA, 19 nt, Artificial Sequence
  Description of Artificial Sequence: Synthetic oligonucleotide
  Antisense strand to SEQ ID NO: 276888
ucuuucagaggcaaagccu

SEQ ID NO: 276890 - RNA, 19 nt, Artificial Sequence
  Description of Artificial Sequence: Synthetic oligonucleotide
  Sense strand starting at position 3312 of SEQ ID NO: 3556
gggagcuguuugcuucuua

SEQ ID NO: 276891 - RNA, 19 nt, Artificial Sequence
  Description of Artificial Sequence: Synthetic oligonucleotide
  Antisense strand to SEQ ID NO: 276890
uaagaagcaaacagcuccc

SEQ ID NO: 276892 - RNA, 19 nt, Artificial Sequence
  Description of Artificial Sequence: Synthetic oligonucleotide
  Sense strand starting at position 3363 of SEQ ID NO: 3556
ucuagaaguucgccgagau

SEQ ID NO: 276893 - RNA, 19 nt, Artificial Sequence
  Description of Artificial Sequence: Synthetic oligonucleotide
  Antisense strand to SEQ ID NO: 276892
aucucggcgaacuucuaga

SEQ ID NO: 276894 - RNA, 19 nt, Artificial Sequence
  Description of Artificial Sequence: Synthetic oligonucleotide
  Sense strand starting at position 3364 of SEQ ID NO: 3556
cuagaaguucgccgagaug

SEQ ID NO: 276895 - RNA, 19 nt, Artificial Sequence
  Description of Artificial Sequence: Synthetic oligonucleotide
  Antisense strand to SEQ ID NO: 276894
caucucggcgaacuucuag

SEQ ID NO: 276896 - RNA, 19 nt, Artificial Sequence
  Description of Artificial Sequence: Synthetic oligonucleotide
  Sense strand starting at position 3366 of SEQ ID NO: 3556
agaaguucgccgagaugcu

SEQ ID NO: 276897 - RNA, 19 nt, Artificial Sequence
  Description of Artificial Sequence: Synthetic oligonucleotide
  Antisense strand to SEQ ID NO: 276896
agcaucucggcgaacuucu

SEQ ID NO: 276898 - RNA, 19 nt, Artificial Sequence
  Description of Artificial Sequence: Synthetic oligonucleotide
  Sense strand starting at position 3375 of SEQ ID NO: 3556
ccgagaugcucccugcaaa

SEQ ID NO: 276899 - RNA, 19 nt, Artificial Sequence
  Description of Artificial Sequence: Synthetic oligonucleotide
  Antisense strand to SEQ ID NO: 276898
uuugcagggagcaucucgg

SEQ ID NO: 276900 - RNA, 19 nt, Artificial Sequence
  Description of Artificial Sequence: Synthetic oligonucleotide
  Sense strand starting at position 3376 of SEQ ID NO: 3556
cgagaugcucccugcaaag

SEQ ID NO: 276901 - RNA, 19 nt, Artificial Sequence
  Description of Artificial Sequence: Synthetic oligonucleotide
  Antisense strand to SEQ ID NO: 276900
cuuugcagggagcaucucg

SEQ ID NO: 276902 - RNA, 19 nt, Artificial Sequence
  Description of Artificial Sequence: Synthetic oligonucleotide
  Sense strand starting at position 3378 of SEQ ID NO: 3556
agaugcucccugcaaaguu

SEQ ID NO: 276903 - RNA, 19 nt, Artificial Sequence
  Description of Artificial Sequence: Synthetic oligonucleotide
  Antisense strand to SEQ ID NO: 276902
aacuuugcagggagcaucu

SEQ ID NO: 276904 - RNA, 19 nt, Artificial Sequence
  Description of Artificial Sequence: Synthetic oligonucleotide
  Sense strand starting at position 3388 of SEQ ID NO: 3556
ugcaaaguuguccuugcuu

SEQ ID NO: 276905 - RNA, 19 nt, Artificial Sequence
  Description of Artificial Sequence: Synthetic oligonucleotide
  Antisense strand to SEQ ID NO: 276904
aagcaaggacaacuuugca

SEQ ID NO: 276906 - RNA, 19 nt, Artificial Sequence
  Description of Artificial Sequence: Synthetic oligonucleotide
  Sense strand starting at position 3427 of SEQ ID NO: 3556
ucacuugugucuucuggaa

SEQ ID NO: 276907 - RNA, 19 nt, Artificial Sequence
  Description of Artificial Sequence: Synthetic oligonucleotide
  Antisense strand to SEQ ID NO: 276906
uuccagaagacacaaguga

SEQ ID NO: 276908 - RNA, 19 nt, Artificial Sequence
  Description of Artificial Sequence: Synthetic oligonucleotide
  Sense strand starting at position 3431 of SEQ ID NO: 3556
uugugucuucuggaaucaa

SEQ ID NO: 276909 - RNA, 19 nt, Artificial Sequence
  Description of Artificial Sequence: Synthetic oligonucleotide
  Antisense strand to SEQ ID NO: 276908
uugauuccagaagacacaa

SEQ ID NO: 276910 - RNA, 19 nt, Artificial Sequence
  Description of Artificial Sequence: Synthetic oligonucleotide
  Sense strand starting at position 3575 of SEQ ID NO: 3556
agguauuucugguuaacgu

SEQ ID NO: 276911 - RNA, 19 nt, Artificial Sequence
  Description of Artificial Sequence: Synthetic oligonucleotide
  Antisense strand to SEQ ID NO: 276910
acguuaaccagaaauaccu

SEQ ID NO: 276912 - RNA, 19 nt, Artificial Sequence
  Description of Artificial Sequence: Synthetic oligonucleotide
  Sense strand starting at position 3576 of SEQ ID NO: 3556
gguauuucugguuaacguc

SEQ ID NO: 276913 - RNA, 19 nt, Artificial Sequence
  Description of Artificial Sequence: Synthetic oligonucleotide
  Antisense strand to SEQ ID NO: 276912
gacguuaaccagaaauacc

SEQ ID NO: 276914 - RNA, 19 nt, Artificial Sequence
  Description of Artificial Sequence: Synthetic oligonucleotide
  Sense strand starting at position 3583 of SEQ ID NO: 3556
cugguuaacgucugaguca

SEQ ID NO: 276915 - RNA, 19 nt, Artificial Sequence
  Description of Artificial Sequence: Synthetic oligonucleotide
  Antisense strand to SEQ ID NO: 276914
ugacucagacguuaaccag

SEQ ID NO: 276916 - RNA, 19 nt, Artificial Sequence
  Description of Artificial Sequence: Synthetic oligonucleotide
  Sense strand starting at position 3609 of SEQ ID NO: 3556
gugaucuaaggucauguga

SEQ ID NO: 276917 - RNA, 19 nt, Artificial Sequence
  Description of Artificial Sequence: Synthetic oligonucleotide
  Antisense strand to SEQ ID NO: 276916
ucacaugaccuuagaucac

SEQ ID NO: 276918 - RNA, 19 nt, Artificial Sequence
  Description of Artificial Sequence: Synthetic oligonucleotide
  Sense strand starting at position 3816 of SEQ ID NO: 3556
ccuggauaggcuuguaacu

SEQ ID NO: 276919 - RNA, 19 nt, Artificial Sequence
  Description of Artificial Sequence: Synthetic oligonucleotide
  Antisense strand to SEQ ID NO: 276918
aguuacaagccuauccagg

SEQ ID NO: 276920 - RNA, 19 nt, Artificial Sequence
  Description of Artificial Sequence: Synthetic oligonucleotide
  Sense strand starting at position 3828 of SEQ ID NO: 3556
uguaacucucaguaaccua

SEQ ID NO: 276921 - RNA, 19 nt, Artificial Sequence
  Description of Artificial Sequence: Synthetic oligonucleotide
  Antisense strand to SEQ ID NO: 276920
uagguuacugagaguuaca

SEQ ID NO: 276922 - RNA, 19 nt, Artificial Sequence
  Description of Artificial Sequence: Synthetic oligonucleotide
  Sense strand starting at position 3856 of SEQ ID NO: 3556
ccacaacuuuaguugguau

SEQ ID NO: 276923 - RNA, 19 nt, Artificial Sequence
  Description of Artificial Sequence: Synthetic oligonucleotide
  Antisense strand to SEQ ID NO: 276922
auaccaacuaaaguugugg

SEQ ID NO: 276924 - RNA, 19 nt, Artificial Sequence
  Description of Artificial Sequence: Synthetic oligonucleotide
  Sense strand starting at position 11 of SEQ ID NO: 3558
aaagcaugugcauaaggaa

SEQ ID NO: 276925 - RNA, 19 nt, Artificial Sequence
  Description of Artificial Sequence: Synthetic oligonucleotide
  Antisense strand to SEQ ID NO: 276924
uuccuuaugcacaugcuuu

SEQ ID NO: 276926 - RNA, 19 nt, Artificial Sequence
  Description of Artificial Sequence: Synthetic oligonucleotide
  Sense strand starting at position 33 of SEQ ID NO: 3558
cuauuaaagcacugaaaug

SEQ ID NO: 276927 - RNA, 19 nt, Artificial Sequence
  Description of Artificial Sequence: Synthetic oligonucleotide
  Antisense strand to SEQ ID NO: 276926
cauuucagugcuuuaauag

SEQ ID NO: 276928 - RNA, 19 nt, Artificial Sequence
  Description of Artificial Sequence: Synthetic oligonucleotide
  Sense strand starting at position 89 of SEQ ID NO: 3558
uuauaugaugaauggcuau

SEQ ID NO: 276929 - RNA, 19 nt, Artificial Sequence
  Description of Artificial Sequence: Synthetic oligonucleotide
  Antisense strand to SEQ ID NO: 276928
auagccauucaucauauaa

SEQ ID NO: 276930 - RNA, 19 nt, Artificial Sequence
  Description of Artificial Sequence: Synthetic oligonucleotide
  Sense strand starting at position 92 of SEQ ID NO: 3558
uaugaugaauggcuaugau

SEQ ID NO: 276931 - RNA, 19 nt, Artificial Sequence
  Description of Artificial Sequence: Synthetic oligonucleotide
  Antisense strand to SEQ ID NO: 276930
aucauagccauucaucaua

SEQ ID NO: 276932 - RNA, 19 nt, Artificial Sequence
  Description of Artificial Sequence: Synthetic oligonucleotide
  Sense strand starting at position 95 of SEQ ID NO: 3558
gaugaauggcuaugaucuu

SEQ ID NO: 276933 - RNA, 19 nt, Artificial Sequence
  Description of Artificial Sequence: Synthetic oligonucleotide
  Antisense strand to SEQ ID NO: 276932
aagaucauagccauucauc

SEQ ID NO: 276934 - RNA, 19 nt, Artificial Sequence
  Description of Artificial Sequence: Synthetic oligonucleotide
  Sense strand starting at position 290 of SEQ ID NO: 3558
gcugacuuaccugaauauu

SEQ ID NO: 276935 - RNA, 19 nt, Artificial Sequence
  Description of Artificial Sequence: Synthetic oligonucleotide
  Antisense strand to SEQ ID NO: 276934
aauauucagguaagucagc

SEQ ID NO: 276936 - RNA, 19 nt, Artificial Sequence
  Description of Artificial Sequence: Synthetic oligonucleotide
  Sense strand starting at position 529 of SEQ ID NO: 3558
aacugaaucgcaugaugga

SEQ ID NO: 276937 - RNA, 19 nt, Artificial Sequence
  Description of Artificial Sequence: Synthetic oligonucleotide
  Antisense strand to SEQ ID NO: 276936
uccaucaugcgauucaguu

SEQ ID NO: 276938 - RNA, 19 nt, Artificial Sequence
  Description of Artificial Sequence: Synthetic oligonucleotide
  Sense strand starting at position 550 of SEQ ID NO: 3558
aucugauauacgcggaaua

SEQ ID NO: 276939 - RNA, 19 nt, Artificial Sequence
  Description of Artificial Sequence: Synthetic oligonucleotide
  Antisense strand to SEQ ID NO: 276938
uauuccgcguauaucagau

SEQ ID NO: 276940 - RNA, 19 nt, Artificial Sequence
  Description of Artificial Sequence: Synthetic oligonucleotide
  Sense strand starting at position 563 of SEQ ID NO: 3558
ggaauagcacucugaacuu

SEQ ID NO: 276941 - RNA, 19 nt, Artificial Sequence
  Description of Artificial Sequence: Synthetic oligonucleotide
  Antisense strand to SEQ ID NO: 276940
aaguucagagugcuauucc

SEQ ID NO: 276942 - RNA, 19 nt, Artificial Sequence
  Description of Artificial Sequence: Synthetic oligonucleotide
  Sense strand starting at position 581 of SEQ ID NO: 3558
uucucuacuguguauacaa

SEQ ID NO: 276943 - RNA, 19 nt, Artificial Sequence
  Description of Artificial Sequence: Synthetic oligonucleotide
  Antisense strand to SEQ ID NO: 276942
uuguauacacaguagagaa

SEQ ID NO: 276944 - RNA, 19 nt, Artificial Sequence
  Description of Artificial Sequence: Synthetic oligonucleotide
  Sense strand starting at position 680 of SEQ ID NO: 3558
cguugauuucuuggcugca

SEQ ID NO: 276945 - RNA, 19 nt, Artificial Sequence
  Description of Artificial Sequence: Synthetic oligonucleotide
  Antisense strand to SEQ ID NO: 276944
ugcagccaagaaaucaacg

SEQ ID NO: 276946 - RNA, 19 nt, Artificial Sequence
  Description of Artificial Sequence: Synthetic oligonucleotide
  Sense strand starting at position 749 of SEQ ID NO: 3558
agcgaauucuaccuaggga

SEQ ID NO: 276947 - RNA, 19 nt, Artificial Sequence
  Description of Artificial Sequence: Synthetic oligonucleotide
  Antisense strand to SEQ ID NO: 276946
ucccuagguagaauucgcu

SEQ ID NO: 276948 - RNA, 19 nt, Artificial Sequence
  Description of Artificial Sequence: Synthetic oligonucleotide
  Sense strand starting at position 750 of SEQ ID NO: 3558
gcgaauucuaccuagggau

SEQ ID NO: 276949 - RNA, 19 nt, Artificial Sequence
  Description of Artificial Sequence: Synthetic oligonucleotide
  Antisense strand to SEQ ID NO: 276948
aucccuagguagaauucgc

SEQ ID NO: 276950 - RNA, 19 nt, Artificial Sequence
  Description of Artificial Sequence: Synthetic oligonucleotide
  Sense strand starting at position 762 of SEQ ID NO: 3558
uagggauuaaugugagggu

SEQ ID NO: 276951 - RNA, 19 nt, Artificial Sequence
  Description of Artificial Sequence: Synthetic oligonucleotide
  Antisense strand to SEQ ID NO: 276950
acccucacauuaaucccua

SEQ ID NO: 276952 - RNA, 19 nt, Artificial Sequence
  Description of Artificial Sequence: Synthetic oligonucleotide
  Sense strand starting at position 917 of SEQ ID NO: 3558
aaccaaguucgcguauguu

SEQ ID NO: 276953 - RNA, 19 nt, Artificial Sequence
  Description of Artificial Sequence: Synthetic oligonucleotide
  Antisense strand to SEQ ID NO: 276952
aacauacgcgaacuugguu

SEQ ID NO: 276954 - RNA, 19 nt, Artificial Sequence
  Description of Artificial Sequence: Synthetic oligonucleotide
  Sense strand starting at position 1079 of SEQ ID NO: 3558
gacucacugcugggaaaca

SEQ ID NO: 276955 - RNA, 19 nt, Artificial Sequence
  Description of Artificial Sequence: Synthetic oligonucleotide
  Antisense strand to SEQ ID NO: 276954
uguuucccagcagugaguc

SEQ ID NO: 276956 - RNA, 19 nt, Artificial Sequence
  Description of Artificial Sequence: Synthetic oligonucleotide
  Sense strand starting at position 1115 of SEQ ID NO: 3558
gcagcagcucuggagagua

SEQ ID NO: 276957 - RNA, 19 nt, Artificial Sequence
  Description of Artificial Sequence: Synthetic oligonucleotide
  Antisense strand to SEQ ID NO: 276956
uacucuccagagcugcugc

SEQ ID NO: 276958 - RNA, 19 nt, Artificial Sequence
  Description of Artificial Sequence: Synthetic oligonucleotide
  Sense strand starting at position 1127 of SEQ ID NO: 3558
gagaguaagugggucuuau

SEQ ID NO: 276959 - RNA, 19 nt, Artificial Sequence
  Description of Artificial Sequence: Synthetic oligonucleotide
  Antisense strand to SEQ ID NO: 276958
auaagacccacuuacucuc

SEQ ID NO: 276960 - RNA, 19 nt, Artificial Sequence
  Description of Artificial Sequence: Synthetic oligonucleotide
  Sense strand starting at position 1135 of SEQ ID NO: 3558
gugggucuuauguaaagug

SEQ ID NO: 276961 - RNA, 19 nt, Artificial Sequence
  Description of Artificial Sequence: Synthetic oligonucleotide
  Antisense strand to SEQ ID NO: 276960
cacuuuacauaagacccac

SEQ ID NO: 276962 - RNA, 19 nt, Artificial Sequence
  Description of Artificial Sequence: Synthetic oligonucleotide
  Sense strand starting at position 1647 of SEQ ID NO: 3558
cggagaaguguugcgcuca

SEQ ID NO: 276963 - RNA, 19 nt, Artificial Sequence
  Description of Artificial Sequence: Synthetic oligonucleotide
  Antisense strand to SEQ ID NO: 276962
ugagcgcaacacuucuccg

SEQ ID NO: 276964 - RNA, 19 nt, Artificial Sequence
  Description of Artificial Sequence: Synthetic oligonucleotide
  Sense strand starting at position 1818 of SEQ ID NO: 3558
auaaauuaaggucgagauu

SEQ ID NO: 276965 - RNA, 19 nt, Artificial Sequence
  Description of Artificial Sequence: Synthetic oligonucleotide
  Antisense strand to SEQ ID NO: 276964
aaucucgaccuuaauuuau

SEQ ID NO: 276966 - RNA, 19 nt, Artificial Sequence
  Description of Artificial Sequence: Synthetic oligonucleotide
  Sense strand starting at position 2525 of SEQ ID NO: 3558
guaucugugcauccgugua

SEQ ID NO: 276967 - RNA, 19 nt, Artificial Sequence
  Description of Artificial Sequence: Synthetic oligonucleotide
  Antisense strand to SEQ ID NO: 276966
uacacggaugcacagauac

SEQ ID NO: 276968 - RNA, 19 nt, Artificial Sequence
  Description of Artificial Sequence: Synthetic oligonucleotide
  Sense strand starting at position 2620 of SEQ ID NO: 3558
uguaauaugaauuggcaga

SEQ ID NO: 276969 - RNA, 19 nt, Artificial Sequence
  Description of Artificial Sequence: Synthetic oligonucleotide
  Antisense strand to SEQ ID NO: 276968
ucugccaauucauauuaca

SEQ ID NO: 276970 - RNA, 19 nt, Artificial Sequence
  Description of Artificial Sequence: Synthetic oligonucleotide
  Sense strand starting at position 2622 of SEQ ID NO: 3558
uaauaugaauuggcagagu

SEQ ID NO: 276971 - RNA, 19 nt, Artificial Sequence
  Description of Artificial Sequence: Synthetic oligonucleotide
  Antisense strand to SEQ ID NO: 276970
acucugccaauucauauua

SEQ ID NO: 276972 - RNA, 19 nt, Artificial Sequence
  Description of Artificial Sequence: Synthetic oligonucleotide
  Sense strand starting at position 2843 of SEQ ID NO: 3558
uguagauugcccgcuuauc

SEQ ID NO: 276973 - RNA, 19 nt, Artificial Sequence
  Description of Artificial Sequence: Synthetic oligonucleotide
  Antisense strand to SEQ ID NO: 276972
gauaagcgggcaaucuaca

SEQ ID NO: 276974 - RNA, 19 nt, Artificial Sequence
  Description of Artificial Sequence: Synthetic oligonucleotide
  Sense strand starting at position 2889 of SEQ ID NO: 3558
uggcaauuaucuucccaga

SEQ ID NO: 276975 - RNA, 19 nt, Artificial Sequence
  Description of Artificial Sequence: Synthetic oligonucleotide
  Antisense strand to SEQ ID NO: 276974
ucugggaagauaauugcca

SEQ ID NO: 276976 - RNA, 19 nt, Artificial Sequence
  Description of Artificial Sequence: Synthetic oligonucleotide
  Sense strand starting at position 2955 of SEQ ID NO: 3558
aaauuuauguucgagagaa

SEQ ID NO: 276977 - RNA, 19 nt, Artificial Sequence
  Description of Artificial Sequence: Synthetic oligonucleotide
  Antisense strand to SEQ ID NO: 276976
uucucucgaacauaaauuu

SEQ ID NO: 276978 - RNA, 19 nt, Artificial Sequence
  Description of Artificial Sequence: Synthetic oligonucleotide
  Sense strand starting at position 3139 of SEQ ID NO: 3558
uucugagugaucggaaacu

SEQ ID NO: 276979 - RNA, 19 nt, Artificial Sequence
  Description of Artificial Sequence: Synthetic oligonucleotide
  Antisense strand to SEQ ID NO: 276978
aguuuccgaucacucagaa

SEQ ID NO: 276980 - RNA, 19 nt, Artificial Sequence
  Description of Artificial Sequence: Synthetic oligonucleotide
  Sense strand starting at position 3148 of SEQ ID NO: 3558
aucggaaacuccuuauuga

SEQ ID NO: 276981 - RNA, 19 nt, Artificial Sequence
  Description of Artificial Sequence: Synthetic oligonucleotide
  Antisense strand to SEQ ID NO: 276980
ucaauaaggaguuuccgau

SEQ ID NO: 276982 - RNA, 19 nt, Artificial Sequence
  Description of Artificial Sequence: Synthetic oligonucleotide
  Sense strand starting at position 3149 of SEQ ID NO: 3558
ucggaaacuccuuauugau

SEQ ID NO: 276983 - RNA, 19 nt, Artificial Sequence
  Description of Artificial Sequence: Synthetic oligonucleotide
  Antisense strand to SEQ ID NO: 276982
aucaauaaggaguuuccga

SEQ ID NO: 276984 - RNA, 19 nt, Artificial Sequence
  Description of Artificial Sequence: Synthetic oligonucleotide
  Sense strand starting at position 3164 of SEQ ID NO: 3558
ugauaaagccuuugaguca

SEQ ID NO: 276985 - RNA, 19 nt, Artificial Sequence
  Description of Artificial Sequence: Synthetic oligonucleotide
  Antisense strand to SEQ ID NO: 276984
ugacucaaaggcuuuauca

SEQ ID NO: 276986 - RNA, 19 nt, Artificial Sequence
  Description of Artificial Sequence: Synthetic oligonucleotide
  Sense strand starting at position 3275 of SEQ ID NO: 3558
ccauaugaugagcaugcau

SEQ ID NO: 276987 - RNA, 19 nt, Artificial Sequence
  Description of Artificial Sequence: Synthetic oligonucleotide
  Antisense strand to SEQ ID NO: 276986
augcaugcucaucauaugg

SEQ ID NO: 276988 - RNA, 19 nt, Artificial Sequence
  Description of Artificial Sequence: Synthetic oligonucleotide
  Sense strand starting at position 3300 of SEQ ID NO: 3558
cuaauaaacgcucagcgau

SEQ ID NO: 276989 - RNA, 19 nt, Artificial Sequence
  Description of Artificial Sequence: Synthetic oligonucleotide
  Antisense strand to SEQ ID NO: 276988
aucgcugagcguuuauuag

SEQ ID NO: 276990 - RNA, 19 nt, Artificial Sequence
  Description of Artificial Sequence: Synthetic oligonucleotide
  Sense strand starting at position 3302 of SEQ ID NO: 3558
aauaaacgcucagcgauuu

SEQ ID NO: 276991 - RNA, 19 nt, Artificial Sequence
  Description of Artificial Sequence: Synthetic oligonucleotide
  Antisense strand to SEQ ID NO: 276990
aaaucgcugagcguuuauu

SEQ ID NO: 276992 - RNA, 19 nt, Artificial Sequence
  Description of Artificial Sequence: Synthetic oligonucleotide
  Sense strand starting at position 3475 of SEQ ID NO: 3558
agcugugucacacagugaa

SEQ ID NO: 276993 - RNA, 19 nt, Artificial Sequence
  Description of Artificial Sequence: Synthetic oligonucleotide
  Antisense strand to SEQ ID NO: 276992
uucacugugugacacagcu

SEQ ID NO: 276994 - RNA, 19 nt, Artificial Sequence
  Description of Artificial Sequence: Synthetic oligonucleotide
  Sense strand starting at position 3479 of SEQ ID NO: 3558
gugucacacagugaaugua

SEQ ID NO: 276995 - RNA, 19 nt, Artificial Sequence
  Description of Artificial Sequence: Synthetic oligonucleotide
  Antisense strand to SEQ ID NO: 276994
uacauucacugugugacac

SEQ ID NO: 276996 - RNA, 19 nt, Artificial Sequence
  Description of Artificial Sequence: Synthetic oligonucleotide
  Sense strand starting at position 3516 of SEQ ID NO: 3558
gggacacuuucuuccacaa

SEQ ID NO: 276997 - RNA, 19 nt, Artificial Sequence
  Description of Artificial Sequence: Synthetic oligonucleotide
  Antisense strand to SEQ ID NO: 276996
uuguggaagaaaguguccc

SEQ ID NO: 276998 - RNA, 19 nt, Artificial Sequence
  Description of Artificial Sequence: Synthetic oligonucleotide
  Sense strand starting at position 3863 of SEQ ID NO: 3558
ggaggcaauuuauacuagu

SEQ ID NO: 276999 - RNA, 19 nt, Artificial Sequence
  Description of Artificial Sequence: Synthetic oligonucleotide
  Antisense strand to SEQ ID NO: 276998
acuaguauaaauugccucc

SEQ ID NO: 277000 - RNA, 19 nt, Artificial Sequence
  Description of Artificial Sequence: Synthetic oligonucleotide
  Sense strand starting at position 3888 of SEQ ID NO: 3558
ucaguaagauaaguaaauc

SEQ ID NO: 277001 - RNA, 19 nt, Artificial Sequence
  Description of Artificial Sequence: Synthetic oligonucleotide
  Antisense strand to SEQ ID NO: 277000
gauuuacuuaucuuacuga

SEQ ID NO: 277002 - RNA, 19 nt, Artificial Sequence
  Description of Artificial Sequence: Synthetic oligonucleotide
  Sense strand starting at position 3951 of SEQ ID NO: 3558
aaaguaugguaaguaguca

SEQ ID NO: 277003 - RNA, 19 nt, Artificial Sequence
  Description of Artificial Sequence: Synthetic oligonucleotide
  Antisense strand to SEQ ID NO: 277002
ugacuacuuaccauacuuu

SEQ ID NO: 277004 - RNA, 19 nt, Artificial Sequence
  Description of Artificial Sequence: Synthetic oligonucleotide
  Sense strand starting at position 112 of SEQ ID NO: 3559
cucccaugcccaggaagau

SEQ ID NO: 277005 - RNA, 19 nt, Artificial Sequence
  Description of Artificial Sequence: Synthetic oligonucleotide
  Antisense strand to SEQ ID NO: 277004
aucuuccugggcaugggag

SEQ ID NO: 277006 - RNA, 19 nt, Artificial Sequence
  Description of Artificial Sequence: Synthetic oligonucleotide
  Sense strand starting at position 121 of SEQ ID NO: 3559
ccaggaagauccuuccacu

SEQ ID NO: 277007 - RNA, 19 nt, Artificial Sequence
  Description of Artificial Sequence: Synthetic oligonucleotide
  Antisense strand to SEQ ID NO: 277006
aguggaaggaucuuccugg

SEQ ID NO: 277008 - RNA, 19 nt, Artificial Sequence
  Description of Artificial Sequence: Synthetic oligonucleotide
  Sense strand starting at position 127 of SEQ ID NO: 3559
agauccuuccacugccaga

SEQ ID NO: 277009 - RNA, 19 nt, Artificial Sequence
  Description of Artificial Sequence: Synthetic oligonucleotide
  Antisense strand to SEQ ID NO: 277008
ucuggcaguggaaggaucu

SEQ ID NO: 277010 - RNA, 19 nt, Artificial Sequence
  Description of Artificial Sequence: Synthetic oligonucleotide
  Sense strand starting at position 211 of SEQ ID NO: 3559
cugcguaucucugaggguu

SEQ ID NO: 277011 - RNA, 19 nt, Artificial Sequence
  Description of Artificial Sequence: Synthetic oligonucleotide
  Antisense strand to SEQ ID NO: 277010
aacccucagagauacgcag

SEQ ID NO: 277012 - RNA, 19 nt, Artificial Sequence
  Description of Artificial Sequence: Synthetic oligonucleotide
  Sense strand starting at position 456 of SEQ ID NO: 3559
gccuguguccuuugccaca

SEQ ID NO: 277013 - RNA, 19 nt, Artificial Sequence
  Description of Artificial Sequence: Synthetic oligonucleotide
  Antisense strand to SEQ ID NO: 277012
uguggcaaaggacacaggc

SEQ ID NO: 277014 - RNA, 19 nt, Artificial Sequence
  Description of Artificial Sequence: Synthetic oligonucleotide
  Sense strand starting at position 603 of SEQ ID NO: 3559
aggguagagucacucacaa

SEQ ID NO: 277015 - RNA, 19 nt, Artificial Sequence
  Description of Artificial Sequence: Synthetic oligonucleotide
  Antisense strand to SEQ ID NO: 277014
uugugagugacucuacccu

SEQ ID NO: 277016 - RNA, 19 nt, Artificial Sequence
  Description of Artificial Sequence: Synthetic oligonucleotide
  Sense strand starting at position 947 of SEQ ID NO: 3559
uagguugagguauguguuu

SEQ ID NO: 277017 - RNA, 19 nt, Artificial Sequence
  Description of Artificial Sequence: Synthetic oligonucleotide
  Antisense strand to SEQ ID NO: 277016
aaacacauaccucaaccua

SEQ ID NO: 277018 - RNA, 19 nt, Artificial Sequence
  Description of Artificial Sequence: Synthetic oligonucleotide
  Sense strand starting at position 1005 of SEQ ID NO: 3559
ggcgcucuggcaugaugaa

SEQ ID NO: 277019 - RNA, 19 nt, Artificial Sequence
  Description of Artificial Sequence: Synthetic oligonucleotide
  Antisense strand to SEQ ID NO: 277018
uucaucaugccagagcgcc

SEQ ID NO: 277020 - RNA, 19 nt, Artificial Sequence
  Description of Artificial Sequence: Synthetic oligonucleotide
  Sense strand starting at position 1006 of SEQ ID NO: 3559
gcgcucuggcaugaugaau

SEQ ID NO: 277021 - RNA, 19 nt, Artificial Sequence
  Description of Artificial Sequence: Synthetic oligonucleotide
  Antisense strand to SEQ ID NO: 277020
auucaucaugccagagcgc

SEQ ID NO: 277022 - RNA, 19 nt, Artificial Sequence
  Description of Artificial Sequence: Synthetic oligonucleotide
  Sense strand starting at position 1099 of SEQ ID NO: 3559
ugcagagacucuccaacuu

SEQ ID NO: 277023 - RNA, 19 nt, Artificial Sequence
  Description of Artificial Sequence: Synthetic oligonucleotide
  Antisense strand to SEQ ID NO: 277022
aaguuggagagucucugca

SEQ ID NO: 277024 - RNA, 19 nt, Artificial Sequence
  Description of Artificial Sequence: Synthetic oligonucleotide
  Sense strand starting at position 1122 of SEQ ID NO: 3559
acagaugacuaaggaaacu

SEQ ID NO: 277025 - RNA, 19 nt, Artificial Sequence
  Description of Artificial Sequence: Synthetic oligonucleotide
  Antisense strand to SEQ ID NO: 277024
aguuuccuuagucaucugu

SEQ ID NO: 277026 - RNA, 19 nt, Artificial Sequence
  Description of Artificial Sequence: Synthetic oligonucleotide
  Sense strand starting at position 1316 of SEQ ID NO: 3559
uggugaguuuagggacaau

SEQ ID NO: 277027 - RNA, 19 nt, Artificial Sequence
  Description of Artificial Sequence: Synthetic oligonucleotide
  Antisense strand to SEQ ID NO: 277026
auugucccuaaacucacca

SEQ ID NO: 277028 - RNA, 19 nt, Artificial Sequence
  Description of Artificial Sequence: Synthetic oligonucleotide
  Sense strand starting at position 2130 of SEQ ID NO: 3559
ucgcucaguccucggacua

SEQ ID NO: 277029 - RNA, 19 nt, Artificial Sequence
  Description of Artificial Sequence: Synthetic oligonucleotide
  Antisense strand to SEQ ID NO: 277028
uaguccgaggacugagcga

SEQ ID NO: 277030 - RNA, 19 nt, Artificial Sequence
  Description of Artificial Sequence: Synthetic oligonucleotide
  Sense strand starting at position 2328 of SEQ ID NO: 3559
gcguucuugccacccgaua

SEQ ID NO: 277031 - RNA, 19 nt, Artificial Sequence
  Description of Artificial Sequence: Synthetic oligonucleotide
  Antisense strand to SEQ ID NO: 277030
uaucggguggcaagaacgc

SEQ ID NO: 277032 - RNA, 19 nt, Artificial Sequence
  Description of Artificial Sequence: Synthetic oligonucleotide
  Sense strand starting at position 2333 of SEQ ID NO: 3559
cuugccacccgauaguuua

SEQ ID NO: 277033 - RNA, 19 nt, Artificial Sequence
  Description of Artificial Sequence: Synthetic oligonucleotide
  Antisense strand to SEQ ID NO: 277032
uaaacuaucggguggcaag

SEQ ID NO: 277034 - RNA, 19 nt, Artificial Sequence
  Description of Artificial Sequence: Synthetic oligonucleotide
  Sense strand starting at position 2430 of SEQ ID NO: 3559
gggccauucugccgggauu

SEQ ID NO: 277035 - RNA, 19 nt, Artificial Sequence
  Description of Artificial Sequence: Synthetic oligonucleotide
  Antisense strand to SEQ ID NO: 277034
aaucccggcagaauggccc

SEQ ID NO: 277036 - RNA, 19 nt, Artificial Sequence
  Description of Artificial Sequence: Synthetic oligonucleotide
  Sense strand starting at position 2431 of SEQ ID NO: 3559
ggccauucugccgggauuu

SEQ ID NO: 277037 - RNA, 19 nt, Artificial Sequence
  Description of Artificial Sequence: Synthetic oligonucleotide
  Antisense strand to SEQ ID NO: 277036
aaaucccggcagaauggcc

SEQ ID NO: 277038 - RNA, 19 nt, Artificial Sequence
  Description of Artificial Sequence: Synthetic oligonucleotide
  Sense strand starting at position 2497 of SEQ ID NO: 3559
guuaaagccuccugcuuaa

SEQ ID NO: 277039 - RNA, 19 nt, Artificial Sequence
  Description of Artificial Sequence: Synthetic oligonucleotide
  Antisense strand to SEQ ID NO: 277038
uuaagcaggaggcuuuaac

SEQ ID NO: 277040 - RNA, 19 nt, Artificial Sequence
  Description of Artificial Sequence: Synthetic oligonucleotide
  Sense strand starting at position 2560 of SEQ ID NO: 3559
gagagacuuucugggacca

SEQ ID NO: 277041 - RNA, 19 nt, Artificial Sequence
  Description of Artificial Sequence: Synthetic oligonucleotide
  Antisense strand to SEQ ID NO: 277040
uggucccagaaagucucuc

SEQ ID NO: 277042 - RNA, 19 nt, Artificial Sequence
  Description of Artificial Sequence: Synthetic oligonucleotide
  Sense strand starting at position 2562 of SEQ ID NO: 3559
gagacuuucugggaccaga

SEQ ID NO: 277043 - RNA, 19 nt, Artificial Sequence
  Description of Artificial Sequence: Synthetic oligonucleotide
  Antisense strand to SEQ ID NO: 277042
ucuggucccagaaagucuc

SEQ ID NO: 277044 - RNA, 19 nt, Artificial Sequence
  Description of Artificial Sequence: Synthetic oligonucleotide
  Sense strand starting at position 2711 of SEQ ID NO: 3559
ugaaacuguuucuuaagga

SEQ ID NO: 277045 - RNA, 19 nt, Artificial Sequence
  Description of Artificial Sequence: Synthetic oligonucleotide
  Antisense strand to SEQ ID NO: 277044
uccuuaagaaacaguuuca

SEQ ID NO: 277046 - RNA, 19 nt, Artificial Sequence
  Description of Artificial Sequence: Synthetic oligonucleotide
  Sense strand starting at position 2822 of SEQ ID NO: 3559
uguauuagggccugguuau

SEQ ID NO: 277047 - RNA, 19 nt, Artificial Sequence
  Description of Artificial Sequence: Synthetic oligonucleotide
  Antisense strand to SEQ ID NO: 277046
auaaccaggcccuaauaca

SEQ ID NO: 277048 - RNA, 19 nt, Artificial Sequence
  Description of Artificial Sequence: Synthetic oligonucleotide
  Sense strand starting at position 2823 of SEQ ID NO: 3559
guauuagggccugguuaug

SEQ ID NO: 277049 - RNA, 19 nt, Artificial Sequence
  Description of Artificial Sequence: Synthetic oligonucleotide
  Antisense strand to SEQ ID NO: 277048
cauaaccaggcccuaauac

SEQ ID NO: 277050 - RNA, 19 nt, Artificial Sequence
  Description of Artificial Sequence: Synthetic oligonucleotide
  Sense strand starting at position 3110 of SEQ ID NO: 3559
uggcuagaucgauacugau

SEQ ID NO: 277051 - RNA, 19 nt, Artificial Sequence
  Description of Artificial Sequence: Synthetic oligonucleotide
  Antisense strand to SEQ ID NO: 277050
aucaguaucgaucuagcca

SEQ ID NO: 277052 - RNA, 19 nt, Artificial Sequence
  Description of Artificial Sequence: Synthetic oligonucleotide
  Sense strand starting at position 3116 of SEQ ID NO: 3559
gaucgauacugaucguuau

SEQ ID NO: 277053 - RNA, 19 nt, Artificial Sequence
  Description of Artificial Sequence: Synthetic oligonucleotide
  Antisense strand to SEQ ID NO: 277052
auaacgaucaguaucgauc

SEQ ID NO: 277054 - RNA, 19 nt, Artificial Sequence
  Description of Artificial Sequence: Synthetic oligonucleotide
  Sense strand starting at position 3117 of SEQ ID NO: 3559
aucgauacugaucguuauu

SEQ ID NO: 277055 - RNA, 19 nt, Artificial Sequence
  Description of Artificial Sequence: Synthetic oligonucleotide
  Antisense strand to SEQ ID NO: 277054
aauaacgaucaguaucgau

SEQ ID NO: 277056 - RNA, 19 nt, Artificial Sequence
  Description of Artificial Sequence: Synthetic oligonucleotide
  Sense strand starting at position 3119 of SEQ ID NO: 3559
cgauacugaucguuauuga

SEQ ID NO: 277057 - RNA, 19 nt, Artificial Sequence
  Description of Artificial Sequence: Synthetic oligonucleotide
  Antisense strand to SEQ ID NO: 277056
ucaauaacgaucaguaucg

SEQ ID NO: 277058 - RNA, 19 nt, Artificial Sequence
  Description of Artificial Sequence: Synthetic oligonucleotide
  Sense strand starting at position 3120 of SEQ ID NO: 3559
gauacugaucguuauugac

SEQ ID NO: 277059 - RNA, 19 nt, Artificial Sequence
  Description of Artificial Sequence: Synthetic oligonucleotide
  Antisense strand to SEQ ID NO: 277058
gucaauaacgaucaguauc

SEQ ID NO: 277060 - RNA, 19 nt, Artificial Sequence
  Description of Artificial Sequence: Synthetic oligonucleotide
  Sense strand starting at position 3809 of SEQ ID NO: 3559
ugugauaggucccuugaug

SEQ ID NO: 277061 - RNA, 19 nt, Artificial Sequence
  Description of Artificial Sequence: Synthetic oligonucleotide
  Antisense strand to SEQ ID NO: 277060
caucaagggaccuaucaca

SEQ ID NO: 277062 - RNA, 19 nt, Artificial Sequence
  Description of Artificial Sequence: Synthetic oligonucleotide
  Sense strand starting at position 757 of SEQ ID NO: 3560
ggacuugagucccugguuu

SEQ ID NO: 277063 - RNA, 19 nt, Artificial Sequence
  Description of Artificial Sequence: Synthetic oligonucleotide
  Antisense strand to SEQ ID NO: 277062
aaaccagggacucaagucc

SEQ ID NO: 277064 - RNA, 19 nt, Artificial Sequence
  Description of Artificial Sequence: Synthetic oligonucleotide
  Sense strand starting at position 1139 of SEQ ID NO: 3560
cugucacaagucuguuagu

SEQ ID NO: 277065 - RNA, 19 nt, Artificial Sequence
  Description of Artificial Sequence: Synthetic oligonucleotide
  Antisense strand to SEQ ID NO: 277064
acuaacagacuugugacag

SEQ ID NO: 277066 - RNA, 19 nt, Artificial Sequence
  Description of Artificial Sequence: Synthetic oligonucleotide
  Sense strand starting at position 1199 of SEQ ID NO: 3560
gcauuaaggcuuuagcugu

SEQ ID NO: 277067 - RNA, 19 nt, Artificial Sequence
  Description of Artificial Sequence: Synthetic oligonucleotide
  Antisense strand to SEQ ID NO: 277066
acagcuaaagccuuaaugc

SEQ ID NO: 277068 - RNA, 19 nt, Artificial Sequence
  Description of Artificial Sequence: Synthetic oligonucleotide
  Sense strand starting at position 1299 of SEQ ID NO: 3560
cucccucucggauacaaau

SEQ ID NO: 277069 - RNA, 19 nt, Artificial Sequence
  Description of Artificial Sequence: Synthetic oligonucleotide
  Antisense strand to SEQ ID NO: 277068
auuuguauccgagagggag

SEQ ID NO: 277070 - RNA, 19 nt, Artificial Sequence
  Description of Artificial Sequence: Synthetic oligonucleotide
  Sense strand starting at position 1387 of SEQ ID NO: 3560
gugugugcuuauuugugua

SEQ ID NO: 277071 - RNA, 19 nt, Artificial Sequence
  Description of Artificial Sequence: Synthetic oligonucleotide
  Antisense strand to SEQ ID NO: 277070
uacacaaauaagcacacac

SEQ ID NO: 277072 - RNA, 19 nt, Artificial Sequence
  Description of Artificial Sequence: Synthetic oligonucleotide
  Sense strand starting at position 1391 of SEQ ID NO: 3560
gugcuuauuuguguaaguu

SEQ ID NO: 277073 - RNA, 19 nt, Artificial Sequence
  Description of Artificial Sequence: Synthetic oligonucleotide
  Antisense strand to SEQ ID NO: 277072
aacuuacacaaauaagcac

SEQ ID NO: 277074 - RNA, 19 nt, Artificial Sequence
  Description of Artificial Sequence: Synthetic oligonucleotide
  Sense strand starting at position 1392 of SEQ ID NO: 3560
ugcuuauuuguguaaguug

SEQ ID NO: 277075 - RNA, 19 nt, Artificial Sequence
  Description of Artificial Sequence: Synthetic oligonucleotide
  Antisense strand to SEQ ID NO: 277074
caacuuacacaaauaagca

SEQ ID NO: 277076 - RNA, 19 nt, Artificial Sequence
  Description of Artificial Sequence: Synthetic oligonucleotide
  Sense strand starting at position 1401 of SEQ ID NO: 3560
guguaaguuguggguauac

SEQ ID NO: 277077 - RNA, 19 nt, Artificial Sequence
  Description of Artificial Sequence: Synthetic oligonucleotide
  Antisense strand to SEQ ID NO: 277076
guauacccacaacuuacac

SEQ ID NO: 277078 - RNA, 19 nt, Artificial Sequence
  Description of Artificial Sequence: Synthetic oligonucleotide
  Sense strand starting at position 1403 of SEQ ID NO: 3560
guaaguuguggguauacgu

SEQ ID NO: 277079 - RNA, 19 nt, Artificial Sequence
  Description of Artificial Sequence: Synthetic oligonucleotide
  Antisense strand to SEQ ID NO: 277078
acguauacccacaacuuac

SEQ ID NO: 277080 - RNA, 19 nt, Artificial Sequence
  Description of Artificial Sequence: Synthetic oligonucleotide
  Sense strand starting at position 1416 of SEQ ID NO: 3560
auacguaugugcucacuua

SEQ ID NO: 277081 - RNA, 19 nt, Artificial Sequence
  Description of Artificial Sequence: Synthetic oligonucleotide
  Antisense strand to SEQ ID NO: 277080
uaagugagcacauacguau

SEQ ID NO: 277082 - RNA, 19 nt, Artificial Sequence
  Description of Artificial Sequence: Synthetic oligonucleotide
  Sense strand starting at position 1417 of SEQ ID NO: 3560
uacguaugugcucacuuau

SEQ ID NO: 277083 - RNA, 19 nt, Artificial Sequence
  Description of Artificial Sequence: Synthetic oligonucleotide
  Antisense strand to SEQ ID NO: 277082
auaagugagcacauacgua

SEQ ID NO: 277084 - RNA, 19 nt, Artificial Sequence
  Description of Artificial Sequence: Synthetic oligonucleotide
  Sense strand starting at position 1426 of SEQ ID NO: 3560
gcucacuuaugugcauaga

SEQ ID NO: 277085 - RNA, 19 nt, Artificial Sequence
  Description of Artificial Sequence: Synthetic oligonucleotide
  Antisense strand to SEQ ID NO: 277084
ucuaugcacauaagugagc

SEQ ID NO: 277086 - RNA, 19 nt, Artificial Sequence
  Description of Artificial Sequence: Synthetic oligonucleotide
  Sense strand starting at position 1427 of SEQ ID NO: 3560
cucacuuaugugcauagau

SEQ ID NO: 277087 - RNA, 19 nt, Artificial Sequence
  Description of Artificial Sequence: Synthetic oligonucleotide
  Antisense strand to SEQ ID NO: 277086
aucuaugcacauaagugag

SEQ ID NO: 277088 - RNA, 19 nt, Artificial Sequence
  Description of Artificial Sequence: Synthetic oligonucleotide
  Sense strand starting at position 1429 of SEQ ID NO: 3560
cacuuaugugcauagaugu

SEQ ID NO: 277089 - RNA, 19 nt, Artificial Sequence
  Description of Artificial Sequence: Synthetic oligonucleotide
  Antisense strand to SEQ ID NO: 277088
acaucuaugcacauaagug

SEQ ID NO: 277090 - RNA, 19 nt, Artificial Sequence
  Description of Artificial Sequence: Synthetic oligonucleotide
  Sense strand starting at position 1450 of SEQ ID NO: 3560
acauuuaugugcuugugua

SEQ ID NO: 277091 - RNA, 19 nt, Artificial Sequence
  Description of Artificial Sequence: Synthetic oligonucleotide
  Antisense strand to SEQ ID NO: 277090
uacacaagcacauaaaugu

SEQ ID NO: 277092 - RNA, 19 nt, Artificial Sequence
  Description of Artificial Sequence: Synthetic oligonucleotide
  Sense strand starting at position 1451 of SEQ ID NO: 3560
cauuuaugugcuuguguag

SEQ ID NO: 277093 - RNA, 19 nt, Artificial Sequence
  Description of Artificial Sequence: Synthetic oligonucleotide
  Antisense strand to SEQ ID NO: 277092
cuacacaagcacauaaaug

SEQ ID NO: 277094 - RNA, 19 nt, Artificial Sequence
  Description of Artificial Sequence: Synthetic oligonucleotide
  Sense strand starting at position 1485 of SEQ ID NO: 3560
gcgugugugcccacgugua

SEQ ID NO: 277095 - RNA, 19 nt, Artificial Sequence
  Description of Artificial Sequence: Synthetic oligonucleotide
  Antisense strand to SEQ ID NO: 277094
uacacgugggcacacacgc

SEQ ID NO: 277096 - RNA, 19 nt, Artificial Sequence
  Description of Artificial Sequence: Synthetic oligonucleotide
  Sense strand starting at position 1507 of SEQ ID NO: 3560
augugugcuccuguguaca

SEQ ID NO: 277097 - RNA, 19 nt, Artificial Sequence
  Description of Artificial Sequence: Synthetic oligonucleotide
  Antisense strand to SEQ ID NO: 277096
uguacacaggagcacacau

SEQ ID NO: 277098 - RNA, 19 nt, Artificial Sequence
  Description of Artificial Sequence: Synthetic oligonucleotide
  Sense strand starting at position 1523 of SEQ ID NO: 3560
acaugugaaugcucacaua

SEQ ID NO: 277099 - RNA, 19 nt, Artificial Sequence
  Description of Artificial Sequence: Synthetic oligonucleotide
  Antisense strand to SEQ ID NO: 277098
uaugugagcauucacaugu

SEQ ID NO: 277100 - RNA, 19 nt, Artificial Sequence
  Description of Artificial Sequence: Synthetic oligonucleotide
  Sense strand starting at position 1553 of SEQ ID NO: 3560
ccuguaguauccuuccuua

SEQ ID NO: 277101 - RNA, 19 nt, Artificial Sequence
  Description of Artificial Sequence: Synthetic oligonucleotide
  Antisense strand to SEQ ID NO: 277100
uaaggaaggauacuacagg

SEQ ID NO: 277102 - RNA, 19 nt, Artificial Sequence
  Description of Artificial Sequence: Synthetic oligonucleotide
  Sense strand starting at position 1556 of SEQ ID NO: 3560
guaguauccuuccuuagcu

SEQ ID NO: 277103 - RNA, 19 nt, Artificial Sequence
  Description of Artificial Sequence: Synthetic oligonucleotide
  Antisense strand to SEQ ID NO: 277102
agcuaaggaaggauacuac

SEQ ID NO: 277104 - RNA, 19 nt, Artificial Sequence
  Description of Artificial Sequence: Synthetic oligonucleotide
  Sense strand starting at position 1697 of SEQ ID NO: 3560
acuuuauguccuuggacca

SEQ ID NO: 277105 - RNA, 19 nt, Artificial Sequence
  Description of Artificial Sequence: Synthetic oligonucleotide
  Antisense strand to SEQ ID NO: 277104
ugguccaaggacauaaagu

SEQ ID NO: 277106 - RNA, 19 nt, Artificial Sequence
  Description of Artificial Sequence: Synthetic oligonucleotide
  Sense strand starting at position 2140 of SEQ ID NO: 3560
cuuccuauuggucgagaga

SEQ ID NO: 277107 - RNA, 19 nt, Artificial Sequence
  Description of Artificial Sequence: Synthetic oligonucleotide
  Antisense strand to SEQ ID NO: 277106
ucucucgaccaauaggaag

SEQ ID NO: 277108 - RNA, 19 nt, Artificial Sequence
  Description of Artificial Sequence: Synthetic oligonucleotide
  Sense strand starting at position 2141 of SEQ ID NO: 3560
uuccuauuggucgagagaa

SEQ ID NO: 277109 - RNA, 19 nt, Artificial Sequence
  Description of Artificial Sequence: Synthetic oligonucleotide
  Antisense strand to SEQ ID NO: 277108
uucucucgaccaauaggaa

SEQ ID NO: 277110 - RNA, 19 nt, Artificial Sequence
  Description of Artificial Sequence: Synthetic oligonucleotide
  Sense strand starting at position 2143 of SEQ ID NO: 3560
ccuauuggucgagagaagu

SEQ ID NO: 277111 - RNA, 19 nt, Artificial Sequence
  Description of Artificial Sequence: Synthetic oligonucleotide
  Antisense strand to SEQ ID NO: 277110
acuucucucgaccaauagg

SEQ ID NO: 277112 - RNA, 19 nt, Artificial Sequence
  Description of Artificial Sequence: Synthetic oligonucleotide
  Sense strand starting at position 2171 of SEQ ID NO: 3560
ggcugauuggcuuaaacuc

SEQ ID NO: 277113 - RNA, 19 nt, Artificial Sequence
  Description of Artificial Sequence: Synthetic oligonucleotide
  Antisense strand to SEQ ID NO: 277112
gaguuuaagccaaucagcc

SEQ ID NO: 277114 - RNA, 19 nt, Artificial Sequence
  Description of Artificial Sequence: Synthetic oligonucleotide
  Sense strand starting at position 2622 of SEQ ID NO: 3560
cguugacacugacuaugua

SEQ ID NO: 277115 - RNA, 19 nt, Artificial Sequence
  Description of Artificial Sequence: Synthetic oligonucleotide
  Antisense strand to SEQ ID NO: 277114
uacauagucagugucaacg

SEQ ID NO: 277116 - RNA, 19 nt, Artificial Sequence
  Description of Artificial Sequence: Synthetic oligonucleotide
  Sense strand starting at position 2623 of SEQ ID NO: 3560
guugacacugacuauguaa

SEQ ID NO: 277117 - RNA, 19 nt, Artificial Sequence
  Description of Artificial Sequence: Synthetic oligonucleotide
  Antisense strand to SEQ ID NO: 277116
uuacauagucagugucaac

SEQ ID NO: 277118 - RNA, 19 nt, Artificial Sequence
  Description of Artificial Sequence: Synthetic oligonucleotide
  Sense strand starting at position 2673 of SEQ ID NO: 3560
uccuuucugucaucaguaa

SEQ ID NO: 277119 - RNA, 19 nt, Artificial Sequence
  Description of Artificial Sequence: Synthetic oligonucleotide
  Antisense strand to SEQ ID NO: 277118
uuacugaugacagaaagga

SEQ ID NO: 277120 - RNA, 19 nt, Artificial Sequence
  Description of Artificial Sequence: Synthetic oligonucleotide
  Sense strand starting at position 2674 of SEQ ID NO: 3560
ccuuucugucaucaguaaa

SEQ ID NO: 277121 - RNA, 19 nt, Artificial Sequence
  Description of Artificial Sequence: Synthetic oligonucleotide
  Antisense strand to SEQ ID NO: 277120
uuuacugaugacagaaagg

SEQ ID NO: 277122 - RNA, 19 nt, Artificial Sequence
  Description of Artificial Sequence: Synthetic oligonucleotide
  Sense strand starting at position 2880 of SEQ ID NO: 3560
gacccuccgugcucuaaga

SEQ ID NO: 277123 - RNA, 19 nt, Artificial Sequence
  Description of Artificial Sequence: Synthetic oligonucleotide
  Antisense strand to SEQ ID NO: 277122
ucuuagagcacggaggguc

SEQ ID NO: 277124 - RNA, 19 nt, Artificial Sequence
  Description of Artificial Sequence: Synthetic oligonucleotide
  Sense strand starting at position 3467 of SEQ ID NO: 3560
ggacuugcgugaaacgagu

SEQ ID NO: 277125 - RNA, 19 nt, Artificial Sequence
  Description of Artificial Sequence: Synthetic oligonucleotide
  Antisense strand to SEQ ID NO: 277124
acucguuucacgcaagucc

SEQ ID NO: 277126 - RNA, 19 nt, Artificial Sequence
  Description of Artificial Sequence: Synthetic oligonucleotide
  Sense strand starting at position 3540 of SEQ ID NO: 3560
cugagauuugcgggcugua

SEQ ID NO: 277127 - RNA, 19 nt, Artificial Sequence
  Description of Artificial Sequence: Synthetic oligonucleotide
  Antisense strand to SEQ ID NO: 277126
uacagcccgcaaaucucag

SEQ ID NO: 277128 - RNA, 19 nt, Artificial Sequence
  Description of Artificial Sequence: Synthetic oligonucleotide
  Sense strand starting at position 3543 of SEQ ID NO: 3560
agauuugcgggcuguaaag

SEQ ID NO: 277129 - RNA, 19 nt, Artificial Sequence
  Description of Artificial Sequence: Synthetic oligonucleotide
  Antisense strand to SEQ ID NO: 277128
cuuuacagcccgcaaaucu

SEQ ID NO: 277130 - RNA, 19 nt, Artificial Sequence
  Description of Artificial Sequence: Synthetic oligonucleotide
  Sense strand starting at position 3702 of SEQ ID NO: 3560
cucauucgcucagucauua

SEQ ID NO: 277131 - RNA, 19 nt, Artificial Sequence
  Description of Artificial Sequence: Synthetic oligonucleotide
  Antisense strand to SEQ ID NO: 277130
uaaugacugagcgaaugag

SEQ ID NO: 277132 - RNA, 19 nt, Artificial Sequence
  Description of Artificial Sequence: Synthetic oligonucleotide
  Sense strand starting at position 3706 of SEQ ID NO: 3560
uucgcucagucauuaaaua

SEQ ID NO: 277133 - RNA, 19 nt, Artificial Sequence
  Description of Artificial Sequence: Synthetic oligonucleotide
  Antisense strand to SEQ ID NO: 277132
uauuuaaugacugagcgaa

SEQ ID NO: 277134 - RNA, 19 nt, Artificial Sequence
  Description of Artificial Sequence: Synthetic oligonucleotide
  Sense strand starting at position 3707 of SEQ ID NO: 3560
ucgcucagucauuaaauaa

SEQ ID NO: 277135 - RNA, 19 nt, Artificial Sequence
  Description of Artificial Sequence: Synthetic oligonucleotide
  Antisense strand to SEQ ID NO: 277134
uuauuuaaugacugagcga

SEQ ID NO: 277136 - RNA, 19 nt, Artificial Sequence
  Description of Artificial Sequence: Synthetic oligonucleotide
  Sense strand starting at position 3848 of SEQ ID NO: 3560
ucggacucuggugacauaa

SEQ ID NO: 277137 - RNA, 19 nt, Artificial Sequence
  Description of Artificial Sequence: Synthetic oligonucleotide
  Antisense strand to SEQ ID NO: 277136
uuaugucaccagaguccga

SEQ ID NO: 277138 - RNA, 19 nt, Artificial Sequence
  Description of Artificial Sequence: Synthetic oligonucleotide
  Sense strand starting at position 3850 of SEQ ID NO: 3560
ggacucuggugacauaaga

SEQ ID NO: 277139 - RNA, 19 nt, Artificial Sequence
  Description of Artificial Sequence: Synthetic oligonucleotide
  Antisense strand to SEQ ID NO: 277138
ucuuaugucaccagagucc

SEQ ID NO: 277140 - RNA, 19 nt, Artificial Sequence
  Description of Artificial Sequence: Synthetic oligonucleotide
  Sense strand starting at position 3875 of SEQ ID NO: 3560
uuucuaguuggcuaccuaa

SEQ ID NO: 277141 - RNA, 19 nt, Artificial Sequence
  Description of Artificial Sequence: Synthetic oligonucleotide
  Antisense strand to SEQ ID NO: 277140
uuagguagccaacuagaaa

SEQ ID NO: 277142 - RNA, 19 nt, Artificial Sequence
  Description of Artificial Sequence: Synthetic oligonucleotide
  Sense strand starting at position 46 of SEQ ID NO: 3561
guuaccaacuaguuaggaa

SEQ ID NO: 277143 - RNA, 19 nt, Artificial Sequence
  Description of Artificial Sequence: Synthetic oligonucleotide
  Antisense strand to SEQ ID NO: 277142
uuccuaacuaguugguaac

SEQ ID NO: 277144 - RNA, 19 nt, Artificial Sequence
  Description of Artificial Sequence: Synthetic oligonucleotide
  Sense strand starting at position 49 of SEQ ID NO: 3561
accaacuaguuaggaauaa

SEQ ID NO: 277145 - RNA, 19 nt, Artificial Sequence
  Description of Artificial Sequence: Synthetic oligonucleotide
  Antisense strand to SEQ ID NO: 277144
uuauuccuaacuaguuggu

SEQ ID NO: 277146 - RNA, 19 nt, Artificial Sequence
  Description of Artificial Sequence: Synthetic oligonucleotide
  Sense strand starting at position 50 of SEQ ID NO: 3561
ccaacuaguuaggaauaaa

SEQ ID NO: 277147 - RNA, 19 nt, Artificial Sequence
  Description of Artificial Sequence: Synthetic oligonucleotide
  Antisense strand to SEQ ID NO: 277146
uuuauuccuaacuaguugg

SEQ ID NO: 277148 - RNA, 19 nt, Artificial Sequence
  Description of Artificial Sequence: Synthetic oligonucleotide
  Sense strand starting at position 271 of SEQ ID NO: 3561
gguuaacucagguguccag

SEQ ID NO: 277149 - RNA, 19 nt, Artificial Sequence
  Description of Artificial Sequence: Synthetic oligonucleotide
  Antisense strand to SEQ ID NO: 277148
cuggacaccugaguuaacc

SEQ ID NO: 277150 - RNA, 19 nt, Artificial Sequence
  Description of Artificial Sequence: Synthetic oligonucleotide
  Sense strand starting at position 289 of SEQ ID NO: 3561
gcaaguacacugugacuga

SEQ ID NO: 277151 - RNA, 19 nt, Artificial Sequence
  Description of Artificial Sequence: Synthetic oligonucleotide
  Antisense strand to SEQ ID NO: 277150
ucagucacaguguacuugc

SEQ ID NO: 277152 - RNA, 19 nt, Artificial Sequence
  Description of Artificial Sequence: Synthetic oligonucleotide
  Sense strand starting at position 354 of SEQ ID NO: 3561
acaaguuucccagaugcca

SEQ ID NO: 277153 - RNA, 19 nt, Artificial Sequence
  Description of Artificial Sequence: Synthetic oligonucleotide
  Antisense strand to SEQ ID NO: 277152
uggcaucugggaaacuugu

SEQ ID NO: 277154 - RNA, 19 nt, Artificial Sequence
  Description of Artificial Sequence: Synthetic oligonucleotide
  Sense strand starting at position 487 of SEQ ID NO: 3561
ggguauuaucgugguugaa

SEQ ID NO: 277155 - RNA, 19 nt, Artificial Sequence
  Description of Artificial Sequence: Synthetic oligonucleotide
  Antisense strand to SEQ ID NO: 277154
uucaaccacgauaauaccc

SEQ ID NO: 277156 - RNA, 19 nt, Artificial Sequence
  Description of Artificial Sequence: Synthetic oligonucleotide
  Sense strand starting at position 489 of SEQ ID NO: 3561
guauuaucgugguugaagc

SEQ ID NO: 277157 - RNA, 19 nt, Artificial Sequence
  Description of Artificial Sequence: Synthetic oligonucleotide
  Antisense strand to SEQ ID NO: 277156
gcuucaaccacgauaauac

SEQ ID NO: 277158 - RNA, 19 nt, Artificial Sequence
  Description of Artificial Sequence: Synthetic oligonucleotide
  Sense strand starting at position 490 of SEQ ID NO: 3561
uauuaucgugguugaagca

SEQ ID NO: 277159 - RNA, 19 nt, Artificial Sequence
  Description of Artificial Sequence: Synthetic oligonucleotide
  Antisense strand to SEQ ID NO: 277158
ugcuucaaccacgauaaua

SEQ ID NO: 277160 - RNA, 19 nt, Artificial Sequence
  Description of Artificial Sequence: Synthetic oligonucleotide
  Sense strand starting at position 531 of SEQ ID NO: 3561
gagcuaaagucugucugca

SEQ ID NO: 277161 - RNA, 19 nt, Artificial Sequence
  Description of Artificial Sequence: Synthetic oligonucleotide
  Antisense strand to SEQ ID NO: 277160
ugcagacagacuuuagcuc

SEQ ID NO: 277162 - RNA, 19 nt, Artificial Sequence
  Description of Artificial Sequence: Synthetic oligonucleotide
  Sense strand starting at position 592 of SEQ ID NO: 3561
ggguuuccgcuccacauuu

SEQ ID NO: 277163 - RNA, 19 nt, Artificial Sequence
  Description of Artificial Sequence: Synthetic oligonucleotide
  Antisense strand to SEQ ID NO: 277162
aaauguggagcggaaaccc

SEQ ID NO: 277164 - RNA, 19 nt, Artificial Sequence
  Description of Artificial Sequence: Synthetic oligonucleotide
  Sense strand starting at position 1131 of SEQ ID NO: 3561
gcuuucugcacguucuagu

SEQ ID NO: 277165 - RNA, 19 nt, Artificial Sequence
  Description of Artificial Sequence: Synthetic oligonucleotide
  Antisense strand to SEQ ID NO: 277164
acuagaacgugcagaaagc

SEQ ID NO: 277166 - RNA, 19 nt, Artificial Sequence
  Description of Artificial Sequence: Synthetic oligonucleotide
  Sense strand starting at position 1206 of SEQ ID NO: 3561
ugagcaggacugggauuau

SEQ ID NO: 277167 - RNA, 19 nt, Artificial Sequence
  Description of Artificial Sequence: Synthetic oligonucleotide
  Antisense strand to SEQ ID NO: 277166
auaaucccaguccugcuca

SEQ ID NO: 277168 - RNA, 19 nt, Artificial Sequence
  Description of Artificial Sequence: Synthetic oligonucleotide
  Sense strand starting at position 1215 of SEQ ID NO: 3561
cugggauuauuaccucuau

SEQ ID NO: 277169 - RNA, 19 nt, Artificial Sequence
  Description of Artificial Sequence: Synthetic oligonucleotide
  Antisense strand to SEQ ID NO: 277168
auagagguaauaaucccag

SEQ ID NO: 277170 - RNA, 19 nt, Artificial Sequence
  Description of Artificial Sequence: Synthetic oligonucleotide
  Sense strand starting at position 1216 of SEQ ID NO: 3561
ugggauuauuaccucuauu

SEQ ID NO: 277171 - RNA, 19 nt, Artificial Sequence
  Description of Artificial Sequence: Synthetic oligonucleotide
  Antisense strand to SEQ ID NO: 277170
aauagagguaauaauccca

SEQ ID NO: 277172 - RNA, 19 nt, Artificial Sequence
  Description of Artificial Sequence: Synthetic oligonucleotide
  Sense strand starting at position 1443 of SEQ ID NO: 3561
cgcugaguucucgacugaa

SEQ ID NO: 277173 - RNA, 19 nt, Artificial Sequence
  Description of Artificial Sequence: Synthetic oligonucleotide
  Antisense strand to SEQ ID NO: 277172
uucagucgagaacucagcg

SEQ ID NO: 277174 - RNA, 19 nt, Artificial Sequence
  Description of Artificial Sequence: Synthetic oligonucleotide
  Sense strand starting at position 1446 of SEQ ID NO: 3561
ugaguucucgacugaaauu

SEQ ID NO: 277175 - RNA, 19 nt, Artificial Sequence
  Description of Artificial Sequence: Synthetic oligonucleotide
  Antisense strand to SEQ ID NO: 277174
aauuucagucgagaacuca

SEQ ID NO: 277176 - RNA, 19 nt, Artificial Sequence
  Description of Artificial Sequence: Synthetic oligonucleotide
  Sense strand starting at position 1487 of SEQ ID NO: 3561
gggucuucccaacagaagu

SEQ ID NO: 277177 - RNA, 19 nt, Artificial Sequence
  Description of Artificial Sequence: Synthetic oligonucleotide
  Antisense strand to SEQ ID NO: 277176
acuucuguugggaagaccc

SEQ ID NO: 277178 - RNA, 19 nt, Artificial Sequence
  Description of Artificial Sequence: Synthetic oligonucleotide
  Sense strand starting at position 2157 of SEQ ID NO: 3561
gccaauggagguugaugaa

SEQ ID NO: 277179 - RNA, 19 nt, Artificial Sequence
  Description of Artificial Sequence: Synthetic oligonucleotide
  Antisense strand to SEQ ID NO: 277178
uucaucaaccuccauuggc

SEQ ID NO: 277180 - RNA, 19 nt, Artificial Sequence
  Description of Artificial Sequence: Synthetic oligonucleotide
  Sense strand starting at position 2163 of SEQ ID NO: 3561
ggagguugaugaaggucaa

SEQ ID NO: 277181 - RNA, 19 nt, Artificial Sequence
  Description of Artificial Sequence: Synthetic oligonucleotide
  Antisense strand to SEQ ID NO: 277180
uugaccuucaucaaccucc

SEQ ID NO: 277182 - RNA, 19 nt, Artificial Sequence
  Description of Artificial Sequence: Synthetic oligonucleotide
  Sense strand starting at position 2596 of SEQ ID NO: 3561
gggauccgucccuacgaaa

SEQ ID NO: 277183 - RNA, 19 nt, Artificial Sequence
  Description of Artificial Sequence: Synthetic oligonucleotide
  Antisense strand to SEQ ID NO: 277182
uuucguagggacggauccc

SEQ ID NO: 277184 - RNA, 19 nt, Artificial Sequence
  Description of Artificial Sequence: Synthetic oligonucleotide
  Sense strand starting at position 2721 of SEQ ID NO: 3561
cagugaugucaccacugca

SEQ ID NO: 277185 - RNA, 19 nt, Artificial Sequence
  Description of Artificial Sequence: Synthetic oligonucleotide
  Antisense strand to SEQ ID NO: 277184
ugcaguggugacaucacug

SEQ ID NO: 277186 - RNA, 19 nt, Artificial Sequence
  Description of Artificial Sequence: Synthetic oligonucleotide
  Sense strand starting at position 2810 of SEQ ID NO: 3561
ccaucugaggagugauaug

SEQ ID NO: 277187 - RNA, 19 nt, Artificial Sequence
  Description of Artificial Sequence: Synthetic oligonucleotide
  Antisense strand to SEQ ID NO: 277186
cauaucacuccucagaugg

SEQ ID NO: 277188 - RNA, 19 nt, Artificial Sequence
  Description of Artificial Sequence: Synthetic oligonucleotide
  Sense strand starting at position 2815 of SEQ ID NO: 3561
ugaggagugauaugccaac

SEQ ID NO: 277189 - RNA, 19 nt, Artificial Sequence
  Description of Artificial Sequence: Synthetic oligonucleotide
  Antisense strand to SEQ ID NO: 277188
guuggcauaucacuccuca

SEQ ID NO: 277190 - RNA, 19 nt, Artificial Sequence
  Description of Artificial Sequence: Synthetic oligonucleotide
  Sense strand starting at position 2855 of SEQ ID NO: 3561
caucuuaccucagagagga

SEQ ID NO: 277191 - RNA, 19 nt, Artificial Sequence
  Description of Artificial Sequence: Synthetic oligonucleotide
  Antisense strand to SEQ ID NO: 277190
uccucucugagguaagaug

SEQ ID NO: 277192 - RNA, 19 nt, Artificial Sequence
  Description of Artificial Sequence: Synthetic oligonucleotide
  Sense strand starting at position 2908 of SEQ ID NO: 3561
cggagucucuugcuucuua

SEQ ID NO: 277193 - RNA, 19 nt, Artificial Sequence
  Description of Artificial Sequence: Synthetic oligonucleotide
  Antisense strand to SEQ ID NO: 277192
uaagaagcaagagacuccg

SEQ ID NO: 277194 - RNA, 19 nt, Artificial Sequence
  Description of Artificial Sequence: Synthetic oligonucleotide
  Sense strand starting at position 2909 of SEQ ID NO: 3561
ggagucucuugcuucuuaa

SEQ ID NO: 277195 - RNA, 19 nt, Artificial Sequence
  Description of Artificial Sequence: Synthetic oligonucleotide
  Antisense strand to SEQ ID NO: 277194
uuaagaagcaagagacucc

SEQ ID NO: 277196 - RNA, 19 nt, Artificial Sequence
  Description of Artificial Sequence: Synthetic oligonucleotide
  Sense strand starting at position 2973 of SEQ ID NO: 3561
auccauugcuuccucguau

SEQ ID NO: 277197 - RNA, 19 nt, Artificial Sequence
  Description of Artificial Sequence: Synthetic oligonucleotide
  Antisense strand to SEQ ID NO: 277196
auacgaggaagcaauggau

SEQ ID NO: 277198 - RNA, 19 nt, Artificial Sequence
  Description of Artificial Sequence: Synthetic oligonucleotide
  Sense strand starting at position 2991 of SEQ ID NO: 3561
ugaggacacgucugucauc

SEQ ID NO: 277199 - RNA, 19 nt, Artificial Sequence
  Description of Artificial Sequence: Synthetic oligonucleotide
  Antisense strand to SEQ ID NO: 277198
gaugacagacguguccuca

SEQ ID NO: 277200 - RNA, 19 nt, Artificial Sequence
  Description of Artificial Sequence: Synthetic oligonucleotide
  Sense strand starting at position 2996 of SEQ ID NO: 3561
acacgucugucauccuuaa

SEQ ID NO: 277201 - RNA, 19 nt, Artificial Sequence
  Description of Artificial Sequence: Synthetic oligonucleotide
  Antisense strand to SEQ ID NO: 277200
uuaaggaugacagacgugu

SEQ ID NO: 277202 - RNA, 19 nt, Artificial Sequence
  Description of Artificial Sequence: Synthetic oligonucleotide
  Sense strand starting at position 3106 of SEQ ID NO: 3561
cugcuuugcuggccucaga

SEQ ID NO: 277203 - RNA, 19 nt, Artificial Sequence
  Description of Artificial Sequence: Synthetic oligonucleotide
  Antisense strand to SEQ ID NO: 277202
ucugaggccagcaaagcag

SEQ ID NO: 277204 - RNA, 19 nt, Artificial Sequence
  Description of Artificial Sequence: Synthetic oligonucleotide
  Sense strand starting at position 3149 of SEQ ID NO: 3561
guaucuucugcgccugaca

SEQ ID NO: 277205 - RNA, 19 nt, Artificial Sequence
  Description of Artificial Sequence: Synthetic oligonucleotide
  Antisense strand to SEQ ID NO: 277204
ugucaggcgcagaagauac

SEQ ID NO: 277206 - RNA, 19 nt, Artificial Sequence
  Description of Artificial Sequence: Synthetic oligonucleotide
  Sense strand starting at position 3180 of SEQ ID NO: 3561
ucggguuucugaucugaug

SEQ ID NO: 277207 - RNA, 19 nt, Artificial Sequence
  Description of Artificial Sequence: Synthetic oligonucleotide
  Antisense strand to SEQ ID NO: 277206
caucagaucagaaacccga

SEQ ID NO: 277208 - RNA, 19 nt, Artificial Sequence
  Description of Artificial Sequence: Synthetic oligonucleotide
  Sense strand starting at position 3182 of SEQ ID NO: 3561
ggguuucugaucugaugag

SEQ ID NO: 277209 - RNA, 19 nt, Artificial Sequence
  Description of Artificial Sequence: Synthetic oligonucleotide
  Antisense strand to SEQ ID NO: 277208
cucaucagaucagaaaccc

SEQ ID NO: 277210 - RNA, 19 nt, Artificial Sequence
  Description of Artificial Sequence: Synthetic oligonucleotide
  Sense strand starting at position 3233 of SEQ ID NO: 3561
ggauguccuucccugcaaa

SEQ ID NO: 277211 - RNA, 19 nt, Artificial Sequence
  Description of Artificial Sequence: Synthetic oligonucleotide
  Antisense strand to SEQ ID NO: 277210
uuugcagggaaggacaucc

SEQ ID NO: 277212 - RNA, 19 nt, Artificial Sequence
  Description of Artificial Sequence: Synthetic oligonucleotide
  Sense strand starting at position 3332 of SEQ ID NO: 3561
auaucugucccacagaguu

SEQ ID NO: 277213 - RNA, 19 nt, Artificial Sequence
  Description of Artificial Sequence: Synthetic oligonucleotide
  Antisense strand to SEQ ID NO: 277212
aacucugugggacagauau

SEQ ID NO: 277214 - RNA, 19 nt, Artificial Sequence
  Description of Artificial Sequence: Synthetic oligonucleotide
  Sense strand starting at position 3347 of SEQ ID NO: 3561
aguugaauuagauguguga

SEQ ID NO: 277215 - RNA, 19 nt, Artificial Sequence
  Description of Artificial Sequence: Synthetic oligonucleotide
  Antisense strand to SEQ ID NO: 277214
ucacacaucuaauucaacu

SEQ ID NO: 277216 - RNA, 19 nt, Artificial Sequence
  Description of Artificial Sequence: Synthetic oligonucleotide
  Sense strand starting at position 3703 of SEQ ID NO: 3561
cucguaacuccugaccuua

SEQ ID NO: 277217 - RNA, 19 nt, Artificial Sequence
  Description of Artificial Sequence: Synthetic oligonucleotide
  Antisense strand to SEQ ID NO: 277216
uaaggucaggaguuacgag

SEQ ID NO: 277218 - RNA, 19 nt, Artificial Sequence
  Description of Artificial Sequence: Synthetic oligonucleotide
  Sense strand starting at position 3705 of SEQ ID NO: 3561
cguaacuccugaccuuaaa

SEQ ID NO: 277219 - RNA, 19 nt, Artificial Sequence
  Description of Artificial Sequence: Synthetic oligonucleotide
  Antisense strand to SEQ ID NO: 277218
uuuaaggucaggaguuacg

SEQ ID NO: 277220 - RNA, 19 nt, Artificial Sequence
  Description of Artificial Sequence: Synthetic oligonucleotide
  Sense strand starting at position 3850 of SEQ ID NO: 3561
ugauauagcucauugcaac

SEQ ID NO: 277221 - RNA, 19 nt, Artificial Sequence
  Description of Artificial Sequence: Synthetic oligonucleotide
  Antisense strand to SEQ ID NO: 277220
guugcaaugagcuauauca

SEQ ID NO: 277222 - RNA, 19 nt, Artificial Sequence
  Description of Artificial Sequence: Synthetic oligonucleotide
  Sense strand starting at position 388 of SEQ ID NO: 3562
agaagaaucugcccaagug

SEQ ID NO: 277223 - RNA, 19 nt, Artificial Sequence
  Description of Artificial Sequence: Synthetic oligonucleotide
  Antisense strand to SEQ ID NO: 277222
cacuugggcagauucuucu

SEQ ID NO: 277224 - RNA, 19 nt, Artificial Sequence
  Description of Artificial Sequence: Synthetic oligonucleotide
  Sense strand starting at position 389 of SEQ ID NO: 3562
gaagaaucugcccaagugu

SEQ ID NO: 277225 - RNA, 19 nt, Artificial Sequence
  Description of Artificial Sequence: Synthetic oligonucleotide
  Antisense strand to SEQ ID NO: 277224
acacuugggcagauucuuc

SEQ ID NO: 277226 - RNA, 19 nt, Artificial Sequence
  Description of Artificial Sequence: Synthetic oligonucleotide
  Sense strand starting at position 400 of SEQ ID NO: 3562
ccaaguguccaucaauuac

SEQ ID NO: 277227 - RNA, 19 nt, Artificial Sequence
  Description of Artificial Sequence: Synthetic oligonucleotide
  Antisense strand to SEQ ID NO: 277226
guaauugauggacacuugg

SEQ ID NO: 277228 - RNA, 19 nt, Artificial Sequence
  Description of Artificial Sequence: Synthetic oligonucleotide
  Sense strand starting at position 518 of SEQ ID NO: 3562
uuugaaagccacugaauug

SEQ ID NO: 277229 - RNA, 19 nt, Artificial Sequence
  Description of Artificial Sequence: Synthetic oligonucleotide
  Antisense strand to SEQ ID NO: 277228
caauucaguggcuuucaaa

SEQ ID NO: 277230 - RNA, 19 nt, Artificial Sequence
  Description of Artificial Sequence: Synthetic oligonucleotide
  Sense strand starting at position 805 of SEQ ID NO: 3562
acuguaggaugaccauaua

SEQ ID NO: 277231 - RNA, 19 nt, Artificial Sequence
  Description of Artificial Sequence: Synthetic oligonucleotide
  Antisense strand to SEQ ID NO: 277230
uauauggucauccuacagu

SEQ ID NO: 277232 - RNA, 19 nt, Artificial Sequence
  Description of Artificial Sequence: Synthetic oligonucleotide
  Sense strand starting at position 930 of SEQ ID NO: 3562
gugguuacucucuauauaa

SEQ ID NO: 277233 - RNA, 19 nt, Artificial Sequence
  Description of Artificial Sequence: Synthetic oligonucleotide
  Antisense strand to SEQ ID NO: 277232
uuauauagagaguaaccac

SEQ ID NO: 277234 - RNA, 19 nt, Artificial Sequence
  Description of Artificial Sequence: Synthetic oligonucleotide
  Sense strand starting at position 952 of SEQ ID NO: 3562
caaucagguccuuaagguu

SEQ ID NO: 277235 - RNA, 19 nt, Artificial Sequence
  Description of Artificial Sequence: Synthetic oligonucleotide
  Antisense strand to SEQ ID NO: 277234
aaccuuaaggaccugauug

SEQ ID NO: 277236 - RNA, 19 nt, Artificial Sequence
  Description of Artificial Sequence: Synthetic oligonucleotide
  Sense strand starting at position 1003 of SEQ ID NO: 3562
aguacaauacucugacagu

SEQ ID NO: 277237 - RNA, 19 nt, Artificial Sequence
  Description of Artificial Sequence: Synthetic oligonucleotide
  Antisense strand to SEQ ID NO: 277236
acugucagaguauuguacu

SEQ ID NO: 277238 - RNA, 19 nt, Artificial Sequence
  Description of Artificial Sequence: Synthetic oligonucleotide
  Sense strand starting at position 1018 of SEQ ID NO: 3562
cagugucuuccugaaugac

SEQ ID NO: 277239 - RNA, 19 nt, Artificial Sequence
  Description of Artificial Sequence: Synthetic oligonucleotide
  Antisense strand to SEQ ID NO: 277238
gucauucaggaagacacug

SEQ ID NO: 277240 - RNA, 19 nt, Artificial Sequence
  Description of Artificial Sequence: Synthetic oligonucleotide
  Sense strand starting at position 1021 of SEQ ID NO: 3562
ugucuuccugaaugacuca

SEQ ID NO: 277241 - RNA, 19 nt, Artificial Sequence
  Description of Artificial Sequence: Synthetic oligonucleotide
  Antisense strand to SEQ ID NO: 277240
ugagucauucaggaagaca

SEQ ID NO: 277242 - RNA, 19 nt, Artificial Sequence
  Description of Artificial Sequence: Synthetic oligonucleotide
  Sense strand starting at position 1200 of SEQ ID NO: 3562
gccgaauuauacuuugaaa

SEQ ID NO: 277243 - RNA, 19 nt, Artificial Sequence
  Description of Artificial Sequence: Synthetic oligonucleotide
  Antisense strand to SEQ ID NO: 277242
uuucaaaguauaauucggc

SEQ ID NO: 277244 - RNA, 19 nt, Artificial Sequence
  Description of Artificial Sequence: Synthetic oligonucleotide
  Sense strand starting at position 1202 of SEQ ID NO: 3562
cgaauuauacuuugaaaug

SEQ ID NO: 277245 - RNA, 19 nt, Artificial Sequence
  Description of Artificial Sequence: Synthetic oligonucleotide
  Antisense strand to SEQ ID NO: 277244
cauuucaaaguauaauucg

SEQ ID NO: 277246 - RNA, 19 nt, Artificial Sequence
  Description of Artificial Sequence: Synthetic oligonucleotide
  Sense strand starting at position 1801 of SEQ ID NO: 3562
guuuauucugaagacacuu

SEQ ID NO: 277247 - RNA, 19 nt, Artificial Sequence
  Description of Artificial Sequence: Synthetic oligonucleotide
  Antisense strand to SEQ ID NO: 277246
aagugucuucagaauaaac

SEQ ID NO: 277248 - RNA, 19 nt, Artificial Sequence
  Description of Artificial Sequence: Synthetic oligonucleotide
  Sense strand starting at position 1814 of SEQ ID NO: 3562
acacuugguuaggugauau

SEQ ID NO: 277249 - RNA, 19 nt, Artificial Sequence
  Description of Artificial Sequence: Synthetic oligonucleotide
  Antisense strand to SEQ ID NO: 277248
auaucaccuaaccaagugu

SEQ ID NO: 277250 - RNA, 19 nt, Artificial Sequence
  Description of Artificial Sequence: Synthetic oligonucleotide
  Sense strand starting at position 1854 of SEQ ID NO: 3562
uaacaaugaucagcgaagu

SEQ ID NO: 277251 - RNA, 19 nt, Artificial Sequence
  Description of Artificial Sequence: Synthetic oligonucleotide
  Antisense strand to SEQ ID NO: 277250
acuucgcugaucauuguua

SEQ ID NO: 277252 - RNA, 19 nt, Artificial Sequence
  Description of Artificial Sequence: Synthetic oligonucleotide
  Sense strand starting at position 1855 of SEQ ID NO: 3562
aacaaugaucagcgaaguu

SEQ ID NO: 277253 - RNA, 19 nt, Artificial Sequence
  Description of Artificial Sequence: Synthetic oligonucleotide
  Antisense strand to SEQ ID NO: 277252
aacuucgcugaucauuguu

SEQ ID NO: 277254 - RNA, 19 nt, Artificial Sequence
  Description of Artificial Sequence: Synthetic oligonucleotide
  Sense strand starting at position 2049 of SEQ ID NO: 3562
uucucagaguaacuaagau

SEQ ID NO: 277255 - RNA, 19 nt, Artificial Sequence
  Description of Artificial Sequence: Synthetic oligonucleotide
  Antisense strand to SEQ ID NO: 277254
aucuuaguuacucugagaa

SEQ ID NO: 277256 - RNA, 19 nt, Artificial Sequence
  Description of Artificial Sequence: Synthetic oligonucleotide
  Sense strand starting at position 2132 of SEQ ID NO: 3562
cugauaacuuaggcuaacu

SEQ ID NO: 277257 - RNA, 19 nt, Artificial Sequence
  Description of Artificial Sequence: Synthetic oligonucleotide
  Antisense strand to SEQ ID NO: 277256
aguuagccuaaguuaucag

SEQ ID NO: 277258 - RNA, 19 nt, Artificial Sequence
  Description of Artificial Sequence: Synthetic oligonucleotide
  Sense strand starting at position 2188 of SEQ ID NO: 3562
aucauaauucuuggcagau

SEQ ID NO: 277259 - RNA, 19 nt, Artificial Sequence
  Description of Artificial Sequence: Synthetic oligonucleotide
  Antisense strand to SEQ ID NO: 277258
aucugccaagaauuaugau

SEQ ID NO: 277260 - RNA, 19 nt, Artificial Sequence
  Description of Artificial Sequence: Synthetic oligonucleotide
  Sense strand starting at position 2189 of SEQ ID NO: 3562
ucauaauucuuggcagaug

SEQ ID NO: 277261 - RNA, 19 nt, Artificial Sequence
  Description of Artificial Sequence: Synthetic oligonucleotide
  Antisense strand to SEQ ID NO: 277260
caucugccaagaauuauga

SEQ ID NO: 277262 - RNA, 19 nt, Artificial Sequence
  Description of Artificial Sequence: Synthetic oligonucleotide
  Sense strand starting at position 2192 of SEQ ID NO: 3562
uaauucuuggcagauguga

SEQ ID NO: 277263 - RNA, 19 nt, Artificial Sequence
  Description of Artificial Sequence: Synthetic oligonucleotide
  Antisense strand to SEQ ID NO: 277262
ucacaucugccaagaauua

SEQ ID NO: 277264 - RNA, 19 nt, Artificial Sequence
  Description of Artificial Sequence: Synthetic oligonucleotide
  Sense strand starting at position 2201 of SEQ ID NO: 3562
gcagaugugacuuaaaugu

SEQ ID NO: 277265 - RNA, 19 nt, Artificial Sequence
  Description of Artificial Sequence: Synthetic oligonucleotide
  Antisense strand to SEQ ID NO: 277264
acauuuaagucacaucugc

SEQ ID NO: 277266 - RNA, 19 nt, Artificial Sequence
  Description of Artificial Sequence: Synthetic oligonucleotide
  Sense strand starting at position 2397 of SEQ ID NO: 3562
ggucuuacauaauuaugaa

SEQ ID NO: 277267 - RNA, 19 nt, Artificial Sequence
  Description of Artificial Sequence: Synthetic oligonucleotide
  Antisense strand to SEQ ID NO: 277266
uucauaauuauguaagacc

SEQ ID NO: 277268 - RNA, 19 nt, Artificial Sequence
  Description of Artificial Sequence: Synthetic oligonucleotide
  Sense strand starting at position 2423 of SEQ ID NO: 3562
uugguauauauguggaaga

SEQ ID NO: 277269 - RNA, 19 nt, Artificial Sequence
  Description of Artificial Sequence: Synthetic oligonucleotide
  Antisense strand to SEQ ID NO: 277268
ucuuccacauauauaccaa

SEQ ID NO: 277270 - RNA, 19 nt, Artificial Sequence
  Description of Artificial Sequence: Synthetic oligonucleotide
  Sense strand starting at position 2486 of SEQ ID NO: 3562
gauuaauuauuguugagug

SEQ ID NO: 277271 - RNA, 19 nt, Artificial Sequence
  Description of Artificial Sequence: Synthetic oligonucleotide
  Antisense strand to SEQ ID NO: 277270
cacucaacaauaauuaauc

SEQ ID NO: 277272 - RNA, 19 nt, Artificial Sequence
  Description of Artificial Sequence: Synthetic oligonucleotide
  Sense strand starting at position 2616 of SEQ ID NO: 3562
ggagguucuaagcaacugu

SEQ ID NO: 277273 - RNA, 19 nt, Artificial Sequence
  Description of Artificial Sequence: Synthetic oligonucleotide
  Antisense strand to SEQ ID NO: 277272
acaguugcuuagaaccucc

SEQ ID NO: 277274 - RNA, 19 nt, Artificial Sequence
  Description of Artificial Sequence: Synthetic oligonucleotide
  Sense strand starting at position 2674 of SEQ ID NO: 3562
caauuugguucgguuccaa

SEQ ID NO: 277275 - RNA, 19 nt, Artificial Sequence
  Description of Artificial Sequence: Synthetic oligonucleotide
  Antisense strand to SEQ ID NO: 277274
uuggaaccgaaccaaauug

SEQ ID NO: 277276 - RNA, 19 nt, Artificial Sequence
  Description of Artificial Sequence: Synthetic oligonucleotide
  Sense strand starting at position 2841 of SEQ ID NO: 3562
gcuaauaaguaguuaagag

SEQ ID NO: 277277 - RNA, 19 nt, Artificial Sequence
  Description of Artificial Sequence: Synthetic oligonucleotide
  Antisense strand to SEQ ID NO: 277276
cucuuaacuacuuauuagc

SEQ ID NO: 277278 - RNA, 19 nt, Artificial Sequence
  Description of Artificial Sequence: Synthetic oligonucleotide
  Sense strand starting at position 3065 of SEQ ID NO: 3562
aggaauaaucuagguaugu

SEQ ID NO: 277279 - RNA, 19 nt, Artificial Sequence
  Description of Artificial Sequence: Synthetic oligonucleotide
  Antisense strand to SEQ ID NO: 277278
acauaccuagauuauuccu

SEQ ID NO: 277280 - RNA, 19 nt, Artificial Sequence
  Description of Artificial Sequence: Synthetic oligonucleotide
  Sense strand starting at position 3066 of SEQ ID NO: 3562
ggaauaaucuagguauguu

SEQ ID NO: 277281 - RNA, 19 nt, Artificial Sequence
  Description of Artificial Sequence: Synthetic oligonucleotide
  Antisense strand to SEQ ID NO: 277280
aacauaccuagauuauucc

SEQ ID NO: 277282 - RNA, 19 nt, Artificial Sequence
  Description of Artificial Sequence: Synthetic oligonucleotide
  Sense strand starting at position 3092 of SEQ ID NO: 3562
gcugaaugucauuauggaa

SEQ ID NO: 277283 - RNA, 19 nt, Artificial Sequence
  Description of Artificial Sequence: Synthetic oligonucleotide
  Antisense strand to SEQ ID NO: 277282
uuccauaaugacauucagc

SEQ ID NO: 277284 - RNA, 19 nt, Artificial Sequence
  Description of Artificial Sequence: Synthetic oligonucleotide
  Sense strand starting at position 3129 of SEQ ID NO: 3562
ccugguaucaaagguagaa

SEQ ID NO: 277285 - RNA, 19 nt, Artificial Sequence
  Description of Artificial Sequence: Synthetic oligonucleotide
  Antisense strand to SEQ ID NO: 277284
uucuaccuuugauaccagg

SEQ ID NO: 277286 - RNA, 19 nt, Artificial Sequence
  Description of Artificial Sequence: Synthetic oligonucleotide
  Sense strand starting at position 3259 of SEQ ID NO: 3562
aguuuacuagccgacacua

SEQ ID NO: 277287 - RNA, 19 nt, Artificial Sequence
  Description of Artificial Sequence: Synthetic oligonucleotide
  Antisense strand to SEQ ID NO: 277286
uagugucggcuaguaaacu

SEQ ID NO: 277288 - RNA, 19 nt, Artificial Sequence
  Description of Artificial Sequence: Synthetic oligonucleotide
  Sense strand starting at position 3419 of SEQ ID NO: 3562
ggguguucucaggagaacc

SEQ ID NO: 277289 - RNA, 19 nt, Artificial Sequence
  Description of Artificial Sequence: Synthetic oligonucleotide
  Antisense strand to SEQ ID NO: 277288
gguucuccugagaacaccc

SEQ ID NO: 277290 - RNA, 19 nt, Artificial Sequence
  Description of Artificial Sequence: Synthetic oligonucleotide
  Sense strand starting at position 3421 of SEQ ID NO: 3562
guguucucaggagaaccua

SEQ ID NO: 277291 - RNA, 19 nt, Artificial Sequence
  Description of Artificial Sequence: Synthetic oligonucleotide
  Antisense strand to SEQ ID NO: 277290
uagguucuccugagaacac

SEQ ID NO: 277292 - RNA, 19 nt, Artificial Sequence
  Description of Artificial Sequence: Synthetic oligonucleotide
  Sense strand starting at position 3429 of SEQ ID NO: 3562
aggagaaccuauucguuua

SEQ ID NO: 277293 - RNA, 19 nt, Artificial Sequence
  Description of Artificial Sequence: Synthetic oligonucleotide
  Antisense strand to SEQ ID NO: 277292
uaaacgaauagguucuccu

SEQ ID NO: 277294 - RNA, 19 nt, Artificial Sequence
  Description of Artificial Sequence: Synthetic oligonucleotide
  Sense strand starting at position 3841 of SEQ ID NO: 3562
ggcagauuucgccaucuuu

SEQ ID NO: 277295 - RNA, 19 nt, Artificial Sequence
  Description of Artificial Sequence: Synthetic oligonucleotide
  Antisense strand to SEQ ID NO: 277294
aaagauggcgaaaucugcc

SEQ ID NO: 277296 - RNA, 19 nt, Artificial Sequence
  Description of Artificial Sequence: Synthetic oligonucleotide
  Sense strand starting at position 3893 of SEQ ID NO: 3562
uucuuuagucucgaaauau

SEQ ID NO: 277297 - RNA, 19 nt, Artificial Sequence
  Description of Artificial Sequence: Synthetic oligonucleotide
  Antisense strand to SEQ ID NO: 277296
auauuucgagacuaaagaa

SEQ ID NO: 277298 - RNA, 19 nt, Artificial Sequence
  Description of Artificial Sequence: Synthetic oligonucleotide
  Sense strand starting at position 3936 of SEQ ID NO: 3562
ucuucugagcucgagauga

SEQ ID NO: 277299 - RNA, 19 nt, Artificial Sequence
  Description of Artificial Sequence: Synthetic oligonucleotide
  Antisense strand to SEQ ID NO: 277298
ucaucucgagcucagaaga

SEQ ID NO: 277300 - RNA, 19 nt, Artificial Sequence
  Description of Artificial Sequence: Synthetic oligonucleotide
  Sense strand starting at position 3938 of SEQ ID NO: 3562
uucugagcucgagaugaag

SEQ ID NO: 277301 - RNA, 19 nt, Artificial Sequence
  Description of Artificial Sequence: Synthetic oligonucleotide
  Antisense strand to SEQ ID NO: 277300
cuucaucucgagcucagaa

SEQ ID NO: 277302 - RNA, 19 nt, Artificial Sequence
  Description of Artificial Sequence: Synthetic oligonucleotide
  Sense strand starting at position 5 of SEQ ID NO: 3565
gugguuacucucuauauaa

SEQ ID NO: 277303 - RNA, 19 nt, Artificial Sequence
  Description of Artificial Sequence: Synthetic oligonucleotide
  Antisense strand to SEQ ID NO: 277302
uuauauagagaguaaccac

SEQ ID NO: 277304 - RNA, 19 nt, Artificial Sequence
  Description of Artificial Sequence: Synthetic oligonucleotide
  Sense strand starting at position 27 of SEQ ID NO: 3565
caaucagguccuuaagguu

SEQ ID NO: 277305 - RNA, 19 nt, Artificial Sequence
  Description of Artificial Sequence: Synthetic oligonucleotide
  Antisense strand to SEQ ID NO: 277304
aaccuuaaggaccugauug

SEQ ID NO: 277306 - RNA, 19 nt, Artificial Sequence
  Description of Artificial Sequence: Synthetic oligonucleotide
  Sense strand starting at position 78 of SEQ ID NO: 3565
aguacaauacucugacagu

SEQ ID NO: 277307 - RNA, 19 nt, Artificial Sequence
  Description of Artificial Sequence: Synthetic oligonucleotide
  Antisense strand to SEQ ID NO: 277306
acugucagaguauuguacu

SEQ ID NO: 277308 - RNA, 19 nt, Artificial Sequence
  Description of Artificial Sequence: Synthetic oligonucleotide
  Sense strand starting at position 93 of SEQ ID NO: 3565
cagugucuuccugaaugac

SEQ ID NO: 277309 - RNA, 19 nt, Artificial Sequence
  Description of Artificial Sequence: Synthetic oligonucleotide
  Antisense strand to SEQ ID NO: 277308
gucauucaggaagacacug

SEQ ID NO: 277310 - RNA, 19 nt, Artificial Sequence
  Description of Artificial Sequence: Synthetic oligonucleotide
  Sense strand starting at position 96 of SEQ ID NO: 3565
ugucuuccugaaugacuca

SEQ ID NO: 277311 - RNA, 19 nt, Artificial Sequence
  Description of Artificial Sequence: Synthetic oligonucleotide
  Antisense strand to SEQ ID NO: 277310
ugagucauucaggaagaca

SEQ ID NO: 277312 - RNA, 19 nt, Artificial Sequence
  Description of Artificial Sequence: Synthetic oligonucleotide
  Sense strand starting at position 275 of SEQ ID NO: 3565
gccgaauuauacuuugaaa

SEQ ID NO: 277313 - RNA, 19 nt, Artificial Sequence
  Description of Artificial Sequence: Synthetic oligonucleotide
  Antisense strand to SEQ ID NO: 277312
uuucaaaguauaauucggc

SEQ ID NO: 277314 - RNA, 19 nt, Artificial Sequence
  Description of Artificial Sequence: Synthetic oligonucleotide
  Sense strand starting at position 277 of SEQ ID NO: 3565
cgaauuauacuuugaaaug

SEQ ID NO: 277315 - RNA, 19 nt, Artificial Sequence
  Description of Artificial Sequence: Synthetic oligonucleotide
  Antisense strand to SEQ ID NO: 277314
cauuucaaaguauaauucg

SEQ ID NO: 277316 - RNA, 19 nt, Artificial Sequence
  Description of Artificial Sequence: Synthetic oligonucleotide
  Sense strand starting at position 864 of SEQ ID NO: 3565
cugauaucuuggguuuauu

SEQ ID NO: 277317 - RNA, 19 nt, Artificial Sequence
  Description of Artificial Sequence: Synthetic oligonucleotide
  Antisense strand to SEQ ID NO: 277316
aauaaacccaagauaucag

SEQ ID NO: 277318 - RNA, 19 nt, Artificial Sequence
  Description of Artificial Sequence: Synthetic oligonucleotide
  Sense strand starting at position 876 of SEQ ID NO: 3565
guuuauucugaagacacuu

SEQ ID NO: 277319 - RNA, 19 nt, Artificial Sequence
  Description of Artificial Sequence: Synthetic oligonucleotide
  Antisense strand to SEQ ID NO: 277318
aagugucuucagaauaaac

SEQ ID NO: 277320 - RNA, 19 nt, Artificial Sequence
  Description of Artificial Sequence: Synthetic oligonucleotide
  Sense strand starting at position 889 of SEQ ID NO: 3565
acacuugguuaggugauau

SEQ ID NO: 277321 - RNA, 19 nt, Artificial Sequence
  Description of Artificial Sequence: Synthetic oligonucleotide
  Antisense strand to SEQ ID NO: 277320
auaucaccuaaccaagugu

SEQ ID NO: 277322 - RNA, 19 nt, Artificial Sequence
  Description of Artificial Sequence: Synthetic oligonucleotide
  Sense strand starting at position 929 of SEQ ID NO: 3565
uaacaaugaucagcgaagu

SEQ ID NO: 277323 - RNA, 19 nt, Artificial Sequence
  Description of Artificial Sequence: Synthetic oligonucleotide
  Antisense strand to SEQ ID NO: 277322
acuucgcugaucauuguua

SEQ ID NO: 277324 - RNA, 19 nt, Artificial Sequence
  Description of Artificial Sequence: Synthetic oligonucleotide
  Sense strand starting at position 930 of SEQ ID NO: 3565
aacaaugaucagcgaaguu

SEQ ID NO: 277325 - RNA, 19 nt, Artificial Sequence
  Description of Artificial Sequence: Synthetic oligonucleotide
  Antisense strand to SEQ ID NO: 277324
aacuucgcugaucauuguu

SEQ ID NO: 277326 - RNA, 19 nt, Artificial Sequence
  Description of Artificial Sequence: Synthetic oligonucleotide
  Sense strand starting at position 1124 of SEQ ID NO: 3565
uucucagaguaacuaagau

SEQ ID NO: 277327 - RNA, 19 nt, Artificial Sequence
  Description of Artificial Sequence: Synthetic oligonucleotide
  Antisense strand to SEQ ID NO: 277326
aucuuaguuacucugagaa

SEQ ID NO: 277328 - RNA, 19 nt, Artificial Sequence
  Description of Artificial Sequence: Synthetic oligonucleotide
  Sense strand starting at position 1207 of SEQ ID NO: 3565
cugauaacuuaggcuaacu

SEQ ID NO: 277329 - RNA, 19 nt, Artificial Sequence
  Description of Artificial Sequence: Synthetic oligonucleotide
  Antisense strand to SEQ ID NO: 277328
aguuagccuaaguuaucag

SEQ ID NO: 277330 - RNA, 19 nt, Artificial Sequence
  Description of Artificial Sequence: Synthetic oligonucleotide
  Sense strand starting at position 1263 of SEQ ID NO: 3565
aucauaauucuuggcagau

SEQ ID NO: 277331 - RNA, 19 nt, Artificial Sequence
  Description of Artificial Sequence: Synthetic oligonucleotide
  Antisense strand to SEQ ID NO: 277330
aucugccaagaauuaugau

SEQ ID NO: 277332 - RNA, 19 nt, Artificial Sequence
  Description of Artificial Sequence: Synthetic oligonucleotide
  Sense strand starting at position 1264 of SEQ ID NO: 3565
ucauaauucuuggcagaug

SEQ ID NO: 277333 - RNA, 19 nt, Artificial Sequence
  Description of Artificial Sequence: Synthetic oligonucleotide
  Antisense strand to SEQ ID NO: 277332
caucugccaagaauuauga

SEQ ID NO: 277334 - RNA, 19 nt, Artificial Sequence
  Description of Artificial Sequence: Synthetic oligonucleotide
  Sense strand starting at position 1267 of SEQ ID NO: 3565
uaauucuuggcagauguga

SEQ ID NO: 277335 - RNA, 19 nt, Artificial Sequence
  Description of Artificial Sequence: Synthetic oligonucleotide
  Antisense strand to SEQ ID NO: 277334
ucacaucugccaagaauua

SEQ ID NO: 277336 - RNA, 19 nt, Artificial Sequence
  Description of Artificial Sequence: Synthetic oligonucleotide
  Sense strand starting at position 1276 of SEQ ID NO: 3565
gcagaugugacuuaaaugu

SEQ ID NO: 277337 - RNA, 19 nt, Artificial Sequence
  Description of Artificial Sequence: Synthetic oligonucleotide
  Antisense strand to SEQ ID NO: 277336
acauuuaagucacaucugc

SEQ ID NO: 277338 - RNA, 19 nt, Artificial Sequence
  Description of Artificial Sequence: Synthetic oligonucleotide
  Sense strand starting at position 1472 of SEQ ID NO: 3565
ggucuuacauaauuaugaa

SEQ ID NO: 277339 - RNA, 19 nt, Artificial Sequence
  Description of Artificial Sequence: Synthetic oligonucleotide
  Antisense strand to SEQ ID NO: 277338
uucauaauuauguaagacc

SEQ ID NO: 277340 - RNA, 19 nt, Artificial Sequence
  Description of Artificial Sequence: Synthetic oligonucleotide
  Sense strand starting at position 1498 of SEQ ID NO: 3565
uugguauauauguggaaga

SEQ ID NO: 277341 - RNA, 19 nt, Artificial Sequence
  Description of Artificial Sequence: Synthetic oligonucleotide
  Antisense strand to SEQ ID NO: 277340
ucuuccacauauauaccaa

SEQ ID NO: 277342 - RNA, 19 nt, Artificial Sequence
  Description of Artificial Sequence: Synthetic oligonucleotide
  Sense strand starting at position 1561 of SEQ ID NO: 3565
gauuaauuauuguugagug

SEQ ID NO: 277343 - RNA, 19 nt, Artificial Sequence
  Description of Artificial Sequence: Synthetic oligonucleotide
  Antisense strand to SEQ ID NO: 277342
cacucaacaauaauuaauc

SEQ ID NO: 277344 - RNA, 19 nt, Artificial Sequence
  Description of Artificial Sequence: Synthetic oligonucleotide
  Sense strand starting at position 1691 of SEQ ID NO: 3565
ggagguucuaagcaacugu

SEQ ID NO: 277345 - RNA, 19 nt, Artificial Sequence
  Description of Artificial Sequence: Synthetic oligonucleotide
  Antisense strand to SEQ ID NO: 277344
acaguugcuuagaaccucc

SEQ ID NO: 277346 - RNA, 19 nt, Artificial Sequence
  Description of Artificial Sequence: Synthetic oligonucleotide
  Sense strand starting at position 1725 of SEQ ID NO: 3565
caguaagcuguauagcaaa

SEQ ID NO: 277347 - RNA, 19 nt, Artificial Sequence
  Description of Artificial Sequence: Synthetic oligonucleotide
  Antisense strand to SEQ ID NO: 277346
uuugcuauacagcuuacug

SEQ ID NO: 277348 - RNA, 19 nt, Artificial Sequence
  Description of Artificial Sequence: Synthetic oligonucleotide
  Sense strand starting at position 1749 of SEQ ID NO: 3565
caauuugguucgguuccaa

SEQ ID NO: 277349 - RNA, 19 nt, Artificial Sequence
  Description of Artificial Sequence: Synthetic oligonucleotide
  Antisense strand to SEQ ID NO: 277348
uuggaaccgaaccaaauug

SEQ ID NO: 277350 - RNA, 19 nt, Artificial Sequence
  Description of Artificial Sequence: Synthetic oligonucleotide
  Sense strand starting at position 1916 of SEQ ID NO: 3565
gcuaauaaguaguuaagag

SEQ ID NO: 277351 - RNA, 19 nt, Artificial Sequence
  Description of Artificial Sequence: Synthetic oligonucleotide
  Antisense strand to SEQ ID NO: 277350
cucuuaacuacuuauuagc

SEQ ID NO: 277352 - RNA, 19 nt, Artificial Sequence
  Description of Artificial Sequence: Synthetic oligonucleotide
  Sense strand starting at position 2140 of SEQ ID NO: 3565
aggaauaaucuagguaugu

SEQ ID NO: 277353 - RNA, 19 nt, Artificial Sequence
  Description of Artificial Sequence: Synthetic oligonucleotide
  Antisense strand to SEQ ID NO: 277352
acauaccuagauuauuccu

SEQ ID NO: 277354 - RNA, 19 nt, Artificial Sequence
  Description of Artificial Sequence: Synthetic oligonucleotide
  Sense strand starting at position 2141 of SEQ ID NO: 3565
ggaauaaucuagguauguu

SEQ ID NO: 277355 - RNA, 19 nt, Artificial Sequence
  Description of Artificial Sequence: Synthetic oligonucleotide
  Antisense strand to SEQ ID NO: 277354
aacauaccuagauuauucc

SEQ ID NO: 277356 - RNA, 19 nt, Artificial Sequence
  Description of Artificial Sequence: Synthetic oligonucleotide
  Sense strand starting at position 2167 of SEQ ID NO: 3565
gcugaaugucauuauggaa

SEQ ID NO: 277357 - RNA, 19 nt, Artificial Sequence
  Description of Artificial Sequence: Synthetic oligonucleotide
  Antisense strand to SEQ ID NO: 277356
uuccauaaugacauucagc

SEQ ID NO: 277358 - RNA, 19 nt, Artificial Sequence
  Description of Artificial Sequence: Synthetic oligonucleotide
  Sense strand starting at position 2204 of SEQ ID NO: 3565
ccugguaucaaagguagaa

SEQ ID NO: 277359 - RNA, 19 nt, Artificial Sequence
  Description of Artificial Sequence: Synthetic oligonucleotide
  Antisense strand to SEQ ID NO: 277358
uucuaccuuugauaccagg

SEQ ID NO: 277360 - RNA, 19 nt, Artificial Sequence
  Description of Artificial Sequence: Synthetic oligonucleotide
  Sense strand starting at position 2334 of SEQ ID NO: 3565
aguuuacuagccgacacua

SEQ ID NO: 277361 - RNA, 19 nt, Artificial Sequence
  Description of Artificial Sequence: Synthetic oligonucleotide
  Antisense strand to SEQ ID NO: 277360
uagugucggcuaguaaacu

SEQ ID NO: 277362 - RNA, 19 nt, Artificial Sequence
  Description of Artificial Sequence: Synthetic oligonucleotide
  Sense strand starting at position 2494 of SEQ ID NO: 3565
ggguguucucaggagaacc

SEQ ID NO: 277363 - RNA, 19 nt, Artificial Sequence
  Description of Artificial Sequence: Synthetic oligonucleotide
  Antisense strand to SEQ ID NO: 277362
gguucuccugagaacaccc

SEQ ID NO: 277364 - RNA, 19 nt, Artificial Sequence
  Description of Artificial Sequence: Synthetic oligonucleotide
  Sense strand starting at position 2496 of SEQ ID NO: 3565
guguucucaggagaaccua

SEQ ID NO: 277365 - RNA, 19 nt, Artificial Sequence
  Description of Artificial Sequence: Synthetic oligonucleotide
  Antisense strand to SEQ ID NO: 277364
uagguucuccugagaacac

SEQ ID NO: 277366 - RNA, 19 nt, Artificial Sequence
  Description of Artificial Sequence: Synthetic oligonucleotide
  Sense strand starting at position 2504 of SEQ ID NO: 3565
aggagaaccuauucguuua

SEQ ID NO: 277367 - RNA, 19 nt, Artificial Sequence
  Description of Artificial Sequence: Synthetic oligonucleotide
  Antisense strand to SEQ ID NO: 277366
uaaacgaauagguucuccu

SEQ ID NO: 277368 - RNA, 19 nt, Artificial Sequence
  Description of Artificial Sequence: Synthetic oligonucleotide
  Sense strand starting at position 2916 of SEQ ID NO: 3565
ggcagauuucgccaucuuu

SEQ ID NO: 277369 - RNA, 19 nt, Artificial Sequence
  Description of Artificial Sequence: Synthetic oligonucleotide
  Antisense strand to SEQ ID NO: 277368
aaagauggcgaaaucugcc

SEQ ID NO: 277370 - RNA, 19 nt, Artificial Sequence
  Description of Artificial Sequence: Synthetic oligonucleotide
  Sense strand starting at position 2968 of SEQ ID NO: 3565
uucuuuagucucgaaauau

SEQ ID NO: 277371 - RNA, 19 nt, Artificial Sequence
  Description of Artificial Sequence: Synthetic oligonucleotide
  Antisense strand to SEQ ID NO: 277370
auauuucgagacuaaagaa

SEQ ID NO: 277372 - RNA, 19 nt, Artificial Sequence
  Description of Artificial Sequence: Synthetic oligonucleotide
  Sense strand starting at position 3011 of SEQ ID NO: 3565
ucuucugagcucgagauga

SEQ ID NO: 277373 - RNA, 19 nt, Artificial Sequence
  Description of Artificial Sequence: Synthetic oligonucleotide
  Antisense strand to SEQ ID NO: 277372
ucaucucgagcucagaaga

SEQ ID NO: 277374 - RNA, 19 nt, Artificial Sequence
  Description of Artificial Sequence: Synthetic oligonucleotide
  Sense strand starting at position 3013 of SEQ ID NO: 3565
uucugagcucgagaugaag

SEQ ID NO: 277375 - RNA, 19 nt, Artificial Sequence
  Description of Artificial Sequence: Synthetic oligonucleotide
  Antisense strand to SEQ ID NO: 277374
cuucaucucgagcucagaa

SEQ ID NO: 277376 - RNA, 19 nt, Artificial Sequence
  Description of Artificial Sequence: Synthetic oligonucleotide
  Sense strand starting at position 3113 of SEQ ID NO: 3565
gauggcuaccagcaagaau

SEQ ID NO: 277377 - RNA, 19 nt, Artificial Sequence
  Description of Artificial Sequence: Synthetic oligonucleotide
  Antisense strand to SEQ ID NO: 277376
auucuugcugguagccauc

SEQ ID NO: 277378 - RNA, 19 nt, Artificial Sequence
  Description of Artificial Sequence: Synthetic oligonucleotide
  Sense strand starting at position 3570 of SEQ ID NO: 3565
gggagacccuucucaguuu

SEQ ID NO: 277379 - RNA, 19 nt, Artificial Sequence
  Description of Artificial Sequence: Synthetic oligonucleotide
  Antisense strand to SEQ ID NO: 277378
aaacugagaagggucuccc

SEQ ID NO: 277380 - RNA, 19 nt, Artificial Sequence
  Description of Artificial Sequence: Synthetic oligonucleotide
  Sense strand starting at position 3698 of SEQ ID NO: 3565
ggaaacucagaucgaagua

SEQ ID NO: 277381 - RNA, 19 nt, Artificial Sequence
  Description of Artificial Sequence: Synthetic oligonucleotide
  Antisense strand to SEQ ID NO: 277380
uacuucgaucugaguuucc

SEQ ID NO: 277382 - RNA, 19 nt, Artificial Sequence
  Description of Artificial Sequence: Synthetic oligonucleotide
  Sense strand starting at position 2 of SEQ ID NO: 3564
acacuugguuaggugauau

SEQ ID NO: 277383 - RNA, 19 nt, Artificial Sequence
  Description of Artificial Sequence: Synthetic oligonucleotide
  Antisense strand to SEQ ID NO: 277382
auaucaccuaaccaagugu

SEQ ID NO: 277384 - RNA, 19 nt, Artificial Sequence
  Description of Artificial Sequence: Synthetic oligonucleotide
  Sense strand starting at position 42 of SEQ ID NO: 3564
uaacaaugaucagcgaagu

SEQ ID NO: 277385 - RNA, 19 nt, Artificial Sequence
  Description of Artificial Sequence: Synthetic oligonucleotide
  Antisense strand to SEQ ID NO: 277384
acuucgcugaucauuguua

SEQ ID NO: 277386 - RNA, 19 nt, Artificial Sequence
  Description of Artificial Sequence: Synthetic oligonucleotide
  Sense strand starting at position 43 of SEQ ID NO: 3564
aacaaugaucagcgaaguu

SEQ ID NO: 277387 - RNA, 19 nt, Artificial Sequence
  Description of Artificial Sequence: Synthetic oligonucleotide
  Antisense strand to SEQ ID NO: 277386
aacuucgcugaucauuguu

SEQ ID NO: 277388 - RNA, 19 nt, Artificial Sequence
  Description of Artificial Sequence: Synthetic oligonucleotide
  Sense strand starting at position 237 of SEQ ID NO: 3564
uucucagaguaacuaagau

SEQ ID NO: 277389 - RNA, 19 nt, Artificial Sequence
  Description of Artificial Sequence: Synthetic oligonucleotide
  Antisense strand to SEQ ID NO: 277388
aucuuaguuacucugagaa

SEQ ID NO: 277390 - RNA, 19 nt, Artificial Sequence
  Description of Artificial Sequence: Synthetic oligonucleotide
  Sense strand starting at position 320 of SEQ ID NO: 3564
cugauaacuuaggcuaacu

SEQ ID NO: 277391 - RNA, 19 nt, Artificial Sequence
  Description of Artificial Sequence: Synthetic oligonucleotide
  Antisense strand to SEQ ID NO: 277390
aguuagccuaaguuaucag

SEQ ID NO: 277392 - RNA, 19 nt, Artificial Sequence
  Description of Artificial Sequence: Synthetic oligonucleotide
  Sense strand starting at position 376 of SEQ ID NO: 3564
aucauaauucuuggcagau

SEQ ID NO: 277393 - RNA, 19 nt, Artificial Sequence
  Description of Artificial Sequence: Synthetic oligonucleotide
  Antisense strand to SEQ ID NO: 277392
aucugccaagaauuaugau

SEQ ID NO: 277394 - RNA, 19 nt, Artificial Sequence
  Description of Artificial Sequence: Synthetic oligonucleotide
  Sense strand starting at position 377 of SEQ ID NO: 3564
ucauaauucuuggcagaug

SEQ ID NO: 277395 - RNA, 19 nt, Artificial Sequence
  Description of Artificial Sequence: Synthetic oligonucleotide
  Antisense strand to SEQ ID NO: 277394
caucugccaagaauuauga

SEQ ID NO: 277396 - RNA, 19 nt, Artificial Sequence
  Description of Artificial Sequence: Synthetic oligonucleotide
  Sense strand starting at position 380 of SEQ ID NO: 3564
uaauucuuggcagauguga

SEQ ID NO: 277397 - RNA, 19 nt, Artificial Sequence
  Description of Artificial Sequence: Synthetic oligonucleotide
  Antisense strand to SEQ ID NO: 277396
ucacaucugccaagaauua

SEQ ID NO: 277398 - RNA, 19 nt, Artificial Sequence
  Description of Artificial Sequence: Synthetic oligonucleotide
  Sense strand starting at position 389 of SEQ ID NO: 3564
gcagaugugacuuaaaugu

SEQ ID NO: 277399 - RNA, 19 nt, Artificial Sequence
  Description of Artificial Sequence: Synthetic oligonucleotide
  Antisense strand to SEQ ID NO: 277398
acauuuaagucacaucugc

SEQ ID NO: 277400 - RNA, 19 nt, Artificial Sequence
  Description of Artificial Sequence: Synthetic oligonucleotide
  Sense strand starting at position 585 of SEQ ID NO: 3564
ggucuuacauaauuaugaa

SEQ ID NO: 277401 - RNA, 19 nt, Artificial Sequence
  Description of Artificial Sequence: Synthetic oligonucleotide
  Antisense strand to SEQ ID NO: 277400
uucauaauuauguaagacc

SEQ ID NO: 277402 - RNA, 19 nt, Artificial Sequence
  Description of Artificial Sequence: Synthetic oligonucleotide
  Sense strand starting at position 611 of SEQ ID NO: 3564
uugguauauauguggaaga

SEQ ID NO: 277403 - RNA, 19 nt, Artificial Sequence
  Description of Artificial Sequence: Synthetic oligonucleotide
  Antisense strand to SEQ ID NO: 277402
ucuuccacauauauaccaa

SEQ ID NO: 277404 - RNA, 19 nt, Artificial Sequence
  Description of Artificial Sequence: Synthetic oligonucleotide
  Sense strand starting at position 674 of SEQ ID NO: 3564
gauuaauuauuguugagug

SEQ ID NO: 277405 - RNA, 19 nt, Artificial Sequence
  Description of Artificial Sequence: Synthetic oligonucleotide
  Antisense strand to SEQ ID NO: 277404
cacucaacaauaauuaauc

SEQ ID NO: 277406 - RNA, 19 nt, Artificial Sequence
  Description of Artificial Sequence: Synthetic oligonucleotide
  Sense strand starting at position 804 of SEQ ID NO: 3564
ggagguucuaagcaacugu

SEQ ID NO: 277407 - RNA, 19 nt, Artificial Sequence
  Description of Artificial Sequence: Synthetic oligonucleotide
  Antisense strand to SEQ ID NO: 277406
acaguugcuuagaaccucc

SEQ ID NO: 277408 - RNA, 19 nt, Artificial Sequence
  Description of Artificial Sequence: Synthetic oligonucleotide
  Sense strand starting at position 862 of SEQ ID NO: 3564
caauuugguucgguuccaa

SEQ ID NO: 277409 - RNA, 19 nt, Artificial Sequence
  Description of Artificial Sequence: Synthetic oligonucleotide
  Antisense strand to SEQ ID NO: 277408
uuggaaccgaaccaaauug

SEQ ID NO: 277410 - RNA, 19 nt, Artificial Sequence
  Description of Artificial Sequence: Synthetic oligonucleotide
  Sense strand starting at position 1029 of SEQ ID NO: 3564
gcuaauaaguaguuaagag

SEQ ID NO: 277411 - RNA, 19 nt, Artificial Sequence
  Description of Artificial Sequence: Synthetic oligonucleotide
  Antisense strand to SEQ ID NO: 277410
cucuuaacuacuuauuagc

SEQ ID NO: 277412 - RNA, 19 nt, Artificial Sequence
  Description of Artificial Sequence: Synthetic oligonucleotide
  Sense strand starting at position 1253 of SEQ ID NO: 3564
aggaauaaucuagguaugu

SEQ ID NO: 277413 - RNA, 19 nt, Artificial Sequence
  Description of Artificial Sequence: Synthetic oligonucleotide
  Antisense strand to SEQ ID NO: 277412
acauaccuagauuauuccu

SEQ ID NO: 277414 - RNA, 19 nt, Artificial Sequence
  Description of Artificial Sequence: Synthetic oligonucleotide
  Sense strand starting at position 1254 of SEQ ID NO: 3564
ggaauaaucuagguauguu

SEQ ID NO: 277415 - RNA, 19 nt, Artificial Sequence
  Description of Artificial Sequence: Synthetic oligonucleotide
  Antisense strand to SEQ ID NO: 277414
aacauaccuagauuauucc

SEQ ID NO: 277416 - RNA, 19 nt, Artificial Sequence
  Description of Artificial Sequence: Synthetic oligonucleotide
  Sense strand starting at position 1280 of SEQ ID NO: 3564
gcugaaugucauuauggaa

SEQ ID NO: 277417 - RNA, 19 nt, Artificial Sequence
  Description of Artificial Sequence: Synthetic oligonucleotide
  Antisense strand to SEQ ID NO: 277416
uuccauaaugacauucagc

SEQ ID NO: 277418 - RNA, 19 nt, Artificial Sequence
  Description of Artificial Sequence: Synthetic oligonucleotide
  Sense strand starting at position 1317 of SEQ ID NO: 3564
ccugguaucaaagguagaa

SEQ ID NO: 277419 - RNA, 19 nt, Artificial Sequence
  Description of Artificial Sequence: Synthetic oligonucleotide
  Antisense strand to SEQ ID NO: 277418
uucuaccuuugauaccagg

SEQ ID NO: 277420 - RNA, 19 nt, Artificial Sequence
  Description of Artificial Sequence: Synthetic oligonucleotide
  Sense strand starting at position 1447 of SEQ ID NO: 3564
aguuuacuagccgacacua

SEQ ID NO: 277421 - RNA, 19 nt, Artificial Sequence
  Description of Artificial Sequence: Synthetic oligonucleotide
  Antisense strand to SEQ ID NO: 277420
uagugucggcuaguaaacu

SEQ ID NO: 277422 - RNA, 19 nt, Artificial Sequence
  Description of Artificial Sequence: Synthetic oligonucleotide
  Sense strand starting at position 1607 of SEQ ID NO: 3564
ggguguucucaggagaacc

SEQ ID NO: 277423 - RNA, 19 nt, Artificial Sequence
  Description of Artificial Sequence: Synthetic oligonucleotide
  Antisense strand to SEQ ID NO: 277422
gguucuccugagaacaccc

SEQ ID NO: 277424 - RNA, 19 nt, Artificial Sequence
  Description of Artificial Sequence: Synthetic oligonucleotide
  Sense strand starting at position 1609 of SEQ ID NO: 3564
guguucucaggagaaccua

SEQ ID NO: 277425 - RNA, 19 nt, Artificial Sequence
  Description of Artificial Sequence: Synthetic oligonucleotide
  Antisense strand to SEQ ID NO: 277424
uagguucuccugagaacac

SEQ ID NO: 277426 - RNA, 19 nt, Artificial Sequence
  Description of Artificial Sequence: Synthetic oligonucleotide
  Sense strand starting at position 1617 of SEQ ID NO: 3564
aggagaaccuauucguuua

SEQ ID NO: 277427 - RNA, 19 nt, Artificial Sequence
  Description of Artificial Sequence: Synthetic oligonucleotide
  Antisense strand to SEQ ID NO: 277426
uaaacgaauagguucuccu

SEQ ID NO: 277428 - RNA, 19 nt, Artificial Sequence
  Description of Artificial Sequence: Synthetic oligonucleotide
  Sense strand starting at position 2029 of SEQ ID NO: 3564
ggcagauuucgccaucuuu

SEQ ID NO: 277429 - RNA, 19 nt, Artificial Sequence
  Description of Artificial Sequence: Synthetic oligonucleotide
  Antisense strand to SEQ ID NO: 277428
aaagauggcgaaaucugcc

SEQ ID NO: 277430 - RNA, 19 nt, Artificial Sequence
  Description of Artificial Sequence: Synthetic oligonucleotide
  Sense strand starting at position 2081 of SEQ ID NO: 3564
uucuuuagucucgaaauau

SEQ ID NO: 277431 - RNA, 19 nt, Artificial Sequence
  Description of Artificial Sequence: Synthetic oligonucleotide
  Antisense strand to SEQ ID NO: 277430
auauuucgagacuaaagaa

SEQ ID NO: 277432 - RNA, 19 nt, Artificial Sequence
  Description of Artificial Sequence: Synthetic oligonucleotide
  Sense strand starting at position 2124 of SEQ ID NO: 3564
ucuucugagcucgagauga

SEQ ID NO: 277433 - RNA, 19 nt, Artificial Sequence
  Description of Artificial Sequence: Synthetic oligonucleotide
  Antisense strand to SEQ ID NO: 277432
ucaucucgagcucagaaga

SEQ ID NO: 277434 - RNA, 19 nt, Artificial Sequence
  Description of Artificial Sequence: Synthetic oligonucleotide
  Sense strand starting at position 2126 of SEQ ID NO: 3564
uucugagcucgagaugaag

SEQ ID NO: 277435 - RNA, 19 nt, Artificial Sequence
  Description of Artificial Sequence: Synthetic oligonucleotide
  Antisense strand to SEQ ID NO: 277434
cuucaucucgagcucagaa

SEQ ID NO: 277436 - RNA, 19 nt, Artificial Sequence
  Description of Artificial Sequence: Synthetic oligonucleotide
  Sense strand starting at position 2226 of SEQ ID NO: 3564
gauggcuaccagcaagaau

SEQ ID NO: 277437 - RNA, 19 nt, Artificial Sequence
  Description of Artificial Sequence: Synthetic oligonucleotide
  Antisense strand to SEQ ID NO: 277436
auucuugcugguagccauc

SEQ ID NO: 277438 - RNA, 19 nt, Artificial Sequence
  Description of Artificial Sequence: Synthetic oligonucleotide
  Sense strand starting at position 2683 of SEQ ID NO: 3564
gggagacccuucucaguuu

SEQ ID NO: 277439 - RNA, 19 nt, Artificial Sequence
  Description of Artificial Sequence: Synthetic oligonucleotide
  Antisense strand to SEQ ID NO: 277438
aaacugagaagggucuccc

SEQ ID NO: 277440 - RNA, 19 nt, Artificial Sequence
  Description of Artificial Sequence: Synthetic oligonucleotide
  Sense strand starting at position 2811 of SEQ ID NO: 3564
ggaaacucagaucgaagua

SEQ ID NO: 277441 - RNA, 19 nt, Artificial Sequence
  Description of Artificial Sequence: Synthetic oligonucleotide
  Antisense strand to SEQ ID NO: 277440
uacuucgaucugaguuucc

SEQ ID NO: 277442 - RNA, 19 nt, Artificial Sequence
  Description of Artificial Sequence: Synthetic oligonucleotide
  Sense strand starting at position 3202 of SEQ ID NO: 3564
agucaaaguguguucguuu

SEQ ID NO: 277443 - RNA, 19 nt, Artificial Sequence
  Description of Artificial Sequence: Synthetic oligonucleotide
  Antisense strand to SEQ ID NO: 277442
aaacgaacacacuuugacu

SEQ ID NO: 277444 - RNA, 19 nt, Artificial Sequence
  Description of Artificial Sequence: Synthetic oligonucleotide
  Sense strand starting at position 3367 of SEQ ID NO: 3564
caguguuaugccucugccu

SEQ ID NO: 277445 - RNA, 19 nt, Artificial Sequence
  Description of Artificial Sequence: Synthetic oligonucleotide
  Antisense strand to SEQ ID NO: 277444
aggcagaggcauaacacug

SEQ ID NO: 277446 - RNA, 19 nt, Artificial Sequence
  Description of Artificial Sequence: Synthetic oligonucleotide
  Sense strand starting at position 3404 of SEQ ID NO: 3564
cuuuacucaggaggacauu

SEQ ID NO: 277447 - RNA, 19 nt, Artificial Sequence
  Description of Artificial Sequence: Synthetic oligonucleotide
  Antisense strand to SEQ ID NO: 277446
aauguccuccugaguaaag

SEQ ID NO: 277448 - RNA, 19 nt, Artificial Sequence
  Description of Artificial Sequence: Synthetic oligonucleotide
  Sense strand starting at position 3428 of SEQ ID NO: 3564
auuucugacaguuguguuu

SEQ ID NO: 277449 - RNA, 19 nt, Artificial Sequence
  Description of Artificial Sequence: Synthetic oligonucleotide
  Antisense strand to SEQ ID NO: 277448
aaacacaacugucagaaau

SEQ ID NO: 277450 - RNA, 19 nt, Artificial Sequence
  Description of Artificial Sequence: Synthetic oligonucleotide
  Sense strand starting at position 3469 of SEQ ID NO: 3564
gccacuuuacuugagauug

SEQ ID NO: 277451 - RNA, 19 nt, Artificial Sequence
  Description of Artificial Sequence: Synthetic oligonucleotide
  Antisense strand to SEQ ID NO: 277450
caaucucaaguaaaguggc

SEQ ID NO: 277452 - RNA, 19 nt, Artificial Sequence
  Description of Artificial Sequence: Synthetic oligonucleotide
  Sense strand starting at position 3567 of SEQ ID NO: 3564
agaguuaugaguuaaguag

SEQ ID NO: 277453 - RNA, 19 nt, Artificial Sequence
  Description of Artificial Sequence: Synthetic oligonucleotide
  Antisense strand to SEQ ID NO: 277452
cuacuuaacucauaacucu

SEQ ID NO: 277454 - RNA, 19 nt, Artificial Sequence
  Description of Artificial Sequence: Synthetic oligonucleotide
  Sense strand starting at position 3578 of SEQ ID NO: 3564
uuaaguagaucaucagagu

SEQ ID NO: 277455 - RNA, 19 nt, Artificial Sequence
  Description of Artificial Sequence: Synthetic oligonucleotide
  Antisense strand to SEQ ID NO: 277454
acucugaugaucuacuuaa

SEQ ID NO: 277456 - RNA, 19 nt, Artificial Sequence
  Description of Artificial Sequence: Synthetic oligonucleotide
  Sense strand starting at position 3603 of SEQ ID NO: 3564
agauuuauuugcugauaca

SEQ ID NO: 277457 - RNA, 19 nt, Artificial Sequence
  Description of Artificial Sequence: Synthetic oligonucleotide
  Antisense strand to SEQ ID NO: 277456
uguaucagcaaauaaaucu

SEQ ID NO: 277458 - RNA, 19 nt, Artificial Sequence
  Description of Artificial Sequence: Synthetic oligonucleotide
  Sense strand starting at position 3625 of SEQ ID NO: 3564
acagucuuuccagaccagu

SEQ ID NO: 277459 - RNA, 19 nt, Artificial Sequence
  Description of Artificial Sequence: Synthetic oligonucleotide
  Antisense strand to SEQ ID NO: 277458
acuggucuggaaagacugu

SEQ ID NO: 277460 - RNA, 19 nt, Artificial Sequence
  Description of Artificial Sequence: Synthetic oligonucleotide
  Sense strand starting at position 3628 of SEQ ID NO: 3564
gucuuuccagaccaguaau

SEQ ID NO: 277461 - RNA, 19 nt, Artificial Sequence
  Description of Artificial Sequence: Synthetic oligonucleotide
  Antisense strand to SEQ ID NO: 277460
auuacuggucuggaaagac

SEQ ID NO: 277462 - RNA, 19 nt, Artificial Sequence
  Description of Artificial Sequence: Synthetic oligonucleotide
  Sense strand starting at position 19 of SEQ ID NO: 3563
cugauaacuuaggcuaacu

SEQ ID NO: 277463 - RNA, 19 nt, Artificial Sequence
  Description of Artificial Sequence: Synthetic oligonucleotide
  Antisense strand to SEQ ID NO: 277462
aguuagccuaaguuaucag

SEQ ID NO: 277464 - RNA, 19 nt, Artificial Sequence
  Description of Artificial Sequence: Synthetic oligonucleotide
  Sense strand starting at position 48 of SEQ ID NO: 3563
accuguguaaguuaaaguu

SEQ ID NO: 277465 - RNA, 19 nt, Artificial Sequence
  Description of Artificial Sequence: Synthetic oligonucleotide
  Antisense strand to SEQ ID NO: 277464
aacuuuaacuuacacaggu

SEQ ID NO: 277466 - RNA, 19 nt, Artificial Sequence
  Description of Artificial Sequence: Synthetic oligonucleotide
  Sense strand starting at position 75 of SEQ ID NO: 3563
aucauaauucuuggcagau

SEQ ID NO: 277467 - RNA, 19 nt, Artificial Sequence
  Description of Artificial Sequence: Synthetic oligonucleotide
  Antisense strand to SEQ ID NO: 277466
aucugccaagaauuaugau

SEQ ID NO: 277468 - RNA, 19 nt, Artificial Sequence
  Description of Artificial Sequence: Synthetic oligonucleotide
  Sense strand starting at position 76 of SEQ ID NO: 3563
ucauaauucuuggcagaug

SEQ ID NO: 277469 - RNA, 19 nt, Artificial Sequence
  Description of Artificial Sequence: Synthetic oligonucleotide
  Antisense strand to SEQ ID NO: 277468
caucugccaagaauuauga

SEQ ID NO: 277470 - RNA, 19 nt, Artificial Sequence
  Description of Artificial Sequence: Synthetic oligonucleotide
  Sense strand starting at position 79 of SEQ ID NO: 3563
uaauucuuggcagauguga

SEQ ID NO: 277471 - RNA, 19 nt, Artificial Sequence
  Description of Artificial Sequence: Synthetic oligonucleotide
  Antisense strand to SEQ ID NO: 277470
ucacaucugccaagaauua

SEQ ID NO: 277472 - RNA, 19 nt, Artificial Sequence
  Description of Artificial Sequence: Synthetic oligonucleotide
  Sense strand starting at position 88 of SEQ ID NO: 3563
gcagaugugacuuaaaugu

SEQ ID NO: 277473 - RNA, 19 nt, Artificial Sequence
  Description of Artificial Sequence: Synthetic oligonucleotide
  Antisense strand to SEQ ID NO: 277472
acauuuaagucacaucugc

SEQ ID NO: 277474 - RNA, 19 nt, Artificial Sequence
  Description of Artificial Sequence: Synthetic oligonucleotide
  Sense strand starting at position 284 of SEQ ID NO: 3563
ggucuuacauaauuaugaa

SEQ ID NO: 277475 - RNA, 19 nt, Artificial Sequence
  Description of Artificial Sequence: Synthetic oligonucleotide
  Antisense strand to SEQ ID NO: 277474
uucauaauuauguaagacc

SEQ ID NO: 277476 - RNA, 19 nt, Artificial Sequence
  Description of Artificial Sequence: Synthetic oligonucleotide
  Sense strand starting at position 304 of SEQ ID NO: 3563
guaucuuugguauauaugu

SEQ ID NO: 277477 - RNA, 19 nt, Artificial Sequence
  Description of Artificial Sequence: Synthetic oligonucleotide
  Antisense strand to SEQ ID NO: 277476
acauauauaccaaagauac

SEQ ID NO: 277478 - RNA, 19 nt, Artificial Sequence
  Description of Artificial Sequence: Synthetic oligonucleotide
  Sense strand starting at position 310 of SEQ ID NO: 3563
uugguauauauguggaaga

SEQ ID NO: 277479 - RNA, 19 nt, Artificial Sequence
  Description of Artificial Sequence: Synthetic oligonucleotide
  Antisense strand to SEQ ID NO: 277478
ucuuccacauauauaccaa

SEQ ID NO: 277480 - RNA, 19 nt, Artificial Sequence
  Description of Artificial Sequence: Synthetic oligonucleotide
  Sense strand starting at position 373 of SEQ ID NO: 3563
gauuaauuauuguugagug

SEQ ID NO: 277481 - RNA, 19 nt, Artificial Sequence
  Description of Artificial Sequence: Synthetic oligonucleotide
  Antisense strand to SEQ ID NO: 277480
cacucaacaauaauuaauc

SEQ ID NO: 277482 - RNA, 19 nt, Artificial Sequence
  Description of Artificial Sequence: Synthetic oligonucleotide
  Sense strand starting at position 503 of SEQ ID NO: 3563
ggagguucuaagcaacugu

SEQ ID NO: 277483 - RNA, 19 nt, Artificial Sequence
  Description of Artificial Sequence: Synthetic oligonucleotide
  Antisense strand to SEQ ID NO: 277482
acaguugcuuagaaccucc

SEQ ID NO: 277484 - RNA, 19 nt, Artificial Sequence
  Description of Artificial Sequence: Synthetic oligonucleotide
  Sense strand starting at position 537 of SEQ ID NO: 3563
caguaagcuguauagcaaa

SEQ ID NO: 277485 - RNA, 19 nt, Artificial Sequence
  Description of Artificial Sequence: Synthetic oligonucleotide
  Antisense strand to SEQ ID NO: 277484
uuugcuauacagcuuacug

SEQ ID NO: 277486 - RNA, 19 nt, Artificial Sequence
  Description of Artificial Sequence: Synthetic oligonucleotide
  Sense strand starting at position 561 of SEQ ID NO: 3563
caauuugguucgguuccaa

SEQ ID NO: 277487 - RNA, 19 nt, Artificial Sequence
  Description of Artificial Sequence: Synthetic oligonucleotide
  Antisense strand to SEQ ID NO: 277486
uuggaaccgaaccaaauug

SEQ ID NO: 277488 - RNA, 19 nt, Artificial Sequence
  Description of Artificial Sequence: Synthetic oligonucleotide
  Sense strand starting at position 728 of SEQ ID NO: 3563
gcuaauaaguaguuaagag

SEQ ID NO: 277489 - RNA, 19 nt, Artificial Sequence
  Description of Artificial Sequence: Synthetic oligonucleotide
  Antisense strand to SEQ ID NO: 277488
cucuuaacuacuuauuagc

SEQ ID NO: 277490 - RNA, 19 nt, Artificial Sequence
  Description of Artificial Sequence: Synthetic oligonucleotide
  Sense strand starting at position 952 of SEQ ID NO: 3563
aggaauaaucuagguaugu

SEQ ID NO: 277491 - RNA, 19 nt, Artificial Sequence
  Description of Artificial Sequence: Synthetic oligonucleotide
  Antisense strand to SEQ ID NO: 277490
acauaccuagauuauuccu

SEQ ID NO: 277492 - RNA, 19 nt, Artificial Sequence
  Description of Artificial Sequence: Synthetic oligonucleotide
  Sense strand starting at position 953 of SEQ ID NO: 3563
ggaauaaucuagguauguu

SEQ ID NO: 277493 - RNA, 19 nt, Artificial Sequence
  Description of Artificial Sequence: Synthetic oligonucleotide
  Antisense strand to SEQ ID NO: 277492
aacauaccuagauuauucc

SEQ ID NO: 277494 - RNA, 19 nt, Artificial Sequence
  Description of Artificial Sequence: Synthetic oligonucleotide
  Sense strand starting at position 979 of SEQ ID NO: 3563
gcugaaugucauuauggaa

SEQ ID NO: 277495 - RNA, 19 nt, Artificial Sequence
  Description of Artificial Sequence: Synthetic oligonucleotide
  Antisense strand to SEQ ID NO: 277494
uuccauaaugacauucagc

SEQ ID NO: 277496 - RNA, 19 nt, Artificial Sequence
  Description of Artificial Sequence: Synthetic oligonucleotide
  Sense strand starting at position 1016 of SEQ ID NO: 3563
ccugguaucaaagguagaa

SEQ ID NO: 277497 - RNA, 19 nt, Artificial Sequence
  Description of Artificial Sequence: Synthetic oligonucleotide
  Antisense strand to SEQ ID NO: 277496
uucuaccuuugauaccagg

SEQ ID NO: 277498 - RNA, 19 nt, Artificial Sequence
  Description of Artificial Sequence: Synthetic oligonucleotide
  Sense strand starting at position 1146 of SEQ ID NO: 3563
aguuuacuagccgacacua

SEQ ID NO: 277499 - RNA, 19 nt, Artificial Sequence
  Description of Artificial Sequence: Synthetic oligonucleotide
  Antisense strand to SEQ ID NO: 277498
uagugucggcuaguaaacu

SEQ ID NO: 277500 - RNA, 19 nt, Artificial Sequence
  Description of Artificial Sequence: Synthetic oligonucleotide
  Sense strand starting at position 1306 of SEQ ID NO: 3563
ggguguucucaggagaacc

SEQ ID NO: 277501 - RNA, 19 nt, Artificial Sequence
  Description of Artificial Sequence: Synthetic oligonucleotide
  Antisense strand to SEQ ID NO: 277500
gguucuccugagaacaccc

SEQ ID NO: 277502 - RNA, 19 nt, Artificial Sequence
  Description of Artificial Sequence: Synthetic oligonucleotide
  Sense strand starting at position 1308 of SEQ ID NO: 3563
guguucucaggagaaccua

SEQ ID NO: 277503 - RNA, 19 nt, Artificial Sequence
  Description of Artificial Sequence: Synthetic oligonucleotide
  Antisense strand to SEQ ID NO: 277502
uagguucuccugagaacac

SEQ ID NO: 277504 - RNA, 19 nt, Artificial Sequence
  Description of Artificial Sequence: Synthetic oligonucleotide
  Sense strand starting at position 1316 of SEQ ID NO: 3563
aggagaaccuauucguuua

SEQ ID NO: 277505 - RNA, 19 nt, Artificial Sequence
  Description of Artificial Sequence: Synthetic oligonucleotide
  Antisense strand to SEQ ID NO: 277504
uaaacgaauagguucuccu

SEQ ID NO: 277506 - RNA, 19 nt, Artificial Sequence
  Description of Artificial Sequence: Synthetic oligonucleotide
  Sense strand starting at position 1317 of SEQ ID NO: 3563
ggagaaccuauucguuuac

SEQ ID NO: 277507 - RNA, 19 nt, Artificial Sequence
  Description of Artificial Sequence: Synthetic oligonucleotide
  Antisense strand to SEQ ID NO: 277506
guaaacgaauagguucucc

SEQ ID NO: 277508 - RNA, 19 nt, Artificial Sequence
  Description of Artificial Sequence: Synthetic oligonucleotide
  Sense strand starting at position 1728 of SEQ ID NO: 3563
ggcagauuucgccaucuuu

SEQ ID NO: 277509 - RNA, 19 nt, Artificial Sequence
  Description of Artificial Sequence: Synthetic oligonucleotide
  Antisense strand to SEQ ID NO: 277508
aaagauggcgaaaucugcc

SEQ ID NO: 277510 - RNA, 19 nt, Artificial Sequence
  Description of Artificial Sequence: Synthetic oligonucleotide
  Sense strand starting at position 1780 of SEQ ID NO: 3563
uucuuuagucucgaaauau

SEQ ID NO: 277511 - RNA, 19 nt, Artificial Sequence
  Description of Artificial Sequence: Synthetic oligonucleotide
  Antisense strand to SEQ ID NO: 277510
auauuucgagacuaaagaa

SEQ ID NO: 277512 - RNA, 19 nt, Artificial Sequence
  Description of Artificial Sequence: Synthetic oligonucleotide
  Sense strand starting at position 1823 of SEQ ID NO: 3563
ucuucugagcucgagauga

SEQ ID NO: 277513 - RNA, 19 nt, Artificial Sequence
  Description of Artificial Sequence: Synthetic oligonucleotide
  Antisense strand to SEQ ID NO: 277512
ucaucucgagcucagaaga

SEQ ID NO: 277514 - RNA, 19 nt, Artificial Sequence
  Description of Artificial Sequence: Synthetic oligonucleotide
  Sense strand starting at position 1825 of SEQ ID NO: 3563
uucugagcucgagaugaag

SEQ ID NO: 277515 - RNA, 19 nt, Artificial Sequence
  Description of Artificial Sequence: Synthetic oligonucleotide
  Antisense strand to SEQ ID NO: 277514
cuucaucucgagcucagaa

SEQ ID NO: 277516 - RNA, 19 nt, Artificial Sequence
  Description of Artificial Sequence: Synthetic oligonucleotide
  Sense strand starting at position 1925 of SEQ ID NO: 3563
gauggcuaccagcaagaau

SEQ ID NO: 277517 - RNA, 19 nt, Artificial Sequence
  Description of Artificial Sequence: Synthetic oligonucleotide
  Antisense strand to SEQ ID NO: 277516
auucuugcugguagccauc

SEQ ID NO: 277518 - RNA, 19 nt, Artificial Sequence
  Description of Artificial Sequence: Synthetic oligonucleotide
  Sense strand starting at position 2382 of SEQ ID NO: 3563
gggagacccuucucaguuu

SEQ ID NO: 277519 - RNA, 19 nt, Artificial Sequence
  Description of Artificial Sequence: Synthetic oligonucleotide
  Antisense strand to SEQ ID NO: 277518
aaacugagaagggucuccc

SEQ ID NO: 277520 - RNA, 19 nt, Artificial Sequence
  Description of Artificial Sequence: Synthetic oligonucleotide
  Sense strand starting at position 2510 of SEQ ID NO: 3563
ggaaacucagaucgaagua

SEQ ID NO: 277521 - RNA, 19 nt, Artificial Sequence
  Description of Artificial Sequence: Synthetic oligonucleotide
  Antisense strand to SEQ ID NO: 277520
uacuucgaucugaguuucc

SEQ ID NO: 277522 - RNA, 19 nt, Artificial Sequence
  Description of Artificial Sequence: Synthetic oligonucleotide
  Sense strand starting at position 2901 of SEQ ID NO: 3563
agucaaaguguguucguuu

SEQ ID NO: 277523 - RNA, 19 nt, Artificial Sequence
  Description of Artificial Sequence: Synthetic oligonucleotide
  Antisense strand to SEQ ID NO: 277522
aaacgaacacacuuugacu

SEQ ID NO: 277524 - RNA, 19 nt, Artificial Sequence
  Description of Artificial Sequence: Synthetic oligonucleotide
  Sense strand starting at position 3066 of SEQ ID NO: 3563
caguguuaugccucugccu

SEQ ID NO: 277525 - RNA, 19 nt, Artificial Sequence
  Description of Artificial Sequence: Synthetic oligonucleotide
  Antisense strand to SEQ ID NO: 277524
aggcagaggcauaacacug

SEQ ID NO: 277526 - RNA, 19 nt, Artificial Sequence
  Description of Artificial Sequence: Synthetic oligonucleotide
  Sense strand starting at position 3103 of SEQ ID NO: 3563
cuuuacucaggaggacauu

SEQ ID NO: 277527 - RNA, 19 nt, Artificial Sequence
  Description of Artificial Sequence: Synthetic oligonucleotide
  Antisense strand to SEQ ID NO: 277526
aauguccuccugaguaaag

SEQ ID NO: 277528 - RNA, 19 nt, Artificial Sequence
  Description of Artificial Sequence: Synthetic oligonucleotide
  Sense strand starting at position 3127 of SEQ ID NO: 3563
auuucugacaguuguguuu

SEQ ID NO: 277529 - RNA, 19 nt, Artificial Sequence
  Description of Artificial Sequence: Synthetic oligonucleotide
  Antisense strand to SEQ ID NO: 277528
aaacacaacugucagaaau

SEQ ID NO: 277530 - RNA, 19 nt, Artificial Sequence
  Description of Artificial Sequence: Synthetic oligonucleotide
  Sense strand starting at position 3168 of SEQ ID NO: 3563
gccacuuuacuugagauug

SEQ ID NO: 277531 - RNA, 19 nt, Artificial Sequence
  Description of Artificial Sequence: Synthetic oligonucleotide
  Antisense strand to SEQ ID NO: 277530
caaucucaaguaaaguggc

SEQ ID NO: 277532 - RNA, 19 nt, Artificial Sequence
  Description of Artificial Sequence: Synthetic oligonucleotide
  Sense strand starting at position 3266 of SEQ ID NO: 3563
agaguuaugaguuaaguag

SEQ ID NO: 277533 - RNA, 19 nt, Artificial Sequence
  Description of Artificial Sequence: Synthetic oligonucleotide
  Antisense strand to SEQ ID NO: 277532
cuacuuaacucauaacucu

SEQ ID NO: 277534 - RNA, 19 nt, Artificial Sequence
  Description of Artificial Sequence: Synthetic oligonucleotide
  Sense strand starting at position 3277 of SEQ ID NO: 3563
uuaaguagaucaucagagu

SEQ ID NO: 277535 - RNA, 19 nt, Artificial Sequence
  Description of Artificial Sequence: Synthetic oligonucleotide
  Antisense strand to SEQ ID NO: 277534
acucugaugaucuacuuaa

SEQ ID NO: 277536 - RNA, 19 nt, Artificial Sequence
  Description of Artificial Sequence: Synthetic oligonucleotide
  Sense strand starting at position 3302 of SEQ ID NO: 3563
agauuuauuugcugauaca

SEQ ID NO: 277537 - RNA, 19 nt, Artificial Sequence
  Description of Artificial Sequence: Synthetic oligonucleotide
  Antisense strand to SEQ ID NO: 277536
uguaucagcaaauaaaucu

SEQ ID NO: 277538 - RNA, 19 nt, Artificial Sequence
  Description of Artificial Sequence: Synthetic oligonucleotide
  Sense strand starting at position 3324 of SEQ ID NO: 3563
acagucuuuccagaccagu

SEQ ID NO: 277539 - RNA, 19 nt, Artificial Sequence
  Description of Artificial Sequence: Synthetic oligonucleotide
  Antisense strand to SEQ ID NO: 277538
acuggucuggaaagacugu

SEQ ID NO: 277540 - RNA, 19 nt, Artificial Sequence
  Description of Artificial Sequence: Synthetic oligonucleotide
  Sense strand starting at position 3327 of SEQ ID NO: 3563
gucuuuccagaccaguaau

SEQ ID NO: 277541 - RNA, 19 nt, Artificial Sequence
  Description of Artificial Sequence: Synthetic oligonucleotide
  Antisense strand to SEQ ID NO: 277540
auuacuggucuggaaagac

SEQ ID NO: 277542 - RNA, 19 nt, Artificial Sequence
  Description of Artificial Sequence: Synthetic oligonucleotide
  Sense strand starting at position 7 of SEQ ID NO: 3566
ugugcuaacagagaguaga

SEQ ID NO: 277543 - RNA, 19 nt, Artificial Sequence
  Description of Artificial Sequence: Synthetic oligonucleotide
  Antisense strand to SEQ ID NO: 277542
ucuacucucuguuagcaca

SEQ ID NO: 277544 - RNA, 19 nt, Artificial Sequence
  Description of Artificial Sequence: Synthetic oligonucleotide
  Sense strand starting at position 195 of SEQ ID NO: 3566
cauggugucgaagaugacu

SEQ ID NO: 277545 - RNA, 19 nt, Artificial Sequence
  Description of Artificial Sequence: Synthetic oligonucleotide
  Antisense strand to SEQ ID NO: 277544
agucaucuucgacaccaug

SEQ ID NO: 277546 - RNA, 19 nt, Artificial Sequence
  Description of Artificial Sequence: Synthetic oligonucleotide
  Sense strand starting at position 847 of SEQ ID NO: 3566
ggguccaacucuguguuau

SEQ ID NO: 277547 - RNA, 19 nt, Artificial Sequence
  Description of Artificial Sequence: Synthetic oligonucleotide
  Antisense strand to SEQ ID NO: 277546
auaacacagaguuggaccc

SEQ ID NO: 277548 - RNA, 19 nt, Artificial Sequence
  Description of Artificial Sequence: Synthetic oligonucleotide
  Sense strand starting at position 1035 of SEQ ID NO: 3566
cacggauucuuucugagcu

SEQ ID NO: 277549 - RNA, 19 nt, Artificial Sequence
  Description of Artificial Sequence: Synthetic oligonucleotide
  Antisense strand to SEQ ID NO: 277548
agcucagaaagaauccgug

SEQ ID NO: 277550 - RNA, 19 nt, Artificial Sequence
  Description of Artificial Sequence: Synthetic oligonucleotide
  Sense strand starting at position 1127 of SEQ ID NO: 3566
gggccuguuugguuaauag

SEQ ID NO: 277551 - RNA, 19 nt, Artificial Sequence
  Description of Artificial Sequence: Synthetic oligonucleotide
  Antisense strand to SEQ ID NO: 277550
cuauuaaccaaacaggccc

SEQ ID NO: 277552 - RNA, 19 nt, Artificial Sequence
  Description of Artificial Sequence: Synthetic oligonucleotide
  Sense strand starting at position 1138 of SEQ ID NO: 3566
guuaauagggaguaaugca

SEQ ID NO: 277553 - RNA, 19 nt, Artificial Sequence
  Description of Artificial Sequence: Synthetic oligonucleotide
  Antisense strand to SEQ ID NO: 277552
ugcauuacucccuauuaac

SEQ ID NO: 277554 - RNA, 19 nt, Artificial Sequence
  Description of Artificial Sequence: Synthetic oligonucleotide
  Sense strand starting at position 1179 of SEQ ID NO: 3566
ucauaaucuuuaggauuug

SEQ ID NO: 277555 - RNA, 19 nt, Artificial Sequence
  Description of Artificial Sequence: Synthetic oligonucleotide
  Antisense strand to SEQ ID NO: 277554
caaauccuaaagauuauga

SEQ ID NO: 277556 - RNA, 19 nt, Artificial Sequence
  Description of Artificial Sequence: Synthetic oligonucleotide
  Sense strand starting at position 1316 of SEQ ID NO: 3566
uuaagcaauuugcugcaaa

SEQ ID NO: 277557 - RNA, 19 nt, Artificial Sequence
  Description of Artificial Sequence: Synthetic oligonucleotide
  Antisense strand to SEQ ID NO: 277556
uuugcagcaaauugcuuaa

SEQ ID NO: 277558 - RNA, 19 nt, Artificial Sequence
  Description of Artificial Sequence: Synthetic oligonucleotide
  Sense strand starting at position 1350 of SEQ ID NO: 3566
gugggaaagucacuucuga

SEQ ID NO: 277559 - RNA, 19 nt, Artificial Sequence
  Description of Artificial Sequence: Synthetic oligonucleotide
  Antisense strand to SEQ ID NO: 277558
ucagaagugacuuucccac

SEQ ID NO: 277560 - RNA, 19 nt, Artificial Sequence
  Description of Artificial Sequence: Synthetic oligonucleotide
  Sense strand starting at position 1595 of SEQ ID NO: 3566
agaagaguuucugaaggag

SEQ ID NO: 277561 - RNA, 19 nt, Artificial Sequence
  Description of Artificial Sequence: Synthetic oligonucleotide
  Antisense strand to SEQ ID NO: 277560
cuccuucagaaacucuucu

SEQ ID NO: 277562 - RNA, 19 nt, Artificial Sequence
  Description of Artificial Sequence: Synthetic oligonucleotide
  Sense strand starting at position 2182 of SEQ ID NO: 3566
ccggauaaucuggguacuu

SEQ ID NO: 277563 - RNA, 19 nt, Artificial Sequence
  Description of Artificial Sequence: Synthetic oligonucleotide
  Antisense strand to SEQ ID NO: 277562
aaguacccagauuauccgg

SEQ ID NO: 277564 - RNA, 19 nt, Artificial Sequence
  Description of Artificial Sequence: Synthetic oligonucleotide
  Sense strand starting at position 2183 of SEQ ID NO: 3566
cggauaaucuggguacuug

SEQ ID NO: 277565 - RNA, 19 nt, Artificial Sequence
  Description of Artificial Sequence: Synthetic oligonucleotide
  Antisense strand to SEQ ID NO: 277564
caaguacccagauuauccg

SEQ ID NO: 277566 - RNA, 19 nt, Artificial Sequence
  Description of Artificial Sequence: Synthetic oligonucleotide
  Sense strand starting at position 2275 of SEQ ID NO: 3566
gugggaacauggucauuga

SEQ ID NO: 277567 - RNA, 19 nt, Artificial Sequence
  Description of Artificial Sequence: Synthetic oligonucleotide
  Antisense strand to SEQ ID NO: 277566
ucaaugaccauguucccac

SEQ ID NO: 277568 - RNA, 19 nt, Artificial Sequence
  Description of Artificial Sequence: Synthetic oligonucleotide
  Sense strand starting at position 2278 of SEQ ID NO: 3566
ggaacauggucauugagca

SEQ ID NO: 277569 - RNA, 19 nt, Artificial Sequence
  Description of Artificial Sequence: Synthetic oligonucleotide
  Antisense strand to SEQ ID NO: 277568
ugcucaaugaccauguucc

SEQ ID NO: 277570 - RNA, 19 nt, Artificial Sequence
  Description of Artificial Sequence: Synthetic oligonucleotide
  Sense strand starting at position 2283 of SEQ ID NO: 3566
auggucauugagcagaguu

SEQ ID NO: 277571 - RNA, 19 nt, Artificial Sequence
  Description of Artificial Sequence: Synthetic oligonucleotide
  Antisense strand to SEQ ID NO: 277570
aacucugcucaaugaccau

SEQ ID NO: 277572 - RNA, 19 nt, Artificial Sequence
  Description of Artificial Sequence: Synthetic oligonucleotide
  Sense strand starting at position 2375 of SEQ ID NO: 3566
gaggcagaucagcauaacu

SEQ ID NO: 277573 - RNA, 19 nt, Artificial Sequence
  Description of Artificial Sequence: Synthetic oligonucleotide
  Antisense strand to SEQ ID NO: 277572
aguuaugcugaucugccuc

SEQ ID NO: 277574 - RNA, 19 nt, Artificial Sequence
  Description of Artificial Sequence: Synthetic oligonucleotide
  Sense strand starting at position 2377 of SEQ ID NO: 3566
ggcagaucagcauaacuuu

SEQ ID NO: 277575 - RNA, 19 nt, Artificial Sequence
  Description of Artificial Sequence: Synthetic oligonucleotide
  Antisense strand to SEQ ID NO: 277574
aaaguuaugcugaucugcc

SEQ ID NO: 277576 - RNA, 19 nt, Artificial Sequence
  Description of Artificial Sequence: Synthetic oligonucleotide
  Sense strand starting at position 2418 of SEQ ID NO: 3566
gaggguggugcuggaguua

SEQ ID NO: 277577 - RNA, 19 nt, Artificial Sequence
  Description of Artificial Sequence: Synthetic oligonucleotide
  Antisense strand to SEQ ID NO: 277576
uaacuccagcaccacccuc

SEQ ID NO: 277578 - RNA, 19 nt, Artificial Sequence
  Description of Artificial Sequence: Synthetic oligonucleotide
  Sense strand starting at position 2594 of SEQ ID NO: 3566
ggugaagagcugugagaau

SEQ ID NO: 277579 - RNA, 19 nt, Artificial Sequence
  Description of Artificial Sequence: Synthetic oligonucleotide
  Antisense strand to SEQ ID NO: 277578
auucucacagcucuucacc

SEQ ID NO: 277580 - RNA, 19 nt, Artificial Sequence
  Description of Artificial Sequence: Synthetic oligonucleotide
  Sense strand starting at position 2603 of SEQ ID NO: 3566
cugugagaaucaccucgaa

SEQ ID NO: 277581 - RNA, 19 nt, Artificial Sequence
  Description of Artificial Sequence: Synthetic oligonucleotide
  Antisense strand to SEQ ID NO: 277580
uucgaggugauucucacag

SEQ ID NO: 277582 - RNA, 19 nt, Artificial Sequence
  Description of Artificial Sequence: Synthetic oligonucleotide
  Sense strand starting at position 2682 of SEQ ID NO: 3566
gggagauaugccugggugu

SEQ ID NO: 277583 - RNA, 19 nt, Artificial Sequence
  Description of Artificial Sequence: Synthetic oligonucleotide
  Antisense strand to SEQ ID NO: 277582
acacccaggcauaucuccc

SEQ ID NO: 277584 - RNA, 19 nt, Artificial Sequence
  Description of Artificial Sequence: Synthetic oligonucleotide
  Sense strand starting at position 2727 of SEQ ID NO: 3566
gugagugcugugccuacau

SEQ ID NO: 277585 - RNA, 19 nt, Artificial Sequence
  Description of Artificial Sequence: Synthetic oligonucleotide
  Antisense strand to SEQ ID NO: 277584
auguaggcacagcacucac

SEQ ID NO: 277586 - RNA, 19 nt, Artificial Sequence
  Description of Artificial Sequence: Synthetic oligonucleotide
  Sense strand starting at position 2814 of SEQ ID NO: 3566
cugagucaauguccggauu

SEQ ID NO: 277587 - RNA, 19 nt, Artificial Sequence
  Description of Artificial Sequence: Synthetic oligonucleotide
  Antisense strand to SEQ ID NO: 277586
aauccggacauugacucag

SEQ ID NO: 277588 - RNA, 19 nt, Artificial Sequence
  Description of Artificial Sequence: Synthetic oligonucleotide
  Sense strand starting at position 2820 of SEQ ID NO: 3566
caauguccggauugggaau

SEQ ID NO: 277589 - RNA, 19 nt, Artificial Sequence
  Description of Artificial Sequence: Synthetic oligonucleotide
  Antisense strand to SEQ ID NO: 277588
auucccaauccggacauug

SEQ ID NO: 277590 - RNA, 19 nt, Artificial Sequence
  Description of Artificial Sequence: Synthetic oligonucleotide
  Sense strand starting at position 2937 of SEQ ID NO: 3566
acaacagacuggugaauuu

SEQ ID NO: 277591 - RNA, 19 nt, Artificial Sequence
  Description of Artificial Sequence: Synthetic oligonucleotide
  Antisense strand to SEQ ID NO: 277590
aaauucaccagucuguugu

SEQ ID NO: 277592 - RNA, 19 nt, Artificial Sequence
  Description of Artificial Sequence: Synthetic oligonucleotide
  Sense strand starting at position 2948 of SEQ ID NO: 3566
gugaauuucugucugaguu

SEQ ID NO: 277593 - RNA, 19 nt, Artificial Sequence
  Description of Artificial Sequence: Synthetic oligonucleotide
  Antisense strand to SEQ ID NO: 277592
aacucagacagaaauucac

SEQ ID NO: 277594 - RNA, 19 nt, Artificial Sequence
  Description of Artificial Sequence: Synthetic oligonucleotide
  Sense strand starting at position 2955 of SEQ ID NO: 3566
ucugucugaguuuauuaca

SEQ ID NO: 277595 - RNA, 19 nt, Artificial Sequence
  Description of Artificial Sequence: Synthetic oligonucleotide
  Antisense strand to SEQ ID NO: 277594
uguaauaaacucagacaga

SEQ ID NO: 277596 - RNA, 19 nt, Artificial Sequence
  Description of Artificial Sequence: Synthetic oligonucleotide
  Sense strand starting at position 3078 of SEQ ID NO: 3566
agccuuucucaaggacauc

SEQ ID NO: 277597 - RNA, 19 nt, Artificial Sequence
  Description of Artificial Sequence: Synthetic oligonucleotide
  Antisense strand to SEQ ID NO: 277596
gauguccuugagaaaggcu

SEQ ID NO: 277598 - RNA, 19 nt, Artificial Sequence
  Description of Artificial Sequence: Synthetic oligonucleotide
  Sense strand starting at position 3091 of SEQ ID NO: 3566
gacaucugcucacuggaca

SEQ ID NO: 277599 - RNA, 19 nt, Artificial Sequence
  Description of Artificial Sequence: Synthetic oligonucleotide
  Antisense strand to SEQ ID NO: 277598
uguccagugagcagauguc

SEQ ID NO: 277600 - RNA, 19 nt, Artificial Sequence
  Description of Artificial Sequence: Synthetic oligonucleotide
  Sense strand starting at position 3281 of SEQ ID NO: 3566
ggcugugguuacucaaaca

SEQ ID NO: 277601 - RNA, 19 nt, Artificial Sequence
  Description of Artificial Sequence: Synthetic oligonucleotide
  Antisense strand to SEQ ID NO: 277600
uguuugaguaaccacagcc

SEQ ID NO: 277602 - RNA, 19 nt, Artificial Sequence
  Description of Artificial Sequence: Synthetic oligonucleotide
  Sense strand starting at position 3332 of SEQ ID NO: 3566
ggguguuguauuggcaaag

SEQ ID NO: 277603 - RNA, 19 nt, Artificial Sequence
  Description of Artificial Sequence: Synthetic oligonucleotide
  Antisense strand to SEQ ID NO: 277602
cuuugccaauacaacaccc

SEQ ID NO: 277604 - RNA, 19 nt, Artificial Sequence
  Description of Artificial Sequence: Synthetic oligonucleotide
  Sense strand starting at position 3333 of SEQ ID NO: 3566
gguguuguauuggcaaaga

SEQ ID NO: 277605 - RNA, 19 nt, Artificial Sequence
  Description of Artificial Sequence: Synthetic oligonucleotide
  Antisense strand to SEQ ID NO: 277604
ucuuugccaauacaacacc

SEQ ID NO: 277606 - RNA, 19 nt, Artificial Sequence
  Description of Artificial Sequence: Synthetic oligonucleotide
  Sense strand starting at position 3354 of SEQ ID NO: 3566
ccauaagccugaucagcaa

SEQ ID NO: 277607 - RNA, 19 nt, Artificial Sequence
  Description of Artificial Sequence: Synthetic oligonucleotide
  Antisense strand to SEQ ID NO: 277606
uugcugaucaggcuuaugg

SEQ ID NO: 277608 - RNA, 19 nt, Artificial Sequence
  Description of Artificial Sequence: Synthetic oligonucleotide
  Sense strand starting at position 3366 of SEQ ID NO: 3566
ucagcaaagccugguuuga

SEQ ID NO: 277609 - RNA, 19 nt, Artificial Sequence
  Description of Artificial Sequence: Synthetic oligonucleotide
  Antisense strand to SEQ ID NO: 277608
ucaaaccaggcuuugcuga

SEQ ID NO: 277610 - RNA, 19 nt, Artificial Sequence
  Description of Artificial Sequence: Synthetic oligonucleotide
  Sense strand starting at position 3368 of SEQ ID NO: 3566
agcaaagccugguuugaca

SEQ ID NO: 277611 - RNA, 19 nt, Artificial Sequence
  Description of Artificial Sequence: Synthetic oligonucleotide
  Antisense strand to SEQ ID NO: 277610
ugucaaaccaggcuuugcu

SEQ ID NO: 277612 - RNA, 19 nt, Artificial Sequence
  Description of Artificial Sequence: Synthetic oligonucleotide
  Sense strand starting at position 3488 of SEQ ID NO: 3566
gacaaaggauauuggauaa

SEQ ID NO: 277613 - RNA, 19 nt, Artificial Sequence
  Description of Artificial Sequence: Synthetic oligonucleotide
  Antisense strand to SEQ ID NO: 277612
uuauccaauauccuuuguc

SEQ ID NO: 277614 - RNA, 19 nt, Artificial Sequence
  Description of Artificial Sequence: Synthetic oligonucleotide
  Sense strand starting at position 3558 of SEQ ID NO: 3566
gggagaucuucccagagag

SEQ ID NO: 277615 - RNA, 19 nt, Artificial Sequence
  Description of Artificial Sequence: Synthetic oligonucleotide
  Antisense strand to SEQ ID NO: 277614
cucucugggaagaucuccc

SEQ ID NO: 277616 - RNA, 19 nt, Artificial Sequence
  Description of Artificial Sequence: Synthetic oligonucleotide
  Sense strand starting at position 3591 of SEQ ID NO: 3566
gucaaaugugcugaccaag

SEQ ID NO: 277617 - RNA, 19 nt, Artificial Sequence
  Description of Artificial Sequence: Synthetic oligonucleotide
  Antisense strand to SEQ ID NO: 277616
cuuggucagcacauuugac

SEQ ID NO: 277618 - RNA, 19 nt, Artificial Sequence
  Description of Artificial Sequence: Synthetic oligonucleotide
  Sense strand starting at position 3597 of SEQ ID NO: 3566
ugugcugaccaagaacuua

SEQ ID NO: 277619 - RNA, 19 nt, Artificial Sequence
  Description of Artificial Sequence: Synthetic oligonucleotide
  Antisense strand to SEQ ID NO: 277618
uaaguucuuggucagcaca

SEQ ID NO: 277620 - RNA, 19 nt, Artificial Sequence
  Description of Artificial Sequence: Synthetic oligonucleotide
  Sense strand starting at position 3946 of SEQ ID NO: 3566
guccaucuaccuggaagaa

SEQ ID NO: 277621 - RNA, 19 nt, Artificial Sequence
  Description of Artificial Sequence: Synthetic oligonucleotide
  Antisense strand to SEQ ID NO: 277620
uucuuccagguagauggac

SEQ ID NO: 277622 - RNA, 19 nt, Artificial Sequence
  Description of Artificial Sequence: Synthetic oligonucleotide
  Sense strand starting at position 18 of SEQ ID NO: 3567
gagggacaucugugaagua

SEQ ID NO: 277623 - RNA, 19 nt, Artificial Sequence
  Description of Artificial Sequence: Synthetic oligonucleotide
  Antisense strand to SEQ ID NO: 277622
uacuucacagaugucccuc

SEQ ID NO: 277624 - RNA, 19 nt, Artificial Sequence
  Description of Artificial Sequence: Synthetic oligonucleotide
  Sense strand starting at position 38 of SEQ ID NO: 3567
aauagaauggcauggaguu

SEQ ID NO: 277625 - RNA, 19 nt, Artificial Sequence
  Description of Artificial Sequence: Synthetic oligonucleotide
  Antisense strand to SEQ ID NO: 277624
aacuccaugccauucuauu

SEQ ID NO: 277626 - RNA, 19 nt, Artificial Sequence
  Description of Artificial Sequence: Synthetic oligonucleotide
  Sense strand starting at position 48 of SEQ ID NO: 3567
cauggaguucucugggauu

SEQ ID NO: 277627 - RNA, 19 nt, Artificial Sequence
  Description of Artificial Sequence: Synthetic oligonucleotide
  Antisense strand to SEQ ID NO: 277626
aaucccagagaacuccaug

SEQ ID NO: 277628 - RNA, 19 nt, Artificial Sequence
  Description of Artificial Sequence: Synthetic oligonucleotide
  Sense strand starting at position 51 of SEQ ID NO: 3567
ggaguucucugggauucca

SEQ ID NO: 277629 - RNA, 19 nt, Artificial Sequence
  Description of Artificial Sequence: Synthetic oligonucleotide
  Antisense strand to SEQ ID NO: 277628
uggaaucccagagaacucc

SEQ ID NO: 277630 - RNA, 19 nt, Artificial Sequence
  Description of Artificial Sequence: Synthetic oligonucleotide
  Sense strand starting at position 73 of SEQ ID NO: 3567
agguuugccugcuuuccaa

SEQ ID NO: 277631 - RNA, 19 nt, Artificial Sequence
  Description of Artificial Sequence: Synthetic oligonucleotide
  Antisense strand to SEQ ID NO: 277630
uuggaaagcaggcaaaccu

SEQ ID NO: 277632 - RNA, 19 nt, Artificial Sequence
  Description of Artificial Sequence: Synthetic oligonucleotide
  Sense strand starting at position 107 of SEQ ID NO: 3567
ucuagaguucuacgcaugu

SEQ ID NO: 277633 - RNA, 19 nt, Artificial Sequence
  Description of Artificial Sequence: Synthetic oligonucleotide
  Antisense strand to SEQ ID NO: 277632
acaugcguagaacucuaga

SEQ ID NO: 277634 - RNA, 19 nt, Artificial Sequence
  Description of Artificial Sequence: Synthetic oligonucleotide
  Sense strand starting at position 134 of SEQ ID NO: 3567
ggagcuucccugugaaacc

SEQ ID NO: 277635 - RNA, 19 nt, Artificial Sequence
  Description of Artificial Sequence: Synthetic oligonucleotide
  Antisense strand to SEQ ID NO: 277634
gguuucacagggaagcucc

SEQ ID NO: 277636 - RNA, 19 nt, Artificial Sequence
  Description of Artificial Sequence: Synthetic oligonucleotide
  Sense strand starting at position 263 of SEQ ID NO: 3567
augccaaagugauccaugu

SEQ ID NO: 277637 - RNA, 19 nt, Artificial Sequence
  Description of Artificial Sequence: Synthetic oligonucleotide
  Antisense strand to SEQ ID NO: 277636
acauggaucacuuuggcau

SEQ ID NO: 277638 - RNA, 19 nt, Artificial Sequence
  Description of Artificial Sequence: Synthetic oligonucleotide
  Sense strand starting at position 267 of SEQ ID NO: 3567
caaagugauccaugugcaa

SEQ ID NO: 277639 - RNA, 19 nt, Artificial Sequence
  Description of Artificial Sequence: Synthetic oligonucleotide
  Antisense strand to SEQ ID NO: 277638
uugcacauggaucacuuug

SEQ ID NO: 277640 - RNA, 19 nt, Artificial Sequence
  Description of Artificial Sequence: Synthetic oligonucleotide
  Sense strand starting at position 287 of SEQ ID NO: 3567
cucugaccucuaggacauu

SEQ ID NO: 277641 - RNA, 19 nt, Artificial Sequence
  Description of Artificial Sequence: Synthetic oligonucleotide
  Antisense strand to SEQ ID NO: 277640
aauguccuagaggucagag

SEQ ID NO: 277642 - RNA, 19 nt, Artificial Sequence
  Description of Artificial Sequence: Synthetic oligonucleotide
  Sense strand starting at position 428 of SEQ ID NO: 3567
uuguacuugcuggaaacau

SEQ ID NO: 277643 - RNA, 19 nt, Artificial Sequence
  Description of Artificial Sequence: Synthetic oligonucleotide
  Antisense strand to SEQ ID NO: 277642
auguuuccagcaaguacaa

SEQ ID NO: 277644 - RNA, 19 nt, Artificial Sequence
  Description of Artificial Sequence: Synthetic oligonucleotide
  Sense strand starting at position 608 of SEQ ID NO: 3567
gcauuugguuuauaguaga

SEQ ID NO: 277645 - RNA, 19 nt, Artificial Sequence
  Description of Artificial Sequence: Synthetic oligonucleotide
  Antisense strand to SEQ ID NO: 277644
ucuacuauaaaccaaaugc

SEQ ID NO: 277646 - RNA, 19 nt, Artificial Sequence
  Description of Artificial Sequence: Synthetic oligonucleotide
  Sense strand starting at position 616 of SEQ ID NO: 3567
uuuauaguagauugagaca

SEQ ID NO: 277647 - RNA, 19 nt, Artificial Sequence
  Description of Artificial Sequence: Synthetic oligonucleotide
  Antisense strand to SEQ ID NO: 277646
ugucucaaucuacuauaaa

SEQ ID NO: 277648 - RNA, 19 nt, Artificial Sequence
  Description of Artificial Sequence: Synthetic oligonucleotide
  Sense strand starting at position 619 of SEQ ID NO: 3567
auaguagauugagacaaga

SEQ ID NO: 277649 - RNA, 19 nt, Artificial Sequence
  Description of Artificial Sequence: Synthetic oligonucleotide
  Antisense strand to SEQ ID NO: 277648
ucuugucucaaucuacuau

SEQ ID NO: 277650 - RNA, 19 nt, Artificial Sequence
  Description of Artificial Sequence: Synthetic oligonucleotide
  Sense strand starting at position 868 of SEQ ID NO: 3567
ugauguuucugggaccaua

SEQ ID NO: 277651 - RNA, 19 nt, Artificial Sequence
  Description of Artificial Sequence: Synthetic oligonucleotide
  Antisense strand to SEQ ID NO: 277650
uauggucccagaaacauca

SEQ ID NO: 277652 - RNA, 19 nt, Artificial Sequence
  Description of Artificial Sequence: Synthetic oligonucleotide
  Sense strand starting at position 916 of SEQ ID NO: 3567
uuucuacuuguaugucaga

SEQ ID NO: 277653 - RNA, 19 nt, Artificial Sequence
  Description of Artificial Sequence: Synthetic oligonucleotide
  Antisense strand to SEQ ID NO: 277652
ucugacauacaaguagaaa

SEQ ID NO: 277654 - RNA, 19 nt, Artificial Sequence
  Description of Artificial Sequence: Synthetic oligonucleotide
  Sense strand starting at position 917 of SEQ ID NO: 3567
uucuacuuguaugucagaa

SEQ ID NO: 277655 - RNA, 19 nt, Artificial Sequence
  Description of Artificial Sequence: Synthetic oligonucleotide
  Antisense strand to SEQ ID NO: 277654
uucugacauacaaguagaa

SEQ ID NO: 277656 - RNA, 19 nt, Artificial Sequence
  Description of Artificial Sequence: Synthetic oligonucleotide
  Sense strand starting at position 919 of SEQ ID NO: 3567
cuacuuguaugucagaaga

SEQ ID NO: 277657 - RNA, 19 nt, Artificial Sequence
  Description of Artificial Sequence: Synthetic oligonucleotide
  Antisense strand to SEQ ID NO: 277656
ucuucugacauacaaguag

SEQ ID NO: 277658 - RNA, 19 nt, Artificial Sequence
  Description of Artificial Sequence: Synthetic oligonucleotide
  Sense strand starting at position 1263 of SEQ ID NO: 3567
gucucaucuuccucgccaa

SEQ ID NO: 277659 - RNA, 19 nt, Artificial Sequence
  Description of Artificial Sequence: Synthetic oligonucleotide
  Antisense strand to SEQ ID NO: 277658
uuggcgaggaagaugagac

SEQ ID NO: 277660 - RNA, 19 nt, Artificial Sequence
  Description of Artificial Sequence: Synthetic oligonucleotide
  Sense strand starting at position 2208 of SEQ ID NO: 3567
gaaacauaaucccgggaaa

SEQ ID NO: 277661 - RNA, 19 nt, Artificial Sequence
  Description of Artificial Sequence: Synthetic oligonucleotide
  Antisense strand to SEQ ID NO: 277660
uuucccgggauuauguuuc

SEQ ID NO: 277662 - RNA, 19 nt, Artificial Sequence
  Description of Artificial Sequence: Synthetic oligonucleotide
  Sense strand starting at position 2366 of SEQ ID NO: 3567
ucagucuauccggagggau

SEQ ID NO: 277663 - RNA, 19 nt, Artificial Sequence
  Description of Artificial Sequence: Synthetic oligonucleotide
  Antisense strand to SEQ ID NO: 277662
aucccuccggauagacuga

SEQ ID NO: 277664 - RNA, 19 nt, Artificial Sequence
  Description of Artificial Sequence: Synthetic oligonucleotide
  Sense strand starting at position 2381 of SEQ ID NO: 3567
ggaugcaugucgagaggaa

SEQ ID NO: 277665 - RNA, 19 nt, Artificial Sequence
  Description of Artificial Sequence: Synthetic oligonucleotide
  Antisense strand to SEQ ID NO: 277664
uuccucucgacaugcaucc

SEQ ID NO: 277666 - RNA, 19 nt, Artificial Sequence
  Description of Artificial Sequence: Synthetic oligonucleotide
  Sense strand starting at position 2382 of SEQ ID NO: 3567
gaugcaugucgagaggaaa

SEQ ID NO: 277667 - RNA, 19 nt, Artificial Sequence
  Description of Artificial Sequence: Synthetic oligonucleotide
  Antisense strand to SEQ ID NO: 277666
uuuccucucgacaugcauc

SEQ ID NO: 277668 - RNA, 19 nt, Artificial Sequence
  Description of Artificial Sequence: Synthetic oligonucleotide
  Sense strand starting at position 3230 of SEQ ID NO: 3567
ggaguucuggcccaucugu

SEQ ID NO: 277669 - RNA, 19 nt, Artificial Sequence
  Description of Artificial Sequence: Synthetic oligonucleotide
  Antisense strand to SEQ ID NO: 277668
acagaugggccagaacucc

SEQ ID NO: 277670 - RNA, 19 nt, Artificial Sequence
  Description of Artificial Sequence: Synthetic oligonucleotide
  Sense strand starting at position 3306 of SEQ ID NO: 3567
caagcauggcucgggugaa

SEQ ID NO: 277671 - RNA, 19 nt, Artificial Sequence
  Description of Artificial Sequence: Synthetic oligonucleotide
  Antisense strand to SEQ ID NO: 277670
uucacccgagccaugcuug

SEQ ID NO: 277672 - RNA, 19 nt, Artificial Sequence
  Description of Artificial Sequence: Synthetic oligonucleotide
  Sense strand starting at position 3309 of SEQ ID NO: 3567
gcauggcucgggugaaguu

SEQ ID NO: 277673 - RNA, 19 nt, Artificial Sequence
  Description of Artificial Sequence: Synthetic oligonucleotide
  Antisense strand to SEQ ID NO: 277672
aacuucacccgagccaugc

SEQ ID NO: 277674 - RNA, 19 nt, Artificial Sequence
  Description of Artificial Sequence: Synthetic oligonucleotide
  Sense strand starting at position 3405 of SEQ ID NO: 3567
cgagaacuuguugacaagu

SEQ ID NO: 277675 - RNA, 19 nt, Artificial Sequence
  Description of Artificial Sequence: Synthetic oligonucleotide
  Antisense strand to SEQ ID NO: 277674
acuugucaacaaguucucg

SEQ ID NO: 277676 - RNA, 19 nt, Artificial Sequence
  Description of Artificial Sequence: Synthetic oligonucleotide
  Sense strand starting at position 3407 of SEQ ID NO: 3567
agaacuuguugacaaguga

SEQ ID NO: 277677 - RNA, 19 nt, Artificial Sequence
  Description of Artificial Sequence: Synthetic oligonucleotide
  Antisense strand to SEQ ID NO: 277676
ucacuugucaacaaguucu

SEQ ID NO: 277678 - RNA, 19 nt, Artificial Sequence
  Description of Artificial Sequence: Synthetic oligonucleotide
  Sense strand starting at position 3420 of SEQ ID NO: 3567
aagugaaagcucgguagag

SEQ ID NO: 277679 - RNA, 19 nt, Artificial Sequence
  Description of Artificial Sequence: Synthetic oligonucleotide
  Antisense strand to SEQ ID NO: 277678
cucuaccgagcuuucacuu

SEQ ID NO: 277680 - RNA, 19 nt, Artificial Sequence
  Description of Artificial Sequence: Synthetic oligonucleotide
  Sense strand starting at position 3447 of SEQ ID NO: 3567
ugguuuguggucugcuuau

SEQ ID NO: 277681 - RNA, 19 nt, Artificial Sequence
  Description of Artificial Sequence: Synthetic oligonucleotide
  Antisense strand to SEQ ID NO: 277680
auaagcagaccacaaacca

SEQ ID NO: 277682 - RNA, 19 nt, Artificial Sequence
  Description of Artificial Sequence: Synthetic oligonucleotide
  Sense strand starting at position 3472 of SEQ ID NO: 3567
caaagugacuguuccuguu

SEQ ID NO: 277683 - RNA, 19 nt, Artificial Sequence
  Description of Artificial Sequence: Synthetic oligonucleotide
  Antisense strand to SEQ ID NO: 277682
aacaggaacagucacuuug

SEQ ID NO: 277684 - RNA, 19 nt, Artificial Sequence
  Description of Artificial Sequence: Synthetic oligonucleotide
  Sense strand starting at position 3600 of SEQ ID NO: 3567
ggcuguguccuugcuaauu

SEQ ID NO: 277685 - RNA, 19 nt, Artificial Sequence
  Description of Artificial Sequence: Synthetic oligonucleotide
  Antisense strand to SEQ ID NO: 277684
aauuagcaaggacacagcc

SEQ ID NO: 277686 - RNA, 19 nt, Artificial Sequence
  Description of Artificial Sequence: Synthetic oligonucleotide
  Sense strand starting at position 3610 of SEQ ID NO: 3567
uugcuaauuuccuccguaa

SEQ ID NO: 277687 - RNA, 19 nt, Artificial Sequence
  Description of Artificial Sequence: Synthetic oligonucleotide
  Antisense strand to SEQ ID NO: 277686
uuacggaggaaauuagcaa

SEQ ID NO: 277688 - RNA, 19 nt, Artificial Sequence
  Description of Artificial Sequence: Synthetic oligonucleotide
  Sense strand starting at position 3920 of SEQ ID NO: 3567
ccaagucaagucugggaau

SEQ ID NO: 277689 - RNA, 19 nt, Artificial Sequence
  Description of Artificial Sequence: Synthetic oligonucleotide
  Antisense strand to SEQ ID NO: 277688
auucccagacuugacuugg

SEQ ID NO: 277690 - RNA, 19 nt, Artificial Sequence
  Description of Artificial Sequence: Synthetic oligonucleotide
  Sense strand starting at position 3923 of SEQ ID NO: 3567
agucaagucugggaauuug

SEQ ID NO: 277691 - RNA, 19 nt, Artificial Sequence
  Description of Artificial Sequence: Synthetic oligonucleotide
  Antisense strand to SEQ ID NO: 277690
caaauucccagacuugacu

SEQ ID NO: 277692 - RNA, 19 nt, Artificial Sequence
  Description of Artificial Sequence: Synthetic oligonucleotide
  Sense strand starting at position 3950 of SEQ ID NO: 3567
gugguaagcugaguguuca

SEQ ID NO: 277693 - RNA, 19 nt, Artificial Sequence
  Description of Artificial Sequence: Synthetic oligonucleotide
  Antisense strand to SEQ ID NO: 277692
ugaacacucagcuuaccac

SEQ ID NO: 277694 - RNA, 19 nt, Artificial Sequence
  Description of Artificial Sequence: Synthetic oligonucleotide
  Sense strand starting at position 3951 of SEQ ID NO: 3567
ugguaagcugaguguucau

SEQ ID NO: 277695 - RNA, 19 nt, Artificial Sequence
  Description of Artificial Sequence: Synthetic oligonucleotide
  Antisense strand to SEQ ID NO: 277694
augaacacucagcuuacca

SEQ ID NO: 277696 - RNA, 19 nt, Artificial Sequence
  Description of Artificial Sequence: Synthetic oligonucleotide
  Sense strand starting at position 3972 of SEQ ID NO: 3567
ggcgggucugguuagugua

SEQ ID NO: 277697 - RNA, 19 nt, Artificial Sequence
  Description of Artificial Sequence: Synthetic oligonucleotide
  Antisense strand to SEQ ID NO: 277696
uacacuaaccagacccgcc

SEQ ID NO: 277698 - RNA, 19 nt, Artificial Sequence
  Description of Artificial Sequence: Synthetic oligonucleotide
  Sense strand starting at position 3973 of SEQ ID NO: 3567
gcgggucugguuaguguaa

SEQ ID NO: 277699 - RNA, 19 nt, Artificial Sequence
  Description of Artificial Sequence: Synthetic oligonucleotide
  Antisense strand to SEQ ID NO: 277698
uuacacuaaccagacccgc

SEQ ID NO: 277700 - RNA, 19 nt, Artificial Sequence
  Description of Artificial Sequence: Synthetic oligonucleotide
  Sense strand starting at position 3974 of SEQ ID NO: 3567
cgggucugguuaguguaaa

SEQ ID NO: 277701 - RNA, 19 nt, Artificial Sequence
  Description of Artificial Sequence: Synthetic oligonucleotide
  Antisense strand to SEQ ID NO: 277700
uuuacacuaaccagacccg

SEQ ID NO: 277702 - RNA, 19 nt, Artificial Sequence
  Description of Artificial Sequence: Synthetic oligonucleotide
  Sense strand starting at position 4 of SEQ ID NO: 3568
gagcaugaauucccagaga

SEQ ID NO: 277703 - RNA, 19 nt, Artificial Sequence
  Description of Artificial Sequence: Synthetic oligonucleotide
  Antisense strand to SEQ ID NO: 277702
ucucugggaauucaugcuc

SEQ ID NO: 277704 - RNA, 19 nt, Artificial Sequence
  Description of Artificial Sequence: Synthetic oligonucleotide
  Sense strand starting at position 206 of SEQ ID NO: 3568
agcuaaaguuccuuaagaa

SEQ ID NO: 277705 - RNA, 19 nt, Artificial Sequence
  Description of Artificial Sequence: Synthetic oligonucleotide
  Antisense strand to SEQ ID NO: 277704
uucuuaaggaacuuuagcu

SEQ ID NO: 277706 - RNA, 19 nt, Artificial Sequence
  Description of Artificial Sequence: Synthetic oligonucleotide
  Sense strand starting at position 207 of SEQ ID NO: 3568
gcuaaaguuccuuaagaaa

SEQ ID NO: 277707 - RNA, 19 nt, Artificial Sequence
  Description of Artificial Sequence: Synthetic oligonucleotide
  Antisense strand to SEQ ID NO: 277706
uuucuuaaggaacuuuagc

SEQ ID NO: 277708 - RNA, 19 nt, Artificial Sequence
  Description of Artificial Sequence: Synthetic oligonucleotide
  Sense strand starting at position 332 of SEQ ID NO: 3568
gacagaaagcaugguccua

SEQ ID NO: 277709 - RNA, 19 nt, Artificial Sequence
  Description of Artificial Sequence: Synthetic oligonucleotide
  Antisense strand to SEQ ID NO: 277708
uaggaccaugcuuucuguc

SEQ ID NO: 277710 - RNA, 19 nt, Artificial Sequence
  Description of Artificial Sequence: Synthetic oligonucleotide
  Sense strand starting at position 1011 of SEQ ID NO: 3568
agccucagaggucauuaga

SEQ ID NO: 277711 - RNA, 19 nt, Artificial Sequence
  Description of Artificial Sequence: Synthetic oligonucleotide
  Antisense strand to SEQ ID NO: 277710
ucuaaugaccucugaggcu

SEQ ID NO: 277712 - RNA, 19 nt, Artificial Sequence
  Description of Artificial Sequence: Synthetic oligonucleotide
  Sense strand starting at position 1062 of SEQ ID NO: 3568
auggaucaguaugucuuaa

SEQ ID NO: 277713 - RNA, 19 nt, Artificial Sequence
  Description of Artificial Sequence: Synthetic oligonucleotide
  Antisense strand to SEQ ID NO: 277712
uuaagacauacugauccau

SEQ ID NO: 277714 - RNA, 19 nt, Artificial Sequence
  Description of Artificial Sequence: Synthetic oligonucleotide
  Sense strand starting at position 1284 of SEQ ID NO: 3568
ucuggaguuggugagugau

SEQ ID NO: 277715 - RNA, 19 nt, Artificial Sequence
  Description of Artificial Sequence: Synthetic oligonucleotide
  Antisense strand to SEQ ID NO: 277714
aucacucaccaacuccaga

SEQ ID NO: 277716 - RNA, 19 nt, Artificial Sequence
  Description of Artificial Sequence: Synthetic oligonucleotide
  Sense strand starting at position 1389 of SEQ ID NO: 3568
aauagcuguggguaauaca

SEQ ID NO: 277717 - RNA, 19 nt, Artificial Sequence
  Description of Artificial Sequence: Synthetic oligonucleotide
  Antisense strand to SEQ ID NO: 277716
uguauuacccacagcuauu

SEQ ID NO: 277718 - RNA, 19 nt, Artificial Sequence
  Description of Artificial Sequence: Synthetic oligonucleotide
  Sense strand starting at position 1396 of SEQ ID NO: 3568
guggguaauacagacuucu

SEQ ID NO: 277719 - RNA, 19 nt, Artificial Sequence
  Description of Artificial Sequence: Synthetic oligonucleotide
  Antisense strand to SEQ ID NO: 277718
agaagucuguauuacccac

SEQ ID NO: 277720 - RNA, 19 nt, Artificial Sequence
  Description of Artificial Sequence: Synthetic oligonucleotide
  Sense strand starting at position 1404 of SEQ ID NO: 3568
uacagacuucugggcugau

SEQ ID NO: 277721 - RNA, 19 nt, Artificial Sequence
  Description of Artificial Sequence: Synthetic oligonucleotide
  Antisense strand to SEQ ID NO: 277720
aucagcccagaagucugua

SEQ ID NO: 277722 - RNA, 19 nt, Artificial Sequence
  Description of Artificial Sequence: Synthetic oligonucleotide
  Sense strand starting at position 1407 of SEQ ID NO: 3568
agacuucugggcugaugga

SEQ ID NO: 277723 - RNA, 19 nt, Artificial Sequence
  Description of Artificial Sequence: Synthetic oligonucleotide
  Antisense strand to SEQ ID NO: 277722
uccaucagcccagaagucu

SEQ ID NO: 277724 - RNA, 19 nt, Artificial Sequence
  Description of Artificial Sequence: Synthetic oligonucleotide
  Sense strand starting at position 1668 of SEQ ID NO: 3568
cagucuugucuguaggaag

SEQ ID NO: 277725 - RNA, 19 nt, Artificial Sequence
  Description of Artificial Sequence: Synthetic oligonucleotide
  Antisense strand to SEQ ID NO: 277724
cuuccuacagacaagacug

SEQ ID NO: 277726 - RNA, 19 nt, Artificial Sequence
  Description of Artificial Sequence: Synthetic oligonucleotide
  Sense strand starting at position 1722 of SEQ ID NO: 3568
agcuauccucagcaggaua

SEQ ID NO: 277727 - RNA, 19 nt, Artificial Sequence
  Description of Artificial Sequence: Synthetic oligonucleotide
  Antisense strand to SEQ ID NO: 277726
uauccugcugaggauagcu

SEQ ID NO: 277728 - RNA, 19 nt, Artificial Sequence
  Description of Artificial Sequence: Synthetic oligonucleotide
  Sense strand starting at position 1745 of SEQ ID NO: 3568
ugacguagcuuauuuacga

SEQ ID NO: 277729 - RNA, 19 nt, Artificial Sequence
  Description of Artificial Sequence: Synthetic oligonucleotide
  Antisense strand to SEQ ID NO: 277728
ucguaaauaagcuacguca

SEQ ID NO: 277730 - RNA, 19 nt, Artificial Sequence
  Description of Artificial Sequence: Synthetic oligonucleotide
  Sense strand starting at position 1746 of SEQ ID NO: 3568
gacguagcuuauuuacgaa

SEQ ID NO: 277731 - RNA, 19 nt, Artificial Sequence
  Description of Artificial Sequence: Synthetic oligonucleotide
  Antisense strand to SEQ ID NO: 277730
uucguaaauaagcuacguc

SEQ ID NO: 277732 - RNA, 19 nt, Artificial Sequence
  Description of Artificial Sequence: Synthetic oligonucleotide
  Sense strand starting at position 1784 of SEQ ID NO: 3568
guacuugucucuuuaauuu

SEQ ID NO: 277733 - RNA, 19 nt, Artificial Sequence
  Description of Artificial Sequence: Synthetic oligonucleotide
  Antisense strand to SEQ ID NO: 277732
aaauuaaagagacaaguac

SEQ ID NO: 277734 - RNA, 19 nt, Artificial Sequence
  Description of Artificial Sequence: Synthetic oligonucleotide
  Sense strand starting at position 1909 of SEQ ID NO: 3568
guuuacuaauuugauagga

SEQ ID NO: 277735 - RNA, 19 nt, Artificial Sequence
  Description of Artificial Sequence: Synthetic oligonucleotide
  Antisense strand to SEQ ID NO: 277734
uccuaucaaauuaguaaac

SEQ ID NO: 277736 - RNA, 19 nt, Artificial Sequence
  Description of Artificial Sequence: Synthetic oligonucleotide
  Sense strand starting at position 2047 of SEQ ID NO: 3568
auuagaugaauggguccau

SEQ ID NO: 277737 - RNA, 19 nt, Artificial Sequence
  Description of Artificial Sequence: Synthetic oligonucleotide
  Antisense strand to SEQ ID NO: 277736
auggacccauucaucuaau

SEQ ID NO: 277738 - RNA, 19 nt, Artificial Sequence
  Description of Artificial Sequence: Synthetic oligonucleotide
  Sense strand starting at position 2088 of SEQ ID NO: 3568
acauauaguuagccuggaa

SEQ ID NO: 277739 - RNA, 19 nt, Artificial Sequence
  Description of Artificial Sequence: Synthetic oligonucleotide
  Antisense strand to SEQ ID NO: 277738
uuccaggcuaacuauaugu

SEQ ID NO: 277740 - RNA, 19 nt, Artificial Sequence
  Description of Artificial Sequence: Synthetic oligonucleotide
  Sense strand starting at position 2091 of SEQ ID NO: 3568
uauaguuagccuggaagga

SEQ ID NO: 277741 - RNA, 19 nt, Artificial Sequence
  Description of Artificial Sequence: Synthetic oligonucleotide
  Antisense strand to SEQ ID NO: 277740
uccuuccaggcuaacuaua

SEQ ID NO: 277742 - RNA, 19 nt, Artificial Sequence
  Description of Artificial Sequence: Synthetic oligonucleotide
  Sense strand starting at position 2193 of SEQ ID NO: 3568
uggucauaugcuuauaauu

SEQ ID NO: 277743 - RNA, 19 nt, Artificial Sequence
  Description of Artificial Sequence: Synthetic oligonucleotide
  Antisense strand to SEQ ID NO: 277742
aauuauaagcauaugacca

SEQ ID NO: 277744 - RNA, 19 nt, Artificial Sequence
  Description of Artificial Sequence: Synthetic oligonucleotide
  Sense strand starting at position 2401 of SEQ ID NO: 3568
acaauuacaugacugaguu

SEQ ID NO: 277745 - RNA, 19 nt, Artificial Sequence
  Description of Artificial Sequence: Synthetic oligonucleotide
  Antisense strand to SEQ ID NO: 277744
aacucagucauguaauugu

SEQ ID NO: 277746 - RNA, 19 nt, Artificial Sequence
  Description of Artificial Sequence: Synthetic oligonucleotide
  Sense strand starting at position 2405 of SEQ ID NO: 3568
uuacaugacugaguuauau

SEQ ID NO: 277747 - RNA, 19 nt, Artificial Sequence
  Description of Artificial Sequence: Synthetic oligonucleotide
  Antisense strand to SEQ ID NO: 277746
auauaacucagucauguaa

SEQ ID NO: 277748 - RNA, 19 nt, Artificial Sequence
  Description of Artificial Sequence: Synthetic oligonucleotide
  Sense strand starting at position 2552 of SEQ ID NO: 3568
acuaauucugccgaaacau

SEQ ID NO: 277749 - RNA, 19 nt, Artificial Sequence
  Description of Artificial Sequence: Synthetic oligonucleotide
  Antisense strand to SEQ ID NO: 277748
auguuucggcagaauuagu

SEQ ID NO: 277750 - RNA, 19 nt, Artificial Sequence
  Description of Artificial Sequence: Synthetic oligonucleotide
  Sense strand starting at position 2579 of SEQ ID NO: 3568
acuugcuuuguugaaacau

SEQ ID NO: 277751 - RNA, 19 nt, Artificial Sequence
  Description of Artificial Sequence: Synthetic oligonucleotide
  Antisense strand to SEQ ID NO: 277750
auguuucaacaaagcaagu

SEQ ID NO: 277752 - RNA, 19 nt, Artificial Sequence
  Description of Artificial Sequence: Synthetic oligonucleotide
  Sense strand starting at position 2648 of SEQ ID NO: 3568
gaucaauaagugugaaagc

SEQ ID NO: 277753 - RNA, 19 nt, Artificial Sequence
  Description of Artificial Sequence: Synthetic oligonucleotide
  Antisense strand to SEQ ID NO: 277752
gcuuucacacuuauugauc

SEQ ID NO: 277754 - RNA, 19 nt, Artificial Sequence
  Description of Artificial Sequence: Synthetic oligonucleotide
  Sense strand starting at position 2835 of SEQ ID NO: 3568
gagaacaguagguauaguu

SEQ ID NO: 277755 - RNA, 19 nt, Artificial Sequence
  Description of Artificial Sequence: Synthetic oligonucleotide
  Antisense strand to SEQ ID NO: 277754
aacuauaccuacuguucuc

SEQ ID NO: 277756 - RNA, 19 nt, Artificial Sequence
  Description of Artificial Sequence: Synthetic oligonucleotide
  Sense strand starting at position 2941 of SEQ ID NO: 3568
cgugaaacagcucauaauu

SEQ ID NO: 277757 - RNA, 19 nt, Artificial Sequence
  Description of Artificial Sequence: Synthetic oligonucleotide
  Antisense strand to SEQ ID NO: 277756
aauuaugagcuguuucacg

SEQ ID NO: 277758 - RNA, 19 nt, Artificial Sequence
  Description of Artificial Sequence: Synthetic oligonucleotide
  Sense strand starting at position 2957 of SEQ ID NO: 3568
auugaugguucuuucuaag

SEQ ID NO: 277759 - RNA, 19 nt, Artificial Sequence
  Description of Artificial Sequence: Synthetic oligonucleotide
  Antisense strand to SEQ ID NO: 277758
cuuagaaagaaccaucaau

SEQ ID NO: 277760 - RNA, 19 nt, Artificial Sequence
  Description of Artificial Sequence: Synthetic oligonucleotide
  Sense strand starting at position 3040 of SEQ ID NO: 3568
agaguaacucucugcagag

SEQ ID NO: 277761 - RNA, 19 nt, Artificial Sequence
  Description of Artificial Sequence: Synthetic oligonucleotide
  Antisense strand to SEQ ID NO: 277760
cucugcagagaguuacucu

SEQ ID NO: 277762 - RNA, 19 nt, Artificial Sequence
  Description of Artificial Sequence: Synthetic oligonucleotide
  Sense strand starting at position 3042 of SEQ ID NO: 3568
aguaacucucugcagagua

SEQ ID NO: 277763 - RNA, 19 nt, Artificial Sequence
  Description of Artificial Sequence: Synthetic oligonucleotide
  Antisense strand to SEQ ID NO: 277762
uacucugcagagaguuacu

SEQ ID NO: 277764 - RNA, 19 nt, Artificial Sequence
  Description of Artificial Sequence: Synthetic oligonucleotide
  Sense strand starting at position 3055 of SEQ ID NO: 3568
agaguaguuaauggguuaa

SEQ ID NO: 277765 - RNA, 19 nt, Artificial Sequence
  Description of Artificial Sequence: Synthetic oligonucleotide
  Antisense strand to SEQ ID NO: 277764
uuaacccauuaacuacucu

SEQ ID NO: 277766 - RNA, 19 nt, Artificial Sequence
  Description of Artificial Sequence: Synthetic oligonucleotide
  Sense strand starting at position 3057 of SEQ ID NO: 3568
aguaguuaauggguuaaau

SEQ ID NO: 277767 - RNA, 19 nt, Artificial Sequence
  Description of Artificial Sequence: Synthetic oligonucleotide
  Antisense strand to SEQ ID NO: 277766
auuuaacccauuaacuacu

SEQ ID NO: 277768 - RNA, 19 nt, Artificial Sequence
  Description of Artificial Sequence: Synthetic oligonucleotide
  Sense strand starting at position 3225 of SEQ ID NO: 3568
uguacaacacuugauaguu

SEQ ID NO: 277769 - RNA, 19 nt, Artificial Sequence
  Description of Artificial Sequence: Synthetic oligonucleotide
  Antisense strand to SEQ ID NO: 277768
aacuaucaaguguuguaca

SEQ ID NO: 277770 - RNA, 19 nt, Artificial Sequence
  Description of Artificial Sequence: Synthetic oligonucleotide
  Sense strand starting at position 3485 of SEQ ID NO: 3568
guugcuaagguugagaaau

SEQ ID NO: 277771 - RNA, 19 nt, Artificial Sequence
  Description of Artificial Sequence: Synthetic oligonucleotide
  Antisense strand to SEQ ID NO: 277770
auuucucaaccuuagcaac

SEQ ID NO: 277772 - RNA, 19 nt, Artificial Sequence
  Description of Artificial Sequence: Synthetic oligonucleotide
  Sense strand starting at position 3570 of SEQ ID NO: 3568
gcagaaaggcauugagaac

SEQ ID NO: 277773 - RNA, 19 nt, Artificial Sequence
  Description of Artificial Sequence: Synthetic oligonucleotide
  Antisense strand to SEQ ID NO: 277772
guucucaaugccuuucugc

SEQ ID NO: 277774 - RNA, 19 nt, Artificial Sequence
  Description of Artificial Sequence: Synthetic oligonucleotide
  Sense strand starting at position 3708 of SEQ ID NO: 3568
uccugcaaucuuggagaaa

SEQ ID NO: 277775 - RNA, 19 nt, Artificial Sequence
  Description of Artificial Sequence: Synthetic oligonucleotide
  Antisense strand to SEQ ID NO: 277774
uuucuccaagauugcagga

SEQ ID NO: 277776 - RNA, 19 nt, Artificial Sequence
  Description of Artificial Sequence: Synthetic oligonucleotide
  Sense strand starting at position 3745 of SEQ ID NO: 3568
auaaucauggccuggagau

SEQ ID NO: 277777 - RNA, 19 nt, Artificial Sequence
  Description of Artificial Sequence: Synthetic oligonucleotide
  Antisense strand to SEQ ID NO: 277776
aucuccaggccaugauuau

SEQ ID NO: 277778 - RNA, 19 nt, Artificial Sequence
  Description of Artificial Sequence: Synthetic oligonucleotide
  Sense strand starting at position 3746 of SEQ ID NO: 3568
uaaucauggccuggagauu

SEQ ID NO: 277779 - RNA, 19 nt, Artificial Sequence
  Description of Artificial Sequence: Synthetic oligonucleotide
  Antisense strand to SEQ ID NO: 277778
aaucuccaggccaugauua

SEQ ID NO: 277780 - RNA, 19 nt, Artificial Sequence
  Description of Artificial Sequence: Synthetic oligonucleotide
  Sense strand starting at position 3851 of SEQ ID NO: 3568
guuugugaauaacuagaga

SEQ ID NO: 277781 - RNA, 19 nt, Artificial Sequence
  Description of Artificial Sequence: Synthetic oligonucleotide
  Antisense strand to SEQ ID NO: 277780
ucucuaguuauucacaaac

SEQ ID NO: 277782 - RNA, 19 nt, Artificial Sequence
  Description of Artificial Sequence: Synthetic oligonucleotide
  Sense strand starting at position 120 of SEQ ID NO: 3570
aauggauaguuaguggauu

SEQ ID NO: 277783 - RNA, 19 nt, Artificial Sequence
  Description of Artificial Sequence: Synthetic oligonucleotide
  Antisense strand to SEQ ID NO: 277782
aauccacuaacuauccauu

SEQ ID NO: 277784 - RNA, 19 nt, Artificial Sequence
  Description of Artificial Sequence: Synthetic oligonucleotide
  Sense strand starting at position 122 of SEQ ID NO: 3570
uggauaguuaguggauuau

SEQ ID NO: 277785 - RNA, 19 nt, Artificial Sequence
  Description of Artificial Sequence: Synthetic oligonucleotide
  Antisense strand to SEQ ID NO: 277784
auaauccacuaacuaucca

SEQ ID NO: 277786 - RNA, 19 nt, Artificial Sequence
  Description of Artificial Sequence: Synthetic oligonucleotide
  Sense strand starting at position 145 of SEQ ID NO: 3570
cgccaauggauagaguuua

SEQ ID NO: 277787 - RNA, 19 nt, Artificial Sequence
  Description of Artificial Sequence: Synthetic oligonucleotide
  Antisense strand to SEQ ID NO: 277786
uaaacucuauccauuggcg

SEQ ID NO: 277788 - RNA, 19 nt, Artificial Sequence
  Description of Artificial Sequence: Synthetic oligonucleotide
  Sense strand starting at position 225 of SEQ ID NO: 3570
ucuacugaacuaggugauu

SEQ ID NO: 277789 - RNA, 19 nt, Artificial Sequence
  Description of Artificial Sequence: Synthetic oligonucleotide
  Antisense strand to SEQ ID NO: 277788
aaucaccuaguucaguaga

SEQ ID NO: 277790 - RNA, 19 nt, Artificial Sequence
  Description of Artificial Sequence: Synthetic oligonucleotide
  Sense strand starting at position 270 of SEQ ID NO: 3570
gcaagaagaauggguuuga

SEQ ID NO: 277791 - RNA, 19 nt, Artificial Sequence
  Description of Artificial Sequence: Synthetic oligonucleotide
  Antisense strand to SEQ ID NO: 277790
ucaaacccauucuucuugc

SEQ ID NO: 277792 - RNA, 19 nt, Artificial Sequence
  Description of Artificial Sequence: Synthetic oligonucleotide
  Sense strand starting at position 297 of SEQ ID NO: 3570
auggauucaguuugggaca

SEQ ID NO: 277793 - RNA, 19 nt, Artificial Sequence
  Description of Artificial Sequence: Synthetic oligonucleotide
  Antisense strand to SEQ ID NO: 277792
ugucccaaacugaauccau

SEQ ID NO: 277794 - RNA, 19 nt, Artificial Sequence
  Description of Artificial Sequence: Synthetic oligonucleotide
  Sense strand starting at position 338 of SEQ ID NO: 3570
gugucauccaggcaaagau

SEQ ID NO: 277795 - RNA, 19 nt, Artificial Sequence
  Description of Artificial Sequence: Synthetic oligonucleotide
  Antisense strand to SEQ ID NO: 277794
aucuuugccuggaugacac

SEQ ID NO: 277796 - RNA, 19 nt, Artificial Sequence
  Description of Artificial Sequence: Synthetic oligonucleotide
  Sense strand starting at position 347 of SEQ ID NO: 3570
aggcaaagaugcucagcaa

SEQ ID NO: 277797 - RNA, 19 nt, Artificial Sequence
  Description of Artificial Sequence: Synthetic oligonucleotide
  Antisense strand to SEQ ID NO: 277796
uugcugagcaucuuugccu

SEQ ID NO: 277798 - RNA, 19 nt, Artificial Sequence
  Description of Artificial Sequence: Synthetic oligonucleotide
  Sense strand starting at position 418 of SEQ ID NO: 3570
ucagaauauuagucuuuag

SEQ ID NO: 277799 - RNA, 19 nt, Artificial Sequence
  Description of Artificial Sequence: Synthetic oligonucleotide
  Antisense strand to SEQ ID NO: 277798
cuaaagacuaauauucuga

SEQ ID NO: 277800 - RNA, 19 nt, Artificial Sequence
  Description of Artificial Sequence: Synthetic oligonucleotide
  Sense strand starting at position 429 of SEQ ID NO: 3570
gucuuuagacaguaucaga

SEQ ID NO: 277801 - RNA, 19 nt, Artificial Sequence
  Description of Artificial Sequence: Synthetic oligonucleotide
  Antisense strand to SEQ ID NO: 277800
ucugauacugucuaaagac

SEQ ID NO: 277802 - RNA, 19 nt, Artificial Sequence
  Description of Artificial Sequence: Synthetic oligonucleotide
  Sense strand starting at position 517 of SEQ ID NO: 3570
ugccauagguuguuaauuu

SEQ ID NO: 277803 - RNA, 19 nt, Artificial Sequence
  Description of Artificial Sequence: Synthetic oligonucleotide
  Antisense strand to SEQ ID NO: 277802
aaauuaacaaccuauggca

SEQ ID NO: 277804 - RNA, 19 nt, Artificial Sequence
  Description of Artificial Sequence: Synthetic oligonucleotide
  Sense strand starting at position 595 of SEQ ID NO: 3570
gaaauagacuagcuaaagu

SEQ ID NO: 277805 - RNA, 19 nt, Artificial Sequence
  Description of Artificial Sequence: Synthetic oligonucleotide
  Antisense strand to SEQ ID NO: 277804
acuuuagcuagucuauuuc

SEQ ID NO: 277806 - RNA, 19 nt, Artificial Sequence
  Description of Artificial Sequence: Synthetic oligonucleotide
  Sense strand starting at position 622 of SEQ ID NO: 3570
caguguugacucuaugguu

SEQ ID NO: 277807 - RNA, 19 nt, Artificial Sequence
  Description of Artificial Sequence: Synthetic oligonucleotide
  Antisense strand to SEQ ID NO: 277806
aaccauagagucaacacug

SEQ ID NO: 277808 - RNA, 19 nt, Artificial Sequence
  Description of Artificial Sequence: Synthetic oligonucleotide
  Sense strand starting at position 912 of SEQ ID NO: 3570
ugagcaacuuuaguuauca

SEQ ID NO: 277809 - RNA, 19 nt, Artificial Sequence
  Description of Artificial Sequence: Synthetic oligonucleotide
  Antisense strand to SEQ ID NO: 277808
ugauaacuaaaguugcuca

SEQ ID NO: 277810 - RNA, 19 nt, Artificial Sequence
  Description of Artificial Sequence: Synthetic oligonucleotide
  Sense strand starting at position 924 of SEQ ID NO: 3570
guuaucauuugcucaagcu

SEQ ID NO: 277811 - RNA, 19 nt, Artificial Sequence
  Description of Artificial Sequence: Synthetic oligonucleotide
  Antisense strand to SEQ ID NO: 277810
agcuugagcaaaugauaac

SEQ ID NO: 277812 - RNA, 19 nt, Artificial Sequence
  Description of Artificial Sequence: Synthetic oligonucleotide
  Sense strand starting at position 1281 of SEQ ID NO: 3570
agcuaugacugcuccaaga

SEQ ID NO: 277813 - RNA, 19 nt, Artificial Sequence
  Description of Artificial Sequence: Synthetic oligonucleotide
  Antisense strand to SEQ ID NO: 277812
ucuuggagcagucauagcu

SEQ ID NO: 277814 - RNA, 19 nt, Artificial Sequence
  Description of Artificial Sequence: Synthetic oligonucleotide
  Sense strand starting at position 1283 of SEQ ID NO: 3570
cuaugacugcuccaagaac

SEQ ID NO: 277815 - RNA, 19 nt, Artificial Sequence
  Description of Artificial Sequence: Synthetic oligonucleotide
  Antisense strand to SEQ ID NO: 277814
guucuuggagcagucauag

SEQ ID NO: 277816 - RNA, 19 nt, Artificial Sequence
  Description of Artificial Sequence: Synthetic oligonucleotide
  Sense strand starting at position 1466 of SEQ ID NO: 3570
gcccuaacgaccugagaug

SEQ ID NO: 277817 - RNA, 19 nt, Artificial Sequence
  Description of Artificial Sequence: Synthetic oligonucleotide
  Antisense strand to SEQ ID NO: 277816
caucucaggucguuagggc

SEQ ID NO: 277818 - RNA, 19 nt, Artificial Sequence
  Description of Artificial Sequence: Synthetic oligonucleotide
  Sense strand starting at position 1592 of SEQ ID NO: 3570
cagguuaacuguguauaca

SEQ ID NO: 277819 - RNA, 19 nt, Artificial Sequence
  Description of Artificial Sequence: Synthetic oligonucleotide
  Antisense strand to SEQ ID NO: 277818
uguauacacaguuaaccug

SEQ ID NO: 277820 - RNA, 19 nt, Artificial Sequence
  Description of Artificial Sequence: Synthetic oligonucleotide
  Sense strand starting at position 1620 of SEQ ID NO: 3570
agguuaugucaccaacggu

SEQ ID NO: 277821 - RNA, 19 nt, Artificial Sequence
  Description of Artificial Sequence: Synthetic oligonucleotide
  Antisense strand to SEQ ID NO: 277820
accguuggugacauaaccu

SEQ ID NO: 277822 - RNA, 19 nt, Artificial Sequence
  Description of Artificial Sequence: Synthetic oligonucleotide
  Sense strand starting at position 1636 of SEQ ID NO: 3570
gguuacucugaaggugaaa

SEQ ID NO: 277823 - RNA, 19 nt, Artificial Sequence
  Description of Artificial Sequence: Synthetic oligonucleotide
  Antisense strand to SEQ ID NO: 277822
uuucaccuucagaguaacc

SEQ ID NO: 277824 - RNA, 19 nt, Artificial Sequence
  Description of Artificial Sequence: Synthetic oligonucleotide
  Sense strand starting at position 1638 of SEQ ID NO: 3570
uuacucugaaggugaaagu

SEQ ID NO: 277825 - RNA, 19 nt, Artificial Sequence
  Description of Artificial Sequence: Synthetic oligonucleotide
  Antisense strand to SEQ ID NO: 277824
acuuucaccuucagaguaa

SEQ ID NO: 277826 - RNA, 19 nt, Artificial Sequence
  Description of Artificial Sequence: Synthetic oligonucleotide
  Sense strand starting at position 1719 of SEQ ID NO: 3570
ugccguauucguguaauac

SEQ ID NO: 277827 - RNA, 19 nt, Artificial Sequence
  Description of Artificial Sequence: Synthetic oligonucleotide
  Antisense strand to SEQ ID NO: 277826
guauuacacgaauacggca

SEQ ID NO: 277828 - RNA, 19 nt, Artificial Sequence
  Description of Artificial Sequence: Synthetic oligonucleotide
  Sense strand starting at position 1983 of SEQ ID NO: 3570
gagcgaggucuuuagagag

SEQ ID NO: 277829 - RNA, 19 nt, Artificial Sequence
  Description of Artificial Sequence: Synthetic oligonucleotide
  Antisense strand to SEQ ID NO: 277828
cucucuaaagaccucgcuc

SEQ ID NO: 277830 - RNA, 19 nt, Artificial Sequence
  Description of Artificial Sequence: Synthetic oligonucleotide
  Sense strand starting at position 2006 of SEQ ID NO: 3570
cuugaaugcggguaggaga

SEQ ID NO: 277831 - RNA, 19 nt, Artificial Sequence
  Description of Artificial Sequence: Synthetic oligonucleotide
  Antisense strand to SEQ ID NO: 277830
ucuccuacccgcauucaag

SEQ ID NO: 277832 - RNA, 19 nt, Artificial Sequence
  Description of Artificial Sequence: Synthetic oligonucleotide
  Sense strand starting at position 2019 of SEQ ID NO: 3570
aggagagauucucaacaga

SEQ ID NO: 277833 - RNA, 19 nt, Artificial Sequence
  Description of Artificial Sequence: Synthetic oligonucleotide
  Antisense strand to SEQ ID NO: 277832
ucuguugagaaucucuccu

SEQ ID NO: 277834 - RNA, 19 nt, Artificial Sequence
  Description of Artificial Sequence: Synthetic oligonucleotide
  Sense strand starting at position 3161 of SEQ ID NO: 3570
acacguuaggaguaaacga

SEQ ID NO: 277835 - RNA, 19 nt, Artificial Sequence
  Description of Artificial Sequence: Synthetic oligonucleotide
  Antisense strand to SEQ ID NO: 277834
ucguuuacuccuaacgugu

SEQ ID NO: 277836 - RNA, 19 nt, Artificial Sequence
  Description of Artificial Sequence: Synthetic oligonucleotide
  Sense strand starting at position 3207 of SEQ ID NO: 3570
guuguaauggcguuugccu

SEQ ID NO: 277837 - RNA, 19 nt, Artificial Sequence
  Description of Artificial Sequence: Synthetic oligonucleotide
  Antisense strand to SEQ ID NO: 277836
aggcaaacgccauuacaac

SEQ ID NO: 277838 - RNA, 19 nt, Artificial Sequence
  Description of Artificial Sequence: Synthetic oligonucleotide
  Sense strand starting at position 3315 of SEQ ID NO: 3570
cucgguguuauggaagauu

SEQ ID NO: 277839 - RNA, 19 nt, Artificial Sequence
  Description of Artificial Sequence: Synthetic oligonucleotide
  Antisense strand to SEQ ID NO: 277838
aaucuuccauaacaccgag

SEQ ID NO: 277840 - RNA, 19 nt, Artificial Sequence
  Description of Artificial Sequence: Synthetic oligonucleotide
  Sense strand starting at position 3318 of SEQ ID NO: 3570
gguguuauggaagauugcu

SEQ ID NO: 277841 - RNA, 19 nt, Artificial Sequence
  Description of Artificial Sequence: Synthetic oligonucleotide
  Antisense strand to SEQ ID NO: 277840
agcaaucuuccauaacacc

SEQ ID NO: 277842 - RNA, 19 nt, Artificial Sequence
  Description of Artificial Sequence: Synthetic oligonucleotide
  Sense strand starting at position 3324 of SEQ ID NO: 3570
auggaagauugcuugcaca

SEQ ID NO: 277843 - RNA, 19 nt, Artificial Sequence
  Description of Artificial Sequence: Synthetic oligonucleotide
  Antisense strand to SEQ ID NO: 277842
ugugcaagcaaucuuccau

SEQ ID NO: 277844 - RNA, 19 nt, Artificial Sequence
  Description of Artificial Sequence: Synthetic oligonucleotide
  Sense strand starting at position 3348 of SEQ ID NO: 3570
auucguacgaaaggauauu

SEQ ID NO: 277845 - RNA, 19 nt, Artificial Sequence
  Description of Artificial Sequence: Synthetic oligonucleotide
  Antisense strand to SEQ ID NO: 277844
aauauccuuucguacgaau

SEQ ID NO: 277846 - RNA, 19 nt, Artificial Sequence
  Description of Artificial Sequence: Synthetic oligonucleotide
  Sense strand starting at position 3349 of SEQ ID NO: 3570
uucguacgaaaggauauua

SEQ ID NO: 277847 - RNA, 19 nt, Artificial Sequence
  Description of Artificial Sequence: Synthetic oligonucleotide
  Antisense strand to SEQ ID NO: 277846
uaauauccuuucguacgaa

SEQ ID NO: 277848 - RNA, 19 nt, Artificial Sequence
  Description of Artificial Sequence: Synthetic oligonucleotide
  Sense strand starting at position 3723 of SEQ ID NO: 3570
gcuugaaacaagugaaaga

SEQ ID NO: 277849 - RNA, 19 nt, Artificial Sequence
  Description of Artificial Sequence: Synthetic oligonucleotide
  Antisense strand to SEQ ID NO: 277848
ucuuucacuuguuucaagc

SEQ ID NO: 277850 - RNA, 19 nt, Artificial Sequence
  Description of Artificial Sequence: Synthetic oligonucleotide
  Sense strand starting at position 3822 of SEQ ID NO: 3570
guauauagauuacuaucca

SEQ ID NO: 277851 - RNA, 19 nt, Artificial Sequence
  Description of Artificial Sequence: Synthetic oligonucleotide
  Antisense strand to SEQ ID NO: 277850
uggauaguaaucuauauac

SEQ ID NO: 277852 - RNA, 19 nt, Artificial Sequence
  Description of Artificial Sequence: Synthetic oligonucleotide
  Sense strand starting at position 3870 of SEQ ID NO: 3570
gggcuacauagucaguauu

SEQ ID NO: 277853 - RNA, 19 nt, Artificial Sequence
  Description of Artificial Sequence: Synthetic oligonucleotide
  Antisense strand to SEQ ID NO: 277852
aauacugacuauguagccc

SEQ ID NO: 277854 - RNA, 19 nt, Artificial Sequence
  Description of Artificial Sequence: Synthetic oligonucleotide
  Sense strand starting at position 3872 of SEQ ID NO: 3570
gcuacauagucaguauuuc

SEQ ID NO: 277855 - RNA, 19 nt, Artificial Sequence
  Description of Artificial Sequence: Synthetic oligonucleotide
  Antisense strand to SEQ ID NO: 277854
gaaauacugacuauguagc

SEQ ID NO: 277856 - RNA, 19 nt, Artificial Sequence
  Description of Artificial Sequence: Synthetic oligonucleotide
  Sense strand starting at position 3894 of SEQ ID NO: 3570
auauaugaacuccgcauaa

SEQ ID NO: 277857 - RNA, 19 nt, Artificial Sequence
  Description of Artificial Sequence: Synthetic oligonucleotide
  Antisense strand to SEQ ID NO: 277856
uuaugcggaguucauauau

SEQ ID NO: 277858 - RNA, 19 nt, Artificial Sequence
  Description of Artificial Sequence: Synthetic oligonucleotide
  Sense strand starting at position 3896 of SEQ ID NO: 3570
auaugaacuccgcauaaca

SEQ ID NO: 277859 - RNA, 19 nt, Artificial Sequence
  Description of Artificial Sequence: Synthetic oligonucleotide
  Antisense strand to SEQ ID NO: 277858
uguuaugcggaguucauau

SEQ ID NO: 277860 - RNA, 19 nt, Artificial Sequence
  Description of Artificial Sequence: Synthetic oligonucleotide
  Sense strand starting at position 3907 of SEQ ID NO: 3570
gcauaacaccuauggcaaa

SEQ ID NO: 277861 - RNA, 19 nt, Artificial Sequence
  Description of Artificial Sequence: Synthetic oligonucleotide
  Antisense strand to SEQ ID NO: 277860
uuugccauagguguuaugc

SEQ ID NO: 277862 - RNA, 19 nt, Artificial Sequence
  Description of Artificial Sequence: Synthetic oligonucleotide
  Sense strand starting at position 16 of SEQ ID NO: 3569
cgccaauggauagaguuua

SEQ ID NO: 277863 - RNA, 19 nt, Artificial Sequence
  Description of Artificial Sequence: Synthetic oligonucleotide
  Antisense strand to SEQ ID NO: 277862
uaaacucuauccauuggcg

SEQ ID NO: 277864 - RNA, 19 nt, Artificial Sequence
  Description of Artificial Sequence: Synthetic oligonucleotide
  Sense strand starting at position 96 of SEQ ID NO: 3569
ucuacugaacuaggugauu

SEQ ID NO: 277865 - RNA, 19 nt, Artificial Sequence
  Description of Artificial Sequence: Synthetic oligonucleotide
  Antisense strand to SEQ ID NO: 277864
aaucaccuaguucaguaga

SEQ ID NO: 277866 - RNA, 19 nt, Artificial Sequence
  Description of Artificial Sequence: Synthetic oligonucleotide
  Sense strand starting at position 141 of SEQ ID NO: 3569
gcaagaagaauggguuuga

SEQ ID NO: 277867 - RNA, 19 nt, Artificial Sequence
  Description of Artificial Sequence: Synthetic oligonucleotide
  Antisense strand to SEQ ID NO: 277866
ucaaacccauucuucuugc

SEQ ID NO: 277868 - RNA, 19 nt, Artificial Sequence
  Description of Artificial Sequence: Synthetic oligonucleotide
  Sense strand starting at position 168 of SEQ ID NO: 3569
auggauucaguuugggaca

SEQ ID NO: 277869 - RNA, 19 nt, Artificial Sequence
  Description of Artificial Sequence: Synthetic oligonucleotide
  Antisense strand to SEQ ID NO: 277868
ugucccaaacugaauccau

SEQ ID NO: 277870 - RNA, 19 nt, Artificial Sequence
  Description of Artificial Sequence: Synthetic oligonucleotide
  Sense strand starting at position 209 of SEQ ID NO: 3569
gugucauccaggcaaagau

SEQ ID NO: 277871 - RNA, 19 nt, Artificial Sequence
  Description of Artificial Sequence: Synthetic oligonucleotide
  Antisense strand to SEQ ID NO: 277870
aucuuugccuggaugacac

SEQ ID NO: 277872 - RNA, 19 nt, Artificial Sequence
  Description of Artificial Sequence: Synthetic oligonucleotide
  Sense strand starting at position 218 of SEQ ID NO: 3569
aggcaaagaugcucagcaa

SEQ ID NO: 277873 - RNA, 19 nt, Artificial Sequence
  Description of Artificial Sequence: Synthetic oligonucleotide
  Antisense strand to SEQ ID NO: 277872
uugcugagcaucuuugccu

SEQ ID NO: 277874 - RNA, 19 nt, Artificial Sequence
  Description of Artificial Sequence: Synthetic oligonucleotide
  Sense strand starting at position 289 of SEQ ID NO: 3569
ucagaauauuagucuuuag

SEQ ID NO: 277875 - RNA, 19 nt, Artificial Sequence
  Description of Artificial Sequence: Synthetic oligonucleotide
  Antisense strand to SEQ ID NO: 277874
cuaaagacuaauauucuga

SEQ ID NO: 277876 - RNA, 19 nt, Artificial Sequence
  Description of Artificial Sequence: Synthetic oligonucleotide
  Sense strand starting at position 300 of SEQ ID NO: 3569
gucuuuagacaguaucaga

SEQ ID NO: 277877 - RNA, 19 nt, Artificial Sequence
  Description of Artificial Sequence: Synthetic oligonucleotide
  Antisense strand to SEQ ID NO: 277876
ucugauacugucuaaagac

SEQ ID NO: 277878 - RNA, 19 nt, Artificial Sequence
  Description of Artificial Sequence: Synthetic oligonucleotide
  Sense strand starting at position 388 of SEQ ID NO: 3569
ugccauagguuguuaauuu

SEQ ID NO: 277879 - RNA, 19 nt, Artificial Sequence
  Description of Artificial Sequence: Synthetic oligonucleotide
  Antisense strand to SEQ ID NO: 277878
aaauuaacaaccuauggca

SEQ ID NO: 277880 - RNA, 19 nt, Artificial Sequence
  Description of Artificial Sequence: Synthetic oligonucleotide
  Sense strand starting at position 466 of SEQ ID NO: 3569
gaaauagacuagcuaaagu

SEQ ID NO: 277881 - RNA, 19 nt, Artificial Sequence
  Description of Artificial Sequence: Synthetic oligonucleotide
  Antisense strand to SEQ ID NO: 277880
acuuuagcuagucuauuuc

SEQ ID NO: 277882 - RNA, 19 nt, Artificial Sequence
  Description of Artificial Sequence: Synthetic oligonucleotide
  Sense strand starting at position 493 of SEQ ID NO: 3569
caguguugacucuaugguu

SEQ ID NO: 277883 - RNA, 19 nt, Artificial Sequence
  Description of Artificial Sequence: Synthetic oligonucleotide
  Antisense strand to SEQ ID NO: 277882
aaccauagagucaacacug

SEQ ID NO: 277884 - RNA, 19 nt, Artificial Sequence
  Description of Artificial Sequence: Synthetic oligonucleotide
  Sense strand starting at position 783 of SEQ ID NO: 3569
ugagcaacuuuaguuauca

SEQ ID NO: 277885 - RNA, 19 nt, Artificial Sequence
  Description of Artificial Sequence: Synthetic oligonucleotide
  Antisense strand to SEQ ID NO: 277884
ugauaacuaaaguugcuca

SEQ ID NO: 277886 - RNA, 19 nt, Artificial Sequence
  Description of Artificial Sequence: Synthetic oligonucleotide
  Sense strand starting at position 795 of SEQ ID NO: 3569
guuaucauuugcucaagcu

SEQ ID NO: 277887 - RNA, 19 nt, Artificial Sequence
  Description of Artificial Sequence: Synthetic oligonucleotide
  Antisense strand to SEQ ID NO: 277886
agcuugagcaaaugauaac

SEQ ID NO: 277888 - RNA, 19 nt, Artificial Sequence
  Description of Artificial Sequence: Synthetic oligonucleotide
  Sense strand starting at position 1152 of SEQ ID NO: 3569
agcuaugacugcuccaaga

SEQ ID NO: 277889 - RNA, 19 nt, Artificial Sequence
  Description of Artificial Sequence: Synthetic oligonucleotide
  Antisense strand to SEQ ID NO: 277888
ucuuggagcagucauagcu

SEQ ID NO: 277890 - RNA, 19 nt, Artificial Sequence
  Description of Artificial Sequence: Synthetic oligonucleotide
  Sense strand starting at position 1154 of SEQ ID NO: 3569
cuaugacugcuccaagaac

SEQ ID NO: 277891 - RNA, 19 nt, Artificial Sequence
  Description of Artificial Sequence: Synthetic oligonucleotide
  Antisense strand to SEQ ID NO: 277890
guucuuggagcagucauag

SEQ ID NO: 277892 - RNA, 19 nt, Artificial Sequence
  Description of Artificial Sequence: Synthetic oligonucleotide
  Sense strand starting at position 1337 of SEQ ID NO: 3569
gcccuaacgaccugagaug

SEQ ID NO: 277893 - RNA, 19 nt, Artificial Sequence
  Description of Artificial Sequence: Synthetic oligonucleotide
  Antisense strand to SEQ ID NO: 277892
caucucaggucguuagggc

SEQ ID NO: 277894 - RNA, 19 nt, Artificial Sequence
  Description of Artificial Sequence: Synthetic oligonucleotide
  Sense strand starting at position 1463 of SEQ ID NO: 3569
cagguuaacuguguauaca

SEQ ID NO: 277895 - RNA, 19 nt, Artificial Sequence
  Description of Artificial Sequence: Synthetic oligonucleotide
  Antisense strand to SEQ ID NO: 277894
uguauacacaguuaaccug

SEQ ID NO: 277896 - RNA, 19 nt, Artificial Sequence
  Description of Artificial Sequence: Synthetic oligonucleotide
  Sense strand starting at position 1491 of SEQ ID NO: 3569
agguuaugucaccaacggu

SEQ ID NO: 277897 - RNA, 19 nt, Artificial Sequence
  Description of Artificial Sequence: Synthetic oligonucleotide
  Antisense strand to SEQ ID NO: 277896
accguuggugacauaaccu

SEQ ID NO: 277898 - RNA, 19 nt, Artificial Sequence
  Description of Artificial Sequence: Synthetic oligonucleotide
  Sense strand starting at position 1507 of SEQ ID NO: 3569
gguuacucugaaggugaaa

SEQ ID NO: 277899 - RNA, 19 nt, Artificial Sequence
  Description of Artificial Sequence: Synthetic oligonucleotide
  Antisense strand to SEQ ID NO: 277898
uuucaccuucagaguaacc

SEQ ID NO: 277900 - RNA, 19 nt, Artificial Sequence
  Description of Artificial Sequence: Synthetic oligonucleotide
  Sense strand starting at position 1509 of SEQ ID NO: 3569
uuacucugaaggugaaagu

SEQ ID NO: 277901 - RNA, 19 nt, Artificial Sequence
  Description of Artificial Sequence: Synthetic oligonucleotide
  Antisense strand to SEQ ID NO: 277900
acuuucaccuucagaguaa

SEQ ID NO: 277902 - RNA, 19 nt, Artificial Sequence
  Description of Artificial Sequence: Synthetic oligonucleotide
  Sense strand starting at position 1590 of SEQ ID NO: 3569
ugccguauucguguaauac

SEQ ID NO: 277903 - RNA, 19 nt, Artificial Sequence
  Description of Artificial Sequence: Synthetic oligonucleotide
  Antisense strand to SEQ ID NO: 277902
guauuacacgaauacggca

SEQ ID NO: 277904 - RNA, 19 nt, Artificial Sequence
  Description of Artificial Sequence: Synthetic oligonucleotide
  Sense strand starting at position 1854 of SEQ ID NO: 3569
gagcgaggucuuuagagag

SEQ ID NO: 277905 - RNA, 19 nt, Artificial Sequence
  Description of Artificial Sequence: Synthetic oligonucleotide
  Antisense strand to SEQ ID NO: 277904
cucucuaaagaccucgcuc

SEQ ID NO: 277906 - RNA, 19 nt, Artificial Sequence
  Description of Artificial Sequence: Synthetic oligonucleotide
  Sense strand starting at position 1877 of SEQ ID NO: 3569
cuugaaugcggguaggaga

SEQ ID NO: 277907 - RNA, 19 nt, Artificial Sequence
  Description of Artificial Sequence: Synthetic oligonucleotide
  Antisense strand to SEQ ID NO: 277906
ucuccuacccgcauucaag

SEQ ID NO: 277908 - RNA, 19 nt, Artificial Sequence
  Description of Artificial Sequence: Synthetic oligonucleotide
  Sense strand starting at position 1890 of SEQ ID NO: 3569
aggagagauucucaacaga

SEQ ID NO: 277909 - RNA, 19 nt, Artificial Sequence
  Description of Artificial Sequence: Synthetic oligonucleotide
  Antisense strand to SEQ ID NO: 277908
ucuguugagaaucucuccu

SEQ ID NO: 277910 - RNA, 19 nt, Artificial Sequence
  Description of Artificial Sequence: Synthetic oligonucleotide
  Sense strand starting at position 3032 of SEQ ID NO: 3569
acacguuaggaguaaacga

SEQ ID NO: 277911 - RNA, 19 nt, Artificial Sequence
  Description of Artificial Sequence: Synthetic oligonucleotide
  Antisense strand to SEQ ID NO: 277910
ucguuuacuccuaacgugu

SEQ ID NO: 277912 - RNA, 19 nt, Artificial Sequence
  Description of Artificial Sequence: Synthetic oligonucleotide
  Sense strand starting at position 3078 of SEQ ID NO: 3569
guuguaauggcguuugccu

SEQ ID NO: 277913 - RNA, 19 nt, Artificial Sequence
  Description of Artificial Sequence: Synthetic oligonucleotide
  Antisense strand to SEQ ID NO: 277912
aggcaaacgccauuacaac

SEQ ID NO: 277914 - RNA, 19 nt, Artificial Sequence
  Description of Artificial Sequence: Synthetic oligonucleotide
  Sense strand starting at position 3186 of SEQ ID NO: 3569
cucgguguuauggaagauu

SEQ ID NO: 277915 - RNA, 19 nt, Artificial Sequence
  Description of Artificial Sequence: Synthetic oligonucleotide
  Antisense strand to SEQ ID NO: 277914
aaucuuccauaacaccgag

SEQ ID NO: 277916 - RNA, 19 nt, Artificial Sequence
  Description of Artificial Sequence: Synthetic oligonucleotide
  Sense strand starting at position 3189 of SEQ ID NO: 3569
gguguuauggaagauugcu

SEQ ID NO: 277917 - RNA, 19 nt, Artificial Sequence
  Description of Artificial Sequence: Synthetic oligonucleotide
  Antisense strand to SEQ ID NO: 277916
agcaaucuuccauaacacc

SEQ ID NO: 277918 - RNA, 19 nt, Artificial Sequence
  Description of Artificial Sequence: Synthetic oligonucleotide
  Sense strand starting at position 3195 of SEQ ID NO: 3569
auggaagauugcuugcaca

SEQ ID NO: 277919 - RNA, 19 nt, Artificial Sequence
  Description of Artificial Sequence: Synthetic oligonucleotide
  Antisense strand to SEQ ID NO: 277918
ugugcaagcaaucuuccau

SEQ ID NO: 277920 - RNA, 19 nt, Artificial Sequence
  Description of Artificial Sequence: Synthetic oligonucleotide
  Sense strand starting at position 3219 of SEQ ID NO: 3569
auucguacgaaaggauauu

SEQ ID NO: 277921 - RNA, 19 nt, Artificial Sequence
  Description of Artificial Sequence: Synthetic oligonucleotide
  Antisense strand to SEQ ID NO: 277920
aauauccuuucguacgaau

SEQ ID NO: 277922 - RNA, 19 nt, Artificial Sequence
  Description of Artificial Sequence: Synthetic oligonucleotide
  Sense strand starting at position 3220 of SEQ ID NO: 3569
uucguacgaaaggauauua

SEQ ID NO: 277923 - RNA, 19 nt, Artificial Sequence
  Description of Artificial Sequence: Synthetic oligonucleotide
  Antisense strand to SEQ ID NO: 277922
uaauauccuuucguacgaa

SEQ ID NO: 277924 - RNA, 19 nt, Artificial Sequence
  Description of Artificial Sequence: Synthetic oligonucleotide
  Sense strand starting at position 3594 of SEQ ID NO: 3569
gcuugaaacaagugaaaga

SEQ ID NO: 277925 - RNA, 19 nt, Artificial Sequence
  Description of Artificial Sequence: Synthetic oligonucleotide
  Antisense strand to SEQ ID NO: 277924
ucuuucacuuguuucaagc

SEQ ID NO: 277926 - RNA, 19 nt, Artificial Sequence
  Description of Artificial Sequence: Synthetic oligonucleotide
  Sense strand starting at position 3693 of SEQ ID NO: 3569
guauauagauuacuaucca

SEQ ID NO: 277927 - RNA, 19 nt, Artificial Sequence
  Description of Artificial Sequence: Synthetic oligonucleotide
  Antisense strand to SEQ ID NO: 277926
uggauaguaaucuauauac

SEQ ID NO: 277928 - RNA, 19 nt, Artificial Sequence
  Description of Artificial Sequence: Synthetic oligonucleotide
  Sense strand starting at position 3741 of SEQ ID NO: 3569
gggcuacauagucaguauu

SEQ ID NO: 277929 - RNA, 19 nt, Artificial Sequence
  Description of Artificial Sequence: Synthetic oligonucleotide
  Antisense strand to SEQ ID NO: 277928
aauacugacuauguagccc

SEQ ID NO: 277930 - RNA, 19 nt, Artificial Sequence
  Description of Artificial Sequence: Synthetic oligonucleotide
  Sense strand starting at position 3743 of SEQ ID NO: 3569
gcuacauagucaguauuuc

SEQ ID NO: 277931 - RNA, 19 nt, Artificial Sequence
  Description of Artificial Sequence: Synthetic oligonucleotide
  Antisense strand to SEQ ID NO: 277930
gaaauacugacuauguagc

SEQ ID NO: 277932 - RNA, 19 nt, Artificial Sequence
  Description of Artificial Sequence: Synthetic oligonucleotide
  Sense strand starting at position 3765 of SEQ ID NO: 3569
auauaugaacuccgcauaa

SEQ ID NO: 277933 - RNA, 19 nt, Artificial Sequence
  Description of Artificial Sequence: Synthetic oligonucleotide
  Antisense strand to SEQ ID NO: 277932
uuaugcggaguucauauau

SEQ ID NO: 277934 - RNA, 19 nt, Artificial Sequence
  Description of Artificial Sequence: Synthetic oligonucleotide
  Sense strand starting at position 3767 of SEQ ID NO: 3569
auaugaacuccgcauaaca

SEQ ID NO: 277935 - RNA, 19 nt, Artificial Sequence
  Description of Artificial Sequence: Synthetic oligonucleotide
  Antisense strand to SEQ ID NO: 277934
uguuaugcggaguucauau

SEQ ID NO: 277936 - RNA, 19 nt, Artificial Sequence
  Description of Artificial Sequence: Synthetic oligonucleotide
  Sense strand starting at position 3778 of SEQ ID NO: 3569
gcauaacaccuauggcaaa

SEQ ID NO: 277937 - RNA, 19 nt, Artificial Sequence
  Description of Artificial Sequence: Synthetic oligonucleotide
  Antisense strand to SEQ ID NO: 277936
uuugccauagguguuaugc

SEQ ID NO: 277938 - RNA, 19 nt, Artificial Sequence
  Description of Artificial Sequence: Synthetic oligonucleotide
  Sense strand starting at position 3879 of SEQ ID NO: 3569
agguuaaguagcugggaua

SEQ ID NO: 277939 - RNA, 19 nt, Artificial Sequence
  Description of Artificial Sequence: Synthetic oligonucleotide
  Antisense strand to SEQ ID NO: 277938
uaucccagcuacuuaaccu

SEQ ID NO: 277940 - RNA, 19 nt, Artificial Sequence
  Description of Artificial Sequence: Synthetic oligonucleotide
  Sense strand starting at position 3880 of SEQ ID NO: 3569
gguuaaguagcugggauaa

SEQ ID NO: 277941 - RNA, 19 nt, Artificial Sequence
  Description of Artificial Sequence: Synthetic oligonucleotide
  Antisense strand to SEQ ID NO: 277940
uuaucccagcuacuuaacc

SEQ ID NO: 277942 - RNA, 19 nt, Artificial Sequence
  Description of Artificial Sequence: Synthetic oligonucleotide
  Sense strand starting at position 19 of SEQ ID NO: 3571
caguguugacucuaugguu

SEQ ID NO: 277943 - RNA, 19 nt, Artificial Sequence
  Description of Artificial Sequence: Synthetic oligonucleotide
  Antisense strand to SEQ ID NO: 277942
aaccauagagucaacacug

SEQ ID NO: 277944 - RNA, 19 nt, Artificial Sequence
  Description of Artificial Sequence: Synthetic oligonucleotide
  Sense strand starting at position 309 of SEQ ID NO: 3571
ugagcaacuuuaguuauca

SEQ ID NO: 277945 - RNA, 19 nt, Artificial Sequence
  Description of Artificial Sequence: Synthetic oligonucleotide
  Antisense strand to SEQ ID NO: 277944
ugauaacuaaaguugcuca

SEQ ID NO: 277946 - RNA, 19 nt, Artificial Sequence
  Description of Artificial Sequence: Synthetic oligonucleotide
  Sense strand starting at position 321 of SEQ ID NO: 3571
guuaucauuugcucaagcu

SEQ ID NO: 277947 - RNA, 19 nt, Artificial Sequence
  Description of Artificial Sequence: Synthetic oligonucleotide
  Antisense strand to SEQ ID NO: 277946
agcuugagcaaaugauaac

SEQ ID NO: 277948 - RNA, 19 nt, Artificial Sequence
  Description of Artificial Sequence: Synthetic oligonucleotide
  Sense strand starting at position 633 of SEQ ID NO: 3571
uggcauccgcuauaaucua

SEQ ID NO: 277949 - RNA, 19 nt, Artificial Sequence
  Description of Artificial Sequence: Synthetic oligonucleotide
  Antisense strand to SEQ ID NO: 277948
uagauuauagcggaugcca

SEQ ID NO: 277950 - RNA, 19 nt, Artificial Sequence
  Description of Artificial Sequence: Synthetic oligonucleotide
  Sense strand starting at position 678 of SEQ ID NO: 3571
agcuaugacugcuccaaga

SEQ ID NO: 277951 - RNA, 19 nt, Artificial Sequence
  Description of Artificial Sequence: Synthetic oligonucleotide
  Antisense strand to SEQ ID NO: 277950
ucuuggagcagucauagcu

SEQ ID NO: 277952 - RNA, 19 nt, Artificial Sequence
  Description of Artificial Sequence: Synthetic oligonucleotide
  Sense strand starting at position 680 of SEQ ID NO: 3571
cuaugacugcuccaagaac

SEQ ID NO: 277953 - RNA, 19 nt, Artificial Sequence
  Description of Artificial Sequence: Synthetic oligonucleotide
  Antisense strand to SEQ ID NO: 277952
guucuuggagcagucauag

SEQ ID NO: 277954 - RNA, 19 nt, Artificial Sequence
  Description of Artificial Sequence: Synthetic oligonucleotide
  Sense strand starting at position 863 of SEQ ID NO: 3571
gcccuaacgaccugagaug

SEQ ID NO: 277955 - RNA, 19 nt, Artificial Sequence
  Description of Artificial Sequence: Synthetic oligonucleotide
  Antisense strand to SEQ ID NO: 277954
caucucaggucguuagggc

SEQ ID NO: 277956 - RNA, 19 nt, Artificial Sequence
  Description of Artificial Sequence: Synthetic oligonucleotide
  Sense strand starting at position 989 of SEQ ID NO: 3571
cagguuaacuguguauaca

SEQ ID NO: 277957 - RNA, 19 nt, Artificial Sequence
  Description of Artificial Sequence: Synthetic oligonucleotide
  Antisense strand to SEQ ID NO: 277956
uguauacacaguuaaccug

SEQ ID NO: 277958 - RNA, 19 nt, Artificial Sequence
  Description of Artificial Sequence: Synthetic oligonucleotide
  Sense strand starting at position 1017 of SEQ ID NO: 3571
agguuaugucaccaacggu

SEQ ID NO: 277959 - RNA, 19 nt, Artificial Sequence
  Description of Artificial Sequence: Synthetic oligonucleotide
  Antisense strand to SEQ ID NO: 277958
accguuggugacauaaccu

SEQ ID NO: 277960 - RNA, 19 nt, Artificial Sequence
  Description of Artificial Sequence: Synthetic oligonucleotide
  Sense strand starting at position 1033 of SEQ ID NO: 3571
gguuacucugaaggugaaa

SEQ ID NO: 277961 - RNA, 19 nt, Artificial Sequence
  Description of Artificial Sequence: Synthetic oligonucleotide
  Antisense strand to SEQ ID NO: 277960
uuucaccuucagaguaacc

SEQ ID NO: 277962 - RNA, 19 nt, Artificial Sequence
  Description of Artificial Sequence: Synthetic oligonucleotide
  Sense strand starting at position 1035 of SEQ ID NO: 3571
uuacucugaaggugaaagu

SEQ ID NO: 277963 - RNA, 19 nt, Artificial Sequence
  Description of Artificial Sequence: Synthetic oligonucleotide
  Antisense strand to SEQ ID NO: 277962
acuuucaccuucagaguaa

SEQ ID NO: 277964 - RNA, 19 nt, Artificial Sequence
  Description of Artificial Sequence: Synthetic oligonucleotide
  Sense strand starting at position 1116 of SEQ ID NO: 3571
ugccguauucguguaauac

SEQ ID NO: 277965 - RNA, 19 nt, Artificial Sequence
  Description of Artificial Sequence: Synthetic oligonucleotide
  Antisense strand to SEQ ID NO: 277964
guauuacacgaauacggca

SEQ ID NO: 277966 - RNA, 19 nt, Artificial Sequence
  Description of Artificial Sequence: Synthetic oligonucleotide
  Sense strand starting at position 1380 of SEQ ID NO: 3571
gagcgaggucuuuagagag

SEQ ID NO: 277967 - RNA, 19 nt, Artificial Sequence
  Description of Artificial Sequence: Synthetic oligonucleotide
  Antisense strand to SEQ ID NO: 277966
cucucuaaagaccucgcuc

SEQ ID NO: 277968 - RNA, 19 nt, Artificial Sequence
  Description of Artificial Sequence: Synthetic oligonucleotide
  Sense strand starting at position 1403 of SEQ ID NO: 3571
cuugaaugcggguaggaga

SEQ ID NO: 277969 - RNA, 19 nt, Artificial Sequence
  Description of Artificial Sequence: Synthetic oligonucleotide
  Antisense strand to SEQ ID NO: 277968
ucuccuacccgcauucaag

SEQ ID NO: 277970 - RNA, 19 nt, Artificial Sequence
  Description of Artificial Sequence: Synthetic oligonucleotide
  Sense strand starting at position 1416 of SEQ ID NO: 3571
aggagagauucucaacaga

SEQ ID NO: 277971 - RNA, 19 nt, Artificial Sequence
  Description of Artificial Sequence: Synthetic oligonucleotide
  Antisense strand to SEQ ID NO: 277970
ucuguugagaaucucuccu

SEQ ID NO: 277972 - RNA, 19 nt, Artificial Sequence
  Description of Artificial Sequence: Synthetic oligonucleotide
  Sense strand starting at position 2558 of SEQ ID NO: 3571
acacguuaggaguaaacga

SEQ ID NO: 277973 - RNA, 19 nt, Artificial Sequence
  Description of Artificial Sequence: Synthetic oligonucleotide
  Antisense strand to SEQ ID NO: 277972
ucguuuacuccuaacgugu

SEQ ID NO: 277974 - RNA, 19 nt, Artificial Sequence
  Description of Artificial Sequence: Synthetic oligonucleotide
  Sense strand starting at position 2604 of SEQ ID NO: 3571
guuguaauggcguuugccu

SEQ ID NO: 277975 - RNA, 19 nt, Artificial Sequence
  Description of Artificial Sequence: Synthetic oligonucleotide
  Antisense strand to SEQ ID NO: 277974
aggcaaacgccauuacaac

SEQ ID NO: 277976 - RNA, 19 nt, Artificial Sequence
  Description of Artificial Sequence: Synthetic oligonucleotide
  Sense strand starting at position 2712 of SEQ ID NO: 3571
cucgguguuauggaagauu

SEQ ID NO: 277977 - RNA, 19 nt, Artificial Sequence
  Description of Artificial Sequence: Synthetic oligonucleotide
  Antisense strand to SEQ ID NO: 277976
aaucuuccauaacaccgag

SEQ ID NO: 277978 - RNA, 19 nt, Artificial Sequence
  Description of Artificial Sequence: Synthetic oligonucleotide
  Sense strand starting at position 2715 of SEQ ID NO: 3571
gguguuauggaagauugcu

SEQ ID NO: 277979 - RNA, 19 nt, Artificial Sequence
  Description of Artificial Sequence: Synthetic oligonucleotide
  Antisense strand to SEQ ID NO: 277978
agcaaucuuccauaacacc

SEQ ID NO: 277980 - RNA, 19 nt, Artificial Sequence
  Description of Artificial Sequence: Synthetic oligonucleotide
  Sense strand starting at position 2721 of SEQ ID NO: 3571
auggaagauugcuugcaca

SEQ ID NO: 277981 - RNA, 19 nt, Artificial Sequence
  Description of Artificial Sequence: Synthetic oligonucleotide
  Antisense strand to SEQ ID NO: 277980
ugugcaagcaaucuuccau

SEQ ID NO: 277982 - RNA, 19 nt, Artificial Sequence
  Description of Artificial Sequence: Synthetic oligonucleotide
  Sense strand starting at position 2745 of SEQ ID NO: 3571
auucguacgaaaggauauu

SEQ ID NO: 277983 - RNA, 19 nt, Artificial Sequence
  Description of Artificial Sequence: Synthetic oligonucleotide
  Antisense strand to SEQ ID NO: 277982
aauauccuuucguacgaau

SEQ ID NO: 277984 - RNA, 19 nt, Artificial Sequence
  Description of Artificial Sequence: Synthetic oligonucleotide
  Sense strand starting at position 2746 of SEQ ID NO: 3571
uucguacgaaaggauauua

SEQ ID NO: 277985 - RNA, 19 nt, Artificial Sequence
  Description of Artificial Sequence: Synthetic oligonucleotide
  Antisense strand to SEQ ID NO: 277984
uaauauccuuucguacgaa

SEQ ID NO: 277986 - RNA, 19 nt, Artificial Sequence
  Description of Artificial Sequence: Synthetic oligonucleotide
  Sense strand starting at position 3120 of SEQ ID NO: 3571
gcuugaaacaagugaaaga

SEQ ID NO: 277987 - RNA, 19 nt, Artificial Sequence
  Description of Artificial Sequence: Synthetic oligonucleotide
  Antisense strand to SEQ ID NO: 277986
ucuuucacuuguuucaagc

SEQ ID NO: 277988 - RNA, 19 nt, Artificial Sequence
  Description of Artificial Sequence: Synthetic oligonucleotide
  Sense strand starting at position 3196 of SEQ ID NO: 3571
uuccucuccgucuauauau

SEQ ID NO: 277989 - RNA, 19 nt, Artificial Sequence
  Description of Artificial Sequence: Synthetic oligonucleotide
  Antisense strand to SEQ ID NO: 277988
auauauagacggagaggaa

SEQ ID NO: 277990 - RNA, 19 nt, Artificial Sequence
  Description of Artificial Sequence: Synthetic oligonucleotide
  Sense strand starting at position 3219 of SEQ ID NO: 3571
guauauagauuacuaucca

SEQ ID NO: 277991 - RNA, 19 nt, Artificial Sequence
  Description of Artificial Sequence: Synthetic oligonucleotide
  Antisense strand to SEQ ID NO: 277990
uggauaguaaucuauauac

SEQ ID NO: 277992 - RNA, 19 nt, Artificial Sequence
  Description of Artificial Sequence: Synthetic oligonucleotide
  Sense strand starting at position 3267 of SEQ ID NO: 3571
gggcuacauagucaguauu

SEQ ID NO: 277993 - RNA, 19 nt, Artificial Sequence
  Description of Artificial Sequence: Synthetic oligonucleotide
  Antisense strand to SEQ ID NO: 277992
aauacugacuauguagccc

SEQ ID NO: 277994 - RNA, 19 nt, Artificial Sequence
  Description of Artificial Sequence: Synthetic oligonucleotide
  Sense strand starting at position 3269 of SEQ ID NO: 3571
gcuacauagucaguauuuc

SEQ ID NO: 277995 - RNA, 19 nt, Artificial Sequence
  Description of Artificial Sequence: Synthetic oligonucleotide
  Antisense strand to SEQ ID NO: 277994
gaaauacugacuauguagc

SEQ ID NO: 277996 - RNA, 19 nt, Artificial Sequence
  Description of Artificial Sequence: Synthetic oligonucleotide
  Sense strand starting at position 3291 of SEQ ID NO: 3571
auauaugaacuccgcauaa

SEQ ID NO: 277997 - RNA, 19 nt, Artificial Sequence
  Description of Artificial Sequence: Synthetic oligonucleotide
  Antisense strand to SEQ ID NO: 277996
uuaugcggaguucauauau

SEQ ID NO: 277998 - RNA, 19 nt, Artificial Sequence
  Description of Artificial Sequence: Synthetic oligonucleotide
  Sense strand starting at position 3293 of SEQ ID NO: 3571
auaugaacuccgcauaaca

SEQ ID NO: 277999 - RNA, 19 nt, Artificial Sequence
  Description of Artificial Sequence: Synthetic oligonucleotide
  Antisense strand to SEQ ID NO: 277998
uguuaugcggaguucauau

SEQ ID NO: 278000 - RNA, 19 nt, Artificial Sequence
  Description of Artificial Sequence: Synthetic oligonucleotide
  Sense strand starting at position 3304 of SEQ ID NO: 3571
gcauaacaccuauggcaaa

SEQ ID NO: 278001 - RNA, 19 nt, Artificial Sequence
  Description of Artificial Sequence: Synthetic oligonucleotide
  Antisense strand to SEQ ID NO: 278000
uuugccauagguguuaugc

SEQ ID NO: 278002 - RNA, 19 nt, Artificial Sequence
  Description of Artificial Sequence: Synthetic oligonucleotide
  Sense strand starting at position 3405 of SEQ ID NO: 3571
agguuaaguagcugggaua

SEQ ID NO: 278003 - RNA, 19 nt, Artificial Sequence
  Description of Artificial Sequence: Synthetic oligonucleotide
  Antisense strand to SEQ ID NO: 278002
uaucccagcuacuuaaccu

SEQ ID NO: 278004 - RNA, 19 nt, Artificial Sequence
  Description of Artificial Sequence: Synthetic oligonucleotide
  Sense strand starting at position 3406 of SEQ ID NO: 3571
gguuaaguagcugggauaa

SEQ ID NO: 278005 - RNA, 19 nt, Artificial Sequence
  Description of Artificial Sequence: Synthetic oligonucleotide
  Antisense strand to SEQ ID NO: 278004
uuaucccagcuacuuaacc

SEQ ID NO: 278006 - RNA, 19 nt, Artificial Sequence
  Description of Artificial Sequence: Synthetic oligonucleotide
  Sense strand starting at position 3661 of SEQ ID NO: 3571
gcuguaugccaugaggauu

SEQ ID NO: 278007 - RNA, 19 nt, Artificial Sequence
  Description of Artificial Sequence: Synthetic oligonucleotide
  Antisense strand to SEQ ID NO: 278006
aauccucauggcauacagc

SEQ ID NO: 278008 - RNA, 19 nt, Artificial Sequence
  Description of Artificial Sequence: Synthetic oligonucleotide
  Sense strand starting at position 3716 of SEQ ID NO: 3571
uggacuugugaaggaauuc

SEQ ID NO: 278009 - RNA, 19 nt, Artificial Sequence
  Description of Artificial Sequence: Synthetic oligonucleotide
  Antisense strand to SEQ ID NO: 278008
gaauuccuucacaagucca

SEQ ID NO: 278010 - RNA, 19 nt, Artificial Sequence
  Description of Artificial Sequence: Synthetic oligonucleotide
  Sense strand starting at position 3727 of SEQ ID NO: 3571
aggaauucccuuuggacua

SEQ ID NO: 278011 - RNA, 19 nt, Artificial Sequence
  Description of Artificial Sequence: Synthetic oligonucleotide
  Antisense strand to SEQ ID NO: 278010
uaguccaaagggaauuccu

SEQ ID NO: 278012 - RNA, 19 nt, Artificial Sequence
  Description of Artificial Sequence: Synthetic oligonucleotide
  Sense strand starting at position 3754 of SEQ ID NO: 3571
guagauuguauccgggacu

SEQ ID NO: 278013 - RNA, 19 nt, Artificial Sequence
  Description of Artificial Sequence: Synthetic oligonucleotide
  Antisense strand to SEQ ID NO: 278012
agucccggauacaaucuac

SEQ ID NO: 278014 - RNA, 19 nt, Artificial Sequence
  Description of Artificial Sequence: Synthetic oligonucleotide
  Sense strand starting at position 3757 of SEQ ID NO: 3571
gauuguauccgggacuauc

SEQ ID NO: 278015 - RNA, 19 nt, Artificial Sequence
  Description of Artificial Sequence: Synthetic oligonucleotide
  Antisense strand to SEQ ID NO: 278014
gauagucccggauacaauc

SEQ ID NO: 278016 - RNA, 19 nt, Artificial Sequence
  Description of Artificial Sequence: Synthetic oligonucleotide
  Sense strand starting at position 3841 of SEQ ID NO: 3571
aguggcaaaucacuaucua

SEQ ID NO: 278017 - RNA, 19 nt, Artificial Sequence
  Description of Artificial Sequence: Synthetic oligonucleotide
  Antisense strand to SEQ ID NO: 278016
uagauagugauuugccacu

SEQ ID NO: 278018 - RNA, 19 nt, Artificial Sequence
  Description of Artificial Sequence: Synthetic oligonucleotide
  Sense strand starting at position 3860 of SEQ ID NO: 3571
cugugauccuuaucauaga

SEQ ID NO: 278019 - RNA, 19 nt, Artificial Sequence
  Description of Artificial Sequence: Synthetic oligonucleotide
  Antisense strand to SEQ ID NO: 278018
ucuaugauaaggaucacag

SEQ ID NO: 278020 - RNA, 19 nt, Artificial Sequence
  Description of Artificial Sequence: Synthetic oligonucleotide
  Sense strand starting at position 3971 of SEQ ID NO: 3571
uuacaccguugaucuauaa

SEQ ID NO: 278021 - RNA, 19 nt, Artificial Sequence
  Description of Artificial Sequence: Synthetic oligonucleotide
  Antisense strand to SEQ ID NO: 278020
uuauagaucaacgguguaa

SEQ ID NO: 278022 - RNA, 19 nt, Artificial Sequence
  Description of Artificial Sequence: Synthetic oligonucleotide
  Sense strand starting at position 568 of SEQ ID NO: 3572
ugaugcaucuucccugagu

SEQ ID NO: 278023 - RNA, 19 nt, Artificial Sequence
  Description of Artificial Sequence: Synthetic oligonucleotide
  Antisense strand to SEQ ID NO: 278022
acucagggaagaugcauca

SEQ ID NO: 278024 - RNA, 19 nt, Artificial Sequence
  Description of Artificial Sequence: Synthetic oligonucleotide
  Sense strand starting at position 569 of SEQ ID NO: 3572
gaugcaucuucccugagua

SEQ ID NO: 278025 - RNA, 19 nt, Artificial Sequence
  Description of Artificial Sequence: Synthetic oligonucleotide
  Antisense strand to SEQ ID NO: 278024
uacucagggaagaugcauc

SEQ ID NO: 278026 - RNA, 19 nt, Artificial Sequence
  Description of Artificial Sequence: Synthetic oligonucleotide
  Sense strand starting at position 570 of SEQ ID NO: 3572
augcaucuucccugaguaa

SEQ ID NO: 278027 - RNA, 19 nt, Artificial Sequence
  Description of Artificial Sequence: Synthetic oligonucleotide
  Antisense strand to SEQ ID NO: 278026
uuacucagggaagaugcau

SEQ ID NO: 278028 - RNA, 19 nt, Artificial Sequence
  Description of Artificial Sequence: Synthetic oligonucleotide
  Sense strand starting at position 571 of SEQ ID NO: 3572
ugcaucuucccugaguaag

SEQ ID NO: 278029 - RNA, 19 nt, Artificial Sequence
  Description of Artificial Sequence: Synthetic oligonucleotide
  Antisense strand to SEQ ID NO: 278028
cuuacucagggaagaugca

SEQ ID NO: 278030 - RNA, 19 nt, Artificial Sequence
  Description of Artificial Sequence: Synthetic oligonucleotide
  Sense strand starting at position 573 of SEQ ID NO: 3572
caucuucccugaguaagag

SEQ ID NO: 278031 - RNA, 19 nt, Artificial Sequence
  Description of Artificial Sequence: Synthetic oligonucleotide
  Antisense strand to SEQ ID NO: 278030
cucuuacucagggaagaug

SEQ ID NO: 278032 - RNA, 19 nt, Artificial Sequence
  Description of Artificial Sequence: Synthetic oligonucleotide
  Sense strand starting at position 709 of SEQ ID NO: 3572
caucguguuguuguacauu

SEQ ID NO: 278033 - RNA, 19 nt, Artificial Sequence
  Description of Artificial Sequence: Synthetic oligonucleotide
  Antisense strand to SEQ ID NO: 278032
aauguacaacaacacgaug

SEQ ID NO: 278034 - RNA, 19 nt, Artificial Sequence
  Description of Artificial Sequence: Synthetic oligonucleotide
  Sense strand starting at position 717 of SEQ ID NO: 3572
uguuguacauuugugcaaa

SEQ ID NO: 278035 - RNA, 19 nt, Artificial Sequence
  Description of Artificial Sequence: Synthetic oligonucleotide
  Antisense strand to SEQ ID NO: 278034
uuugcacaaauguacaaca

SEQ ID NO: 278036 - RNA, 19 nt, Artificial Sequence
  Description of Artificial Sequence: Synthetic oligonucleotide
  Sense strand starting at position 756 of SEQ ID NO: 3572
gagagugggcucugacaua

SEQ ID NO: 278037 - RNA, 19 nt, Artificial Sequence
  Description of Artificial Sequence: Synthetic oligonucleotide
  Antisense strand to SEQ ID NO: 278036
uaugucagagcccacucuc

SEQ ID NO: 278038 - RNA, 19 nt, Artificial Sequence
  Description of Artificial Sequence: Synthetic oligonucleotide
  Sense strand starting at position 807 of SEQ ID NO: 3572
guuccucgacugggacaaa

SEQ ID NO: 278039 - RNA, 19 nt, Artificial Sequence
  Description of Artificial Sequence: Synthetic oligonucleotide
  Antisense strand to SEQ ID NO: 278038
uuugucccagucgaggaac

SEQ ID NO: 278040 - RNA, 19 nt, Artificial Sequence
  Description of Artificial Sequence: Synthetic oligonucleotide
  Sense strand starting at position 927 of SEQ ID NO: 3572
accuaaagcugcucugaaa

SEQ ID NO: 278041 - RNA, 19 nt, Artificial Sequence
  Description of Artificial Sequence: Synthetic oligonucleotide
  Antisense strand to SEQ ID NO: 278040
uuucagagcagcuuuaggu

SEQ ID NO: 278042 - RNA, 19 nt, Artificial Sequence
  Description of Artificial Sequence: Synthetic oligonucleotide
  Sense strand starting at position 1023 of SEQ ID NO: 3572
gacaguguccugcagagua

SEQ ID NO: 278043 - RNA, 19 nt, Artificial Sequence
  Description of Artificial Sequence: Synthetic oligonucleotide
  Antisense strand to SEQ ID NO: 278042
uacucugcaggacacuguc

SEQ ID NO: 278044 - RNA, 19 nt, Artificial Sequence
  Description of Artificial Sequence: Synthetic oligonucleotide
  Sense strand starting at position 1219 of SEQ ID NO: 3572
cucugagguucuuucuagu

SEQ ID NO: 278045 - RNA, 19 nt, Artificial Sequence
  Description of Artificial Sequence: Synthetic oligonucleotide
  Antisense strand to SEQ ID NO: 278044
acuagaaagaaccucagag

SEQ ID NO: 278046 - RNA, 19 nt, Artificial Sequence
  Description of Artificial Sequence: Synthetic oligonucleotide
  Sense strand starting at position 1225 of SEQ ID NO: 3572
gguucuuucuagucuaaug

SEQ ID NO: 278047 - RNA, 19 nt, Artificial Sequence
  Description of Artificial Sequence: Synthetic oligonucleotide
  Antisense strand to SEQ ID NO: 278046
cauuagacuagaaagaacc

SEQ ID NO: 278048 - RNA, 19 nt, Artificial Sequence
  Description of Artificial Sequence: Synthetic oligonucleotide
  Sense strand starting at position 1237 of SEQ ID NO: 3572
ucuaaugucccaggaggga

SEQ ID NO: 278049 - RNA, 19 nt, Artificial Sequence
  Description of Artificial Sequence: Synthetic oligonucleotide
  Antisense strand to SEQ ID NO: 278048
ucccuccugggacauuaga

SEQ ID NO: 278050 - RNA, 19 nt, Artificial Sequence
  Description of Artificial Sequence: Synthetic oligonucleotide
  Sense strand starting at position 1277 of SEQ ID NO: 3572
cacagucgugaauguguaa

SEQ ID NO: 278051 - RNA, 19 nt, Artificial Sequence
  Description of Artificial Sequence: Synthetic oligonucleotide
  Antisense strand to SEQ ID NO: 278050
uuacacauucacgacugug

SEQ ID NO: 278052 - RNA, 19 nt, Artificial Sequence
  Description of Artificial Sequence: Synthetic oligonucleotide
  Sense strand starting at position 1372 of SEQ ID NO: 3572
cagagugaguuucuugaca

SEQ ID NO: 278053 - RNA, 19 nt, Artificial Sequence
  Description of Artificial Sequence: Synthetic oligonucleotide
  Antisense strand to SEQ ID NO: 278052
ugucaagaaacucacucug

SEQ ID NO: 278054 - RNA, 19 nt, Artificial Sequence
  Description of Artificial Sequence: Synthetic oligonucleotide
  Sense strand starting at position 2153 of SEQ ID NO: 3572
gagagaaguaugugcauga

SEQ ID NO: 278055 - RNA, 19 nt, Artificial Sequence
  Description of Artificial Sequence: Synthetic oligonucleotide
  Antisense strand to SEQ ID NO: 278054
ucaugcacauacuucucuc

SEQ ID NO: 278056 - RNA, 19 nt, Artificial Sequence
  Description of Artificial Sequence: Synthetic oligonucleotide
  Sense strand starting at position 2157 of SEQ ID NO: 3572
gaaguaugugcaugagccu

SEQ ID NO: 278057 - RNA, 19 nt, Artificial Sequence
  Description of Artificial Sequence: Synthetic oligonucleotide
  Antisense strand to SEQ ID NO: 278056
aggcucaugcacauacuuc

SEQ ID NO: 278058 - RNA, 19 nt, Artificial Sequence
  Description of Artificial Sequence: Synthetic oligonucleotide
  Sense strand starting at position 2252 of SEQ ID NO: 3572
uguguaugugugcagauau

SEQ ID NO: 278059 - RNA, 19 nt, Artificial Sequence
  Description of Artificial Sequence: Synthetic oligonucleotide
  Antisense strand to SEQ ID NO: 278058
auaucugcacacauacaca

SEQ ID NO: 278060 - RNA, 19 nt, Artificial Sequence
  Description of Artificial Sequence: Synthetic oligonucleotide
  Sense strand starting at position 2468 of SEQ ID NO: 3572
agaugugucuguguguaga

SEQ ID NO: 278061 - RNA, 19 nt, Artificial Sequence
  Description of Artificial Sequence: Synthetic oligonucleotide
  Antisense strand to SEQ ID NO: 278060
ucuacacacagacacaucu

SEQ ID NO: 278062 - RNA, 19 nt, Artificial Sequence
  Description of Artificial Sequence: Synthetic oligonucleotide
  Sense strand starting at position 2795 of SEQ ID NO: 3572
gugaguauguguguagaug

SEQ ID NO: 278063 - RNA, 19 nt, Artificial Sequence
  Description of Artificial Sequence: Synthetic oligonucleotide
  Antisense strand to SEQ ID NO: 278062
caucuacacacauacucac

SEQ ID NO: 278064 - RNA, 19 nt, Artificial Sequence
  Description of Artificial Sequence: Synthetic oligonucleotide
  Sense strand starting at position 2796 of SEQ ID NO: 3572
ugaguauguguguagaugu

SEQ ID NO: 278065 - RNA, 19 nt, Artificial Sequence
  Description of Artificial Sequence: Synthetic oligonucleotide
  Antisense strand to SEQ ID NO: 278064
acaucuacacacauacuca

SEQ ID NO: 278066 - RNA, 19 nt, Artificial Sequence
  Description of Artificial Sequence: Synthetic oligonucleotide
  Sense strand starting at position 2878 of SEQ ID NO: 3572
uguagauauguguguagau

SEQ ID NO: 278067 - RNA, 19 nt, Artificial Sequence
  Description of Artificial Sequence: Synthetic oligonucleotide
  Antisense strand to SEQ ID NO: 278066
aucuacacacauaucuaca

SEQ ID NO: 278068 - RNA, 19 nt, Artificial Sequence
  Description of Artificial Sequence: Synthetic oligonucleotide
  Sense strand starting at position 2879 of SEQ ID NO: 3572
guagauauguguguagaug

SEQ ID NO: 278069 - RNA, 19 nt, Artificial Sequence
  Description of Artificial Sequence: Synthetic oligonucleotide
  Antisense strand to SEQ ID NO: 278068
caucuacacacauaucuac

SEQ ID NO: 278070 - RNA, 19 nt, Artificial Sequence
  Description of Artificial Sequence: Synthetic oligonucleotide
  Sense strand starting at position 2880 of SEQ ID NO: 3572
uagauauguguguagaugu

SEQ ID NO: 278071 - RNA, 19 nt, Artificial Sequence
  Description of Artificial Sequence: Synthetic oligonucleotide
  Antisense strand to SEQ ID NO: 278070
acaucuacacacauaucua

SEQ ID NO: 278072 - RNA, 19 nt, Artificial Sequence
  Description of Artificial Sequence: Synthetic oligonucleotide
  Sense strand starting at position 3110 of SEQ ID NO: 3572
uguguagauguguaugagu

SEQ ID NO: 278073 - RNA, 19 nt, Artificial Sequence
  Description of Artificial Sequence: Synthetic oligonucleotide
  Antisense strand to SEQ ID NO: 278072
acucauacacaucuacaca

SEQ ID NO: 278074 - RNA, 19 nt, Artificial Sequence
  Description of Artificial Sequence: Synthetic oligonucleotide
  Sense strand starting at position 3115 of SEQ ID NO: 3572
agauguguaugaguguaga

SEQ ID NO: 278075 - RNA, 19 nt, Artificial Sequence
  Description of Artificial Sequence: Synthetic oligonucleotide
  Antisense strand to SEQ ID NO: 278074
ucuacacucauacacaucu

SEQ ID NO: 278076 - RNA, 19 nt, Artificial Sequence
  Description of Artificial Sequence: Synthetic oligonucleotide
  Sense strand starting at position 3118 of SEQ ID NO: 3572
uguguaugaguguagaugu

SEQ ID NO: 278077 - RNA, 19 nt, Artificial Sequence
  Description of Artificial Sequence: Synthetic oligonucleotide
  Antisense strand to SEQ ID NO: 278076
acaucuacacucauacaca

SEQ ID NO: 278078 - RNA, 19 nt, Artificial Sequence
  Description of Artificial Sequence: Synthetic oligonucleotide
  Sense strand starting at position 3229 of SEQ ID NO: 3572
agaugugcgcgugcacaua

SEQ ID NO: 278079 - RNA, 19 nt, Artificial Sequence
  Description of Artificial Sequence: Synthetic oligonucleotide
  Antisense strand to SEQ ID NO: 278078
uaugugcacgcgcacaucu

SEQ ID NO: 278080 - RNA, 19 nt, Artificial Sequence
  Description of Artificial Sequence: Synthetic oligonucleotide
  Sense strand starting at position 3240 of SEQ ID NO: 3572
ugcacauagccacauagau

SEQ ID NO: 278081 - RNA, 19 nt, Artificial Sequence
  Description of Artificial Sequence: Synthetic oligonucleotide
  Antisense strand to SEQ ID NO: 278080
aucuauguggcuaugugca

SEQ ID NO: 278082 - RNA, 19 nt, Artificial Sequence
  Description of Artificial Sequence: Synthetic oligonucleotide
  Sense strand starting at position 3252 of SEQ ID NO: 3572
cauagaucuccacguguuc

SEQ ID NO: 278083 - RNA, 19 nt, Artificial Sequence
  Description of Artificial Sequence: Synthetic oligonucleotide
  Antisense strand to SEQ ID NO: 278082
gaacacguggagaucuaug

SEQ ID NO: 278084 - RNA, 19 nt, Artificial Sequence
  Description of Artificial Sequence: Synthetic oligonucleotide
  Sense strand starting at position 3375 of SEQ ID NO: 3572
ugagguguuaagugagaug

SEQ ID NO: 278085 - RNA, 19 nt, Artificial Sequence
  Description of Artificial Sequence: Synthetic oligonucleotide
  Antisense strand to SEQ ID NO: 278084
caucucacuuaacaccuca

SEQ ID NO: 278086 - RNA, 19 nt, Artificial Sequence
  Description of Artificial Sequence: Synthetic oligonucleotide
  Sense strand starting at position 3380 of SEQ ID NO: 3572
uguuaagugagaugcuucu

SEQ ID NO: 278087 - RNA, 19 nt, Artificial Sequence
  Description of Artificial Sequence: Synthetic oligonucleotide
  Antisense strand to SEQ ID NO: 278086
agaagcaucucacuuaaca

SEQ ID NO: 278088 - RNA, 19 nt, Artificial Sequence
  Description of Artificial Sequence: Synthetic oligonucleotide
  Sense strand starting at position 3423 of SEQ ID NO: 3572
cggucacauguacauugau

SEQ ID NO: 278089 - RNA, 19 nt, Artificial Sequence
  Description of Artificial Sequence: Synthetic oligonucleotide
  Antisense strand to SEQ ID NO: 278088
aucaauguacaugugaccg

SEQ ID NO: 278090 - RNA, 19 nt, Artificial Sequence
  Description of Artificial Sequence: Synthetic oligonucleotide
  Sense strand starting at position 3432 of SEQ ID NO: 3572
guacauugaugcucaugau

SEQ ID NO: 278091 - RNA, 19 nt, Artificial Sequence
  Description of Artificial Sequence: Synthetic oligonucleotide
  Antisense strand to SEQ ID NO: 278090
aucaugagcaucaauguac

SEQ ID NO: 278092 - RNA, 19 nt, Artificial Sequence
  Description of Artificial Sequence: Synthetic oligonucleotide
  Sense strand starting at position 3438 of SEQ ID NO: 3572
ugaugcucaugaucagaaa

SEQ ID NO: 278093 - RNA, 19 nt, Artificial Sequence
  Description of Artificial Sequence: Synthetic oligonucleotide
  Antisense strand to SEQ ID NO: 278092
uuucugaucaugagcauca

SEQ ID NO: 278094 - RNA, 19 nt, Artificial Sequence
  Description of Artificial Sequence: Synthetic oligonucleotide
  Sense strand starting at position 3470 of SEQ ID NO: 3572
gugagcuacgcguuauaaa

SEQ ID NO: 278095 - RNA, 19 nt, Artificial Sequence
  Description of Artificial Sequence: Synthetic oligonucleotide
  Antisense strand to SEQ ID NO: 278094
uuuauaacgcguagcucac

SEQ ID NO: 278096 - RNA, 19 nt, Artificial Sequence
  Description of Artificial Sequence: Synthetic oligonucleotide
  Sense strand starting at position 3471 of SEQ ID NO: 3572
ugagcuacgcguuauaaag

SEQ ID NO: 278097 - RNA, 19 nt, Artificial Sequence
  Description of Artificial Sequence: Synthetic oligonucleotide
  Antisense strand to SEQ ID NO: 278096
cuuuauaacgcguagcuca

SEQ ID NO: 278098 - RNA, 19 nt, Artificial Sequence
  Description of Artificial Sequence: Synthetic oligonucleotide
  Sense strand starting at position 3519 of SEQ ID NO: 3572
gucuguccgccuguguuaa

SEQ ID NO: 278099 - RNA, 19 nt, Artificial Sequence
  Description of Artificial Sequence: Synthetic oligonucleotide
  Antisense strand to SEQ ID NO: 278098
uuaacacaggcggacagac

SEQ ID NO: 278100 - RNA, 19 nt, Artificial Sequence
  Description of Artificial Sequence: Synthetic oligonucleotide
  Sense strand starting at position 3945 of SEQ ID NO: 3572
cuuccuaucggugauggga

SEQ ID NO: 278101 - RNA, 19 nt, Artificial Sequence
  Description of Artificial Sequence: Synthetic oligonucleotide
  Antisense strand to SEQ ID NO: 278100
ucccaucaccgauaggaag

SEQ ID NO: 278102 - RNA, 19 nt, Artificial Sequence
  Description of Artificial Sequence: Synthetic oligonucleotide
  Sense strand starting at position 264 of SEQ ID NO: 3573
gucaguugauuccugccau

SEQ ID NO: 278103 - RNA, 19 nt, Artificial Sequence
  Description of Artificial Sequence: Synthetic oligonucleotide
  Antisense strand to SEQ ID NO: 278102
auggcaggaaucaacugac

SEQ ID NO: 278104 - RNA, 19 nt, Artificial Sequence
  Description of Artificial Sequence: Synthetic oligonucleotide
  Sense strand starting at position 628 of SEQ ID NO: 3573
guccuuguucgcuagagac

SEQ ID NO: 278105 - RNA, 19 nt, Artificial Sequence
  Description of Artificial Sequence: Synthetic oligonucleotide
  Antisense strand to SEQ ID NO: 278104
gucucuagcgaacaaggac

SEQ ID NO: 278106 - RNA, 19 nt, Artificial Sequence
  Description of Artificial Sequence: Synthetic oligonucleotide
  Sense strand starting at position 630 of SEQ ID NO: 3573
ccuuguucgcuagagacau

SEQ ID NO: 278107 - RNA, 19 nt, Artificial Sequence
  Description of Artificial Sequence: Synthetic oligonucleotide
  Antisense strand to SEQ ID NO: 278106
augucucuagcgaacaagg

SEQ ID NO: 278108 - RNA, 19 nt, Artificial Sequence
  Description of Artificial Sequence: Synthetic oligonucleotide
  Sense strand starting at position 791 of SEQ ID NO: 3573
ucugaugacugggcugaga

SEQ ID NO: 278109 - RNA, 19 nt, Artificial Sequence
  Description of Artificial Sequence: Synthetic oligonucleotide
  Antisense strand to SEQ ID NO: 278108
ucucagcccagucaucaga

SEQ ID NO: 278110 - RNA, 19 nt, Artificial Sequence
  Description of Artificial Sequence: Synthetic oligonucleotide
  Sense strand starting at position 793 of SEQ ID NO: 3573
ugaugacugggcugagaau

SEQ ID NO: 278111 - RNA, 19 nt, Artificial Sequence
  Description of Artificial Sequence: Synthetic oligonucleotide
  Antisense strand to SEQ ID NO: 278110
auucucagcccagucauca

SEQ ID NO: 278112 - RNA, 19 nt, Artificial Sequence
  Description of Artificial Sequence: Synthetic oligonucleotide
  Sense strand starting at position 805 of SEQ ID NO: 3573
ugagaauauuagcuaacgu

SEQ ID NO: 278113 - RNA, 19 nt, Artificial Sequence
  Description of Artificial Sequence: Synthetic oligonucleotide
  Antisense strand to SEQ ID NO: 278112
acguuagcuaauauucuca

SEQ ID NO: 278114 - RNA, 19 nt, Artificial Sequence
  Description of Artificial Sequence: Synthetic oligonucleotide
  Sense strand starting at position 929 of SEQ ID NO: 3573
gggcaauguugggcaagau

SEQ ID NO: 278115 - RNA, 19 nt, Artificial Sequence
  Description of Artificial Sequence: Synthetic oligonucleotide
  Antisense strand to SEQ ID NO: 278114
aucuugcccaacauugccc

SEQ ID NO: 278116 - RNA, 19 nt, Artificial Sequence
  Description of Artificial Sequence: Synthetic oligonucleotide
  Sense strand starting at position 930 of SEQ ID NO: 3573
ggcaauguugggcaagaug

SEQ ID NO: 278117 - RNA, 19 nt, Artificial Sequence
  Description of Artificial Sequence: Synthetic oligonucleotide
  Antisense strand to SEQ ID NO: 278116
caucuugcccaacauugcc

SEQ ID NO: 278118 - RNA, 19 nt, Artificial Sequence
  Description of Artificial Sequence: Synthetic oligonucleotide
  Sense strand starting at position 989 of SEQ ID NO: 3573
gauggaauaacguggugua

SEQ ID NO: 278119 - RNA, 19 nt, Artificial Sequence
  Description of Artificial Sequence: Synthetic oligonucleotide
  Antisense strand to SEQ ID NO: 278118
uacaccacguuauuccauc

SEQ ID NO: 278120 - RNA, 19 nt, Artificial Sequence
  Description of Artificial Sequence: Synthetic oligonucleotide
  Sense strand starting at position 990 of SEQ ID NO: 3573
auggaauaacgugguguau

SEQ ID NO: 278121 - RNA, 19 nt, Artificial Sequence
  Description of Artificial Sequence: Synthetic oligonucleotide
  Antisense strand to SEQ ID NO: 278120
auacaccacguuauuccau

SEQ ID NO: 278122 - RNA, 19 nt, Artificial Sequence
  Description of Artificial Sequence: Synthetic oligonucleotide
  Sense strand starting at position 1003 of SEQ ID NO: 3573
guguaucugugccuuaaag

SEQ ID NO: 278123 - RNA, 19 nt, Artificial Sequence
  Description of Artificial Sequence: Synthetic oligonucleotide
  Antisense strand to SEQ ID NO: 278122
cuuuaaggcacagauacac

SEQ ID NO: 278124 - RNA, 19 nt, Artificial Sequence
  Description of Artificial Sequence: Synthetic oligonucleotide
  Sense strand starting at position 1080 of SEQ ID NO: 3573
auagcucaugcucaguaaa

SEQ ID NO: 278125 - RNA, 19 nt, Artificial Sequence
  Description of Artificial Sequence: Synthetic oligonucleotide
  Antisense strand to SEQ ID NO: 278124
uuuacugagcaugagcuau

SEQ ID NO: 278126 - RNA, 19 nt, Artificial Sequence
  Description of Artificial Sequence: Synthetic oligonucleotide
  Sense strand starting at position 1082 of SEQ ID NO: 3573
agcucaugcucaguaaaca

SEQ ID NO: 278127 - RNA, 19 nt, Artificial Sequence
  Description of Artificial Sequence: Synthetic oligonucleotide
  Antisense strand to SEQ ID NO: 278126
uguuuacugagcaugagcu

SEQ ID NO: 278128 - RNA, 19 nt, Artificial Sequence
  Description of Artificial Sequence: Synthetic oligonucleotide
  Sense strand starting at position 1083 of SEQ ID NO: 3573
gcucaugcucaguaaacau

SEQ ID NO: 278129 - RNA, 19 nt, Artificial Sequence
  Description of Artificial Sequence: Synthetic oligonucleotide
  Antisense strand to SEQ ID NO: 278128
auguuuacugagcaugagc

SEQ ID NO: 278130 - RNA, 19 nt, Artificial Sequence
  Description of Artificial Sequence: Synthetic oligonucleotide
  Sense strand starting at position 1186 of SEQ ID NO: 3573
cugagacucggaggaguua

SEQ ID NO: 278131 - RNA, 19 nt, Artificial Sequence
  Description of Artificial Sequence: Synthetic oligonucleotide
  Antisense strand to SEQ ID NO: 278130
uaacuccuccgagucucag

SEQ ID NO: 278132 - RNA, 19 nt, Artificial Sequence
  Description of Artificial Sequence: Synthetic oligonucleotide
  Sense strand starting at position 1195 of SEQ ID NO: 3573
ggaggaguuaagugguuua

SEQ ID NO: 278133 - RNA, 19 nt, Artificial Sequence
  Description of Artificial Sequence: Synthetic oligonucleotide
  Antisense strand to SEQ ID NO: 278132
uaaaccacuuaacuccucc

SEQ ID NO: 278134 - RNA, 19 nt, Artificial Sequence
  Description of Artificial Sequence: Synthetic oligonucleotide
  Sense strand starting at position 1198 of SEQ ID NO: 3573
ggaguuaagugguuuauua

SEQ ID NO: 278135 - RNA, 19 nt, Artificial Sequence
  Description of Artificial Sequence: Synthetic oligonucleotide
  Antisense strand to SEQ ID NO: 278134
uaauaaaccacuuaacucc

SEQ ID NO: 278136 - RNA, 19 nt, Artificial Sequence
  Description of Artificial Sequence: Synthetic oligonucleotide
  Sense strand starting at position 1241 of SEQ ID NO: 3573
guugauugcacagggaagu

SEQ ID NO: 278137 - RNA, 19 nt, Artificial Sequence
  Description of Artificial Sequence: Synthetic oligonucleotide
  Antisense strand to SEQ ID NO: 278136
acuucccugugcaaucaac

SEQ ID NO: 278138 - RNA, 19 nt, Artificial Sequence
  Description of Artificial Sequence: Synthetic oligonucleotide
  Sense strand starting at position 1377 of SEQ ID NO: 3573
uguuuacauccaugcauua

SEQ ID NO: 278139 - RNA, 19 nt, Artificial Sequence
  Description of Artificial Sequence: Synthetic oligonucleotide
  Antisense strand to SEQ ID NO: 278138
uaaugcauggauguaaaca

SEQ ID NO: 278140 - RNA, 19 nt, Artificial Sequence
  Description of Artificial Sequence: Synthetic oligonucleotide
  Sense strand starting at position 1600 of SEQ ID NO: 3573
ggccacuucugagauuugu

SEQ ID NO: 278141 - RNA, 19 nt, Artificial Sequence
  Description of Artificial Sequence: Synthetic oligonucleotide
  Antisense strand to SEQ ID NO: 278140
acaaaucucagaaguggcc

SEQ ID NO: 278142 - RNA, 19 nt, Artificial Sequence
  Description of Artificial Sequence: Synthetic oligonucleotide
  Sense strand starting at position 1675 of SEQ ID NO: 3573
cuccaaacugucuguugga

SEQ ID NO: 278143 - RNA, 19 nt, Artificial Sequence
  Description of Artificial Sequence: Synthetic oligonucleotide
  Antisense strand to SEQ ID NO: 278142
uccaacagacaguuuggag

SEQ ID NO: 278144 - RNA, 19 nt, Artificial Sequence
  Description of Artificial Sequence: Synthetic oligonucleotide
  Sense strand starting at position 1676 of SEQ ID NO: 3573
uccaaacugucuguuggaa

SEQ ID NO: 278145 - RNA, 19 nt, Artificial Sequence
  Description of Artificial Sequence: Synthetic oligonucleotide
  Antisense strand to SEQ ID NO: 278144
uuccaacagacaguuugga

SEQ ID NO: 278146 - RNA, 19 nt, Artificial Sequence
  Description of Artificial Sequence: Synthetic oligonucleotide
  Sense strand starting at position 1989 of SEQ ID NO: 3573
cgaguuaauccauaaccac

SEQ ID NO: 278147 - RNA, 19 nt, Artificial Sequence
  Description of Artificial Sequence: Synthetic oligonucleotide
  Antisense strand to SEQ ID NO: 278146
gugguuauggauuaacucg

SEQ ID NO: 278148 - RNA, 19 nt, Artificial Sequence
  Description of Artificial Sequence: Synthetic oligonucleotide
  Sense strand starting at position 2261 of SEQ ID NO: 3573
auuauaguuugcccaagau

SEQ ID NO: 278149 - RNA, 19 nt, Artificial Sequence
  Description of Artificial Sequence: Synthetic oligonucleotide
  Antisense strand to SEQ ID NO: 278148
aucuugggcaaacuauaau

SEQ ID NO: 278150 - RNA, 19 nt, Artificial Sequence
  Description of Artificial Sequence: Synthetic oligonucleotide
  Sense strand starting at position 2590 of SEQ ID NO: 3573
guguuacucgcccagauuc

SEQ ID NO: 278151 - RNA, 19 nt, Artificial Sequence
  Description of Artificial Sequence: Synthetic oligonucleotide
  Antisense strand to SEQ ID NO: 278150
gaaucugggcgaguaacac

SEQ ID NO: 278152 - RNA, 19 nt, Artificial Sequence
  Description of Artificial Sequence: Synthetic oligonucleotide
  Sense strand starting at position 2793 of SEQ ID NO: 3573
ugcagucuaucagcauuua

SEQ ID NO: 278153 - RNA, 19 nt, Artificial Sequence
  Description of Artificial Sequence: Synthetic oligonucleotide
  Antisense strand to SEQ ID NO: 278152
uaaaugcugauagacugca

SEQ ID NO: 278154 - RNA, 19 nt, Artificial Sequence
  Description of Artificial Sequence: Synthetic oligonucleotide
  Sense strand starting at position 2872 of SEQ ID NO: 3573
cuaccuguuccugggaaga

SEQ ID NO: 278155 - RNA, 19 nt, Artificial Sequence
  Description of Artificial Sequence: Synthetic oligonucleotide
  Antisense strand to SEQ ID NO: 278154
ucuucccaggaacagguag

SEQ ID NO: 278156 - RNA, 19 nt, Artificial Sequence
  Description of Artificial Sequence: Synthetic oligonucleotide
  Sense strand starting at position 2959 of SEQ ID NO: 3573
auugauugcacagggaagu

SEQ ID NO: 278157 - RNA, 19 nt, Artificial Sequence
  Description of Artificial Sequence: Synthetic oligonucleotide
  Antisense strand to SEQ ID NO: 278156
acuucccugugcaaucaau

SEQ ID NO: 278158 - RNA, 19 nt, Artificial Sequence
  Description of Artificial Sequence: Synthetic oligonucleotide
  Sense strand starting at position 3018 of SEQ ID NO: 3573
cugucaguacaccauaagu

SEQ ID NO: 278159 - RNA, 19 nt, Artificial Sequence
  Description of Artificial Sequence: Synthetic oligonucleotide
  Antisense strand to SEQ ID NO: 278158
acuuaugguguacugacag

SEQ ID NO: 278160 - RNA, 19 nt, Artificial Sequence
  Description of Artificial Sequence: Synthetic oligonucleotide
  Sense strand starting at position 3071 of SEQ ID NO: 3573
auccauguuuacgcuuaaa

SEQ ID NO: 278161 - RNA, 19 nt, Artificial Sequence
  Description of Artificial Sequence: Synthetic oligonucleotide
  Antisense strand to SEQ ID NO: 278160
uuuaagcguaaacauggau

SEQ ID NO: 278162 - RNA, 19 nt, Artificial Sequence
  Description of Artificial Sequence: Synthetic oligonucleotide
  Sense strand starting at position 3074 of SEQ ID NO: 3573
cauguuuacgcuuaaagca

SEQ ID NO: 278163 - RNA, 19 nt, Artificial Sequence
  Description of Artificial Sequence: Synthetic oligonucleotide
  Antisense strand to SEQ ID NO: 278162
ugcuuuaagcguaaacaug

SEQ ID NO: 278164 - RNA, 19 nt, Artificial Sequence
  Description of Artificial Sequence: Synthetic oligonucleotide
  Sense strand starting at position 3273 of SEQ ID NO: 3573
cuuuaaauuggcuggaaca

SEQ ID NO: 278165 - RNA, 19 nt, Artificial Sequence
  Description of Artificial Sequence: Synthetic oligonucleotide
  Antisense strand to SEQ ID NO: 278164
uguuccagccaauuuaaag

SEQ ID NO: 278166 - RNA, 19 nt, Artificial Sequence
  Description of Artificial Sequence: Synthetic oligonucleotide
  Sense strand starting at position 3286 of SEQ ID NO: 3573
ggaacagcuuguguugauu

SEQ ID NO: 278167 - RNA, 19 nt, Artificial Sequence
  Description of Artificial Sequence: Synthetic oligonucleotide
  Antisense strand to SEQ ID NO: 278166
aaucaacacaagcuguucc

SEQ ID NO: 278168 - RNA, 19 nt, Artificial Sequence
  Description of Artificial Sequence: Synthetic oligonucleotide
  Sense strand starting at position 3289 of SEQ ID NO: 3573
acagcuuguguugauugua

SEQ ID NO: 278169 - RNA, 19 nt, Artificial Sequence
  Description of Artificial Sequence: Synthetic oligonucleotide
  Antisense strand to SEQ ID NO: 278168
uacaaucaacacaagcugu

SEQ ID NO: 278170 - RNA, 19 nt, Artificial Sequence
  Description of Artificial Sequence: Synthetic oligonucleotide
  Sense strand starting at position 3297 of SEQ ID NO: 3573
uguugauuguaaccagaug

SEQ ID NO: 278171 - RNA, 19 nt, Artificial Sequence
  Description of Artificial Sequence: Synthetic oligonucleotide
  Antisense strand to SEQ ID NO: 278170
caucugguuacaaucaaca

SEQ ID NO: 278172 - RNA, 19 nt, Artificial Sequence
  Description of Artificial Sequence: Synthetic oligonucleotide
  Sense strand starting at position 3437 of SEQ ID NO: 3573
aggaaaugcuuacagaauu

SEQ ID NO: 278173 - RNA, 19 nt, Artificial Sequence
  Description of Artificial Sequence: Synthetic oligonucleotide
  Antisense strand to SEQ ID NO: 278172
aauucuguaagcauuuccu

SEQ ID NO: 278174 - RNA, 19 nt, Artificial Sequence
  Description of Artificial Sequence: Synthetic oligonucleotide
  Sense strand starting at position 3702 of SEQ ID NO: 3573
ccaggagcuguuugugaca

SEQ ID NO: 278175 - RNA, 19 nt, Artificial Sequence
  Description of Artificial Sequence: Synthetic oligonucleotide
  Antisense strand to SEQ ID NO: 278174
ugucacaaacagcuccugg

SEQ ID NO: 278176 - RNA, 19 nt, Artificial Sequence
  Description of Artificial Sequence: Synthetic oligonucleotide
  Sense strand starting at position 3846 of SEQ ID NO: 3573
cccgcaagucugcagagau

SEQ ID NO: 278177 - RNA, 19 nt, Artificial Sequence
  Description of Artificial Sequence: Synthetic oligonucleotide
  Antisense strand to SEQ ID NO: 278176
aucucugcagacuugcggg

SEQ ID NO: 278178 - RNA, 19 nt, Artificial Sequence
  Description of Artificial Sequence: Synthetic oligonucleotide
  Sense strand starting at position 3879 of SEQ ID NO: 3573
uugccuuccaggugcaaga

SEQ ID NO: 278179 - RNA, 19 nt, Artificial Sequence
  Description of Artificial Sequence: Synthetic oligonucleotide
  Antisense strand to SEQ ID NO: 278178
ucuugcaccuggaaggcaa

SEQ ID NO: 278180 - RNA, 19 nt, Artificial Sequence
  Description of Artificial Sequence: Synthetic oligonucleotide
  Sense strand starting at position 3895 of SEQ ID NO: 3573
agauguuguggguauucuu

SEQ ID NO: 278181 - RNA, 19 nt, Artificial Sequence
  Description of Artificial Sequence: Synthetic oligonucleotide
  Antisense strand to SEQ ID NO: 278180
aagaauacccacaacaucu

SEQ ID NO: 278182 - RNA, 19 nt, Artificial Sequence
  Description of Artificial Sequence: Synthetic oligonucleotide
  Sense strand starting at position 18 of SEQ ID NO: 3574
cugugauucaguggaggga

SEQ ID NO: 278183 - RNA, 19 nt, Artificial Sequence
  Description of Artificial Sequence: Synthetic oligonucleotide
  Antisense strand to SEQ ID NO: 278182
ucccuccacugaaucacag

SEQ ID NO: 278184 - RNA, 19 nt, Artificial Sequence
  Description of Artificial Sequence: Synthetic oligonucleotide
  Sense strand starting at position 21 of SEQ ID NO: 3574
ugauucaguggagggaauu

SEQ ID NO: 278185 - RNA, 19 nt, Artificial Sequence
  Description of Artificial Sequence: Synthetic oligonucleotide
  Antisense strand to SEQ ID NO: 278184
aauucccuccacugaauca

SEQ ID NO: 278186 - RNA, 19 nt, Artificial Sequence
  Description of Artificial Sequence: Synthetic oligonucleotide
  Sense strand starting at position 52 of SEQ ID NO: 3574
aguagcacucugcaaggau

SEQ ID NO: 278187 - RNA, 19 nt, Artificial Sequence
  Description of Artificial Sequence: Synthetic oligonucleotide
  Antisense strand to SEQ ID NO: 278186
auccuugcagagugcuacu

SEQ ID NO: 278188 - RNA, 19 nt, Artificial Sequence
  Description of Artificial Sequence: Synthetic oligonucleotide
  Sense strand starting at position 112 of SEQ ID NO: 3574
ugauguccuucccuagaga

SEQ ID NO: 278189 - RNA, 19 nt, Artificial Sequence
  Description of Artificial Sequence: Synthetic oligonucleotide
  Antisense strand to SEQ ID NO: 278188
ucucuagggaaggacauca

SEQ ID NO: 278190 - RNA, 19 nt, Artificial Sequence
  Description of Artificial Sequence: Synthetic oligonucleotide
  Sense strand starting at position 167 of SEQ ID NO: 3574
gacagagguuccuugguaa

SEQ ID NO: 278191 - RNA, 19 nt, Artificial Sequence
  Description of Artificial Sequence: Synthetic oligonucleotide
  Antisense strand to SEQ ID NO: 278190
uuaccaaggaaccucuguc

SEQ ID NO: 278192 - RNA, 19 nt, Artificial Sequence
  Description of Artificial Sequence: Synthetic oligonucleotide
  Sense strand starting at position 268 of SEQ ID NO: 3574
ugugcuccucccuagaaca

SEQ ID NO: 278193 - RNA, 19 nt, Artificial Sequence
  Description of Artificial Sequence: Synthetic oligonucleotide
  Antisense strand to SEQ ID NO: 278192
uguucuagggaggagcaca

SEQ ID NO: 278194 - RNA, 19 nt, Artificial Sequence
  Description of Artificial Sequence: Synthetic oligonucleotide
  Sense strand starting at position 364 of SEQ ID NO: 3574
ggcucucuggguuaaagga

SEQ ID NO: 278195 - RNA, 19 nt, Artificial Sequence
  Description of Artificial Sequence: Synthetic oligonucleotide
  Antisense strand to SEQ ID NO: 278194
uccuuuaacccagagagcc

SEQ ID NO: 278196 - RNA, 19 nt, Artificial Sequence
  Description of Artificial Sequence: Synthetic oligonucleotide
  Sense strand starting at position 422 of SEQ ID NO: 3574
auuugauccucaggauaau

SEQ ID NO: 278197 - RNA, 19 nt, Artificial Sequence
  Description of Artificial Sequence: Synthetic oligonucleotide
  Antisense strand to SEQ ID NO: 278196
auuauccugaggaucaaau

SEQ ID NO: 278198 - RNA, 19 nt, Artificial Sequence
  Description of Artificial Sequence: Synthetic oligonucleotide
  Sense strand starting at position 431 of SEQ ID NO: 3574
ucaggauaauugucucuag

SEQ ID NO: 278199 - RNA, 19 nt, Artificial Sequence
  Description of Artificial Sequence: Synthetic oligonucleotide
  Antisense strand to SEQ ID NO: 278198
cuagagacaauuauccuga

SEQ ID NO: 278200 - RNA, 19 nt, Artificial Sequence
  Description of Artificial Sequence: Synthetic oligonucleotide
  Sense strand starting at position 432 of SEQ ID NO: 3574
caggauaauugucucuaga

SEQ ID NO: 278201 - RNA, 19 nt, Artificial Sequence
  Description of Artificial Sequence: Synthetic oligonucleotide
  Antisense strand to SEQ ID NO: 278200
ucuagagacaauuauccug

SEQ ID NO: 278202 - RNA, 19 nt, Artificial Sequence
  Description of Artificial Sequence: Synthetic oligonucleotide
  Sense strand starting at position 434 of SEQ ID NO: 3574
ggauaauugucucuagacu

SEQ ID NO: 278203 - RNA, 19 nt, Artificial Sequence
  Description of Artificial Sequence: Synthetic oligonucleotide
  Antisense strand to SEQ ID NO: 278202
agucuagagacaauuaucc

SEQ ID NO: 278204 - RNA, 19 nt, Artificial Sequence
  Description of Artificial Sequence: Synthetic oligonucleotide
  Sense strand starting at position 536 of SEQ ID NO: 3574
ggcccauuagcacaaguuu

SEQ ID NO: 278205 - RNA, 19 nt, Artificial Sequence
  Description of Artificial Sequence: Synthetic oligonucleotide
  Antisense strand to SEQ ID NO: 278204
aaacuugugcuaaugggcc

SEQ ID NO: 278206 - RNA, 19 nt, Artificial Sequence
  Description of Artificial Sequence: Synthetic oligonucleotide
  Sense strand starting at position 669 of SEQ ID NO: 3574
gugcaaagugauuaaugca

SEQ ID NO: 278207 - RNA, 19 nt, Artificial Sequence
  Description of Artificial Sequence: Synthetic oligonucleotide
  Antisense strand to SEQ ID NO: 278206
ugcauuaaucacuuugcac

SEQ ID NO: 278208 - RNA, 19 nt, Artificial Sequence
  Description of Artificial Sequence: Synthetic oligonucleotide
  Sense strand starting at position 941 of SEQ ID NO: 3574
aaaggugaggucuggauau

SEQ ID NO: 278209 - RNA, 19 nt, Artificial Sequence
  Description of Artificial Sequence: Synthetic oligonucleotide
  Antisense strand to SEQ ID NO: 278208
auauccagaccucaccuuu

SEQ ID NO: 278210 - RNA, 19 nt, Artificial Sequence
  Description of Artificial Sequence: Synthetic oligonucleotide
  Sense strand starting at position 943 of SEQ ID NO: 3574
aggugaggucuggauaugu

SEQ ID NO: 278211 - RNA, 19 nt, Artificial Sequence
  Description of Artificial Sequence: Synthetic oligonucleotide
  Antisense strand to SEQ ID NO: 278210
acauauccagaccucaccu

SEQ ID NO: 278212 - RNA, 19 nt, Artificial Sequence
  Description of Artificial Sequence: Synthetic oligonucleotide
  Sense strand starting at position 1027 of SEQ ID NO: 3574
ggauuauaggcuugaacug

SEQ ID NO: 278213 - RNA, 19 nt, Artificial Sequence
  Description of Artificial Sequence: Synthetic oligonucleotide
  Antisense strand to SEQ ID NO: 278212
caguucaagccuauaaucc

SEQ ID NO: 278214 - RNA, 19 nt, Artificial Sequence
  Description of Artificial Sequence: Synthetic oligonucleotide
  Sense strand starting at position 1028 of SEQ ID NO: 3574
gauuauaggcuugaacugu

SEQ ID NO: 278215 - RNA, 19 nt, Artificial Sequence
  Description of Artificial Sequence: Synthetic oligonucleotide
  Antisense strand to SEQ ID NO: 278214
acaguucaagccuauaauc

SEQ ID NO: 278216 - RNA, 19 nt, Artificial Sequence
  Description of Artificial Sequence: Synthetic oligonucleotide
  Sense strand starting at position 1036 of SEQ ID NO: 3574
gcuugaacuguuuaccaca

SEQ ID NO: 278217 - RNA, 19 nt, Artificial Sequence
  Description of Artificial Sequence: Synthetic oligonucleotide
  Antisense strand to SEQ ID NO: 278216
ugugguaaacaguucaagc

SEQ ID NO: 278218 - RNA, 19 nt, Artificial Sequence
  Description of Artificial Sequence: Synthetic oligonucleotide
  Sense strand starting at position 1188 of SEQ ID NO: 3574
cuuaaaguuucccucgaua

SEQ ID NO: 278219 - RNA, 19 nt, Artificial Sequence
  Description of Artificial Sequence: Synthetic oligonucleotide
  Antisense strand to SEQ ID NO: 278218
uaucgagggaaacuuuaag

SEQ ID NO: 278220 - RNA, 19 nt, Artificial Sequence
  Description of Artificial Sequence: Synthetic oligonucleotide
  Sense strand starting at position 1232 of SEQ ID NO: 3574
ccuugaaagguguaauauc

SEQ ID NO: 278221 - RNA, 19 nt, Artificial Sequence
  Description of Artificial Sequence: Synthetic oligonucleotide
  Antisense strand to SEQ ID NO: 278220
gauauuacaccuuucaagg

SEQ ID NO: 278222 - RNA, 19 nt, Artificial Sequence
  Description of Artificial Sequence: Synthetic oligonucleotide
  Sense strand starting at position 1343 of SEQ ID NO: 3574
ggagaacucuucucacugu

SEQ ID NO: 278223 - RNA, 19 nt, Artificial Sequence
  Description of Artificial Sequence: Synthetic oligonucleotide
  Antisense strand to SEQ ID NO: 278222
acagugagaagaguucucc

SEQ ID NO: 278224 - RNA, 19 nt, Artificial Sequence
  Description of Artificial Sequence: Synthetic oligonucleotide
  Sense strand starting at position 2021 of SEQ ID NO: 3574
agcaacacugcucagaauu

SEQ ID NO: 278225 - RNA, 19 nt, Artificial Sequence
  Description of Artificial Sequence: Synthetic oligonucleotide
  Antisense strand to SEQ ID NO: 278224
aauucugagcaguguugcu

SEQ ID NO: 278226 - RNA, 19 nt, Artificial Sequence
  Description of Artificial Sequence: Synthetic oligonucleotide
  Sense strand starting at position 2088 of SEQ ID NO: 3574
ccagcucucccuuaaugag

SEQ ID NO: 278227 - RNA, 19 nt, Artificial Sequence
  Description of Artificial Sequence: Synthetic oligonucleotide
  Antisense strand to SEQ ID NO: 278226
cucauuaagggagagcugg

SEQ ID NO: 278228 - RNA, 19 nt, Artificial Sequence
  Description of Artificial Sequence: Synthetic oligonucleotide
  Sense strand starting at position 2094 of SEQ ID NO: 3574
cucccuuaaugagucagaa

SEQ ID NO: 278229 - RNA, 19 nt, Artificial Sequence
  Description of Artificial Sequence: Synthetic oligonucleotide
  Antisense strand to SEQ ID NO: 278228
uucugacucauuaagggag

SEQ ID NO: 278230 - RNA, 19 nt, Artificial Sequence
  Description of Artificial Sequence: Synthetic oligonucleotide
  Sense strand starting at position 2140 of SEQ ID NO: 3574
guaucugagcuccauucua

SEQ ID NO: 278231 - RNA, 19 nt, Artificial Sequence
  Description of Artificial Sequence: Synthetic oligonucleotide
  Antisense strand to SEQ ID NO: 278230
uagaauggagcucagauac

SEQ ID NO: 278232 - RNA, 19 nt, Artificial Sequence
  Description of Artificial Sequence: Synthetic oligonucleotide
  Sense strand starting at position 2176 of SEQ ID NO: 3574
caaacaguuggcuauaugu

SEQ ID NO: 278233 - RNA, 19 nt, Artificial Sequence
  Description of Artificial Sequence: Synthetic oligonucleotide
  Antisense strand to SEQ ID NO: 278232
acauauagccaacuguuug

SEQ ID NO: 278234 - RNA, 19 nt, Artificial Sequence
  Description of Artificial Sequence: Synthetic oligonucleotide
  Sense strand starting at position 2339 of SEQ ID NO: 3574
aaggguggauugcuauaga

SEQ ID NO: 278235 - RNA, 19 nt, Artificial Sequence
  Description of Artificial Sequence: Synthetic oligonucleotide
  Antisense strand to SEQ ID NO: 278234
ucuauagcaauccacccuu

SEQ ID NO: 278236 - RNA, 19 nt, Artificial Sequence
  Description of Artificial Sequence: Synthetic oligonucleotide
  Sense strand starting at position 2342 of SEQ ID NO: 3574
gguggauugcuauagagac

SEQ ID NO: 278237 - RNA, 19 nt, Artificial Sequence
  Description of Artificial Sequence: Synthetic oligonucleotide
  Antisense strand to SEQ ID NO: 278236
gucucuauagcaauccacc

SEQ ID NO: 278238 - RNA, 19 nt, Artificial Sequence
  Description of Artificial Sequence: Synthetic oligonucleotide
  Sense strand starting at position 2372 of SEQ ID NO: 3574
ggcucaguuuauuucuguu

SEQ ID NO: 278239 - RNA, 19 nt, Artificial Sequence
  Description of Artificial Sequence: Synthetic oligonucleotide
  Antisense strand to SEQ ID NO: 278238
aacagaaauaaacugagcc

SEQ ID NO: 278240 - RNA, 19 nt, Artificial Sequence
  Description of Artificial Sequence: Synthetic oligonucleotide
  Sense strand starting at position 2525 of SEQ ID NO: 3574
gcucuucuggcagaacaug

SEQ ID NO: 278241 - RNA, 19 nt, Artificial Sequence
  Description of Artificial Sequence: Synthetic oligonucleotide
  Antisense strand to SEQ ID NO: 278240
cauguucugccagaagagc

SEQ ID NO: 278242 - RNA, 19 nt, Artificial Sequence
  Description of Artificial Sequence: Synthetic oligonucleotide
  Sense strand starting at position 2533 of SEQ ID NO: 3574
ggcagaacauggcucuaaa

SEQ ID NO: 278243 - RNA, 19 nt, Artificial Sequence
  Description of Artificial Sequence: Synthetic oligonucleotide
  Antisense strand to SEQ ID NO: 278242
uuuagagccauguucugcc

SEQ ID NO: 278244 - RNA, 19 nt, Artificial Sequence
  Description of Artificial Sequence: Synthetic oligonucleotide
  Sense strand starting at position 2853 of SEQ ID NO: 3574
aguguuacacccuagaacu

SEQ ID NO: 278245 - RNA, 19 nt, Artificial Sequence
  Description of Artificial Sequence: Synthetic oligonucleotide
  Antisense strand to SEQ ID NO: 278244
aguucuaggguguaacacu

SEQ ID NO: 278246 - RNA, 19 nt, Artificial Sequence
  Description of Artificial Sequence: Synthetic oligonucleotide
  Sense strand starting at position 2864 of SEQ ID NO: 3574
cuagaacugcaaggaguua

SEQ ID NO: 278247 - RNA, 19 nt, Artificial Sequence
  Description of Artificial Sequence: Synthetic oligonucleotide
  Antisense strand to SEQ ID NO: 278246
uaacuccuugcaguucuag

SEQ ID NO: 278248 - RNA, 19 nt, Artificial Sequence
  Description of Artificial Sequence: Synthetic oligonucleotide
  Sense strand starting at position 3625 of SEQ ID NO: 3574
ggagggcgucacgagauua

SEQ ID NO: 278249 - RNA, 19 nt, Artificial Sequence
  Description of Artificial Sequence: Synthetic oligonucleotide
  Antisense strand to SEQ ID NO: 278248
uaaucucgugacgcccucc

SEQ ID NO: 278250 - RNA, 19 nt, Artificial Sequence
  Description of Artificial Sequence: Synthetic oligonucleotide
  Sense strand starting at position 3630 of SEQ ID NO: 3574
gcgucacgagauuaaggau

SEQ ID NO: 278251 - RNA, 19 nt, Artificial Sequence
  Description of Artificial Sequence: Synthetic oligonucleotide
  Antisense strand to SEQ ID NO: 278250
auccuuaaucucgugacgc

SEQ ID NO: 278252 - RNA, 19 nt, Artificial Sequence
  Description of Artificial Sequence: Synthetic oligonucleotide
  Sense strand starting at position 3636 of SEQ ID NO: 3574
cgagauuaaggaugauugu

SEQ ID NO: 278253 - RNA, 19 nt, Artificial Sequence
  Description of Artificial Sequence: Synthetic oligonucleotide
  Antisense strand to SEQ ID NO: 278252
acaaucauccuuaaucucg

SEQ ID NO: 278254 - RNA, 19 nt, Artificial Sequence
  Description of Artificial Sequence: Synthetic oligonucleotide
  Sense strand starting at position 3646 of SEQ ID NO: 3574
gaugauuguccagaggucu

SEQ ID NO: 278255 - RNA, 19 nt, Artificial Sequence
  Description of Artificial Sequence: Synthetic oligonucleotide
  Antisense strand to SEQ ID NO: 278254
agaccucuggacaaucauc

SEQ ID NO: 278256 - RNA, 19 nt, Artificial Sequence
  Description of Artificial Sequence: Synthetic oligonucleotide
  Sense strand starting at position 3835 of SEQ ID NO: 3574
ccuggcucuccugaagaaa

SEQ ID NO: 278257 - RNA, 19 nt, Artificial Sequence
  Description of Artificial Sequence: Synthetic oligonucleotide
  Antisense strand to SEQ ID NO: 278256
uuucuucaggagagccagg

SEQ ID NO: 278258 - RNA, 19 nt, Artificial Sequence
  Description of Artificial Sequence: Synthetic oligonucleotide
  Sense strand starting at position 3859 of SEQ ID NO: 3574
aggagugaaucccuggcaa

SEQ ID NO: 278259 - RNA, 19 nt, Artificial Sequence
  Description of Artificial Sequence: Synthetic oligonucleotide
  Antisense strand to SEQ ID NO: 278258
uugccagggauucacuccu

SEQ ID NO: 278260 - RNA, 19 nt, Artificial Sequence
  Description of Artificial Sequence: Synthetic oligonucleotide
  Sense strand starting at position 3861 of SEQ ID NO: 3574
gagugaaucccuggcaaag

SEQ ID NO: 278261 - RNA, 19 nt, Artificial Sequence
  Description of Artificial Sequence: Synthetic oligonucleotide
  Antisense strand to SEQ ID NO: 278260
cuuugccagggauucacuc

SEQ ID NO: 278262 - RNA, 19 nt, Artificial Sequence
  Description of Artificial Sequence: Synthetic oligonucleotide
  Sense strand starting at position 219 of SEQ ID NO: 3575
acaccaauccugugggaau

SEQ ID NO: 278263 - RNA, 19 nt, Artificial Sequence
  Description of Artificial Sequence: Synthetic oligonucleotide
  Antisense strand to SEQ ID NO: 278262
auucccacaggauuggugu

SEQ ID NO: 278264 - RNA, 19 nt, Artificial Sequence
  Description of Artificial Sequence: Synthetic oligonucleotide
  Sense strand starting at position 220 of SEQ ID NO: 3575
caccaauccugugggaaug

SEQ ID NO: 278265 - RNA, 19 nt, Artificial Sequence
  Description of Artificial Sequence: Synthetic oligonucleotide
  Antisense strand to SEQ ID NO: 278264
cauucccacaggauuggug

SEQ ID NO: 278266 - RNA, 19 nt, Artificial Sequence
  Description of Artificial Sequence: Synthetic oligonucleotide
  Sense strand starting at position 251 of SEQ ID NO: 3575
aggugcuugcuggguaaga

SEQ ID NO: 278267 - RNA, 19 nt, Artificial Sequence
  Description of Artificial Sequence: Synthetic oligonucleotide
  Antisense strand to SEQ ID NO: 278266
ucuuacccagcaagcaccu

SEQ ID NO: 278268 - RNA, 19 nt, Artificial Sequence
  Description of Artificial Sequence: Synthetic oligonucleotide
  Sense strand starting at position 1231 of SEQ ID NO: 3575
aguccugagccugggcaaa

SEQ ID NO: 278269 - RNA, 19 nt, Artificial Sequence
  Description of Artificial Sequence: Synthetic oligonucleotide
  Antisense strand to SEQ ID NO: 278268
uuugcccaggcucaggacu

SEQ ID NO: 278270 - RNA, 19 nt, Artificial Sequence
  Description of Artificial Sequence: Synthetic oligonucleotide
  Sense strand starting at position 1361 of SEQ ID NO: 3575
gaggaugucugagucaggu

SEQ ID NO: 278271 - RNA, 19 nt, Artificial Sequence
  Description of Artificial Sequence: Synthetic oligonucleotide
  Antisense strand to SEQ ID NO: 278270
accugacucagacauccuc

SEQ ID NO: 278272 - RNA, 19 nt, Artificial Sequence
  Description of Artificial Sequence: Synthetic oligonucleotide
  Sense strand starting at position 1369 of SEQ ID NO: 3575
cugagucaggucuaaugua

SEQ ID NO: 278273 - RNA, 19 nt, Artificial Sequence
  Description of Artificial Sequence: Synthetic oligonucleotide
  Antisense strand to SEQ ID NO: 278272
uacauuagaccugacucag

SEQ ID NO: 278274 - RNA, 19 nt, Artificial Sequence
  Description of Artificial Sequence: Synthetic oligonucleotide
  Sense strand starting at position 1516 of SEQ ID NO: 3575
uggcaagugccugcuugua

SEQ ID NO: 278275 - RNA, 19 nt, Artificial Sequence
  Description of Artificial Sequence: Synthetic oligonucleotide
  Antisense strand to SEQ ID NO: 278274
uacaagcaggcacuugcca

SEQ ID NO: 278276 - RNA, 19 nt, Artificial Sequence
  Description of Artificial Sequence: Synthetic oligonucleotide
  Sense strand starting at position 1539 of SEQ ID NO: 3575
gggcacaucccaugguaga

SEQ ID NO: 278277 - RNA, 19 nt, Artificial Sequence
  Description of Artificial Sequence: Synthetic oligonucleotide
  Antisense strand to SEQ ID NO: 278276
ucuaccaugggaugugccc

SEQ ID NO: 278278 - RNA, 19 nt, Artificial Sequence
  Description of Artificial Sequence: Synthetic oligonucleotide
  Sense strand starting at position 2278 of SEQ ID NO: 3575
uggugaagcccuggucaaa

SEQ ID NO: 278279 - RNA, 19 nt, Artificial Sequence
  Description of Artificial Sequence: Synthetic oligonucleotide
  Antisense strand to SEQ ID NO: 278278
uuugaccagggcuucacca

SEQ ID NO: 278280 - RNA, 19 nt, Artificial Sequence
  Description of Artificial Sequence: Synthetic oligonucleotide
  Sense strand starting at position 2493 of SEQ ID NO: 3575
ccagucagcaguugaaaga

SEQ ID NO: 278281 - RNA, 19 nt, Artificial Sequence
  Description of Artificial Sequence: Synthetic oligonucleotide
  Antisense strand to SEQ ID NO: 278280
ucuuucaacugcugacugg

SEQ ID NO: 278282 - RNA, 19 nt, Artificial Sequence
  Description of Artificial Sequence: Synthetic oligonucleotide
  Sense strand starting at position 2527 of SEQ ID NO: 3575
ccagaaacgugucugcaca

SEQ ID NO: 278283 - RNA, 19 nt, Artificial Sequence
  Description of Artificial Sequence: Synthetic oligonucleotide
  Antisense strand to SEQ ID NO: 278282
ugugcagacacguuucugg

SEQ ID NO: 278284 - RNA, 19 nt, Artificial Sequence
  Description of Artificial Sequence: Synthetic oligonucleotide
  Sense strand starting at position 2703 of SEQ ID NO: 3575
cugggcaguugcuaaagaa

SEQ ID NO: 278285 - RNA, 19 nt, Artificial Sequence
  Description of Artificial Sequence: Synthetic oligonucleotide
  Antisense strand to SEQ ID NO: 278284
uucuuuagcaacugcccag

SEQ ID NO: 278286 - RNA, 19 nt, Artificial Sequence
  Description of Artificial Sequence: Synthetic oligonucleotide
  Sense strand starting at position 2717 of SEQ ID NO: 3575
aagaacaugccguggaaau

SEQ ID NO: 278287 - RNA, 19 nt, Artificial Sequence
  Description of Artificial Sequence: Synthetic oligonucleotide
  Antisense strand to SEQ ID NO: 278286
auuuccacggcauguucuu

SEQ ID NO: 278288 - RNA, 19 nt, Artificial Sequence
  Description of Artificial Sequence: Synthetic oligonucleotide
  Sense strand starting at position 2718 of SEQ ID NO: 3575
agaacaugccguggaaaug

SEQ ID NO: 278289 - RNA, 19 nt, Artificial Sequence
  Description of Artificial Sequence: Synthetic oligonucleotide
  Antisense strand to SEQ ID NO: 278288
cauuuccacggcauguucu

SEQ ID NO: 278290 - RNA, 19 nt, Artificial Sequence
  Description of Artificial Sequence: Synthetic oligonucleotide
  Sense strand starting at position 2719 of SEQ ID NO: 3575
gaacaugccguggaaaugu

SEQ ID NO: 278291 - RNA, 19 nt, Artificial Sequence
  Description of Artificial Sequence: Synthetic oligonucleotide
  Antisense strand to SEQ ID NO: 278290
acauuuccacggcauguuc

SEQ ID NO: 278292 - RNA, 19 nt, Artificial Sequence
  Description of Artificial Sequence: Synthetic oligonucleotide
  Sense strand starting at position 2728 of SEQ ID NO: 3575
guggaaaugucucuuguga

SEQ ID NO: 278293 - RNA, 19 nt, Artificial Sequence
  Description of Artificial Sequence: Synthetic oligonucleotide
  Antisense strand to SEQ ID NO: 278292
ucacaagagacauuuccac

SEQ ID NO: 278294 - RNA, 19 nt, Artificial Sequence
  Description of Artificial Sequence: Synthetic oligonucleotide
  Sense strand starting at position 2733 of SEQ ID NO: 3575
aaugucucuugugacugaa

SEQ ID NO: 278295 - RNA, 19 nt, Artificial Sequence
  Description of Artificial Sequence: Synthetic oligonucleotide
  Antisense strand to SEQ ID NO: 278294
uucagucacaagagacauu

SEQ ID NO: 278296 - RNA, 19 nt, Artificial Sequence
  Description of Artificial Sequence: Synthetic oligonucleotide
  Sense strand starting at position 2774 of SEQ ID NO: 3575
gugcaaauagcagauuaca

SEQ ID NO: 278297 - RNA, 19 nt, Artificial Sequence
  Description of Artificial Sequence: Synthetic oligonucleotide
  Antisense strand to SEQ ID NO: 278296
uguaaucugcuauuugcac

SEQ ID NO: 278298 - RNA, 19 nt, Artificial Sequence
  Description of Artificial Sequence: Synthetic oligonucleotide
  Sense strand starting at position 2821 of SEQ ID NO: 3575
cggugaucauuuccgccaa

SEQ ID NO: 278299 - RNA, 19 nt, Artificial Sequence
  Description of Artificial Sequence: Synthetic oligonucleotide
  Antisense strand to SEQ ID NO: 278298
uuggcggaaaugaucaccg

SEQ ID NO: 278300 - RNA, 19 nt, Artificial Sequence
  Description of Artificial Sequence: Synthetic oligonucleotide
  Sense strand starting at position 2822 of SEQ ID NO: 3575
ggugaucauuuccgccaau

SEQ ID NO: 278301 - RNA, 19 nt, Artificial Sequence
  Description of Artificial Sequence: Synthetic oligonucleotide
  Antisense strand to SEQ ID NO: 278300
auuggcggaaaugaucacc

SEQ ID NO: 278302 - RNA, 19 nt, Artificial Sequence
  Description of Artificial Sequence: Synthetic oligonucleotide
  Sense strand starting at position 2823 of SEQ ID NO: 3575
gugaucauuuccgccaaua

SEQ ID NO: 278303 - RNA, 19 nt, Artificial Sequence
  Description of Artificial Sequence: Synthetic oligonucleotide
  Antisense strand to SEQ ID NO: 278302
uauuggcggaaaugaucac

SEQ ID NO: 278304 - RNA, 19 nt, Artificial Sequence
  Description of Artificial Sequence: Synthetic oligonucleotide
  Sense strand starting at position 2900 of SEQ ID NO: 3575
agaagauuacuccgucucu

SEQ ID NO: 278305 - RNA, 19 nt, Artificial Sequence
  Description of Artificial Sequence: Synthetic oligonucleotide
  Antisense strand to SEQ ID NO: 278304
agagacggaguaaucuucu

SEQ ID NO: 278306 - RNA, 19 nt, Artificial Sequence
  Description of Artificial Sequence: Synthetic oligonucleotide
  Sense strand starting at position 2901 of SEQ ID NO: 3575
gaagauuacuccgucucua

SEQ ID NO: 278307 - RNA, 19 nt, Artificial Sequence
  Description of Artificial Sequence: Synthetic oligonucleotide
  Antisense strand to SEQ ID NO: 278306
uagagacggaguaaucuuc

SEQ ID NO: 278308 - RNA, 19 nt, Artificial Sequence
  Description of Artificial Sequence: Synthetic oligonucleotide
  Sense strand starting at position 3156 of SEQ ID NO: 3575
aguggaguugccggcaauu

SEQ ID NO: 278309 - RNA, 19 nt, Artificial Sequence
  Description of Artificial Sequence: Synthetic oligonucleotide
  Antisense strand to SEQ ID NO: 278308
aauugccggcaacuccacu

SEQ ID NO: 278310 - RNA, 19 nt, Artificial Sequence
  Description of Artificial Sequence: Synthetic oligonucleotide
  Sense strand starting at position 3202 of SEQ ID NO: 3575
uccucauuucugugcacua

SEQ ID NO: 278311 - RNA, 19 nt, Artificial Sequence
  Description of Artificial Sequence: Synthetic oligonucleotide
  Antisense strand to SEQ ID NO: 278310
uagugcacagaaaugagga

SEQ ID NO: 278312 - RNA, 19 nt, Artificial Sequence
  Description of Artificial Sequence: Synthetic oligonucleotide
  Sense strand starting at position 3215 of SEQ ID NO: 3575
gcacuaaacgcguguuacu

SEQ ID NO: 278313 - RNA, 19 nt, Artificial Sequence
  Description of Artificial Sequence: Synthetic oligonucleotide
  Antisense strand to SEQ ID NO: 278312
aguaacacgcguuuagugc

SEQ ID NO: 278314 - RNA, 19 nt, Artificial Sequence
  Description of Artificial Sequence: Synthetic oligonucleotide
  Sense strand starting at position 3222 of SEQ ID NO: 3575
acgcguguuacucguauuu

SEQ ID NO: 278315 - RNA, 19 nt, Artificial Sequence
  Description of Artificial Sequence: Synthetic oligonucleotide
  Antisense strand to SEQ ID NO: 278314
aaauacgaguaacacgcgu

SEQ ID NO: 278316 - RNA, 19 nt, Artificial Sequence
  Description of Artificial Sequence: Synthetic oligonucleotide
  Sense strand starting at position 3247 of SEQ ID NO: 3575
guaaucaaaguuugugaga

SEQ ID NO: 278317 - RNA, 19 nt, Artificial Sequence
  Description of Artificial Sequence: Synthetic oligonucleotide
  Antisense strand to SEQ ID NO: 278316
ucucacaaacuuugauuac

SEQ ID NO: 278318 - RNA, 19 nt, Artificial Sequence
  Description of Artificial Sequence: Synthetic oligonucleotide
  Sense strand starting at position 3248 of SEQ ID NO: 3575
uaaucaaaguuugugagau

SEQ ID NO: 278319 - RNA, 19 nt, Artificial Sequence
  Description of Artificial Sequence: Synthetic oligonucleotide
  Antisense strand to SEQ ID NO: 278318
aucucacaaacuuugauua

SEQ ID NO: 278320 - RNA, 19 nt, Artificial Sequence
  Description of Artificial Sequence: Synthetic oligonucleotide
  Sense strand starting at position 3249 of SEQ ID NO: 3575
aaucaaaguuugugagauu

SEQ ID NO: 278321 - RNA, 19 nt, Artificial Sequence
  Description of Artificial Sequence: Synthetic oligonucleotide
  Antisense strand to SEQ ID NO: 278320
aaucucacaaacuuugauu

SEQ ID NO: 278322 - RNA, 19 nt, Artificial Sequence
  Description of Artificial Sequence: Synthetic oligonucleotide
  Sense strand starting at position 3252 of SEQ ID NO: 3575
caaaguuugugagauucca

SEQ ID NO: 278323 - RNA, 19 nt, Artificial Sequence
  Description of Artificial Sequence: Synthetic oligonucleotide
  Antisense strand to SEQ ID NO: 278322
uggaaucucacaaacuuug

SEQ ID NO: 278324 - RNA, 19 nt, Artificial Sequence
  Description of Artificial Sequence: Synthetic oligonucleotide
  Sense strand starting at position 3260 of SEQ ID NO: 3575
gugagauuccauggcagcu

SEQ ID NO: 278325 - RNA, 19 nt, Artificial Sequence
  Description of Artificial Sequence: Synthetic oligonucleotide
  Antisense strand to SEQ ID NO: 278324
agcugccauggaaucucac

SEQ ID NO: 278326 - RNA, 19 nt, Artificial Sequence
  Description of Artificial Sequence: Synthetic oligonucleotide
  Sense strand starting at position 3432 of SEQ ID NO: 3575
uagggccuuacgugugaau

SEQ ID NO: 278327 - RNA, 19 nt, Artificial Sequence
  Description of Artificial Sequence: Synthetic oligonucleotide
  Antisense strand to SEQ ID NO: 278326
auucacacguaaggcccua

SEQ ID NO: 278328 - RNA, 19 nt, Artificial Sequence
  Description of Artificial Sequence: Synthetic oligonucleotide
  Sense strand starting at position 3434 of SEQ ID NO: 3575
gggccuuacgugugaauca

SEQ ID NO: 278329 - RNA, 19 nt, Artificial Sequence
  Description of Artificial Sequence: Synthetic oligonucleotide
  Antisense strand to SEQ ID NO: 278328
ugauucacacguaaggccc

SEQ ID NO: 278330 - RNA, 19 nt, Artificial Sequence
  Description of Artificial Sequence: Synthetic oligonucleotide
  Sense strand starting at position 3617 of SEQ ID NO: 3575
ggaugcagugaagaauagu

SEQ ID NO: 278331 - RNA, 19 nt, Artificial Sequence
  Description of Artificial Sequence: Synthetic oligonucleotide
  Antisense strand to SEQ ID NO: 278330
acuauucuucacugcaucc

SEQ ID NO: 278332 - RNA, 19 nt, Artificial Sequence
  Description of Artificial Sequence: Synthetic oligonucleotide
  Sense strand starting at position 3620 of SEQ ID NO: 3575
ugcagugaagaauagucua

SEQ ID NO: 278333 - RNA, 19 nt, Artificial Sequence
  Description of Artificial Sequence: Synthetic oligonucleotide
  Antisense strand to SEQ ID NO: 278332
uagacuauucuucacugca

SEQ ID NO: 278334 - RNA, 19 nt, Artificial Sequence
  Description of Artificial Sequence: Synthetic oligonucleotide
  Sense strand starting at position 3759 of SEQ ID NO: 3575
gccuaugacuguguuguga

SEQ ID NO: 278335 - RNA, 19 nt, Artificial Sequence
  Description of Artificial Sequence: Synthetic oligonucleotide
  Antisense strand to SEQ ID NO: 278334
ucacaacacagucauaggc

SEQ ID NO: 278336 - RNA, 19 nt, Artificial Sequence
  Description of Artificial Sequence: Synthetic oligonucleotide
  Sense strand starting at position 3932 of SEQ ID NO: 3575
ccuccaauuuaggcuguua

SEQ ID NO: 278337 - RNA, 19 nt, Artificial Sequence
  Description of Artificial Sequence: Synthetic oligonucleotide
  Antisense strand to SEQ ID NO: 278336
uaacagccuaaauuggagg

SEQ ID NO: 278338 - RNA, 19 nt, Artificial Sequence
  Description of Artificial Sequence: Synthetic oligonucleotide
  Sense strand starting at position 3937 of SEQ ID NO: 3575
aauuuaggcuguuagaaag

SEQ ID NO: 278339 - RNA, 19 nt, Artificial Sequence
  Description of Artificial Sequence: Synthetic oligonucleotide
  Antisense strand to SEQ ID NO: 278338
cuuucuaacagccuaaauu

SEQ ID NO: 278340 - RNA, 19 nt, Artificial Sequence
  Description of Artificial Sequence: Synthetic oligonucleotide
  Sense strand starting at position 3968 of SEQ ID NO: 3575
ugggauggcuuucuaacca

SEQ ID NO: 278341 - RNA, 19 nt, Artificial Sequence
  Description of Artificial Sequence: Synthetic oligonucleotide
  Antisense strand to SEQ ID NO: 278340
ugguuagaaagccauccca

SEQ ID NO: 278342 - RNA, 19 nt, Artificial Sequence
  Description of Artificial Sequence: Synthetic oligonucleotide
  Sense strand starting at position 160 of SEQ ID NO: 3576
ucaguuauguugcuguauc

SEQ ID NO: 278343 - RNA, 19 nt, Artificial Sequence
  Description of Artificial Sequence: Synthetic oligonucleotide
  Antisense strand to SEQ ID NO: 278342
gauacagcaacauaacuga

SEQ ID NO: 278344 - RNA, 19 nt, Artificial Sequence
  Description of Artificial Sequence: Synthetic oligonucleotide
  Sense strand starting at position 308 of SEQ ID NO: 3576
guaaauuucucagaagacu

SEQ ID NO: 278345 - RNA, 19 nt, Artificial Sequence
  Description of Artificial Sequence: Synthetic oligonucleotide
  Antisense strand to SEQ ID NO: 278344
agucuucugagaaauuuac

SEQ ID NO: 278346 - RNA, 19 nt, Artificial Sequence
  Description of Artificial Sequence: Synthetic oligonucleotide
  Sense strand starting at position 374 of SEQ ID NO: 3576
ccguuacagucaugauuua

SEQ ID NO: 278347 - RNA, 19 nt, Artificial Sequence
  Description of Artificial Sequence: Synthetic oligonucleotide
  Antisense strand to SEQ ID NO: 278346
uaaaucaugacuguaacgg

SEQ ID NO: 278348 - RNA, 19 nt, Artificial Sequence
  Description of Artificial Sequence: Synthetic oligonucleotide
  Sense strand starting at position 405 of SEQ ID NO: 3576
uuugaaauuauucgggcau

SEQ ID NO: 278349 - RNA, 19 nt, Artificial Sequence
  Description of Artificial Sequence: Synthetic oligonucleotide
  Antisense strand to SEQ ID NO: 278348
augcccgaauaauuucaaa

SEQ ID NO: 278350 - RNA, 19 nt, Artificial Sequence
  Description of Artificial Sequence: Synthetic oligonucleotide
  Sense strand starting at position 411 of SEQ ID NO: 3576
auuauucgggcauaaacua

SEQ ID NO: 278351 - RNA, 19 nt, Artificial Sequence
  Description of Artificial Sequence: Synthetic oligonucleotide
  Antisense strand to SEQ ID NO: 278350
uaguuuaugcccgaauaau

SEQ ID NO: 278352 - RNA, 19 nt, Artificial Sequence
  Description of Artificial Sequence: Synthetic oligonucleotide
  Sense strand starting at position 452 of SEQ ID NO: 3576
ugaccuagauucugaaauc

SEQ ID NO: 278353 - RNA, 19 nt, Artificial Sequence
  Description of Artificial Sequence: Synthetic oligonucleotide
  Antisense strand to SEQ ID NO: 278352
gauuucagaaucuagguca

SEQ ID NO: 278354 - RNA, 19 nt, Artificial Sequence
  Description of Artificial Sequence: Synthetic oligonucleotide
  Sense strand starting at position 463 of SEQ ID NO: 3576
cugaaaucuugauagaaua

SEQ ID NO: 278355 - RNA, 19 nt, Artificial Sequence
  Description of Artificial Sequence: Synthetic oligonucleotide
  Antisense strand to SEQ ID NO: 278354
uauucuaucaagauuucag

SEQ ID NO: 278356 - RNA, 19 nt, Artificial Sequence
  Description of Artificial Sequence: Synthetic oligonucleotide
  Sense strand starting at position 564 of SEQ ID NO: 3576
caucaucugcggcaucauu

SEQ ID NO: 278357 - RNA, 19 nt, Artificial Sequence
  Description of Artificial Sequence: Synthetic oligonucleotide
  Antisense strand to SEQ ID NO: 278356
aaugaugccgcagaugaug

SEQ ID NO: 278358 - RNA, 19 nt, Artificial Sequence
  Description of Artificial Sequence: Synthetic oligonucleotide
  Sense strand starting at position 574 of SEQ ID NO: 3576
ggcaucauuccaugaggua

SEQ ID NO: 278359 - RNA, 19 nt, Artificial Sequence
  Description of Artificial Sequence: Synthetic oligonucleotide
  Antisense strand to SEQ ID NO: 278358
uaccucauggaaugaugcc

SEQ ID NO: 278360 - RNA, 19 nt, Artificial Sequence
  Description of Artificial Sequence: Synthetic oligonucleotide
  Sense strand starting at position 575 of SEQ ID NO: 3576
gcaucauuccaugagguac

SEQ ID NO: 278361 - RNA, 19 nt, Artificial Sequence
  Description of Artificial Sequence: Synthetic oligonucleotide
  Antisense strand to SEQ ID NO: 278360
guaccucauggaaugaugc

SEQ ID NO: 278362 - RNA, 19 nt, Artificial Sequence
  Description of Artificial Sequence: Synthetic oligonucleotide
  Sense strand starting at position 732 of SEQ ID NO: 3576
acagaucaguuaucugaag

SEQ ID NO: 278363 - RNA, 19 nt, Artificial Sequence
  Description of Artificial Sequence: Synthetic oligonucleotide
  Antisense strand to SEQ ID NO: 278362
cuucagauaacugaucugu

SEQ ID NO: 278364 - RNA, 19 nt, Artificial Sequence
  Description of Artificial Sequence: Synthetic oligonucleotide
  Sense strand starting at position 739 of SEQ ID NO: 3576
aguuaucugaagcgacaua

SEQ ID NO: 278365 - RNA, 19 nt, Artificial Sequence
  Description of Artificial Sequence: Synthetic oligonucleotide
  Antisense strand to SEQ ID NO: 278364
uaugucgcuucagauaacu

SEQ ID NO: 278366 - RNA, 19 nt, Artificial Sequence
  Description of Artificial Sequence: Synthetic oligonucleotide
  Sense strand starting at position 740 of SEQ ID NO: 3576
guuaucugaagcgacauaa

SEQ ID NO: 278367 - RNA, 19 nt, Artificial Sequence
  Description of Artificial Sequence: Synthetic oligonucleotide
  Antisense strand to SEQ ID NO: 278366
uuaugucgcuucagauaac

SEQ ID NO: 278368 - RNA, 19 nt, Artificial Sequence
  Description of Artificial Sequence: Synthetic oligonucleotide
  Sense strand starting at position 776 of SEQ ID NO: 3576
auaacaucauuggauuagu

SEQ ID NO: 278369 - RNA, 19 nt, Artificial Sequence
  Description of Artificial Sequence: Synthetic oligonucleotide
  Antisense strand to SEQ ID NO: 278368
acuaauccaaugauguuau

SEQ ID NO: 278370 - RNA, 19 nt, Artificial Sequence
  Description of Artificial Sequence: Synthetic oligonucleotide
  Sense strand starting at position 781 of SEQ ID NO: 3576
aucauuggauuagucuaua

SEQ ID NO: 278371 - RNA, 19 nt, Artificial Sequence
  Description of Artificial Sequence: Synthetic oligonucleotide
  Antisense strand to SEQ ID NO: 278370
uauagacuaauccaaugau

SEQ ID NO: 278372 - RNA, 19 nt, Artificial Sequence
  Description of Artificial Sequence: Synthetic oligonucleotide
  Sense strand starting at position 784 of SEQ ID NO: 3576
auuggauuagucuauaccu

SEQ ID NO: 278373 - RNA, 19 nt, Artificial Sequence
  Description of Artificial Sequence: Synthetic oligonucleotide
  Antisense strand to SEQ ID NO: 278372
agguauagacuaauccaau

SEQ ID NO: 278374 - RNA, 19 nt, Artificial Sequence
  Description of Artificial Sequence: Synthetic oligonucleotide
  Sense strand starting at position 818 of SEQ ID NO: 3576
gcauucugcuaguauuuaa

SEQ ID NO: 278375 - RNA, 19 nt, Artificial Sequence
  Description of Artificial Sequence: Synthetic oligonucleotide
  Antisense strand to SEQ ID NO: 278374
uuaaauacuagcagaaugc

SEQ ID NO: 278376 - RNA, 19 nt, Artificial Sequence
  Description of Artificial Sequence: Synthetic oligonucleotide
  Sense strand starting at position 941 of SEQ ID NO: 3576
gcuacuaauuggcuugcua

SEQ ID NO: 278377 - RNA, 19 nt, Artificial Sequence
  Description of Artificial Sequence: Synthetic oligonucleotide
  Antisense strand to SEQ ID NO: 278376
uagcaagccaauuaguagc

SEQ ID NO: 278378 - RNA, 19 nt, Artificial Sequence
  Description of Artificial Sequence: Synthetic oligonucleotide
  Sense strand starting at position 954 of SEQ ID NO: 3576
uugcuaagcuuggaggaua

SEQ ID NO: 278379 - RNA, 19 nt, Artificial Sequence
  Description of Artificial Sequence: Synthetic oligonucleotide
  Antisense strand to SEQ ID NO: 278378
uauccuccaagcuuagcaa

SEQ ID NO: 278380 - RNA, 19 nt, Artificial Sequence
  Description of Artificial Sequence: Synthetic oligonucleotide
  Sense strand starting at position 1101 of SEQ ID NO: 3576
ccaauuaacucaggugaga

SEQ ID NO: 278381 - RNA, 19 nt, Artificial Sequence
  Description of Artificial Sequence: Synthetic oligonucleotide
  Antisense strand to SEQ ID NO: 278380
ucucaccugaguuaauugg

SEQ ID NO: 278382 - RNA, 19 nt, Artificial Sequence
  Description of Artificial Sequence: Synthetic oligonucleotide
  Sense strand starting at position 1317 of SEQ ID NO: 3576
cuacuuucuuuaccgauga

SEQ ID NO: 278383 - RNA, 19 nt, Artificial Sequence
  Description of Artificial Sequence: Synthetic oligonucleotide
  Antisense strand to SEQ ID NO: 278382
ucaucgguaaagaaaguag

SEQ ID NO: 278384 - RNA, 19 nt, Artificial Sequence
  Description of Artificial Sequence: Synthetic oligonucleotide
  Sense strand starting at position 1327 of SEQ ID NO: 3576
uaccgaugaguccauuguu

SEQ ID NO: 278385 - RNA, 19 nt, Artificial Sequence
  Description of Artificial Sequence: Synthetic oligonucleotide
  Antisense strand to SEQ ID NO: 278384
aacaauggacucaucggua

SEQ ID NO: 278386 - RNA, 19 nt, Artificial Sequence
  Description of Artificial Sequence: Synthetic oligonucleotide
  Sense strand starting at position 1330 of SEQ ID NO: 3576
cgaugaguccauuguucua

SEQ ID NO: 278387 - RNA, 19 nt, Artificial Sequence
  Description of Artificial Sequence: Synthetic oligonucleotide
  Antisense strand to SEQ ID NO: 278386
uagaacaauggacucaucg

SEQ ID NO: 278388 - RNA, 19 nt, Artificial Sequence
  Description of Artificial Sequence: Synthetic oligonucleotide
  Sense strand starting at position 1659 of SEQ ID NO: 3576
cgaguucuuccuucgucca

SEQ ID NO: 278389 - RNA, 19 nt, Artificial Sequence
  Description of Artificial Sequence: Synthetic oligonucleotide
  Antisense strand to SEQ ID NO: 278388
uggacgaaggaagaacucg

SEQ ID NO: 278390 - RNA, 19 nt, Artificial Sequence
  Description of Artificial Sequence: Synthetic oligonucleotide
  Sense strand starting at position 1820 of SEQ ID NO: 3576
gaggcuugagccggacaau

SEQ ID NO: 278391 - RNA, 19 nt, Artificial Sequence
  Description of Artificial Sequence: Synthetic oligonucleotide
  Antisense strand to SEQ ID NO: 278390
auuguccggcucaagccuc

SEQ ID NO: 278392 - RNA, 19 nt, Artificial Sequence
  Description of Artificial Sequence: Synthetic oligonucleotide
  Sense strand starting at position 2196 of SEQ ID NO: 3576
ggaaguuucugcgccgagu

SEQ ID NO: 278393 - RNA, 19 nt, Artificial Sequence
  Description of Artificial Sequence: Synthetic oligonucleotide
  Antisense strand to SEQ ID NO: 278392
acucggcgcagaaacuucc

SEQ ID NO: 278394 - RNA, 19 nt, Artificial Sequence
  Description of Artificial Sequence: Synthetic oligonucleotide
  Sense strand starting at position 2210 of SEQ ID NO: 3576
cgaguccuccgucgggaaa

SEQ ID NO: 278395 - RNA, 19 nt, Artificial Sequence
  Description of Artificial Sequence: Synthetic oligonucleotide
  Antisense strand to SEQ ID NO: 278394
uuucccgacggaggacucg

SEQ ID NO: 278396 - RNA, 19 nt, Artificial Sequence
  Description of Artificial Sequence: Synthetic oligonucleotide
  Sense strand starting at position 3547 of SEQ ID NO: 3576
cuacuugaucguuaaaggu

SEQ ID NO: 278397 - RNA, 19 nt, Artificial Sequence
  Description of Artificial Sequence: Synthetic oligonucleotide
  Antisense strand to SEQ ID NO: 278396
accuuuaacgaucaaguag

SEQ ID NO: 278398 - RNA, 19 nt, Artificial Sequence
  Description of Artificial Sequence: Synthetic oligonucleotide
  Sense strand starting at position 3579 of SEQ ID NO: 3576
ccuugaaagucuguccaga

SEQ ID NO: 278399 - RNA, 19 nt, Artificial Sequence
  Description of Artificial Sequence: Synthetic oligonucleotide
  Antisense strand to SEQ ID NO: 278398
ucuggacagacuuucaagg

SEQ ID NO: 278400 - RNA, 19 nt, Artificial Sequence
  Description of Artificial Sequence: Synthetic oligonucleotide
  Sense strand starting at position 3581 of SEQ ID NO: 3576
uugaaagucuguccagagu

SEQ ID NO: 278401 - RNA, 19 nt, Artificial Sequence
  Description of Artificial Sequence: Synthetic oligonucleotide
  Antisense strand to SEQ ID NO: 278400
acucuggacagacuuucaa

SEQ ID NO: 278402 - RNA, 19 nt, Artificial Sequence
  Description of Artificial Sequence: Synthetic oligonucleotide
  Sense strand starting at position 3584 of SEQ ID NO: 3576
aaagucuguccagaguaaa

SEQ ID NO: 278403 - RNA, 19 nt, Artificial Sequence
  Description of Artificial Sequence: Synthetic oligonucleotide
  Antisense strand to SEQ ID NO: 278402
uuuacucuggacagacuuu

SEQ ID NO: 278404 - RNA, 19 nt, Artificial Sequence
  Description of Artificial Sequence: Synthetic oligonucleotide
  Sense strand starting at position 3587 of SEQ ID NO: 3576
gucuguccagaguaaaguu

SEQ ID NO: 278405 - RNA, 19 nt, Artificial Sequence
  Description of Artificial Sequence: Synthetic oligonucleotide
  Antisense strand to SEQ ID NO: 278404
aacuuuacucuggacagac

SEQ ID NO: 278406 - RNA, 19 nt, Artificial Sequence
  Description of Artificial Sequence: Synthetic oligonucleotide
  Sense strand starting at position 3776 of SEQ ID NO: 3576
aaaggaucguuugauuaaa

SEQ ID NO: 278407 - RNA, 19 nt, Artificial Sequence
  Description of Artificial Sequence: Synthetic oligonucleotide
  Antisense strand to SEQ ID NO: 278406
uuuaaucaaacgauccuuu

SEQ ID NO: 278408 - RNA, 19 nt, Artificial Sequence
  Description of Artificial Sequence: Synthetic oligonucleotide
  Sense strand starting at position 3778 of SEQ ID NO: 3576
aggaucguuugauuaaaug

SEQ ID NO: 278409 - RNA, 19 nt, Artificial Sequence
  Description of Artificial Sequence: Synthetic oligonucleotide
  Antisense strand to SEQ ID NO: 278408
cauuuaaucaaacgauccu

SEQ ID NO: 278410 - RNA, 19 nt, Artificial Sequence
  Description of Artificial Sequence: Synthetic oligonucleotide
  Sense strand starting at position 3784 of SEQ ID NO: 3576
guuugauuaaauggguacu

SEQ ID NO: 278411 - RNA, 19 nt, Artificial Sequence
  Description of Artificial Sequence: Synthetic oligonucleotide
  Antisense strand to SEQ ID NO: 278410
aguacccauuuaaucaaac

SEQ ID NO: 278412 - RNA, 19 nt, Artificial Sequence
  Description of Artificial Sequence: Synthetic oligonucleotide
  Sense strand starting at position 3790 of SEQ ID NO: 3576
uuaaauggguacucuugaa

SEQ ID NO: 278413 - RNA, 19 nt, Artificial Sequence
  Description of Artificial Sequence: Synthetic oligonucleotide
  Antisense strand to SEQ ID NO: 278412
uucaagaguacccauuuaa

SEQ ID NO: 278414 - RNA, 19 nt, Artificial Sequence
  Description of Artificial Sequence: Synthetic oligonucleotide
  Sense strand starting at position 3838 of SEQ ID NO: 3576
gaugaaauauugugaagau

SEQ ID NO: 278415 - RNA, 19 nt, Artificial Sequence
  Description of Artificial Sequence: Synthetic oligonucleotide
  Antisense strand to SEQ ID NO: 278414
aucuucacaauauuucauc

SEQ ID NO: 278416 - RNA, 19 nt, Artificial Sequence
  Description of Artificial Sequence: Synthetic oligonucleotide
  Sense strand starting at position 3952 of SEQ ID NO: 3576
agaugugcuguccaccaau

SEQ ID NO: 278417 - RNA, 19 nt, Artificial Sequence
  Description of Artificial Sequence: Synthetic oligonucleotide
  Antisense strand to SEQ ID NO: 278416
auugguggacagcacaucu

SEQ ID NO: 278418 - RNA, 19 nt, Artificial Sequence
  Description of Artificial Sequence: Synthetic oligonucleotide
  Sense strand starting at position 3976 of SEQ ID NO: 3576
uacacagaaucuugaggga

SEQ ID NO: 278419 - RNA, 19 nt, Artificial Sequence
  Description of Artificial Sequence: Synthetic oligonucleotide
  Antisense strand to SEQ ID NO: 278418
ucccucaagauucugugua

SEQ ID NO: 278420 - RNA, 19 nt, Artificial Sequence
  Description of Artificial Sequence: Synthetic oligonucleotide
  Sense strand starting at position 3979 of SEQ ID NO: 3576
acagaaucuugagggacaa

SEQ ID NO: 278421 - RNA, 19 nt, Artificial Sequence
  Description of Artificial Sequence: Synthetic oligonucleotide
  Antisense strand to SEQ ID NO: 278420
uugucccucaagauucugu

SEQ ID NO: 278422 - RNA, 19 nt, Artificial Sequence
  Description of Artificial Sequence: Synthetic oligonucleotide
  Sense strand starting at position 193 of SEQ ID NO: 3577
gccagagacuuagaggaga

SEQ ID NO: 278423 - RNA, 19 nt, Artificial Sequence
  Description of Artificial Sequence: Synthetic oligonucleotide
  Antisense strand to SEQ ID NO: 278422
ucuccucuaagucucuggc

SEQ ID NO: 278424 - RNA, 19 nt, Artificial Sequence
  Description of Artificial Sequence: Synthetic oligonucleotide
  Sense strand starting at position 263 of SEQ ID NO: 3577
uggugcuucugugcaacaa

SEQ ID NO: 278425 - RNA, 19 nt, Artificial Sequence
  Description of Artificial Sequence: Synthetic oligonucleotide
  Antisense strand to SEQ ID NO: 278424
uuguugcacagaagcacca

SEQ ID NO: 278426 - RNA, 19 nt, Artificial Sequence
  Description of Artificial Sequence: Synthetic oligonucleotide
  Sense strand starting at position 320 of SEQ ID NO: 3577
ggaagagacaaguggguuu

SEQ ID NO: 278427 - RNA, 19 nt, Artificial Sequence
  Description of Artificial Sequence: Synthetic oligonucleotide
  Antisense strand to SEQ ID NO: 278426
aaacccacuugucucuucc

SEQ ID NO: 278428 - RNA, 19 nt, Artificial Sequence
  Description of Artificial Sequence: Synthetic oligonucleotide
  Sense strand starting at position 611 of SEQ ID NO: 3577
ggaacugucugguccagag

SEQ ID NO: 278429 - RNA, 19 nt, Artificial Sequence
  Description of Artificial Sequence: Synthetic oligonucleotide
  Antisense strand to SEQ ID NO: 278428
cucuggaccagacaguucc

SEQ ID NO: 278430 - RNA, 19 nt, Artificial Sequence
  Description of Artificial Sequence: Synthetic oligonucleotide
  Sense strand starting at position 744 of SEQ ID NO: 3577
guaugagcugaagaagcuu

SEQ ID NO: 278431 - RNA, 19 nt, Artificial Sequence
  Description of Artificial Sequence: Synthetic oligonucleotide
  Antisense strand to SEQ ID NO: 278430
aagcuucuucagcucauac

SEQ ID NO: 278432 - RNA, 19 nt, Artificial Sequence
  Description of Artificial Sequence: Synthetic oligonucleotide
  Sense strand starting at position 805 of SEQ ID NO: 3577
ggaugccagaguugauaaa

SEQ ID NO: 278433 - RNA, 19 nt, Artificial Sequence
  Description of Artificial Sequence: Synthetic oligonucleotide
  Antisense strand to SEQ ID NO: 278432
uuuaucaacucuggcaucc

SEQ ID NO: 278434 - RNA, 19 nt, Artificial Sequence
  Description of Artificial Sequence: Synthetic oligonucleotide
  Sense strand starting at position 826 of SEQ ID NO: 3577
uagacuuaguaagagauua

SEQ ID NO: 278435 - RNA, 19 nt, Artificial Sequence
  Description of Artificial Sequence: Synthetic oligonucleotide
  Antisense strand to SEQ ID NO: 278434
uaaucucuuacuaagucua

SEQ ID NO: 278436 - RNA, 19 nt, Artificial Sequence
  Description of Artificial Sequence: Synthetic oligonucleotide
  Sense strand starting at position 834 of SEQ ID NO: 3577
guaagagauuauuagaaag

SEQ ID NO: 278437 - RNA, 19 nt, Artificial Sequence
  Description of Artificial Sequence: Synthetic oligonucleotide
  Antisense strand to SEQ ID NO: 278436
cuuucuaauaaucucuuac

SEQ ID NO: 278438 - RNA, 19 nt, Artificial Sequence
  Description of Artificial Sequence: Synthetic oligonucleotide
  Sense strand starting at position 848 of SEQ ID NO: 3577
gaaaguacauguuagaaac

SEQ ID NO: 278439 - RNA, 19 nt, Artificial Sequence
  Description of Artificial Sequence: Synthetic oligonucleotide
  Antisense strand to SEQ ID NO: 278438
guuucuaacauguacuuuc

SEQ ID NO: 278440 - RNA, 19 nt, Artificial Sequence
  Description of Artificial Sequence: Synthetic oligonucleotide
  Sense strand starting at position 967 of SEQ ID NO: 3577
ugaagagacuuggaugaag

SEQ ID NO: 278441 - RNA, 19 nt, Artificial Sequence
  Description of Artificial Sequence: Synthetic oligonucleotide
  Antisense strand to SEQ ID NO: 278440
cuucauccaagucucuuca

SEQ ID NO: 278442 - RNA, 19 nt, Artificial Sequence
  Description of Artificial Sequence: Synthetic oligonucleotide
  Sense strand starting at position 1889 of SEQ ID NO: 3577
ggugaagagccguggauga

SEQ ID NO: 278443 - RNA, 19 nt, Artificial Sequence
  Description of Artificial Sequence: Synthetic oligonucleotide
  Antisense strand to SEQ ID NO: 278442
ucauccacggcucuucacc

SEQ ID NO: 278444 - RNA, 19 nt, Artificial Sequence
  Description of Artificial Sequence: Synthetic oligonucleotide
  Sense strand starting at position 1970 of SEQ ID NO: 3577
gaugaagagcuguggauga

SEQ ID NO: 278445 - RNA, 19 nt, Artificial Sequence
  Description of Artificial Sequence: Synthetic oligonucleotide
  Antisense strand to SEQ ID NO: 278444
ucauccacagcucuucauc

SEQ ID NO: 278446 - RNA, 19 nt, Artificial Sequence
  Description of Artificial Sequence: Synthetic oligonucleotide
  Sense strand starting at position 2181 of SEQ ID NO: 3577
cuccucuggccuuggaaga

SEQ ID NO: 278447 - RNA, 19 nt, Artificial Sequence
  Description of Artificial Sequence: Synthetic oligonucleotide
  Antisense strand to SEQ ID NO: 278446
ucuuccaaggccagaggag

SEQ ID NO: 278448 - RNA, 19 nt, Artificial Sequence
  Description of Artificial Sequence: Synthetic oligonucleotide
  Sense strand starting at position 2182 of SEQ ID NO: 3577
uccucuggccuuggaagaa

SEQ ID NO: 278449 - RNA, 19 nt, Artificial Sequence
  Description of Artificial Sequence: Synthetic oligonucleotide
  Antisense strand to SEQ ID NO: 278448
uucuuccaaggccagagga

SEQ ID NO: 278450 - RNA, 19 nt, Artificial Sequence
  Description of Artificial Sequence: Synthetic oligonucleotide
  Sense strand starting at position 2212 of SEQ ID NO: 3577
ggaucugauuucuacccau

SEQ ID NO: 278451 - RNA, 19 nt, Artificial Sequence
  Description of Artificial Sequence: Synthetic oligonucleotide
  Antisense strand to SEQ ID NO: 278450
auggguagaaaucagaucc

SEQ ID NO: 278452 - RNA, 19 nt, Artificial Sequence
  Description of Artificial Sequence: Synthetic oligonucleotide
  Sense strand starting at position 2223 of SEQ ID NO: 3577
cuacccauuugauaggaau

SEQ ID NO: 278453 - RNA, 19 nt, Artificial Sequence
  Description of Artificial Sequence: Synthetic oligonucleotide
  Antisense strand to SEQ ID NO: 278452
auuccuaucaaauggguag

SEQ ID NO: 278454 - RNA, 19 nt, Artificial Sequence
  Description of Artificial Sequence: Synthetic oligonucleotide
  Sense strand starting at position 2376 of SEQ ID NO: 3577
gcgucuacucggucccuaa

SEQ ID NO: 278455 - RNA, 19 nt, Artificial Sequence
  Description of Artificial Sequence: Synthetic oligonucleotide
  Antisense strand to SEQ ID NO: 278454
uuagggaccgaguagacgc

SEQ ID NO: 278456 - RNA, 19 nt, Artificial Sequence
  Description of Artificial Sequence: Synthetic oligonucleotide
  Sense strand starting at position 2395 of SEQ ID NO: 3577
cagguaucuggaugcauuc

SEQ ID NO: 278457 - RNA, 19 nt, Artificial Sequence
  Description of Artificial Sequence: Synthetic oligonucleotide
  Antisense strand to SEQ ID NO: 278456
gaaugcauccagauaccug

SEQ ID NO: 278458 - RNA, 19 nt, Artificial Sequence
  Description of Artificial Sequence: Synthetic oligonucleotide
  Sense strand starting at position 2667 of SEQ ID NO: 3577
ccuuaauugccagacgagu

SEQ ID NO: 278459 - RNA, 19 nt, Artificial Sequence
  Description of Artificial Sequence: Synthetic oligonucleotide
  Antisense strand to SEQ ID NO: 278458
acucgucuggcaauuaagg

SEQ ID NO: 278460 - RNA, 19 nt, Artificial Sequence
  Description of Artificial Sequence: Synthetic oligonucleotide
  Sense strand starting at position 3064 of SEQ ID NO: 3577
cgucuuugagcucugcaca

SEQ ID NO: 278461 - RNA, 19 nt, Artificial Sequence
  Description of Artificial Sequence: Synthetic oligonucleotide
  Antisense strand to SEQ ID NO: 278460
ugugcagagcucaaagacg

SEQ ID NO: 278462 - RNA, 19 nt, Artificial Sequence
  Description of Artificial Sequence: Synthetic oligonucleotide
  Sense strand starting at position 3107 of SEQ ID NO: 3577
aggcuuugcuaucauugaa

SEQ ID NO: 278463 - RNA, 19 nt, Artificial Sequence
  Description of Artificial Sequence: Synthetic oligonucleotide
  Antisense strand to SEQ ID NO: 278462
uucaaugauagcaaagccu

SEQ ID NO: 278464 - RNA, 19 nt, Artificial Sequence
  Description of Artificial Sequence: Synthetic oligonucleotide
  Sense strand starting at position 3120 of SEQ ID NO: 3577
auugaaauugccuggaaca

SEQ ID NO: 278465 - RNA, 19 nt, Artificial Sequence
  Description of Artificial Sequence: Synthetic oligonucleotide
  Antisense strand to SEQ ID NO: 278464
uguuccaggcaauuucaau

SEQ ID NO: 278466 - RNA, 19 nt, Artificial Sequence
  Description of Artificial Sequence: Synthetic oligonucleotide
  Sense strand starting at position 3121 of SEQ ID NO: 3577
uugaaauugccuggaacac

SEQ ID NO: 278467 - RNA, 19 nt, Artificial Sequence
  Description of Artificial Sequence: Synthetic oligonucleotide
  Antisense strand to SEQ ID NO: 278466
guguuccaggcaauuucaa

SEQ ID NO: 278468 - RNA, 19 nt, Artificial Sequence
  Description of Artificial Sequence: Synthetic oligonucleotide
  Sense strand starting at position 3399 of SEQ ID NO: 3577
cugggcaucuguguguauu

SEQ ID NO: 278469 - RNA, 19 nt, Artificial Sequence
  Description of Artificial Sequence: Synthetic oligonucleotide
  Antisense strand to SEQ ID NO: 278468
aauacacacagaugcccag

SEQ ID NO: 278470 - RNA, 19 nt, Artificial Sequence
  Description of Artificial Sequence: Synthetic oligonucleotide
  Sense strand starting at position 3400 of SEQ ID NO: 3577
ugggcaucuguguguauuu

SEQ ID NO: 278471 - RNA, 19 nt, Artificial Sequence
  Description of Artificial Sequence: Synthetic oligonucleotide
  Antisense strand to SEQ ID NO: 278470
aaauacacacagaugccca

SEQ ID NO: 278472 - RNA, 19 nt, Artificial Sequence
  Description of Artificial Sequence: Synthetic oligonucleotide
  Sense strand starting at position 3401 of SEQ ID NO: 3577
gggcaucuguguguauuua

SEQ ID NO: 278473 - RNA, 19 nt, Artificial Sequence
  Description of Artificial Sequence: Synthetic oligonucleotide
  Antisense strand to SEQ ID NO: 278472
uaaauacacacagaugccc

SEQ ID NO: 278474 - RNA, 19 nt, Artificial Sequence
  Description of Artificial Sequence: Synthetic oligonucleotide
  Sense strand starting at position 3547 of SEQ ID NO: 3577
cugggcaucugcguauauu

SEQ ID NO: 278475 - RNA, 19 nt, Artificial Sequence
  Description of Artificial Sequence: Synthetic oligonucleotide
  Antisense strand to SEQ ID NO: 278474
aauauacgcagaugcccag

SEQ ID NO: 278476 - RNA, 19 nt, Artificial Sequence
  Description of Artificial Sequence: Synthetic oligonucleotide
  Sense strand starting at position 3548 of SEQ ID NO: 3577
ugggcaucugcguauauuu

SEQ ID NO: 278477 - RNA, 19 nt, Artificial Sequence
  Description of Artificial Sequence: Synthetic oligonucleotide
  Antisense strand to SEQ ID NO: 278476
aaauauacgcagaugccca

SEQ ID NO: 278478 - RNA, 19 nt, Artificial Sequence
  Description of Artificial Sequence: Synthetic oligonucleotide
  Sense strand starting at position 3577 of SEQ ID NO: 3577
agaaucgacucaugcaaua

SEQ ID NO: 278479 - RNA, 19 nt, Artificial Sequence
  Description of Artificial Sequence: Synthetic oligonucleotide
  Antisense strand to SEQ ID NO: 278478
uauugcaugagucgauucu

SEQ ID NO: 278480 - RNA, 19 nt, Artificial Sequence
  Description of Artificial Sequence: Synthetic oligonucleotide
  Sense strand starting at position 3689 of SEQ ID NO: 3577
agagaacauucguugggua

SEQ ID NO: 278481 - RNA, 19 nt, Artificial Sequence
  Description of Artificial Sequence: Synthetic oligonucleotide
  Antisense strand to SEQ ID NO: 278480
uacccaacgaauguucucu

SEQ ID NO: 278482 - RNA, 19 nt, Artificial Sequence
  Description of Artificial Sequence: Synthetic oligonucleotide
  Sense strand starting at position 3690 of SEQ ID NO: 3577
gagaacauucguuggguau

SEQ ID NO: 278483 - RNA, 19 nt, Artificial Sequence
  Description of Artificial Sequence: Synthetic oligonucleotide
  Antisense strand to SEQ ID NO: 278482
auacccaacgaauguucuc

SEQ ID NO: 278484 - RNA, 19 nt, Artificial Sequence
  Description of Artificial Sequence: Synthetic oligonucleotide
  Sense strand starting at position 3691 of SEQ ID NO: 3577
agaacauucguuggguaua

SEQ ID NO: 278485 - RNA, 19 nt, Artificial Sequence
  Description of Artificial Sequence: Synthetic oligonucleotide
  Antisense strand to SEQ ID NO: 278484
uauacccaacgaauguucu

SEQ ID NO: 278486 - RNA, 19 nt, Artificial Sequence
  Description of Artificial Sequence: Synthetic oligonucleotide
  Sense strand starting at position 3692 of SEQ ID NO: 3577
gaacauucguuggguauaa

SEQ ID NO: 278487 - RNA, 19 nt, Artificial Sequence
  Description of Artificial Sequence: Synthetic oligonucleotide
  Antisense strand to SEQ ID NO: 278486
uuauacccaacgaauguuc

SEQ ID NO: 278488 - RNA, 19 nt, Artificial Sequence
  Description of Artificial Sequence: Synthetic oligonucleotide
  Sense strand starting at position 3693 of SEQ ID NO: 3577
aacauucguuggguauaaa

SEQ ID NO: 278489 - RNA, 19 nt, Artificial Sequence
  Description of Artificial Sequence: Synthetic oligonucleotide
  Antisense strand to SEQ ID NO: 278488
uuuauacccaacgaauguu

SEQ ID NO: 278490 - RNA, 19 nt, Artificial Sequence
  Description of Artificial Sequence: Synthetic oligonucleotide
  Sense strand starting at position 3776 of SEQ ID NO: 3577
uuugccacaugguuaaaua

SEQ ID NO: 278491 - RNA, 19 nt, Artificial Sequence
  Description of Artificial Sequence: Synthetic oligonucleotide
  Antisense strand to SEQ ID NO: 278490
uauuuaaccauguggcaaa

SEQ ID NO: 278492 - RNA, 19 nt, Artificial Sequence
  Description of Artificial Sequence: Synthetic oligonucleotide
  Sense strand starting at position 3777 of SEQ ID NO: 3577
uugccacaugguuaaauau

SEQ ID NO: 278493 - RNA, 19 nt, Artificial Sequence
  Description of Artificial Sequence: Synthetic oligonucleotide
  Antisense strand to SEQ ID NO: 278492
auauuuaaccauguggcaa

SEQ ID NO: 278494 - RNA, 19 nt, Artificial Sequence
  Description of Artificial Sequence: Synthetic oligonucleotide
  Sense strand starting at position 3866 of SEQ ID NO: 3577
uucugaaaugugcauggua

SEQ ID NO: 278495 - RNA, 19 nt, Artificial Sequence
  Description of Artificial Sequence: Synthetic oligonucleotide
  Antisense strand to SEQ ID NO: 278494
uaccaugcacauuucagaa

SEQ ID NO: 278496 - RNA, 19 nt, Artificial Sequence
  Description of Artificial Sequence: Synthetic oligonucleotide
  Sense strand starting at position 3868 of SEQ ID NO: 3577
cugaaaugugcaugguaau

SEQ ID NO: 278497 - RNA, 19 nt, Artificial Sequence
  Description of Artificial Sequence: Synthetic oligonucleotide
  Antisense strand to SEQ ID NO: 278496
auuaccaugcacauuucag

SEQ ID NO: 278498 - RNA, 19 nt, Artificial Sequence
  Description of Artificial Sequence: Synthetic oligonucleotide
  Sense strand starting at position 3869 of SEQ ID NO: 3577
ugaaaugugcaugguaauu

SEQ ID NO: 278499 - RNA, 19 nt, Artificial Sequence
  Description of Artificial Sequence: Synthetic oligonucleotide
  Antisense strand to SEQ ID NO: 278498
aauuaccaugcacauuuca

SEQ ID NO: 278500 - RNA, 19 nt, Artificial Sequence
  Description of Artificial Sequence: Synthetic oligonucleotide
  Sense strand starting at position 3946 of SEQ ID NO: 3577
acaagaaaguacugguauu

SEQ ID NO: 278501 - RNA, 19 nt, Artificial Sequence
  Description of Artificial Sequence: Synthetic oligonucleotide
  Antisense strand to SEQ ID NO: 278500
aauaccaguacuuucuugu

SEQ ID NO: 278502 - RNA, 19 nt, Artificial Sequence
  Description of Artificial Sequence: Synthetic oligonucleotide
  Sense strand starting at position 335 of SEQ ID NO: 3578
gcgccaugucugccuguua

SEQ ID NO: 278503 - RNA, 19 nt, Artificial Sequence
  Description of Artificial Sequence: Synthetic oligonucleotide
  Antisense strand to SEQ ID NO: 278502
uaacaggcagacauggcgc

SEQ ID NO: 278504 - RNA, 19 nt, Artificial Sequence
  Description of Artificial Sequence: Synthetic oligonucleotide
  Sense strand starting at position 559 of SEQ ID NO: 3578
gguaguucuggugaaagaa

SEQ ID NO: 278505 - RNA, 19 nt, Artificial Sequence
  Description of Artificial Sequence: Synthetic oligonucleotide
  Antisense strand to SEQ ID NO: 278504
uucuuucaccagaacuacc

SEQ ID NO: 278506 - RNA, 19 nt, Artificial Sequence
  Description of Artificial Sequence: Synthetic oligonucleotide
  Sense strand starting at position 615 of SEQ ID NO: 3578
ggagcaaagucagaauuug

SEQ ID NO: 278507 - RNA, 19 nt, Artificial Sequence
  Description of Artificial Sequence: Synthetic oligonucleotide
  Antisense strand to SEQ ID NO: 278506
caaauucugacuuugcucc

SEQ ID NO: 278508 - RNA, 19 nt, Artificial Sequence
  Description of Artificial Sequence: Synthetic oligonucleotide
  Sense strand starting at position 777 of SEQ ID NO: 3578
gaguccacaaguugugaga

SEQ ID NO: 278509 - RNA, 19 nt, Artificial Sequence
  Description of Artificial Sequence: Synthetic oligonucleotide
  Antisense strand to SEQ ID NO: 278508
ucucacaacuuguggacuc

SEQ ID NO: 278510 - RNA, 19 nt, Artificial Sequence
  Description of Artificial Sequence: Synthetic oligonucleotide
  Sense strand starting at position 856 of SEQ ID NO: 3578
gaggcaacaucgccuugaa

SEQ ID NO: 278511 - RNA, 19 nt, Artificial Sequence
  Description of Artificial Sequence: Synthetic oligonucleotide
  Antisense strand to SEQ ID NO: 278510
uucaaggcgauguugccuc

SEQ ID NO: 278512 - RNA, 19 nt, Artificial Sequence
  Description of Artificial Sequence: Synthetic oligonucleotide
  Sense strand starting at position 944 of SEQ ID NO: 3578
gucagcugugccugagaaa

SEQ ID NO: 278513 - RNA, 19 nt, Artificial Sequence
  Description of Artificial Sequence: Synthetic oligonucleotide
  Antisense strand to SEQ ID NO: 278512
uuucucaggcacagcugac

SEQ ID NO: 278514 - RNA, 19 nt, Artificial Sequence
  Description of Artificial Sequence: Synthetic oligonucleotide
  Sense strand starting at position 945 of SEQ ID NO: 3578
ucagcugugccugagaaau

SEQ ID NO: 278515 - RNA, 19 nt, Artificial Sequence
  Description of Artificial Sequence: Synthetic oligonucleotide
  Antisense strand to SEQ ID NO: 278514
auuucucaggcacagcuga

SEQ ID NO: 278516 - RNA, 19 nt, Artificial Sequence
  Description of Artificial Sequence: Synthetic oligonucleotide
  Sense strand starting at position 1067 of SEQ ID NO: 3578
gguguucaggcaugagcau

SEQ ID NO: 278517 - RNA, 19 nt, Artificial Sequence
  Description of Artificial Sequence: Synthetic oligonucleotide
  Antisense strand to SEQ ID NO: 278516
augcucaugccugaacacc

SEQ ID NO: 278518 - RNA, 19 nt, Artificial Sequence
  Description of Artificial Sequence: Synthetic oligonucleotide
  Sense strand starting at position 1073 of SEQ ID NO: 3578
caggcaugagcaugaaucu

SEQ ID NO: 278519 - RNA, 19 nt, Artificial Sequence
  Description of Artificial Sequence: Synthetic oligonucleotide
  Antisense strand to SEQ ID NO: 278518
agauucaugcucaugccug

SEQ ID NO: 278520 - RNA, 19 nt, Artificial Sequence
  Description of Artificial Sequence: Synthetic oligonucleotide
  Sense strand starting at position 1074 of SEQ ID NO: 3578
aggcaugagcaugaaucua

SEQ ID NO: 278521 - RNA, 19 nt, Artificial Sequence
  Description of Artificial Sequence: Synthetic oligonucleotide
  Antisense strand to SEQ ID NO: 278520
uagauucaugcucaugccu

SEQ ID NO: 278522 - RNA, 19 nt, Artificial Sequence
  Description of Artificial Sequence: Synthetic oligonucleotide
  Sense strand starting at position 1251 of SEQ ID NO: 3578
ccaagacauugggagaauu

SEQ ID NO: 278523 - RNA, 19 nt, Artificial Sequence
  Description of Artificial Sequence: Synthetic oligonucleotide
  Antisense strand to SEQ ID NO: 278522
aauucucccaaugucuugg

SEQ ID NO: 278524 - RNA, 19 nt, Artificial Sequence
  Description of Artificial Sequence: Synthetic oligonucleotide
  Sense strand starting at position 1259 of SEQ ID NO: 3578
uugggagaauugguccauu

SEQ ID NO: 278525 - RNA, 19 nt, Artificial Sequence
  Description of Artificial Sequence: Synthetic oligonucleotide
  Antisense strand to SEQ ID NO: 278524
aauggaccaauucucccaa

SEQ ID NO: 278526 - RNA, 19 nt, Artificial Sequence
  Description of Artificial Sequence: Synthetic oligonucleotide
  Sense strand starting at position 1332 of SEQ ID NO: 3578
ccaugucaccuuugggauc

SEQ ID NO: 278527 - RNA, 19 nt, Artificial Sequence
  Description of Artificial Sequence: Synthetic oligonucleotide
  Antisense strand to SEQ ID NO: 278526
gaucccaaaggugacaugg

SEQ ID NO: 278528 - RNA, 19 nt, Artificial Sequence
  Description of Artificial Sequence: Synthetic oligonucleotide
  Sense strand starting at position 1497 of SEQ ID NO: 3578
cgcucuuaccaaugagaac

SEQ ID NO: 278529 - RNA, 19 nt, Artificial Sequence
  Description of Artificial Sequence: Synthetic oligonucleotide
  Antisense strand to SEQ ID NO: 278528
guucucauugguaagagcg

SEQ ID NO: 278530 - RNA, 19 nt, Artificial Sequence
  Description of Artificial Sequence: Synthetic oligonucleotide
  Sense strand starting at position 1647 of SEQ ID NO: 3578
cugucugagcccugaguuu

SEQ ID NO: 278531 - RNA, 19 nt, Artificial Sequence
  Description of Artificial Sequence: Synthetic oligonucleotide
  Antisense strand to SEQ ID NO: 278530
aaacucagggcucagacag

SEQ ID NO: 278532 - RNA, 19 nt, Artificial Sequence
  Description of Artificial Sequence: Synthetic oligonucleotide
  Sense strand starting at position 1799 of SEQ ID NO: 3578
gcugauguccucuagcuca

SEQ ID NO: 278533 - RNA, 19 nt, Artificial Sequence
  Description of Artificial Sequence: Synthetic oligonucleotide
  Antisense strand to SEQ ID NO: 278532
ugagcuagaggacaucagc

SEQ ID NO: 278534 - RNA, 19 nt, Artificial Sequence
  Description of Artificial Sequence: Synthetic oligonucleotide
  Sense strand starting at position 1981 of SEQ ID NO: 3578
gcagcaugugccuauguca

SEQ ID NO: 278535 - RNA, 19 nt, Artificial Sequence
  Description of Artificial Sequence: Synthetic oligonucleotide
  Antisense strand to SEQ ID NO: 278534
ugacauaggcacaugcugc

SEQ ID NO: 278536 - RNA, 19 nt, Artificial Sequence
  Description of Artificial Sequence: Synthetic oligonucleotide
  Sense strand starting at position 1984 of SEQ ID NO: 3578
gcaugugccuaugucacaa

SEQ ID NO: 278537 - RNA, 19 nt, Artificial Sequence
  Description of Artificial Sequence: Synthetic oligonucleotide
  Antisense strand to SEQ ID NO: 278536
uugugacauaggcacaugc

SEQ ID NO: 278538 - RNA, 19 nt, Artificial Sequence
  Description of Artificial Sequence: Synthetic oligonucleotide
  Sense strand starting at position 2079 of SEQ ID NO: 3578
ccuugauaacgcugugaag

SEQ ID NO: 278539 - RNA, 19 nt, Artificial Sequence
  Description of Artificial Sequence: Synthetic oligonucleotide
  Antisense strand to SEQ ID NO: 278538
cuucacagcguuaucaagg

SEQ ID NO: 278540 - RNA, 19 nt, Artificial Sequence
  Description of Artificial Sequence: Synthetic oligonucleotide
  Sense strand starting at position 2081 of SEQ ID NO: 3578
uugauaacgcugugaagca

SEQ ID NO: 278541 - RNA, 19 nt, Artificial Sequence
  Description of Artificial Sequence: Synthetic oligonucleotide
  Antisense strand to SEQ ID NO: 278540
ugcuucacagcguuaucaa

SEQ ID NO: 278542 - RNA, 19 nt, Artificial Sequence
  Description of Artificial Sequence: Synthetic oligonucleotide
  Sense strand starting at position 2090 of SEQ ID NO: 3578
cugugaagcaggcagaauu

SEQ ID NO: 278543 - RNA, 19 nt, Artificial Sequence
  Description of Artificial Sequence: Synthetic oligonucleotide
  Antisense strand to SEQ ID NO: 278542
aauucugccugcuucacag

SEQ ID NO: 278544 - RNA, 19 nt, Artificial Sequence
  Description of Artificial Sequence: Synthetic oligonucleotide
  Sense strand starting at position 2264 of SEQ ID NO: 3578
ggauauaccuauuauaugu

SEQ ID NO: 278545 - RNA, 19 nt, Artificial Sequence
  Description of Artificial Sequence: Synthetic oligonucleotide
  Antisense strand to SEQ ID NO: 278544
acauauaauagguauaucc

SEQ ID NO: 278546 - RNA, 19 nt, Artificial Sequence
  Description of Artificial Sequence: Synthetic oligonucleotide
  Sense strand starting at position 2496 of SEQ ID NO: 3578
agucuacucuguuucuaua

SEQ ID NO: 278547 - RNA, 19 nt, Artificial Sequence
  Description of Artificial Sequence: Synthetic oligonucleotide
  Antisense strand to SEQ ID NO: 278546
uauagaaacagaguagacu

SEQ ID NO: 278548 - RNA, 19 nt, Artificial Sequence
  Description of Artificial Sequence: Synthetic oligonucleotide
  Sense strand starting at position 2507 of SEQ ID NO: 3578
uuucuauagguuugcauau

SEQ ID NO: 278549 - RNA, 19 nt, Artificial Sequence
  Description of Artificial Sequence: Synthetic oligonucleotide
  Antisense strand to SEQ ID NO: 278548
auaugcaaaccuauagaaa

SEQ ID NO: 278550 - RNA, 19 nt, Artificial Sequence
  Description of Artificial Sequence: Synthetic oligonucleotide
  Sense strand starting at position 2508 of SEQ ID NO: 3578
uucuauagguuugcauauu

SEQ ID NO: 278551 - RNA, 19 nt, Artificial Sequence
  Description of Artificial Sequence: Synthetic oligonucleotide
  Antisense strand to SEQ ID NO: 278550
aauaugcaaaccuauagaa

SEQ ID NO: 278552 - RNA, 19 nt, Artificial Sequence
  Description of Artificial Sequence: Synthetic oligonucleotide
  Sense strand starting at position 2621 of SEQ ID NO: 3578
gcaugugucaucgcuuuau

SEQ ID NO: 278553 - RNA, 19 nt, Artificial Sequence
  Description of Artificial Sequence: Synthetic oligonucleotide
  Antisense strand to SEQ ID NO: 278552
auaaagcgaugacacaugc

SEQ ID NO: 278554 - RNA, 19 nt, Artificial Sequence
  Description of Artificial Sequence: Synthetic oligonucleotide
  Sense strand starting at position 2625 of SEQ ID NO: 3578
gugucaucgcuuuauuccu

SEQ ID NO: 278555 - RNA, 19 nt, Artificial Sequence
  Description of Artificial Sequence: Synthetic oligonucleotide
  Antisense strand to SEQ ID NO: 278554
aggaauaaagcgaugacac

SEQ ID NO: 278556 - RNA, 19 nt, Artificial Sequence
  Description of Artificial Sequence: Synthetic oligonucleotide
  Sense strand starting at position 2654 of SEQ ID NO: 3578
agauaauauuccuuugugu

SEQ ID NO: 278557 - RNA, 19 nt, Artificial Sequence
  Description of Artificial Sequence: Synthetic oligonucleotide
  Antisense strand to SEQ ID NO: 278556
acacaaaggaauauuaucu

SEQ ID NO: 278558 - RNA, 19 nt, Artificial Sequence
  Description of Artificial Sequence: Synthetic oligonucleotide
  Sense strand starting at position 3053 of SEQ ID NO: 3578
ugaauagugcuaugaacau

SEQ ID NO: 278559 - RNA, 19 nt, Artificial Sequence
  Description of Artificial Sequence: Synthetic oligonucleotide
  Antisense strand to SEQ ID NO: 278558
auguucauagcacuauuca

SEQ ID NO: 278560 - RNA, 19 nt, Artificial Sequence
  Description of Artificial Sequence: Synthetic oligonucleotide
  Sense strand starting at position 3127 of SEQ ID NO: 3578
gcagacuugcuggguuaca

SEQ ID NO: 278561 - RNA, 19 nt, Artificial Sequence
  Description of Artificial Sequence: Synthetic oligonucleotide
  Antisense strand to SEQ ID NO: 278560
uguaacccagcaagucugc

SEQ ID NO: 278562 - RNA, 19 nt, Artificial Sequence
  Description of Artificial Sequence: Synthetic oligonucleotide
  Sense strand starting at position 3137 of SEQ ID NO: 3578
uggguuacacggugaaucu

SEQ ID NO: 278563 - RNA, 19 nt, Artificial Sequence
  Description of Artificial Sequence: Synthetic oligonucleotide
  Antisense strand to SEQ ID NO: 278562
agauucaccguguaaccca

SEQ ID NO: 278564 - RNA, 19 nt, Artificial Sequence
  Description of Artificial Sequence: Synthetic oligonucleotide
  Sense strand starting at position 3138 of SEQ ID NO: 3578
ggguuacacggugaaucua

SEQ ID NO: 278565 - RNA, 19 nt, Artificial Sequence
  Description of Artificial Sequence: Synthetic oligonucleotide
  Antisense strand to SEQ ID NO: 278564
uagauucaccguguaaccc

SEQ ID NO: 278566 - RNA, 19 nt, Artificial Sequence
  Description of Artificial Sequence: Synthetic oligonucleotide
  Sense strand starting at position 3191 of SEQ ID NO: 3578
ccaaguuggcuguaccaau

SEQ ID NO: 278567 - RNA, 19 nt, Artificial Sequence
  Description of Artificial Sequence: Synthetic oligonucleotide
  Antisense strand to SEQ ID NO: 278566
auugguacagccaacuugg

SEQ ID NO: 278568 - RNA, 19 nt, Artificial Sequence
  Description of Artificial Sequence: Synthetic oligonucleotide
  Sense strand starting at position 3216 of SEQ ID NO: 3578
ucccaucagcgagguauaa

SEQ ID NO: 278569 - RNA, 19 nt, Artificial Sequence
  Description of Artificial Sequence: Synthetic oligonucleotide
  Antisense strand to SEQ ID NO: 278568
uuauaccucgcugauggga

SEQ ID NO: 278570 - RNA, 19 nt, Artificial Sequence
  Description of Artificial Sequence: Synthetic oligonucleotide
  Sense strand starting at position 3235 of SEQ ID NO: 3578
ggguuccaauguuucuuua

SEQ ID NO: 278571 - RNA, 19 nt, Artificial Sequence
  Description of Artificial Sequence: Synthetic oligonucleotide
  Antisense strand to SEQ ID NO: 278570
uaaagaaacauuggaaccc

SEQ ID NO: 278572 - RNA, 19 nt, Artificial Sequence
  Description of Artificial Sequence: Synthetic oligonucleotide
  Sense strand starting at position 3237 of SEQ ID NO: 3578
guuccaauguuucuuuauc

SEQ ID NO: 278573 - RNA, 19 nt, Artificial Sequence
  Description of Artificial Sequence: Synthetic oligonucleotide
  Antisense strand to SEQ ID NO: 278572
gauaaagaaacauuggaac

SEQ ID NO: 278574 - RNA, 19 nt, Artificial Sequence
  Description of Artificial Sequence: Synthetic oligonucleotide
  Sense strand starting at position 3296 of SEQ ID NO: 3578
aacccuagugggugugaaa

SEQ ID NO: 278575 - RNA, 19 nt, Artificial Sequence
  Description of Artificial Sequence: Synthetic oligonucleotide
  Antisense strand to SEQ ID NO: 278574
uuucacacccacuaggguu

SEQ ID NO: 278576 - RNA, 19 nt, Artificial Sequence
  Description of Artificial Sequence: Synthetic oligonucleotide
  Sense strand starting at position 3308 of SEQ ID NO: 3578
ugugaaaugguaugauauu

SEQ ID NO: 278577 - RNA, 19 nt, Artificial Sequence
  Description of Artificial Sequence: Synthetic oligonucleotide
  Antisense strand to SEQ ID NO: 278576
aauaucauaccauuucaca

SEQ ID NO: 278578 - RNA, 19 nt, Artificial Sequence
  Description of Artificial Sequence: Synthetic oligonucleotide
  Sense strand starting at position 3309 of SEQ ID NO: 3578
gugaaaugguaugauauug

SEQ ID NO: 278579 - RNA, 19 nt, Artificial Sequence
  Description of Artificial Sequence: Synthetic oligonucleotide
  Antisense strand to SEQ ID NO: 278578
caauaucauaccauuucac

SEQ ID NO: 278580 - RNA, 19 nt, Artificial Sequence
  Description of Artificial Sequence: Synthetic oligonucleotide
  Sense strand starting at position 3376 of SEQ ID NO: 3578
ucaugugcuaagggauauu

SEQ ID NO: 278581 - RNA, 19 nt, Artificial Sequence
  Description of Artificial Sequence: Synthetic oligonucleotide
  Antisense strand to SEQ ID NO: 278580
aauaucccuuagcacauga

SEQ ID NO: 278582 - RNA, 19 nt, Artificial Sequence
  Description of Artificial Sequence: Synthetic oligonucleotide
  Sense strand starting at position 656 of SEQ ID NO: 3579
gaaacagaccuuugagucu

SEQ ID NO: 278583 - RNA, 19 nt, Artificial Sequence
  Description of Artificial Sequence: Synthetic oligonucleotide
  Antisense strand to SEQ ID NO: 278582
agacucaaaggucuguuuc

SEQ ID NO: 278584 - RNA, 19 nt, Artificial Sequence
  Description of Artificial Sequence: Synthetic oligonucleotide
  Sense strand starting at position 868 of SEQ ID NO: 3579
uccuuuccacucggagaga

SEQ ID NO: 278585 - RNA, 19 nt, Artificial Sequence
  Description of Artificial Sequence: Synthetic oligonucleotide
  Antisense strand to SEQ ID NO: 278584
ucucuccgaguggaaagga

SEQ ID NO: 278586 - RNA, 19 nt, Artificial Sequence
  Description of Artificial Sequence: Synthetic oligonucleotide
  Sense strand starting at position 1359 of SEQ ID NO: 3579
ggaucuuugaaaggugcuu

SEQ ID NO: 278587 - RNA, 19 nt, Artificial Sequence
  Description of Artificial Sequence: Synthetic oligonucleotide
  Antisense strand to SEQ ID NO: 278586
aagcaccuuucaaagaucc

SEQ ID NO: 278588 - RNA, 19 nt, Artificial Sequence
  Description of Artificial Sequence: Synthetic oligonucleotide
  Sense strand starting at position 1444 of SEQ ID NO: 3579
gacugaaaguagcuguguu

SEQ ID NO: 278589 - RNA, 19 nt, Artificial Sequence
  Description of Artificial Sequence: Synthetic oligonucleotide
  Antisense strand to SEQ ID NO: 278588
aacacagcuacuuucaguc

SEQ ID NO: 278590 - RNA, 19 nt, Artificial Sequence
  Description of Artificial Sequence: Synthetic oligonucleotide
  Sense strand starting at position 1445 of SEQ ID NO: 3579
acugaaaguagcuguguuu

SEQ ID NO: 278591 - RNA, 19 nt, Artificial Sequence
  Description of Artificial Sequence: Synthetic oligonucleotide
  Antisense strand to SEQ ID NO: 278590
aaacacagcuacuuucagu

SEQ ID NO: 278592 - RNA, 19 nt, Artificial Sequence
  Description of Artificial Sequence: Synthetic oligonucleotide
  Sense strand starting at position 1448 of SEQ ID NO: 3579
gaaaguagcuguguuugag

SEQ ID NO: 278593 - RNA, 19 nt, Artificial Sequence
  Description of Artificial Sequence: Synthetic oligonucleotide
  Antisense strand to SEQ ID NO: 278592
cucaaacacagcuacuuuc

SEQ ID NO: 278594 - RNA, 19 nt, Artificial Sequence
  Description of Artificial Sequence: Synthetic oligonucleotide
  Sense strand starting at position 1655 of SEQ ID NO: 3579
agccaaagguccuuaugag

SEQ ID NO: 278595 - RNA, 19 nt, Artificial Sequence
  Description of Artificial Sequence: Synthetic oligonucleotide
  Antisense strand to SEQ ID NO: 278594
cucauaaggaccuuuggcu

SEQ ID NO: 278596 - RNA, 19 nt, Artificial Sequence
  Description of Artificial Sequence: Synthetic oligonucleotide
  Sense strand starting at position 1656 of SEQ ID NO: 3579
gccaaagguccuuaugagu

SEQ ID NO: 278597 - RNA, 19 nt, Artificial Sequence
  Description of Artificial Sequence: Synthetic oligonucleotide
  Antisense strand to SEQ ID NO: 278596
acucauaaggaccuuuggc

SEQ ID NO: 278598 - RNA, 19 nt, Artificial Sequence
  Description of Artificial Sequence: Synthetic oligonucleotide
  Sense strand starting at position 2090 of SEQ ID NO: 3579
gcugcagggucuuuauaga

SEQ ID NO: 278599 - RNA, 19 nt, Artificial Sequence
  Description of Artificial Sequence: Synthetic oligonucleotide
  Antisense strand to SEQ ID NO: 278598
ucuauaaagacccugcagc

SEQ ID NO: 278600 - RNA, 19 nt, Artificial Sequence
  Description of Artificial Sequence: Synthetic oligonucleotide
  Sense strand starting at position 2504 of SEQ ID NO: 3579
ccuaauugcuuggcagagu

SEQ ID NO: 278601 - RNA, 19 nt, Artificial Sequence
  Description of Artificial Sequence: Synthetic oligonucleotide
  Antisense strand to SEQ ID NO: 278600
acucugccaagcaauuagg

SEQ ID NO: 278602 - RNA, 19 nt, Artificial Sequence
  Description of Artificial Sequence: Synthetic oligonucleotide
  Sense strand starting at position 2533 of SEQ ID NO: 3579
uguggccauuucuaaagau

SEQ ID NO: 278603 - RNA, 19 nt, Artificial Sequence
  Description of Artificial Sequence: Synthetic oligonucleotide
  Antisense strand to SEQ ID NO: 278602
aucuuuagaaauggccaca

SEQ ID NO: 278604 - RNA, 19 nt, Artificial Sequence
  Description of Artificial Sequence: Synthetic oligonucleotide
  Sense strand starting at position 2562 of SEQ ID NO: 3579
gccuaauuagcgccguaau

SEQ ID NO: 278605 - RNA, 19 nt, Artificial Sequence
  Description of Artificial Sequence: Synthetic oligonucleotide
  Antisense strand to SEQ ID NO: 278604
auuacggcgcuaauuaggc

SEQ ID NO: 278606 - RNA, 19 nt, Artificial Sequence
  Description of Artificial Sequence: Synthetic oligonucleotide
  Sense strand starting at position 2563 of SEQ ID NO: 3579
ccuaauuagcgccguaauu

SEQ ID NO: 278607 - RNA, 19 nt, Artificial Sequence
  Description of Artificial Sequence: Synthetic oligonucleotide
  Antisense strand to SEQ ID NO: 278606
aauuacggcgcuaauuagg

SEQ ID NO: 278608 - RNA, 19 nt, Artificial Sequence
  Description of Artificial Sequence: Synthetic oligonucleotide
  Sense strand starting at position 2760 of SEQ ID NO: 3579
ggcauuguucugugacccu

SEQ ID NO: 278609 - RNA, 19 nt, Artificial Sequence
  Description of Artificial Sequence: Synthetic oligonucleotide
  Antisense strand to SEQ ID NO: 278608
agggucacagaacaaugcc

SEQ ID NO: 278610 - RNA, 19 nt, Artificial Sequence
  Description of Artificial Sequence: Synthetic oligonucleotide
  Sense strand starting at position 2763 of SEQ ID NO: 3579
auuguucugugacccugau

SEQ ID NO: 278611 - RNA, 19 nt, Artificial Sequence
  Description of Artificial Sequence: Synthetic oligonucleotide
  Antisense strand to SEQ ID NO: 278610
aucagggucacagaacaau

SEQ ID NO: 278612 - RNA, 19 nt, Artificial Sequence
  Description of Artificial Sequence: Synthetic oligonucleotide
  Sense strand starting at position 2777 of SEQ ID NO: 3579
cugaucuggcagugggauu

SEQ ID NO: 278613 - RNA, 19 nt, Artificial Sequence
  Description of Artificial Sequence: Synthetic oligonucleotide
  Antisense strand to SEQ ID NO: 278612
aaucccacugccagaucag

SEQ ID NO: 278614 - RNA, 19 nt, Artificial Sequence
  Description of Artificial Sequence: Synthetic oligonucleotide
  Sense strand starting at position 2911 of SEQ ID NO: 3579
aggugaacuggugggaaua

SEQ ID NO: 278615 - RNA, 19 nt, Artificial Sequence
  Description of Artificial Sequence: Synthetic oligonucleotide
  Antisense strand to SEQ ID NO: 278614
uauucccaccaguucaccu

SEQ ID NO: 278616 - RNA, 19 nt, Artificial Sequence
  Description of Artificial Sequence: Synthetic oligonucleotide
  Sense strand starting at position 2912 of SEQ ID NO: 3579
ggugaacuggugggaauau

SEQ ID NO: 278617 - RNA, 19 nt, Artificial Sequence
  Description of Artificial Sequence: Synthetic oligonucleotide
  Antisense strand to SEQ ID NO: 278616
auauucccaccaguucacc

SEQ ID NO: 278618 - RNA, 19 nt, Artificial Sequence
  Description of Artificial Sequence: Synthetic oligonucleotide
  Sense strand starting at position 2913 of SEQ ID NO: 3579
gugaacuggugggaauauu

SEQ ID NO: 278619 - RNA, 19 nt, Artificial Sequence
  Description of Artificial Sequence: Synthetic oligonucleotide
  Antisense strand to SEQ ID NO: 278618
aauauucccaccaguucac

SEQ ID NO: 278620 - RNA, 19 nt, Artificial Sequence
  Description of Artificial Sequence: Synthetic oligonucleotide
  Sense strand starting at position 2923 of SEQ ID NO: 3579
gggaauauuuaucagcaaa

SEQ ID NO: 278621 - RNA, 19 nt, Artificial Sequence
  Description of Artificial Sequence: Synthetic oligonucleotide
  Antisense strand to SEQ ID NO: 278620
uuugcugauaaauauuccc

SEQ ID NO: 278622 - RNA, 19 nt, Artificial Sequence
  Description of Artificial Sequence: Synthetic oligonucleotide
  Sense strand starting at position 3033 of SEQ ID NO: 3579
cgcaccucgccaugacaau

SEQ ID NO: 278623 - RNA, 19 nt, Artificial Sequence
  Description of Artificial Sequence: Synthetic oligonucleotide
  Antisense strand to SEQ ID NO: 278622
auugucauggcgaggugcg

SEQ ID NO: 278624 - RNA, 19 nt, Artificial Sequence
  Description of Artificial Sequence: Synthetic oligonucleotide
  Sense strand starting at position 3034 of SEQ ID NO: 3579
gcaccucgccaugacaaua

SEQ ID NO: 278625 - RNA, 19 nt, Artificial Sequence
  Description of Artificial Sequence: Synthetic oligonucleotide
  Antisense strand to SEQ ID NO: 278624
uauugucauggcgaggugc

SEQ ID NO: 278626 - RNA, 19 nt, Artificial Sequence
  Description of Artificial Sequence: Synthetic oligonucleotide
  Sense strand starting at position 3089 of SEQ ID NO: 3579
ggaugauucuggugaguga

SEQ ID NO: 278627 - RNA, 19 nt, Artificial Sequence
  Description of Artificial Sequence: Synthetic oligonucleotide
  Antisense strand to SEQ ID NO: 278626
ucacucaccagaaucaucc

SEQ ID NO: 278628 - RNA, 19 nt, Artificial Sequence
  Description of Artificial Sequence: Synthetic oligonucleotide
  Sense strand starting at position 3092 of SEQ ID NO: 3579
ugauucuggugagugaauu

SEQ ID NO: 278629 - RNA, 19 nt, Artificial Sequence
  Description of Artificial Sequence: Synthetic oligonucleotide
  Antisense strand to SEQ ID NO: 278628
aauucacucaccagaauca

SEQ ID NO: 278630 - RNA, 19 nt, Artificial Sequence
  Description of Artificial Sequence: Synthetic oligonucleotide
  Sense strand starting at position 3102 of SEQ ID NO: 3579
gagugaauuuggugaaguu

SEQ ID NO: 278631 - RNA, 19 nt, Artificial Sequence
  Description of Artificial Sequence: Synthetic oligonucleotide
  Antisense strand to SEQ ID NO: 278630
aacuucaccaaauucacuc

SEQ ID NO: 278632 - RNA, 19 nt, Artificial Sequence
  Description of Artificial Sequence: Synthetic oligonucleotide
  Sense strand starting at position 3181 of SEQ ID NO: 3579
ccuccacaaucuugguaga

SEQ ID NO: 278633 - RNA, 19 nt, Artificial Sequence
  Description of Artificial Sequence: Synthetic oligonucleotide
  Antisense strand to SEQ ID NO: 278632
ucuaccaagauuguggagg

SEQ ID NO: 278634 - RNA, 19 nt, Artificial Sequence
  Description of Artificial Sequence: Synthetic oligonucleotide
  Sense strand starting at position 3182 of SEQ ID NO: 3579
cuccacaaucuugguagau

SEQ ID NO: 278635 - RNA, 19 nt, Artificial Sequence
  Description of Artificial Sequence: Synthetic oligonucleotide
  Antisense strand to SEQ ID NO: 278634
aucuaccaagauuguggag

SEQ ID NO: 278636 - RNA, 19 nt, Artificial Sequence
  Description of Artificial Sequence: Synthetic oligonucleotide
  Sense strand starting at position 3183 of SEQ ID NO: 3579
uccacaaucuugguagaua

SEQ ID NO: 278637 - RNA, 19 nt, Artificial Sequence
  Description of Artificial Sequence: Synthetic oligonucleotide
  Antisense strand to SEQ ID NO: 278636
uaucuaccaagauugugga

SEQ ID NO: 278638 - RNA, 19 nt, Artificial Sequence
  Description of Artificial Sequence: Synthetic oligonucleotide
  Sense strand starting at position 3184 of SEQ ID NO: 3579
ccacaaucuugguagauaa

SEQ ID NO: 278639 - RNA, 19 nt, Artificial Sequence
  Description of Artificial Sequence: Synthetic oligonucleotide
  Antisense strand to SEQ ID NO: 278638
uuaucuaccaagauugugg

SEQ ID NO: 278640 - RNA, 19 nt, Artificial Sequence
  Description of Artificial Sequence: Synthetic oligonucleotide
  Sense strand starting at position 3334 of SEQ ID NO: 3579
acaggccucugugaggauu

SEQ ID NO: 278641 - RNA, 19 nt, Artificial Sequence
  Description of Artificial Sequence: Synthetic oligonucleotide
  Antisense strand to SEQ ID NO: 278640
aauccucacagaggccugu

SEQ ID NO: 278642 - RNA, 19 nt, Artificial Sequence
  Description of Artificial Sequence: Synthetic oligonucleotide
  Sense strand starting at position 3337 of SEQ ID NO: 3579
ggccucugugaggauucga

SEQ ID NO: 278643 - RNA, 19 nt, Artificial Sequence
  Description of Artificial Sequence: Synthetic oligonucleotide
  Antisense strand to SEQ ID NO: 278642
ucgaauccucacagaggcc

SEQ ID NO: 278644 - RNA, 19 nt, Artificial Sequence
  Description of Artificial Sequence: Synthetic oligonucleotide
  Sense strand starting at position 3346 of SEQ ID NO: 3579
gaggauucgacagagcuuc

SEQ ID NO: 278645 - RNA, 19 nt, Artificial Sequence
  Description of Artificial Sequence: Synthetic oligonucleotide
  Antisense strand to SEQ ID NO: 278644
gaagcucugucgaauccuc

SEQ ID NO: 278646 - RNA, 19 nt, Artificial Sequence
  Description of Artificial Sequence: Synthetic oligonucleotide
  Sense strand starting at position 3613 of SEQ ID NO: 3579
ggaacuuucugcguggacu

SEQ ID NO: 278647 - RNA, 19 nt, Artificial Sequence
  Description of Artificial Sequence: Synthetic oligonucleotide
  Antisense strand to SEQ ID NO: 278646
aguccacgcagaaaguucc

SEQ ID NO: 278648 - RNA, 19 nt, Artificial Sequence
  Description of Artificial Sequence: Synthetic oligonucleotide
  Sense strand starting at position 3648 of SEQ ID NO: 3579
ccauucuccuguucucuga

SEQ ID NO: 278649 - RNA, 19 nt, Artificial Sequence
  Description of Artificial Sequence: Synthetic oligonucleotide
  Antisense strand to SEQ ID NO: 278648
ucagagaacaggagaaugg

SEQ ID NO: 278650 - RNA, 19 nt, Artificial Sequence
  Description of Artificial Sequence: Synthetic oligonucleotide
  Sense strand starting at position 3815 of SEQ ID NO: 3579
uuguuuaagcgugcacuca

SEQ ID NO: 278651 - RNA, 19 nt, Artificial Sequence
  Description of Artificial Sequence: Synthetic oligonucleotide
  Antisense strand to SEQ ID NO: 278650
ugagugcacgcuuaaacaa

SEQ ID NO: 278652 - RNA, 19 nt, Artificial Sequence
  Description of Artificial Sequence: Synthetic oligonucleotide
  Sense strand starting at position 3840 of SEQ ID NO: 3579
gucugcuuccuccauugga

SEQ ID NO: 278653 - RNA, 19 nt, Artificial Sequence
  Description of Artificial Sequence: Synthetic oligonucleotide
  Antisense strand to SEQ ID NO: 278652
uccaauggaggaagcagac

SEQ ID NO: 278654 - RNA, 19 nt, Artificial Sequence
  Description of Artificial Sequence: Synthetic oligonucleotide
  Sense strand starting at position 3848 of SEQ ID NO: 3579
ccuccauuggaaugugaug

SEQ ID NO: 278655 - RNA, 19 nt, Artificial Sequence
  Description of Artificial Sequence: Synthetic oligonucleotide
  Antisense strand to SEQ ID NO: 278654
caucacauuccaauggagg

SEQ ID NO: 278656 - RNA, 19 nt, Artificial Sequence
  Description of Artificial Sequence: Synthetic oligonucleotide
  Sense strand starting at position 3892 of SEQ ID NO: 3579
gcagucucauucucuguaa

SEQ ID NO: 278657 - RNA, 19 nt, Artificial Sequence
  Description of Artificial Sequence: Synthetic oligonucleotide
  Antisense strand to SEQ ID NO: 278656
uuacagagaaugagacugc

SEQ ID NO: 278658 - RNA, 19 nt, Artificial Sequence
  Description of Artificial Sequence: Synthetic oligonucleotide
  Sense strand starting at position 3894 of SEQ ID NO: 3579
agucucauucucuguaaca

SEQ ID NO: 278659 - RNA, 19 nt, Artificial Sequence
  Description of Artificial Sequence: Synthetic oligonucleotide
  Antisense strand to SEQ ID NO: 278658
uguuacagagaaugagacu

SEQ ID NO: 278660 - RNA, 19 nt, Artificial Sequence
  Description of Artificial Sequence: Synthetic oligonucleotide
  Sense strand starting at position 3895 of SEQ ID NO: 3579
gucucauucucuguaacac

SEQ ID NO: 278661 - RNA, 19 nt, Artificial Sequence
  Description of Artificial Sequence: Synthetic oligonucleotide
  Antisense strand to SEQ ID NO: 278660
guguuacagagaaugagac

SEQ ID NO: 278662 - RNA, 19 nt, Artificial Sequence
  Description of Artificial Sequence: Synthetic oligonucleotide
  Sense strand starting at position 129 of SEQ ID NO: 3580
ccguguccugcucaguuua

SEQ ID NO: 278663 - RNA, 19 nt, Artificial Sequence
  Description of Artificial Sequence: Synthetic oligonucleotide
  Antisense strand to SEQ ID NO: 278662
uaaacugagcaggacacgg

SEQ ID NO: 278664 - RNA, 19 nt, Artificial Sequence
  Description of Artificial Sequence: Synthetic oligonucleotide
  Sense strand starting at position 131 of SEQ ID NO: 3580
guguccugcucaguuuaau

SEQ ID NO: 278665 - RNA, 19 nt, Artificial Sequence
  Description of Artificial Sequence: Synthetic oligonucleotide
  Antisense strand to SEQ ID NO: 278664
auuaaacugagcaggacac

SEQ ID NO: 278666 - RNA, 19 nt, Artificial Sequence
  Description of Artificial Sequence: Synthetic oligonucleotide
  Sense strand starting at position 241 of SEQ ID NO: 3580
ggagucagcccugaaccuu

SEQ ID NO: 278667 - RNA, 19 nt, Artificial Sequence
  Description of Artificial Sequence: Synthetic oligonucleotide
  Antisense strand to SEQ ID NO: 278666
aagguucagggcugacucc

SEQ ID NO: 278668 - RNA, 19 nt, Artificial Sequence
  Description of Artificial Sequence: Synthetic oligonucleotide
  Sense strand starting at position 425 of SEQ ID NO: 3580
ccgagaagcugccgaauua

SEQ ID NO: 278669 - RNA, 19 nt, Artificial Sequence
  Description of Artificial Sequence: Synthetic oligonucleotide
  Antisense strand to SEQ ID NO: 278668
uaauucggcagcuucucgg

SEQ ID NO: 278670 - RNA, 19 nt, Artificial Sequence
  Description of Artificial Sequence: Synthetic oligonucleotide
  Sense strand starting at position 436 of SEQ ID NO: 3580
ccgaauuacagauguugcu

SEQ ID NO: 278671 - RNA, 19 nt, Artificial Sequence
  Description of Artificial Sequence: Synthetic oligonucleotide
  Antisense strand to SEQ ID NO: 278670
agcaacaucuguaauucgg

SEQ ID NO: 278672 - RNA, 19 nt, Artificial Sequence
  Description of Artificial Sequence: Synthetic oligonucleotide
  Sense strand starting at position 499 of SEQ ID NO: 3580
gacagaggccucugucuga

SEQ ID NO: 278673 - RNA, 19 nt, Artificial Sequence
  Description of Artificial Sequence: Synthetic oligonucleotide
  Antisense strand to SEQ ID NO: 278672
ucagacagaggccucuguc

SEQ ID NO: 278674 - RNA, 19 nt, Artificial Sequence
  Description of Artificial Sequence: Synthetic oligonucleotide
  Sense strand starting at position 529 of SEQ ID NO: 3580
gaagcaccgugagagaaau

SEQ ID NO: 278675 - RNA, 19 nt, Artificial Sequence
  Description of Artificial Sequence: Synthetic oligonucleotide
  Antisense strand to SEQ ID NO: 278674
auuucucucacggugcuuc

SEQ ID NO: 278676 - RNA, 19 nt, Artificial Sequence
  Description of Artificial Sequence: Synthetic oligonucleotide
  Sense strand starting at position 637 of SEQ ID NO: 3580
gagagaagacagugcuacu

SEQ ID NO: 278677 - RNA, 19 nt, Artificial Sequence
  Description of Artificial Sequence: Synthetic oligonucleotide
  Antisense strand to SEQ ID NO: 278676
aguagcacugucuucucuc

SEQ ID NO: 278678 - RNA, 19 nt, Artificial Sequence
  Description of Artificial Sequence: Synthetic oligonucleotide
  Sense strand starting at position 640 of SEQ ID NO: 3580
agaagacagugcuacugaa

SEQ ID NO: 278679 - RNA, 19 nt, Artificial Sequence
  Description of Artificial Sequence: Synthetic oligonucleotide
  Antisense strand to SEQ ID NO: 278678
uucaguagcacugucuucu

SEQ ID NO: 278680 - RNA, 19 nt, Artificial Sequence
  Description of Artificial Sequence: Synthetic oligonucleotide
  Sense strand starting at position 1095 of SEQ ID NO: 3580
ccugcauucuagcagagga

SEQ ID NO: 278681 - RNA, 19 nt, Artificial Sequence
  Description of Artificial Sequence: Synthetic oligonucleotide
  Antisense strand to SEQ ID NO: 278680
uccucugcuagaaugcagg

SEQ ID NO: 278682 - RNA, 19 nt, Artificial Sequence
  Description of Artificial Sequence: Synthetic oligonucleotide
  Sense strand starting at position 1097 of SEQ ID NO: 3580
ugcauucuagcagaggagu

SEQ ID NO: 278683 - RNA, 19 nt, Artificial Sequence
  Description of Artificial Sequence: Synthetic oligonucleotide
  Antisense strand to SEQ ID NO: 278682
acuccucugcuagaaugca

SEQ ID NO: 278684 - RNA, 19 nt, Artificial Sequence
  Description of Artificial Sequence: Synthetic oligonucleotide
  Sense strand starting at position 1222 of SEQ ID NO: 3580
ggccuuaguuuccuacaca

SEQ ID NO: 278685 - RNA, 19 nt, Artificial Sequence
  Description of Artificial Sequence: Synthetic oligonucleotide
  Antisense strand to SEQ ID NO: 278684
uguguaggaaacuaaggcc

SEQ ID NO: 278686 - RNA, 19 nt, Artificial Sequence
  Description of Artificial Sequence: Synthetic oligonucleotide
  Sense strand starting at position 1223 of SEQ ID NO: 3580
gccuuaguuuccuacacag

SEQ ID NO: 278687 - RNA, 19 nt, Artificial Sequence
  Description of Artificial Sequence: Synthetic oligonucleotide
  Antisense strand to SEQ ID NO: 278686
cuguguaggaaacuaaggc

SEQ ID NO: 278688 - RNA, 19 nt, Artificial Sequence
  Description of Artificial Sequence: Synthetic oligonucleotide
  Sense strand starting at position 1475 of SEQ ID NO: 3580
agagucuagggucgagaau

SEQ ID NO: 278689 - RNA, 19 nt, Artificial Sequence
  Description of Artificial Sequence: Synthetic oligonucleotide
  Antisense strand to SEQ ID NO: 278688
auucucgacccuagacucu

SEQ ID NO: 278690 - RNA, 19 nt, Artificial Sequence
  Description of Artificial Sequence: Synthetic oligonucleotide
  Sense strand starting at position 1484 of SEQ ID NO: 3580
ggucgagaaucacuuggga

SEQ ID NO: 278691 - RNA, 19 nt, Artificial Sequence
  Description of Artificial Sequence: Synthetic oligonucleotide
  Antisense strand to SEQ ID NO: 278690
ucccaagugauucucgacc

SEQ ID NO: 278692 - RNA, 19 nt, Artificial Sequence
  Description of Artificial Sequence: Synthetic oligonucleotide
  Sense strand starting at position 1488 of SEQ ID NO: 3580
gagaaucacuugggaccuu

SEQ ID NO: 278693 - RNA, 19 nt, Artificial Sequence
  Description of Artificial Sequence: Synthetic oligonucleotide
  Antisense strand to SEQ ID NO: 278692
aaggucccaagugauucuc

SEQ ID NO: 278694 - RNA, 19 nt, Artificial Sequence
  Description of Artificial Sequence: Synthetic oligonucleotide
  Sense strand starting at position 1556 of SEQ ID NO: 3580
cgcagugacacucacaaga

SEQ ID NO: 278695 - RNA, 19 nt, Artificial Sequence
  Description of Artificial Sequence: Synthetic oligonucleotide
  Antisense strand to SEQ ID NO: 278694
ucuugugagugucacugcg

SEQ ID NO: 278696 - RNA, 19 nt, Artificial Sequence
  Description of Artificial Sequence: Synthetic oligonucleotide
  Sense strand starting at position 1857 of SEQ ID NO: 3580
acaugugacucuccacauu

SEQ ID NO: 278697 - RNA, 19 nt, Artificial Sequence
  Description of Artificial Sequence: Synthetic oligonucleotide
  Antisense strand to SEQ ID NO: 278696
aauguggagagucacaugu

SEQ ID NO: 278698 - RNA, 19 nt, Artificial Sequence
  Description of Artificial Sequence: Synthetic oligonucleotide
  Sense strand starting at position 1995 of SEQ ID NO: 3580
cggcuugcccagugaaugu

SEQ ID NO: 278699 - RNA, 19 nt, Artificial Sequence
  Description of Artificial Sequence: Synthetic oligonucleotide
  Antisense strand to SEQ ID NO: 278698
acauucacugggcaagccg

SEQ ID NO: 278700 - RNA, 19 nt, Artificial Sequence
  Description of Artificial Sequence: Synthetic oligonucleotide
  Sense strand starting at position 2411 of SEQ ID NO: 3580
gcccuaaguugggcaauuu

SEQ ID NO: 278701 - RNA, 19 nt, Artificial Sequence
  Description of Artificial Sequence: Synthetic oligonucleotide
  Antisense strand to SEQ ID NO: 278700
aaauugcccaacuuagggc

SEQ ID NO: 278702 - RNA, 19 nt, Artificial Sequence
  Description of Artificial Sequence: Synthetic oligonucleotide
  Sense strand starting at position 2460 of SEQ ID NO: 3580
uugugugacuaugucucau

SEQ ID NO: 278703 - RNA, 19 nt, Artificial Sequence
  Description of Artificial Sequence: Synthetic oligonucleotide
  Antisense strand to SEQ ID NO: 278702
augagacauagucacacaa

SEQ ID NO: 278704 - RNA, 19 nt, Artificial Sequence
  Description of Artificial Sequence: Synthetic oligonucleotide
  Sense strand starting at position 2462 of SEQ ID NO: 3580
gugugacuaugucucaugu

SEQ ID NO: 278705 - RNA, 19 nt, Artificial Sequence
  Description of Artificial Sequence: Synthetic oligonucleotide
  Antisense strand to SEQ ID NO: 278704
acaugagacauagucacac

SEQ ID NO: 278706 - RNA, 19 nt, Artificial Sequence
  Description of Artificial Sequence: Synthetic oligonucleotide
  Sense strand starting at position 2464 of SEQ ID NO: 3580
gugacuaugucucauguca

SEQ ID NO: 278707 - RNA, 19 nt, Artificial Sequence
  Description of Artificial Sequence: Synthetic oligonucleotide
  Antisense strand to SEQ ID NO: 278706
ugacaugagacauagucac

SEQ ID NO: 278708 - RNA, 19 nt, Artificial Sequence
  Description of Artificial Sequence: Synthetic oligonucleotide
  Sense strand starting at position 2471 of SEQ ID NO: 3580
ugucucaugucacugguaa

SEQ ID NO: 278709 - RNA, 19 nt, Artificial Sequence
  Description of Artificial Sequence: Synthetic oligonucleotide
  Antisense strand to SEQ ID NO: 278708
uuaccagugacaugagaca

SEQ ID NO: 278710 - RNA, 19 nt, Artificial Sequence
  Description of Artificial Sequence: Synthetic oligonucleotide
  Sense strand starting at position 2475 of SEQ ID NO: 3580
ucaugucacugguaauaau

SEQ ID NO: 278711 - RNA, 19 nt, Artificial Sequence
  Description of Artificial Sequence: Synthetic oligonucleotide
  Antisense strand to SEQ ID NO: 278710
auuauuaccagugacauga

SEQ ID NO: 278712 - RNA, 19 nt, Artificial Sequence
  Description of Artificial Sequence: Synthetic oligonucleotide
  Sense strand starting at position 2517 of SEQ ID NO: 3580
guuacaaaguuucucccaa

SEQ ID NO: 278713 - RNA, 19 nt, Artificial Sequence
  Description of Artificial Sequence: Synthetic oligonucleotide
  Antisense strand to SEQ ID NO: 278712
uugggagaaacuuuguaac

SEQ ID NO: 278714 - RNA, 19 nt, Artificial Sequence
  Description of Artificial Sequence: Synthetic oligonucleotide
  Sense strand starting at position 2678 of SEQ ID NO: 3580
uacagagccugugacuaua

SEQ ID NO: 278715 - RNA, 19 nt, Artificial Sequence
  Description of Artificial Sequence: Synthetic oligonucleotide
  Antisense strand to SEQ ID NO: 278714
uauagucacaggcucugua

SEQ ID NO: 278716 - RNA, 19 nt, Artificial Sequence
  Description of Artificial Sequence: Synthetic oligonucleotide
  Sense strand starting at position 2681 of SEQ ID NO: 3580
agagccugugacuauauga

SEQ ID NO: 278717 - RNA, 19 nt, Artificial Sequence
  Description of Artificial Sequence: Synthetic oligonucleotide
  Antisense strand to SEQ ID NO: 278716
ucauauagucacaggcucu

SEQ ID NO: 278718 - RNA, 19 nt, Artificial Sequence
  Description of Artificial Sequence: Synthetic oligonucleotide
  Sense strand starting at position 3206 of SEQ ID NO: 3580
uggcaagaguccugauagc

SEQ ID NO: 278719 - RNA, 19 nt, Artificial Sequence
  Description of Artificial Sequence: Synthetic oligonucleotide
  Antisense strand to SEQ ID NO: 278718
gcuaucaggacucuugcca

SEQ ID NO: 278720 - RNA, 19 nt, Artificial Sequence
  Description of Artificial Sequence: Synthetic oligonucleotide
  Sense strand starting at position 3274 of SEQ ID NO: 3580
cccacaugcacgugugaua

SEQ ID NO: 278721 - RNA, 19 nt, Artificial Sequence
  Description of Artificial Sequence: Synthetic oligonucleotide
  Antisense strand to SEQ ID NO: 278720
uaucacacgugcauguggg

SEQ ID NO: 278722 - RNA, 19 nt, Artificial Sequence
  Description of Artificial Sequence: Synthetic oligonucleotide
  Sense strand starting at position 3375 of SEQ ID NO: 3580
uucagaggcggcuaagaau

SEQ ID NO: 278723 - RNA, 19 nt, Artificial Sequence
  Description of Artificial Sequence: Synthetic oligonucleotide
  Antisense strand to SEQ ID NO: 278722
auucuuagccgccucugaa

SEQ ID NO: 278724 - RNA, 19 nt, Artificial Sequence
  Description of Artificial Sequence: Synthetic oligonucleotide
  Sense strand starting at position 3411 of SEQ ID NO: 3580
gcuccaggccaugaugaaa

SEQ ID NO: 278725 - RNA, 19 nt, Artificial Sequence
  Description of Artificial Sequence: Synthetic oligonucleotide
  Antisense strand to SEQ ID NO: 278724
uuucaucauggccuggagc

SEQ ID NO: 278726 - RNA, 19 nt, Artificial Sequence
  Description of Artificial Sequence: Synthetic oligonucleotide
  Sense strand starting at position 3437 of SEQ ID NO: 3580
guaggagaauuaggagaau

SEQ ID NO: 278727 - RNA, 19 nt, Artificial Sequence
  Description of Artificial Sequence: Synthetic oligonucleotide
  Antisense strand to SEQ ID NO: 278726
auucuccuaauucuccuac

SEQ ID NO: 278728 - RNA, 19 nt, Artificial Sequence
  Description of Artificial Sequence: Synthetic oligonucleotide
  Sense strand starting at position 3712 of SEQ ID NO: 3580
cucccauagugcuagauua

SEQ ID NO: 278729 - RNA, 19 nt, Artificial Sequence
  Description of Artificial Sequence: Synthetic oligonucleotide
  Antisense strand to SEQ ID NO: 278728
uaaucuagcacuaugggag

SEQ ID NO: 278730 - RNA, 19 nt, Artificial Sequence
  Description of Artificial Sequence: Synthetic oligonucleotide
  Sense strand starting at position 3714 of SEQ ID NO: 3580
cccauagugcuagauuaca

SEQ ID NO: 278731 - RNA, 19 nt, Artificial Sequence
  Description of Artificial Sequence: Synthetic oligonucleotide
  Antisense strand to SEQ ID NO: 278730
uguaaucuagcacuauggg

SEQ ID NO: 278732 - RNA, 19 nt, Artificial Sequence
  Description of Artificial Sequence: Synthetic oligonucleotide
  Sense strand starting at position 3771 of SEQ ID NO: 3580
gacaguuugugagcuuuag

SEQ ID NO: 278733 - RNA, 19 nt, Artificial Sequence
  Description of Artificial Sequence: Synthetic oligonucleotide
  Antisense strand to SEQ ID NO: 278732
cuaaagcucacaaacuguc

SEQ ID NO: 278734 - RNA, 19 nt, Artificial Sequence
  Description of Artificial Sequence: Synthetic oligonucleotide
  Sense strand starting at position 3775 of SEQ ID NO: 3580
guuugugagcuuuagucuu

SEQ ID NO: 278735 - RNA, 19 nt, Artificial Sequence
  Description of Artificial Sequence: Synthetic oligonucleotide
  Antisense strand to SEQ ID NO: 278734
aagacuaaagcucacaaac

SEQ ID NO: 278736 - RNA, 19 nt, Artificial Sequence
  Description of Artificial Sequence: Synthetic oligonucleotide
  Sense strand starting at position 3777 of SEQ ID NO: 3580
uugugagcuuuagucuuaa

SEQ ID NO: 278737 - RNA, 19 nt, Artificial Sequence
  Description of Artificial Sequence: Synthetic oligonucleotide
  Antisense strand to SEQ ID NO: 278736
uuaagacuaaagcucacaa

SEQ ID NO: 278738 - RNA, 19 nt, Artificial Sequence
  Description of Artificial Sequence: Synthetic oligonucleotide
  Sense strand starting at position 3892 of SEQ ID NO: 3580
acucaauguuuauaaggca

SEQ ID NO: 278739 - RNA, 19 nt, Artificial Sequence
  Description of Artificial Sequence: Synthetic oligonucleotide
  Antisense strand to SEQ ID NO: 278738
ugccuuauaaacauugagu

SEQ ID NO: 278740 - RNA, 19 nt, Artificial Sequence
  Description of Artificial Sequence: Synthetic oligonucleotide
  Sense strand starting at position 128 of SEQ ID NO: 3581
aguccagugugauuaggau

SEQ ID NO: 278741 - RNA, 19 nt, Artificial Sequence
  Description of Artificial Sequence: Synthetic oligonucleotide
  Antisense strand to SEQ ID NO: 278740
auccuaaucacacuggacu

SEQ ID NO: 278742 - RNA, 19 nt, Artificial Sequence
  Description of Artificial Sequence: Synthetic oligonucleotide
  Sense strand starting at position 134 of SEQ ID NO: 3581
gugugauuaggauguauug

SEQ ID NO: 278743 - RNA, 19 nt, Artificial Sequence
  Description of Artificial Sequence: Synthetic oligonucleotide
  Antisense strand to SEQ ID NO: 278742
caauacauccuaaucacac

SEQ ID NO: 278744 - RNA, 19 nt, Artificial Sequence
  Description of Artificial Sequence: Synthetic oligonucleotide
  Sense strand starting at position 143 of SEQ ID NO: 3581
ggauguauugagugaagac

SEQ ID NO: 278745 - RNA, 19 nt, Artificial Sequence
  Description of Artificial Sequence: Synthetic oligonucleotide
  Antisense strand to SEQ ID NO: 278744
gucuucacucaauacaucc

SEQ ID NO: 278746 - RNA, 19 nt, Artificial Sequence
  Description of Artificial Sequence: Synthetic oligonucleotide
  Sense strand starting at position 195 of SEQ ID NO: 3581
uggguccuugguuaagagu

SEQ ID NO: 278747 - RNA, 19 nt, Artificial Sequence
  Description of Artificial Sequence: Synthetic oligonucleotide
  Antisense strand to SEQ ID NO: 278746
acucuuaaccaaggaccca

SEQ ID NO: 278748 - RNA, 19 nt, Artificial Sequence
  Description of Artificial Sequence: Synthetic oligonucleotide
  Sense strand starting at position 447 of SEQ ID NO: 3581
gguggauuguaagcaaaga

SEQ ID NO: 278749 - RNA, 19 nt, Artificial Sequence
  Description of Artificial Sequence: Synthetic oligonucleotide
  Antisense strand to SEQ ID NO: 278748
ucuuugcuuacaauccacc

SEQ ID NO: 278750 - RNA, 19 nt, Artificial Sequence
  Description of Artificial Sequence: Synthetic oligonucleotide
  Sense strand starting at position 512 of SEQ ID NO: 3581
cgggcuguacggagguaau

SEQ ID NO: 278751 - RNA, 19 nt, Artificial Sequence
  Description of Artificial Sequence: Synthetic oligonucleotide
  Antisense strand to SEQ ID NO: 278750
auuaccuccguacagcccg

SEQ ID NO: 278752 - RNA, 19 nt, Artificial Sequence
  Description of Artificial Sequence: Synthetic oligonucleotide
  Sense strand starting at position 543 of SEQ ID NO: 3581
agccuuaaggcugauauag

SEQ ID NO: 278753 - RNA, 19 nt, Artificial Sequence
  Description of Artificial Sequence: Synthetic oligonucleotide
  Antisense strand to SEQ ID NO: 278752
cuauaucagccuuaaggcu

SEQ ID NO: 278754 - RNA, 19 nt, Artificial Sequence
  Description of Artificial Sequence: Synthetic oligonucleotide
  Sense strand starting at position 584 of SEQ ID NO: 3581
ugguuugggccgaguuaga

SEQ ID NO: 278755 - RNA, 19 nt, Artificial Sequence
  Description of Artificial Sequence: Synthetic oligonucleotide
  Antisense strand to SEQ ID NO: 278754
ucuaacucggcccaaacca

SEQ ID NO: 278756 - RNA, 19 nt, Artificial Sequence
  Description of Artificial Sequence: Synthetic oligonucleotide
  Sense strand starting at position 650 of SEQ ID NO: 3581
uggcaagaaacugaguguu

SEQ ID NO: 278757 - RNA, 19 nt, Artificial Sequence
  Description of Artificial Sequence: Synthetic oligonucleotide
  Antisense strand to SEQ ID NO: 278756
aacacucaguuucuugcca

SEQ ID NO: 278758 - RNA, 19 nt, Artificial Sequence
  Description of Artificial Sequence: Synthetic oligonucleotide
  Sense strand starting at position 652 of SEQ ID NO: 3581
gcaagaaacugaguguuua

SEQ ID NO: 278759 - RNA, 19 nt, Artificial Sequence
  Description of Artificial Sequence: Synthetic oligonucleotide
  Antisense strand to SEQ ID NO: 278758
uaaacacucaguuucuugc

SEQ ID NO: 278760 - RNA, 19 nt, Artificial Sequence
  Description of Artificial Sequence: Synthetic oligonucleotide
  Sense strand starting at position 653 of SEQ ID NO: 3581
caagaaacugaguguuuau

SEQ ID NO: 278761 - RNA, 19 nt, Artificial Sequence
  Description of Artificial Sequence: Synthetic oligonucleotide
  Antisense strand to SEQ ID NO: 278760
auaaacacucaguuucuug

SEQ ID NO: 278762 - RNA, 19 nt, Artificial Sequence
  Description of Artificial Sequence: Synthetic oligonucleotide
  Sense strand starting at position 664 of SEQ ID NO: 3581
guguuuauuugaucuuuac

SEQ ID NO: 278763 - RNA, 19 nt, Artificial Sequence
  Description of Artificial Sequence: Synthetic oligonucleotide
  Antisense strand to SEQ ID NO: 278762
guaaagaucaaauaaacac

SEQ ID NO: 278764 - RNA, 19 nt, Artificial Sequence
  Description of Artificial Sequence: Synthetic oligonucleotide
  Sense strand starting at position 1003 of SEQ ID NO: 3581
ucuggacagcuauaugcaa

SEQ ID NO: 278765 - RNA, 19 nt, Artificial Sequence
  Description of Artificial Sequence: Synthetic oligonucleotide
  Antisense strand to SEQ ID NO: 278764
uugcauauagcuguccaga

SEQ ID NO: 278766 - RNA, 19 nt, Artificial Sequence
  Description of Artificial Sequence: Synthetic oligonucleotide
  Sense strand starting at position 1038 of SEQ ID NO: 3581
gagcuuaagucuccaauug

SEQ ID NO: 278767 - RNA, 19 nt, Artificial Sequence
  Description of Artificial Sequence: Synthetic oligonucleotide
  Antisense strand to SEQ ID NO: 278766
caauuggagacuuaagcuc

SEQ ID NO: 278768 - RNA, 19 nt, Artificial Sequence
  Description of Artificial Sequence: Synthetic oligonucleotide
  Sense strand starting at position 1039 of SEQ ID NO: 3581
agcuuaagucuccaauuga

SEQ ID NO: 278769 - RNA, 19 nt, Artificial Sequence
  Description of Artificial Sequence: Synthetic oligonucleotide
  Antisense strand to SEQ ID NO: 278768
ucaauuggagacuuaagcu

SEQ ID NO: 278770 - RNA, 19 nt, Artificial Sequence
  Description of Artificial Sequence: Synthetic oligonucleotide
  Sense strand starting at position 1053 of SEQ ID NO: 3581
auugaaacuugaucucugu

SEQ ID NO: 278771 - RNA, 19 nt, Artificial Sequence
  Description of Artificial Sequence: Synthetic oligonucleotide
  Antisense strand to SEQ ID NO: 278770
acagagaucaaguuucaau

SEQ ID NO: 278772 - RNA, 19 nt, Artificial Sequence
  Description of Artificial Sequence: Synthetic oligonucleotide
  Sense strand starting at position 1084 of SEQ ID NO: 3581
ugcaaaugucacuacguga

SEQ ID NO: 278773 - RNA, 19 nt, Artificial Sequence
  Description of Artificial Sequence: Synthetic oligonucleotide
  Antisense strand to SEQ ID NO: 278772
ucacguagugacauuugca

SEQ ID NO: 278774 - RNA, 19 nt, Artificial Sequence
  Description of Artificial Sequence: Synthetic oligonucleotide
  Sense strand starting at position 1087 of SEQ ID NO: 3581
aaaugucacuacgugaauc

SEQ ID NO: 278775 - RNA, 19 nt, Artificial Sequence
  Description of Artificial Sequence: Synthetic oligonucleotide
  Antisense strand to SEQ ID NO: 278774
gauucacguagugacauuu

SEQ ID NO: 278776 - RNA, 19 nt, Artificial Sequence
  Description of Artificial Sequence: Synthetic oligonucleotide
  Sense strand starting at position 1089 of SEQ ID NO: 3581
augucacuacgugaaucua

SEQ ID NO: 278777 - RNA, 19 nt, Artificial Sequence
  Description of Artificial Sequence: Synthetic oligonucleotide
  Antisense strand to SEQ ID NO: 278776
uagauucacguagugacau

SEQ ID NO: 278778 - RNA, 19 nt, Artificial Sequence
  Description of Artificial Sequence: Synthetic oligonucleotide
  Sense strand starting at position 1100 of SEQ ID NO: 3581
ugaaucuaccuaugcaaug

SEQ ID NO: 278779 - RNA, 19 nt, Artificial Sequence
  Description of Artificial Sequence: Synthetic oligonucleotide
  Antisense strand to SEQ ID NO: 278778
cauugcauagguagauuca

SEQ ID NO: 278780 - RNA, 19 nt, Artificial Sequence
  Description of Artificial Sequence: Synthetic oligonucleotide
  Sense strand starting at position 1115 of SEQ ID NO: 3581
aaugguuugcgcguaugaa

SEQ ID NO: 278781 - RNA, 19 nt, Artificial Sequence
  Description of Artificial Sequence: Synthetic oligonucleotide
  Antisense strand to SEQ ID NO: 278780
uucauacgcgcaaaccauu

SEQ ID NO: 278782 - RNA, 19 nt, Artificial Sequence
  Description of Artificial Sequence: Synthetic oligonucleotide
  Sense strand starting at position 1211 of SEQ ID NO: 3581
guaggcucucaguauaaag

SEQ ID NO: 278783 - RNA, 19 nt, Artificial Sequence
  Description of Artificial Sequence: Synthetic oligonucleotide
  Antisense strand to SEQ ID NO: 278782
cuuuauacugagagccuac

SEQ ID NO: 278784 - RNA, 19 nt, Artificial Sequence
  Description of Artificial Sequence: Synthetic oligonucleotide
  Sense strand starting at position 1379 of SEQ ID NO: 3581
gaaacacuucuguagcagu

SEQ ID NO: 278785 - RNA, 19 nt, Artificial Sequence
  Description of Artificial Sequence: Synthetic oligonucleotide
  Antisense strand to SEQ ID NO: 278784
acugcuacagaaguguuuc

SEQ ID NO: 278786 - RNA, 19 nt, Artificial Sequence
  Description of Artificial Sequence: Synthetic oligonucleotide
  Sense strand starting at position 2236 of SEQ ID NO: 3581
cccgccauugcugagagaa

SEQ ID NO: 278787 - RNA, 19 nt, Artificial Sequence
  Description of Artificial Sequence: Synthetic oligonucleotide
  Antisense strand to SEQ ID NO: 278786
uucucucagcaauggcggg

SEQ ID NO: 278788 - RNA, 19 nt, Artificial Sequence
  Description of Artificial Sequence: Synthetic oligonucleotide
  Sense strand starting at position 2331 of SEQ ID NO: 3581
accagauaaugcuuaggga

SEQ ID NO: 278789 - RNA, 19 nt, Artificial Sequence
  Description of Artificial Sequence: Synthetic oligonucleotide
  Antisense strand to SEQ ID NO: 278788
ucccuaagcauuaucuggu

SEQ ID NO: 278790 - RNA, 19 nt, Artificial Sequence
  Description of Artificial Sequence: Synthetic oligonucleotide
  Sense strand starting at position 2461 of SEQ ID NO: 3581
auagaagugcuuuauuauc

SEQ ID NO: 278791 - RNA, 19 nt, Artificial Sequence
  Description of Artificial Sequence: Synthetic oligonucleotide
  Antisense strand to SEQ ID NO: 278790
gauaauaaagcacuucuau

SEQ ID NO: 278792 - RNA, 19 nt, Artificial Sequence
  Description of Artificial Sequence: Synthetic oligonucleotide
  Sense strand starting at position 2463 of SEQ ID NO: 3581
agaagugcuuuauuaucau

SEQ ID NO: 278793 - RNA, 19 nt, Artificial Sequence
  Description of Artificial Sequence: Synthetic oligonucleotide
  Antisense strand to SEQ ID NO: 278792
augauaauaaagcacuucu

SEQ ID NO: 278794 - RNA, 19 nt, Artificial Sequence
  Description of Artificial Sequence: Synthetic oligonucleotide
  Sense strand starting at position 2491 of SEQ ID NO: 3581
acaaguaaucauuggcuua

SEQ ID NO: 278795 - RNA, 19 nt, Artificial Sequence
  Description of Artificial Sequence: Synthetic oligonucleotide
  Antisense strand to SEQ ID NO: 278794
uaagccaaugauuacuugu

SEQ ID NO: 278796 - RNA, 19 nt, Artificial Sequence
  Description of Artificial Sequence: Synthetic oligonucleotide
  Sense strand starting at position 2494 of SEQ ID NO: 3581
aguaaucauuggcuuauua

SEQ ID NO: 278797 - RNA, 19 nt, Artificial Sequence
  Description of Artificial Sequence: Synthetic oligonucleotide
  Antisense strand to SEQ ID NO: 278796
uaauaagccaaugauuacu

SEQ ID NO: 278798 - RNA, 19 nt, Artificial Sequence
  Description of Artificial Sequence: Synthetic oligonucleotide
  Sense strand starting at position 2601 of SEQ ID NO: 3581
aagccuuuccaagggagaa

SEQ ID NO: 278799 - RNA, 19 nt, Artificial Sequence
  Description of Artificial Sequence: Synthetic oligonucleotide
  Antisense strand to SEQ ID NO: 278798
uucucccuuggaaaggcuu

SEQ ID NO: 278800 - RNA, 19 nt, Artificial Sequence
  Description of Artificial Sequence: Synthetic oligonucleotide
  Sense strand starting at position 2935 of SEQ ID NO: 3581
gugguugccagugaauuaa

SEQ ID NO: 278801 - RNA, 19 nt, Artificial Sequence
  Description of Artificial Sequence: Synthetic oligonucleotide
  Antisense strand to SEQ ID NO: 278800
uuaauucacuggcaaccac

SEQ ID NO: 278802 - RNA, 19 nt, Artificial Sequence
  Description of Artificial Sequence: Synthetic oligonucleotide
  Sense strand starting at position 2945 of SEQ ID NO: 3581
gugaauuaaaugugcuuga

SEQ ID NO: 278803 - RNA, 19 nt, Artificial Sequence
  Description of Artificial Sequence: Synthetic oligonucleotide
  Antisense strand to SEQ ID NO: 278802
ucaagcacauuuaauucac

SEQ ID NO: 278804 - RNA, 19 nt, Artificial Sequence
  Description of Artificial Sequence: Synthetic oligonucleotide
  Sense strand starting at position 2946 of SEQ ID NO: 3581
ugaauuaaaugugcuugau

SEQ ID NO: 278805 - RNA, 19 nt, Artificial Sequence
  Description of Artificial Sequence: Synthetic oligonucleotide
  Antisense strand to SEQ ID NO: 278804
aucaagcacauuuaauuca

SEQ ID NO: 278806 - RNA, 19 nt, Artificial Sequence
  Description of Artificial Sequence: Synthetic oligonucleotide
  Sense strand starting at position 2949 of SEQ ID NO: 3581
auuaaaugugcuugauaac

SEQ ID NO: 278807 - RNA, 19 nt, Artificial Sequence
  Description of Artificial Sequence: Synthetic oligonucleotide
  Antisense strand to SEQ ID NO: 278806
guuaucaagcacauuuaau

SEQ ID NO: 278808 - RNA, 19 nt, Artificial Sequence
  Description of Artificial Sequence: Synthetic oligonucleotide
  Sense strand starting at position 2950 of SEQ ID NO: 3581
uuaaaugugcuugauaaca

SEQ ID NO: 278809 - RNA, 19 nt, Artificial Sequence
  Description of Artificial Sequence: Synthetic oligonucleotide
  Antisense strand to SEQ ID NO: 278808
uguuaucaagcacauuuaa

SEQ ID NO: 278810 - RNA, 19 nt, Artificial Sequence
  Description of Artificial Sequence: Synthetic oligonucleotide
  Sense strand starting at position 3096 of SEQ ID NO: 3581
cgagaagaugugcaugcaa

SEQ ID NO: 278811 - RNA, 19 nt, Artificial Sequence
  Description of Artificial Sequence: Synthetic oligonucleotide
  Antisense strand to SEQ ID NO: 278810
uugcaugcacaucuucucg

SEQ ID NO: 278812 - RNA, 19 nt, Artificial Sequence
  Description of Artificial Sequence: Synthetic oligonucleotide
  Sense strand starting at position 3098 of SEQ ID NO: 3581
agaagaugugcaugcaaag

SEQ ID NO: 278813 - RNA, 19 nt, Artificial Sequence
  Description of Artificial Sequence: Synthetic oligonucleotide
  Antisense strand to SEQ ID NO: 278812
cuuugcaugcacaucuucu

SEQ ID NO: 278814 - RNA, 19 nt, Artificial Sequence
  Description of Artificial Sequence: Synthetic oligonucleotide
  Sense strand starting at position 3133 of SEQ ID NO: 3581
ggugucauucuacagaggu

SEQ ID NO: 278815 - RNA, 19 nt, Artificial Sequence
  Description of Artificial Sequence: Synthetic oligonucleotide
  Antisense strand to SEQ ID NO: 278814
accucuguagaaugacacc

SEQ ID NO: 278816 - RNA, 19 nt, Artificial Sequence
  Description of Artificial Sequence: Synthetic oligonucleotide
  Sense strand starting at position 3592 of SEQ ID NO: 3581
gugaauggcaacuaacagu

SEQ ID NO: 278817 - RNA, 19 nt, Artificial Sequence
  Description of Artificial Sequence: Synthetic oligonucleotide
  Antisense strand to SEQ ID NO: 278816
acuguuaguugccauucac

SEQ ID NO: 278818 - RNA, 19 nt, Artificial Sequence
  Description of Artificial Sequence: Synthetic oligonucleotide
  Sense strand starting at position 3641 of SEQ ID NO: 3581
agugaugaagagugaauuc

SEQ ID NO: 278819 - RNA, 19 nt, Artificial Sequence
  Description of Artificial Sequence: Synthetic oligonucleotide
  Antisense strand to SEQ ID NO: 278818
gaauucacucuucaucacu

SEQ ID NO: 278820 - RNA, 19 nt, Artificial Sequence
  Description of Artificial Sequence: Synthetic oligonucleotide
  Sense strand starting at position 54 of SEQ ID NO: 3582
uuacauggccaguaugaaa

SEQ ID NO: 278821 - RNA, 19 nt, Artificial Sequence
  Description of Artificial Sequence: Synthetic oligonucleotide
  Antisense strand to SEQ ID NO: 278820
uuucauacuggccauguaa

SEQ ID NO: 278822 - RNA, 19 nt, Artificial Sequence
  Description of Artificial Sequence: Synthetic oligonucleotide
  Sense strand starting at position 519 of SEQ ID NO: 3582
cuuucuucccuuggcaaga

SEQ ID NO: 278823 - RNA, 19 nt, Artificial Sequence
  Description of Artificial Sequence: Synthetic oligonucleotide
  Antisense strand to SEQ ID NO: 278822
ucuugccaagggaagaaag

SEQ ID NO: 278824 - RNA, 19 nt, Artificial Sequence
  Description of Artificial Sequence: Synthetic oligonucleotide
  Sense strand starting at position 520 of SEQ ID NO: 3582
uuucuucccuuggcaagau

SEQ ID NO: 278825 - RNA, 19 nt, Artificial Sequence
  Description of Artificial Sequence: Synthetic oligonucleotide
  Antisense strand to SEQ ID NO: 278824
aucuugccaagggaagaaa

SEQ ID NO: 278826 - RNA, 19 nt, Artificial Sequence
  Description of Artificial Sequence: Synthetic oligonucleotide
  Sense strand starting at position 530 of SEQ ID NO: 3582
uggcaagauuuagggacaa

SEQ ID NO: 278827 - RNA, 19 nt, Artificial Sequence
  Description of Artificial Sequence: Synthetic oligonucleotide
  Antisense strand to SEQ ID NO: 278826
uugucccuaaaucuugcca

SEQ ID NO: 278828 - RNA, 19 nt, Artificial Sequence
  Description of Artificial Sequence: Synthetic oligonucleotide
  Sense strand starting at position 597 of SEQ ID NO: 3582
acaccuuaacuguaguuaa

SEQ ID NO: 278829 - RNA, 19 nt, Artificial Sequence
  Description of Artificial Sequence: Synthetic oligonucleotide
  Antisense strand to SEQ ID NO: 278828
uuaacuacaguuaaggugu

SEQ ID NO: 278830 - RNA, 19 nt, Artificial Sequence
  Description of Artificial Sequence: Synthetic oligonucleotide
  Sense strand starting at position 649 of SEQ ID NO: 3582
ucaaaugagucagcuggua

SEQ ID NO: 278831 - RNA, 19 nt, Artificial Sequence
  Description of Artificial Sequence: Synthetic oligonucleotide
  Antisense strand to SEQ ID NO: 278830
uaccagcugacucauuuga

SEQ ID NO: 278832 - RNA, 19 nt, Artificial Sequence
  Description of Artificial Sequence: Synthetic oligonucleotide
  Sense strand starting at position 809 of SEQ ID NO: 3582
acuugugaccaguggaaca

SEQ ID NO: 278833 - RNA, 19 nt, Artificial Sequence
  Description of Artificial Sequence: Synthetic oligonucleotide
  Antisense strand to SEQ ID NO: 278832
uguuccacuggucacaagu

SEQ ID NO: 278834 - RNA, 19 nt, Artificial Sequence
  Description of Artificial Sequence: Synthetic oligonucleotide
  Sense strand starting at position 1290 of SEQ ID NO: 3582
ugggaaaguuaauucuacu

SEQ ID NO: 278835 - RNA, 19 nt, Artificial Sequence
  Description of Artificial Sequence: Synthetic oligonucleotide
  Antisense strand to SEQ ID NO: 278834
aguagaauuaacuuuccca

SEQ ID NO: 278836 - RNA, 19 nt, Artificial Sequence
  Description of Artificial Sequence: Synthetic oligonucleotide
  Sense strand starting at position 1356 of SEQ ID NO: 3582
ccgguuaacaacuauggau

SEQ ID NO: 278837 - RNA, 19 nt, Artificial Sequence
  Description of Artificial Sequence: Synthetic oligonucleotide
  Antisense strand to SEQ ID NO: 278836
auccauaguuguuaaccgg

SEQ ID NO: 278838 - RNA, 19 nt, Artificial Sequence
  Description of Artificial Sequence: Synthetic oligonucleotide
  Sense strand starting at position 1425 of SEQ ID NO: 3582
agagguucccaugauguga

SEQ ID NO: 278839 - RNA, 19 nt, Artificial Sequence
  Description of Artificial Sequence: Synthetic oligonucleotide
  Antisense strand to SEQ ID NO: 278838
ucacaucaugggaaccucu

SEQ ID NO: 278840 - RNA, 19 nt, Artificial Sequence
  Description of Artificial Sequence: Synthetic oligonucleotide
  Sense strand starting at position 1439 of SEQ ID NO: 3582
ugugaauucggccaaacag

SEQ ID NO: 278841 - RNA, 19 nt, Artificial Sequence
  Description of Artificial Sequence: Synthetic oligonucleotide
  Antisense strand to SEQ ID NO: 278840
cuguuuggccgaauucaca

SEQ ID NO: 278842 - RNA, 19 nt, Artificial Sequence
  Description of Artificial Sequence: Synthetic oligonucleotide
  Sense strand starting at position 1584 of SEQ ID NO: 3582
ggcaacgugacucaggaaa

SEQ ID NO: 278843 - RNA, 19 nt, Artificial Sequence
  Description of Artificial Sequence: Synthetic oligonucleotide
  Antisense strand to SEQ ID NO: 278842
uuuccugagucacguugcc

SEQ ID NO: 278844 - RNA, 19 nt, Artificial Sequence
  Description of Artificial Sequence: Synthetic oligonucleotide
  Sense strand starting at position 1661 of SEQ ID NO: 3582
cugggucuuaccugaagac

SEQ ID NO: 278845 - RNA, 19 nt, Artificial Sequence
  Description of Artificial Sequence: Synthetic oligonucleotide
  Antisense strand to SEQ ID NO: 278844
gucuucagguaagacccag

SEQ ID NO: 278846 - RNA, 19 nt, Artificial Sequence
  Description of Artificial Sequence: Synthetic oligonucleotide
  Sense strand starting at position 2108 of SEQ ID NO: 3582
gacgacuggcuaggaaaua

SEQ ID NO: 278847 - RNA, 19 nt, Artificial Sequence
  Description of Artificial Sequence: Synthetic oligonucleotide
  Antisense strand to SEQ ID NO: 278846
uauuuccuagccagucguc

SEQ ID NO: 278848 - RNA, 19 nt, Artificial Sequence
  Description of Artificial Sequence: Synthetic oligonucleotide
  Sense strand starting at position 2224 of SEQ ID NO: 3582
uuaacuugguuaucugaga

SEQ ID NO: 278849 - RNA, 19 nt, Artificial Sequence
  Description of Artificial Sequence: Synthetic oligonucleotide
  Antisense strand to SEQ ID NO: 278848
ucucagauaaccaaguuaa

SEQ ID NO: 278850 - RNA, 19 nt, Artificial Sequence
  Description of Artificial Sequence: Synthetic oligonucleotide
  Sense strand starting at position 2225 of SEQ ID NO: 3582
uaacuugguuaucugagaa

SEQ ID NO: 278851 - RNA, 19 nt, Artificial Sequence
  Description of Artificial Sequence: Synthetic oligonucleotide
  Antisense strand to SEQ ID NO: 278850
uucucagauaaccaaguua

SEQ ID NO: 278852 - RNA, 19 nt, Artificial Sequence
  Description of Artificial Sequence: Synthetic oligonucleotide
  Sense strand starting at position 2411 of SEQ ID NO: 3582
uuuaguuuacaggguuuaa

SEQ ID NO: 278853 - RNA, 19 nt, Artificial Sequence
  Description of Artificial Sequence: Synthetic oligonucleotide
  Antisense strand to SEQ ID NO: 278852
uuaaacccuguaaacuaaa

SEQ ID NO: 278854 - RNA, 19 nt, Artificial Sequence
  Description of Artificial Sequence: Synthetic oligonucleotide
  Sense strand starting at position 2454 of SEQ ID NO: 3582
auguaauuaucggcaauca

SEQ ID NO: 278855 - RNA, 19 nt, Artificial Sequence
  Description of Artificial Sequence: Synthetic oligonucleotide
  Antisense strand to SEQ ID NO: 278854
ugauugccgauaauuacau

SEQ ID NO: 278856 - RNA, 19 nt, Artificial Sequence
  Description of Artificial Sequence: Synthetic oligonucleotide
  Sense strand starting at position 2455 of SEQ ID NO: 3582
uguaauuaucggcaaucac

SEQ ID NO: 278857 - RNA, 19 nt, Artificial Sequence
  Description of Artificial Sequence: Synthetic oligonucleotide
  Antisense strand to SEQ ID NO: 278856
gugauugccgauaauuaca

SEQ ID NO: 278858 - RNA, 19 nt, Artificial Sequence
  Description of Artificial Sequence: Synthetic oligonucleotide
  Sense strand starting at position 2563 of SEQ ID NO: 3582
agguacagucucuguuuaa

SEQ ID NO: 278859 - RNA, 19 nt, Artificial Sequence
  Description of Artificial Sequence: Synthetic oligonucleotide
  Antisense strand to SEQ ID NO: 278858
uuaaacagagacuguaccu

SEQ ID NO: 278860 - RNA, 19 nt, Artificial Sequence
  Description of Artificial Sequence: Synthetic oligonucleotide
  Sense strand starting at position 2650 of SEQ ID NO: 3582
uuccuaaaucgagaauggu

SEQ ID NO: 278861 - RNA, 19 nt, Artificial Sequence
  Description of Artificial Sequence: Synthetic oligonucleotide
  Antisense strand to SEQ ID NO: 278860
accauucucgauuuaggaa

SEQ ID NO: 278862 - RNA, 19 nt, Artificial Sequence
  Description of Artificial Sequence: Synthetic oligonucleotide
  Sense strand starting at position 2653 of SEQ ID NO: 3582
cuaaaucgagaauggugau

SEQ ID NO: 278863 - RNA, 19 nt, Artificial Sequence
  Description of Artificial Sequence: Synthetic oligonucleotide
  Antisense strand to SEQ ID NO: 278862
aucaccauucucgauuuag

SEQ ID NO: 278864 - RNA, 19 nt, Artificial Sequence
  Description of Artificial Sequence: Synthetic oligonucleotide
  Sense strand starting at position 2713 of SEQ ID NO: 3582
gauccaaacugugauuuga

SEQ ID NO: 278865 - RNA, 19 nt, Artificial Sequence
  Description of Artificial Sequence: Synthetic oligonucleotide
  Antisense strand to SEQ ID NO: 278864
ucaaaucacaguuuggauc

SEQ ID NO: 278866 - RNA, 19 nt, Artificial Sequence
  Description of Artificial Sequence: Synthetic oligonucleotide
  Sense strand starting at position 2735 of SEQ ID NO: 3582
gcacaauugcuuuaagaua

SEQ ID NO: 278867 - RNA, 19 nt, Artificial Sequence
  Description of Artificial Sequence: Synthetic oligonucleotide
  Antisense strand to SEQ ID NO: 278866
uaucuuaaagcaauugugc

SEQ ID NO: 278868 - RNA, 19 nt, Artificial Sequence
  Description of Artificial Sequence: Synthetic oligonucleotide
  Sense strand starting at position 2960 of SEQ ID NO: 3582
ccaugaaauguguaaucuc

SEQ ID NO: 278869 - RNA, 19 nt, Artificial Sequence
  Description of Artificial Sequence: Synthetic oligonucleotide
  Antisense strand to SEQ ID NO: 278868
gagauuacacauuucaugg

SEQ ID NO: 278870 - RNA, 19 nt, Artificial Sequence
  Description of Artificial Sequence: Synthetic oligonucleotide
  Sense strand starting at position 2963 of SEQ ID NO: 3582
ugaaauguguaaucuccau

SEQ ID NO: 278871 - RNA, 19 nt, Artificial Sequence
  Description of Artificial Sequence: Synthetic oligonucleotide
  Antisense strand to SEQ ID NO: 278870
auggagauuacacauuuca

SEQ ID NO: 278872 - RNA, 19 nt, Artificial Sequence
  Description of Artificial Sequence: Synthetic oligonucleotide
  Sense strand starting at position 2967 of SEQ ID NO: 3582
auguguaaucuccauaaca

SEQ ID NO: 278873 - RNA, 19 nt, Artificial Sequence
  Description of Artificial Sequence: Synthetic oligonucleotide
  Antisense strand to SEQ ID NO: 278872
uguuauggagauuacacau

SEQ ID NO: 278874 - RNA, 19 nt, Artificial Sequence
  Description of Artificial Sequence: Synthetic oligonucleotide
  Sense strand starting at position 2969 of SEQ ID NO: 3582
guguaaucuccauaacagc

SEQ ID NO: 278875 - RNA, 19 nt, Artificial Sequence
  Description of Artificial Sequence: Synthetic oligonucleotide
  Antisense strand to SEQ ID NO: 278874
gcuguuauggagauuacac

SEQ ID NO: 278876 - RNA, 19 nt, Artificial Sequence
  Description of Artificial Sequence: Synthetic oligonucleotide
  Sense strand starting at position 3329 of SEQ ID NO: 3582
uuagaaugcucuuugaucu

SEQ ID NO: 278877 - RNA, 19 nt, Artificial Sequence
  Description of Artificial Sequence: Synthetic oligonucleotide
  Antisense strand to SEQ ID NO: 278876
agaucaaagagcauucuaa

SEQ ID NO: 278878 - RNA, 19 nt, Artificial Sequence
  Description of Artificial Sequence: Synthetic oligonucleotide
  Sense strand starting at position 3495 of SEQ ID NO: 3582
cccuuaaacuuuguuugga

SEQ ID NO: 278879 - RNA, 19 nt, Artificial Sequence
  Description of Artificial Sequence: Synthetic oligonucleotide
  Antisense strand to SEQ ID NO: 278878
uccaaacaaaguuuaaggg

SEQ ID NO: 278880 - RNA, 19 nt, Artificial Sequence
  Description of Artificial Sequence: Synthetic oligonucleotide
  Sense strand starting at position 3555 of SEQ ID NO: 3582
auaagauguccauagggcu

SEQ ID NO: 278881 - RNA, 19 nt, Artificial Sequence
  Description of Artificial Sequence: Synthetic oligonucleotide
  Antisense strand to SEQ ID NO: 278880
agcccuauggacaucuuau

SEQ ID NO: 278882 - RNA, 19 nt, Artificial Sequence
  Description of Artificial Sequence: Synthetic oligonucleotide
  Sense strand starting at position 3590 of SEQ ID NO: 3582
uauuccugagacuguagaa

SEQ ID NO: 278883 - RNA, 19 nt, Artificial Sequence
  Description of Artificial Sequence: Synthetic oligonucleotide
  Antisense strand to SEQ ID NO: 278882
uucuacagucucaggaaua

SEQ ID NO: 278884 - RNA, 19 nt, Artificial Sequence
  Description of Artificial Sequence: Synthetic oligonucleotide
  Sense strand starting at position 3626 of SEQ ID NO: 3582
uaugucuaggguuauguga

SEQ ID NO: 278885 - RNA, 19 nt, Artificial Sequence
  Description of Artificial Sequence: Synthetic oligonucleotide
  Antisense strand to SEQ ID NO: 278884
ucacauaacccuagacaua

SEQ ID NO: 278886 - RNA, 19 nt, Artificial Sequence
  Description of Artificial Sequence: Synthetic oligonucleotide
  Sense strand starting at position 3674 of SEQ ID NO: 3582
agcucuaaccucuggguga

SEQ ID NO: 278887 - RNA, 19 nt, Artificial Sequence
  Description of Artificial Sequence: Synthetic oligonucleotide
  Antisense strand to SEQ ID NO: 278886
ucacccagagguuagagcu

SEQ ID NO: 278888 - RNA, 19 nt, Artificial Sequence
  Description of Artificial Sequence: Synthetic oligonucleotide
  Sense strand starting at position 3778 of SEQ ID NO: 3582
caacgaaauuacuuuggua

SEQ ID NO: 278889 - RNA, 19 nt, Artificial Sequence
  Description of Artificial Sequence: Synthetic oligonucleotide
  Antisense strand to SEQ ID NO: 278888
uaccaaaguaauuucguug

SEQ ID NO: 278890 - RNA, 19 nt, Artificial Sequence
  Description of Artificial Sequence: Synthetic oligonucleotide
  Sense strand starting at position 3882 of SEQ ID NO: 3582
uuugguugaagguguuuaa

SEQ ID NO: 278891 - RNA, 19 nt, Artificial Sequence
  Description of Artificial Sequence: Synthetic oligonucleotide
  Antisense strand to SEQ ID NO: 278890
uuaaacaccuucaaccaaa

SEQ ID NO: 278892 - RNA, 19 nt, Artificial Sequence
  Description of Artificial Sequence: Synthetic oligonucleotide
  Sense strand starting at position 3885 of SEQ ID NO: 3582
gguugaagguguuuaagaa

SEQ ID NO: 278893 - RNA, 19 nt, Artificial Sequence
  Description of Artificial Sequence: Synthetic oligonucleotide
  Antisense strand to SEQ ID NO: 278892
uucuuaaacaccuucaacc

SEQ ID NO: 278894 - RNA, 19 nt, Artificial Sequence
  Description of Artificial Sequence: Synthetic oligonucleotide
  Sense strand starting at position 3886 of SEQ ID NO: 3582
guugaagguguuuaagaaa

SEQ ID NO: 278895 - RNA, 19 nt, Artificial Sequence
  Description of Artificial Sequence: Synthetic oligonucleotide
  Antisense strand to SEQ ID NO: 278894
uuucuuaaacaccuucaac

SEQ ID NO: 278896 - RNA, 19 nt, Artificial Sequence
  Description of Artificial Sequence: Synthetic oligonucleotide
  Sense strand starting at position 3946 of SEQ ID NO: 3582
gcagaaaccugagugguca

SEQ ID NO: 278897 - RNA, 19 nt, Artificial Sequence
  Description of Artificial Sequence: Synthetic oligonucleotide
  Antisense strand to SEQ ID NO: 278896
ugaccacucagguuucugc

SEQ ID NO: 278898 - RNA, 19 nt, Artificial Sequence
  Description of Artificial Sequence: Synthetic oligonucleotide
  Sense strand starting at position 3950 of SEQ ID NO: 3582
aaaccugaguggucacaca

SEQ ID NO: 278899 - RNA, 19 nt, Artificial Sequence
  Description of Artificial Sequence: Synthetic oligonucleotide
  Antisense strand to SEQ ID NO: 278898
ugugugaccacucagguuu

SEQ ID NO: 278900 - RNA, 19 nt, Artificial Sequence
  Description of Artificial Sequence: Synthetic oligonucleotide
  Sense strand starting at position 51 of SEQ ID NO: 3583
uaacuaugccuugguagau

SEQ ID NO: 278901 - RNA, 19 nt, Artificial Sequence
  Description of Artificial Sequence: Synthetic oligonucleotide
  Antisense strand to SEQ ID NO: 278900
aucuaccaaggcauaguua

SEQ ID NO: 278902 - RNA, 19 nt, Artificial Sequence
  Description of Artificial Sequence: Synthetic oligonucleotide
  Sense strand starting at position 52 of SEQ ID NO: 3583
aacuaugccuugguagauu

SEQ ID NO: 278903 - RNA, 19 nt, Artificial Sequence
  Description of Artificial Sequence: Synthetic oligonucleotide
  Antisense strand to SEQ ID NO: 278902
aaucuaccaaggcauaguu

SEQ ID NO: 278904 - RNA, 19 nt, Artificial Sequence
  Description of Artificial Sequence: Synthetic oligonucleotide
  Sense strand starting at position 63 of SEQ ID NO: 3583
gguagauucuagguuuaua

SEQ ID NO: 278905 - RNA, 19 nt, Artificial Sequence
  Description of Artificial Sequence: Synthetic oligonucleotide
  Antisense strand to SEQ ID NO: 278904
uauaaaccuagaaucuacc

SEQ ID NO: 278906 - RNA, 19 nt, Artificial Sequence
  Description of Artificial Sequence: Synthetic oligonucleotide
  Sense strand starting at position 258 of SEQ ID NO: 3583
cuaggagucucacuugaaa

SEQ ID NO: 278907 - RNA, 19 nt, Artificial Sequence
  Description of Artificial Sequence: Synthetic oligonucleotide
  Antisense strand to SEQ ID NO: 278906
uuucaagugagacuccuag

SEQ ID NO: 278908 - RNA, 19 nt, Artificial Sequence
  Description of Artificial Sequence: Synthetic oligonucleotide
  Sense strand starting at position 552 of SEQ ID NO: 3583
ccuuaauaauuggcagaug

SEQ ID NO: 278909 - RNA, 19 nt, Artificial Sequence
  Description of Artificial Sequence: Synthetic oligonucleotide
  Antisense strand to SEQ ID NO: 278908
caucugccaauuauuaagg

SEQ ID NO: 278910 - RNA, 19 nt, Artificial Sequence
  Description of Artificial Sequence: Synthetic oligonucleotide
  Sense strand starting at position 652 of SEQ ID NO: 3583
cugaaugagugaguuaugu

SEQ ID NO: 278911 - RNA, 19 nt, Artificial Sequence
  Description of Artificial Sequence: Synthetic oligonucleotide
  Antisense strand to SEQ ID NO: 278910
acauaacucacucauucag

SEQ ID NO: 278912 - RNA, 19 nt, Artificial Sequence
  Description of Artificial Sequence: Synthetic oligonucleotide
  Sense strand starting at position 654 of SEQ ID NO: 3583
gaaugagugaguuaugucu

SEQ ID NO: 278913 - RNA, 19 nt, Artificial Sequence
  Description of Artificial Sequence: Synthetic oligonucleotide
  Antisense strand to SEQ ID NO: 278912
agacauaacucacucauuc

SEQ ID NO: 278914 - RNA, 19 nt, Artificial Sequence
  Description of Artificial Sequence: Synthetic oligonucleotide
  Sense strand starting at position 662 of SEQ ID NO: 3583
gaguuaugucuuguguguu

SEQ ID NO: 278915 - RNA, 19 nt, Artificial Sequence
  Description of Artificial Sequence: Synthetic oligonucleotide
  Antisense strand to SEQ ID NO: 278914
aacacacaagacauaacuc

SEQ ID NO: 278916 - RNA, 19 nt, Artificial Sequence
  Description of Artificial Sequence: Synthetic oligonucleotide
  Sense strand starting at position 674 of SEQ ID NO: 3583
guguguucacccguccaua

SEQ ID NO: 278917 - RNA, 19 nt, Artificial Sequence
  Description of Artificial Sequence: Synthetic oligonucleotide
  Antisense strand to SEQ ID NO: 278916
uauggacgggugaacacac

SEQ ID NO: 278918 - RNA, 19 nt, Artificial Sequence
  Description of Artificial Sequence: Synthetic oligonucleotide
  Sense strand starting at position 692 of SEQ ID NO: 3583
acccacaugcgugaacaua

SEQ ID NO: 278919 - RNA, 19 nt, Artificial Sequence
  Description of Artificial Sequence: Synthetic oligonucleotide
  Antisense strand to SEQ ID NO: 278918
uauguucacgcaugugggu

SEQ ID NO: 278920 - RNA, 19 nt, Artificial Sequence
  Description of Artificial Sequence: Synthetic oligonucleotide
  Sense strand starting at position 702 of SEQ ID NO: 3583
gugaacauaccauguuacu

SEQ ID NO: 278921 - RNA, 19 nt, Artificial Sequence
  Description of Artificial Sequence: Synthetic oligonucleotide
  Antisense strand to SEQ ID NO: 278920
aguaacaugguauguucac

SEQ ID NO: 278922 - RNA, 19 nt, Artificial Sequence
  Description of Artificial Sequence: Synthetic oligonucleotide
  Sense strand starting at position 708 of SEQ ID NO: 3583
auaccauguuacuagauuu

SEQ ID NO: 278923 - RNA, 19 nt, Artificial Sequence
  Description of Artificial Sequence: Synthetic oligonucleotide
  Antisense strand to SEQ ID NO: 278922
aaaucuaguaacaugguau

SEQ ID NO: 278924 - RNA, 19 nt, Artificial Sequence
  Description of Artificial Sequence: Synthetic oligonucleotide
  Sense strand starting at position 774 of SEQ ID NO: 3583
gcucuucggacacaguaaa

SEQ ID NO: 278925 - RNA, 19 nt, Artificial Sequence
  Description of Artificial Sequence: Synthetic oligonucleotide
  Antisense strand to SEQ ID NO: 278924
uuuacuguguccgaagagc

SEQ ID NO: 278926 - RNA, 19 nt, Artificial Sequence
  Description of Artificial Sequence: Synthetic oligonucleotide
  Sense strand starting at position 874 of SEQ ID NO: 3583
gugacacuauaguuugaag

SEQ ID NO: 278927 - RNA, 19 nt, Artificial Sequence
  Description of Artificial Sequence: Synthetic oligonucleotide
  Antisense strand to SEQ ID NO: 278926
cuucaaacuauagugucac

SEQ ID NO: 278928 - RNA, 19 nt, Artificial Sequence
  Description of Artificial Sequence: Synthetic oligonucleotide
  Sense strand starting at position 876 of SEQ ID NO: 3583
gacacuauaguuugaagcu

SEQ ID NO: 278929 - RNA, 19 nt, Artificial Sequence
  Description of Artificial Sequence: Synthetic oligonucleotide
  Antisense strand to SEQ ID NO: 278928
agcuucaaacuauaguguc

SEQ ID NO: 278930 - RNA, 19 nt, Artificial Sequence
  Description of Artificial Sequence: Synthetic oligonucleotide
  Sense strand starting at position 928 of SEQ ID NO: 3583
guaaucucuuaaucugagu

SEQ ID NO: 278931 - RNA, 19 nt, Artificial Sequence
  Description of Artificial Sequence: Synthetic oligonucleotide
  Antisense strand to SEQ ID NO: 278930
acucagauuaagagauuac

SEQ ID NO: 278932 - RNA, 19 nt, Artificial Sequence
  Description of Artificial Sequence: Synthetic oligonucleotide
  Sense strand starting at position 1097 of SEQ ID NO: 3583
agacguuaagcucaagaau

SEQ ID NO: 278933 - RNA, 19 nt, Artificial Sequence
  Description of Artificial Sequence: Synthetic oligonucleotide
  Antisense strand to SEQ ID NO: 278932
auucuugagcuuaacgucu

SEQ ID NO: 278934 - RNA, 19 nt, Artificial Sequence
  Description of Artificial Sequence: Synthetic oligonucleotide
  Sense strand starting at position 1100 of SEQ ID NO: 3583
cguuaagcucaagaaugag

SEQ ID NO: 278935 - RNA, 19 nt, Artificial Sequence
  Description of Artificial Sequence: Synthetic oligonucleotide
  Antisense strand to SEQ ID NO: 278934
cucauucuugagcuuaacg

SEQ ID NO: 278936 - RNA, 19 nt, Artificial Sequence
  Description of Artificial Sequence: Synthetic oligonucleotide
  Sense strand starting at position 1110 of SEQ ID NO: 3583
aagaaugaggucugacuuu

SEQ ID NO: 278937 - RNA, 19 nt, Artificial Sequence
  Description of Artificial Sequence: Synthetic oligonucleotide
  Antisense strand to SEQ ID NO: 278936
aaagucagaccucauucuu

SEQ ID NO: 278938 - RNA, 19 nt, Artificial Sequence
  Description of Artificial Sequence: Synthetic oligonucleotide
  Sense strand starting at position 1479 of SEQ ID NO: 3583
gacguagagggaugguaaa

SEQ ID NO: 278939 - RNA, 19 nt, Artificial Sequence
  Description of Artificial Sequence: Synthetic oligonucleotide
  Antisense strand to SEQ ID NO: 278938
uuuaccaucccucuacguc

SEQ ID NO: 278940 - RNA, 19 nt, Artificial Sequence
  Description of Artificial Sequence: Synthetic oligonucleotide
  Sense strand starting at position 1502 of SEQ ID NO: 3583
cgggaagucccguaggaaa

SEQ ID NO: 278941 - RNA, 19 nt, Artificial Sequence
  Description of Artificial Sequence: Synthetic oligonucleotide
  Antisense strand to SEQ ID NO: 278940
uuuccuacgggacuucccg

SEQ ID NO: 278942 - RNA, 19 nt, Artificial Sequence
  Description of Artificial Sequence: Synthetic oligonucleotide
  Sense strand starting at position 1694 of SEQ ID NO: 3583
cacacuuacguggagaguu

SEQ ID NO: 278943 - RNA, 19 nt, Artificial Sequence
  Description of Artificial Sequence: Synthetic oligonucleotide
  Antisense strand to SEQ ID NO: 278942
aacucuccacguaagugug

SEQ ID NO: 278944 - RNA, 19 nt, Artificial Sequence
  Description of Artificial Sequence: Synthetic oligonucleotide
  Sense strand starting at position 1707 of SEQ ID NO: 3583
agaguuuccugguccagaa

SEQ ID NO: 278945 - RNA, 19 nt, Artificial Sequence
  Description of Artificial Sequence: Synthetic oligonucleotide
  Antisense strand to SEQ ID NO: 278944
uucuggaccaggaaacucu

SEQ ID NO: 278946 - RNA, 19 nt, Artificial Sequence
  Description of Artificial Sequence: Synthetic oligonucleotide
  Sense strand starting at position 1709 of SEQ ID NO: 3583
aguuuccugguccagaaga

SEQ ID NO: 278947 - RNA, 19 nt, Artificial Sequence
  Description of Artificial Sequence: Synthetic oligonucleotide
  Antisense strand to SEQ ID NO: 278946
ucuucuggaccaggaaacu

SEQ ID NO: 278948 - RNA, 19 nt, Artificial Sequence
  Description of Artificial Sequence: Synthetic oligonucleotide
  Sense strand starting at position 2642 of SEQ ID NO: 3583
guauucuggccgccaucau

SEQ ID NO: 278949 - RNA, 19 nt, Artificial Sequence
  Description of Artificial Sequence: Synthetic oligonucleotide
  Antisense strand to SEQ ID NO: 278948
augauggcggccagaauac

SEQ ID NO: 278950 - RNA, 19 nt, Artificial Sequence
  Description of Artificial Sequence: Synthetic oligonucleotide
  Sense strand starting at position 2675 of SEQ ID NO: 3583
uaguuacucgcugaacaaa

SEQ ID NO: 278951 - RNA, 19 nt, Artificial Sequence
  Description of Artificial Sequence: Synthetic oligonucleotide
  Antisense strand to SEQ ID NO: 278950
uuuguucagcgaguaacua

SEQ ID NO: 278952 - RNA, 19 nt, Artificial Sequence
  Description of Artificial Sequence: Synthetic oligonucleotide
  Sense strand starting at position 2685 of SEQ ID NO: 3583
cugaacaaaugcuauuuga

SEQ ID NO: 278953 - RNA, 19 nt, Artificial Sequence
  Description of Artificial Sequence: Synthetic oligonucleotide
  Antisense strand to SEQ ID NO: 278952
ucaaauagcauuuguucag

SEQ ID NO: 278954 - RNA, 19 nt, Artificial Sequence
  Description of Artificial Sequence: Synthetic oligonucleotide
  Sense strand starting at position 2716 of SEQ ID NO: 3583
uguguaaggcgcucaguuu

SEQ ID NO: 278955 - RNA, 19 nt, Artificial Sequence
  Description of Artificial Sequence: Synthetic oligonucleotide
  Antisense strand to SEQ ID NO: 278954
aaacugagcgccuuacaca

SEQ ID NO: 278956 - RNA, 19 nt, Artificial Sequence
  Description of Artificial Sequence: Synthetic oligonucleotide
  Sense strand starting at position 2747 of SEQ ID NO: 3583
uagaaaguuuaaccugguu

SEQ ID NO: 278957 - RNA, 19 nt, Artificial Sequence
  Description of Artificial Sequence: Synthetic oligonucleotide
  Antisense strand to SEQ ID NO: 278956
aaccagguuaaacuuucua

SEQ ID NO: 278958 - RNA, 19 nt, Artificial Sequence
  Description of Artificial Sequence: Synthetic oligonucleotide
  Sense strand starting at position 2782 of SEQ ID NO: 3583
cuuagucuagcagagauaa

SEQ ID NO: 278959 - RNA, 19 nt, Artificial Sequence
  Description of Artificial Sequence: Synthetic oligonucleotide
  Antisense strand to SEQ ID NO: 278958
uuaucucugcuagacuaag

SEQ ID NO: 278960 - RNA, 19 nt, Artificial Sequence
  Description of Artificial Sequence: Synthetic oligonucleotide
  Sense strand starting at position 2824 of SEQ ID NO: 3583
ucuuaauugcuagauaagu

SEQ ID NO: 278961 - RNA, 19 nt, Artificial Sequence
  Description of Artificial Sequence: Synthetic oligonucleotide
  Antisense strand to SEQ ID NO: 278960
acuuaucuagcaauuaaga

SEQ ID NO: 278962 - RNA, 19 nt, Artificial Sequence
  Description of Artificial Sequence: Synthetic oligonucleotide
  Sense strand starting at position 2931 of SEQ ID NO: 3583
uaugaagguugagugcaaa

SEQ ID NO: 278963 - RNA, 19 nt, Artificial Sequence
  Description of Artificial Sequence: Synthetic oligonucleotide
  Antisense strand to SEQ ID NO: 278962
uuugcacucaaccuucaua

SEQ ID NO: 278964 - RNA, 19 nt, Artificial Sequence
  Description of Artificial Sequence: Synthetic oligonucleotide
  Sense strand starting at position 2934 of SEQ ID NO: 3583
gaagguugagugcaaaguu

SEQ ID NO: 278965 - RNA, 19 nt, Artificial Sequence
  Description of Artificial Sequence: Synthetic oligonucleotide
  Antisense strand to SEQ ID NO: 278964
aacuuugcacucaaccuuc

SEQ ID NO: 278966 - RNA, 19 nt, Artificial Sequence
  Description of Artificial Sequence: Synthetic oligonucleotide
  Sense strand starting at position 3141 of SEQ ID NO: 3583
auagcagugggaugauaua

SEQ ID NO: 278967 - RNA, 19 nt, Artificial Sequence
  Description of Artificial Sequence: Synthetic oligonucleotide
  Antisense strand to SEQ ID NO: 278966
uauaucaucccacugcuau

SEQ ID NO: 278968 - RNA, 19 nt, Artificial Sequence
  Description of Artificial Sequence: Synthetic oligonucleotide
  Sense strand starting at position 3839 of SEQ ID NO: 3583
cccuuuaaggugugacaua

SEQ ID NO: 278969 - RNA, 19 nt, Artificial Sequence
  Description of Artificial Sequence: Synthetic oligonucleotide
  Antisense strand to SEQ ID NO: 278968
uaugucacaccuuaaaggg

SEQ ID NO: 278970 - RNA, 19 nt, Artificial Sequence
  Description of Artificial Sequence: Synthetic oligonucleotide
  Sense strand starting at position 3853 of SEQ ID NO: 3583
acauaaucauggccuggau

SEQ ID NO: 278971 - RNA, 19 nt, Artificial Sequence
  Description of Artificial Sequence: Synthetic oligonucleotide
  Antisense strand to SEQ ID NO: 278970
auccaggccaugauuaugu

SEQ ID NO: 278972 - RNA, 19 nt, Artificial Sequence
  Description of Artificial Sequence: Synthetic oligonucleotide
  Sense strand starting at position 3866 of SEQ ID NO: 3583
cuggaugucaguugaaauu

SEQ ID NO: 278973 - RNA, 19 nt, Artificial Sequence
  Description of Artificial Sequence: Synthetic oligonucleotide
  Antisense strand to SEQ ID NO: 278972
aauuucaacugacauccag

SEQ ID NO: 278974 - RNA, 19 nt, Artificial Sequence
  Description of Artificial Sequence: Synthetic oligonucleotide
  Sense strand starting at position 3911 of SEQ ID NO: 3583
ggcuuaguaguugacugaa

SEQ ID NO: 278975 - RNA, 19 nt, Artificial Sequence
  Description of Artificial Sequence: Synthetic oligonucleotide
  Antisense strand to SEQ ID NO: 278974
uucagucaacuacuaagcc

SEQ ID NO: 278976 - RNA, 19 nt, Artificial Sequence
  Description of Artificial Sequence: Synthetic oligonucleotide
  Sense strand starting at position 3913 of SEQ ID NO: 3583
cuuaguaguugacugaaag

SEQ ID NO: 278977 - RNA, 19 nt, Artificial Sequence
  Description of Artificial Sequence: Synthetic oligonucleotide
  Antisense strand to SEQ ID NO: 278976
cuuucagucaacuacuaag

SEQ ID NO: 278978 - RNA, 19 nt, Artificial Sequence
  Description of Artificial Sequence: Synthetic oligonucleotide
  Sense strand starting at position 3914 of SEQ ID NO: 3583
uuaguaguugacugaaagu

SEQ ID NO: 278979 - RNA, 19 nt, Artificial Sequence
  Description of Artificial Sequence: Synthetic oligonucleotide
  Antisense strand to SEQ ID NO: 278978
acuuucagucaacuacuaa

SEQ ID NO: 278980 - RNA, 19 nt, Artificial Sequence
  Description of Artificial Sequence: Synthetic oligonucleotide
  Sense strand starting at position 277 of SEQ ID NO: 3584
ugaacaaucugguuugaaa

SEQ ID NO: 278981 - RNA, 19 nt, Artificial Sequence
  Description of Artificial Sequence: Synthetic oligonucleotide
  Antisense strand to SEQ ID NO: 278980
uuucaaaccagauuguuca

SEQ ID NO: 278982 - RNA, 19 nt, Artificial Sequence
  Description of Artificial Sequence: Synthetic oligonucleotide
  Sense strand starting at position 571 of SEQ ID NO: 3584
aucauuggcccaugacuga

SEQ ID NO: 278983 - RNA, 19 nt, Artificial Sequence
  Description of Artificial Sequence: Synthetic oligonucleotide
  Antisense strand to SEQ ID NO: 278982
ucagucaugggccaaugau

SEQ ID NO: 278984 - RNA, 19 nt, Artificial Sequence
  Description of Artificial Sequence: Synthetic oligonucleotide
  Sense strand starting at position 652 of SEQ ID NO: 3584
uaaugugacgguuaguauu

SEQ ID NO: 278985 - RNA, 19 nt, Artificial Sequence
  Description of Artificial Sequence: Synthetic oligonucleotide
  Antisense strand to SEQ ID NO: 278984
aauacuaaccgucacauua

SEQ ID NO: 278986 - RNA, 19 nt, Artificial Sequence
  Description of Artificial Sequence: Synthetic oligonucleotide
  Sense strand starting at position 726 of SEQ ID NO: 3584
ugugauugcacagacagau

SEQ ID NO: 278987 - RNA, 19 nt, Artificial Sequence
  Description of Artificial Sequence: Synthetic oligonucleotide
  Antisense strand to SEQ ID NO: 278986
aucugucugugcaaucaca

SEQ ID NO: 278988 - RNA, 19 nt, Artificial Sequence
  Description of Artificial Sequence: Synthetic oligonucleotide
  Sense strand starting at position 739 of SEQ ID NO: 3584
acagauacuuccuccagua

SEQ ID NO: 278989 - RNA, 19 nt, Artificial Sequence
  Description of Artificial Sequence: Synthetic oligonucleotide
  Antisense strand to SEQ ID NO: 278988
uacuggaggaaguaucugu

SEQ ID NO: 278990 - RNA, 19 nt, Artificial Sequence
  Description of Artificial Sequence: Synthetic oligonucleotide
  Sense strand starting at position 741 of SEQ ID NO: 3584
agauacuuccuccaguagu

SEQ ID NO: 278991 - RNA, 19 nt, Artificial Sequence
  Description of Artificial Sequence: Synthetic oligonucleotide
  Antisense strand to SEQ ID NO: 278990
acuacuggaggaaguaucu

SEQ ID NO: 278992 - RNA, 19 nt, Artificial Sequence
  Description of Artificial Sequence: Synthetic oligonucleotide
  Sense strand starting at position 870 of SEQ ID NO: 3584
uuuguuucucaugaccuua

SEQ ID NO: 278993 - RNA, 19 nt, Artificial Sequence
  Description of Artificial Sequence: Synthetic oligonucleotide
  Antisense strand to SEQ ID NO: 278992
uaaggucaugagaaacaaa

SEQ ID NO: 278994 - RNA, 19 nt, Artificial Sequence
  Description of Artificial Sequence: Synthetic oligonucleotide
  Sense strand starting at position 1130 of SEQ ID NO: 3584
uucggaugguuauuaccaa

SEQ ID NO: 278995 - RNA, 19 nt, Artificial Sequence
  Description of Artificial Sequence: Synthetic oligonucleotide
  Antisense strand to SEQ ID NO: 278994
uugguaauaaccauccgaa

SEQ ID NO: 278996 - RNA, 19 nt, Artificial Sequence
  Description of Artificial Sequence: Synthetic oligonucleotide
  Sense strand starting at position 1147 of SEQ ID NO: 3584
aacucuagucugcagauga

SEQ ID NO: 278997 - RNA, 19 nt, Artificial Sequence
  Description of Artificial Sequence: Synthetic oligonucleotide
  Antisense strand to SEQ ID NO: 278996
ucaucugcagacuagaguu

SEQ ID NO: 278998 - RNA, 19 nt, Artificial Sequence
  Description of Artificial Sequence: Synthetic oligonucleotide
  Sense strand starting at position 1151 of SEQ ID NO: 3584
cuagucugcagaugaggaa

SEQ ID NO: 278999 - RNA, 19 nt, Artificial Sequence
  Description of Artificial Sequence: Synthetic oligonucleotide
  Antisense strand to SEQ ID NO: 278998
uuccucaucugcagacuag

SEQ ID NO: 279000 - RNA, 19 nt, Artificial Sequence
  Description of Artificial Sequence: Synthetic oligonucleotide
  Sense strand starting at position 1164 of SEQ ID NO: 3584
gaggaaaucugucuauuau

SEQ ID NO: 279001 - RNA, 19 nt, Artificial Sequence
  Description of Artificial Sequence: Synthetic oligonucleotide
  Antisense strand to SEQ ID NO: 279000
auaauagacagauuuccuc

SEQ ID NO: 279002 - RNA, 19 nt, Artificial Sequence
  Description of Artificial Sequence: Synthetic oligonucleotide
  Sense strand starting at position 1277 of SEQ ID NO: 3584
acuguuuguacugagugaa

SEQ ID NO: 279003 - RNA, 19 nt, Artificial Sequence
  Description of Artificial Sequence: Synthetic oligonucleotide
  Antisense strand to SEQ ID NO: 279002
uucacucaguacaaacagu

SEQ ID NO: 279004 - RNA, 19 nt, Artificial Sequence
  Description of Artificial Sequence: Synthetic oligonucleotide
  Sense strand starting at position 1499 of SEQ ID NO: 3584
augaguaauggcggauaau

SEQ ID NO: 279005 - RNA, 19 nt, Artificial Sequence
  Description of Artificial Sequence: Synthetic oligonucleotide
  Antisense strand to SEQ ID NO: 279004
auuauccgccauuacucau

SEQ ID NO: 279006 - RNA, 19 nt, Artificial Sequence
  Description of Artificial Sequence: Synthetic oligonucleotide
  Sense strand starting at position 1500 of SEQ ID NO: 3584
ugaguaauggcggauaauu

SEQ ID NO: 279007 - RNA, 19 nt, Artificial Sequence
  Description of Artificial Sequence: Synthetic oligonucleotide
  Antisense strand to SEQ ID NO: 279006
aauuauccgccauuacuca

SEQ ID NO: 279008 - RNA, 19 nt, Artificial Sequence
  Description of Artificial Sequence: Synthetic oligonucleotide
  Sense strand starting at position 1619 of SEQ ID NO: 3584
gcaagcaaccaauaaguau

SEQ ID NO: 279009 - RNA, 19 nt, Artificial Sequence
  Description of Artificial Sequence: Synthetic oligonucleotide
  Antisense strand to SEQ ID NO: 279008
auacuuauugguugcuugc

SEQ ID NO: 279010 - RNA, 19 nt, Artificial Sequence
  Description of Artificial Sequence: Synthetic oligonucleotide
  Sense strand starting at position 1653 of SEQ ID NO: 3584
augcguugcgaauccuauu

SEQ ID NO: 279011 - RNA, 19 nt, Artificial Sequence
  Description of Artificial Sequence: Synthetic oligonucleotide
  Antisense strand to SEQ ID NO: 279010
aauaggauucgcaacgcau

SEQ ID NO: 279012 - RNA, 19 nt, Artificial Sequence
  Description of Artificial Sequence: Synthetic oligonucleotide
  Sense strand starting at position 2077 of SEQ ID NO: 3584
aagcucaugguuugaaaga

SEQ ID NO: 279013 - RNA, 19 nt, Artificial Sequence
  Description of Artificial Sequence: Synthetic oligonucleotide
  Antisense strand to SEQ ID NO: 279012
ucuuucaaaccaugagcuu

SEQ ID NO: 279014 - RNA, 19 nt, Artificial Sequence
  Description of Artificial Sequence: Synthetic oligonucleotide
  Sense strand starting at position 2090 of SEQ ID NO: 3584
gaaagacuucgucacggaa

SEQ ID NO: 279015 - RNA, 19 nt, Artificial Sequence
  Description of Artificial Sequence: Synthetic oligonucleotide
  Antisense strand to SEQ ID NO: 279014
uuccgugacgaagucuuuc

SEQ ID NO: 279016 - RNA, 19 nt, Artificial Sequence
  Description of Artificial Sequence: Synthetic oligonucleotide
  Sense strand starting at position 2126 of SEQ ID NO: 3584
cccgauuugccucggagga

SEQ ID NO: 279017 - RNA, 19 nt, Artificial Sequence
  Description of Artificial Sequence: Synthetic oligonucleotide
  Antisense strand to SEQ ID NO: 279016
uccuccgaggcaaaucggg

SEQ ID NO: 279018 - RNA, 19 nt, Artificial Sequence
  Description of Artificial Sequence: Synthetic oligonucleotide
  Sense strand starting at position 2127 of SEQ ID NO: 3584
ccgauuugccucggaggaa

SEQ ID NO: 279019 - RNA, 19 nt, Artificial Sequence
  Description of Artificial Sequence: Synthetic oligonucleotide
  Antisense strand to SEQ ID NO: 279018
uuccuccgaggcaaaucgg

SEQ ID NO: 279020 - RNA, 19 nt, Artificial Sequence
  Description of Artificial Sequence: Synthetic oligonucleotide
  Sense strand starting at position 2210 of SEQ ID NO: 3584
cagagagucguacaacuau

SEQ ID NO: 279021 - RNA, 19 nt, Artificial Sequence
  Description of Artificial Sequence: Synthetic oligonucleotide
  Antisense strand to SEQ ID NO: 279020
auaguuguacgacucucug

SEQ ID NO: 279022 - RNA, 19 nt, Artificial Sequence
  Description of Artificial Sequence: Synthetic oligonucleotide
  Sense strand starting at position 2251 of SEQ ID NO: 3584
ugaucucauccacguaaau

SEQ ID NO: 279023 - RNA, 19 nt, Artificial Sequence
  Description of Artificial Sequence: Synthetic oligonucleotide
  Antisense strand to SEQ ID NO: 279022
auuuacguggaugagauca

SEQ ID NO: 279024 - RNA, 19 nt, Artificial Sequence
  Description of Artificial Sequence: Synthetic oligonucleotide
  Sense strand starting at position 2264 of SEQ ID NO: 3584
guaaaugucguuccugcga

SEQ ID NO: 279025 - RNA, 19 nt, Artificial Sequence
  Description of Artificial Sequence: Synthetic oligonucleotide
  Antisense strand to SEQ ID NO: 279024
ucgcaggaacgacauuuac

SEQ ID NO: 279026 - RNA, 19 nt, Artificial Sequence
  Description of Artificial Sequence: Synthetic oligonucleotide
  Sense strand starting at position 2303 of SEQ ID NO: 3584
acguugaaucgcgugguga

SEQ ID NO: 279027 - RNA, 19 nt, Artificial Sequence
  Description of Artificial Sequence: Synthetic oligonucleotide
  Antisense strand to SEQ ID NO: 279026
ucaccacgcgauucaacgu

SEQ ID NO: 279028 - RNA, 19 nt, Artificial Sequence
  Description of Artificial Sequence: Synthetic oligonucleotide
  Sense strand starting at position 2326 of SEQ ID NO: 3584
gggcuugagguugaauuaa

SEQ ID NO: 279029 - RNA, 19 nt, Artificial Sequence
  Description of Artificial Sequence: Synthetic oligonucleotide
  Antisense strand to SEQ ID NO: 279028
uuaauucaaccucaagccc

SEQ ID NO: 279030 - RNA, 19 nt, Artificial Sequence
  Description of Artificial Sequence: Synthetic oligonucleotide
  Sense strand starting at position 2344 of SEQ ID NO: 3584
agaauagucagguggugag

SEQ ID NO: 279031 - RNA, 19 nt, Artificial Sequence
  Description of Artificial Sequence: Synthetic oligonucleotide
  Antisense strand to SEQ ID NO: 279030
cucaccaccugacuauucu

SEQ ID NO: 279032 - RNA, 19 nt, Artificial Sequence
  Description of Artificial Sequence: Synthetic oligonucleotide
  Sense strand starting at position 2402 of SEQ ID NO: 3584
ggaggauguugaucuccaa

SEQ ID NO: 279033 - RNA, 19 nt, Artificial Sequence
  Description of Artificial Sequence: Synthetic oligonucleotide
  Antisense strand to SEQ ID NO: 279032
uuggagaucaacauccucc

SEQ ID NO: 279034 - RNA, 19 nt, Artificial Sequence
  Description of Artificial Sequence: Synthetic oligonucleotide
  Sense strand starting at position 2405 of SEQ ID NO: 3584
ggauguugaucuccaagaa

SEQ ID NO: 279035 - RNA, 19 nt, Artificial Sequence
  Description of Artificial Sequence: Synthetic oligonucleotide
  Antisense strand to SEQ ID NO: 279034
uucuuggagaucaacaucc

SEQ ID NO: 279036 - RNA, 19 nt, Artificial Sequence
  Description of Artificial Sequence: Synthetic oligonucleotide
  Sense strand starting at position 2469 of SEQ ID NO: 3584
ggcugaagagcucaaguaa

SEQ ID NO: 279037 - RNA, 19 nt, Artificial Sequence
  Description of Artificial Sequence: Synthetic oligonucleotide
  Antisense strand to SEQ ID NO: 279036
uuacuugagcucuucagcc

SEQ ID NO: 279038 - RNA, 19 nt, Artificial Sequence
  Description of Artificial Sequence: Synthetic oligonucleotide
  Sense strand starting at position 2646 of SEQ ID NO: 3584
guggacugccuggauaaga

SEQ ID NO: 279039 - RNA, 19 nt, Artificial Sequence
  Description of Artificial Sequence: Synthetic oligonucleotide
  Antisense strand to SEQ ID NO: 279038
ucuuauccaggcaguccac

SEQ ID NO: 279040 - RNA, 19 nt, Artificial Sequence
  Description of Artificial Sequence: Synthetic oligonucleotide
  Sense strand starting at position 2729 of SEQ ID NO: 3584
uggucugcagcguuaucau

SEQ ID NO: 279041 - RNA, 19 nt, Artificial Sequence
  Description of Artificial Sequence: Synthetic oligonucleotide
  Antisense strand to SEQ ID NO: 279040
augauaacgcugcagacca

SEQ ID NO: 279042 - RNA, 19 nt, Artificial Sequence
  Description of Artificial Sequence: Synthetic oligonucleotide
  Sense strand starting at position 2789 of SEQ ID NO: 3584
accauaguguaccugacau

SEQ ID NO: 279043 - RNA, 19 nt, Artificial Sequence
  Description of Artificial Sequence: Synthetic oligonucleotide
  Antisense strand to SEQ ID NO: 279042
augucagguacacuauggu

SEQ ID NO: 279044 - RNA, 19 nt, Artificial Sequence
  Description of Artificial Sequence: Synthetic oligonucleotide
  Sense strand starting at position 2796 of SEQ ID NO: 3584
uguaccugacaugguuaau

SEQ ID NO: 279045 - RNA, 19 nt, Artificial Sequence
  Description of Artificial Sequence: Synthetic oligonucleotide
  Antisense strand to SEQ ID NO: 279044
auuaaccaugucagguaca

SEQ ID NO: 279046 - RNA, 19 nt, Artificial Sequence
  Description of Artificial Sequence: Synthetic oligonucleotide
  Sense strand starting at position 2863 of SEQ ID NO: 3584
gugucaguucaggcguuaa

SEQ ID NO: 279047 - RNA, 19 nt, Artificial Sequence
  Description of Artificial Sequence: Synthetic oligonucleotide
  Antisense strand to SEQ ID NO: 279046
uuaacgccugaacugacac

SEQ ID NO: 279048 - RNA, 19 nt, Artificial Sequence
  Description of Artificial Sequence: Synthetic oligonucleotide
  Sense strand starting at position 2920 of SEQ ID NO: 3584
uuguuaaaucaagggaacu

SEQ ID NO: 279049 - RNA, 19 nt, Artificial Sequence
  Description of Artificial Sequence: Synthetic oligonucleotide
  Antisense strand to SEQ ID NO: 279048
aguucccuugauuuaacaa

SEQ ID NO: 279050 - RNA, 19 nt, Artificial Sequence
  Description of Artificial Sequence: Synthetic oligonucleotide
  Sense strand starting at position 2931 of SEQ ID NO: 3584
agggaacucucuuuagucu

SEQ ID NO: 279051 - RNA, 19 nt, Artificial Sequence
  Description of Artificial Sequence: Synthetic oligonucleotide
  Antisense strand to SEQ ID NO: 279050
agacuaaagagaguucccu

SEQ ID NO: 279052 - RNA, 19 nt, Artificial Sequence
  Description of Artificial Sequence: Synthetic oligonucleotide
  Sense strand starting at position 2932 of SEQ ID NO: 3584
gggaacucucuuuagucuu

SEQ ID NO: 279053 - RNA, 19 nt, Artificial Sequence
  Description of Artificial Sequence: Synthetic oligonucleotide
  Antisense strand to SEQ ID NO: 279052
aagacuaaagagaguuccc

SEQ ID NO: 279054 - RNA, 19 nt, Artificial Sequence
  Description of Artificial Sequence: Synthetic oligonucleotide
  Sense strand starting at position 3238 of SEQ ID NO: 3584
gguaaauauugucccuaga

SEQ ID NO: 279055 - RNA, 19 nt, Artificial Sequence
  Description of Artificial Sequence: Synthetic oligonucleotide
  Antisense strand to SEQ ID NO: 279054
ucuagggacaauauuuacc

SEQ ID NO: 279056 - RNA, 19 nt, Artificial Sequence
  Description of Artificial Sequence: Synthetic oligonucleotide
  Sense strand starting at position 3408 of SEQ ID NO: 3584
ggccuaaaugcauaucaga

SEQ ID NO: 279057 - RNA, 19 nt, Artificial Sequence
  Description of Artificial Sequence: Synthetic oligonucleotide
  Antisense strand to SEQ ID NO: 279056
ucugauaugcauuuaggcc

SEQ ID NO: 279058 - RNA, 19 nt, Artificial Sequence
  Description of Artificial Sequence: Synthetic oligonucleotide
  Sense strand starting at position 3889 of SEQ ID NO: 3584
gucuauuuguucuuagucu

SEQ ID NO: 279059 - RNA, 19 nt, Artificial Sequence
  Description of Artificial Sequence: Synthetic oligonucleotide
  Antisense strand to SEQ ID NO: 279058
agacuaagaacaaauagac

SEQ ID NO: 279060 - RNA, 19 nt, Artificial Sequence
  Description of Artificial Sequence: Synthetic oligonucleotide
  Sense strand starting at position 31 of SEQ ID NO: 3585
cccacaaucccauggugau

SEQ ID NO: 279061 - RNA, 19 nt, Artificial Sequence
  Description of Artificial Sequence: Synthetic oligonucleotide
  Antisense strand to SEQ ID NO: 279060
aucaccaugggauuguggg

SEQ ID NO: 279062 - RNA, 19 nt, Artificial Sequence
  Description of Artificial Sequence: Synthetic oligonucleotide
  Sense strand starting at position 32 of SEQ ID NO: 3585
ccacaaucccauggugauu

SEQ ID NO: 279063 - RNA, 19 nt, Artificial Sequence
  Description of Artificial Sequence: Synthetic oligonucleotide
  Antisense strand to SEQ ID NO: 279062
aaucaccaugggauugugg

SEQ ID NO: 279064 - RNA, 19 nt, Artificial Sequence
  Description of Artificial Sequence: Synthetic oligonucleotide
  Sense strand starting at position 379 of SEQ ID NO: 3585
uugccucuuguauauaaga

SEQ ID NO: 279065 - RNA, 19 nt, Artificial Sequence
  Description of Artificial Sequence: Synthetic oligonucleotide
  Antisense strand to SEQ ID NO: 279064
ucuuauauacaagaggcaa

SEQ ID NO: 279066 - RNA, 19 nt, Artificial Sequence
  Description of Artificial Sequence: Synthetic oligonucleotide
  Sense strand starting at position 464 of SEQ ID NO: 3585
accagaguucuauaacgau

SEQ ID NO: 279067 - RNA, 19 nt, Artificial Sequence
  Description of Artificial Sequence: Synthetic oligonucleotide
  Antisense strand to SEQ ID NO: 279066
aucguuauagaacucuggu

SEQ ID NO: 279068 - RNA, 19 nt, Artificial Sequence
  Description of Artificial Sequence: Synthetic oligonucleotide
  Sense strand starting at position 551 of SEQ ID NO: 3585
cagguuuaaguguaucuua

SEQ ID NO: 279069 - RNA, 19 nt, Artificial Sequence
  Description of Artificial Sequence: Synthetic oligonucleotide
  Antisense strand to SEQ ID NO: 279068
uaagauacacuuaaaccug

SEQ ID NO: 279070 - RNA, 19 nt, Artificial Sequence
  Description of Artificial Sequence: Synthetic oligonucleotide
  Sense strand starting at position 596 of SEQ ID NO: 3585
uuagucaauguaugacaca

SEQ ID NO: 279071 - RNA, 19 nt, Artificial Sequence
  Description of Artificial Sequence: Synthetic oligonucleotide
  Antisense strand to SEQ ID NO: 279070
ugugucauacauugacuaa

SEQ ID NO: 279072 - RNA, 19 nt, Artificial Sequence
  Description of Artificial Sequence: Synthetic oligonucleotide
  Sense strand starting at position 666 of SEQ ID NO: 3585
augaaacaucuuggucaug

SEQ ID NO: 279073 - RNA, 19 nt, Artificial Sequence
  Description of Artificial Sequence: Synthetic oligonucleotide
  Antisense strand to SEQ ID NO: 279072
caugaccaagauguuucau

SEQ ID NO: 279074 - RNA, 19 nt, Artificial Sequence
  Description of Artificial Sequence: Synthetic oligonucleotide
  Sense strand starting at position 667 of SEQ ID NO: 3585
ugaaacaucuuggucaugu

SEQ ID NO: 279075 - RNA, 19 nt, Artificial Sequence
  Description of Artificial Sequence: Synthetic oligonucleotide
  Antisense strand to SEQ ID NO: 279074
acaugaccaagauguuuca

SEQ ID NO: 279076 - RNA, 19 nt, Artificial Sequence
  Description of Artificial Sequence: Synthetic oligonucleotide
  Sense strand starting at position 668 of SEQ ID NO: 3585
gaaacaucuuggucauguu

SEQ ID NO: 279077 - RNA, 19 nt, Artificial Sequence
  Description of Artificial Sequence: Synthetic oligonucleotide
  Antisense strand to SEQ ID NO: 279076
aacaugaccaagauguuuc

SEQ ID NO: 279078 - RNA, 19 nt, Artificial Sequence
  Description of Artificial Sequence: Synthetic oligonucleotide
  Sense strand starting at position 708 of SEQ ID NO: 3585
uggcaccuagccuagaaau

SEQ ID NO: 279079 - RNA, 19 nt, Artificial Sequence
  Description of Artificial Sequence: Synthetic oligonucleotide
  Antisense strand to SEQ ID NO: 279078
auuucuaggcuaggugcca

SEQ ID NO: 279080 - RNA, 19 nt, Artificial Sequence
  Description of Artificial Sequence: Synthetic oligonucleotide
  Sense strand starting at position 741 of SEQ ID NO: 3585
aaugucucugguuaugacu

SEQ ID NO: 279081 - RNA, 19 nt, Artificial Sequence
  Description of Artificial Sequence: Synthetic oligonucleotide
  Antisense strand to SEQ ID NO: 279080
agucauaaccagagacauu

SEQ ID NO: 279082 - RNA, 19 nt, Artificial Sequence
  Description of Artificial Sequence: Synthetic oligonucleotide
  Sense strand starting at position 875 of SEQ ID NO: 3585
uugaauucucacggugaaa

SEQ ID NO: 279083 - RNA, 19 nt, Artificial Sequence
  Description of Artificial Sequence: Synthetic oligonucleotide
  Antisense strand to SEQ ID NO: 279082
uuucaccgugagaauucaa

SEQ ID NO: 279084 - RNA, 19 nt, Artificial Sequence
  Description of Artificial Sequence: Synthetic oligonucleotide
  Sense strand starting at position 949 of SEQ ID NO: 3585
agagaaauaccuugauucg

SEQ ID NO: 279085 - RNA, 19 nt, Artificial Sequence
  Description of Artificial Sequence: Synthetic oligonucleotide
  Antisense strand to SEQ ID NO: 279084
cgaaucaagguauuucucu

SEQ ID NO: 279086 - RNA, 19 nt, Artificial Sequence
  Description of Artificial Sequence: Synthetic oligonucleotide
  Sense strand starting at position 952 of SEQ ID NO: 3585
gaaauaccuugauucgguu

SEQ ID NO: 279087 - RNA, 19 nt, Artificial Sequence
  Description of Artificial Sequence: Synthetic oligonucleotide
  Antisense strand to SEQ ID NO: 279086
aaccgaaucaagguauuuc

SEQ ID NO: 279088 - RNA, 19 nt, Artificial Sequence
  Description of Artificial Sequence: Synthetic oligonucleotide
  Sense strand starting at position 959 of SEQ ID NO: 3585
cuugauucgguuuaaauuc

SEQ ID NO: 279089 - RNA, 19 nt, Artificial Sequence
  Description of Artificial Sequence: Synthetic oligonucleotide
  Antisense strand to SEQ ID NO: 279088
gaauuuaaaccgaaucaag

SEQ ID NO: 279090 - RNA, 19 nt, Artificial Sequence
  Description of Artificial Sequence: Synthetic oligonucleotide
  Sense strand starting at position 983 of SEQ ID NO: 3585
gcucuugaacugcauaaca

SEQ ID NO: 279091 - RNA, 19 nt, Artificial Sequence
  Description of Artificial Sequence: Synthetic oligonucleotide
  Antisense strand to SEQ ID NO: 279090
uguuaugcaguucaagagc

SEQ ID NO: 279092 - RNA, 19 nt, Artificial Sequence
  Description of Artificial Sequence: Synthetic oligonucleotide
  Sense strand starting at position 1121 of SEQ ID NO: 3585
ugugaaagaucgcccagaa

SEQ ID NO: 279093 - RNA, 19 nt, Artificial Sequence
  Description of Artificial Sequence: Synthetic oligonucleotide
  Antisense strand to SEQ ID NO: 279092
uucugggcgaucuuucaca

SEQ ID NO: 279094 - RNA, 19 nt, Artificial Sequence
  Description of Artificial Sequence: Synthetic oligonucleotide
  Sense strand starting at position 1224 of SEQ ID NO: 3585
gucuccuaacuugaaugua

SEQ ID NO: 279095 - RNA, 19 nt, Artificial Sequence
  Description of Artificial Sequence: Synthetic oligonucleotide
  Antisense strand to SEQ ID NO: 279094
uacauucaaguuaggagac

SEQ ID NO: 279096 - RNA, 19 nt, Artificial Sequence
  Description of Artificial Sequence: Synthetic oligonucleotide
  Sense strand starting at position 1232 of SEQ ID NO: 3585
acuugaauguaugugauuc

SEQ ID NO: 279097 - RNA, 19 nt, Artificial Sequence
  Description of Artificial Sequence: Synthetic oligonucleotide
  Antisense strand to SEQ ID NO: 279096
gaaucacauacauucaagu

SEQ ID NO: 279098 - RNA, 19 nt, Artificial Sequence
  Description of Artificial Sequence: Synthetic oligonucleotide
  Sense strand starting at position 1277 of SEQ ID NO: 3585
ucagauaguggucacaauc

SEQ ID NO: 279099 - RNA, 19 nt, Artificial Sequence
  Description of Artificial Sequence: Synthetic oligonucleotide
  Antisense strand to SEQ ID NO: 279098
gauugugaccacuaucuga

SEQ ID NO: 279100 - RNA, 19 nt, Artificial Sequence
  Description of Artificial Sequence: Synthetic oligonucleotide
  Sense strand starting at position 1474 of SEQ ID NO: 3585
ccaggaugcuggucuaaac

SEQ ID NO: 279101 - RNA, 19 nt, Artificial Sequence
  Description of Artificial Sequence: Synthetic oligonucleotide
  Antisense strand to SEQ ID NO: 279100
guuuagaccagcauccugg

SEQ ID NO: 279102 - RNA, 19 nt, Artificial Sequence
  Description of Artificial Sequence: Synthetic oligonucleotide
  Sense strand starting at position 1594 of SEQ ID NO: 3585
gcguuuguggacgugugaa

SEQ ID NO: 279103 - RNA, 19 nt, Artificial Sequence
  Description of Artificial Sequence: Synthetic oligonucleotide
  Antisense strand to SEQ ID NO: 279102
uucacacguccacaaacgc

SEQ ID NO: 279104 - RNA, 19 nt, Artificial Sequence
  Description of Artificial Sequence: Synthetic oligonucleotide
  Sense strand starting at position 2008 of SEQ ID NO: 3585
ucuugucuuccggagagac

SEQ ID NO: 279105 - RNA, 19 nt, Artificial Sequence
  Description of Artificial Sequence: Synthetic oligonucleotide
  Antisense strand to SEQ ID NO: 279104
gucucuccggaagacaaga

SEQ ID NO: 279106 - RNA, 19 nt, Artificial Sequence
  Description of Artificial Sequence: Synthetic oligonucleotide
  Sense strand starting at position 2280 of SEQ ID NO: 3585
ugggucuuccaggagugau

SEQ ID NO: 279107 - RNA, 19 nt, Artificial Sequence
  Description of Artificial Sequence: Synthetic oligonucleotide
  Antisense strand to SEQ ID NO: 279106
aucacuccuggaagaccca

SEQ ID NO: 279108 - RNA, 19 nt, Artificial Sequence
  Description of Artificial Sequence: Synthetic oligonucleotide
  Sense strand starting at position 2475 of SEQ ID NO: 3585
guguguuaaguagaaauaa

SEQ ID NO: 279109 - RNA, 19 nt, Artificial Sequence
  Description of Artificial Sequence: Synthetic oligonucleotide
  Antisense strand to SEQ ID NO: 279108
uuauuucuacuuaacacac

SEQ ID NO: 279110 - RNA, 19 nt, Artificial Sequence
  Description of Artificial Sequence: Synthetic oligonucleotide
  Sense strand starting at position 2519 of SEQ ID NO: 3585
guucuuugugugguauugu

SEQ ID NO: 279111 - RNA, 19 nt, Artificial Sequence
  Description of Artificial Sequence: Synthetic oligonucleotide
  Antisense strand to SEQ ID NO: 279110
acaauaccacacaaagaac

SEQ ID NO: 279112 - RNA, 19 nt, Artificial Sequence
  Description of Artificial Sequence: Synthetic oligonucleotide
  Sense strand starting at position 2660 of SEQ ID NO: 3585
uugccucuugaaggaagaa

SEQ ID NO: 279113 - RNA, 19 nt, Artificial Sequence
  Description of Artificial Sequence: Synthetic oligonucleotide
  Antisense strand to SEQ ID NO: 279112
uucuuccuucaagaggcaa

SEQ ID NO: 279114 - RNA, 19 nt, Artificial Sequence
  Description of Artificial Sequence: Synthetic oligonucleotide
  Sense strand starting at position 2711 of SEQ ID NO: 3585
cugcauaacccugagcaaa

SEQ ID NO: 279115 - RNA, 19 nt, Artificial Sequence
  Description of Artificial Sequence: Synthetic oligonucleotide
  Antisense strand to SEQ ID NO: 279114
uuugcucaggguuaugcag

SEQ ID NO: 279116 - RNA, 19 nt, Artificial Sequence
  Description of Artificial Sequence: Synthetic oligonucleotide
  Sense strand starting at position 3166 of SEQ ID NO: 3585
aaaguuaagugaguaaaca

SEQ ID NO: 279117 - RNA, 19 nt, Artificial Sequence
  Description of Artificial Sequence: Synthetic oligonucleotide
  Antisense strand to SEQ ID NO: 279116
uguuuacucacuuaacuuu

SEQ ID NO: 279118 - RNA, 19 nt, Artificial Sequence
  Description of Artificial Sequence: Synthetic oligonucleotide
  Sense strand starting at position 3236 of SEQ ID NO: 3585
uuguuuggugaugaugaau

SEQ ID NO: 279119 - RNA, 19 nt, Artificial Sequence
  Description of Artificial Sequence: Synthetic oligonucleotide
  Antisense strand to SEQ ID NO: 279118
auucaucaucaccaaacaa

SEQ ID NO: 279120 - RNA, 19 nt, Artificial Sequence
  Description of Artificial Sequence: Synthetic oligonucleotide
  Sense strand starting at position 3271 of SEQ ID NO: 3585
ugaucauagucugugaaug

SEQ ID NO: 279121 - RNA, 19 nt, Artificial Sequence
  Description of Artificial Sequence: Synthetic oligonucleotide
  Antisense strand to SEQ ID NO: 279120
cauucacagacuaugauca

SEQ ID NO: 279122 - RNA, 19 nt, Artificial Sequence
  Description of Artificial Sequence: Synthetic oligonucleotide
  Sense strand starting at position 3272 of SEQ ID NO: 3585
gaucauagucugugaaugg

SEQ ID NO: 279123 - RNA, 19 nt, Artificial Sequence
  Description of Artificial Sequence: Synthetic oligonucleotide
  Antisense strand to SEQ ID NO: 279122
ccauucacagacuaugauc

SEQ ID NO: 279124 - RNA, 19 nt, Artificial Sequence
  Description of Artificial Sequence: Synthetic oligonucleotide
  Sense strand starting at position 3308 of SEQ ID NO: 3585
guuugaguauucccuauuu

SEQ ID NO: 279125 - RNA, 19 nt, Artificial Sequence
  Description of Artificial Sequence: Synthetic oligonucleotide
  Antisense strand to SEQ ID NO: 279124
aaauagggaauacucaaac

SEQ ID NO: 279126 - RNA, 19 nt, Artificial Sequence
  Description of Artificial Sequence: Synthetic oligonucleotide
  Sense strand starting at position 3339 of SEQ ID NO: 3585
acugucuauguuuacaaua

SEQ ID NO: 279127 - RNA, 19 nt, Artificial Sequence
  Description of Artificial Sequence: Synthetic oligonucleotide
  Antisense strand to SEQ ID NO: 279126
uauuguaaacauagacagu

SEQ ID NO: 279128 - RNA, 19 nt, Artificial Sequence
  Description of Artificial Sequence: Synthetic oligonucleotide
  Sense strand starting at position 3427 of SEQ ID NO: 3585
ugaucagugcggaggguuu

SEQ ID NO: 279129 - RNA, 19 nt, Artificial Sequence
  Description of Artificial Sequence: Synthetic oligonucleotide
  Antisense strand to SEQ ID NO: 279128
aaacccuccgcacugauca

SEQ ID NO: 279130 - RNA, 19 nt, Artificial Sequence
  Description of Artificial Sequence: Synthetic oligonucleotide
  Sense strand starting at position 3852 of SEQ ID NO: 3585
agagcaucucuccaguuua

SEQ ID NO: 279131 - RNA, 19 nt, Artificial Sequence
  Description of Artificial Sequence: Synthetic oligonucleotide
  Antisense strand to SEQ ID NO: 279130
uaaacuggagagaugcucu

SEQ ID NO: 279132 - RNA, 19 nt, Artificial Sequence
  Description of Artificial Sequence: Synthetic oligonucleotide
  Sense strand starting at position 3863 of SEQ ID NO: 3585
ccaguuuauccagggugga

SEQ ID NO: 279133 - RNA, 19 nt, Artificial Sequence
  Description of Artificial Sequence: Synthetic oligonucleotide
  Antisense strand to SEQ ID NO: 279132
uccacccuggauaaacugg

SEQ ID NO: 279134 - RNA, 19 nt, Artificial Sequence
  Description of Artificial Sequence: Synthetic oligonucleotide
  Sense strand starting at position 3864 of SEQ ID NO: 3585
caguuuauccaggguggaa

SEQ ID NO: 279135 - RNA, 19 nt, Artificial Sequence
  Description of Artificial Sequence: Synthetic oligonucleotide
  Antisense strand to SEQ ID NO: 279134
uuccacccuggauaaacug

SEQ ID NO: 279136 - RNA, 19 nt, Artificial Sequence
  Description of Artificial Sequence: Synthetic oligonucleotide
  Sense strand starting at position 3866 of SEQ ID NO: 3585
guuuauccaggguggaaua

SEQ ID NO: 279137 - RNA, 19 nt, Artificial Sequence
  Description of Artificial Sequence: Synthetic oligonucleotide
  Antisense strand to SEQ ID NO: 279136
uauuccacccuggauaaac

SEQ ID NO: 279138 - RNA, 19 nt, Artificial Sequence
  Description of Artificial Sequence: Synthetic oligonucleotide
  Sense strand starting at position 3953 of SEQ ID NO: 3585
cuguuaaauuuggaaagaa

SEQ ID NO: 279139 - RNA, 19 nt, Artificial Sequence
  Description of Artificial Sequence: Synthetic oligonucleotide
  Antisense strand to SEQ ID NO: 279138
uucuuuccaaauuuaacag

SEQ ID NO: 279140 - RNA, 19 nt, Artificial Sequence
  Description of Artificial Sequence: Synthetic oligonucleotide
  Sense strand starting at position 665 of SEQ ID NO: 3586
caaggugacucgcgccaau

SEQ ID NO: 279141 - RNA, 19 nt, Artificial Sequence
  Description of Artificial Sequence: Synthetic oligonucleotide
  Antisense strand to SEQ ID NO: 279140
auuggcgcgagucaccuug

SEQ ID NO: 279142 - RNA, 19 nt, Artificial Sequence
  Description of Artificial Sequence: Synthetic oligonucleotide
  Sense strand starting at position 706 of SEQ ID NO: 3586
cggacgagggccgaaauau

SEQ ID NO: 279143 - RNA, 19 nt, Artificial Sequence
  Description of Artificial Sequence: Synthetic oligonucleotide
  Antisense strand to SEQ ID NO: 279142
auauuucggcccucguccg

SEQ ID NO: 279144 - RNA, 19 nt, Artificial Sequence
  Description of Artificial Sequence: Synthetic oligonucleotide
  Sense strand starting at position 716 of SEQ ID NO: 3586
ccgaaauauuaagaaagag

SEQ ID NO: 279145 - RNA, 19 nt, Artificial Sequence
  Description of Artificial Sequence: Synthetic oligonucleotide
  Antisense strand to SEQ ID NO: 279144
cucuuucuuaauauuucgg

SEQ ID NO: 279146 - RNA, 19 nt, Artificial Sequence
  Description of Artificial Sequence: Synthetic oligonucleotide
  Sense strand starting at position 896 of SEQ ID NO: 3586
ccaguucgacccuaccauu

SEQ ID NO: 279147 - RNA, 19 nt, Artificial Sequence
  Description of Artificial Sequence: Synthetic oligonucleotide
  Antisense strand to SEQ ID NO: 279146
aaugguagggucgaacugg

SEQ ID NO: 279148 - RNA, 19 nt, Artificial Sequence
  Description of Artificial Sequence: Synthetic oligonucleotide
  Sense strand starting at position 1230 of SEQ ID NO: 3586
uccgccuuaucgggacuua

SEQ ID NO: 279149 - RNA, 19 nt, Artificial Sequence
  Description of Artificial Sequence: Synthetic oligonucleotide
  Antisense strand to SEQ ID NO: 279148
uaagucccgauaaggcgga

SEQ ID NO: 279150 - RNA, 19 nt, Artificial Sequence
  Description of Artificial Sequence: Synthetic oligonucleotide
  Sense strand starting at position 1399 of SEQ ID NO: 3586
cgcgcuugaguuucaaagu

SEQ ID NO: 279151 - RNA, 19 nt, Artificial Sequence
  Description of Artificial Sequence: Synthetic oligonucleotide
  Antisense strand to SEQ ID NO: 279150
acuuugaaacucaagcgcg

SEQ ID NO: 279152 - RNA, 19 nt, Artificial Sequence
  Description of Artificial Sequence: Synthetic oligonucleotide
  Sense strand starting at position 1400 of SEQ ID NO: 3586
gcgcuugaguuucaaaguu

SEQ ID NO: 279153 - RNA, 19 nt, Artificial Sequence
  Description of Artificial Sequence: Synthetic oligonucleotide
  Antisense strand to SEQ ID NO: 279152
aacuuugaaacucaagcgc

SEQ ID NO: 279154 - RNA, 19 nt, Artificial Sequence
  Description of Artificial Sequence: Synthetic oligonucleotide
  Sense strand starting at position 2104 of SEQ ID NO: 3586
uggcucgauuccgaacaau

SEQ ID NO: 279155 - RNA, 19 nt, Artificial Sequence
  Description of Artificial Sequence: Synthetic oligonucleotide
  Antisense strand to SEQ ID NO: 279154
auuguucggaaucgagcca

SEQ ID NO: 279156 - RNA, 19 nt, Artificial Sequence
  Description of Artificial Sequence: Synthetic oligonucleotide
  Sense strand starting at position 2120 of SEQ ID NO: 3586
aauggacaagcgugcuuaa

SEQ ID NO: 279157 - RNA, 19 nt, Artificial Sequence
  Description of Artificial Sequence: Synthetic oligonucleotide
  Antisense strand to SEQ ID NO: 279156
uuaagcacgcuuguccauu

SEQ ID NO: 279158 - RNA, 19 nt, Artificial Sequence
  Description of Artificial Sequence: Synthetic oligonucleotide
  Sense strand starting at position 2175 of SEQ ID NO: 3586
cgccgaucgcacugucauu

SEQ ID NO: 279159 - RNA, 19 nt, Artificial Sequence
  Description of Artificial Sequence: Synthetic oligonucleotide
  Antisense strand to SEQ ID NO: 279158
aaugacagugcgaucggcg

SEQ ID NO: 279160 - RNA, 19 nt, Artificial Sequence
  Description of Artificial Sequence: Synthetic oligonucleotide
  Sense strand starting at position 2200 of SEQ ID NO: 3586
cggaguuugccgggucuca

SEQ ID NO: 279161 - RNA, 19 nt, Artificial Sequence
  Description of Artificial Sequence: Synthetic oligonucleotide
  Antisense strand to SEQ ID NO: 279160
ugagacccggcaaacuccg

SEQ ID NO: 279162 - RNA, 19 nt, Artificial Sequence
  Description of Artificial Sequence: Synthetic oligonucleotide
  Sense strand starting at position 2528 of SEQ ID NO: 3586
caaggauugucccagugca

SEQ ID NO: 279163 - RNA, 19 nt, Artificial Sequence
  Description of Artificial Sequence: Synthetic oligonucleotide
  Antisense strand to SEQ ID NO: 279162
ugcacugggacaauccuug

SEQ ID NO: 279164 - RNA, 19 nt, Artificial Sequence
  Description of Artificial Sequence: Synthetic oligonucleotide
  Sense strand starting at position 2841 of SEQ ID NO: 3586
cccucauucuagguuucua

SEQ ID NO: 279165 - RNA, 19 nt, Artificial Sequence
  Description of Artificial Sequence: Synthetic oligonucleotide
  Antisense strand to SEQ ID NO: 279164
uagaaaccuagaaugaggg

SEQ ID NO: 279166 - RNA, 19 nt, Artificial Sequence
  Description of Artificial Sequence: Synthetic oligonucleotide
  Sense strand starting at position 2849 of SEQ ID NO: 3586
cuagguuucuaguuagggu

SEQ ID NO: 279167 - RNA, 19 nt, Artificial Sequence
  Description of Artificial Sequence: Synthetic oligonucleotide
  Antisense strand to SEQ ID NO: 279166
acccuaacuagaaaccuag

SEQ ID NO: 279168 - RNA, 19 nt, Artificial Sequence
  Description of Artificial Sequence: Synthetic oligonucleotide
  Sense strand starting at position 2989 of SEQ ID NO: 3586
uacagaguuccucgggaaa

SEQ ID NO: 279169 - RNA, 19 nt, Artificial Sequence
  Description of Artificial Sequence: Synthetic oligonucleotide
  Antisense strand to SEQ ID NO: 279168
uuucccgaggaacucugua

SEQ ID NO: 279170 - RNA, 19 nt, Artificial Sequence
  Description of Artificial Sequence: Synthetic oligonucleotide
  Sense strand starting at position 3149 of SEQ ID NO: 3586
ggcgugacguagcgaucua

SEQ ID NO: 279171 - RNA, 19 nt, Artificial Sequence
  Description of Artificial Sequence: Synthetic oligonucleotide
  Antisense strand to SEQ ID NO: 279170
uagaucgcuacgucacgcc

SEQ ID NO: 279172 - RNA, 19 nt, Artificial Sequence
  Description of Artificial Sequence: Synthetic oligonucleotide
  Sense strand starting at position 3218 of SEQ ID NO: 3586
cgcacuuagcugucgaacu

SEQ ID NO: 279173 - RNA, 19 nt, Artificial Sequence
  Description of Artificial Sequence: Synthetic oligonucleotide
  Antisense strand to SEQ ID NO: 279172
aguucgacagcuaagugcg

SEQ ID NO: 279174 - RNA, 19 nt, Artificial Sequence
  Description of Artificial Sequence: Synthetic oligonucleotide
  Sense strand starting at position 3219 of SEQ ID NO: 3586
gcacuuagcugucgaacua

SEQ ID NO: 279175 - RNA, 19 nt, Artificial Sequence
  Description of Artificial Sequence: Synthetic oligonucleotide
  Antisense strand to SEQ ID NO: 279174
uaguucgacagcuaagugc

SEQ ID NO: 279176 - RNA, 19 nt, Artificial Sequence
  Description of Artificial Sequence: Synthetic oligonucleotide
  Sense strand starting at position 3220 of SEQ ID NO: 3586
cacuuagcugucgaacuaa

SEQ ID NO: 279177 - RNA, 19 nt, Artificial Sequence
  Description of Artificial Sequence: Synthetic oligonucleotide
  Antisense strand to SEQ ID NO: 279176
uuaguucgacagcuaagug

SEQ ID NO: 279178 - RNA, 19 nt, Artificial Sequence
  Description of Artificial Sequence: Synthetic oligonucleotide
  Sense strand starting at position 3238 of SEQ ID NO: 3586
agaaaucgguuguguggga

SEQ ID NO: 279179 - RNA, 19 nt, Artificial Sequence
  Description of Artificial Sequence: Synthetic oligonucleotide
  Antisense strand to SEQ ID NO: 279178
ucccacacaaccgauuucu

SEQ ID NO: 279180 - RNA, 19 nt, Artificial Sequence
  Description of Artificial Sequence: Synthetic oligonucleotide
  Sense strand starting at position 3758 of SEQ ID NO: 3586
uggccuuuccggagcgagu

SEQ ID NO: 279181 - RNA, 19 nt, Artificial Sequence
  Description of Artificial Sequence: Synthetic oligonucleotide
  Antisense strand to SEQ ID NO: 279180
acucgcuccggaaaggcca

SEQ ID NO: 279182 - RNA, 19 nt, Artificial Sequence
  Description of Artificial Sequence: Synthetic oligonucleotide
  Sense strand starting at position 3759 of SEQ ID NO: 3586
ggccuuuccggagcgaguu

SEQ ID NO: 279183 - RNA, 19 nt, Artificial Sequence
  Description of Artificial Sequence: Synthetic oligonucleotide
  Antisense strand to SEQ ID NO: 279182
aacucgcuccggaaaggcc

SEQ ID NO: 279184 - RNA, 19 nt, Artificial Sequence
  Description of Artificial Sequence: Synthetic oligonucleotide
  Sense strand starting at position 3795 of SEQ ID NO: 3586
ccgggaucccgguaguuua

SEQ ID NO: 279185 - RNA, 19 nt, Artificial Sequence
  Description of Artificial Sequence: Synthetic oligonucleotide
  Antisense strand to SEQ ID NO: 279184
uaaacuaccgggaucccgg

SEQ ID NO: 279186 - RNA, 19 nt, Artificial Sequence
  Description of Artificial Sequence: Synthetic oligonucleotide
  Sense strand starting at position 3805 of SEQ ID NO: 3586
gguaguuuagccugaagaa

SEQ ID NO: 279187 - RNA, 19 nt, Artificial Sequence
  Description of Artificial Sequence: Synthetic oligonucleotide
  Antisense strand to SEQ ID NO: 279186
uucuucaggcuaaacuacc

SEQ ID NO: 279188 - RNA, 19 nt, Artificial Sequence
  Description of Artificial Sequence: Synthetic oligonucleotide
  Sense strand starting at position 3806 of SEQ ID NO: 3586
guaguuuagccugaagaaa

SEQ ID NO: 279189 - RNA, 19 nt, Artificial Sequence
  Description of Artificial Sequence: Synthetic oligonucleotide
  Antisense strand to SEQ ID NO: 279188
uuucuucaggcuaaacuac

SEQ ID NO: 279190 - RNA, 19 nt, Artificial Sequence
  Description of Artificial Sequence: Synthetic oligonucleotide
  Sense strand starting at position 61 of SEQ ID NO: 3587
ugcauuucuuaguuucuua

SEQ ID NO: 279191 - RNA, 19 nt, Artificial Sequence
  Description of Artificial Sequence: Synthetic oligonucleotide
  Antisense strand to SEQ ID NO: 279190
uaagaaacuaagaaaugca

SEQ ID NO: 279192 - RNA, 19 nt, Artificial Sequence
  Description of Artificial Sequence: Synthetic oligonucleotide
  Sense strand starting at position 91 of SEQ ID NO: 3587
ucuacauguguguaaauua

SEQ ID NO: 279193 - RNA, 19 nt, Artificial Sequence
  Description of Artificial Sequence: Synthetic oligonucleotide
  Antisense strand to SEQ ID NO: 279192
uaauuuacacacauguaga

SEQ ID NO: 279194 - RNA, 19 nt, Artificial Sequence
  Description of Artificial Sequence: Synthetic oligonucleotide
  Sense strand starting at position 99 of SEQ ID NO: 3587
uguguaaauuacuuagguu

SEQ ID NO: 279195 - RNA, 19 nt, Artificial Sequence
  Description of Artificial Sequence: Synthetic oligonucleotide
  Antisense strand to SEQ ID NO: 279194
aaccuaaguaauuuacaca

SEQ ID NO: 279196 - RNA, 19 nt, Artificial Sequence
  Description of Artificial Sequence: Synthetic oligonucleotide
  Sense strand starting at position 100 of SEQ ID NO: 3587
guguaaauuacuuagguuu

SEQ ID NO: 279197 - RNA, 19 nt, Artificial Sequence
  Description of Artificial Sequence: Synthetic oligonucleotide
  Antisense strand to SEQ ID NO: 279196
aaaccuaaguaauuuacac

SEQ ID NO: 279198 - RNA, 19 nt, Artificial Sequence
  Description of Artificial Sequence: Synthetic oligonucleotide
  Sense strand starting at position 605 of SEQ ID NO: 3587
ugauacaugucaccauaua

SEQ ID NO: 279199 - RNA, 19 nt, Artificial Sequence
  Description of Artificial Sequence: Synthetic oligonucleotide
  Antisense strand to SEQ ID NO: 279198
uauauggugacauguauca

SEQ ID NO: 279200 - RNA, 19 nt, Artificial Sequence
  Description of Artificial Sequence: Synthetic oligonucleotide
  Sense strand starting at position 624 of SEQ ID NO: 3587
ucaguuuaugcguuuguau

SEQ ID NO: 279201 - RNA, 19 nt, Artificial Sequence
  Description of Artificial Sequence: Synthetic oligonucleotide
  Antisense strand to SEQ ID NO: 279200
auacaaacgcauaaacuga

SEQ ID NO: 279202 - RNA, 19 nt, Artificial Sequence
  Description of Artificial Sequence: Synthetic oligonucleotide
  Sense strand starting at position 625 of SEQ ID NO: 3587
caguuuaugcguuuguaug

SEQ ID NO: 279203 - RNA, 19 nt, Artificial Sequence
  Description of Artificial Sequence: Synthetic oligonucleotide
  Antisense strand to SEQ ID NO: 279202
cauacaaacgcauaaacug

SEQ ID NO: 279204 - RNA, 19 nt, Artificial Sequence
  Description of Artificial Sequence: Synthetic oligonucleotide
  Sense strand starting at position 657 of SEQ ID NO: 3587
ucugguacauaagcgauua

SEQ ID NO: 279205 - RNA, 19 nt, Artificial Sequence
  Description of Artificial Sequence: Synthetic oligonucleotide
  Antisense strand to SEQ ID NO: 279204
uaaucgcuuauguaccaga

SEQ ID NO: 279206 - RNA, 19 nt, Artificial Sequence
  Description of Artificial Sequence: Synthetic oligonucleotide
  Sense strand starting at position 659 of SEQ ID NO: 3587
ugguacauaagcgauuaca

SEQ ID NO: 279207 - RNA, 19 nt, Artificial Sequence
  Description of Artificial Sequence: Synthetic oligonucleotide
  Antisense strand to SEQ ID NO: 279206
uguaaucgcuuauguacca

SEQ ID NO: 279208 - RNA, 19 nt, Artificial Sequence
  Description of Artificial Sequence: Synthetic oligonucleotide
  Sense strand starting at position 669 of SEQ ID NO: 3587
gcgauuacacuuuaaacac

SEQ ID NO: 279209 - RNA, 19 nt, Artificial Sequence
  Description of Artificial Sequence: Synthetic oligonucleotide
  Antisense strand to SEQ ID NO: 279208
guguuuaaaguguaaucgc

SEQ ID NO: 279210 - RNA, 19 nt, Artificial Sequence
  Description of Artificial Sequence: Synthetic oligonucleotide
  Sense strand starting at position 687 of SEQ ID NO: 3587
cgucaucaacuguaaugua

SEQ ID NO: 279211 - RNA, 19 nt, Artificial Sequence
  Description of Artificial Sequence: Synthetic oligonucleotide
  Antisense strand to SEQ ID NO: 279210
uacauuacaguugaugacg

SEQ ID NO: 279212 - RNA, 19 nt, Artificial Sequence
  Description of Artificial Sequence: Synthetic oligonucleotide
  Sense strand starting at position 720 of SEQ ID NO: 3587
cugcgugagccuuccuaau

SEQ ID NO: 279213 - RNA, 19 nt, Artificial Sequence
  Description of Artificial Sequence: Synthetic oligonucleotide
  Antisense strand to SEQ ID NO: 279212
auuaggaaggcucacgcag

SEQ ID NO: 279214 - RNA, 19 nt, Artificial Sequence
  Description of Artificial Sequence: Synthetic oligonucleotide
  Sense strand starting at position 746 of SEQ ID NO: 3587
uugcacuaccuguauugua

SEQ ID NO: 279215 - RNA, 19 nt, Artificial Sequence
  Description of Artificial Sequence: Synthetic oligonucleotide
  Antisense strand to SEQ ID NO: 279214
uacaauacagguagugcaa

SEQ ID NO: 279216 - RNA, 19 nt, Artificial Sequence
  Description of Artificial Sequence: Synthetic oligonucleotide
  Sense strand starting at position 950 of SEQ ID NO: 3587
cgcccaugcccaguugauu

SEQ ID NO: 279217 - RNA, 19 nt, Artificial Sequence
  Description of Artificial Sequence: Synthetic oligonucleotide
  Antisense strand to SEQ ID NO: 279216
aaucaacugggcaugggcg

SEQ ID NO: 279218 - RNA, 19 nt, Artificial Sequence
  Description of Artificial Sequence: Synthetic oligonucleotide
  Sense strand starting at position 1102 of SEQ ID NO: 3587
cguuuagaaucuuuauagg

SEQ ID NO: 279219 - RNA, 19 nt, Artificial Sequence
  Description of Artificial Sequence: Synthetic oligonucleotide
  Antisense strand to SEQ ID NO: 279218
ccuauaaagauucuaaacg

SEQ ID NO: 279220 - RNA, 19 nt, Artificial Sequence
  Description of Artificial Sequence: Synthetic oligonucleotide
  Sense strand starting at position 1108 of SEQ ID NO: 3587
gaaucuuuauaggcaguga

SEQ ID NO: 279221 - RNA, 19 nt, Artificial Sequence
  Description of Artificial Sequence: Synthetic oligonucleotide
  Antisense strand to SEQ ID NO: 279220
ucacugccuauaaagauuc

SEQ ID NO: 279222 - RNA, 19 nt, Artificial Sequence
  Description of Artificial Sequence: Synthetic oligonucleotide
  Sense strand starting at position 1112 of SEQ ID NO: 3587
cuuuauaggcagugacgaa

SEQ ID NO: 279223 - RNA, 19 nt, Artificial Sequence
  Description of Artificial Sequence: Synthetic oligonucleotide
  Antisense strand to SEQ ID NO: 279222
uucgucacugccuauaaag

SEQ ID NO: 279224 - RNA, 19 nt, Artificial Sequence
  Description of Artificial Sequence: Synthetic oligonucleotide
  Sense strand starting at position 1139 of SEQ ID NO: 3587
cgaagugugcgcccaauau

SEQ ID NO: 279225 - RNA, 19 nt, Artificial Sequence
  Description of Artificial Sequence: Synthetic oligonucleotide
  Antisense strand to SEQ ID NO: 279224
auauugggcgcacacuucg

SEQ ID NO: 279226 - RNA, 19 nt, Artificial Sequence
  Description of Artificial Sequence: Synthetic oligonucleotide
  Sense strand starting at position 2531 of SEQ ID NO: 3587
ucccgaggaauuugugguu

SEQ ID NO: 279227 - RNA, 19 nt, Artificial Sequence
  Description of Artificial Sequence: Synthetic oligonucleotide
  Antisense strand to SEQ ID NO: 279226
aaccacaaauuccucggga

SEQ ID NO: 279228 - RNA, 19 nt, Artificial Sequence
  Description of Artificial Sequence: Synthetic oligonucleotide
  Sense strand starting at position 2960 of SEQ ID NO: 3587
caugaugucagguggucaa

SEQ ID NO: 279229 - RNA, 19 nt, Artificial Sequence
  Description of Artificial Sequence: Synthetic oligonucleotide
  Antisense strand to SEQ ID NO: 279228
uugaccaccugacaucaug

SEQ ID NO: 279230 - RNA, 19 nt, Artificial Sequence
  Description of Artificial Sequence: Synthetic oligonucleotide
  Sense strand starting at position 3178 of SEQ ID NO: 3587
ugucaugaauuauucuagu

SEQ ID NO: 279231 - RNA, 19 nt, Artificial Sequence
  Description of Artificial Sequence: Synthetic oligonucleotide
  Antisense strand to SEQ ID NO: 279230
acuagaauaauucaugaca

SEQ ID NO: 279232 - RNA, 19 nt, Artificial Sequence
  Description of Artificial Sequence: Synthetic oligonucleotide
  Sense strand starting at position 3285 of SEQ ID NO: 3587
ggcuguuugauuuaucgug

SEQ ID NO: 279233 - RNA, 19 nt, Artificial Sequence
  Description of Artificial Sequence: Synthetic oligonucleotide
  Antisense strand to SEQ ID NO: 279232
cacgauaaaucaaacagcc

SEQ ID NO: 279234 - RNA, 19 nt, Artificial Sequence
  Description of Artificial Sequence: Synthetic oligonucleotide
  Sense strand starting at position 3355 of SEQ ID NO: 3587
cuuugagcauucucaggga

SEQ ID NO: 279235 - RNA, 19 nt, Artificial Sequence
  Description of Artificial Sequence: Synthetic oligonucleotide
  Antisense strand to SEQ ID NO: 279234
ucccugagaaugcucaaag

SEQ ID NO: 279236 - RNA, 19 nt, Artificial Sequence
  Description of Artificial Sequence: Synthetic oligonucleotide
  Sense strand starting at position 3359 of SEQ ID NO: 3587
gagcauucucagggaggua

SEQ ID NO: 279237 - RNA, 19 nt, Artificial Sequence
  Description of Artificial Sequence: Synthetic oligonucleotide
  Antisense strand to SEQ ID NO: 279236
uaccucccugagaaugcuc

SEQ ID NO: 279238 - RNA, 19 nt, Artificial Sequence
  Description of Artificial Sequence: Synthetic oligonucleotide
  Sense strand starting at position 3362 of SEQ ID NO: 3587
cauucucagggagguaauu

SEQ ID NO: 279239 - RNA, 19 nt, Artificial Sequence
  Description of Artificial Sequence: Synthetic oligonucleotide
  Antisense strand to SEQ ID NO: 279238
aauuaccucccugagaaug

SEQ ID NO: 279240 - RNA, 19 nt, Artificial Sequence
  Description of Artificial Sequence: Synthetic oligonucleotide
  Sense strand starting at position 3371 of SEQ ID NO: 3587
ggagguaauuguuuaggau

SEQ ID NO: 279241 - RNA, 19 nt, Artificial Sequence
  Description of Artificial Sequence: Synthetic oligonucleotide
  Antisense strand to SEQ ID NO: 279240
auccuaaacaauuaccucc

SEQ ID NO: 279242 - RNA, 19 nt, Artificial Sequence
  Description of Artificial Sequence: Synthetic oligonucleotide
  Sense strand starting at position 3451 of SEQ ID NO: 3587
ggugucaguagauauuaau

SEQ ID NO: 279243 - RNA, 19 nt, Artificial Sequence
  Description of Artificial Sequence: Synthetic oligonucleotide
  Antisense strand to SEQ ID NO: 279242
auuaauaucuacugacacc

SEQ ID NO: 279244 - RNA, 19 nt, Artificial Sequence
  Description of Artificial Sequence: Synthetic oligonucleotide
  Sense strand starting at position 3472 of SEQ ID NO: 3587
cagucauugggaggccagu

SEQ ID NO: 279245 - RNA, 19 nt, Artificial Sequence
  Description of Artificial Sequence: Synthetic oligonucleotide
  Antisense strand to SEQ ID NO: 279244
acuggccucccaaugacug

SEQ ID NO: 279246 - RNA, 19 nt, Artificial Sequence
  Description of Artificial Sequence: Synthetic oligonucleotide
  Sense strand starting at position 3536 of SEQ ID NO: 3587
uuuggaguguuaguaauug

SEQ ID NO: 279247 - RNA, 19 nt, Artificial Sequence
  Description of Artificial Sequence: Synthetic oligonucleotide
  Antisense strand to SEQ ID NO: 279246
caauuacuaacacuccaaa

SEQ ID NO: 279248 - RNA, 19 nt, Artificial Sequence
  Description of Artificial Sequence: Synthetic oligonucleotide
  Sense strand starting at position 3540 of SEQ ID NO: 3587
gaguguuaguaauugaagg

SEQ ID NO: 279249 - RNA, 19 nt, Artificial Sequence
  Description of Artificial Sequence: Synthetic oligonucleotide
  Antisense strand to SEQ ID NO: 279248
ccuucaauuacuaacacuc

SEQ ID NO: 279250 - RNA, 19 nt, Artificial Sequence
  Description of Artificial Sequence: Synthetic oligonucleotide
  Sense strand starting at position 3542 of SEQ ID NO: 3587
guguuaguaauugaagggu

SEQ ID NO: 279251 - RNA, 19 nt, Artificial Sequence
  Description of Artificial Sequence: Synthetic oligonucleotide
  Antisense strand to SEQ ID NO: 279250
acccuucaauuacuaacac

SEQ ID NO: 279252 - RNA, 19 nt, Artificial Sequence
  Description of Artificial Sequence: Synthetic oligonucleotide
  Sense strand starting at position 3571 of SEQ ID NO: 3587
ugggaagucauugagagcu

SEQ ID NO: 279253 - RNA, 19 nt, Artificial Sequence
  Description of Artificial Sequence: Synthetic oligonucleotide
  Antisense strand to SEQ ID NO: 279252
agcucucaaugacuuccca

SEQ ID NO: 279254 - RNA, 19 nt, Artificial Sequence
  Description of Artificial Sequence: Synthetic oligonucleotide
  Sense strand starting at position 3588 of SEQ ID NO: 3587
cucugcucagugcaugaua

SEQ ID NO: 279255 - RNA, 19 nt, Artificial Sequence
  Description of Artificial Sequence: Synthetic oligonucleotide
  Antisense strand to SEQ ID NO: 279254
uaucaugcacugagcagag

SEQ ID NO: 279256 - RNA, 19 nt, Artificial Sequence
  Description of Artificial Sequence: Synthetic oligonucleotide
  Sense strand starting at position 3606 of SEQ ID NO: 3587
agugacucucaguauaauc

SEQ ID NO: 279257 - RNA, 19 nt, Artificial Sequence
  Description of Artificial Sequence: Synthetic oligonucleotide
  Antisense strand to SEQ ID NO: 279256
gauuauacugagagucacu

SEQ ID NO: 279258 - RNA, 19 nt, Artificial Sequence
  Description of Artificial Sequence: Synthetic oligonucleotide
  Sense strand starting at position 3615 of SEQ ID NO: 3587
caguauaaucauugagggu

SEQ ID NO: 279259 - RNA, 19 nt, Artificial Sequence
  Description of Artificial Sequence: Synthetic oligonucleotide
  Antisense strand to SEQ ID NO: 279258
acccucaaugauuauacug

SEQ ID NO: 279260 - RNA, 19 nt, Artificial Sequence
  Description of Artificial Sequence: Synthetic oligonucleotide
  Sense strand starting at position 3635 of SEQ ID NO: 3587
uguggauggccauggagau

SEQ ID NO: 279261 - RNA, 19 nt, Artificial Sequence
  Description of Artificial Sequence: Synthetic oligonucleotide
  Antisense strand to SEQ ID NO: 279260
aucuccauggccauccaca

SEQ ID NO: 279262 - RNA, 19 nt, Artificial Sequence
  Description of Artificial Sequence: Synthetic oligonucleotide
  Sense strand starting at position 3739 of SEQ ID NO: 3587
gguuauucagggcagucuu

SEQ ID NO: 279263 - RNA, 19 nt, Artificial Sequence
  Description of Artificial Sequence: Synthetic oligonucleotide
  Antisense strand to SEQ ID NO: 279262
aagacugcccugaauaacc

SEQ ID NO: 279264 - RNA, 19 nt, Artificial Sequence
  Description of Artificial Sequence: Synthetic oligonucleotide
  Sense strand starting at position 3753 of SEQ ID NO: 3587
gucuuuaugggcuagagga

SEQ ID NO: 279265 - RNA, 19 nt, Artificial Sequence
  Description of Artificial Sequence: Synthetic oligonucleotide
  Antisense strand to SEQ ID NO: 279264
uccucuagcccauaaagac

SEQ ID NO: 279266 - RNA, 19 nt, Artificial Sequence
  Description of Artificial Sequence: Synthetic oligonucleotide
  Sense strand starting at position 3928 of SEQ ID NO: 3587
ggcaccuguccuugaggga

SEQ ID NO: 279267 - RNA, 19 nt, Artificial Sequence
  Description of Artificial Sequence: Synthetic oligonucleotide
  Antisense strand to SEQ ID NO: 279266
ucccucaaggacaggugcc

SEQ ID NO: 279268 - RNA, 19 nt, Artificial Sequence
  Description of Artificial Sequence: Synthetic oligonucleotide
  Sense strand starting at position 3929 of SEQ ID NO: 3587
gcaccuguccuugagggau

SEQ ID NO: 279269 - RNA, 19 nt, Artificial Sequence
  Description of Artificial Sequence: Synthetic oligonucleotide
  Antisense strand to SEQ ID NO: 279268
aucccucaaggacaggugc

SEQ ID NO: 279270 - RNA, 19 nt, Artificial Sequence
  Description of Artificial Sequence: Synthetic oligonucleotide
  Sense strand starting at position 81 of SEQ ID NO: 3588
acacuuacgagcuagugaa

SEQ ID NO: 279271 - RNA, 19 nt, Artificial Sequence
  Description of Artificial Sequence: Synthetic oligonucleotide
  Antisense strand to SEQ ID NO: 279270
uucacuagcucguaagugu

SEQ ID NO: 279272 - RNA, 19 nt, Artificial Sequence
  Description of Artificial Sequence: Synthetic oligonucleotide
  Sense strand starting at position 96 of SEQ ID NO: 3588
ugaagagguucuguagaau

SEQ ID NO: 279273 - RNA, 19 nt, Artificial Sequence
  Description of Artificial Sequence: Synthetic oligonucleotide
  Antisense strand to SEQ ID NO: 279272
auucuacagaaccucuuca

SEQ ID NO: 279274 - RNA, 19 nt, Artificial Sequence
  Description of Artificial Sequence: Synthetic oligonucleotide
  Sense strand starting at position 118 of SEQ ID NO: 3588
caaacuucugcuuacgagu

SEQ ID NO: 279275 - RNA, 19 nt, Artificial Sequence
  Description of Artificial Sequence: Synthetic oligonucleotide
  Antisense strand to SEQ ID NO: 279274
acucguaagcagaaguuug

SEQ ID NO: 279276 - RNA, 19 nt, Artificial Sequence
  Description of Artificial Sequence: Synthetic oligonucleotide
  Sense strand starting at position 179 of SEQ ID NO: 3588
agauuuagaugauauaccu

SEQ ID NO: 279277 - RNA, 19 nt, Artificial Sequence
  Description of Artificial Sequence: Synthetic oligonucleotide
  Antisense strand to SEQ ID NO: 279276
agguauaucaucuaaaucu

SEQ ID NO: 279278 - RNA, 19 nt, Artificial Sequence
  Description of Artificial Sequence: Synthetic oligonucleotide
  Sense strand starting at position 217 of SEQ ID NO: 3588
caguuuaggcucugaacaa

SEQ ID NO: 279279 - RNA, 19 nt, Artificial Sequence
  Description of Artificial Sequence: Synthetic oligonucleotide
  Antisense strand to SEQ ID NO: 279278
uuguucagagccuaaacug

SEQ ID NO: 279280 - RNA, 19 nt, Artificial Sequence
  Description of Artificial Sequence: Synthetic oligonucleotide
  Sense strand starting at position 287 of SEQ ID NO: 3588
uuuccucuggcacguuaaa

SEQ ID NO: 279281 - RNA, 19 nt, Artificial Sequence
  Description of Artificial Sequence: Synthetic oligonucleotide
  Antisense strand to SEQ ID NO: 279280
uuuaacgugccagaggaaa

SEQ ID NO: 279282 - RNA, 19 nt, Artificial Sequence
  Description of Artificial Sequence: Synthetic oligonucleotide
  Sense strand starting at position 493 of SEQ ID NO: 3588
ugaaaccucuuauucgaaa

SEQ ID NO: 279283 - RNA, 19 nt, Artificial Sequence
  Description of Artificial Sequence: Synthetic oligonucleotide
  Antisense strand to SEQ ID NO: 279282
uuucgaauaagagguuuca

SEQ ID NO: 279284 - RNA, 19 nt, Artificial Sequence
  Description of Artificial Sequence: Synthetic oligonucleotide
  Sense strand starting at position 518 of SEQ ID NO: 3588
uggcauauugcagaugcau

SEQ ID NO: 279285 - RNA, 19 nt, Artificial Sequence
  Description of Artificial Sequence: Synthetic oligonucleotide
  Antisense strand to SEQ ID NO: 279284
augcaucugcaauaugcca

SEQ ID NO: 279286 - RNA, 19 nt, Artificial Sequence
  Description of Artificial Sequence: Synthetic oligonucleotide
  Sense strand starting at position 574 of SEQ ID NO: 3588
acaaaucguccuuguacau

SEQ ID NO: 279287 - RNA, 19 nt, Artificial Sequence
  Description of Artificial Sequence: Synthetic oligonucleotide
  Antisense strand to SEQ ID NO: 279286
auguacaaggacgauuugu

SEQ ID NO: 279288 - RNA, 19 nt, Artificial Sequence
  Description of Artificial Sequence: Synthetic oligonucleotide
  Sense strand starting at position 676 of SEQ ID NO: 3588
acuguaagcuguuccauuu

SEQ ID NO: 279289 - RNA, 19 nt, Artificial Sequence
  Description of Artificial Sequence: Synthetic oligonucleotide
  Antisense strand to SEQ ID NO: 279288
aaauggaacagcuuacagu

SEQ ID NO: 279290 - RNA, 19 nt, Artificial Sequence
  Description of Artificial Sequence: Synthetic oligonucleotide
  Sense strand starting at position 696 of SEQ ID NO: 3588
auggaaacccugcgaaaug

SEQ ID NO: 279291 - RNA, 19 nt, Artificial Sequence
  Description of Artificial Sequence: Synthetic oligonucleotide
  Antisense strand to SEQ ID NO: 279290
cauuucgcaggguuuccau

SEQ ID NO: 279292 - RNA, 19 nt, Artificial Sequence
  Description of Artificial Sequence: Synthetic oligonucleotide
  Sense strand starting at position 706 of SEQ ID NO: 3588
ugcgaaaugcaucacuguu

SEQ ID NO: 279293 - RNA, 19 nt, Artificial Sequence
  Description of Artificial Sequence: Synthetic oligonucleotide
  Antisense strand to SEQ ID NO: 279292
aacagugaugcauuucgca

SEQ ID NO: 279294 - RNA, 19 nt, Artificial Sequence
  Description of Artificial Sequence: Synthetic oligonucleotide
  Sense strand starting at position 708 of SEQ ID NO: 3588
cgaaaugcaucacuguuua

SEQ ID NO: 279295 - RNA, 19 nt, Artificial Sequence
  Description of Artificial Sequence: Synthetic oligonucleotide
  Antisense strand to SEQ ID NO: 279294
uaaacagugaugcauuucg

SEQ ID NO: 279296 - RNA, 19 nt, Artificial Sequence
  Description of Artificial Sequence: Synthetic oligonucleotide
  Sense strand starting at position 829 of SEQ ID NO: 3588
guaggaauaguuggcucau

SEQ ID NO: 279297 - RNA, 19 nt, Artificial Sequence
  Description of Artificial Sequence: Synthetic oligonucleotide
  Antisense strand to SEQ ID NO: 279296
augagccaacuauuccuac

SEQ ID NO: 279298 - RNA, 19 nt, Artificial Sequence
  Description of Artificial Sequence: Synthetic oligonucleotide
  Sense strand starting at position 855 of SEQ ID NO: 3588
gcaagaagcgcucauauga

SEQ ID NO: 279299 - RNA, 19 nt, Artificial Sequence
  Description of Artificial Sequence: Synthetic oligonucleotide
  Antisense strand to SEQ ID NO: 279298
ucauaugagcgcuucuugc

SEQ ID NO: 279300 - RNA, 19 nt, Artificial Sequence
  Description of Artificial Sequence: Synthetic oligonucleotide
  Sense strand starting at position 999 of SEQ ID NO: 3588
uucgcugacccauaacaga

SEQ ID NO: 279301 - RNA, 19 nt, Artificial Sequence
  Description of Artificial Sequence: Synthetic oligonucleotide
  Antisense strand to SEQ ID NO: 279300
ucuguuaugggucagcgaa

SEQ ID NO: 279302 - RNA, 19 nt, Artificial Sequence
  Description of Artificial Sequence: Synthetic oligonucleotide
  Sense strand starting at position 1239 of SEQ ID NO: 3588
accucuuaccuucguauau

SEQ ID NO: 279303 - RNA, 19 nt, Artificial Sequence
  Description of Artificial Sequence: Synthetic oligonucleotide
  Antisense strand to SEQ ID NO: 279302
auauacgaagguaagaggu

SEQ ID NO: 279304 - RNA, 19 nt, Artificial Sequence
  Description of Artificial Sequence: Synthetic oligonucleotide
  Sense strand starting at position 1243 of SEQ ID NO: 3588
cuuaccuucguauaucaca

SEQ ID NO: 279305 - RNA, 19 nt, Artificial Sequence
  Description of Artificial Sequence: Synthetic oligonucleotide
  Antisense strand to SEQ ID NO: 279304
ugugauauacgaagguaag

SEQ ID NO: 279306 - RNA, 19 nt, Artificial Sequence
  Description of Artificial Sequence: Synthetic oligonucleotide
  Sense strand starting at position 2086 of SEQ ID NO: 3588
ucgcgauugguuguuugga

SEQ ID NO: 279307 - RNA, 19 nt, Artificial Sequence
  Description of Artificial Sequence: Synthetic oligonucleotide
  Antisense strand to SEQ ID NO: 279306
uccaaacaaccaaucgcga

SEQ ID NO: 279308 - RNA, 19 nt, Artificial Sequence
  Description of Artificial Sequence: Synthetic oligonucleotide
  Sense strand starting at position 2207 of SEQ ID NO: 3588
cucagugcuccuggaggau

SEQ ID NO: 279309 - RNA, 19 nt, Artificial Sequence
  Description of Artificial Sequence: Synthetic oligonucleotide
  Antisense strand to SEQ ID NO: 279308
auccuccaggagcacugag

SEQ ID NO: 279310 - RNA, 19 nt, Artificial Sequence
  Description of Artificial Sequence: Synthetic oligonucleotide
  Sense strand starting at position 2210 of SEQ ID NO: 3588
agugcuccuggaggauaua

SEQ ID NO: 279311 - RNA, 19 nt, Artificial Sequence
  Description of Artificial Sequence: Synthetic oligonucleotide
  Antisense strand to SEQ ID NO: 279310
uauauccuccaggagcacu

SEQ ID NO: 279312 - RNA, 19 nt, Artificial Sequence
  Description of Artificial Sequence: Synthetic oligonucleotide
  Sense strand starting at position 2381 of SEQ ID NO: 3588
uaacaugaauuugguguua

SEQ ID NO: 279313 - RNA, 19 nt, Artificial Sequence
  Description of Artificial Sequence: Synthetic oligonucleotide
  Antisense strand to SEQ ID NO: 279312
uaacaccaaauucauguua

SEQ ID NO: 279314 - RNA, 19 nt, Artificial Sequence
  Description of Artificial Sequence: Synthetic oligonucleotide
  Sense strand starting at position 2383 of SEQ ID NO: 3588
acaugaauuugguguuauc

SEQ ID NO: 279315 - RNA, 19 nt, Artificial Sequence
  Description of Artificial Sequence: Synthetic oligonucleotide
  Antisense strand to SEQ ID NO: 279314
gauaacaccaaauucaugu

SEQ ID NO: 279316 - RNA, 19 nt, Artificial Sequence
  Description of Artificial Sequence: Synthetic oligonucleotide
  Sense strand starting at position 2394 of SEQ ID NO: 3588
guguuaucacgccaggguu

SEQ ID NO: 279317 - RNA, 19 nt, Artificial Sequence
  Description of Artificial Sequence: Synthetic oligonucleotide
  Antisense strand to SEQ ID NO: 279316
aacccuggcgugauaacac

SEQ ID NO: 279318 - RNA, 19 nt, Artificial Sequence
  Description of Artificial Sequence: Synthetic oligonucleotide
  Sense strand starting at position 2826 of SEQ ID NO: 3588
uucccagaucucuguugua

SEQ ID NO: 279319 - RNA, 19 nt, Artificial Sequence
  Description of Artificial Sequence: Synthetic oligonucleotide
  Antisense strand to SEQ ID NO: 279318
uacaacagagaucugggaa

SEQ ID NO: 279320 - RNA, 19 nt, Artificial Sequence
  Description of Artificial Sequence: Synthetic oligonucleotide
  Sense strand starting at position 2839 of SEQ ID NO: 3588
guuguagccagugcucauu

SEQ ID NO: 279321 - RNA, 19 nt, Artificial Sequence
  Description of Artificial Sequence: Synthetic oligonucleotide
  Antisense strand to SEQ ID NO: 279320
aaugagcacuggcuacaac

SEQ ID NO: 279322 - RNA, 19 nt, Artificial Sequence
  Description of Artificial Sequence: Synthetic oligonucleotide
  Sense strand starting at position 2988 of SEQ ID NO: 3588
auaugagacuuccaccaga

SEQ ID NO: 279323 - RNA, 19 nt, Artificial Sequence
  Description of Artificial Sequence: Synthetic oligonucleotide
  Antisense strand to SEQ ID NO: 279322
ucugguggaagucucauau

SEQ ID NO: 279324 - RNA, 19 nt, Artificial Sequence
  Description of Artificial Sequence: Synthetic oligonucleotide
  Sense strand starting at position 3118 of SEQ ID NO: 3588
uaccuuaaccuucggagua

SEQ ID NO: 279325 - RNA, 19 nt, Artificial Sequence
  Description of Artificial Sequence: Synthetic oligonucleotide
  Antisense strand to SEQ ID NO: 279324
uacuccgaagguuaaggua

SEQ ID NO: 279326 - RNA, 19 nt, Artificial Sequence
  Description of Artificial Sequence: Synthetic oligonucleotide
  Sense strand starting at position 3150 of SEQ ID NO: 3588
augugagccacauggcuua

SEQ ID NO: 279327 - RNA, 19 nt, Artificial Sequence
  Description of Artificial Sequence: Synthetic oligonucleotide
  Antisense strand to SEQ ID NO: 279326
uaagccauguggcucacau

SEQ ID NO: 279328 - RNA, 19 nt, Artificial Sequence
  Description of Artificial Sequence: Synthetic oligonucleotide
  Sense strand starting at position 3183 of SEQ ID NO: 3588
ucugguguuaagcaagaca

SEQ ID NO: 279329 - RNA, 19 nt, Artificial Sequence
  Description of Artificial Sequence: Synthetic oligonucleotide
  Antisense strand to SEQ ID NO: 279328
ugucuugcuuaacaccaga

SEQ ID NO: 279330 - RNA, 19 nt, Artificial Sequence
  Description of Artificial Sequence: Synthetic oligonucleotide
  Sense strand starting at position 3186 of SEQ ID NO: 3588
gguguuaagcaagacacaa

SEQ ID NO: 279331 - RNA, 19 nt, Artificial Sequence
  Description of Artificial Sequence: Synthetic oligonucleotide
  Antisense strand to SEQ ID NO: 279330
uugugucuugcuuaacacc

SEQ ID NO: 279332 - RNA, 19 nt, Artificial Sequence
  Description of Artificial Sequence: Synthetic oligonucleotide
  Sense strand starting at position 3204 of SEQ ID NO: 3588
aaaguuccugaguggaacu

SEQ ID NO: 279333 - RNA, 19 nt, Artificial Sequence
  Description of Artificial Sequence: Synthetic oligonucleotide
  Antisense strand to SEQ ID NO: 279332
aguuccacucaggaacuuu

SEQ ID NO: 279334 - RNA, 19 nt, Artificial Sequence
  Description of Artificial Sequence: Synthetic oligonucleotide
  Sense strand starting at position 3478 of SEQ ID NO: 3588
uauuaaauggcauggucua

SEQ ID NO: 279335 - RNA, 19 nt, Artificial Sequence
  Description of Artificial Sequence: Synthetic oligonucleotide
  Antisense strand to SEQ ID NO: 279334
uagaccaugccauuuaaua

SEQ ID NO: 279336 - RNA, 19 nt, Artificial Sequence
  Description of Artificial Sequence: Synthetic oligonucleotide
  Sense strand starting at position 3479 of SEQ ID NO: 3588
auuaaauggcauggucuaa

SEQ ID NO: 279337 - RNA, 19 nt, Artificial Sequence
  Description of Artificial Sequence: Synthetic oligonucleotide
  Antisense strand to SEQ ID NO: 279336
uuagaccaugccauuuaau

SEQ ID NO: 279338 - RNA, 19 nt, Artificial Sequence
  Description of Artificial Sequence: Synthetic oligonucleotide
  Sense strand starting at position 3491 of SEQ ID NO: 3588
ggucuaauccauuaggucu

SEQ ID NO: 279339 - RNA, 19 nt, Artificial Sequence
  Description of Artificial Sequence: Synthetic oligonucleotide
  Antisense strand to SEQ ID NO: 279338
agaccuaauggauuagacc

SEQ ID NO: 279340 - RNA, 19 nt, Artificial Sequence
  Description of Artificial Sequence: Synthetic oligonucleotide
  Sense strand starting at position 3509 of SEQ ID NO: 3588
uagagugggcccugaaauu

SEQ ID NO: 279341 - RNA, 19 nt, Artificial Sequence
  Description of Artificial Sequence: Synthetic oligonucleotide
  Antisense strand to SEQ ID NO: 279340
aauuucagggcccacucua

SEQ ID NO: 279342 - RNA, 19 nt, Artificial Sequence
  Description of Artificial Sequence: Synthetic oligonucleotide
  Sense strand starting at position 3680 of SEQ ID NO: 3588
agagacucuuucuaacaag

SEQ ID NO: 279343 - RNA, 19 nt, Artificial Sequence
  Description of Artificial Sequence: Synthetic oligonucleotide
  Antisense strand to SEQ ID NO: 279342
cuuguuagaaagagucucu

SEQ ID NO: 279344 - RNA, 19 nt, Artificial Sequence
  Description of Artificial Sequence: Synthetic oligonucleotide
  Sense strand starting at position 3736 of SEQ ID NO: 3588
guagacuacuguuccuuaa

SEQ ID NO: 279345 - RNA, 19 nt, Artificial Sequence
  Description of Artificial Sequence: Synthetic oligonucleotide
  Antisense strand to SEQ ID NO: 279344
uuaaggaacaguagucuac

SEQ ID NO: 279346 - RNA, 19 nt, Artificial Sequence
  Description of Artificial Sequence: Synthetic oligonucleotide
  Sense strand starting at position 3960 of SEQ ID NO: 3588
auagaauacuucuugugga

SEQ ID NO: 279347 - RNA, 19 nt, Artificial Sequence
  Description of Artificial Sequence: Synthetic oligonucleotide
  Antisense strand to SEQ ID NO: 279346
uccacaagaaguauucuau

SEQ ID NO: 279348 - RNA, 19 nt, Artificial Sequence
  Description of Artificial Sequence: Synthetic oligonucleotide
  Sense strand starting at position 3983 of SEQ ID NO: 3588
acagcauucuggcuaagug

SEQ ID NO: 279349 - RNA, 19 nt, Artificial Sequence
  Description of Artificial Sequence: Synthetic oligonucleotide
  Antisense strand to SEQ ID NO: 279348
cacuuagccagaaugcugu

SEQ ID NO: 279350 - RNA, 19 nt, Artificial Sequence
  Description of Artificial Sequence: Synthetic oligonucleotide
  Sense strand starting at position 105 of SEQ ID NO: 3590
ggaauugggugaguggaau

SEQ ID NO: 279351 - RNA, 19 nt, Artificial Sequence
  Description of Artificial Sequence: Synthetic oligonucleotide
  Antisense strand to SEQ ID NO: 279350
auuccacucacccaauucc

SEQ ID NO: 279352 - RNA, 19 nt, Artificial Sequence
  Description of Artificial Sequence: Synthetic oligonucleotide
  Sense strand starting at position 117 of SEQ ID NO: 3590
guggaauauuauccuggcu

SEQ ID NO: 279353 - RNA, 19 nt, Artificial Sequence
  Description of Artificial Sequence: Synthetic oligonucleotide
  Antisense strand to SEQ ID NO: 279352
agccaggauaauauuccac

SEQ ID NO: 279354 - RNA, 19 nt, Artificial Sequence
  Description of Artificial Sequence: Synthetic oligonucleotide
  Sense strand starting at position 120 of SEQ ID NO: 3590
gaauauuauccuggcugag

SEQ ID NO: 279355 - RNA, 19 nt, Artificial Sequence
  Description of Artificial Sequence: Synthetic oligonucleotide
  Antisense strand to SEQ ID NO: 279354
cucagccaggauaauauuc

SEQ ID NO: 279356 - RNA, 19 nt, Artificial Sequence
  Description of Artificial Sequence: Synthetic oligonucleotide
  Sense strand starting at position 122 of SEQ ID NO: 3590
auauuauccuggcugagga

SEQ ID NO: 279357 - RNA, 19 nt, Artificial Sequence
  Description of Artificial Sequence: Synthetic oligonucleotide
  Antisense strand to SEQ ID NO: 279356
uccucagccaggauaauau

SEQ ID NO: 279358 - RNA, 19 nt, Artificial Sequence
  Description of Artificial Sequence: Synthetic oligonucleotide
  Sense strand starting at position 123 of SEQ ID NO: 3590
uauuauccuggcugaggau

SEQ ID NO: 279359 - RNA, 19 nt, Artificial Sequence
  Description of Artificial Sequence: Synthetic oligonucleotide
  Antisense strand to SEQ ID NO: 279358
auccucagccaggauaaua

SEQ ID NO: 279360 - RNA, 19 nt, Artificial Sequence
  Description of Artificial Sequence: Synthetic oligonucleotide
  Sense strand starting at position 124 of SEQ ID NO: 3590
auuauccuggcugaggauu

SEQ ID NO: 279361 - RNA, 19 nt, Artificial Sequence
  Description of Artificial Sequence: Synthetic oligonucleotide
  Antisense strand to SEQ ID NO: 279360
aauccucagccaggauaau

SEQ ID NO: 279362 - RNA, 19 nt, Artificial Sequence
  Description of Artificial Sequence: Synthetic oligonucleotide
  Sense strand starting at position 185 of SEQ ID NO: 3590
aggaacugguccuaagaag

SEQ ID NO: 279363 - RNA, 19 nt, Artificial Sequence
  Description of Artificial Sequence: Synthetic oligonucleotide
  Antisense strand to SEQ ID NO: 279362
cuucuuaggaccaguuccu

SEQ ID NO: 279364 - RNA, 19 nt, Artificial Sequence
  Description of Artificial Sequence: Synthetic oligonucleotide
  Sense strand starting at position 223 of SEQ ID NO: 3590
agugacuucuucuuagaag

SEQ ID NO: 279365 - RNA, 19 nt, Artificial Sequence
  Description of Artificial Sequence: Synthetic oligonucleotide
  Antisense strand to SEQ ID NO: 279364
cuucuaagaagaagucacu

SEQ ID NO: 279366 - RNA, 19 nt, Artificial Sequence
  Description of Artificial Sequence: Synthetic oligonucleotide
  Sense strand starting at position 428 of SEQ ID NO: 3590
agaccuuaccuugggacau

SEQ ID NO: 279367 - RNA, 19 nt, Artificial Sequence
  Description of Artificial Sequence: Synthetic oligonucleotide
  Antisense strand to SEQ ID NO: 279366
augucccaagguaaggucu

SEQ ID NO: 279368 - RNA, 19 nt, Artificial Sequence
  Description of Artificial Sequence: Synthetic oligonucleotide
  Sense strand starting at position 443 of SEQ ID NO: 3590
acaugaguugucggagcac

SEQ ID NO: 279369 - RNA, 19 nt, Artificial Sequence
  Description of Artificial Sequence: Synthetic oligonucleotide
  Antisense strand to SEQ ID NO: 279368
gugcuccgacaacucaugu

SEQ ID NO: 279370 - RNA, 19 nt, Artificial Sequence
  Description of Artificial Sequence: Synthetic oligonucleotide
  Sense strand starting at position 463 of SEQ ID NO: 3590
ccuuguaagcguuggagaa

SEQ ID NO: 279371 - RNA, 19 nt, Artificial Sequence
  Description of Artificial Sequence: Synthetic oligonucleotide
  Antisense strand to SEQ ID NO: 279370
uucuccaacgcuuacaagg

SEQ ID NO: 279372 - RNA, 19 nt, Artificial Sequence
  Description of Artificial Sequence: Synthetic oligonucleotide
  Sense strand starting at position 464 of SEQ ID NO: 3590
cuuguaagcguuggagaac

SEQ ID NO: 279373 - RNA, 19 nt, Artificial Sequence
  Description of Artificial Sequence: Synthetic oligonucleotide
  Antisense strand to SEQ ID NO: 279372
guucuccaacgcuuacaag

SEQ ID NO: 279374 - RNA, 19 nt, Artificial Sequence
  Description of Artificial Sequence: Synthetic oligonucleotide
  Sense strand starting at position 791 of SEQ ID NO: 3590
uacagacuuccaggugaga

SEQ ID NO: 279375 - RNA, 19 nt, Artificial Sequence
  Description of Artificial Sequence: Synthetic oligonucleotide
  Antisense strand to SEQ ID NO: 279374
ucucaccuggaagucugua

SEQ ID NO: 279376 - RNA, 19 nt, Artificial Sequence
  Description of Artificial Sequence: Synthetic oligonucleotide
  Sense strand starting at position 912 of SEQ ID NO: 3590
gggagaagcagaugcaauu

SEQ ID NO: 279377 - RNA, 19 nt, Artificial Sequence
  Description of Artificial Sequence: Synthetic oligonucleotide
  Antisense strand to SEQ ID NO: 279376
aauugcaucugcuucuccc

SEQ ID NO: 279378 - RNA, 19 nt, Artificial Sequence
  Description of Artificial Sequence: Synthetic oligonucleotide
  Sense strand starting at position 1025 of SEQ ID NO: 3590
uuaagaauuugugagucug

SEQ ID NO: 279379 - RNA, 19 nt, Artificial Sequence
  Description of Artificial Sequence: Synthetic oligonucleotide
  Antisense strand to SEQ ID NO: 279378
cagacucacaaauucuuaa

SEQ ID NO: 279380 - RNA, 19 nt, Artificial Sequence
  Description of Artificial Sequence: Synthetic oligonucleotide
  Sense strand starting at position 1035 of SEQ ID NO: 3590
gugagucuguauccuuaaa

SEQ ID NO: 279381 - RNA, 19 nt, Artificial Sequence
  Description of Artificial Sequence: Synthetic oligonucleotide
  Antisense strand to SEQ ID NO: 279380
uuuaaggauacagacucac

SEQ ID NO: 279382 - RNA, 19 nt, Artificial Sequence
  Description of Artificial Sequence: Synthetic oligonucleotide
  Sense strand starting at position 1061 of SEQ ID NO: 3590
guuugcuuaacugagugau

SEQ ID NO: 279383 - RNA, 19 nt, Artificial Sequence
  Description of Artificial Sequence: Synthetic oligonucleotide
  Antisense strand to SEQ ID NO: 279382
aucacucaguuaagcaaac

SEQ ID NO: 279384 - RNA, 19 nt, Artificial Sequence
  Description of Artificial Sequence: Synthetic oligonucleotide
  Sense strand starting at position 1063 of SEQ ID NO: 3590
uugcuuaacugagugauag

SEQ ID NO: 279385 - RNA, 19 nt, Artificial Sequence
  Description of Artificial Sequence: Synthetic oligonucleotide
  Antisense strand to SEQ ID NO: 279384
cuaucacucaguuaagcaa

SEQ ID NO: 279386 - RNA, 19 nt, Artificial Sequence
  Description of Artificial Sequence: Synthetic oligonucleotide
  Sense strand starting at position 1064 of SEQ ID NO: 3590
ugcuuaacugagugauagg

SEQ ID NO: 279387 - RNA, 19 nt, Artificial Sequence
  Description of Artificial Sequence: Synthetic oligonucleotide
  Antisense strand to SEQ ID NO: 279386
ccuaucacucaguuaagca

SEQ ID NO: 279388 - RNA, 19 nt, Artificial Sequence
  Description of Artificial Sequence: Synthetic oligonucleotide
  Sense strand starting at position 1067 of SEQ ID NO: 3590
uuaacugagugauagggaa

SEQ ID NO: 279389 - RNA, 19 nt, Artificial Sequence
  Description of Artificial Sequence: Synthetic oligonucleotide
  Antisense strand to SEQ ID NO: 279388
uucccuaucacucaguuaa

SEQ ID NO: 279390 - RNA, 19 nt, Artificial Sequence
  Description of Artificial Sequence: Synthetic oligonucleotide
  Sense strand starting at position 1188 of SEQ ID NO: 3590
ccuauaauggccuggaacu

SEQ ID NO: 279391 - RNA, 19 nt, Artificial Sequence
  Description of Artificial Sequence: Synthetic oligonucleotide
  Antisense strand to SEQ ID NO: 279390
aguuccaggccauuauagg

SEQ ID NO: 279392 - RNA, 19 nt, Artificial Sequence
  Description of Artificial Sequence: Synthetic oligonucleotide
  Sense strand starting at position 1705 of SEQ ID NO: 3590
gagaucagaucgcugcaau

SEQ ID NO: 279393 - RNA, 19 nt, Artificial Sequence
  Description of Artificial Sequence: Synthetic oligonucleotide
  Antisense strand to SEQ ID NO: 279392
auugcagcgaucugaucuc

SEQ ID NO: 279394 - RNA, 19 nt, Artificial Sequence
  Description of Artificial Sequence: Synthetic oligonucleotide
  Sense strand starting at position 1706 of SEQ ID NO: 3590
agaucagaucgcugcaauc

SEQ ID NO: 279395 - RNA, 19 nt, Artificial Sequence
  Description of Artificial Sequence: Synthetic oligonucleotide
  Antisense strand to SEQ ID NO: 279394
gauugcagcgaucugaucu

SEQ ID NO: 279396 - RNA, 19 nt, Artificial Sequence
  Description of Artificial Sequence: Synthetic oligonucleotide
  Sense strand starting at position 1797 of SEQ ID NO: 3590
gcuuccacugcccagagau

SEQ ID NO: 279397 - RNA, 19 nt, Artificial Sequence
  Description of Artificial Sequence: Synthetic oligonucleotide
  Antisense strand to SEQ ID NO: 279396
aucucugggcaguggaagc

SEQ ID NO: 279398 - RNA, 19 nt, Artificial Sequence
  Description of Artificial Sequence: Synthetic oligonucleotide
  Sense strand starting at position 2511 of SEQ ID NO: 3590
aagcuaauuugcgucacau

SEQ ID NO: 279399 - RNA, 19 nt, Artificial Sequence
  Description of Artificial Sequence: Synthetic oligonucleotide
  Antisense strand to SEQ ID NO: 279398
augugacgcaaauuagcuu

SEQ ID NO: 279400 - RNA, 19 nt, Artificial Sequence
  Description of Artificial Sequence: Synthetic oligonucleotide
  Sense strand starting at position 2513 of SEQ ID NO: 3590
gcuaauuugcgucacauau

SEQ ID NO: 279401 - RNA, 19 nt, Artificial Sequence
  Description of Artificial Sequence: Synthetic oligonucleotide
  Antisense strand to SEQ ID NO: 279400
auaugugacgcaaauuagc

SEQ ID NO: 279402 - RNA, 19 nt, Artificial Sequence
  Description of Artificial Sequence: Synthetic oligonucleotide
  Sense strand starting at position 2715 of SEQ ID NO: 3590
guggguccagaacgauaaa

SEQ ID NO: 279403 - RNA, 19 nt, Artificial Sequence
  Description of Artificial Sequence: Synthetic oligonucleotide
  Antisense strand to SEQ ID NO: 279402
uuuaucguucuggacccac

SEQ ID NO: 279404 - RNA, 19 nt, Artificial Sequence
  Description of Artificial Sequence: Synthetic oligonucleotide
  Sense strand starting at position 2773 of SEQ ID NO: 3590
ucuuacucauugucauuga

SEQ ID NO: 279405 - RNA, 19 nt, Artificial Sequence
  Description of Artificial Sequence: Synthetic oligonucleotide
  Antisense strand to SEQ ID NO: 279404
ucaaugacaaugaguaaga

SEQ ID NO: 279406 - RNA, 19 nt, Artificial Sequence
  Description of Artificial Sequence: Synthetic oligonucleotide
  Sense strand starting at position 2777 of SEQ ID NO: 3590
acucauugucauugaagau

SEQ ID NO: 279407 - RNA, 19 nt, Artificial Sequence
  Description of Artificial Sequence: Synthetic oligonucleotide
  Antisense strand to SEQ ID NO: 279406
aucuucaaugacaaugagu

SEQ ID NO: 279408 - RNA, 19 nt, Artificial Sequence
  Description of Artificial Sequence: Synthetic oligonucleotide
  Sense strand starting at position 2789 of SEQ ID NO: 3590
ugaagauacuguucucuuc

SEQ ID NO: 279409 - RNA, 19 nt, Artificial Sequence
  Description of Artificial Sequence: Synthetic oligonucleotide
  Antisense strand to SEQ ID NO: 279408
gaagagaacaguaucuuca

SEQ ID NO: 279410 - RNA, 19 nt, Artificial Sequence
  Description of Artificial Sequence: Synthetic oligonucleotide
  Sense strand starting at position 2854 of SEQ ID NO: 3590
gcaucuacuaaggguauga

SEQ ID NO: 279411 - RNA, 19 nt, Artificial Sequence
  Description of Artificial Sequence: Synthetic oligonucleotide
  Antisense strand to SEQ ID NO: 279410
ucauacccuuaguagaugc

SEQ ID NO: 279412 - RNA, 19 nt, Artificial Sequence
  Description of Artificial Sequence: Synthetic oligonucleotide
  Sense strand starting at position 2891 of SEQ ID NO: 3590
acuugucugcguccaaguu

SEQ ID NO: 279413 - RNA, 19 nt, Artificial Sequence
  Description of Artificial Sequence: Synthetic oligonucleotide
  Antisense strand to SEQ ID NO: 279412
aacuuggacgcagacaagu

SEQ ID NO: 279414 - RNA, 19 nt, Artificial Sequence
  Description of Artificial Sequence: Synthetic oligonucleotide
  Sense strand starting at position 2917 of SEQ ID NO: 3590
cugcaaaguggagguguua

SEQ ID NO: 279415 - RNA, 19 nt, Artificial Sequence
  Description of Artificial Sequence: Synthetic oligonucleotide
  Antisense strand to SEQ ID NO: 279414
uaacaccuccacuuugcag

SEQ ID NO: 279416 - RNA, 19 nt, Artificial Sequence
  Description of Artificial Sequence: Synthetic oligonucleotide
  Sense strand starting at position 2951 of SEQ ID NO: 3590
cucacacagugauugugaa

SEQ ID NO: 279417 - RNA, 19 nt, Artificial Sequence
  Description of Artificial Sequence: Synthetic oligonucleotide
  Antisense strand to SEQ ID NO: 279416
uucacaaucacugugugag

SEQ ID NO: 279418 - RNA, 19 nt, Artificial Sequence
  Description of Artificial Sequence: Synthetic oligonucleotide
  Sense strand starting at position 2991 of SEQ ID NO: 3590
auggaucacuuagaaggau

SEQ ID NO: 279419 - RNA, 19 nt, Artificial Sequence
  Description of Artificial Sequence: Synthetic oligonucleotide
  Antisense strand to SEQ ID NO: 279418
auccuucuaagugauccau

SEQ ID NO: 279420 - RNA, 19 nt, Artificial Sequence
  Description of Artificial Sequence: Synthetic oligonucleotide
  Sense strand starting at position 3047 of SEQ ID NO: 3590
agcugucaucauuagcuuu

SEQ ID NO: 279421 - RNA, 19 nt, Artificial Sequence
  Description of Artificial Sequence: Synthetic oligonucleotide
  Antisense strand to SEQ ID NO: 279420
aaagcuaaugaugacagcu

SEQ ID NO: 279422 - RNA, 19 nt, Artificial Sequence
  Description of Artificial Sequence: Synthetic oligonucleotide
  Sense strand starting at position 3210 of SEQ ID NO: 3590
gcaccuugcccggcuaauu

SEQ ID NO: 279423 - RNA, 19 nt, Artificial Sequence
  Description of Artificial Sequence: Synthetic oligonucleotide
  Antisense strand to SEQ ID NO: 279422
aauuagccgggcaaggugc

SEQ ID NO: 279424 - RNA, 19 nt, Artificial Sequence
  Description of Artificial Sequence: Synthetic oligonucleotide
  Sense strand starting at position 3357 of SEQ ID NO: 3590
gccucaucauuagcuuuga

SEQ ID NO: 279425 - RNA, 19 nt, Artificial Sequence
  Description of Artificial Sequence: Synthetic oligonucleotide
  Antisense strand to SEQ ID NO: 279424
ucaaagcuaaugaugaggc

SEQ ID NO: 279426 - RNA, 19 nt, Artificial Sequence
  Description of Artificial Sequence: Synthetic oligonucleotide
  Sense strand starting at position 3398 of SEQ ID NO: 3590
ccaccucgaggcuaucaau

SEQ ID NO: 279427 - RNA, 19 nt, Artificial Sequence
  Description of Artificial Sequence: Synthetic oligonucleotide
  Antisense strand to SEQ ID NO: 279426
auugauagccucgaggugg

SEQ ID NO: 279428 - RNA, 19 nt, Artificial Sequence
  Description of Artificial Sequence: Synthetic oligonucleotide
  Sense strand starting at position 3555 of SEQ ID NO: 3590
cuagucauccaauaaguag

SEQ ID NO: 279429 - RNA, 19 nt, Artificial Sequence
  Description of Artificial Sequence: Synthetic oligonucleotide
  Antisense strand to SEQ ID NO: 279428
cuacuuauuggaugacuag

SEQ ID NO: 279430 - RNA, 19 nt, Artificial Sequence
  Description of Artificial Sequence: Synthetic oligonucleotide
  Sense strand starting at position 183 of SEQ ID NO: 3589
ccgaucuugugaguucuau

SEQ ID NO: 279431 - RNA, 19 nt, Artificial Sequence
  Description of Artificial Sequence: Synthetic oligonucleotide
  Antisense strand to SEQ ID NO: 279430
auagaacucacaagaucgg

SEQ ID NO: 279432 - RNA, 19 nt, Artificial Sequence
  Description of Artificial Sequence: Synthetic oligonucleotide
  Sense strand starting at position 225 of SEQ ID NO: 3589
uacagacuuccaggugaga

SEQ ID NO: 279433 - RNA, 19 nt, Artificial Sequence
  Description of Artificial Sequence: Synthetic oligonucleotide
  Antisense strand to SEQ ID NO: 279432
ucucaccuggaagucugua

SEQ ID NO: 279434 - RNA, 19 nt, Artificial Sequence
  Description of Artificial Sequence: Synthetic oligonucleotide
  Sense strand starting at position 346 of SEQ ID NO: 3589
gggagaagcagaugcaauu

SEQ ID NO: 279435 - RNA, 19 nt, Artificial Sequence
  Description of Artificial Sequence: Synthetic oligonucleotide
  Antisense strand to SEQ ID NO: 279434
aauugcaucugcuucuccc

SEQ ID NO: 279436 - RNA, 19 nt, Artificial Sequence
  Description of Artificial Sequence: Synthetic oligonucleotide
  Sense strand starting at position 459 of SEQ ID NO: 3589
uuaagaauuugugagucug

SEQ ID NO: 279437 - RNA, 19 nt, Artificial Sequence
  Description of Artificial Sequence: Synthetic oligonucleotide
  Antisense strand to SEQ ID NO: 279436
cagacucacaaauucuuaa

SEQ ID NO: 279438 - RNA, 19 nt, Artificial Sequence
  Description of Artificial Sequence: Synthetic oligonucleotide
  Sense strand starting at position 469 of SEQ ID NO: 3589
gugagucuguauccuuaaa

SEQ ID NO: 279439 - RNA, 19 nt, Artificial Sequence
  Description of Artificial Sequence: Synthetic oligonucleotide
  Antisense strand to SEQ ID NO: 279438
uuuaaggauacagacucac

SEQ ID NO: 279440 - RNA, 19 nt, Artificial Sequence
  Description of Artificial Sequence: Synthetic oligonucleotide
  Sense strand starting at position 495 of SEQ ID NO: 3589
guuugcuuaacugagugau

SEQ ID NO: 279441 - RNA, 19 nt, Artificial Sequence
  Description of Artificial Sequence: Synthetic oligonucleotide
  Antisense strand to SEQ ID NO: 279440
aucacucaguuaagcaaac

SEQ ID NO: 279442 - RNA, 19 nt, Artificial Sequence
  Description of Artificial Sequence: Synthetic oligonucleotide
  Sense strand starting at position 497 of SEQ ID NO: 3589
uugcuuaacugagugauag

SEQ ID NO: 279443 - RNA, 19 nt, Artificial Sequence
  Description of Artificial Sequence: Synthetic oligonucleotide
  Antisense strand to SEQ ID NO: 279442
cuaucacucaguuaagcaa

SEQ ID NO: 279444 - RNA, 19 nt, Artificial Sequence
  Description of Artificial Sequence: Synthetic oligonucleotide
  Sense strand starting at position 498 of SEQ ID NO: 3589
ugcuuaacugagugauagg

SEQ ID NO: 279445 - RNA, 19 nt, Artificial Sequence
  Description of Artificial Sequence: Synthetic oligonucleotide
  Antisense strand to SEQ ID NO: 279444
ccuaucacucaguuaagca

SEQ ID NO: 279446 - RNA, 19 nt, Artificial Sequence
  Description of Artificial Sequence: Synthetic oligonucleotide
  Sense strand starting at position 501 of SEQ ID NO: 3589
uuaacugagugauagggaa

SEQ ID NO: 279447 - RNA, 19 nt, Artificial Sequence
  Description of Artificial Sequence: Synthetic oligonucleotide
  Antisense strand to SEQ ID NO: 279446
uucccuaucacucaguuaa

SEQ ID NO: 279448 - RNA, 19 nt, Artificial Sequence
  Description of Artificial Sequence: Synthetic oligonucleotide
  Sense strand starting at position 622 of SEQ ID NO: 3589
ccuauaauggccuggaacu

SEQ ID NO: 279449 - RNA, 19 nt, Artificial Sequence
  Description of Artificial Sequence: Synthetic oligonucleotide
  Antisense strand to SEQ ID NO: 279448
aguuccaggccauuauagg

SEQ ID NO: 279450 - RNA, 19 nt, Artificial Sequence
  Description of Artificial Sequence: Synthetic oligonucleotide
  Sense strand starting at position 1021 of SEQ ID NO: 3589
ugucucuguccgcacagau

SEQ ID NO: 279451 - RNA, 19 nt, Artificial Sequence
  Description of Artificial Sequence: Synthetic oligonucleotide
  Antisense strand to SEQ ID NO: 279450
aucugugcggacagagaca

SEQ ID NO: 279452 - RNA, 19 nt, Artificial Sequence
  Description of Artificial Sequence: Synthetic oligonucleotide
  Sense strand starting at position 1139 of SEQ ID NO: 3589
gagaucagaucgcugcaau

SEQ ID NO: 279453 - RNA, 19 nt, Artificial Sequence
  Description of Artificial Sequence: Synthetic oligonucleotide
  Antisense strand to SEQ ID NO: 279452
auugcagcgaucugaucuc

SEQ ID NO: 279454 - RNA, 19 nt, Artificial Sequence
  Description of Artificial Sequence: Synthetic oligonucleotide
  Sense strand starting at position 1140 of SEQ ID NO: 3589
agaucagaucgcugcaauc

SEQ ID NO: 279455 - RNA, 19 nt, Artificial Sequence
  Description of Artificial Sequence: Synthetic oligonucleotide
  Antisense strand to SEQ ID NO: 279454
gauugcagcgaucugaucu

SEQ ID NO: 279456 - RNA, 19 nt, Artificial Sequence
  Description of Artificial Sequence: Synthetic oligonucleotide
  Sense strand starting at position 1231 of SEQ ID NO: 3589
gcuuccacugcccagagau

SEQ ID NO: 279457 - RNA, 19 nt, Artificial Sequence
  Description of Artificial Sequence: Synthetic oligonucleotide
  Antisense strand to SEQ ID NO: 279456
aucucugggcaguggaagc

SEQ ID NO: 279458 - RNA, 19 nt, Artificial Sequence
  Description of Artificial Sequence: Synthetic oligonucleotide
  Sense strand starting at position 1945 of SEQ ID NO: 3589
aagcuaauuugcgucacau

SEQ ID NO: 279459 - RNA, 19 nt, Artificial Sequence
  Description of Artificial Sequence: Synthetic oligonucleotide
  Antisense strand to SEQ ID NO: 279458
augugacgcaaauuagcuu

SEQ ID NO: 279460 - RNA, 19 nt, Artificial Sequence
  Description of Artificial Sequence: Synthetic oligonucleotide
  Sense strand starting at position 1947 of SEQ ID NO: 3589
gcuaauuugcgucacauau

SEQ ID NO: 279461 - RNA, 19 nt, Artificial Sequence
  Description of Artificial Sequence: Synthetic oligonucleotide
  Antisense strand to SEQ ID NO: 279460
auaugugacgcaaauuagc

SEQ ID NO: 279462 - RNA, 19 nt, Artificial Sequence
  Description of Artificial Sequence: Synthetic oligonucleotide
  Sense strand starting at position 2149 of SEQ ID NO: 3589
guggguccagaacgauaaa

SEQ ID NO: 279463 - RNA, 19 nt, Artificial Sequence
  Description of Artificial Sequence: Synthetic oligonucleotide
  Antisense strand to SEQ ID NO: 279462
uuuaucguucuggacccac

SEQ ID NO: 279464 - RNA, 19 nt, Artificial Sequence
  Description of Artificial Sequence: Synthetic oligonucleotide
  Sense strand starting at position 2207 of SEQ ID NO: 3589
ucuuacucauugucauuga

SEQ ID NO: 279465 - RNA, 19 nt, Artificial Sequence
  Description of Artificial Sequence: Synthetic oligonucleotide
  Antisense strand to SEQ ID NO: 279464
ucaaugacaaugaguaaga

SEQ ID NO: 279466 - RNA, 19 nt, Artificial Sequence
  Description of Artificial Sequence: Synthetic oligonucleotide
  Sense strand starting at position 2211 of SEQ ID NO: 3589
acucauugucauugaagau

SEQ ID NO: 279467 - RNA, 19 nt, Artificial Sequence
  Description of Artificial Sequence: Synthetic oligonucleotide
  Antisense strand to SEQ ID NO: 279466
aucuucaaugacaaugagu

SEQ ID NO: 279468 - RNA, 19 nt, Artificial Sequence
  Description of Artificial Sequence: Synthetic oligonucleotide
  Sense strand starting at position 2223 of SEQ ID NO: 3589
ugaagauacuguucucuuc

SEQ ID NO: 279469 - RNA, 19 nt, Artificial Sequence
  Description of Artificial Sequence: Synthetic oligonucleotide
  Antisense strand to SEQ ID NO: 279468
gaagagaacaguaucuuca

SEQ ID NO: 279470 - RNA, 19 nt, Artificial Sequence
  Description of Artificial Sequence: Synthetic oligonucleotide
  Sense strand starting at position 2288 of SEQ ID NO: 3589
gcaucuacuaaggguauga

SEQ ID NO: 279471 - RNA, 19 nt, Artificial Sequence
  Description of Artificial Sequence: Synthetic oligonucleotide
  Antisense strand to SEQ ID NO: 279470
ucauacccuuaguagaugc

SEQ ID NO: 279472 - RNA, 19 nt, Artificial Sequence
  Description of Artificial Sequence: Synthetic oligonucleotide
  Sense strand starting at position 2325 of SEQ ID NO: 3589
acuugucugcguccaaguu

SEQ ID NO: 279473 - RNA, 19 nt, Artificial Sequence
  Description of Artificial Sequence: Synthetic oligonucleotide
  Antisense strand to SEQ ID NO: 279472
aacuuggacgcagacaagu

SEQ ID NO: 279474 - RNA, 19 nt, Artificial Sequence
  Description of Artificial Sequence: Synthetic oligonucleotide
  Sense strand starting at position 2351 of SEQ ID NO: 3589
cugcaaaguggagguguua

SEQ ID NO: 279475 - RNA, 19 nt, Artificial Sequence
  Description of Artificial Sequence: Synthetic oligonucleotide
  Antisense strand to SEQ ID NO: 279474
uaacaccuccacuuugcag

SEQ ID NO: 279476 - RNA, 19 nt, Artificial Sequence
  Description of Artificial Sequence: Synthetic oligonucleotide
  Sense strand starting at position 2385 of SEQ ID NO: 3589
cucacacagugauugugaa

SEQ ID NO: 279477 - RNA, 19 nt, Artificial Sequence
  Description of Artificial Sequence: Synthetic oligonucleotide
  Antisense strand to SEQ ID NO: 279476
uucacaaucacugugugag

SEQ ID NO: 279478 - RNA, 19 nt, Artificial Sequence
  Description of Artificial Sequence: Synthetic oligonucleotide
  Sense strand starting at position 2425 of SEQ ID NO: 3589
auggaucacuuagaaggau

SEQ ID NO: 279479 - RNA, 19 nt, Artificial Sequence
  Description of Artificial Sequence: Synthetic oligonucleotide
  Antisense strand to SEQ ID NO: 279478
auccuucuaagugauccau

SEQ ID NO: 279480 - RNA, 19 nt, Artificial Sequence
  Description of Artificial Sequence: Synthetic oligonucleotide
  Sense strand starting at position 2481 of SEQ ID NO: 3589
agcugucaucauuagcuuu

SEQ ID NO: 279481 - RNA, 19 nt, Artificial Sequence
  Description of Artificial Sequence: Synthetic oligonucleotide
  Antisense strand to SEQ ID NO: 279480
aaagcuaaugaugacagcu

SEQ ID NO: 279482 - RNA, 19 nt, Artificial Sequence
  Description of Artificial Sequence: Synthetic oligonucleotide
  Sense strand starting at position 2544 of SEQ ID NO: 3589
uggauacuggcgugaucuu

SEQ ID NO: 279483 - RNA, 19 nt, Artificial Sequence
  Description of Artificial Sequence: Synthetic oligonucleotide
  Antisense strand to SEQ ID NO: 279482
aagaucacgccaguaucca

SEQ ID NO: 279484 - RNA, 19 nt, Artificial Sequence
  Description of Artificial Sequence: Synthetic oligonucleotide
  Sense strand starting at position 2644 of SEQ ID NO: 3589
gcaccuugcccggcuaauu

SEQ ID NO: 279485 - RNA, 19 nt, Artificial Sequence
  Description of Artificial Sequence: Synthetic oligonucleotide
  Antisense strand to SEQ ID NO: 279484
aauuagccgggcaaggugc

SEQ ID NO: 279486 - RNA, 19 nt, Artificial Sequence
  Description of Artificial Sequence: Synthetic oligonucleotide
  Sense strand starting at position 2791 of SEQ ID NO: 3589
gccucaucauuagcuuuga

SEQ ID NO: 279487 - RNA, 19 nt, Artificial Sequence
  Description of Artificial Sequence: Synthetic oligonucleotide
  Antisense strand to SEQ ID NO: 279486
ucaaagcuaaugaugaggc

SEQ ID NO: 279488 - RNA, 19 nt, Artificial Sequence
  Description of Artificial Sequence: Synthetic oligonucleotide
  Sense strand starting at position 2832 of SEQ ID NO: 3589
ccaccucgaggcuaucaau

SEQ ID NO: 279489 - RNA, 19 nt, Artificial Sequence
  Description of Artificial Sequence: Synthetic oligonucleotide
  Antisense strand to SEQ ID NO: 279488
auugauagccucgaggugg

SEQ ID NO: 279490 - RNA, 19 nt, Artificial Sequence
  Description of Artificial Sequence: Synthetic oligonucleotide
  Sense strand starting at position 2989 of SEQ ID NO: 3589
cuagucauccaauaaguag

SEQ ID NO: 279491 - RNA, 19 nt, Artificial Sequence
  Description of Artificial Sequence: Synthetic oligonucleotide
  Antisense strand to SEQ ID NO: 279490
cuacuuauuggaugacuag

SEQ ID NO: 279492 - RNA, 19 nt, Artificial Sequence
  Description of Artificial Sequence: Synthetic oligonucleotide
  Sense strand starting at position 3616 of SEQ ID NO: 3589
ccgggcauuccuuaauaua

SEQ ID NO: 279493 - RNA, 19 nt, Artificial Sequence
  Description of Artificial Sequence: Synthetic oligonucleotide
  Antisense strand to SEQ ID NO: 279492
uauauuaaggaaugcccgg

SEQ ID NO: 279494 - RNA, 19 nt, Artificial Sequence
  Description of Artificial Sequence: Synthetic oligonucleotide
  Sense strand starting at position 3761 of SEQ ID NO: 3589
cucuguaaauuagcauaga

SEQ ID NO: 279495 - RNA, 19 nt, Artificial Sequence
  Description of Artificial Sequence: Synthetic oligonucleotide
  Antisense strand to SEQ ID NO: 279494
ucuaugcuaauuuacagag

SEQ ID NO: 279496 - RNA, 19 nt, Artificial Sequence
  Description of Artificial Sequence: Synthetic oligonucleotide
  Sense strand starting at position 3822 of SEQ ID NO: 3589
guugauagaccaggucaau

SEQ ID NO: 279497 - RNA, 19 nt, Artificial Sequence
  Description of Artificial Sequence: Synthetic oligonucleotide
  Antisense strand to SEQ ID NO: 279496
auugaccuggucuaucaac

SEQ ID NO: 279498 - RNA, 19 nt, Artificial Sequence
  Description of Artificial Sequence: Synthetic oligonucleotide
  Sense strand starting at position 3852 of SEQ ID NO: 3589
acucuucuucuggguuuau

SEQ ID NO: 279499 - RNA, 19 nt, Artificial Sequence
  Description of Artificial Sequence: Synthetic oligonucleotide
  Antisense strand to SEQ ID NO: 279498
auaaacccagaagaagagu

SEQ ID NO: 279500 - RNA, 19 nt, Artificial Sequence
  Description of Artificial Sequence: Synthetic oligonucleotide
  Sense strand starting at position 3887 of SEQ ID NO: 3589
uguuguauuucccuguauu

SEQ ID NO: 279501 - RNA, 19 nt, Artificial Sequence
  Description of Artificial Sequence: Synthetic oligonucleotide
  Antisense strand to SEQ ID NO: 279500
aauacagggaaauacaaca

SEQ ID NO: 279502 - RNA, 19 nt, Artificial Sequence
  Description of Artificial Sequence: Synthetic oligonucleotide
  Sense strand starting at position 3901 of SEQ ID NO: 3589
guauuucuccaguguauaa

SEQ ID NO: 279503 - RNA, 19 nt, Artificial Sequence
  Description of Artificial Sequence: Synthetic oligonucleotide
  Antisense strand to SEQ ID NO: 279502
uuauacacuggagaaauac

SEQ ID NO: 279504 - RNA, 19 nt, Artificial Sequence
  Description of Artificial Sequence: Synthetic oligonucleotide
  Sense strand starting at position 3912 of SEQ ID NO: 3589
guguauaaccuguauauca

SEQ ID NO: 279505 - RNA, 19 nt, Artificial Sequence
  Description of Artificial Sequence: Synthetic oligonucleotide
  Antisense strand to SEQ ID NO: 279504
ugauauacagguuauacac

SEQ ID NO: 279506 - RNA, 19 nt, Artificial Sequence
  Description of Artificial Sequence: Synthetic oligonucleotide
  Sense strand starting at position 3919 of SEQ ID NO: 3589
accuguauaucaccuguau

SEQ ID NO: 279507 - RNA, 19 nt, Artificial Sequence
  Description of Artificial Sequence: Synthetic oligonucleotide
  Antisense strand to SEQ ID NO: 279506
auacaggugauauacaggu

SEQ ID NO: 279508 - RNA, 19 nt, Artificial Sequence
  Description of Artificial Sequence: Synthetic oligonucleotide
  Sense strand starting at position 3939 of SEQ ID NO: 3589
uccuguaaacuagaaguua

SEQ ID NO: 279509 - RNA, 19 nt, Artificial Sequence
  Description of Artificial Sequence: Synthetic oligonucleotide
  Antisense strand to SEQ ID NO: 279508
uaacuucuaguuuacagga

SEQ ID NO: 279510 - RNA, 19 nt, Artificial Sequence
  Description of Artificial Sequence: Synthetic oligonucleotide
  Sense strand starting at position 127 of SEQ ID NO: 3591
ggcagaagccacuaagcua

SEQ ID NO: 279511 - RNA, 19 nt, Artificial Sequence
  Description of Artificial Sequence: Synthetic oligonucleotide
  Antisense strand to SEQ ID NO: 279510
uagcuuaguggcuucugcc

SEQ ID NO: 279512 - RNA, 19 nt, Artificial Sequence
  Description of Artificial Sequence: Synthetic oligonucleotide
  Sense strand starting at position 328 of SEQ ID NO: 3591
gugugaucguggauaaguu

SEQ ID NO: 279513 - RNA, 19 nt, Artificial Sequence
  Description of Artificial Sequence: Synthetic oligonucleotide
  Antisense strand to SEQ ID NO: 279512
aacuuauccacgaucacac

SEQ ID NO: 279514 - RNA, 19 nt, Artificial Sequence
  Description of Artificial Sequence: Synthetic oligonucleotide
  Sense strand starting at position 329 of SEQ ID NO: 3591
ugugaucguggauaaguua

SEQ ID NO: 279515 - RNA, 19 nt, Artificial Sequence
  Description of Artificial Sequence: Synthetic oligonucleotide
  Antisense strand to SEQ ID NO: 279514
uaacuuauccacgaucaca

SEQ ID NO: 279516 - RNA, 19 nt, Artificial Sequence
  Description of Artificial Sequence: Synthetic oligonucleotide
  Sense strand starting at position 337 of SEQ ID NO: 3591
uggauaaguuaggugacuu

SEQ ID NO: 279517 - RNA, 19 nt, Artificial Sequence
  Description of Artificial Sequence: Synthetic oligonucleotide
  Antisense strand to SEQ ID NO: 279516
aagucaccuaacuuaucca

SEQ ID NO: 279518 - RNA, 19 nt, Artificial Sequence
  Description of Artificial Sequence: Synthetic oligonucleotide
  Sense strand starting at position 338 of SEQ ID NO: 3591
ggauaaguuaggugacuuc

SEQ ID NO: 279519 - RNA, 19 nt, Artificial Sequence
  Description of Artificial Sequence: Synthetic oligonucleotide
  Antisense strand to SEQ ID NO: 279518
gaagucaccuaacuuaucc

SEQ ID NO: 279520 - RNA, 19 nt, Artificial Sequence
  Description of Artificial Sequence: Synthetic oligonucleotide
  Sense strand starting at position 462 of SEQ ID NO: 3591
guaguuaauccugguauuu

SEQ ID NO: 279521 - RNA, 19 nt, Artificial Sequence
  Description of Artificial Sequence: Synthetic oligonucleotide
  Antisense strand to SEQ ID NO: 279520
aaauaccaggauuaacuac

SEQ ID NO: 279522 - RNA, 19 nt, Artificial Sequence
  Description of Artificial Sequence: Synthetic oligonucleotide
  Sense strand starting at position 611 of SEQ ID NO: 3591
acuuaaucccuguaggcuu

SEQ ID NO: 279523 - RNA, 19 nt, Artificial Sequence
  Description of Artificial Sequence: Synthetic oligonucleotide
  Antisense strand to SEQ ID NO: 279522
aagccuacagggauuaagu

SEQ ID NO: 279524 - RNA, 19 nt, Artificial Sequence
  Description of Artificial Sequence: Synthetic oligonucleotide
  Sense strand starting at position 651 of SEQ ID NO: 3591
agaggagucuaaccugauu

SEQ ID NO: 279525 - RNA, 19 nt, Artificial Sequence
  Description of Artificial Sequence: Synthetic oligonucleotide
  Antisense strand to SEQ ID NO: 279524
aaucagguuagacuccucu

SEQ ID NO: 279526 - RNA, 19 nt, Artificial Sequence
  Description of Artificial Sequence: Synthetic oligonucleotide
  Sense strand starting at position 1019 of SEQ ID NO: 3591
guagauguauuucuuuagu

SEQ ID NO: 279527 - RNA, 19 nt, Artificial Sequence
  Description of Artificial Sequence: Synthetic oligonucleotide
  Antisense strand to SEQ ID NO: 279526
acuaaagaaauacaucuac

SEQ ID NO: 279528 - RNA, 19 nt, Artificial Sequence
  Description of Artificial Sequence: Synthetic oligonucleotide
  Sense strand starting at position 1049 of SEQ ID NO: 3591
aagucuggaucauucugua

SEQ ID NO: 279529 - RNA, 19 nt, Artificial Sequence
  Description of Artificial Sequence: Synthetic oligonucleotide
  Antisense strand to SEQ ID NO: 279528
uacagaaugauccagacuu

SEQ ID NO: 279530 - RNA, 19 nt, Artificial Sequence
  Description of Artificial Sequence: Synthetic oligonucleotide
  Sense strand starting at position 1053 of SEQ ID NO: 3591
cuggaucauucuguauaua

SEQ ID NO: 279531 - RNA, 19 nt, Artificial Sequence
  Description of Artificial Sequence: Synthetic oligonucleotide
  Antisense strand to SEQ ID NO: 279530
uauauacagaaugauccag

SEQ ID NO: 279532 - RNA, 19 nt, Artificial Sequence
  Description of Artificial Sequence: Synthetic oligonucleotide
  Sense strand starting at position 1054 of SEQ ID NO: 3591
uggaucauucuguauauau

SEQ ID NO: 279533 - RNA, 19 nt, Artificial Sequence
  Description of Artificial Sequence: Synthetic oligonucleotide
  Antisense strand to SEQ ID NO: 279532
auauauacagaaugaucca

SEQ ID NO: 279534 - RNA, 19 nt, Artificial Sequence
  Description of Artificial Sequence: Synthetic oligonucleotide
  Sense strand starting at position 1235 of SEQ ID NO: 3591
gugagauuuguuuggucau

SEQ ID NO: 279535 - RNA, 19 nt, Artificial Sequence
  Description of Artificial Sequence: Synthetic oligonucleotide
  Antisense strand to SEQ ID NO: 279534
augaccaaacaaaucucac

SEQ ID NO: 279536 - RNA, 19 nt, Artificial Sequence
  Description of Artificial Sequence: Synthetic oligonucleotide
  Sense strand starting at position 1260 of SEQ ID NO: 3591
acagaaccugacugcuauu

SEQ ID NO: 279537 - RNA, 19 nt, Artificial Sequence
  Description of Artificial Sequence: Synthetic oligonucleotide
  Antisense strand to SEQ ID NO: 279536
aauagcagucagguucugu

SEQ ID NO: 279538 - RNA, 19 nt, Artificial Sequence
  Description of Artificial Sequence: Synthetic oligonucleotide
  Sense strand starting at position 1385 of SEQ ID NO: 3591
ccagguaaauacucaguuu

SEQ ID NO: 279539 - RNA, 19 nt, Artificial Sequence
  Description of Artificial Sequence: Synthetic oligonucleotide
  Antisense strand to SEQ ID NO: 279538
aaacugaguauuuaccugg

SEQ ID NO: 279540 - RNA, 19 nt, Artificial Sequence
  Description of Artificial Sequence: Synthetic oligonucleotide
  Sense strand starting at position 1388 of SEQ ID NO: 3591
gguaaauacucaguuugac

SEQ ID NO: 279541 - RNA, 19 nt, Artificial Sequence
  Description of Artificial Sequence: Synthetic oligonucleotide
  Antisense strand to SEQ ID NO: 279540
gucaaacugaguauuuacc

SEQ ID NO: 279542 - RNA, 19 nt, Artificial Sequence
  Description of Artificial Sequence: Synthetic oligonucleotide
  Sense strand starting at position 1602 of SEQ ID NO: 3591
gggaaacagcuccagucua

SEQ ID NO: 279543 - RNA, 19 nt, Artificial Sequence
  Description of Artificial Sequence: Synthetic oligonucleotide
  Antisense strand to SEQ ID NO: 279542
uagacuggagcuguuuccc

SEQ ID NO: 279544 - RNA, 19 nt, Artificial Sequence
  Description of Artificial Sequence: Synthetic oligonucleotide
  Sense strand starting at position 1874 of SEQ ID NO: 3591
gagaacggagcuugugaua

SEQ ID NO: 279545 - RNA, 19 nt, Artificial Sequence
  Description of Artificial Sequence: Synthetic oligonucleotide
  Antisense strand to SEQ ID NO: 279544
uaucacaagcuccguucuc

SEQ ID NO: 279546 - RNA, 19 nt, Artificial Sequence
  Description of Artificial Sequence: Synthetic oligonucleotide
  Sense strand starting at position 2415 of SEQ ID NO: 3591
cuggguuugaaugggacua

SEQ ID NO: 279547 - RNA, 19 nt, Artificial Sequence
  Description of Artificial Sequence: Synthetic oligonucleotide
  Antisense strand to SEQ ID NO: 279546
uagucccauucaaacccag

SEQ ID NO: 279548 - RNA, 19 nt, Artificial Sequence
  Description of Artificial Sequence: Synthetic oligonucleotide
  Sense strand starting at position 2679 of SEQ ID NO: 3591
ccuguuugggagcagaaua

SEQ ID NO: 279549 - RNA, 19 nt, Artificial Sequence
  Description of Artificial Sequence: Synthetic oligonucleotide
  Antisense strand to SEQ ID NO: 279548
uauucugcucccaaacagg

SEQ ID NO: 279550 - RNA, 19 nt, Artificial Sequence
  Description of Artificial Sequence: Synthetic oligonucleotide
  Sense strand starting at position 2734 of SEQ ID NO: 3591
agccaagauuauucgagga

SEQ ID NO: 279551 - RNA, 19 nt, Artificial Sequence
  Description of Artificial Sequence: Synthetic oligonucleotide
  Antisense strand to SEQ ID NO: 279550
uccucgaauaaucuuggcu

SEQ ID NO: 279552 - RNA, 19 nt, Artificial Sequence
  Description of Artificial Sequence: Synthetic oligonucleotide
  Sense strand starting at position 2964 of SEQ ID NO: 3591
uggcucugccaugauaaau

SEQ ID NO: 279553 - RNA, 19 nt, Artificial Sequence
  Description of Artificial Sequence: Synthetic oligonucleotide
  Antisense strand to SEQ ID NO: 279552
auuuaucauggcagagcca

SEQ ID NO: 279554 - RNA, 19 nt, Artificial Sequence
  Description of Artificial Sequence: Synthetic oligonucleotide
  Sense strand starting at position 3203 of SEQ ID NO: 3591
uguagaagguguuuaaaga

SEQ ID NO: 279555 - RNA, 19 nt, Artificial Sequence
  Description of Artificial Sequence: Synthetic oligonucleotide
  Antisense strand to SEQ ID NO: 279554
ucuuuaaacaccuucuaca

SEQ ID NO: 279556 - RNA, 19 nt, Artificial Sequence
  Description of Artificial Sequence: Synthetic oligonucleotide
  Sense strand starting at position 3217 of SEQ ID NO: 3591
aaagaaugcuuguuagagu

SEQ ID NO: 279557 - RNA, 19 nt, Artificial Sequence
  Description of Artificial Sequence: Synthetic oligonucleotide
  Antisense strand to SEQ ID NO: 279556
acucuaacaagcauucuuu

SEQ ID NO: 279558 - RNA, 19 nt, Artificial Sequence
  Description of Artificial Sequence: Synthetic oligonucleotide
  Sense strand starting at position 3228 of SEQ ID NO: 3591
guuagaguugcuuagaauu

SEQ ID NO: 279559 - RNA, 19 nt, Artificial Sequence
  Description of Artificial Sequence: Synthetic oligonucleotide
  Antisense strand to SEQ ID NO: 279558
aauucuaagcaacucuaac

SEQ ID NO: 279560 - RNA, 19 nt, Artificial Sequence
  Description of Artificial Sequence: Synthetic oligonucleotide
  Sense strand starting at position 3234 of SEQ ID NO: 3591
guugcuuagaauuacgaaa

SEQ ID NO: 279561 - RNA, 19 nt, Artificial Sequence
  Description of Artificial Sequence: Synthetic oligonucleotide
  Antisense strand to SEQ ID NO: 279560
uuucguaauucuaagcaac

SEQ ID NO: 279562 - RNA, 19 nt, Artificial Sequence
  Description of Artificial Sequence: Synthetic oligonucleotide
  Sense strand starting at position 3262 of SEQ ID NO: 3591
uuacuuaguccuuagucaa

SEQ ID NO: 279563 - RNA, 19 nt, Artificial Sequence
  Description of Artificial Sequence: Synthetic oligonucleotide
  Antisense strand to SEQ ID NO: 279562
uugacuaaggacuaaguaa

SEQ ID NO: 279564 - RNA, 19 nt, Artificial Sequence
  Description of Artificial Sequence: Synthetic oligonucleotide
  Sense strand starting at position 3272 of SEQ ID NO: 3591
cuuagucaauccuuuggaa

SEQ ID NO: 279565 - RNA, 19 nt, Artificial Sequence
  Description of Artificial Sequence: Synthetic oligonucleotide
  Antisense strand to SEQ ID NO: 279564
uuccaaaggauugacuaag

SEQ ID NO: 279566 - RNA, 19 nt, Artificial Sequence
  Description of Artificial Sequence: Synthetic oligonucleotide
  Sense strand starting at position 3301 of SEQ ID NO: 3591
gcguuugaauuucugucca

SEQ ID NO: 279567 - RNA, 19 nt, Artificial Sequence
  Description of Artificial Sequence: Synthetic oligonucleotide
  Antisense strand to SEQ ID NO: 279566
uggacagaaauucaaacgc

SEQ ID NO: 279568 - RNA, 19 nt, Artificial Sequence
  Description of Artificial Sequence: Synthetic oligonucleotide
  Sense strand starting at position 3474 of SEQ ID NO: 3591
ugggaaagcuugccauaaa

SEQ ID NO: 279569 - RNA, 19 nt, Artificial Sequence
  Description of Artificial Sequence: Synthetic oligonucleotide
  Antisense strand to SEQ ID NO: 279568
uuuauggcaagcuuuccca

SEQ ID NO: 279570 - RNA, 19 nt, Artificial Sequence
  Description of Artificial Sequence: Synthetic oligonucleotide
  Sense strand starting at position 3563 of SEQ ID NO: 3591
cugggucaucauuaucauu

SEQ ID NO: 279571 - RNA, 19 nt, Artificial Sequence
  Description of Artificial Sequence: Synthetic oligonucleotide
  Antisense strand to SEQ ID NO: 279570
aaugauaaugaugacccag

SEQ ID NO: 279572 - RNA, 19 nt, Artificial Sequence
  Description of Artificial Sequence: Synthetic oligonucleotide
  Sense strand starting at position 3565 of SEQ ID NO: 3591
gggucaucauuaucauuga

SEQ ID NO: 279573 - RNA, 19 nt, Artificial Sequence
  Description of Artificial Sequence: Synthetic oligonucleotide
  Antisense strand to SEQ ID NO: 279572
ucaaugauaaugaugaccc

SEQ ID NO: 279574 - RNA, 19 nt, Artificial Sequence
  Description of Artificial Sequence: Synthetic oligonucleotide
  Sense strand starting at position 3692 of SEQ ID NO: 3591
ggugacuuuauguagugga

SEQ ID NO: 279575 - RNA, 19 nt, Artificial Sequence
  Description of Artificial Sequence: Synthetic oligonucleotide
  Antisense strand to SEQ ID NO: 279574
uccacuacauaaagucacc

SEQ ID NO: 279576 - RNA, 19 nt, Artificial Sequence
  Description of Artificial Sequence: Synthetic oligonucleotide
  Sense strand starting at position 3697 of SEQ ID NO: 3591
cuuuauguaguggaaacau

SEQ ID NO: 279577 - RNA, 19 nt, Artificial Sequence
  Description of Artificial Sequence: Synthetic oligonucleotide
  Antisense strand to SEQ ID NO: 279576
auguuuccacuacauaaag

SEQ ID NO: 279578 - RNA, 19 nt, Artificial Sequence
  Description of Artificial Sequence: Synthetic oligonucleotide
  Sense strand starting at position 3764 of SEQ ID NO: 3591
cuguuaaaguaagugauga

SEQ ID NO: 279579 - RNA, 19 nt, Artificial Sequence
  Description of Artificial Sequence: Synthetic oligonucleotide
  Antisense strand to SEQ ID NO: 279578
ucaucacuuacuuuaacag

SEQ ID NO: 279580 - RNA, 19 nt, Artificial Sequence
  Description of Artificial Sequence: Synthetic oligonucleotide
  Sense strand starting at position 3774 of SEQ ID NO: 3591
aagugaugagguggaaguu

SEQ ID NO: 279581 - RNA, 19 nt, Artificial Sequence
  Description of Artificial Sequence: Synthetic oligonucleotide
  Antisense strand to SEQ ID NO: 279580
aacuuccaccucaucacuu

SEQ ID NO: 279582 - RNA, 19 nt, Artificial Sequence
  Description of Artificial Sequence: Synthetic oligonucleotide
  Sense strand starting at position 3775 of SEQ ID NO: 3591
agugaugagguggaaguuu

SEQ ID NO: 279583 - RNA, 19 nt, Artificial Sequence
  Description of Artificial Sequence: Synthetic oligonucleotide
  Antisense strand to SEQ ID NO: 279582
aaacuuccaccucaucacu

SEQ ID NO: 279584 - RNA, 19 nt, Artificial Sequence
  Description of Artificial Sequence: Synthetic oligonucleotide
  Sense strand starting at position 3929 of SEQ ID NO: 3591
ccacucauuugagaaggaa

SEQ ID NO: 279585 - RNA, 19 nt, Artificial Sequence
  Description of Artificial Sequence: Synthetic oligonucleotide
  Antisense strand to SEQ ID NO: 279584
uuccuucucaaaugagugg

SEQ ID NO: 279586 - RNA, 19 nt, Artificial Sequence
  Description of Artificial Sequence: Synthetic oligonucleotide
  Sense strand starting at position 3947 of SEQ ID NO: 3591
aggacauggaguuguaguu

SEQ ID NO: 279587 - RNA, 19 nt, Artificial Sequence
  Description of Artificial Sequence: Synthetic oligonucleotide
  Antisense strand to SEQ ID NO: 279586
aacuacaacuccauguccu

SEQ ID NO: 279588 - RNA, 19 nt, Artificial Sequence
  Description of Artificial Sequence: Synthetic oligonucleotide
  Sense strand starting at position 3959 of SEQ ID NO: 3591
uguaguugcaaccagauga

SEQ ID NO: 279589 - RNA, 19 nt, Artificial Sequence
  Description of Artificial Sequence: Synthetic oligonucleotide
  Antisense strand to SEQ ID NO: 279588
ucaucugguugcaacuaca

SEQ ID NO: 279590 - RNA, 19 nt, Artificial Sequence
  Description of Artificial Sequence: Synthetic oligonucleotide
  Sense strand starting at position 216 of SEQ ID NO: 3593
guaggaguaugacucucuu

SEQ ID NO: 279591 - RNA, 19 nt, Artificial Sequence
  Description of Artificial Sequence: Synthetic oligonucleotide
  Antisense strand to SEQ ID NO: 279590
aagagagucauacuccuac

SEQ ID NO: 279592 - RNA, 19 nt, Artificial Sequence
  Description of Artificial Sequence: Synthetic oligonucleotide
  Sense strand starting at position 220 of SEQ ID NO: 3593
gaguaugacucucuuguuc

SEQ ID NO: 279593 - RNA, 19 nt, Artificial Sequence
  Description of Artificial Sequence: Synthetic oligonucleotide
  Antisense strand to SEQ ID NO: 279592
gaacaagagagucauacuc

SEQ ID NO: 279594 - RNA, 19 nt, Artificial Sequence
  Description of Artificial Sequence: Synthetic oligonucleotide
  Sense strand starting at position 730 of SEQ ID NO: 3593
gauauugcacugcagugaa

SEQ ID NO: 279595 - RNA, 19 nt, Artificial Sequence
  Description of Artificial Sequence: Synthetic oligonucleotide
  Antisense strand to SEQ ID NO: 279594
uucacugcagugcaauauc

SEQ ID NO: 279596 - RNA, 19 nt, Artificial Sequence
  Description of Artificial Sequence: Synthetic oligonucleotide
  Sense strand starting at position 1031 of SEQ ID NO: 3593
ucaugaaggucucuauucu

SEQ ID NO: 279597 - RNA, 19 nt, Artificial Sequence
  Description of Artificial Sequence: Synthetic oligonucleotide
  Antisense strand to SEQ ID NO: 279596
agaauagagaccuucauga

SEQ ID NO: 279598 - RNA, 19 nt, Artificial Sequence
  Description of Artificial Sequence: Synthetic oligonucleotide
  Sense strand starting at position 1074 of SEQ ID NO: 3593
gcaagcaguuaauuacaca

SEQ ID NO: 279599 - RNA, 19 nt, Artificial Sequence
  Description of Artificial Sequence: Synthetic oligonucleotide
  Antisense strand to SEQ ID NO: 279598
uguguaauuaacugcuugc

SEQ ID NO: 279600 - RNA, 19 nt, Artificial Sequence
  Description of Artificial Sequence: Synthetic oligonucleotide
  Sense strand starting at position 1120 of SEQ ID NO: 3593
auuaucaaagucuacguua

SEQ ID NO: 279601 - RNA, 19 nt, Artificial Sequence
  Description of Artificial Sequence: Synthetic oligonucleotide
  Antisense strand to SEQ ID NO: 279600
uaacguagacuuugauaau

SEQ ID NO: 279602 - RNA, 19 nt, Artificial Sequence
  Description of Artificial Sequence: Synthetic oligonucleotide
  Sense strand starting at position 1125 of SEQ ID NO: 3593
caaagucuacguuaguagu

SEQ ID NO: 279603 - RNA, 19 nt, Artificial Sequence
  Description of Artificial Sequence: Synthetic oligonucleotide
  Antisense strand to SEQ ID NO: 279602
acuacuaacguagacuuug

SEQ ID NO: 279604 - RNA, 19 nt, Artificial Sequence
  Description of Artificial Sequence: Synthetic oligonucleotide
  Sense strand starting at position 1133 of SEQ ID NO: 3593
acguuaguaguacagaaca

SEQ ID NO: 279605 - RNA, 19 nt, Artificial Sequence
  Description of Artificial Sequence: Synthetic oligonucleotide
  Antisense strand to SEQ ID NO: 279604
uguucuguacuacuaacgu

SEQ ID NO: 279606 - RNA, 19 nt, Artificial Sequence
  Description of Artificial Sequence: Synthetic oligonucleotide
  Sense strand starting at position 1135 of SEQ ID NO: 3593
guuaguaguacagaacaug

SEQ ID NO: 279607 - RNA, 19 nt, Artificial Sequence
  Description of Artificial Sequence: Synthetic oligonucleotide
  Antisense strand to SEQ ID NO: 279606
cauguucuguacuacuaac

SEQ ID NO: 279608 - RNA, 19 nt, Artificial Sequence
  Description of Artificial Sequence: Synthetic oligonucleotide
  Sense strand starting at position 1188 of SEQ ID NO: 3593
aucaaaguucucuaaguau

SEQ ID NO: 279609 - RNA, 19 nt, Artificial Sequence
  Description of Artificial Sequence: Synthetic oligonucleotide
  Antisense strand to SEQ ID NO: 279608
auacuuagagaacuuugau

SEQ ID NO: 279610 - RNA, 19 nt, Artificial Sequence
  Description of Artificial Sequence: Synthetic oligonucleotide
  Sense strand starting at position 1264 of SEQ ID NO: 3593
uaacuuuggugcuccaaag

SEQ ID NO: 279611 - RNA, 19 nt, Artificial Sequence
  Description of Artificial Sequence: Synthetic oligonucleotide
  Antisense strand to SEQ ID NO: 279610
cuuuggagcaccaaaguua

SEQ ID NO: 279612 - RNA, 19 nt, Artificial Sequence
  Description of Artificial Sequence: Synthetic oligonucleotide
  Sense strand starting at position 1443 of SEQ ID NO: 3593
ggcuuaauucuauggcaga

SEQ ID NO: 279613 - RNA, 19 nt, Artificial Sequence
  Description of Artificial Sequence: Synthetic oligonucleotide
  Antisense strand to SEQ ID NO: 279612
ucugccauagaauuaagcc

SEQ ID NO: 279614 - RNA, 19 nt, Artificial Sequence
  Description of Artificial Sequence: Synthetic oligonucleotide
  Sense strand starting at position 1490 of SEQ ID NO: 3593
ucgagucuuguagaagauu

SEQ ID NO: 279615 - RNA, 19 nt, Artificial Sequence
  Description of Artificial Sequence: Synthetic oligonucleotide
  Antisense strand to SEQ ID NO: 279614
aaucuucuacaagacucga

SEQ ID NO: 279616 - RNA, 19 nt, Artificial Sequence
  Description of Artificial Sequence: Synthetic oligonucleotide
  Sense strand starting at position 1504 of SEQ ID NO: 3593
agauuagaaguuuguuaag

SEQ ID NO: 279617 - RNA, 19 nt, Artificial Sequence
  Description of Artificial Sequence: Synthetic oligonucleotide
  Antisense strand to SEQ ID NO: 279616
cuuaacaaacuucuaaucu

SEQ ID NO: 279618 - RNA, 19 nt, Artificial Sequence
  Description of Artificial Sequence: Synthetic oligonucleotide
  Sense strand starting at position 1510 of SEQ ID NO: 3593
gaaguuuguuaaguaaaca

SEQ ID NO: 279619 - RNA, 19 nt, Artificial Sequence
  Description of Artificial Sequence: Synthetic oligonucleotide
  Antisense strand to SEQ ID NO: 279618
uguuuacuuaacaaacuuc

SEQ ID NO: 279620 - RNA, 19 nt, Artificial Sequence
  Description of Artificial Sequence: Synthetic oligonucleotide
  Sense strand starting at position 1799 of SEQ ID NO: 3593
cccuccauauaguuuggaa

SEQ ID NO: 279621 - RNA, 19 nt, Artificial Sequence
  Description of Artificial Sequence: Synthetic oligonucleotide
  Antisense strand to SEQ ID NO: 279620
uuccaaacuauauggaggg

SEQ ID NO: 279622 - RNA, 19 nt, Artificial Sequence
  Description of Artificial Sequence: Synthetic oligonucleotide
  Sense strand starting at position 1801 of SEQ ID NO: 3593
cuccauauaguuuggaaga

SEQ ID NO: 279623 - RNA, 19 nt, Artificial Sequence
  Description of Artificial Sequence: Synthetic oligonucleotide
  Antisense strand to SEQ ID NO: 279622
ucuuccaaacuauauggag

SEQ ID NO: 279624 - RNA, 19 nt, Artificial Sequence
  Description of Artificial Sequence: Synthetic oligonucleotide
  Sense strand starting at position 1882 of SEQ ID NO: 3593
aauaaagugagguguaagu

SEQ ID NO: 279625 - RNA, 19 nt, Artificial Sequence
  Description of Artificial Sequence: Synthetic oligonucleotide
  Antisense strand to SEQ ID NO: 279624
acuuacaccucacuuuauu

SEQ ID NO: 279626 - RNA, 19 nt, Artificial Sequence
  Description of Artificial Sequence: Synthetic oligonucleotide
  Sense strand starting at position 2068 of SEQ ID NO: 3593
ugcugcuaugacuaauauu

SEQ ID NO: 279627 - RNA, 19 nt, Artificial Sequence
  Description of Artificial Sequence: Synthetic oligonucleotide
  Antisense strand to SEQ ID NO: 279626
aauauuagucauagcagca

SEQ ID NO: 279628 - RNA, 19 nt, Artificial Sequence
  Description of Artificial Sequence: Synthetic oligonucleotide
  Sense strand starting at position 2076 of SEQ ID NO: 3593
ugacuaauauuagcaugau

SEQ ID NO: 279629 - RNA, 19 nt, Artificial Sequence
  Description of Artificial Sequence: Synthetic oligonucleotide
  Antisense strand to SEQ ID NO: 279628
aucaugcuaauauuaguca

SEQ ID NO: 279630 - RNA, 19 nt, Artificial Sequence
  Description of Artificial Sequence: Synthetic oligonucleotide
  Sense strand starting at position 2079 of SEQ ID NO: 3593
cuaauauuagcaugaucug

SEQ ID NO: 279631 - RNA, 19 nt, Artificial Sequence
  Description of Artificial Sequence: Synthetic oligonucleotide
  Antisense strand to SEQ ID NO: 279630
cagaucaugcuaauauuag

SEQ ID NO: 279632 - RNA, 19 nt, Artificial Sequence
  Description of Artificial Sequence: Synthetic oligonucleotide
  Sense strand starting at position 2082 of SEQ ID NO: 3593
auauuagcaugaucugaga

SEQ ID NO: 279633 - RNA, 19 nt, Artificial Sequence
  Description of Artificial Sequence: Synthetic oligonucleotide
  Antisense strand to SEQ ID NO: 279632
ucucagaucaugcuaauau

SEQ ID NO: 279634 - RNA, 19 nt, Artificial Sequence
  Description of Artificial Sequence: Synthetic oligonucleotide
  Sense strand starting at position 2112 of SEQ ID NO: 3593
ugauuucuguagggaagac

SEQ ID NO: 279635 - RNA, 19 nt, Artificial Sequence
  Description of Artificial Sequence: Synthetic oligonucleotide
  Antisense strand to SEQ ID NO: 279634
gucuucccuacagaaauca

SEQ ID NO: 279636 - RNA, 19 nt, Artificial Sequence
  Description of Artificial Sequence: Synthetic oligonucleotide
  Sense strand starting at position 2141 of SEQ ID NO: 3593
aguuuaugacagcaaucua

SEQ ID NO: 279637 - RNA, 19 nt, Artificial Sequence
  Description of Artificial Sequence: Synthetic oligonucleotide
  Antisense strand to SEQ ID NO: 279636
uagauugcugucauaaacu

SEQ ID NO: 279638 - RNA, 19 nt, Artificial Sequence
  Description of Artificial Sequence: Synthetic oligonucleotide
  Sense strand starting at position 2185 of SEQ ID NO: 3593
ggucaaggguucuugaauu

SEQ ID NO: 279639 - RNA, 19 nt, Artificial Sequence
  Description of Artificial Sequence: Synthetic oligonucleotide
  Antisense strand to SEQ ID NO: 279638
aauucaagaacccuugacc

SEQ ID NO: 279640 - RNA, 19 nt, Artificial Sequence
  Description of Artificial Sequence: Synthetic oligonucleotide
  Sense strand starting at position 2337 of SEQ ID NO: 3593
ggcauuucugcccgaggga

SEQ ID NO: 279641 - RNA, 19 nt, Artificial Sequence
  Description of Artificial Sequence: Synthetic oligonucleotide
  Antisense strand to SEQ ID NO: 279640
ucccucgggcagaaaugcc

SEQ ID NO: 279642 - RNA, 19 nt, Artificial Sequence
  Description of Artificial Sequence: Synthetic oligonucleotide
  Sense strand starting at position 2369 of SEQ ID NO: 3593
gaaguaggguccuuaaauu

SEQ ID NO: 279643 - RNA, 19 nt, Artificial Sequence
  Description of Artificial Sequence: Synthetic oligonucleotide
  Antisense strand to SEQ ID NO: 279642
aauuuaaggacccuacuuc

SEQ ID NO: 279644 - RNA, 19 nt, Artificial Sequence
  Description of Artificial Sequence: Synthetic oligonucleotide
  Sense strand starting at position 2402 of SEQ ID NO: 3593
gccuuaauggccugaagaa

SEQ ID NO: 279645 - RNA, 19 nt, Artificial Sequence
  Description of Artificial Sequence: Synthetic oligonucleotide
  Antisense strand to SEQ ID NO: 279644
uucuucaggccauuaaggc

SEQ ID NO: 279646 - RNA, 19 nt, Artificial Sequence
  Description of Artificial Sequence: Synthetic oligonucleotide
  Sense strand starting at position 2487 of SEQ ID NO: 3593
acgccaugucccguguaua

SEQ ID NO: 279647 - RNA, 19 nt, Artificial Sequence
  Description of Artificial Sequence: Synthetic oligonucleotide
  Antisense strand to SEQ ID NO: 279646
uauacacgggacauggcgu

SEQ ID NO: 279648 - RNA, 19 nt, Artificial Sequence
  Description of Artificial Sequence: Synthetic oligonucleotide
  Sense strand starting at position 2490 of SEQ ID NO: 3593
ccaugucccguguauaaau

SEQ ID NO: 279649 - RNA, 19 nt, Artificial Sequence
  Description of Artificial Sequence: Synthetic oligonucleotide
  Antisense strand to SEQ ID NO: 279648
auuuauacacgggacaugg

SEQ ID NO: 279650 - RNA, 19 nt, Artificial Sequence
  Description of Artificial Sequence: Synthetic oligonucleotide
  Sense strand starting at position 2492 of SEQ ID NO: 3593
augucccguguauaaauua

SEQ ID NO: 279651 - RNA, 19 nt, Artificial Sequence
  Description of Artificial Sequence: Synthetic oligonucleotide
  Antisense strand to SEQ ID NO: 279650
uaauuuauacacgggacau

SEQ ID NO: 279652 - RNA, 19 nt, Artificial Sequence
  Description of Artificial Sequence: Synthetic oligonucleotide
  Sense strand starting at position 2979 of SEQ ID NO: 3593
cuccacauucgccaaagaa

SEQ ID NO: 279653 - RNA, 19 nt, Artificial Sequence
  Description of Artificial Sequence: Synthetic oligonucleotide
  Antisense strand to SEQ ID NO: 279652
uucuuuggcgaauguggag

SEQ ID NO: 279654 - RNA, 19 nt, Artificial Sequence
  Description of Artificial Sequence: Synthetic oligonucleotide
  Sense strand starting at position 3039 of SEQ ID NO: 3593
ucuggaauauaaucuguaa

SEQ ID NO: 279655 - RNA, 19 nt, Artificial Sequence
  Description of Artificial Sequence: Synthetic oligonucleotide
  Antisense strand to SEQ ID NO: 279654
uuacagauuauauuccaga

SEQ ID NO: 279656 - RNA, 19 nt, Artificial Sequence
  Description of Artificial Sequence: Synthetic oligonucleotide
  Sense strand starting at position 3052 of SEQ ID NO: 3593
cuguaauuacuagacaggu

SEQ ID NO: 279657 - RNA, 19 nt, Artificial Sequence
  Description of Artificial Sequence: Synthetic oligonucleotide
  Antisense strand to SEQ ID NO: 279656
accugucuaguaauuacag

SEQ ID NO: 279658 - RNA, 19 nt, Artificial Sequence
  Description of Artificial Sequence: Synthetic oligonucleotide
  Sense strand starting at position 3204 of SEQ ID NO: 3593
gcuccuaaggaaugaacaa

SEQ ID NO: 279659 - RNA, 19 nt, Artificial Sequence
  Description of Artificial Sequence: Synthetic oligonucleotide
  Antisense strand to SEQ ID NO: 279658
uuguucauuccuuaggagc

SEQ ID NO: 279660 - RNA, 19 nt, Artificial Sequence
  Description of Artificial Sequence: Synthetic oligonucleotide
  Sense strand starting at position 3299 of SEQ ID NO: 3593
acuggaugcacuuagcaga

SEQ ID NO: 279661 - RNA, 19 nt, Artificial Sequence
  Description of Artificial Sequence: Synthetic oligonucleotide
  Antisense strand to SEQ ID NO: 279660
ucugcuaagugcauccagu

SEQ ID NO: 279662 - RNA, 19 nt, Artificial Sequence
  Description of Artificial Sequence: Synthetic oligonucleotide
  Sense strand starting at position 3304 of SEQ ID NO: 3593
augcacuuagcagauuaua

SEQ ID NO: 279663 - RNA, 19 nt, Artificial Sequence
  Description of Artificial Sequence: Synthetic oligonucleotide
  Antisense strand to SEQ ID NO: 279662
uauaaucugcuaagugcau

SEQ ID NO: 279664 - RNA, 19 nt, Artificial Sequence
  Description of Artificial Sequence: Synthetic oligonucleotide
  Sense strand starting at position 3726 of SEQ ID NO: 3593
agcaguaaaccaugauugu

SEQ ID NO: 279665 - RNA, 19 nt, Artificial Sequence
  Description of Artificial Sequence: Synthetic oligonucleotide
  Antisense strand to SEQ ID NO: 279664
acaaucaugguuuacugcu

SEQ ID NO: 279666 - RNA, 19 nt, Artificial Sequence
  Description of Artificial Sequence: Synthetic oligonucleotide
  Sense strand starting at position 3834 of SEQ ID NO: 3593
ccuauuuggucauaggaug

SEQ ID NO: 279667 - RNA, 19 nt, Artificial Sequence
  Description of Artificial Sequence: Synthetic oligonucleotide
  Antisense strand to SEQ ID NO: 279666
cauccuaugaccaaauagg

SEQ ID NO: 279668 - RNA, 19 nt, Artificial Sequence
  Description of Artificial Sequence: Synthetic oligonucleotide
  Sense strand starting at position 3900 of SEQ ID NO: 3593
gccuguuucgguagggcau

SEQ ID NO: 279669 - RNA, 19 nt, Artificial Sequence
  Description of Artificial Sequence: Synthetic oligonucleotide
  Antisense strand to SEQ ID NO: 279668
augcccuaccgaaacaggc

SEQ ID NO: 279670 - RNA, 19 nt, Artificial Sequence
  Description of Artificial Sequence: Synthetic oligonucleotide
  Sense strand starting at position 167 of SEQ ID NO: 3592
uguaaugccugagaauuua

SEQ ID NO: 279671 - RNA, 19 nt, Artificial Sequence
  Description of Artificial Sequence: Synthetic oligonucleotide
  Antisense strand to SEQ ID NO: 279670
uaaauucucaggcauuaca

SEQ ID NO: 279672 - RNA, 19 nt, Artificial Sequence
  Description of Artificial Sequence: Synthetic oligonucleotide
  Sense strand starting at position 191 of SEQ ID NO: 3592
aagugacagcuuuguaaga

SEQ ID NO: 279673 - RNA, 19 nt, Artificial Sequence
  Description of Artificial Sequence: Synthetic oligonucleotide
  Antisense strand to SEQ ID NO: 279672
ucuuacaaagcugucacuu

SEQ ID NO: 279674 - RNA, 19 nt, Artificial Sequence
  Description of Artificial Sequence: Synthetic oligonucleotide
  Sense strand starting at position 251 of SEQ ID NO: 3592
guugaaaucuugcuaaaug

SEQ ID NO: 279675 - RNA, 19 nt, Artificial Sequence
  Description of Artificial Sequence: Synthetic oligonucleotide
  Antisense strand to SEQ ID NO: 279674
cauuuagcaagauuucaac

SEQ ID NO: 279676 - RNA, 19 nt, Artificial Sequence
  Description of Artificial Sequence: Synthetic oligonucleotide
  Sense strand starting at position 304 of SEQ ID NO: 3592
aggaaagcauguguuaaac

SEQ ID NO: 279677 - RNA, 19 nt, Artificial Sequence
  Description of Artificial Sequence: Synthetic oligonucleotide
  Antisense strand to SEQ ID NO: 279676
guuuaacacaugcuuuccu

SEQ ID NO: 279678 - RNA, 19 nt, Artificial Sequence
  Description of Artificial Sequence: Synthetic oligonucleotide
  Sense strand starting at position 421 of SEQ ID NO: 3592
agaaccagguuucugaaau

SEQ ID NO: 279679 - RNA, 19 nt, Artificial Sequence
  Description of Artificial Sequence: Synthetic oligonucleotide
  Antisense strand to SEQ ID NO: 279678
auuucagaaaccugguucu

SEQ ID NO: 279680 - RNA, 19 nt, Artificial Sequence
  Description of Artificial Sequence: Synthetic oligonucleotide
  Sense strand starting at position 683 of SEQ ID NO: 3592
uuuacaggauuccuuaagu

SEQ ID NO: 279681 - RNA, 19 nt, Artificial Sequence
  Description of Artificial Sequence: Synthetic oligonucleotide
  Antisense strand to SEQ ID NO: 279680
acuuaaggaauccuguaaa

SEQ ID NO: 279682 - RNA, 19 nt, Artificial Sequence
  Description of Artificial Sequence: Synthetic oligonucleotide
  Sense strand starting at position 718 of SEQ ID NO: 3592
aggucacauggugaagagu

SEQ ID NO: 279683 - RNA, 19 nt, Artificial Sequence
  Description of Artificial Sequence: Synthetic oligonucleotide
  Antisense strand to SEQ ID NO: 279682
acucuucaccaugugaccu

SEQ ID NO: 279684 - RNA, 19 nt, Artificial Sequence
  Description of Artificial Sequence: Synthetic oligonucleotide
  Sense strand starting at position 727 of SEQ ID NO: 3592
ggugaagagucaccuguua

SEQ ID NO: 279685 - RNA, 19 nt, Artificial Sequence
  Description of Artificial Sequence: Synthetic oligonucleotide
  Antisense strand to SEQ ID NO: 279684
uaacaggugacucuucacc

SEQ ID NO: 279686 - RNA, 19 nt, Artificial Sequence
  Description of Artificial Sequence: Synthetic oligonucleotide
  Sense strand starting at position 739 of SEQ ID NO: 3592
ccuguuaaacacgaaaucu

SEQ ID NO: 279687 - RNA, 19 nt, Artificial Sequence
  Description of Artificial Sequence: Synthetic oligonucleotide
  Antisense strand to SEQ ID NO: 279686
agauuucguguuuaacagg

SEQ ID NO: 279688 - RNA, 19 nt, Artificial Sequence
  Description of Artificial Sequence: Synthetic oligonucleotide
  Sense strand starting at position 784 of SEQ ID NO: 3592
uucgguaacucccuuuauu

SEQ ID NO: 279689 - RNA, 19 nt, Artificial Sequence
  Description of Artificial Sequence: Synthetic oligonucleotide
  Antisense strand to SEQ ID NO: 279688
aauaaagggaguuaccgaa

SEQ ID NO: 279690 - RNA, 19 nt, Artificial Sequence
  Description of Artificial Sequence: Synthetic oligonucleotide
  Sense strand starting at position 962 of SEQ ID NO: 3592
accuaauaugcuggcaaua

SEQ ID NO: 279691 - RNA, 19 nt, Artificial Sequence
  Description of Artificial Sequence: Synthetic oligonucleotide
  Antisense strand to SEQ ID NO: 279690
uauugccagcauauuaggu

SEQ ID NO: 279692 - RNA, 19 nt, Artificial Sequence
  Description of Artificial Sequence: Synthetic oligonucleotide
  Sense strand starting at position 995 of SEQ ID NO: 3592
aaaguuuacguauguuaga

SEQ ID NO: 279693 - RNA, 19 nt, Artificial Sequence
  Description of Artificial Sequence: Synthetic oligonucleotide
  Antisense strand to SEQ ID NO: 279692
ucuaacauacguaaacuuu

SEQ ID NO: 279694 - RNA, 19 nt, Artificial Sequence
  Description of Artificial Sequence: Synthetic oligonucleotide
  Sense strand starting at position 996 of SEQ ID NO: 3592
aaguuuacguauguuagaa

SEQ ID NO: 279695 - RNA, 19 nt, Artificial Sequence
  Description of Artificial Sequence: Synthetic oligonucleotide
  Antisense strand to SEQ ID NO: 279694
uucuaacauacguaaacuu

SEQ ID NO: 279696 - RNA, 19 nt, Artificial Sequence
  Description of Artificial Sequence: Synthetic oligonucleotide
  Sense strand starting at position 1075 of SEQ ID NO: 3592
acacguguuugggcaugaa

SEQ ID NO: 279697 - RNA, 19 nt, Artificial Sequence
  Description of Artificial Sequence: Synthetic oligonucleotide
  Antisense strand to SEQ ID NO: 279696
uucaugcccaaacacgugu

SEQ ID NO: 279698 - RNA, 19 nt, Artificial Sequence
  Description of Artificial Sequence: Synthetic oligonucleotide
  Sense strand starting at position 1152 of SEQ ID NO: 3592
aguagaagccgcuaaucuu

SEQ ID NO: 279699 - RNA, 19 nt, Artificial Sequence
  Description of Artificial Sequence: Synthetic oligonucleotide
  Antisense strand to SEQ ID NO: 279698
aagauuagcggcuucuacu

SEQ ID NO: 279700 - RNA, 19 nt, Artificial Sequence
  Description of Artificial Sequence: Synthetic oligonucleotide
  Sense strand starting at position 1163 of SEQ ID NO: 3592
cuaaucuugucuuugguuu

SEQ ID NO: 279701 - RNA, 19 nt, Artificial Sequence
  Description of Artificial Sequence: Synthetic oligonucleotide
  Antisense strand to SEQ ID NO: 279700
aaaccaaagacaagauuag

SEQ ID NO: 279702 - RNA, 19 nt, Artificial Sequence
  Description of Artificial Sequence: Synthetic oligonucleotide
  Sense strand starting at position 1206 of SEQ ID NO: 3592
cgaaauccguuccuauaac

SEQ ID NO: 279703 - RNA, 19 nt, Artificial Sequence
  Description of Artificial Sequence: Synthetic oligonucleotide
  Antisense strand to SEQ ID NO: 279702
guuauaggaacggauuucg

SEQ ID NO: 279704 - RNA, 19 nt, Artificial Sequence
  Description of Artificial Sequence: Synthetic oligonucleotide
  Sense strand starting at position 2439 of SEQ ID NO: 3592
acaagagccggacguuaau

SEQ ID NO: 279705 - RNA, 19 nt, Artificial Sequence
  Description of Artificial Sequence: Synthetic oligonucleotide
  Antisense strand to SEQ ID NO: 279704
auuaacguccggcucuugu

SEQ ID NO: 279706 - RNA, 19 nt, Artificial Sequence
  Description of Artificial Sequence: Synthetic oligonucleotide
  Sense strand starting at position 2521 of SEQ ID NO: 3592
ggaagauuguacccugcga

SEQ ID NO: 279707 - RNA, 19 nt, Artificial Sequence
  Description of Artificial Sequence: Synthetic oligonucleotide
  Antisense strand to SEQ ID NO: 279706
ucgcaggguacaaucuucc

SEQ ID NO: 279708 - RNA, 19 nt, Artificial Sequence
  Description of Artificial Sequence: Synthetic oligonucleotide
  Sense strand starting at position 2523 of SEQ ID NO: 3592
aagauuguacccugcgaga

SEQ ID NO: 279709 - RNA, 19 nt, Artificial Sequence
  Description of Artificial Sequence: Synthetic oligonucleotide
  Antisense strand to SEQ ID NO: 279708
ucucgcaggguacaaucuu

SEQ ID NO: 279710 - RNA, 19 nt, Artificial Sequence
  Description of Artificial Sequence: Synthetic oligonucleotide
  Sense strand starting at position 2776 of SEQ ID NO: 3592
augcaaagcaguggugauu

SEQ ID NO: 279711 - RNA, 19 nt, Artificial Sequence
  Description of Artificial Sequence: Synthetic oligonucleotide
  Antisense strand to SEQ ID NO: 279710
aaucaccacugcuuugcau

SEQ ID NO: 279712 - RNA, 19 nt, Artificial Sequence
  Description of Artificial Sequence: Synthetic oligonucleotide
  Sense strand starting at position 2843 of SEQ ID NO: 3592
ccguguccgauuuguucuu

SEQ ID NO: 279713 - RNA, 19 nt, Artificial Sequence
  Description of Artificial Sequence: Synthetic oligonucleotide
  Antisense strand to SEQ ID NO: 279712
aagaacaaaucggacacgg

SEQ ID NO: 279714 - RNA, 19 nt, Artificial Sequence
  Description of Artificial Sequence: Synthetic oligonucleotide
  Sense strand starting at position 2845 of SEQ ID NO: 3592
guguccgauuuguucuuga

SEQ ID NO: 279715 - RNA, 19 nt, Artificial Sequence
  Description of Artificial Sequence: Synthetic oligonucleotide
  Antisense strand to SEQ ID NO: 279714
ucaagaacaaaucggacac

SEQ ID NO: 279716 - RNA, 19 nt, Artificial Sequence
  Description of Artificial Sequence: Synthetic oligonucleotide
  Sense strand starting at position 2945 of SEQ ID NO: 3592
auaugucuucccuaggcga

SEQ ID NO: 279717 - RNA, 19 nt, Artificial Sequence
  Description of Artificial Sequence: Synthetic oligonucleotide
  Antisense strand to SEQ ID NO: 279716
ucgccuagggaagacauau

SEQ ID NO: 279718 - RNA, 19 nt, Artificial Sequence
  Description of Artificial Sequence: Synthetic oligonucleotide
  Sense strand starting at position 2979 of SEQ ID NO: 3592
gggcaaggaccuuguguuu

SEQ ID NO: 279719 - RNA, 19 nt, Artificial Sequence
  Description of Artificial Sequence: Synthetic oligonucleotide
  Antisense strand to SEQ ID NO: 279718
aaacacaagguccuugccc

SEQ ID NO: 279720 - RNA, 19 nt, Artificial Sequence
  Description of Artificial Sequence: Synthetic oligonucleotide
  Sense strand starting at position 3013 of SEQ ID NO: 3592
ccgcaagugccuguugaau

SEQ ID NO: 279721 - RNA, 19 nt, Artificial Sequence
  Description of Artificial Sequence: Synthetic oligonucleotide
  Antisense strand to SEQ ID NO: 279720
auucaacaggcacuugcgg

SEQ ID NO: 279722 - RNA, 19 nt, Artificial Sequence
  Description of Artificial Sequence: Synthetic oligonucleotide
  Sense strand starting at position 3019 of SEQ ID NO: 3592
gugccuguugaauacacau

SEQ ID NO: 279723 - RNA, 19 nt, Artificial Sequence
  Description of Artificial Sequence: Synthetic oligonucleotide
  Antisense strand to SEQ ID NO: 279722
auguguauucaacaggcac

SEQ ID NO: 279724 - RNA, 19 nt, Artificial Sequence
  Description of Artificial Sequence: Synthetic oligonucleotide
  Sense strand starting at position 3150 of SEQ ID NO: 3592
ugucaccaagcauguuaaa

SEQ ID NO: 279725 - RNA, 19 nt, Artificial Sequence
  Description of Artificial Sequence: Synthetic oligonucleotide
  Antisense strand to SEQ ID NO: 279724
uuuaacaugcuuggugaca

SEQ ID NO: 279726 - RNA, 19 nt, Artificial Sequence
  Description of Artificial Sequence: Synthetic oligonucleotide
  Sense strand starting at position 3551 of SEQ ID NO: 3592
gacagcauuucccuagugu

SEQ ID NO: 279727 - RNA, 19 nt, Artificial Sequence
  Description of Artificial Sequence: Synthetic oligonucleotide
  Antisense strand to SEQ ID NO: 279726
acacuagggaaaugcuguc

SEQ ID NO: 279728 - RNA, 19 nt, Artificial Sequence
  Description of Artificial Sequence: Synthetic oligonucleotide
  Sense strand starting at position 3579 of SEQ ID NO: 3592
aguguuaauagauguuccu

SEQ ID NO: 279729 - RNA, 19 nt, Artificial Sequence
  Description of Artificial Sequence: Synthetic oligonucleotide
  Antisense strand to SEQ ID NO: 279728
aggaacaucuauuaacacu

SEQ ID NO: 279730 - RNA, 19 nt, Artificial Sequence
  Description of Artificial Sequence: Synthetic oligonucleotide
  Sense strand starting at position 3582 of SEQ ID NO: 3592
guuaauagauguuccuuua

SEQ ID NO: 279731 - RNA, 19 nt, Artificial Sequence
  Description of Artificial Sequence: Synthetic oligonucleotide
  Antisense strand to SEQ ID NO: 279730
uaaaggaacaucuauuaac

SEQ ID NO: 279732 - RNA, 19 nt, Artificial Sequence
  Description of Artificial Sequence: Synthetic oligonucleotide
  Sense strand starting at position 3605 of SEQ ID NO: 3592
augucucacgaucaaguaa

SEQ ID NO: 279733 - RNA, 19 nt, Artificial Sequence
  Description of Artificial Sequence: Synthetic oligonucleotide
  Antisense strand to SEQ ID NO: 279732
uuacuugaucgugagacau

SEQ ID NO: 279734 - RNA, 19 nt, Artificial Sequence
  Description of Artificial Sequence: Synthetic oligonucleotide
  Sense strand starting at position 3673 of SEQ ID NO: 3592
cuccguugagcugauaaua

SEQ ID NO: 279735 - RNA, 19 nt, Artificial Sequence
  Description of Artificial Sequence: Synthetic oligonucleotide
  Antisense strand to SEQ ID NO: 279734
uauuaucagcucaacggag

SEQ ID NO: 279736 - RNA, 19 nt, Artificial Sequence
  Description of Artificial Sequence: Synthetic oligonucleotide
  Sense strand starting at position 3692 of SEQ ID NO: 3592
gcagaagagucuuuauaua

SEQ ID NO: 279737 - RNA, 19 nt, Artificial Sequence
  Description of Artificial Sequence: Synthetic oligonucleotide
  Antisense strand to SEQ ID NO: 279736
uauauaaagacucuucugc

SEQ ID NO: 279738 - RNA, 19 nt, Artificial Sequence
  Description of Artificial Sequence: Synthetic oligonucleotide
  Sense strand starting at position 3714 of SEQ ID NO: 3592
uugcuuagugugggugaaa

SEQ ID NO: 279739 - RNA, 19 nt, Artificial Sequence
  Description of Artificial Sequence: Synthetic oligonucleotide
  Antisense strand to SEQ ID NO: 279738
uuucacccacacuaagcaa

SEQ ID NO: 279740 - RNA, 19 nt, Artificial Sequence
  Description of Artificial Sequence: Synthetic oligonucleotide
  Sense strand starting at position 3715 of SEQ ID NO: 3592
ugcuuagugugggugaaac

SEQ ID NO: 279741 - RNA, 19 nt, Artificial Sequence
  Description of Artificial Sequence: Synthetic oligonucleotide
  Antisense strand to SEQ ID NO: 279740
guuucacccacacuaagca

SEQ ID NO: 279742 - RNA, 19 nt, Artificial Sequence
  Description of Artificial Sequence: Synthetic oligonucleotide
  Sense strand starting at position 3717 of SEQ ID NO: 3592
cuuagugugggugaaacua

SEQ ID NO: 279743 - RNA, 19 nt, Artificial Sequence
  Description of Artificial Sequence: Synthetic oligonucleotide
  Antisense strand to SEQ ID NO: 279742
uaguuucacccacacuaag

SEQ ID NO: 279744 - RNA, 19 nt, Artificial Sequence
  Description of Artificial Sequence: Synthetic oligonucleotide
  Sense strand starting at position 3812 of SEQ ID NO: 3592
cugggaucccuugggcaga

SEQ ID NO: 279745 - RNA, 19 nt, Artificial Sequence
  Description of Artificial Sequence: Synthetic oligonucleotide
  Antisense strand to SEQ ID NO: 279744
ucugcccaagggaucccag

SEQ ID NO: 279746 - RNA, 19 nt, Artificial Sequence
  Description of Artificial Sequence: Synthetic oligonucleotide
  Sense strand starting at position 3981 of SEQ ID NO: 3592
augguaaauucugcuucuu

SEQ ID NO: 279747 - RNA, 19 nt, Artificial Sequence
  Description of Artificial Sequence: Synthetic oligonucleotide
  Antisense strand to SEQ ID NO: 279746
aagaagcagaauuuaccau

SEQ ID NO: 279748 - RNA, 19 nt, Artificial Sequence
  Description of Artificial Sequence: Synthetic oligonucleotide
  Sense strand starting at position 3983 of SEQ ID NO: 3592
gguaaauucugcuucuuug

SEQ ID NO: 279749 - RNA, 19 nt, Artificial Sequence
  Description of Artificial Sequence: Synthetic oligonucleotide
  Antisense strand to SEQ ID NO: 279748
caaagaagcagaauuuacc

SEQ ID NO: 279750 - RNA, 19 nt, Artificial Sequence
  Description of Artificial Sequence: Synthetic oligonucleotide
  Sense strand starting at position 48 of SEQ ID NO: 3594
guguuaauaaacgagcuau

SEQ ID NO: 279751 - RNA, 19 nt, Artificial Sequence
  Description of Artificial Sequence: Synthetic oligonucleotide
  Antisense strand to SEQ ID NO: 279750
auagcucguuuauuaacac

SEQ ID NO: 279752 - RNA, 19 nt, Artificial Sequence
  Description of Artificial Sequence: Synthetic oligonucleotide
  Sense strand starting at position 210 of SEQ ID NO: 3594
gauauuagaaaucgguugu

SEQ ID NO: 279753 - RNA, 19 nt, Artificial Sequence
  Description of Artificial Sequence: Synthetic oligonucleotide
  Antisense strand to SEQ ID NO: 279752
acaaccgauuucuaauauc

SEQ ID NO: 279754 - RNA, 19 nt, Artificial Sequence
  Description of Artificial Sequence: Synthetic oligonucleotide
  Sense strand starting at position 216 of SEQ ID NO: 3594
agaaaucgguuguccauau

SEQ ID NO: 279755 - RNA, 19 nt, Artificial Sequence
  Description of Artificial Sequence: Synthetic oligonucleotide
  Antisense strand to SEQ ID NO: 279754
auauggacaaccgauuucu

SEQ ID NO: 279756 - RNA, 19 nt, Artificial Sequence
  Description of Artificial Sequence: Synthetic oligonucleotide
  Sense strand starting at position 220 of SEQ ID NO: 3594
aucgguuguccauauuaga

SEQ ID NO: 279757 - RNA, 19 nt, Artificial Sequence
  Description of Artificial Sequence: Synthetic oligonucleotide
  Antisense strand to SEQ ID NO: 279756
ucuaauauggacaaccgau

SEQ ID NO: 279758 - RNA, 19 nt, Artificial Sequence
  Description of Artificial Sequence: Synthetic oligonucleotide
  Sense strand starting at position 297 of SEQ ID NO: 3594
guugguuacccucaagaug

SEQ ID NO: 279759 - RNA, 19 nt, Artificial Sequence
  Description of Artificial Sequence: Synthetic oligonucleotide
  Antisense strand to SEQ ID NO: 279758
caucuugaggguaaccaac

SEQ ID NO: 279760 - RNA, 19 nt, Artificial Sequence
  Description of Artificial Sequence: Synthetic oligonucleotide
  Sense strand starting at position 300 of SEQ ID NO: 3594
gguuacccucaagauguuu

SEQ ID NO: 279761 - RNA, 19 nt, Artificial Sequence
  Description of Artificial Sequence: Synthetic oligonucleotide
  Antisense strand to SEQ ID NO: 279760
aaacaucuugaggguaacc

SEQ ID NO: 279762 - RNA, 19 nt, Artificial Sequence
  Description of Artificial Sequence: Synthetic oligonucleotide
  Sense strand starting at position 567 of SEQ ID NO: 3594
ugagucucauauccuaaga

SEQ ID NO: 279763 - RNA, 19 nt, Artificial Sequence
  Description of Artificial Sequence: Synthetic oligonucleotide
  Antisense strand to SEQ ID NO: 279762
ucuuaggauaugagacuca

SEQ ID NO: 279764 - RNA, 19 nt, Artificial Sequence
  Description of Artificial Sequence: Synthetic oligonucleotide
  Sense strand starting at position 1003 of SEQ ID NO: 3594
gcaccuauugcgucuagca

SEQ ID NO: 279765 - RNA, 19 nt, Artificial Sequence
  Description of Artificial Sequence: Synthetic oligonucleotide
  Antisense strand to SEQ ID NO: 279764
ugcuagacgcaauaggugc

SEQ ID NO: 279766 - RNA, 19 nt, Artificial Sequence
  Description of Artificial Sequence: Synthetic oligonucleotide
  Sense strand starting at position 1102 of SEQ ID NO: 3594
cuuguuuguagaggaaauc

SEQ ID NO: 279767 - RNA, 19 nt, Artificial Sequence
  Description of Artificial Sequence: Synthetic oligonucleotide
  Antisense strand to SEQ ID NO: 279766
gauuuccucuacaaacaag

SEQ ID NO: 279768 - RNA, 19 nt, Artificial Sequence
  Description of Artificial Sequence: Synthetic oligonucleotide
  Sense strand starting at position 1234 of SEQ ID NO: 3594
cgacgucuagggaguugua

SEQ ID NO: 279769 - RNA, 19 nt, Artificial Sequence
  Description of Artificial Sequence: Synthetic oligonucleotide
  Antisense strand to SEQ ID NO: 279768
uacaacucccuagacgucg

SEQ ID NO: 279770 - RNA, 19 nt, Artificial Sequence
  Description of Artificial Sequence: Synthetic oligonucleotide
  Sense strand starting at position 1261 of SEQ ID NO: 3594
cagaaauaucgaugagccu

SEQ ID NO: 279771 - RNA, 19 nt, Artificial Sequence
  Description of Artificial Sequence: Synthetic oligonucleotide
  Antisense strand to SEQ ID NO: 279770
aggcucaucgauauuucug

SEQ ID NO: 279772 - RNA, 19 nt, Artificial Sequence
  Description of Artificial Sequence: Synthetic oligonucleotide
  Sense strand starting at position 1262 of SEQ ID NO: 3594
agaaauaucgaugagccuu

SEQ ID NO: 279773 - RNA, 19 nt, Artificial Sequence
  Description of Artificial Sequence: Synthetic oligonucleotide
  Antisense strand to SEQ ID NO: 279772
aaggcucaucgauauuucu

SEQ ID NO: 279774 - RNA, 19 nt, Artificial Sequence
  Description of Artificial Sequence: Synthetic oligonucleotide
  Sense strand starting at position 1275 of SEQ ID NO: 3594
agccuuuacccugagguuu

SEQ ID NO: 279775 - RNA, 19 nt, Artificial Sequence
  Description of Artificial Sequence: Synthetic oligonucleotide
  Antisense strand to SEQ ID NO: 279774
aaaccucaggguaaaggcu

SEQ ID NO: 279776 - RNA, 19 nt, Artificial Sequence
  Description of Artificial Sequence: Synthetic oligonucleotide
  Sense strand starting at position 1868 of SEQ ID NO: 3594
gucucugugcuugaaagaa

SEQ ID NO: 279777 - RNA, 19 nt, Artificial Sequence
  Description of Artificial Sequence: Synthetic oligonucleotide
  Antisense strand to SEQ ID NO: 279776
uucuuucaagcacagagac

SEQ ID NO: 279778 - RNA, 19 nt, Artificial Sequence
  Description of Artificial Sequence: Synthetic oligonucleotide
  Sense strand starting at position 1944 of SEQ ID NO: 3594
aucuuuaaagcguagacuu

SEQ ID NO: 279779 - RNA, 19 nt, Artificial Sequence
  Description of Artificial Sequence: Synthetic oligonucleotide
  Antisense strand to SEQ ID NO: 279778
aagucuacgcuuuaaagau

SEQ ID NO: 279780 - RNA, 19 nt, Artificial Sequence
  Description of Artificial Sequence: Synthetic oligonucleotide
  Sense strand starting at position 2012 of SEQ ID NO: 3594
ggagcaaagucucuccuua

SEQ ID NO: 279781 - RNA, 19 nt, Artificial Sequence
  Description of Artificial Sequence: Synthetic oligonucleotide
  Antisense strand to SEQ ID NO: 279780
uaaggagagacuuugcucc

SEQ ID NO: 279782 - RNA, 19 nt, Artificial Sequence
  Description of Artificial Sequence: Synthetic oligonucleotide
  Sense strand starting at position 2035 of SEQ ID NO: 3594
uguuaaccucucgagaagu

SEQ ID NO: 279783 - RNA, 19 nt, Artificial Sequence
  Description of Artificial Sequence: Synthetic oligonucleotide
  Antisense strand to SEQ ID NO: 279782
acuucucgagagguuaaca

SEQ ID NO: 279784 - RNA, 19 nt, Artificial Sequence
  Description of Artificial Sequence: Synthetic oligonucleotide
  Sense strand starting at position 2139 of SEQ ID NO: 3594
ucggaucgagauuggagaa

SEQ ID NO: 279785 - RNA, 19 nt, Artificial Sequence
  Description of Artificial Sequence: Synthetic oligonucleotide
  Antisense strand to SEQ ID NO: 279784
uucuccaaucucgauccga

SEQ ID NO: 279786 - RNA, 19 nt, Artificial Sequence
  Description of Artificial Sequence: Synthetic oligonucleotide
  Sense strand starting at position 2169 of SEQ ID NO: 3594
gcaggaguucuagaucuga

SEQ ID NO: 279787 - RNA, 19 nt, Artificial Sequence
  Description of Artificial Sequence: Synthetic oligonucleotide
  Antisense strand to SEQ ID NO: 279786
ucagaucuagaacuccugc

SEQ ID NO: 279788 - RNA, 19 nt, Artificial Sequence
  Description of Artificial Sequence: Synthetic oligonucleotide
  Sense strand starting at position 2305 of SEQ ID NO: 3594
ugcagaguugggaguguuu

SEQ ID NO: 279789 - RNA, 19 nt, Artificial Sequence
  Description of Artificial Sequence: Synthetic oligonucleotide
  Antisense strand to SEQ ID NO: 279788
aaacacucccaacucugca

SEQ ID NO: 279790 - RNA, 19 nt, Artificial Sequence
  Description of Artificial Sequence: Synthetic oligonucleotide
  Sense strand starting at position 2348 of SEQ ID NO: 3594
gguagugcuggacaucuua

SEQ ID NO: 279791 - RNA, 19 nt, Artificial Sequence
  Description of Artificial Sequence: Synthetic oligonucleotide
  Antisense strand to SEQ ID NO: 279790
uaagauguccagcacuacc

SEQ ID NO: 279792 - RNA, 19 nt, Artificial Sequence
  Description of Artificial Sequence: Synthetic oligonucleotide
  Sense strand starting at position 2502 of SEQ ID NO: 3594
aguaacgacuuaguuuaau

SEQ ID NO: 279793 - RNA, 19 nt, Artificial Sequence
  Description of Artificial Sequence: Synthetic oligonucleotide
  Antisense strand to SEQ ID NO: 279792
auuaaacuaagucguuacu

SEQ ID NO: 279794 - RNA, 19 nt, Artificial Sequence
  Description of Artificial Sequence: Synthetic oligonucleotide
  Sense strand starting at position 2541 of SEQ ID NO: 3594
uaauaaguuugauuaggcu

SEQ ID NO: 279795 - RNA, 19 nt, Artificial Sequence
  Description of Artificial Sequence: Synthetic oligonucleotide
  Antisense strand to SEQ ID NO: 279794
agccuaaucaaacuuauua

SEQ ID NO: 279796 - RNA, 19 nt, Artificial Sequence
  Description of Artificial Sequence: Synthetic oligonucleotide
  Sense strand starting at position 2545 of SEQ ID NO: 3594
aaguuugauuaggcuggua

SEQ ID NO: 279797 - RNA, 19 nt, Artificial Sequence
  Description of Artificial Sequence: Synthetic oligonucleotide
  Antisense strand to SEQ ID NO: 279796
uaccagccuaaucaaacuu

SEQ ID NO: 279798 - RNA, 19 nt, Artificial Sequence
  Description of Artificial Sequence: Synthetic oligonucleotide
  Sense strand starting at position 2629 of SEQ ID NO: 3594
ugucgaaugagagagguuu

SEQ ID NO: 279799 - RNA, 19 nt, Artificial Sequence
  Description of Artificial Sequence: Synthetic oligonucleotide
  Antisense strand to SEQ ID NO: 279798
aaaccucucucauucgaca

SEQ ID NO: 279800 - RNA, 19 nt, Artificial Sequence
  Description of Artificial Sequence: Synthetic oligonucleotide
  Sense strand starting at position 2697 of SEQ ID NO: 3594
ccacuuuaucgugaaauau

SEQ ID NO: 279801 - RNA, 19 nt, Artificial Sequence
  Description of Artificial Sequence: Synthetic oligonucleotide
  Antisense strand to SEQ ID NO: 279800
auauuucacgauaaagugg

SEQ ID NO: 279802 - RNA, 19 nt, Artificial Sequence
  Description of Artificial Sequence: Synthetic oligonucleotide
  Sense strand starting at position 2847 of SEQ ID NO: 3594
cuuuauaguggugacuauu

SEQ ID NO: 279803 - RNA, 19 nt, Artificial Sequence
  Description of Artificial Sequence: Synthetic oligonucleotide
  Antisense strand to SEQ ID NO: 279802
aauagucaccacuauaaag

SEQ ID NO: 279804 - RNA, 19 nt, Artificial Sequence
  Description of Artificial Sequence: Synthetic oligonucleotide
  Sense strand starting at position 3076 of SEQ ID NO: 3594
accaauuuguaagaguauu

SEQ ID NO: 279805 - RNA, 19 nt, Artificial Sequence
  Description of Artificial Sequence: Synthetic oligonucleotide
  Antisense strand to SEQ ID NO: 279804
aauacucuuacaaauuggu

SEQ ID NO: 279806 - RNA, 19 nt, Artificial Sequence
  Description of Artificial Sequence: Synthetic oligonucleotide
  Sense strand starting at position 3084 of SEQ ID NO: 3594
guaagaguauuguuaaacu

SEQ ID NO: 279807 - RNA, 19 nt, Artificial Sequence
  Description of Artificial Sequence: Synthetic oligonucleotide
  Antisense strand to SEQ ID NO: 279806
aguuuaacaauacucuuac

SEQ ID NO: 279808 - RNA, 19 nt, Artificial Sequence
  Description of Artificial Sequence: Synthetic oligonucleotide
  Sense strand starting at position 3338 of SEQ ID NO: 3594
uggaacugacuuuguauaa

SEQ ID NO: 279809 - RNA, 19 nt, Artificial Sequence
  Description of Artificial Sequence: Synthetic oligonucleotide
  Antisense strand to SEQ ID NO: 279808
uuauacaaagucaguucca

SEQ ID NO: 279810 - RNA, 19 nt, Artificial Sequence
  Description of Artificial Sequence: Synthetic oligonucleotide
  Sense strand starting at position 3339 of SEQ ID NO: 3594
ggaacugacuuuguauaaa

SEQ ID NO: 279811 - RNA, 19 nt, Artificial Sequence
  Description of Artificial Sequence: Synthetic oligonucleotide
  Antisense strand to SEQ ID NO: 279810
uuuauacaaagucaguucc

SEQ ID NO: 279812 - RNA, 19 nt, Artificial Sequence
  Description of Artificial Sequence: Synthetic oligonucleotide
  Sense strand starting at position 3535 of SEQ ID NO: 3594
aagucuugauauguaguau

SEQ ID NO: 279813 - RNA, 19 nt, Artificial Sequence
  Description of Artificial Sequence: Synthetic oligonucleotide
  Antisense strand to SEQ ID NO: 279812
auacuacauaucaagacuu

SEQ ID NO: 279814 - RNA, 19 nt, Artificial Sequence
  Description of Artificial Sequence: Synthetic oligonucleotide
  Sense strand starting at position 3536 of SEQ ID NO: 3594
agucuugauauguaguaug

SEQ ID NO: 279815 - RNA, 19 nt, Artificial Sequence
  Description of Artificial Sequence: Synthetic oligonucleotide
  Antisense strand to SEQ ID NO: 279814
cauacuacauaucaagacu

SEQ ID NO: 279816 - RNA, 19 nt, Artificial Sequence
  Description of Artificial Sequence: Synthetic oligonucleotide
  Sense strand starting at position 3541 of SEQ ID NO: 3594
ugauauguaguaugucaag

SEQ ID NO: 279817 - RNA, 19 nt, Artificial Sequence
  Description of Artificial Sequence: Synthetic oligonucleotide
  Antisense strand to SEQ ID NO: 279816
cuugacauacuacauauca

SEQ ID NO: 279818 - RNA, 19 nt, Artificial Sequence
  Description of Artificial Sequence: Synthetic oligonucleotide
  Sense strand starting at position 3547 of SEQ ID NO: 3594
guaguaugucaagaguuuc

SEQ ID NO: 279819 - RNA, 19 nt, Artificial Sequence
  Description of Artificial Sequence: Synthetic oligonucleotide
  Antisense strand to SEQ ID NO: 279818
gaaacucuugacauacuac

SEQ ID NO: 279820 - RNA, 19 nt, Artificial Sequence
  Description of Artificial Sequence: Synthetic oligonucleotide
  Sense strand starting at position 3553 of SEQ ID NO: 3594
ugucaagaguuuccacaca

SEQ ID NO: 279821 - RNA, 19 nt, Artificial Sequence
  Description of Artificial Sequence: Synthetic oligonucleotide
  Antisense strand to SEQ ID NO: 279820
uguguggaaacucuugaca

SEQ ID NO: 279822 - RNA, 19 nt, Artificial Sequence
  Description of Artificial Sequence: Synthetic oligonucleotide
  Sense strand starting at position 3581 of SEQ ID NO: 3594
uuuguaauugcgcucuuua

SEQ ID NO: 279823 - RNA, 19 nt, Artificial Sequence
  Description of Artificial Sequence: Synthetic oligonucleotide
  Antisense strand to SEQ ID NO: 279822
uaaagagcgcaauuacaaa

SEQ ID NO: 279824 - RNA, 19 nt, Artificial Sequence
  Description of Artificial Sequence: Synthetic oligonucleotide
  Sense strand starting at position 3582 of SEQ ID NO: 3594
uuguaauugcgcucuuuac

SEQ ID NO: 279825 - RNA, 19 nt, Artificial Sequence
  Description of Artificial Sequence: Synthetic oligonucleotide
  Antisense strand to SEQ ID NO: 279824
guaaagagcgcaauuacaa

SEQ ID NO: 279826 - RNA, 19 nt, Artificial Sequence
  Description of Artificial Sequence: Synthetic oligonucleotide
  Sense strand starting at position 3696 of SEQ ID NO: 3594
gcuacaauuggugggaauu

SEQ ID NO: 279827 - RNA, 19 nt, Artificial Sequence
  Description of Artificial Sequence: Synthetic oligonucleotide
  Antisense strand to SEQ ID NO: 279826
aauucccaccaauuguagc

SEQ ID NO: 279828 - RNA, 19 nt, Artificial Sequence
  Description of Artificial Sequence: Synthetic oligonucleotide
  Sense strand starting at position 3698 of SEQ ID NO: 3594
uacaauuggugggaauuua

SEQ ID NO: 279829 - RNA, 19 nt, Artificial Sequence
  Description of Artificial Sequence: Synthetic oligonucleotide
  Antisense strand to SEQ ID NO: 279828
uaaauucccaccaauugua

SEQ ID NO: 279830 - RNA, 19 nt, Artificial Sequence
  Description of Artificial Sequence: Synthetic oligonucleotide
  Sense strand starting at position 161 of SEQ ID NO: 3595
cacugcuguugagugagau

SEQ ID NO: 279831 - RNA, 19 nt, Artificial Sequence
  Description of Artificial Sequence: Synthetic oligonucleotide
  Antisense strand to SEQ ID NO: 279830
aucucacucaacagcagug

SEQ ID NO: 279832 - RNA, 19 nt, Artificial Sequence
  Description of Artificial Sequence: Synthetic oligonucleotide
  Sense strand starting at position 223 of SEQ ID NO: 3595
gaaagaaagccuuggucuc

SEQ ID NO: 279833 - RNA, 19 nt, Artificial Sequence
  Description of Artificial Sequence: Synthetic oligonucleotide
  Antisense strand to SEQ ID NO: 279832
gagaccaaggcuuucuuuc

SEQ ID NO: 279834 - RNA, 19 nt, Artificial Sequence
  Description of Artificial Sequence: Synthetic oligonucleotide
  Sense strand starting at position 450 of SEQ ID NO: 3595
ucagcuaagaaacgugaaa

SEQ ID NO: 279835 - RNA, 19 nt, Artificial Sequence
  Description of Artificial Sequence: Synthetic oligonucleotide
  Antisense strand to SEQ ID NO: 279834
uuucacguuucuuagcuga

SEQ ID NO: 279836 - RNA, 19 nt, Artificial Sequence
  Description of Artificial Sequence: Synthetic oligonucleotide
  Sense strand starting at position 492 of SEQ ID NO: 3595
ucgcuacaggacuaaauua

SEQ ID NO: 279837 - RNA, 19 nt, Artificial Sequence
  Description of Artificial Sequence: Synthetic oligonucleotide
  Antisense strand to SEQ ID NO: 279836
uaauuuaguccuguagcga

SEQ ID NO: 279838 - RNA, 19 nt, Artificial Sequence
  Description of Artificial Sequence: Synthetic oligonucleotide
  Sense strand starting at position 751 of SEQ ID NO: 3595
guggauuagaagcgaaaga

SEQ ID NO: 279839 - RNA, 19 nt, Artificial Sequence
  Description of Artificial Sequence: Synthetic oligonucleotide
  Antisense strand to SEQ ID NO: 279838
ucuuucgcuucuaauccac

SEQ ID NO: 279840 - RNA, 19 nt, Artificial Sequence
  Description of Artificial Sequence: Synthetic oligonucleotide
  Sense strand starting at position 769 of SEQ ID NO: 3595
aagagaaaugcccgaggca

SEQ ID NO: 279841 - RNA, 19 nt, Artificial Sequence
  Description of Artificial Sequence: Synthetic oligonucleotide
  Antisense strand to SEQ ID NO: 279840
ugccucgggcauuucucuu

SEQ ID NO: 279842 - RNA, 19 nt, Artificial Sequence
  Description of Artificial Sequence: Synthetic oligonucleotide
  Sense strand starting at position 772 of SEQ ID NO: 3595
agaaaugcccgaggcagaa

SEQ ID NO: 279843 - RNA, 19 nt, Artificial Sequence
  Description of Artificial Sequence: Synthetic oligonucleotide
  Antisense strand to SEQ ID NO: 279842
uucugccucgggcauuucu

SEQ ID NO: 279844 - RNA, 19 nt, Artificial Sequence
  Description of Artificial Sequence: Synthetic oligonucleotide
  Sense strand starting at position 2189 of SEQ ID NO: 3595
ugauucugcgcucgagacu

SEQ ID NO: 279845 - RNA, 19 nt, Artificial Sequence
  Description of Artificial Sequence: Synthetic oligonucleotide
  Antisense strand to SEQ ID NO: 279844
agucucgagcgcagaauca

SEQ ID NO: 279846 - RNA, 19 nt, Artificial Sequence
  Description of Artificial Sequence: Synthetic oligonucleotide
  Sense strand starting at position 2231 of SEQ ID NO: 3595
acgcgaagcuucuccacuu

SEQ ID NO: 279847 - RNA, 19 nt, Artificial Sequence
  Description of Artificial Sequence: Synthetic oligonucleotide
  Antisense strand to SEQ ID NO: 279846
aaguggagaagcuucgcgu

SEQ ID NO: 279848 - RNA, 19 nt, Artificial Sequence
  Description of Artificial Sequence: Synthetic oligonucleotide
  Sense strand starting at position 2290 of SEQ ID NO: 3595
uuaguuggcgccuuaaugu

SEQ ID NO: 279849 - RNA, 19 nt, Artificial Sequence
  Description of Artificial Sequence: Synthetic oligonucleotide
  Antisense strand to SEQ ID NO: 279848
acauuaaggcgccaacuaa

SEQ ID NO: 279850 - RNA, 19 nt, Artificial Sequence
  Description of Artificial Sequence: Synthetic oligonucleotide
  Sense strand starting at position 2296 of SEQ ID NO: 3595
ggcgccuuaauguuuguaa

SEQ ID NO: 279851 - RNA, 19 nt, Artificial Sequence
  Description of Artificial Sequence: Synthetic oligonucleotide
  Antisense strand to SEQ ID NO: 279850
uuacaaacauuaaggcgcc

SEQ ID NO: 279852 - RNA, 19 nt, Artificial Sequence
  Description of Artificial Sequence: Synthetic oligonucleotide
  Sense strand starting at position 2298 of SEQ ID NO: 3595
cgccuuaauguuuguaaca

SEQ ID NO: 279853 - RNA, 19 nt, Artificial Sequence
  Description of Artificial Sequence: Synthetic oligonucleotide
  Antisense strand to SEQ ID NO: 279852
uguuacaaacauuaaggcg

SEQ ID NO: 279854 - RNA, 19 nt, Artificial Sequence
  Description of Artificial Sequence: Synthetic oligonucleotide
  Sense strand starting at position 2299 of SEQ ID NO: 3595
gccuuaauguuuguaacac

SEQ ID NO: 279855 - RNA, 19 nt, Artificial Sequence
  Description of Artificial Sequence: Synthetic oligonucleotide
  Antisense strand to SEQ ID NO: 279854
guguuacaaacauuaaggc

SEQ ID NO: 279856 - RNA, 19 nt, Artificial Sequence
  Description of Artificial Sequence: Synthetic oligonucleotide
  Sense strand starting at position 2332 of SEQ ID NO: 3595
cucugauccgggcacgauu

SEQ ID NO: 279857 - RNA, 19 nt, Artificial Sequence
  Description of Artificial Sequence: Synthetic oligonucleotide
  Antisense strand to SEQ ID NO: 279856
aaucgugcccggaucagag

SEQ ID NO: 279858 - RNA, 19 nt, Artificial Sequence
  Description of Artificial Sequence: Synthetic oligonucleotide
  Sense strand starting at position 2483 of SEQ ID NO: 3595
agggagucugcgggaagau

SEQ ID NO: 279859 - RNA, 19 nt, Artificial Sequence
  Description of Artificial Sequence: Synthetic oligonucleotide
  Antisense strand to SEQ ID NO: 279858
aucuucccgcagacucccu

SEQ ID NO: 279860 - RNA, 19 nt, Artificial Sequence
  Description of Artificial Sequence: Synthetic oligonucleotide
  Sense strand starting at position 2484 of SEQ ID NO: 3595
gggagucugcgggaagauu

SEQ ID NO: 279861 - RNA, 19 nt, Artificial Sequence
  Description of Artificial Sequence: Synthetic oligonucleotide
  Antisense strand to SEQ ID NO: 279860
aaucuucccgcagacuccc

SEQ ID NO: 279862 - RNA, 19 nt, Artificial Sequence
  Description of Artificial Sequence: Synthetic oligonucleotide
  Sense strand starting at position 2706 of SEQ ID NO: 3595
ucgggugugucuagagaca

SEQ ID NO: 279863 - RNA, 19 nt, Artificial Sequence
  Description of Artificial Sequence: Synthetic oligonucleotide
  Antisense strand to SEQ ID NO: 279862
ugucucuagacacacccga

SEQ ID NO: 279864 - RNA, 19 nt, Artificial Sequence
  Description of Artificial Sequence: Synthetic oligonucleotide
  Sense strand starting at position 2746 of SEQ ID NO: 3595
ggaagacacugcgugagau

SEQ ID NO: 279865 - RNA, 19 nt, Artificial Sequence
  Description of Artificial Sequence: Synthetic oligonucleotide
  Antisense strand to SEQ ID NO: 279864
aucucacgcagugucuucc

SEQ ID NO: 279866 - RNA, 19 nt, Artificial Sequence
  Description of Artificial Sequence: Synthetic oligonucleotide
  Sense strand starting at position 2747 of SEQ ID NO: 3595
gaagacacugcgugagaua

SEQ ID NO: 279867 - RNA, 19 nt, Artificial Sequence
  Description of Artificial Sequence: Synthetic oligonucleotide
  Antisense strand to SEQ ID NO: 279866
uaucucacgcagugucuuc

SEQ ID NO: 279868 - RNA, 19 nt, Artificial Sequence
  Description of Artificial Sequence: Synthetic oligonucleotide
  Sense strand starting at position 2758 of SEQ ID NO: 3595
gugagauacgcacaaaggu

SEQ ID NO: 279869 - RNA, 19 nt, Artificial Sequence
  Description of Artificial Sequence: Synthetic oligonucleotide
  Antisense strand to SEQ ID NO: 279868
accuuugugcguaucucac

SEQ ID NO: 279870 - RNA, 19 nt, Artificial Sequence
  Description of Artificial Sequence: Synthetic oligonucleotide
  Sense strand starting at position 2914 of SEQ ID NO: 3595
gggcguguucccgucgcaa

SEQ ID NO: 279871 - RNA, 19 nt, Artificial Sequence
  Description of Artificial Sequence: Synthetic oligonucleotide
  Antisense strand to SEQ ID NO: 279870
uugcgacgggaacacgccc

SEQ ID NO: 279872 - RNA, 19 nt, Artificial Sequence
  Description of Artificial Sequence: Synthetic oligonucleotide
  Sense strand starting at position 2915 of SEQ ID NO: 3595
ggcguguucccgucgcaaa

SEQ ID NO: 279873 - RNA, 19 nt, Artificial Sequence
  Description of Artificial Sequence: Synthetic oligonucleotide
  Antisense strand to SEQ ID NO: 279872
uuugcgacgggaacacgcc

SEQ ID NO: 279874 - RNA, 19 nt, Artificial Sequence
  Description of Artificial Sequence: Synthetic oligonucleotide
  Sense strand starting at position 2971 of SEQ ID NO: 3595
gccugagcugcguuugaaa

SEQ ID NO: 279875 - RNA, 19 nt, Artificial Sequence
  Description of Artificial Sequence: Synthetic oligonucleotide
  Antisense strand to SEQ ID NO: 279874
uuucaaacgcagcucaggc

SEQ ID NO: 279876 - RNA, 19 nt, Artificial Sequence
  Description of Artificial Sequence: Synthetic oligonucleotide
  Sense strand starting at position 3000 of SEQ ID NO: 3595
augggauugguggguaaua

SEQ ID NO: 279877 - RNA, 19 nt, Artificial Sequence
  Description of Artificial Sequence: Synthetic oligonucleotide
  Antisense strand to SEQ ID NO: 279876
uauuacccaccaaucccau

SEQ ID NO: 279878 - RNA, 19 nt, Artificial Sequence
  Description of Artificial Sequence: Synthetic oligonucleotide
  Sense strand starting at position 3020 of SEQ ID NO: 3595
gcuaguuuccuguugcuau

SEQ ID NO: 279879 - RNA, 19 nt, Artificial Sequence
  Description of Artificial Sequence: Synthetic oligonucleotide
  Antisense strand to SEQ ID NO: 279878
auagcaacaggaaacuagc

SEQ ID NO: 279880 - RNA, 19 nt, Artificial Sequence
  Description of Artificial Sequence: Synthetic oligonucleotide
  Sense strand starting at position 3209 of SEQ ID NO: 3595
cagagcagguauuagaaga

SEQ ID NO: 279881 - RNA, 19 nt, Artificial Sequence
  Description of Artificial Sequence: Synthetic oligonucleotide
  Antisense strand to SEQ ID NO: 279880
ucuucuaauaccugcucug

SEQ ID NO: 279882 - RNA, 19 nt, Artificial Sequence
  Description of Artificial Sequence: Synthetic oligonucleotide
  Sense strand starting at position 3330 of SEQ ID NO: 3595
gguggcucccgcugacauu

SEQ ID NO: 279883 - RNA, 19 nt, Artificial Sequence
  Description of Artificial Sequence: Synthetic oligonucleotide
  Antisense strand to SEQ ID NO: 279882
aaugucagcgggagccacc

SEQ ID NO: 279884 - RNA, 19 nt, Artificial Sequence
  Description of Artificial Sequence: Synthetic oligonucleotide
  Sense strand starting at position 3356 of SEQ ID NO: 3595
ccaucuuuccugcaggauu

SEQ ID NO: 279885 - RNA, 19 nt, Artificial Sequence
  Description of Artificial Sequence: Synthetic oligonucleotide
  Antisense strand to SEQ ID NO: 279884
aauccugcaggaaagaugg

SEQ ID NO: 279886 - RNA, 19 nt, Artificial Sequence
  Description of Artificial Sequence: Synthetic oligonucleotide
  Sense strand starting at position 3414 of SEQ ID NO: 3595
uuccauuucuccugcagga

SEQ ID NO: 279887 - RNA, 19 nt, Artificial Sequence
  Description of Artificial Sequence: Synthetic oligonucleotide
  Antisense strand to SEQ ID NO: 279886
uccugcaggagaaauggaa

SEQ ID NO: 279888 - RNA, 19 nt, Artificial Sequence
  Description of Artificial Sequence: Synthetic oligonucleotide
  Sense strand starting at position 3476 of SEQ ID NO: 3595
acaucucuccugcaggaua

SEQ ID NO: 279889 - RNA, 19 nt, Artificial Sequence
  Description of Artificial Sequence: Synthetic oligonucleotide
  Antisense strand to SEQ ID NO: 279888
uauccugcaggagagaugu

SEQ ID NO: 279890 - RNA, 19 nt, Artificial Sequence
  Description of Artificial Sequence: Synthetic oligonucleotide
  Sense strand starting at position 3487 of SEQ ID NO: 3595
gcaggauacuauccacaca

SEQ ID NO: 279891 - RNA, 19 nt, Artificial Sequence
  Description of Artificial Sequence: Synthetic oligonucleotide
  Antisense strand to SEQ ID NO: 279890
uguguggauaguauccugc

SEQ ID NO: 279892 - RNA, 19 nt, Artificial Sequence
  Description of Artificial Sequence: Synthetic oligonucleotide
  Sense strand starting at position 3604 of SEQ ID NO: 3595
gcaggauucuaugcacaca

SEQ ID NO: 279893 - RNA, 19 nt, Artificial Sequence
  Description of Artificial Sequence: Synthetic oligonucleotide
  Antisense strand to SEQ ID NO: 279892
ugugugcauagaauccugc

SEQ ID NO: 279894 - RNA, 19 nt, Artificial Sequence
  Description of Artificial Sequence: Synthetic oligonucleotide
  Sense strand starting at position 3651 of SEQ ID NO: 3595
gccguaucuucugcagaau

SEQ ID NO: 279895 - RNA, 19 nt, Artificial Sequence
  Description of Artificial Sequence: Synthetic oligonucleotide
  Antisense strand to SEQ ID NO: 279894
auucugcagaagauacggc

SEQ ID NO: 279896 - RNA, 19 nt, Artificial Sequence
  Description of Artificial Sequence: Synthetic oligonucleotide
  Sense strand starting at position 3652 of SEQ ID NO: 3595
ccguaucuucugcagaauc

SEQ ID NO: 279897 - RNA, 19 nt, Artificial Sequence
  Description of Artificial Sequence: Synthetic oligonucleotide
  Antisense strand to SEQ ID NO: 279896
gauucugcagaagauacgg

SEQ ID NO: 279898 - RNA, 19 nt, Artificial Sequence
  Description of Artificial Sequence: Synthetic oligonucleotide
  Sense strand starting at position 3654 of SEQ ID NO: 3595
guaucuucugcagaauccu

SEQ ID NO: 279899 - RNA, 19 nt, Artificial Sequence
  Description of Artificial Sequence: Synthetic oligonucleotide
  Antisense strand to SEQ ID NO: 279898
aggauucugcagaagauac

SEQ ID NO: 279900 - RNA, 19 nt, Artificial Sequence
  Description of Artificial Sequence: Synthetic oligonucleotide
  Sense strand starting at position 3663 of SEQ ID NO: 3595
gcagaauccuguccacaca

SEQ ID NO: 279901 - RNA, 19 nt, Artificial Sequence
  Description of Artificial Sequence: Synthetic oligonucleotide
  Antisense strand to SEQ ID NO: 279900
uguguggacaggauucugc

SEQ ID NO: 279902 - RNA, 19 nt, Artificial Sequence
  Description of Artificial Sequence: Synthetic oligonucleotide
  Sense strand starting at position 3842 of SEQ ID NO: 3595
gcaggauccucucuacaca

SEQ ID NO: 279903 - RNA, 19 nt, Artificial Sequence
  Description of Artificial Sequence: Synthetic oligonucleotide
  Antisense strand to SEQ ID NO: 279902
uguguagagaggauccugc

SEQ ID NO: 279904 - RNA, 19 nt, Artificial Sequence
  Description of Artificial Sequence: Synthetic oligonucleotide
  Sense strand starting at position 3886 of SEQ ID NO: 3595
gaugcugucucuuugcaga

SEQ ID NO: 279905 - RNA, 19 nt, Artificial Sequence
  Description of Artificial Sequence: Synthetic oligonucleotide
  Antisense strand to SEQ ID NO: 279904
ucugcaaagagacagcauc

SEQ ID NO: 279906 - RNA, 19 nt, Artificial Sequence
  Description of Artificial Sequence: Synthetic oligonucleotide
  Sense strand starting at position 3888 of SEQ ID NO: 3595
ugcugucucuuugcagagu

SEQ ID NO: 279907 - RNA, 19 nt, Artificial Sequence
  Description of Artificial Sequence: Synthetic oligonucleotide
  Antisense strand to SEQ ID NO: 279906
acucugcaaagagacagca

SEQ ID NO: 279908 - RNA, 19 nt, Artificial Sequence
  Description of Artificial Sequence: Synthetic oligonucleotide
  Sense strand starting at position 3959 of SEQ ID NO: 3595
gcaguauccuauccacaca

SEQ ID NO: 279909 - RNA, 19 nt, Artificial Sequence
  Description of Artificial Sequence: Synthetic oligonucleotide
  Antisense strand to SEQ ID NO: 279908
uguguggauaggauacugc

SEQ ID NO: 279910 - RNA, 19 nt, Artificial Sequence
  Description of Artificial Sequence: Synthetic oligonucleotide
  Sense strand starting at position 17 of SEQ ID NO: 3596
guuaaauucucauugguuu

SEQ ID NO: 279911 - RNA, 19 nt, Artificial Sequence
  Description of Artificial Sequence: Synthetic oligonucleotide
  Antisense strand to SEQ ID NO: 279910
aaaccaaugagaauuuaac

SEQ ID NO: 279912 - RNA, 19 nt, Artificial Sequence
  Description of Artificial Sequence: Synthetic oligonucleotide
  Sense strand starting at position 147 of SEQ ID NO: 3596
cccuuccauuuagauguau

SEQ ID NO: 279913 - RNA, 19 nt, Artificial Sequence
  Description of Artificial Sequence: Synthetic oligonucleotide
  Antisense strand to SEQ ID NO: 279912
auacaucuaaauggaaggg

SEQ ID NO: 279914 - RNA, 19 nt, Artificial Sequence
  Description of Artificial Sequence: Synthetic oligonucleotide
  Sense strand starting at position 156 of SEQ ID NO: 3596
uuagauguaucacaaagau

SEQ ID NO: 279915 - RNA, 19 nt, Artificial Sequence
  Description of Artificial Sequence: Synthetic oligonucleotide
  Antisense strand to SEQ ID NO: 279914
aucuuugugauacaucuaa

SEQ ID NO: 279916 - RNA, 19 nt, Artificial Sequence
  Description of Artificial Sequence: Synthetic oligonucleotide
  Sense strand starting at position 202 of SEQ ID NO: 3596
cuguaauguucucuuccca

SEQ ID NO: 279917 - RNA, 19 nt, Artificial Sequence
  Description of Artificial Sequence: Synthetic oligonucleotide
  Antisense strand to SEQ ID NO: 279916
ugggaagagaacauuacag

SEQ ID NO: 279918 - RNA, 19 nt, Artificial Sequence
  Description of Artificial Sequence: Synthetic oligonucleotide
  Sense strand starting at position 229 of SEQ ID NO: 3596
ccagaaggguauucucagu

SEQ ID NO: 279919 - RNA, 19 nt, Artificial Sequence
  Description of Artificial Sequence: Synthetic oligonucleotide
  Antisense strand to SEQ ID NO: 279918
acugagaauacccuucugg

SEQ ID NO: 279920 - RNA, 19 nt, Artificial Sequence
  Description of Artificial Sequence: Synthetic oligonucleotide
  Sense strand starting at position 234 of SEQ ID NO: 3596
aggguauucucagugaaga

SEQ ID NO: 279921 - RNA, 19 nt, Artificial Sequence
  Description of Artificial Sequence: Synthetic oligonucleotide
  Antisense strand to SEQ ID NO: 279920
ucuucacugagaauacccu

SEQ ID NO: 279922 - RNA, 19 nt, Artificial Sequence
  Description of Artificial Sequence: Synthetic oligonucleotide
  Sense strand starting at position 235 of SEQ ID NO: 3596
ggguauucucagugaagag

SEQ ID NO: 279923 - RNA, 19 nt, Artificial Sequence
  Description of Artificial Sequence: Synthetic oligonucleotide
  Antisense strand to SEQ ID NO: 279922
cucuucacugagaauaccc

SEQ ID NO: 279924 - RNA, 19 nt, Artificial Sequence
  Description of Artificial Sequence: Synthetic oligonucleotide
  Sense strand starting at position 268 of SEQ ID NO: 3596
uugugugucauuccacguu

SEQ ID NO: 279925 - RNA, 19 nt, Artificial Sequence
  Description of Artificial Sequence: Synthetic oligonucleotide
  Antisense strand to SEQ ID NO: 279924
aacguggaaugacacacaa

SEQ ID NO: 279926 - RNA, 19 nt, Artificial Sequence
  Description of Artificial Sequence: Synthetic oligonucleotide
  Sense strand starting at position 419 of SEQ ID NO: 3596
cugaguggugauuacauua

SEQ ID NO: 279927 - RNA, 19 nt, Artificial Sequence
  Description of Artificial Sequence: Synthetic oligonucleotide
  Antisense strand to SEQ ID NO: 279926
uaauguaaucaccacucag

SEQ ID NO: 279928 - RNA, 19 nt, Artificial Sequence
  Description of Artificial Sequence: Synthetic oligonucleotide
  Sense strand starting at position 542 of SEQ ID NO: 3596
ggcauacucuaagugugua

SEQ ID NO: 279929 - RNA, 19 nt, Artificial Sequence
  Description of Artificial Sequence: Synthetic oligonucleotide
  Antisense strand to SEQ ID NO: 279928
uacacacuuagaguaugcc

SEQ ID NO: 279930 - RNA, 19 nt, Artificial Sequence
  Description of Artificial Sequence: Synthetic oligonucleotide
  Sense strand starting at position 563 of SEQ ID NO: 3596
aggucugcucaauaacacu

SEQ ID NO: 279931 - RNA, 19 nt, Artificial Sequence
  Description of Artificial Sequence: Synthetic oligonucleotide
  Antisense strand to SEQ ID NO: 279930
aguguuauugagcagaccu

SEQ ID NO: 279932 - RNA, 19 nt, Artificial Sequence
  Description of Artificial Sequence: Synthetic oligonucleotide
  Sense strand starting at position 725 of SEQ ID NO: 3596
gaacccauguaauugugaa

SEQ ID NO: 279933 - RNA, 19 nt, Artificial Sequence
  Description of Artificial Sequence: Synthetic oligonucleotide
  Antisense strand to SEQ ID NO: 279932
uucacaauuacauggguuc

SEQ ID NO: 279934 - RNA, 19 nt, Artificial Sequence
  Description of Artificial Sequence: Synthetic oligonucleotide
  Sense strand starting at position 958 of SEQ ID NO: 3596
ccauguuagcccugauggu

SEQ ID NO: 279935 - RNA, 19 nt, Artificial Sequence
  Description of Artificial Sequence: Synthetic oligonucleotide
  Antisense strand to SEQ ID NO: 279934
accaucagggcuaacaugg

SEQ ID NO: 279936 - RNA, 19 nt, Artificial Sequence
  Description of Artificial Sequence: Synthetic oligonucleotide
  Sense strand starting at position 1200 of SEQ ID NO: 3596
guaagcaggucuccaguaa

SEQ ID NO: 279937 - RNA, 19 nt, Artificial Sequence
  Description of Artificial Sequence: Synthetic oligonucleotide
  Antisense strand to SEQ ID NO: 279936
uuacuggagaccugcuuac

SEQ ID NO: 279938 - RNA, 19 nt, Artificial Sequence
  Description of Artificial Sequence: Synthetic oligonucleotide
  Sense strand starting at position 1201 of SEQ ID NO: 3596
uaagcaggucuccaguaaa

SEQ ID NO: 279939 - RNA, 19 nt, Artificial Sequence
  Description of Artificial Sequence: Synthetic oligonucleotide
  Antisense strand to SEQ ID NO: 279938
uuuacuggagaccugcuua

SEQ ID NO: 279940 - RNA, 19 nt, Artificial Sequence
  Description of Artificial Sequence: Synthetic oligonucleotide
  Sense strand starting at position 1204 of SEQ ID NO: 3596
gcaggucuccaguaaaggu

SEQ ID NO: 279941 - RNA, 19 nt, Artificial Sequence
  Description of Artificial Sequence: Synthetic oligonucleotide
  Antisense strand to SEQ ID NO: 279940
accuuuacuggagaccugc

SEQ ID NO: 279942 - RNA, 19 nt, Artificial Sequence
  Description of Artificial Sequence: Synthetic oligonucleotide
  Sense strand starting at position 1307 of SEQ ID NO: 3596
agcagcauccuuggaugaa

SEQ ID NO: 279943 - RNA, 19 nt, Artificial Sequence
  Description of Artificial Sequence: Synthetic oligonucleotide
  Antisense strand to SEQ ID NO: 279942
uucauccaaggaugcugcu

SEQ ID NO: 279944 - RNA, 19 nt, Artificial Sequence
  Description of Artificial Sequence: Synthetic oligonucleotide
  Sense strand starting at position 1471 of SEQ ID NO: 3596
acacauuuccugugccuau

SEQ ID NO: 279945 - RNA, 19 nt, Artificial Sequence
  Description of Artificial Sequence: Synthetic oligonucleotide
  Antisense strand to SEQ ID NO: 279944
auaggcacaggaaaugugu

SEQ ID NO: 279946 - RNA, 19 nt, Artificial Sequence
  Description of Artificial Sequence: Synthetic oligonucleotide
  Sense strand starting at position 2292 of SEQ ID NO: 3596
ggaaucgacgucugcugaa

SEQ ID NO: 279947 - RNA, 19 nt, Artificial Sequence
  Description of Artificial Sequence: Synthetic oligonucleotide
  Antisense strand to SEQ ID NO: 279946
uucagcagacgucgauucc

SEQ ID NO: 279948 - RNA, 19 nt, Artificial Sequence
  Description of Artificial Sequence: Synthetic oligonucleotide
  Sense strand starting at position 2443 of SEQ ID NO: 3596
aaaguaugacaguggaucu

SEQ ID NO: 279949 - RNA, 19 nt, Artificial Sequence
  Description of Artificial Sequence: Synthetic oligonucleotide
  Antisense strand to SEQ ID NO: 279948
agauccacugucauacuuu

SEQ ID NO: 279950 - RNA, 19 nt, Artificial Sequence
  Description of Artificial Sequence: Synthetic oligonucleotide
  Sense strand starting at position 2587 of SEQ ID NO: 3596
agucaucuucuccaaggca

SEQ ID NO: 279951 - RNA, 19 nt, Artificial Sequence
  Description of Artificial Sequence: Synthetic oligonucleotide
  Antisense strand to SEQ ID NO: 279950
ugccuuggagaagaugacu

SEQ ID NO: 279952 - RNA, 19 nt, Artificial Sequence
  Description of Artificial Sequence: Synthetic oligonucleotide
  Sense strand starting at position 2652 of SEQ ID NO: 3596
aucaaaggucauuguuauc

SEQ ID NO: 279953 - RNA, 19 nt, Artificial Sequence
  Description of Artificial Sequence: Synthetic oligonucleotide
  Antisense strand to SEQ ID NO: 279952
gauaacaaugaccuuugau

SEQ ID NO: 279954 - RNA, 19 nt, Artificial Sequence
  Description of Artificial Sequence: Synthetic oligonucleotide
  Sense strand starting at position 2657 of SEQ ID NO: 3596
aggucauuguuauccagau

SEQ ID NO: 279955 - RNA, 19 nt, Artificial Sequence
  Description of Artificial Sequence: Synthetic oligonucleotide
  Antisense strand to SEQ ID NO: 279954
aucuggauaacaaugaccu

SEQ ID NO: 279956 - RNA, 19 nt, Artificial Sequence
  Description of Artificial Sequence: Synthetic oligonucleotide
  Sense strand starting at position 2658 of SEQ ID NO: 3596
ggucauuguuauccagaua

SEQ ID NO: 279957 - RNA, 19 nt, Artificial Sequence
  Description of Artificial Sequence: Synthetic oligonucleotide
  Antisense strand to SEQ ID NO: 279956
uaucuggauaacaaugacc

SEQ ID NO: 279958 - RNA, 19 nt, Artificial Sequence
  Description of Artificial Sequence: Synthetic oligonucleotide
  Sense strand starting at position 2710 of SEQ ID NO: 3596
guagguuucugguccaagu

SEQ ID NO: 279959 - RNA, 19 nt, Artificial Sequence
  Description of Artificial Sequence: Synthetic oligonucleotide
  Antisense strand to SEQ ID NO: 279958
acuuggaccagaaaccuac

SEQ ID NO: 279960 - RNA, 19 nt, Artificial Sequence
  Description of Artificial Sequence: Synthetic oligonucleotide
  Sense strand starting at position 2759 of SEQ ID NO: 3596
uugcuuccacagugaggau

SEQ ID NO: 279961 - RNA, 19 nt, Artificial Sequence
  Description of Artificial Sequence: Synthetic oligonucleotide
  Antisense strand to SEQ ID NO: 279960
auccucacuguggaagcaa

SEQ ID NO: 279962 - RNA, 19 nt, Artificial Sequence
  Description of Artificial Sequence: Synthetic oligonucleotide
  Sense strand starting at position 2790 of SEQ ID NO: 3596
ugcucugagucaucuccca

SEQ ID NO: 279963 - RNA, 19 nt, Artificial Sequence
  Description of Artificial Sequence: Synthetic oligonucleotide
  Antisense strand to SEQ ID NO: 279962
ugggagaugacucagagca

SEQ ID NO: 279964 - RNA, 19 nt, Artificial Sequence
  Description of Artificial Sequence: Synthetic oligonucleotide
  Sense strand starting at position 2798 of SEQ ID NO: 3596
gucaucucccaguaacauc

SEQ ID NO: 279965 - RNA, 19 nt, Artificial Sequence
  Description of Artificial Sequence: Synthetic oligonucleotide
  Antisense strand to SEQ ID NO: 279964
gauguuacugggagaugac

SEQ ID NO: 279966 - RNA, 19 nt, Artificial Sequence
  Description of Artificial Sequence: Synthetic oligonucleotide
  Sense strand starting at position 2954 of SEQ ID NO: 3596
gagggcuugccuggaaaua

SEQ ID NO: 279967 - RNA, 19 nt, Artificial Sequence
  Description of Artificial Sequence: Synthetic oligonucleotide
  Antisense strand to SEQ ID NO: 279966
uauuuccaggcaagcccuc

SEQ ID NO: 279968 - RNA, 19 nt, Artificial Sequence
  Description of Artificial Sequence: Synthetic oligonucleotide
  Sense strand starting at position 3134 of SEQ ID NO: 3596
gacaguucugaucaucgga

SEQ ID NO: 279969 - RNA, 19 nt, Artificial Sequence
  Description of Artificial Sequence: Synthetic oligonucleotide
  Antisense strand to SEQ ID NO: 279968
uccgaugaucagaacuguc

SEQ ID NO: 279970 - RNA, 19 nt, Artificial Sequence
  Description of Artificial Sequence: Synthetic oligonucleotide
  Sense strand starting at position 3234 of SEQ ID NO: 3596
cugggucaaccuugaaaua

SEQ ID NO: 279971 - RNA, 19 nt, Artificial Sequence
  Description of Artificial Sequence: Synthetic oligonucleotide
  Antisense strand to SEQ ID NO: 279970
uauuucaagguugacccag

SEQ ID NO: 279972 - RNA, 19 nt, Artificial Sequence
  Description of Artificial Sequence: Synthetic oligonucleotide
  Sense strand starting at position 3260 of SEQ ID NO: 3596
uccugaguggcuggguaau

SEQ ID NO: 279973 - RNA, 19 nt, Artificial Sequence
  Description of Artificial Sequence: Synthetic oligonucleotide
  Antisense strand to SEQ ID NO: 279972
auuacccagccacucagga

SEQ ID NO: 279974 - RNA, 19 nt, Artificial Sequence
  Description of Artificial Sequence: Synthetic oligonucleotide
  Sense strand starting at position 3262 of SEQ ID NO: 3596
cugaguggcuggguaauaa

SEQ ID NO: 279975 - RNA, 19 nt, Artificial Sequence
  Description of Artificial Sequence: Synthetic oligonucleotide
  Antisense strand to SEQ ID NO: 279974
uuauuacccagccacucag

SEQ ID NO: 279976 - RNA, 19 nt, Artificial Sequence
  Description of Artificial Sequence: Synthetic oligonucleotide
  Sense strand starting at position 3326 of SEQ ID NO: 3596
acaauaugguuccuauaag

SEQ ID NO: 279977 - RNA, 19 nt, Artificial Sequence
  Description of Artificial Sequence: Synthetic oligonucleotide
  Antisense strand to SEQ ID NO: 279976
cuuauaggaaccauauugu

SEQ ID NO: 279978 - RNA, 19 nt, Artificial Sequence
  Description of Artificial Sequence: Synthetic oligonucleotide
  Sense strand starting at position 3398 of SEQ ID NO: 3596
ucaugcuaaguaugagcaa

SEQ ID NO: 279979 - RNA, 19 nt, Artificial Sequence
  Description of Artificial Sequence: Synthetic oligonucleotide
  Antisense strand to SEQ ID NO: 279978
uugcucauacuuagcauga

SEQ ID NO: 279980 - RNA, 19 nt, Artificial Sequence
  Description of Artificial Sequence: Synthetic oligonucleotide
  Sense strand starting at position 3573 of SEQ ID NO: 3596
acaugcaggauguguauua

SEQ ID NO: 279981 - RNA, 19 nt, Artificial Sequence
  Description of Artificial Sequence: Synthetic oligonucleotide
  Antisense strand to SEQ ID NO: 279980
uaauacacauccugcaugu

SEQ ID NO: 279982 - RNA, 19 nt, Artificial Sequence
  Description of Artificial Sequence: Synthetic oligonucleotide
  Sense strand starting at position 3592 of SEQ ID NO: 3596
gggagugcccuugggacaa

SEQ ID NO: 279983 - RNA, 19 nt, Artificial Sequence
  Description of Artificial Sequence: Synthetic oligonucleotide
  Antisense strand to SEQ ID NO: 279982
uugucccaagggcacuccc

SEQ ID NO: 279984 - RNA, 19 nt, Artificial Sequence
  Description of Artificial Sequence: Synthetic oligonucleotide
  Sense strand starting at position 3721 of SEQ ID NO: 3596
cggucaaaguugucccaua

SEQ ID NO: 279985 - RNA, 19 nt, Artificial Sequence
  Description of Artificial Sequence: Synthetic oligonucleotide
  Antisense strand to SEQ ID NO: 279984
uaugggacaacuuugaccg

SEQ ID NO: 279986 - RNA, 19 nt, Artificial Sequence
  Description of Artificial Sequence: Synthetic oligonucleotide
  Sense strand starting at position 3722 of SEQ ID NO: 3596
ggucaaaguugucccauac

SEQ ID NO: 279987 - RNA, 19 nt, Artificial Sequence
  Description of Artificial Sequence: Synthetic oligonucleotide
  Antisense strand to SEQ ID NO: 279986
guaugggacaacuuugacc

SEQ ID NO: 279988 - RNA, 19 nt, Artificial Sequence
  Description of Artificial Sequence: Synthetic oligonucleotide
  Sense strand starting at position 3919 of SEQ ID NO: 3596
acguauuguaucugguaca

SEQ ID NO: 279989 - RNA, 19 nt, Artificial Sequence
  Description of Artificial Sequence: Synthetic oligonucleotide
  Antisense strand to SEQ ID NO: 279988
uguaccagauacaauacgu

SEQ ID NO: 279990 - RNA, 19 nt, Artificial Sequence
  Description of Artificial Sequence: Synthetic oligonucleotide
  Sense strand starting at position 31 of SEQ ID NO: 3598
ucugaaaguaucgauugua

SEQ ID NO: 279991 - RNA, 19 nt, Artificial Sequence
  Description of Artificial Sequence: Synthetic oligonucleotide
  Antisense strand to SEQ ID NO: 279990
uacaaucgauacuuucaga

SEQ ID NO: 279992 - RNA, 19 nt, Artificial Sequence
  Description of Artificial Sequence: Synthetic oligonucleotide
  Sense strand starting at position 34 of SEQ ID NO: 3598
gaaaguaucgauuguauaa

SEQ ID NO: 279993 - RNA, 19 nt, Artificial Sequence
  Description of Artificial Sequence: Synthetic oligonucleotide
  Antisense strand to SEQ ID NO: 279992
uuauacaaucgauacuuuc

SEQ ID NO: 279994 - RNA, 19 nt, Artificial Sequence
  Description of Artificial Sequence: Synthetic oligonucleotide
  Sense strand starting at position 145 of SEQ ID NO: 3598
cuuccaaggcuguguauuu

SEQ ID NO: 279995 - RNA, 19 nt, Artificial Sequence
  Description of Artificial Sequence: Synthetic oligonucleotide
  Antisense strand to SEQ ID NO: 279994
aaauacacagccuuggaag

SEQ ID NO: 279996 - RNA, 19 nt, Artificial Sequence
  Description of Artificial Sequence: Synthetic oligonucleotide
  Sense strand starting at position 146 of SEQ ID NO: 3598
uuccaaggcuguguauuua

SEQ ID NO: 279997 - RNA, 19 nt, Artificial Sequence
  Description of Artificial Sequence: Synthetic oligonucleotide
  Antisense strand to SEQ ID NO: 279996
uaaauacacagccuuggaa

SEQ ID NO: 279998 - RNA, 19 nt, Artificial Sequence
  Description of Artificial Sequence: Synthetic oligonucleotide
  Sense strand starting at position 181 of SEQ ID NO: 3598
agaccauguucugcuauau

SEQ ID NO: 279999 - RNA, 19 nt, Artificial Sequence
  Description of Artificial Sequence: Synthetic oligonucleotide
  Antisense strand to SEQ ID NO: 279998
auauagcagaacauggucu

SEQ ID NO: 280000 - RNA, 19 nt, Artificial Sequence
  Description of Artificial Sequence: Synthetic oligonucleotide
  Sense strand starting at position 278 of SEQ ID NO: 3598
cuacuacaugacuggcaau

SEQ ID NO: 280001 - RNA, 19 nt, Artificial Sequence
  Description of Artificial Sequence: Synthetic oligonucleotide
  Antisense strand to SEQ ID NO: 280000
auugccagucauguaguag

SEQ ID NO: 280002 - RNA, 19 nt, Artificial Sequence
  Description of Artificial Sequence: Synthetic oligonucleotide
  Sense strand starting at position 349 of SEQ ID NO: 3598
augucaauucuguaacuag

SEQ ID NO: 280003 - RNA, 19 nt, Artificial Sequence
  Description of Artificial Sequence: Synthetic oligonucleotide
  Antisense strand to SEQ ID NO: 280002
cuaguuacagaauugacau

SEQ ID NO: 280004 - RNA, 19 nt, Artificial Sequence
  Description of Artificial Sequence: Synthetic oligonucleotide
  Sense strand starting at position 366 of SEQ ID NO: 3598
agguguacuaguuauggaa

SEQ ID NO: 280005 - RNA, 19 nt, Artificial Sequence
  Description of Artificial Sequence: Synthetic oligonucleotide
  Antisense strand to SEQ ID NO: 280004
uuccauaacuaguacaccu

SEQ ID NO: 280006 - RNA, 19 nt, Artificial Sequence
  Description of Artificial Sequence: Synthetic oligonucleotide
  Sense strand starting at position 441 of SEQ ID NO: 3598
cucagauguuuccucagaa

SEQ ID NO: 280007 - RNA, 19 nt, Artificial Sequence
  Description of Artificial Sequence: Synthetic oligonucleotide
  Antisense strand to SEQ ID NO: 280006
uucugaggaaacaucugag

SEQ ID NO: 280008 - RNA, 19 nt, Artificial Sequence
  Description of Artificial Sequence: Synthetic oligonucleotide
  Sense strand starting at position 442 of SEQ ID NO: 3598
ucagauguuuccucagaac

SEQ ID NO: 280009 - RNA, 19 nt, Artificial Sequence
  Description of Artificial Sequence: Synthetic oligonucleotide
  Antisense strand to SEQ ID NO: 280008
guucugaggaaacaucuga

SEQ ID NO: 280010 - RNA, 19 nt, Artificial Sequence
  Description of Artificial Sequence: Synthetic oligonucleotide
  Sense strand starting at position 508 of SEQ ID NO: 3598
uuuaucucugaucacaguu

SEQ ID NO: 280011 - RNA, 19 nt, Artificial Sequence
  Description of Artificial Sequence: Synthetic oligonucleotide
  Antisense strand to SEQ ID NO: 280010
aacugugaucagagauaaa

SEQ ID NO: 280012 - RNA, 19 nt, Artificial Sequence
  Description of Artificial Sequence: Synthetic oligonucleotide
  Sense strand starting at position 605 of SEQ ID NO: 3598
acgagcguacuccaucaaa

SEQ ID NO: 280013 - RNA, 19 nt, Artificial Sequence
  Description of Artificial Sequence: Synthetic oligonucleotide
  Antisense strand to SEQ ID NO: 280012
uuugauggaguacgcucgu

SEQ ID NO: 280014 - RNA, 19 nt, Artificial Sequence
  Description of Artificial Sequence: Synthetic oligonucleotide
  Sense strand starting at position 687 of SEQ ID NO: 3598
uugagacguguccaauuau

SEQ ID NO: 280015 - RNA, 19 nt, Artificial Sequence
  Description of Artificial Sequence: Synthetic oligonucleotide
  Antisense strand to SEQ ID NO: 280014
auaauuggacacgucucaa

SEQ ID NO: 280016 - RNA, 19 nt, Artificial Sequence
  Description of Artificial Sequence: Synthetic oligonucleotide
  Sense strand starting at position 711 of SEQ ID NO: 3598
ucagacugguauccuauua

SEQ ID NO: 280017 - RNA, 19 nt, Artificial Sequence
  Description of Artificial Sequence: Synthetic oligonucleotide
  Antisense strand to SEQ ID NO: 280016
uaauaggauaccagucuga

SEQ ID NO: 280018 - RNA, 19 nt, Artificial Sequence
  Description of Artificial Sequence: Synthetic oligonucleotide
  Sense strand starting at position 718 of SEQ ID NO: 3598
gguauccuauuacuuagaa

SEQ ID NO: 280019 - RNA, 19 nt, Artificial Sequence
  Description of Artificial Sequence: Synthetic oligonucleotide
  Antisense strand to SEQ ID NO: 280018
uucuaaguaauaggauacc

SEQ ID NO: 280020 - RNA, 19 nt, Artificial Sequence
  Description of Artificial Sequence: Synthetic oligonucleotide
  Sense strand starting at position 719 of SEQ ID NO: 3598
guauccuauuacuuagaag

SEQ ID NO: 280021 - RNA, 19 nt, Artificial Sequence
  Description of Artificial Sequence: Synthetic oligonucleotide
  Antisense strand to SEQ ID NO: 280020
cuucuaaguaauaggauac

SEQ ID NO: 280022 - RNA, 19 nt, Artificial Sequence
  Description of Artificial Sequence: Synthetic oligonucleotide
  Sense strand starting at position 751 of SEQ ID NO: 3598
uauuauaaauggguagacu

SEQ ID NO: 280023 - RNA, 19 nt, Artificial Sequence
  Description of Artificial Sequence: Synthetic oligonucleotide
  Antisense strand to SEQ ID NO: 280022
agucuacccauuuauaaua

SEQ ID NO: 280024 - RNA, 19 nt, Artificial Sequence
  Description of Artificial Sequence: Synthetic oligonucleotide
  Sense strand starting at position 996 of SEQ ID NO: 3598
ggagcaugauagucccaau

SEQ ID NO: 280025 - RNA, 19 nt, Artificial Sequence
  Description of Artificial Sequence: Synthetic oligonucleotide
  Antisense strand to SEQ ID NO: 280024
auugggacuaucaugcucc

SEQ ID NO: 280026 - RNA, 19 nt, Artificial Sequence
  Description of Artificial Sequence: Synthetic oligonucleotide
  Sense strand starting at position 1128 of SEQ ID NO: 3598
cagccuaaggcucaggaau

SEQ ID NO: 280027 - RNA, 19 nt, Artificial Sequence
  Description of Artificial Sequence: Synthetic oligonucleotide
  Antisense strand to SEQ ID NO: 280026
auuccugagccuuaggcug

SEQ ID NO: 280028 - RNA, 19 nt, Artificial Sequence
  Description of Artificial Sequence: Synthetic oligonucleotide
  Sense strand starting at position 2346 of SEQ ID NO: 3598
cagaucuccucagugggua

SEQ ID NO: 280029 - RNA, 19 nt, Artificial Sequence
  Description of Artificial Sequence: Synthetic oligonucleotide
  Antisense strand to SEQ ID NO: 280028
uacccacugaggagaucug

SEQ ID NO: 280030 - RNA, 19 nt, Artificial Sequence
  Description of Artificial Sequence: Synthetic oligonucleotide
  Sense strand starting at position 2347 of SEQ ID NO: 3598
agaucuccucaguggguau

SEQ ID NO: 280031 - RNA, 19 nt, Artificial Sequence
  Description of Artificial Sequence: Synthetic oligonucleotide
  Antisense strand to SEQ ID NO: 280030
auacccacugaggagaucu

SEQ ID NO: 280032 - RNA, 19 nt, Artificial Sequence
  Description of Artificial Sequence: Synthetic oligonucleotide
  Sense strand starting at position 2608 of SEQ ID NO: 3598
cuggaauuguaguuccuga

SEQ ID NO: 280033 - RNA, 19 nt, Artificial Sequence
  Description of Artificial Sequence: Synthetic oligonucleotide
  Antisense strand to SEQ ID NO: 280032
ucaggaacuacaauuccag

SEQ ID NO: 280034 - RNA, 19 nt, Artificial Sequence
  Description of Artificial Sequence: Synthetic oligonucleotide
  Sense strand starting at position 2613 of SEQ ID NO: 3598
auuguaguuccugagaggu

SEQ ID NO: 280035 - RNA, 19 nt, Artificial Sequence
  Description of Artificial Sequence: Synthetic oligonucleotide
  Antisense strand to SEQ ID NO: 280034
accucucaggaacuacaau

SEQ ID NO: 280036 - RNA, 19 nt, Artificial Sequence
  Description of Artificial Sequence: Synthetic oligonucleotide
  Sense strand starting at position 2619 of SEQ ID NO: 3598
guuccugagagguacccau

SEQ ID NO: 280037 - RNA, 19 nt, Artificial Sequence
  Description of Artificial Sequence: Synthetic oligonucleotide
  Antisense strand to SEQ ID NO: 280036
auggguaccucucaggaac

SEQ ID NO: 280038 - RNA, 19 nt, Artificial Sequence
  Description of Artificial Sequence: Synthetic oligonucleotide
  Sense strand starting at position 2771 of SEQ ID NO: 3598
ccggaagaguuuccucaaa

SEQ ID NO: 280039 - RNA, 19 nt, Artificial Sequence
  Description of Artificial Sequence: Synthetic oligonucleotide
  Antisense strand to SEQ ID NO: 280038
uuugaggaaacucuuccgg

SEQ ID NO: 280040 - RNA, 19 nt, Artificial Sequence
  Description of Artificial Sequence: Synthetic oligonucleotide
  Sense strand starting at position 2968 of SEQ ID NO: 3598
uaguuucuugcaugggaga

SEQ ID NO: 280041 - RNA, 19 nt, Artificial Sequence
  Description of Artificial Sequence: Synthetic oligonucleotide
  Antisense strand to SEQ ID NO: 280040
ucucccaugcaagaaacua

SEQ ID NO: 280042 - RNA, 19 nt, Artificial Sequence
  Description of Artificial Sequence: Synthetic oligonucleotide
  Sense strand starting at position 2969 of SEQ ID NO: 3598
aguuucuugcaugggagau

SEQ ID NO: 280043 - RNA, 19 nt, Artificial Sequence
  Description of Artificial Sequence: Synthetic oligonucleotide
  Antisense strand to SEQ ID NO: 280042
aucucccaugcaagaaacu

SEQ ID NO: 280044 - RNA, 19 nt, Artificial Sequence
  Description of Artificial Sequence: Synthetic oligonucleotide
  Sense strand starting at position 2970 of SEQ ID NO: 3598
guuucuugcaugggagaua

SEQ ID NO: 280045 - RNA, 19 nt, Artificial Sequence
  Description of Artificial Sequence: Synthetic oligonucleotide
  Antisense strand to SEQ ID NO: 280044
uaucucccaugcaagaaac

SEQ ID NO: 280046 - RNA, 19 nt, Artificial Sequence
  Description of Artificial Sequence: Synthetic oligonucleotide
  Sense strand starting at position 3104 of SEQ ID NO: 3598
gccugcucgcuauuagauu

SEQ ID NO: 280047 - RNA, 19 nt, Artificial Sequence
  Description of Artificial Sequence: Synthetic oligonucleotide
  Antisense strand to SEQ ID NO: 280046
aaucuaauagcgagcaggc

SEQ ID NO: 280048 - RNA, 19 nt, Artificial Sequence
  Description of Artificial Sequence: Synthetic oligonucleotide
  Sense strand starting at position 3115 of SEQ ID NO: 3598
auuagauugcacggcuaaa

SEQ ID NO: 280049 - RNA, 19 nt, Artificial Sequence
  Description of Artificial Sequence: Synthetic oligonucleotide
  Antisense strand to SEQ ID NO: 280048
uuuagccgugcaaucuaau

SEQ ID NO: 280050 - RNA, 19 nt, Artificial Sequence
  Description of Artificial Sequence: Synthetic oligonucleotide
  Sense strand starting at position 3158 of SEQ ID NO: 3598
uuuagucuucgcgugguca

SEQ ID NO: 280051 - RNA, 19 nt, Artificial Sequence
  Description of Artificial Sequence: Synthetic oligonucleotide
  Antisense strand to SEQ ID NO: 280050
ugaccacgcgaagacuaaa

SEQ ID NO: 280052 - RNA, 19 nt, Artificial Sequence
  Description of Artificial Sequence: Synthetic oligonucleotide
  Sense strand starting at position 3161 of SEQ ID NO: 3598
agucuucgcguggucaguu

SEQ ID NO: 280053 - RNA, 19 nt, Artificial Sequence
  Description of Artificial Sequence: Synthetic oligonucleotide
  Antisense strand to SEQ ID NO: 280052
aacugaccacgcgaagacu

SEQ ID NO: 280054 - RNA, 19 nt, Artificial Sequence
  Description of Artificial Sequence: Synthetic oligonucleotide
  Sense strand starting at position 3166 of SEQ ID NO: 3598
ucgcguggucaguuugaac

SEQ ID NO: 280055 - RNA, 19 nt, Artificial Sequence
  Description of Artificial Sequence: Synthetic oligonucleotide
  Antisense strand to SEQ ID NO: 280054
guucaaacugaccacgcga

SEQ ID NO: 280056 - RNA, 19 nt, Artificial Sequence
  Description of Artificial Sequence: Synthetic oligonucleotide
  Sense strand starting at position 3173 of SEQ ID NO: 3598
gucaguuugaacuguaaag

SEQ ID NO: 280057 - RNA, 19 nt, Artificial Sequence
  Description of Artificial Sequence: Synthetic oligonucleotide
  Antisense strand to SEQ ID NO: 280056
cuuuacaguucaaacugac

SEQ ID NO: 280058 - RNA, 19 nt, Artificial Sequence
  Description of Artificial Sequence: Synthetic oligonucleotide
  Sense strand starting at position 3290 of SEQ ID NO: 3598
gggaucuuggcucacugau

SEQ ID NO: 280059 - RNA, 19 nt, Artificial Sequence
  Description of Artificial Sequence: Synthetic oligonucleotide
  Antisense strand to SEQ ID NO: 280058
aucagugagccaagauccc

SEQ ID NO: 280060 - RNA, 19 nt, Artificial Sequence
  Description of Artificial Sequence: Synthetic oligonucleotide
  Sense strand starting at position 3603 of SEQ ID NO: 3598
accacucuuugaguaacga

SEQ ID NO: 280061 - RNA, 19 nt, Artificial Sequence
  Description of Artificial Sequence: Synthetic oligonucleotide
  Antisense strand to SEQ ID NO: 280060
ucguuacucaaagaguggu

SEQ ID NO: 280062 - RNA, 19 nt, Artificial Sequence
  Description of Artificial Sequence: Synthetic oligonucleotide
  Sense strand starting at position 3626 of SEQ ID NO: 3598
uuauuaaacgaguggcaga

SEQ ID NO: 280063 - RNA, 19 nt, Artificial Sequence
  Description of Artificial Sequence: Synthetic oligonucleotide
  Antisense strand to SEQ ID NO: 280062
ucugccacucguuuaauaa

SEQ ID NO: 280064 - RNA, 19 nt, Artificial Sequence
  Description of Artificial Sequence: Synthetic oligonucleotide
  Sense strand starting at position 3794 of SEQ ID NO: 3598
guggcagagaucuguagga

SEQ ID NO: 280065 - RNA, 19 nt, Artificial Sequence
  Description of Artificial Sequence: Synthetic oligonucleotide
  Antisense strand to SEQ ID NO: 280064
uccuacagaucucugccac

SEQ ID NO: 280066 - RNA, 19 nt, Artificial Sequence
  Description of Artificial Sequence: Synthetic oligonucleotide
  Sense strand starting at position 3796 of SEQ ID NO: 3598
ggcagagaucuguaggauc

SEQ ID NO: 280067 - RNA, 19 nt, Artificial Sequence
  Description of Artificial Sequence: Synthetic oligonucleotide
  Antisense strand to SEQ ID NO: 280066
gauccuacagaucucugcc

SEQ ID NO: 280068 - RNA, 19 nt, Artificial Sequence
  Description of Artificial Sequence: Synthetic oligonucleotide
  Sense strand starting at position 3798 of SEQ ID NO: 3598
cagagaucuguaggaucug

SEQ ID NO: 280069 - RNA, 19 nt, Artificial Sequence
  Description of Artificial Sequence: Synthetic oligonucleotide
  Antisense strand to SEQ ID NO: 280068
cagauccuacagaucucug

SEQ ID NO: 280070 - RNA, 19 nt, Artificial Sequence
  Description of Artificial Sequence: Synthetic oligonucleotide
  Sense strand starting at position 615 of SEQ ID NO: 3597
agcaguuguaaguaagaac

SEQ ID NO: 280071 - RNA, 19 nt, Artificial Sequence
  Description of Artificial Sequence: Synthetic oligonucleotide
  Antisense strand to SEQ ID NO: 280070
guucuuacuuacaacugcu

SEQ ID NO: 280072 - RNA, 19 nt, Artificial Sequence
  Description of Artificial Sequence: Synthetic oligonucleotide
  Sense strand starting at position 622 of SEQ ID NO: 3597
guaaguaagaacugagagu

SEQ ID NO: 280073 - RNA, 19 nt, Artificial Sequence
  Description of Artificial Sequence: Synthetic oligonucleotide
  Antisense strand to SEQ ID NO: 280072
acucucaguucuuacuuac

SEQ ID NO: 280074 - RNA, 19 nt, Artificial Sequence
  Description of Artificial Sequence: Synthetic oligonucleotide
  Sense strand starting at position 637 of SEQ ID NO: 3597
gaguauguguugcuuauuu

SEQ ID NO: 280075 - RNA, 19 nt, Artificial Sequence
  Description of Artificial Sequence: Synthetic oligonucleotide
  Antisense strand to SEQ ID NO: 280074
aaauaagcaacacauacuc

SEQ ID NO: 280076 - RNA, 19 nt, Artificial Sequence
  Description of Artificial Sequence: Synthetic oligonucleotide
  Sense strand starting at position 713 of SEQ ID NO: 3597
ugaaauucucuuggcauua

SEQ ID NO: 280077 - RNA, 19 nt, Artificial Sequence
  Description of Artificial Sequence: Synthetic oligonucleotide
  Antisense strand to SEQ ID NO: 280076
uaaugccaagagaauuuca

SEQ ID NO: 280078 - RNA, 19 nt, Artificial Sequence
  Description of Artificial Sequence: Synthetic oligonucleotide
  Sense strand starting at position 1226 of SEQ ID NO: 3597
ugugauaucugauuauguu

SEQ ID NO: 280079 - RNA, 19 nt, Artificial Sequence
  Description of Artificial Sequence: Synthetic oligonucleotide
  Antisense strand to SEQ ID NO: 280078
aacauaaucagauaucaca

SEQ ID NO: 280080 - RNA, 19 nt, Artificial Sequence
  Description of Artificial Sequence: Synthetic oligonucleotide
  Sense strand starting at position 1227 of SEQ ID NO: 3597
gugauaucugauuauguua

SEQ ID NO: 280081 - RNA, 19 nt, Artificial Sequence
  Description of Artificial Sequence: Synthetic oligonucleotide
  Antisense strand to SEQ ID NO: 280080
uaacauaaucagauaucac

SEQ ID NO: 280082 - RNA, 19 nt, Artificial Sequence
  Description of Artificial Sequence: Synthetic oligonucleotide
  Sense strand starting at position 1235 of SEQ ID NO: 3597
ugauuauguuaaucauagc

SEQ ID NO: 280083 - RNA, 19 nt, Artificial Sequence
  Description of Artificial Sequence: Synthetic oligonucleotide
  Antisense strand to SEQ ID NO: 280082
gcuaugauuaacauaauca

SEQ ID NO: 280084 - RNA, 19 nt, Artificial Sequence
  Description of Artificial Sequence: Synthetic oligonucleotide
  Sense strand starting at position 1487 of SEQ ID NO: 3597
gacaauuugcugugcuaua

SEQ ID NO: 280085 - RNA, 19 nt, Artificial Sequence
  Description of Artificial Sequence: Synthetic oligonucleotide
  Antisense strand to SEQ ID NO: 280084
uauagcacagcaaauuguc

SEQ ID NO: 280086 - RNA, 19 nt, Artificial Sequence
  Description of Artificial Sequence: Synthetic oligonucleotide
  Sense strand starting at position 1533 of SEQ ID NO: 3597
accauucuaucaguaaguu

SEQ ID NO: 280087 - RNA, 19 nt, Artificial Sequence
  Description of Artificial Sequence: Synthetic oligonucleotide
  Antisense strand to SEQ ID NO: 280086
aacuuacugauagaauggu

SEQ ID NO: 280088 - RNA, 19 nt, Artificial Sequence
  Description of Artificial Sequence: Synthetic oligonucleotide
  Sense strand starting at position 1534 of SEQ ID NO: 3597
ccauucuaucaguaaguua

SEQ ID NO: 280089 - RNA, 19 nt, Artificial Sequence
  Description of Artificial Sequence: Synthetic oligonucleotide
  Antisense strand to SEQ ID NO: 280088
uaacuuacugauagaaugg

SEQ ID NO: 280090 - RNA, 19 nt, Artificial Sequence
  Description of Artificial Sequence: Synthetic oligonucleotide
  Sense strand starting at position 1537 of SEQ ID NO: 3597
uucuaucaguaaguuacaa

SEQ ID NO: 280091 - RNA, 19 nt, Artificial Sequence
  Description of Artificial Sequence: Synthetic oligonucleotide
  Antisense strand to SEQ ID NO: 280090
uuguaacuuacugauagaa

SEQ ID NO: 280092 - RNA, 19 nt, Artificial Sequence
  Description of Artificial Sequence: Synthetic oligonucleotide
  Sense strand starting at position 1581 of SEQ ID NO: 3597
ggagaagaaauuggugcua

SEQ ID NO: 280093 - RNA, 19 nt, Artificial Sequence
  Description of Artificial Sequence: Synthetic oligonucleotide
  Antisense strand to SEQ ID NO: 280092
uagcaccaauuucuucucc

SEQ ID NO: 280094 - RNA, 19 nt, Artificial Sequence
  Description of Artificial Sequence: Synthetic oligonucleotide
  Sense strand starting at position 1593 of SEQ ID NO: 3597
ggugcuacagcugagaagu

SEQ ID NO: 280095 - RNA, 19 nt, Artificial Sequence
  Description of Artificial Sequence: Synthetic oligonucleotide
  Antisense strand to SEQ ID NO: 280094
acuucucagcuguagcacc

SEQ ID NO: 280096 - RNA, 19 nt, Artificial Sequence
  Description of Artificial Sequence: Synthetic oligonucleotide
  Sense strand starting at position 2023 of SEQ ID NO: 3597
uugugaugucaguaacacu

SEQ ID NO: 280097 - RNA, 19 nt, Artificial Sequence
  Description of Artificial Sequence: Synthetic oligonucleotide
  Antisense strand to SEQ ID NO: 280096
aguguuacugacaucacaa

SEQ ID NO: 280098 - RNA, 19 nt, Artificial Sequence
  Description of Artificial Sequence: Synthetic oligonucleotide
  Sense strand starting at position 2364 of SEQ ID NO: 3597
gcaauuugucuguaauagc

SEQ ID NO: 280099 - RNA, 19 nt, Artificial Sequence
  Description of Artificial Sequence: Synthetic oligonucleotide
  Antisense strand to SEQ ID NO: 280098
gcuauuacagacaaauugc

SEQ ID NO: 280100 - RNA, 19 nt, Artificial Sequence
  Description of Artificial Sequence: Synthetic oligonucleotide
  Sense strand starting at position 2501 of SEQ ID NO: 3597
uuauucuggcaagagcauu

SEQ ID NO: 280101 - RNA, 19 nt, Artificial Sequence
  Description of Artificial Sequence: Synthetic oligonucleotide
  Antisense strand to SEQ ID NO: 280100
aaugcucuugccagaauaa

SEQ ID NO: 280102 - RNA, 19 nt, Artificial Sequence
  Description of Artificial Sequence: Synthetic oligonucleotide
  Sense strand starting at position 2556 of SEQ ID NO: 3597
cugugauccgaggacaauu

SEQ ID NO: 280103 - RNA, 19 nt, Artificial Sequence
  Description of Artificial Sequence: Synthetic oligonucleotide
  Antisense strand to SEQ ID NO: 280102
aauuguccucggaucacag

SEQ ID NO: 280104 - RNA, 19 nt, Artificial Sequence
  Description of Artificial Sequence: Synthetic oligonucleotide
  Sense strand starting at position 2714 of SEQ ID NO: 3597
gcaucuauugggcaacaca

SEQ ID NO: 280105 - RNA, 19 nt, Artificial Sequence
  Description of Artificial Sequence: Synthetic oligonucleotide
  Antisense strand to SEQ ID NO: 280104
uguguugcccaauagaugc

SEQ ID NO: 280106 - RNA, 19 nt, Artificial Sequence
  Description of Artificial Sequence: Synthetic oligonucleotide
  Sense strand starting at position 2754 of SEQ ID NO: 3597
ucuggauucuaacuauugu

SEQ ID NO: 280107 - RNA, 19 nt, Artificial Sequence
  Description of Artificial Sequence: Synthetic oligonucleotide
  Antisense strand to SEQ ID NO: 280106
acaauaguuagaauccaga

SEQ ID NO: 280108 - RNA, 19 nt, Artificial Sequence
  Description of Artificial Sequence: Synthetic oligonucleotide
  Sense strand starting at position 2778 of SEQ ID NO: 3597
gugauagcuggguauagca

SEQ ID NO: 280109 - RNA, 19 nt, Artificial Sequence
  Description of Artificial Sequence: Synthetic oligonucleotide
  Antisense strand to SEQ ID NO: 280108
ugcuauacccagcuaucac

SEQ ID NO: 280110 - RNA, 19 nt, Artificial Sequence
  Description of Artificial Sequence: Synthetic oligonucleotide
  Sense strand starting at position 2956 of SEQ ID NO: 3597
uguuaagucauguagaguu

SEQ ID NO: 280111 - RNA, 19 nt, Artificial Sequence
  Description of Artificial Sequence: Synthetic oligonucleotide
  Antisense strand to SEQ ID NO: 280110
aacucuacaugacuuaaca

SEQ ID NO: 280112 - RNA, 19 nt, Artificial Sequence
  Description of Artificial Sequence: Synthetic oligonucleotide
  Sense strand starting at position 2958 of SEQ ID NO: 3597
uuaagucauguagaguuua

SEQ ID NO: 280113 - RNA, 19 nt, Artificial Sequence
  Description of Artificial Sequence: Synthetic oligonucleotide
  Antisense strand to SEQ ID NO: 280112
uaaacucuacaugacuuaa

SEQ ID NO: 280114 - RNA, 19 nt, Artificial Sequence
  Description of Artificial Sequence: Synthetic oligonucleotide
  Sense strand starting at position 2963 of SEQ ID NO: 3597
ucauguagaguuuacacaa

SEQ ID NO: 280115 - RNA, 19 nt, Artificial Sequence
  Description of Artificial Sequence: Synthetic oligonucleotide
  Antisense strand to SEQ ID NO: 280114
uuguguaaacucuacauga

SEQ ID NO: 280116 - RNA, 19 nt, Artificial Sequence
  Description of Artificial Sequence: Synthetic oligonucleotide
  Sense strand starting at position 3036 of SEQ ID NO: 3597
agauaccagcuuuauagua

SEQ ID NO: 280117 - RNA, 19 nt, Artificial Sequence
  Description of Artificial Sequence: Synthetic oligonucleotide
  Antisense strand to SEQ ID NO: 280116
uacuauaaagcugguaucu

SEQ ID NO: 280118 - RNA, 19 nt, Artificial Sequence
  Description of Artificial Sequence: Synthetic oligonucleotide
  Sense strand starting at position 3096 of SEQ ID NO: 3597
gcccuagaaguagauuguu

SEQ ID NO: 280119 - RNA, 19 nt, Artificial Sequence
  Description of Artificial Sequence: Synthetic oligonucleotide
  Antisense strand to SEQ ID NO: 280118
aacaaucuacuucuagggc

SEQ ID NO: 280120 - RNA, 19 nt, Artificial Sequence
  Description of Artificial Sequence: Synthetic oligonucleotide
  Sense strand starting at position 3099 of SEQ ID NO: 3597
cuagaaguagauuguuaaa

SEQ ID NO: 280121 - RNA, 19 nt, Artificial Sequence
  Description of Artificial Sequence: Synthetic oligonucleotide
  Antisense strand to SEQ ID NO: 280120
uuuaacaaucuacuucuag

SEQ ID NO: 280122 - RNA, 19 nt, Artificial Sequence
  Description of Artificial Sequence: Synthetic oligonucleotide
  Sense strand starting at position 3201 of SEQ ID NO: 3597
gaagcuucccgcugauuua

SEQ ID NO: 280123 - RNA, 19 nt, Artificial Sequence
  Description of Artificial Sequence: Synthetic oligonucleotide
  Antisense strand to SEQ ID NO: 280122
uaaaucagcgggaagcuuc

SEQ ID NO: 280124 - RNA, 19 nt, Artificial Sequence
  Description of Artificial Sequence: Synthetic oligonucleotide
  Sense strand starting at position 3348 of SEQ ID NO: 3597
uuugccaaaggguauaaau

SEQ ID NO: 280125 - RNA, 19 nt, Artificial Sequence
  Description of Artificial Sequence: Synthetic oligonucleotide
  Antisense strand to SEQ ID NO: 280124
auuuauacccuuuggcaaa

SEQ ID NO: 280126 - RNA, 19 nt, Artificial Sequence
  Description of Artificial Sequence: Synthetic oligonucleotide
  Sense strand starting at position 3559 of SEQ ID NO: 3597
cucuccaagcuuuggaaau

SEQ ID NO: 280127 - RNA, 19 nt, Artificial Sequence
  Description of Artificial Sequence: Synthetic oligonucleotide
  Antisense strand to SEQ ID NO: 280126
auuuccaaagcuuggagag

SEQ ID NO: 280128 - RNA, 19 nt, Artificial Sequence
  Description of Artificial Sequence: Synthetic oligonucleotide
  Sense strand starting at position 3580 of SEQ ID NO: 3597
uuagguaggccuuauaaac

SEQ ID NO: 280129 - RNA, 19 nt, Artificial Sequence
  Description of Artificial Sequence: Synthetic oligonucleotide
  Antisense strand to SEQ ID NO: 280128
guuuauaaggccuaccuaa

SEQ ID NO: 280130 - RNA, 19 nt, Artificial Sequence
  Description of Artificial Sequence: Synthetic oligonucleotide
  Sense strand starting at position 3603 of SEQ ID NO: 3597
guaauugugaauuagugaa

SEQ ID NO: 280131 - RNA, 19 nt, Artificial Sequence
  Description of Artificial Sequence: Synthetic oligonucleotide
  Antisense strand to SEQ ID NO: 280130
uucacuaauucacaauuac

SEQ ID NO: 280132 - RNA, 19 nt, Artificial Sequence
  Description of Artificial Sequence: Synthetic oligonucleotide
  Sense strand starting at position 3712 of SEQ ID NO: 3597
aauagugagcuuuagugau

SEQ ID NO: 280133 - RNA, 19 nt, Artificial Sequence
  Description of Artificial Sequence: Synthetic oligonucleotide
  Antisense strand to SEQ ID NO: 280132
aucacuaaagcucacuauu

SEQ ID NO: 280134 - RNA, 19 nt, Artificial Sequence
  Description of Artificial Sequence: Synthetic oligonucleotide
  Sense strand starting at position 3714 of SEQ ID NO: 3597
uagugagcuuuagugauaa

SEQ ID NO: 280135 - RNA, 19 nt, Artificial Sequence
  Description of Artificial Sequence: Synthetic oligonucleotide
  Antisense strand to SEQ ID NO: 280134
uuaucacuaaagcucacua

SEQ ID NO: 280136 - RNA, 19 nt, Artificial Sequence
  Description of Artificial Sequence: Synthetic oligonucleotide
  Sense strand starting at position 3716 of SEQ ID NO: 3597
gugagcuuuagugauaaua

SEQ ID NO: 280137 - RNA, 19 nt, Artificial Sequence
  Description of Artificial Sequence: Synthetic oligonucleotide
  Antisense strand to SEQ ID NO: 280136
uauuaucacuaaagcucac

SEQ ID NO: 280138 - RNA, 19 nt, Artificial Sequence
  Description of Artificial Sequence: Synthetic oligonucleotide
  Sense strand starting at position 3754 of SEQ ID NO: 3597
aucuacaacuuguuaguaa

SEQ ID NO: 280139 - RNA, 19 nt, Artificial Sequence
  Description of Artificial Sequence: Synthetic oligonucleotide
  Antisense strand to SEQ ID NO: 280138
uuacuaacaaguuguagau

SEQ ID NO: 280140 - RNA, 19 nt, Artificial Sequence
  Description of Artificial Sequence: Synthetic oligonucleotide
  Sense strand starting at position 3803 of SEQ ID NO: 3597
ggaugcuacacugguaauu

SEQ ID NO: 280141 - RNA, 19 nt, Artificial Sequence
  Description of Artificial Sequence: Synthetic oligonucleotide
  Antisense strand to SEQ ID NO: 280140
aauuaccaguguagcaucc

SEQ ID NO: 280142 - RNA, 19 nt, Artificial Sequence
  Description of Artificial Sequence: Synthetic oligonucleotide
  Sense strand starting at position 3835 of SEQ ID NO: 3597
gugucucuaccuuacaaau

SEQ ID NO: 280143 - RNA, 19 nt, Artificial Sequence
  Description of Artificial Sequence: Synthetic oligonucleotide
  Antisense strand to SEQ ID NO: 280142
auuuguaagguagagacac

SEQ ID NO: 280144 - RNA, 19 nt, Artificial Sequence
  Description of Artificial Sequence: Synthetic oligonucleotide
  Sense strand starting at position 3875 of SEQ ID NO: 3597
agguuuagguuucuaauga

SEQ ID NO: 280145 - RNA, 19 nt, Artificial Sequence
  Description of Artificial Sequence: Synthetic oligonucleotide
  Antisense strand to SEQ ID NO: 280144
ucauuagaaaccuaaaccu

SEQ ID NO: 280146 - RNA, 19 nt, Artificial Sequence
  Description of Artificial Sequence: Synthetic oligonucleotide
  Sense strand starting at position 3898 of SEQ ID NO: 3597
guggaacugugcuuaaaca

SEQ ID NO: 280147 - RNA, 19 nt, Artificial Sequence
  Description of Artificial Sequence: Synthetic oligonucleotide
  Antisense strand to SEQ ID NO: 280146
uguuuaagcacaguuccac

SEQ ID NO: 280148 - RNA, 19 nt, Artificial Sequence
  Description of Artificial Sequence: Synthetic oligonucleotide
  Sense strand starting at position 3899 of SEQ ID NO: 3597
uggaacugugcuuaaacau

SEQ ID NO: 280149 - RNA, 19 nt, Artificial Sequence
  Description of Artificial Sequence: Synthetic oligonucleotide
  Antisense strand to SEQ ID NO: 280148
auguuuaagcacaguucca

SEQ ID NO: 280150 - RNA, 19 nt, Artificial Sequence
  Description of Artificial Sequence: Synthetic oligonucleotide
  Sense strand starting at position 161 of SEQ ID NO: 3599
ugcugagagccaugugucu

SEQ ID NO: 280151 - RNA, 19 nt, Artificial Sequence
  Description of Artificial Sequence: Synthetic oligonucleotide
  Antisense strand to SEQ ID NO: 280150
agacacauggcucucagca

SEQ ID NO: 280152 - RNA, 19 nt, Artificial Sequence
  Description of Artificial Sequence: Synthetic oligonucleotide
  Sense strand starting at position 163 of SEQ ID NO: 3599
cugagagccaugugucuuu

SEQ ID NO: 280153 - RNA, 19 nt, Artificial Sequence
  Description of Artificial Sequence: Synthetic oligonucleotide
  Antisense strand to SEQ ID NO: 280152
aaagacacauggcucucag

SEQ ID NO: 280154 - RNA, 19 nt, Artificial Sequence
  Description of Artificial Sequence: Synthetic oligonucleotide
  Sense strand starting at position 272 of SEQ ID NO: 3599
gggacuuuccuagagccuu

SEQ ID NO: 280155 - RNA, 19 nt, Artificial Sequence
  Description of Artificial Sequence: Synthetic oligonucleotide
  Antisense strand to SEQ ID NO: 280154
aaggcucuaggaaaguccc

SEQ ID NO: 280156 - RNA, 19 nt, Artificial Sequence
  Description of Artificial Sequence: Synthetic oligonucleotide
  Sense strand starting at position 375 of SEQ ID NO: 3599
gugaaagugcauuauaagu

SEQ ID NO: 280157 - RNA, 19 nt, Artificial Sequence
  Description of Artificial Sequence: Synthetic oligonucleotide
  Antisense strand to SEQ ID NO: 280156
acuuauaaugcacuuucac

SEQ ID NO: 280158 - RNA, 19 nt, Artificial Sequence
  Description of Artificial Sequence: Synthetic oligonucleotide
  Sense strand starting at position 380 of SEQ ID NO: 3599
agugcauuauaaguccaua

SEQ ID NO: 280159 - RNA, 19 nt, Artificial Sequence
  Description of Artificial Sequence: Synthetic oligonucleotide
  Antisense strand to SEQ ID NO: 280158
uauggacuuauaaugcacu

SEQ ID NO: 280160 - RNA, 19 nt, Artificial Sequence
  Description of Artificial Sequence: Synthetic oligonucleotide
  Sense strand starting at position 391 of SEQ ID NO: 3599
aguccauagggcuaugacu

SEQ ID NO: 280161 - RNA, 19 nt, Artificial Sequence
  Description of Artificial Sequence: Synthetic oligonucleotide
  Antisense strand to SEQ ID NO: 280160
agucauagcccuauggacu

SEQ ID NO: 280162 - RNA, 19 nt, Artificial Sequence
  Description of Artificial Sequence: Synthetic oligonucleotide
  Sense strand starting at position 397 of SEQ ID NO: 3599
uagggcuaugacuggcaaa

SEQ ID NO: 280163 - RNA, 19 nt, Artificial Sequence
  Description of Artificial Sequence: Synthetic oligonucleotide
  Antisense strand to SEQ ID NO: 280162
uuugccagucauagcccua

SEQ ID NO: 280164 - RNA, 19 nt, Artificial Sequence
  Description of Artificial Sequence: Synthetic oligonucleotide
  Sense strand starting at position 508 of SEQ ID NO: 3599
ucagauuacugcuucuguu

SEQ ID NO: 280165 - RNA, 19 nt, Artificial Sequence
  Description of Artificial Sequence: Synthetic oligonucleotide
  Antisense strand to SEQ ID NO: 280164
aacagaagcaguaaucuga

SEQ ID NO: 280166 - RNA, 19 nt, Artificial Sequence
  Description of Artificial Sequence: Synthetic oligonucleotide
  Sense strand starting at position 520 of SEQ ID NO: 3599
uucuguugaugucucgaaa

SEQ ID NO: 280167 - RNA, 19 nt, Artificial Sequence
  Description of Artificial Sequence: Synthetic oligonucleotide
  Antisense strand to SEQ ID NO: 280166
uuucgagacaucaacagaa

SEQ ID NO: 280168 - RNA, 19 nt, Artificial Sequence
  Description of Artificial Sequence: Synthetic oligonucleotide
  Sense strand starting at position 574 of SEQ ID NO: 3599
gcgcgaagagccuccgauu

SEQ ID NO: 280169 - RNA, 19 nt, Artificial Sequence
  Description of Artificial Sequence: Synthetic oligonucleotide
  Antisense strand to SEQ ID NO: 280168
aaucggaggcucuucgcgc

SEQ ID NO: 280170 - RNA, 19 nt, Artificial Sequence
  Description of Artificial Sequence: Synthetic oligonucleotide
  Sense strand starting at position 580 of SEQ ID NO: 3599
agagccuccgauuguuuga

SEQ ID NO: 280171 - RNA, 19 nt, Artificial Sequence
  Description of Artificial Sequence: Synthetic oligonucleotide
  Antisense strand to SEQ ID NO: 280170
ucaaacaaucggaggcucu

SEQ ID NO: 280172 - RNA, 19 nt, Artificial Sequence
  Description of Artificial Sequence: Synthetic oligonucleotide
  Sense strand starting at position 673 of SEQ ID NO: 3599
ccucaaguuuacucuaagu

SEQ ID NO: 280173 - RNA, 19 nt, Artificial Sequence
  Description of Artificial Sequence: Synthetic oligonucleotide
  Antisense strand to SEQ ID NO: 280172
acuuagaguaaacuugagg

SEQ ID NO: 280174 - RNA, 19 nt, Artificial Sequence
  Description of Artificial Sequence: Synthetic oligonucleotide
  Sense strand starting at position 675 of SEQ ID NO: 3599
ucaaguuuacucuaaguua

SEQ ID NO: 280175 - RNA, 19 nt, Artificial Sequence
  Description of Artificial Sequence: Synthetic oligonucleotide
  Antisense strand to SEQ ID NO: 280174
uaacuuagaguaaacuuga

SEQ ID NO: 280176 - RNA, 19 nt, Artificial Sequence
  Description of Artificial Sequence: Synthetic oligonucleotide
  Sense strand starting at position 678 of SEQ ID NO: 3599
aguuuacucuaaguuauca

SEQ ID NO: 280177 - RNA, 19 nt, Artificial Sequence
  Description of Artificial Sequence: Synthetic oligonucleotide
  Antisense strand to SEQ ID NO: 280176
ugauaacuuagaguaaacu

SEQ ID NO: 280178 - RNA, 19 nt, Artificial Sequence
  Description of Artificial Sequence: Synthetic oligonucleotide
  Sense strand starting at position 838 of SEQ ID NO: 3599
aguccagucgccugaagaa

SEQ ID NO: 280179 - RNA, 19 nt, Artificial Sequence
  Description of Artificial Sequence: Synthetic oligonucleotide
  Antisense strand to SEQ ID NO: 280178
uucuucaggcgacuggacu

SEQ ID NO: 280180 - RNA, 19 nt, Artificial Sequence
  Description of Artificial Sequence: Synthetic oligonucleotide
  Sense strand starting at position 861 of SEQ ID NO: 3599
gguucuggaacaugguuaa

SEQ ID NO: 280181 - RNA, 19 nt, Artificial Sequence
  Description of Artificial Sequence: Synthetic oligonucleotide
  Antisense strand to SEQ ID NO: 280180
uuaaccauguuccagaacc

SEQ ID NO: 280182 - RNA, 19 nt, Artificial Sequence
  Description of Artificial Sequence: Synthetic oligonucleotide
  Sense strand starting at position 864 of SEQ ID NO: 3599
ucuggaacaugguuaaaug

SEQ ID NO: 280183 - RNA, 19 nt, Artificial Sequence
  Description of Artificial Sequence: Synthetic oligonucleotide
  Antisense strand to SEQ ID NO: 280182
cauuuaaccauguuccaga

SEQ ID NO: 280184 - RNA, 19 nt, Artificial Sequence
  Description of Artificial Sequence: Synthetic oligonucleotide
  Sense strand starting at position 1000 of SEQ ID NO: 3599
uuggaugugucguuuggaa

SEQ ID NO: 280185 - RNA, 19 nt, Artificial Sequence
  Description of Artificial Sequence: Synthetic oligonucleotide
  Antisense strand to SEQ ID NO: 280184
uuccaaacgacacauccaa

SEQ ID NO: 280186 - RNA, 19 nt, Artificial Sequence
  Description of Artificial Sequence: Synthetic oligonucleotide
  Sense strand starting at position 1002 of SEQ ID NO: 3599
ggaugugucguuuggaauc

SEQ ID NO: 280187 - RNA, 19 nt, Artificial Sequence
  Description of Artificial Sequence: Synthetic oligonucleotide
  Antisense strand to SEQ ID NO: 280186
gauuccaaacgacacaucc

SEQ ID NO: 280188 - RNA, 19 nt, Artificial Sequence
  Description of Artificial Sequence: Synthetic oligonucleotide
  Sense strand starting at position 1030 of SEQ ID NO: 3599
gaaacaaaggcguauauua

SEQ ID NO: 280189 - RNA, 19 nt, Artificial Sequence
  Description of Artificial Sequence: Synthetic oligonucleotide
  Antisense strand to SEQ ID NO: 280188
uaauauacgccuuuguuuc

SEQ ID NO: 280190 - RNA, 19 nt, Artificial Sequence
  Description of Artificial Sequence: Synthetic oligonucleotide
  Sense strand starting at position 1039 of SEQ ID NO: 3599
gcguauauuacgggaagca

SEQ ID NO: 280191 - RNA, 19 nt, Artificial Sequence
  Description of Artificial Sequence: Synthetic oligonucleotide
  Antisense strand to SEQ ID NO: 280190
ugcuucccguaauauacgc

SEQ ID NO: 280192 - RNA, 19 nt, Artificial Sequence
  Description of Artificial Sequence: Synthetic oligonucleotide
  Sense strand starting at position 1040 of SEQ ID NO: 3599
cguauauuacgggaagcaa

SEQ ID NO: 280193 - RNA, 19 nt, Artificial Sequence
  Description of Artificial Sequence: Synthetic oligonucleotide
  Antisense strand to SEQ ID NO: 280192
uugcuucccguaauauacg

SEQ ID NO: 280194 - RNA, 19 nt, Artificial Sequence
  Description of Artificial Sequence: Synthetic oligonucleotide
  Sense strand starting at position 1052 of SEQ ID NO: 3599
gaagcaagaugucuggagu

SEQ ID NO: 280195 - RNA, 19 nt, Artificial Sequence
  Description of Artificial Sequence: Synthetic oligonucleotide
  Antisense strand to SEQ ID NO: 280194
acuccagacaucuugcuuc

SEQ ID NO: 280196 - RNA, 19 nt, Artificial Sequence
  Description of Artificial Sequence: Synthetic oligonucleotide
  Sense strand starting at position 1055 of SEQ ID NO: 3599
gcaagaugucuggaguaaa

SEQ ID NO: 280197 - RNA, 19 nt, Artificial Sequence
  Description of Artificial Sequence: Synthetic oligonucleotide
  Antisense strand to SEQ ID NO: 280196
uuuacuccagacaucuugc

SEQ ID NO: 280198 - RNA, 19 nt, Artificial Sequence
  Description of Artificial Sequence: Synthetic oligonucleotide
  Sense strand starting at position 1117 of SEQ ID NO: 3599
aggucuuaccuauggugga

SEQ ID NO: 280199 - RNA, 19 nt, Artificial Sequence
  Description of Artificial Sequence: Synthetic oligonucleotide
  Antisense strand to SEQ ID NO: 280198
uccaccauagguaagaccu

SEQ ID NO: 280200 - RNA, 19 nt, Artificial Sequence
  Description of Artificial Sequence: Synthetic oligonucleotide
  Sense strand starting at position 1121 of SEQ ID NO: 3599
cuuaccuaugguggaaaua

SEQ ID NO: 280201 - RNA, 19 nt, Artificial Sequence
  Description of Artificial Sequence: Synthetic oligonucleotide
  Antisense strand to SEQ ID NO: 280200
uauuuccaccauagguaag

SEQ ID NO: 280202 - RNA, 19 nt, Artificial Sequence
  Description of Artificial Sequence: Synthetic oligonucleotide
  Sense strand starting at position 2275 of SEQ ID NO: 3599
cgcccugggucauuuaaua

SEQ ID NO: 280203 - RNA, 19 nt, Artificial Sequence
  Description of Artificial Sequence: Synthetic oligonucleotide
  Antisense strand to SEQ ID NO: 280202
uauuaaaugacccagggcg

SEQ ID NO: 280204 - RNA, 19 nt, Artificial Sequence
  Description of Artificial Sequence: Synthetic oligonucleotide
  Sense strand starting at position 2388 of SEQ ID NO: 3599
agagcaagaguuugagaug

SEQ ID NO: 280205 - RNA, 19 nt, Artificial Sequence
  Description of Artificial Sequence: Synthetic oligonucleotide
  Antisense strand to SEQ ID NO: 280204
caucucaaacucuugcucu

SEQ ID NO: 280206 - RNA, 19 nt, Artificial Sequence
  Description of Artificial Sequence: Synthetic oligonucleotide
  Sense strand starting at position 2391 of SEQ ID NO: 3599
gcaagaguuugagauggaa

SEQ ID NO: 280207 - RNA, 19 nt, Artificial Sequence
  Description of Artificial Sequence: Synthetic oligonucleotide
  Antisense strand to SEQ ID NO: 280206
uuccaucucaaacucuugc

SEQ ID NO: 280208 - RNA, 19 nt, Artificial Sequence
  Description of Artificial Sequence: Synthetic oligonucleotide
  Sense strand starting at position 2500 of SEQ ID NO: 3599
ggaagaaccucccugcgaa

SEQ ID NO: 280209 - RNA, 19 nt, Artificial Sequence
  Description of Artificial Sequence: Synthetic oligonucleotide
  Antisense strand to SEQ ID NO: 280208
uucgcagggagguucuucc

SEQ ID NO: 280210 - RNA, 19 nt, Artificial Sequence
  Description of Artificial Sequence: Synthetic oligonucleotide
  Sense strand starting at position 3223 of SEQ ID NO: 3599
uuccauucucagggacauc

SEQ ID NO: 280211 - RNA, 19 nt, Artificial Sequence
  Description of Artificial Sequence: Synthetic oligonucleotide
  Antisense strand to SEQ ID NO: 280210
gaugucccugagaauggaa

SEQ ID NO: 280212 - RNA, 19 nt, Artificial Sequence
  Description of Artificial Sequence: Synthetic oligonucleotide
  Sense strand starting at position 3467 of SEQ ID NO: 3599
ugucuuauauuucugucuu

SEQ ID NO: 280213 - RNA, 19 nt, Artificial Sequence
  Description of Artificial Sequence: Synthetic oligonucleotide
  Antisense strand to SEQ ID NO: 280212
aagacagaaauauaagaca

SEQ ID NO: 280214 - RNA, 19 nt, Artificial Sequence
  Description of Artificial Sequence: Synthetic oligonucleotide
  Sense strand starting at position 3517 of SEQ ID NO: 3599
agcguccuuaccgaagaua

SEQ ID NO: 280215 - RNA, 19 nt, Artificial Sequence
  Description of Artificial Sequence: Synthetic oligonucleotide
  Antisense strand to SEQ ID NO: 280214
uaucuucgguaaggacgcu

SEQ ID NO: 280216 - RNA, 19 nt, Artificial Sequence
  Description of Artificial Sequence: Synthetic oligonucleotide
  Sense strand starting at position 3520 of SEQ ID NO: 3599
guccuuaccgaagauacuu

SEQ ID NO: 280217 - RNA, 19 nt, Artificial Sequence
  Description of Artificial Sequence: Synthetic oligonucleotide
  Antisense strand to SEQ ID NO: 280216
aaguaucuucgguaaggac

SEQ ID NO: 280218 - RNA, 19 nt, Artificial Sequence
  Description of Artificial Sequence: Synthetic oligonucleotide
  Sense strand starting at position 3583 of SEQ ID NO: 3599
cuccuagucuugucacuua

SEQ ID NO: 280219 - RNA, 19 nt, Artificial Sequence
  Description of Artificial Sequence: Synthetic oligonucleotide
  Antisense strand to SEQ ID NO: 280218
uaagugacaagacuaggag

SEQ ID NO: 280220 - RNA, 19 nt, Artificial Sequence
  Description of Artificial Sequence: Synthetic oligonucleotide
  Sense strand starting at position 3586 of SEQ ID NO: 3599
cuagucuugucacuuaaac

SEQ ID NO: 280221 - RNA, 19 nt, Artificial Sequence
  Description of Artificial Sequence: Synthetic oligonucleotide
  Antisense strand to SEQ ID NO: 280220
guuuaagugacaagacuag

SEQ ID NO: 280222 - RNA, 19 nt, Artificial Sequence
  Description of Artificial Sequence: Synthetic oligonucleotide
  Sense strand starting at position 3920 of SEQ ID NO: 3599
gaaucauucugacuguagu

SEQ ID NO: 280223 - RNA, 19 nt, Artificial Sequence
  Description of Artificial Sequence: Synthetic oligonucleotide
  Antisense strand to SEQ ID NO: 280222
acuacagucagaaugauuc

SEQ ID NO: 280224 - RNA, 19 nt, Artificial Sequence
  Description of Artificial Sequence: Synthetic oligonucleotide
  Sense strand starting at position 3927 of SEQ ID NO: 3599
ucugacuguagucgggaau

SEQ ID NO: 280225 - RNA, 19 nt, Artificial Sequence
  Description of Artificial Sequence: Synthetic oligonucleotide
  Antisense strand to SEQ ID NO: 280224
auucccgacuacagucaga

SEQ ID NO: 280226 - RNA, 19 nt, Artificial Sequence
  Description of Artificial Sequence: Synthetic oligonucleotide
  Sense strand starting at position 3938 of SEQ ID NO: 3599
ucgggaaugccuuaugaua

SEQ ID NO: 280227 - RNA, 19 nt, Artificial Sequence
  Description of Artificial Sequence: Synthetic oligonucleotide
  Antisense strand to SEQ ID NO: 280226
uaucauaaggcauucccga

SEQ ID NO: 280228 - RNA, 19 nt, Artificial Sequence
  Description of Artificial Sequence: Synthetic oligonucleotide
  Sense strand starting at position 3971 of SEQ ID NO: 3599
auagacuagcuaugcaaau

SEQ ID NO: 280229 - RNA, 19 nt, Artificial Sequence
  Description of Artificial Sequence: Synthetic oligonucleotide
  Antisense strand to SEQ ID NO: 280228
auuugcauagcuagucuau

SEQ ID NO: 280230 - RNA, 19 nt, Artificial Sequence
  Description of Artificial Sequence: Synthetic oligonucleotide
  Sense strand starting at position 169 of SEQ ID NO: 3600
ccaggaaagucauuccaca

SEQ ID NO: 280231 - RNA, 19 nt, Artificial Sequence
  Description of Artificial Sequence: Synthetic oligonucleotide
  Antisense strand to SEQ ID NO: 280230
uguggaaugacuuuccugg

SEQ ID NO: 280232 - RNA, 19 nt, Artificial Sequence
  Description of Artificial Sequence: Synthetic oligonucleotide
  Sense strand starting at position 278 of SEQ ID NO: 3600
gcaagccuuccuggauuua

SEQ ID NO: 280233 - RNA, 19 nt, Artificial Sequence
  Description of Artificial Sequence: Synthetic oligonucleotide
  Antisense strand to SEQ ID NO: 280232
uaaauccaggaaggcuugc

SEQ ID NO: 280234 - RNA, 19 nt, Artificial Sequence
  Description of Artificial Sequence: Synthetic oligonucleotide
  Sense strand starting at position 405 of SEQ ID NO: 3600
aguuaaccacuugagugau

SEQ ID NO: 280235 - RNA, 19 nt, Artificial Sequence
  Description of Artificial Sequence: Synthetic oligonucleotide
  Antisense strand to SEQ ID NO: 280234
aucacucaagugguuaacu

SEQ ID NO: 280236 - RNA, 19 nt, Artificial Sequence
  Description of Artificial Sequence: Synthetic oligonucleotide
  Sense strand starting at position 411 of SEQ ID NO: 3600
ccacuugagugauccacag

SEQ ID NO: 280237 - RNA, 19 nt, Artificial Sequence
  Description of Artificial Sequence: Synthetic oligonucleotide
  Antisense strand to SEQ ID NO: 280236
cuguggaucacucaagugg

SEQ ID NO: 280238 - RNA, 19 nt, Artificial Sequence
  Description of Artificial Sequence: Synthetic oligonucleotide
  Sense strand starting at position 498 of SEQ ID NO: 3600
ggcugaagccuugaucuua

SEQ ID NO: 280239 - RNA, 19 nt, Artificial Sequence
  Description of Artificial Sequence: Synthetic oligonucleotide
  Antisense strand to SEQ ID NO: 280238
uaagaucaaggcuucagcc

SEQ ID NO: 280240 - RNA, 19 nt, Artificial Sequence
  Description of Artificial Sequence: Synthetic oligonucleotide
  Sense strand starting at position 577 of SEQ ID NO: 3600
guggaagugaccgggagau

SEQ ID NO: 280241 - RNA, 19 nt, Artificial Sequence
  Description of Artificial Sequence: Synthetic oligonucleotide
  Antisense strand to SEQ ID NO: 280240
aucucccggucacuuccac

SEQ ID NO: 280242 - RNA, 19 nt, Artificial Sequence
  Description of Artificial Sequence: Synthetic oligonucleotide
  Sense strand starting at position 591 of SEQ ID NO: 3600
gagauaaucuccugcuguu

SEQ ID NO: 280243 - RNA, 19 nt, Artificial Sequence
  Description of Artificial Sequence: Synthetic oligonucleotide
  Antisense strand to SEQ ID NO: 280242
aacagcaggagauuaucuc

SEQ ID NO: 280244 - RNA, 19 nt, Artificial Sequence
  Description of Artificial Sequence: Synthetic oligonucleotide
  Sense strand starting at position 678 of SEQ ID NO: 3600
ucaaguguuuccuuccuua

SEQ ID NO: 280245 - RNA, 19 nt, Artificial Sequence
  Description of Artificial Sequence: Synthetic oligonucleotide
  Antisense strand to SEQ ID NO: 280244
uaaggaaggaaacacuuga

SEQ ID NO: 280246 - RNA, 19 nt, Artificial Sequence
  Description of Artificial Sequence: Synthetic oligonucleotide
  Sense strand starting at position 681 of SEQ ID NO: 3600
aguguuuccuuccuuaacu

SEQ ID NO: 280247 - RNA, 19 nt, Artificial Sequence
  Description of Artificial Sequence: Synthetic oligonucleotide
  Antisense strand to SEQ ID NO: 280246
aguuaaggaaggaaacacu

SEQ ID NO: 280248 - RNA, 19 nt, Artificial Sequence
  Description of Artificial Sequence: Synthetic oligonucleotide
  Sense strand starting at position 682 of SEQ ID NO: 3600
guguuuccuuccuuaacuu

SEQ ID NO: 280249 - RNA, 19 nt, Artificial Sequence
  Description of Artificial Sequence: Synthetic oligonucleotide
  Antisense strand to SEQ ID NO: 280248
aaguuaaggaaggaaacac

SEQ ID NO: 280250 - RNA, 19 nt, Artificial Sequence
  Description of Artificial Sequence: Synthetic oligonucleotide
  Sense strand starting at position 765 of SEQ ID NO: 3600
gugacaucucuagauagug

SEQ ID NO: 280251 - RNA, 19 nt, Artificial Sequence
  Description of Artificial Sequence: Synthetic oligonucleotide
  Antisense strand to SEQ ID NO: 280250
cacuaucuagagaugucac

SEQ ID NO: 280252 - RNA, 19 nt, Artificial Sequence
  Description of Artificial Sequence: Synthetic oligonucleotide
  Sense strand starting at position 1004 of SEQ ID NO: 3600
gauuucccuucuugagguu

SEQ ID NO: 280253 - RNA, 19 nt, Artificial Sequence
  Description of Artificial Sequence: Synthetic oligonucleotide
  Antisense strand to SEQ ID NO: 280252
aaccucaagaagggaaauc

SEQ ID NO: 280254 - RNA, 19 nt, Artificial Sequence
  Description of Artificial Sequence: Synthetic oligonucleotide
  Sense strand starting at position 1148 of SEQ ID NO: 3600
gcacguuugggaagcuuga

SEQ ID NO: 280255 - RNA, 19 nt, Artificial Sequence
  Description of Artificial Sequence: Synthetic oligonucleotide
  Antisense strand to SEQ ID NO: 280254
ucaagcuucccaaacgugc

SEQ ID NO: 280256 - RNA, 19 nt, Artificial Sequence
  Description of Artificial Sequence: Synthetic oligonucleotide
  Sense strand starting at position 1203 of SEQ ID NO: 3600
cgguuuacgcccuuaagca

SEQ ID NO: 280257 - RNA, 19 nt, Artificial Sequence
  Description of Artificial Sequence: Synthetic oligonucleotide
  Antisense strand to SEQ ID NO: 280256
ugcuuaagggcguaaaccg

SEQ ID NO: 280258 - RNA, 19 nt, Artificial Sequence
  Description of Artificial Sequence: Synthetic oligonucleotide
  Sense strand starting at position 2578 of SEQ ID NO: 3600
cggagagccgagugaugaa

SEQ ID NO: 280259 - RNA, 19 nt, Artificial Sequence
  Description of Artificial Sequence: Synthetic oligonucleotide
  Antisense strand to SEQ ID NO: 280258
uucaucacucggcucuccg

SEQ ID NO: 280260 - RNA, 19 nt, Artificial Sequence
  Description of Artificial Sequence: Synthetic oligonucleotide
  Sense strand starting at position 2581 of SEQ ID NO: 3600
agagccgagugaugaauaa

SEQ ID NO: 280261 - RNA, 19 nt, Artificial Sequence
  Description of Artificial Sequence: Synthetic oligonucleotide
  Antisense strand to SEQ ID NO: 280260
uuauucaucacucggcucu

SEQ ID NO: 280262 - RNA, 19 nt, Artificial Sequence
  Description of Artificial Sequence: Synthetic oligonucleotide
  Sense strand starting at position 2736 of SEQ ID NO: 3600
gggccuaaguauuaacgua

SEQ ID NO: 280263 - RNA, 19 nt, Artificial Sequence
  Description of Artificial Sequence: Synthetic oligonucleotide
  Antisense strand to SEQ ID NO: 280262
uacguuaauacuuaggccc

SEQ ID NO: 280264 - RNA, 19 nt, Artificial Sequence
  Description of Artificial Sequence: Synthetic oligonucleotide
  Sense strand starting at position 2748 of SEQ ID NO: 3600
uaacguauacuugguuuau

SEQ ID NO: 280265 - RNA, 19 nt, Artificial Sequence
  Description of Artificial Sequence: Synthetic oligonucleotide
  Antisense strand to SEQ ID NO: 280264
auaaaccaaguauacguua

SEQ ID NO: 280266 - RNA, 19 nt, Artificial Sequence
  Description of Artificial Sequence: Synthetic oligonucleotide
  Sense strand starting at position 2749 of SEQ ID NO: 3600
aacguauacuugguuuauu

SEQ ID NO: 280267 - RNA, 19 nt, Artificial Sequence
  Description of Artificial Sequence: Synthetic oligonucleotide
  Antisense strand to SEQ ID NO: 280266
aauaaaccaaguauacguu

SEQ ID NO: 280268 - RNA, 19 nt, Artificial Sequence
  Description of Artificial Sequence: Synthetic oligonucleotide
  Sense strand starting at position 2750 of SEQ ID NO: 3600
acguauacuugguuuauua

SEQ ID NO: 280269 - RNA, 19 nt, Artificial Sequence
  Description of Artificial Sequence: Synthetic oligonucleotide
  Antisense strand to SEQ ID NO: 280268
uaauaaaccaaguauacgu

SEQ ID NO: 280270 - RNA, 19 nt, Artificial Sequence
  Description of Artificial Sequence: Synthetic oligonucleotide
  Sense strand starting at position 2770 of SEQ ID NO: 3600
ugauaauaacgauguuuag

SEQ ID NO: 280271 - RNA, 19 nt, Artificial Sequence
  Description of Artificial Sequence: Synthetic oligonucleotide
  Antisense strand to SEQ ID NO: 280270
cuaaacaucguuauuauca

SEQ ID NO: 280272 - RNA, 19 nt, Artificial Sequence
  Description of Artificial Sequence: Synthetic oligonucleotide
  Sense strand starting at position 3054 of SEQ ID NO: 3600
gacagaauggcuugcaaug

SEQ ID NO: 280273 - RNA, 19 nt, Artificial Sequence
  Description of Artificial Sequence: Synthetic oligonucleotide
  Antisense strand to SEQ ID NO: 280272
cauugcaagccauucuguc

SEQ ID NO: 280274 - RNA, 19 nt, Artificial Sequence
  Description of Artificial Sequence: Synthetic oligonucleotide
  Sense strand starting at position 3056 of SEQ ID NO: 3600
cagaauggcuugcaaugaa

SEQ ID NO: 280275 - RNA, 19 nt, Artificial Sequence
  Description of Artificial Sequence: Synthetic oligonucleotide
  Antisense strand to SEQ ID NO: 280274
uucauugcaagccauucug

SEQ ID NO: 280276 - RNA, 19 nt, Artificial Sequence
  Description of Artificial Sequence: Synthetic oligonucleotide
  Sense strand starting at position 3115 of SEQ ID NO: 3600
gcuuaaagccacugguguu

SEQ ID NO: 280277 - RNA, 19 nt, Artificial Sequence
  Description of Artificial Sequence: Synthetic oligonucleotide
  Antisense strand to SEQ ID NO: 280276
aacaccaguggcuuuaagc

SEQ ID NO: 280278 - RNA, 19 nt, Artificial Sequence
  Description of Artificial Sequence: Synthetic oligonucleotide
  Sense strand starting at position 3145 of SEQ ID NO: 3600
ugguuaccuccacaucacu

SEQ ID NO: 280279 - RNA, 19 nt, Artificial Sequence
  Description of Artificial Sequence: Synthetic oligonucleotide
  Antisense strand to SEQ ID NO: 280278
agugauguggagguaacca

SEQ ID NO: 280280 - RNA, 19 nt, Artificial Sequence
  Description of Artificial Sequence: Synthetic oligonucleotide
  Sense strand starting at position 3167 of SEQ ID NO: 3600
uuaagaugcucacauagcu

SEQ ID NO: 280281 - RNA, 19 nt, Artificial Sequence
  Description of Artificial Sequence: Synthetic oligonucleotide
  Antisense strand to SEQ ID NO: 280280
agcuaugugagcaucuuaa

SEQ ID NO: 280282 - RNA, 19 nt, Artificial Sequence
  Description of Artificial Sequence: Synthetic oligonucleotide
  Sense strand starting at position 3221 of SEQ ID NO: 3600
gccuuccuccuaugauaga

SEQ ID NO: 280283 - RNA, 19 nt, Artificial Sequence
  Description of Artificial Sequence: Synthetic oligonucleotide
  Antisense strand to SEQ ID NO: 280282
ucuaucauaggaggaaggc

SEQ ID NO: 280284 - RNA, 19 nt, Artificial Sequence
  Description of Artificial Sequence: Synthetic oligonucleotide
  Sense strand starting at position 3273 of SEQ ID NO: 3600
ccucaaucuuguguaguua

SEQ ID NO: 280285 - RNA, 19 nt, Artificial Sequence
  Description of Artificial Sequence: Synthetic oligonucleotide
  Antisense strand to SEQ ID NO: 280284
uaacuacacaagauugagg

SEQ ID NO: 280286 - RNA, 19 nt, Artificial Sequence
  Description of Artificial Sequence: Synthetic oligonucleotide
  Sense strand starting at position 3274 of SEQ ID NO: 3600
cucaaucuuguguaguuau

SEQ ID NO: 280287 - RNA, 19 nt, Artificial Sequence
  Description of Artificial Sequence: Synthetic oligonucleotide
  Antisense strand to SEQ ID NO: 280286
auaacuacacaagauugag

SEQ ID NO: 280288 - RNA, 19 nt, Artificial Sequence
  Description of Artificial Sequence: Synthetic oligonucleotide
  Sense strand starting at position 3281 of SEQ ID NO: 3600
uuguguaguuaugcuauua

SEQ ID NO: 280289 - RNA, 19 nt, Artificial Sequence
  Description of Artificial Sequence: Synthetic oligonucleotide
  Antisense strand to SEQ ID NO: 280288
uaauagcauaacuacacaa

SEQ ID NO: 280290 - RNA, 19 nt, Artificial Sequence
  Description of Artificial Sequence: Synthetic oligonucleotide
  Sense strand starting at position 3407 of SEQ ID NO: 3600
gggcuagcuggugaaacuu

SEQ ID NO: 280291 - RNA, 19 nt, Artificial Sequence
  Description of Artificial Sequence: Synthetic oligonucleotide
  Antisense strand to SEQ ID NO: 280290
aaguuucaccagcuagccc

SEQ ID NO: 280292 - RNA, 19 nt, Artificial Sequence
  Description of Artificial Sequence: Synthetic oligonucleotide
  Sense strand starting at position 3494 of SEQ ID NO: 3600
gcauuaaauucuccuagga

SEQ ID NO: 280293 - RNA, 19 nt, Artificial Sequence
  Description of Artificial Sequence: Synthetic oligonucleotide
  Antisense strand to SEQ ID NO: 280292
uccuaggagaauuuaaugc

SEQ ID NO: 280294 - RNA, 19 nt, Artificial Sequence
  Description of Artificial Sequence: Synthetic oligonucleotide
  Sense strand starting at position 3496 of SEQ ID NO: 3600
auuaaauucuccuaggagc

SEQ ID NO: 280295 - RNA, 19 nt, Artificial Sequence
  Description of Artificial Sequence: Synthetic oligonucleotide
  Antisense strand to SEQ ID NO: 280294
gcuccuaggagaauuuaau

SEQ ID NO: 280296 - RNA, 19 nt, Artificial Sequence
  Description of Artificial Sequence: Synthetic oligonucleotide
  Sense strand starting at position 3776 of SEQ ID NO: 3600
cccucagucuguggaaacu

SEQ ID NO: 280297 - RNA, 19 nt, Artificial Sequence
  Description of Artificial Sequence: Synthetic oligonucleotide
  Antisense strand to SEQ ID NO: 280296
aguuuccacagacugaggg

SEQ ID NO: 280298 - RNA, 19 nt, Artificial Sequence
  Description of Artificial Sequence: Synthetic oligonucleotide
  Sense strand starting at position 3800 of SEQ ID NO: 3600
uuuggucccuggugucaaa

SEQ ID NO: 280299 - RNA, 19 nt, Artificial Sequence
  Description of Artificial Sequence: Synthetic oligonucleotide
  Antisense strand to SEQ ID NO: 280298
uuugacaccagggaccaaa

SEQ ID NO: 280300 - RNA, 19 nt, Artificial Sequence
  Description of Artificial Sequence: Synthetic oligonucleotide
  Sense strand starting at position 3827 of SEQ ID NO: 3600
gaaccagugcucuauagga

SEQ ID NO: 280301 - RNA, 19 nt, Artificial Sequence
  Description of Artificial Sequence: Synthetic oligonucleotide
  Antisense strand to SEQ ID NO: 280300
uccuauagagcacugguuc

SEQ ID NO: 280302 - RNA, 19 nt, Artificial Sequence
  Description of Artificial Sequence: Synthetic oligonucleotide
  Sense strand starting at position 3829 of SEQ ID NO: 3600
accagugcucuauaggaua

SEQ ID NO: 280303 - RNA, 19 nt, Artificial Sequence
  Description of Artificial Sequence: Synthetic oligonucleotide
  Antisense strand to SEQ ID NO: 280302
uauccuauagagcacuggu

SEQ ID NO: 280304 - RNA, 19 nt, Artificial Sequence
  Description of Artificial Sequence: Synthetic oligonucleotide
  Sense strand starting at position 3867 of SEQ ID NO: 3600
auuucuucuuagggagacu

SEQ ID NO: 280305 - RNA, 19 nt, Artificial Sequence
  Description of Artificial Sequence: Synthetic oligonucleotide
  Antisense strand to SEQ ID NO: 280304
agucucccuaagaagaaau

SEQ ID NO: 280306 - RNA, 19 nt, Artificial Sequence
  Description of Artificial Sequence: Synthetic oligonucleotide
  Sense strand starting at position 3921 of SEQ ID NO: 3600
uguccucuacugggaauau

SEQ ID NO: 280307 - RNA, 19 nt, Artificial Sequence
  Description of Artificial Sequence: Synthetic oligonucleotide
  Antisense strand to SEQ ID NO: 280306
auauucccaguagaggaca

SEQ ID NO: 280308 - RNA, 19 nt, Artificial Sequence
  Description of Artificial Sequence: Synthetic oligonucleotide
  Sense strand starting at position 3922 of SEQ ID NO: 3600
guccucuacugggaauaug

SEQ ID NO: 280309 - RNA, 19 nt, Artificial Sequence
  Description of Artificial Sequence: Synthetic oligonucleotide
  Antisense strand to SEQ ID NO: 280308
cauauucccaguagaggac

SEQ ID NO: 280310 - RNA, 19 nt, Artificial Sequence
  Description of Artificial Sequence: Synthetic oligonucleotide
  Sense strand starting at position 259 of SEQ ID NO: 3601
auuauuauccgauggguaa

SEQ ID NO: 280311 - RNA, 19 nt, Artificial Sequence
  Description of Artificial Sequence: Synthetic oligonucleotide
  Antisense strand to SEQ ID NO: 280310
uuacccaucggauaauaau

SEQ ID NO: 280312 - RNA, 19 nt, Artificial Sequence
  Description of Artificial Sequence: Synthetic oligonucleotide
  Sense strand starting at position 260 of SEQ ID NO: 3601
uuauuauccgauggguaag

SEQ ID NO: 280313 - RNA, 19 nt, Artificial Sequence
  Description of Artificial Sequence: Synthetic oligonucleotide
  Antisense strand to SEQ ID NO: 280312
cuuacccaucggauaauaa

SEQ ID NO: 280314 - RNA, 19 nt, Artificial Sequence
  Description of Artificial Sequence: Synthetic oligonucleotide
  Sense strand starting at position 415 of SEQ ID NO: 3601
cuguaauaagacugcagua

SEQ ID NO: 280315 - RNA, 19 nt, Artificial Sequence
  Description of Artificial Sequence: Synthetic oligonucleotide
  Antisense strand to SEQ ID NO: 280314
uacugcagucuuauuacag

SEQ ID NO: 280316 - RNA, 19 nt, Artificial Sequence
  Description of Artificial Sequence: Synthetic oligonucleotide
  Sense strand starting at position 417 of SEQ ID NO: 3601
guaauaagacugcaguaaa

SEQ ID NO: 280317 - RNA, 19 nt, Artificial Sequence
  Description of Artificial Sequence: Synthetic oligonucleotide
  Antisense strand to SEQ ID NO: 280316
uuuacugcagucuuauuac

SEQ ID NO: 280318 - RNA, 19 nt, Artificial Sequence
  Description of Artificial Sequence: Synthetic oligonucleotide
  Sense strand starting at position 496 of SEQ ID NO: 3601
ggagccuucuguccaaaga

SEQ ID NO: 280319 - RNA, 19 nt, Artificial Sequence
  Description of Artificial Sequence: Synthetic oligonucleotide
  Antisense strand to SEQ ID NO: 280318
ucuuuggacagaaggcucc

SEQ ID NO: 280320 - RNA, 19 nt, Artificial Sequence
  Description of Artificial Sequence: Synthetic oligonucleotide
  Sense strand starting at position 497 of SEQ ID NO: 3601
gagccuucuguccaaagag

SEQ ID NO: 280321 - RNA, 19 nt, Artificial Sequence
  Description of Artificial Sequence: Synthetic oligonucleotide
  Antisense strand to SEQ ID NO: 280320
cucuuuggacagaaggcuc

SEQ ID NO: 280322 - RNA, 19 nt, Artificial Sequence
  Description of Artificial Sequence: Synthetic oligonucleotide
  Sense strand starting at position 569 of SEQ ID NO: 3601
guuauuaguagugaaagau

SEQ ID NO: 280323 - RNA, 19 nt, Artificial Sequence
  Description of Artificial Sequence: Synthetic oligonucleotide
  Antisense strand to SEQ ID NO: 280322
aucuuucacuacuaauaac

SEQ ID NO: 280324 - RNA, 19 nt, Artificial Sequence
  Description of Artificial Sequence: Synthetic oligonucleotide
  Sense strand starting at position 575 of SEQ ID NO: 3601
aguagugaaagauguuauu

SEQ ID NO: 280325 - RNA, 19 nt, Artificial Sequence
  Description of Artificial Sequence: Synthetic oligonucleotide
  Antisense strand to SEQ ID NO: 280324
aauaacaucuuucacuacu

SEQ ID NO: 280326 - RNA, 19 nt, Artificial Sequence
  Description of Artificial Sequence: Synthetic oligonucleotide
  Sense strand starting at position 586 of SEQ ID NO: 3601
auguuauuagguuguugaa

SEQ ID NO: 280327 - RNA, 19 nt, Artificial Sequence
  Description of Artificial Sequence: Synthetic oligonucleotide
  Antisense strand to SEQ ID NO: 280326
uucaacaaccuaauaacau

SEQ ID NO: 280328 - RNA, 19 nt, Artificial Sequence
  Description of Artificial Sequence: Synthetic oligonucleotide
  Sense strand starting at position 588 of SEQ ID NO: 3601
guuauuagguuguugaaga

SEQ ID NO: 280329 - RNA, 19 nt, Artificial Sequence
  Description of Artificial Sequence: Synthetic oligonucleotide
  Antisense strand to SEQ ID NO: 280328
ucuucaacaaccuaauaac

SEQ ID NO: 280330 - RNA, 19 nt, Artificial Sequence
  Description of Artificial Sequence: Synthetic oligonucleotide
  Sense strand starting at position 641 of SEQ ID NO: 3601
ggcgcuucucuaguaaucu

SEQ ID NO: 280331 - RNA, 19 nt, Artificial Sequence
  Description of Artificial Sequence: Synthetic oligonucleotide
  Antisense strand to SEQ ID NO: 280330
agauuacuagagaagcgcc

SEQ ID NO: 280332 - RNA, 19 nt, Artificial Sequence
  Description of Artificial Sequence: Synthetic oligonucleotide
  Sense strand starting at position 840 of SEQ ID NO: 3601
gagauuacgagagguacac

SEQ ID NO: 280333 - RNA, 19 nt, Artificial Sequence
  Description of Artificial Sequence: Synthetic oligonucleotide
  Antisense strand to SEQ ID NO: 280332
guguaccucucguaaucuc

SEQ ID NO: 280334 - RNA, 19 nt, Artificial Sequence
  Description of Artificial Sequence: Synthetic oligonucleotide
  Sense strand starting at position 937 of SEQ ID NO: 3601
cugacaagcuuccuagaua

SEQ ID NO: 280335 - RNA, 19 nt, Artificial Sequence
  Description of Artificial Sequence: Synthetic oligonucleotide
  Antisense strand to SEQ ID NO: 280334
uaucuaggaagcuugucag

SEQ ID NO: 280336 - RNA, 19 nt, Artificial Sequence
  Description of Artificial Sequence: Synthetic oligonucleotide
  Sense strand starting at position 948 of SEQ ID NO: 3601
ccuagauaucacuggguau

SEQ ID NO: 280337 - RNA, 19 nt, Artificial Sequence
  Description of Artificial Sequence: Synthetic oligonucleotide
  Antisense strand to SEQ ID NO: 280336
auacccagugauaucuagg

SEQ ID NO: 280338 - RNA, 19 nt, Artificial Sequence
  Description of Artificial Sequence: Synthetic oligonucleotide
  Sense strand starting at position 950 of SEQ ID NO: 3601
uagauaucacuggguauua

SEQ ID NO: 280339 - RNA, 19 nt, Artificial Sequence
  Description of Artificial Sequence: Synthetic oligonucleotide
  Antisense strand to SEQ ID NO: 280338
uaauacccagugauaucua

SEQ ID NO: 280340 - RNA, 19 nt, Artificial Sequence
  Description of Artificial Sequence: Synthetic oligonucleotide
  Sense strand starting at position 951 of SEQ ID NO: 3601
agauaucacuggguauuaa

SEQ ID NO: 280341 - RNA, 19 nt, Artificial Sequence
  Description of Artificial Sequence: Synthetic oligonucleotide
  Antisense strand to SEQ ID NO: 280340
uuaauacccagugauaucu

SEQ ID NO: 280342 - RNA, 19 nt, Artificial Sequence
  Description of Artificial Sequence: Synthetic oligonucleotide
  Sense strand starting at position 966 of SEQ ID NO: 3601
uuaaauugggaauguugau

SEQ ID NO: 280343 - RNA, 19 nt, Artificial Sequence
  Description of Artificial Sequence: Synthetic oligonucleotide
  Antisense strand to SEQ ID NO: 280342
aucaacauucccaauuuaa

SEQ ID NO: 280344 - RNA, 19 nt, Artificial Sequence
  Description of Artificial Sequence: Synthetic oligonucleotide
  Sense strand starting at position 997 of SEQ ID NO: 3601
ggauuucuuuaagaguucu

SEQ ID NO: 280345 - RNA, 19 nt, Artificial Sequence
  Description of Artificial Sequence: Synthetic oligonucleotide
  Antisense strand to SEQ ID NO: 280344
agaacucuuaaagaaaucc

SEQ ID NO: 280346 - RNA, 19 nt, Artificial Sequence
  Description of Artificial Sequence: Synthetic oligonucleotide
  Sense strand starting at position 1010 of SEQ ID NO: 3601
aguucuucucauuaccaga

SEQ ID NO: 280347 - RNA, 19 nt, Artificial Sequence
  Description of Artificial Sequence: Synthetic oligonucleotide
  Antisense strand to SEQ ID NO: 280346
ucugguaaugagaagaacu

SEQ ID NO: 280348 - RNA, 19 nt, Artificial Sequence
  Description of Artificial Sequence: Synthetic oligonucleotide
  Sense strand starting at position 1063 of SEQ ID NO: 3601
accggaacuuucccgaaga

SEQ ID NO: 280349 - RNA, 19 nt, Artificial Sequence
  Description of Artificial Sequence: Synthetic oligonucleotide
  Antisense strand to SEQ ID NO: 280348
ucuucgggaaaguuccggu

SEQ ID NO: 280350 - RNA, 19 nt, Artificial Sequence
  Description of Artificial Sequence: Synthetic oligonucleotide
  Sense strand starting at position 1163 of SEQ ID NO: 3601
uuuguccuuugauuauaca

SEQ ID NO: 280351 - RNA, 19 nt, Artificial Sequence
  Description of Artificial Sequence: Synthetic oligonucleotide
  Antisense strand to SEQ ID NO: 280350
uguauaaucaaaggacaaa

SEQ ID NO: 280352 - RNA, 19 nt, Artificial Sequence
  Description of Artificial Sequence: Synthetic oligonucleotide
  Sense strand starting at position 1981 of SEQ ID NO: 3601
gggucagauccugggcuga

SEQ ID NO: 280353 - RNA, 19 nt, Artificial Sequence
  Description of Artificial Sequence: Synthetic oligonucleotide
  Antisense strand to SEQ ID NO: 280352
ucagcccaggaucugaccc

SEQ ID NO: 280354 - RNA, 19 nt, Artificial Sequence
  Description of Artificial Sequence: Synthetic oligonucleotide
  Sense strand starting at position 2097 of SEQ ID NO: 3601
ccaugaaacuuccuggcuu

SEQ ID NO: 280355 - RNA, 19 nt, Artificial Sequence
  Description of Artificial Sequence: Synthetic oligonucleotide
  Antisense strand to SEQ ID NO: 280354
aagccaggaaguuucaugg

SEQ ID NO: 280356 - RNA, 19 nt, Artificial Sequence
  Description of Artificial Sequence: Synthetic oligonucleotide
  Sense strand starting at position 2127 of SEQ ID NO: 3601
aagagucuccuccagguaa

SEQ ID NO: 280357 - RNA, 19 nt, Artificial Sequence
  Description of Artificial Sequence: Synthetic oligonucleotide
  Antisense strand to SEQ ID NO: 280356
uuaccuggaggagacucuu

SEQ ID NO: 280358 - RNA, 19 nt, Artificial Sequence
  Description of Artificial Sequence: Synthetic oligonucleotide
  Sense strand starting at position 2129 of SEQ ID NO: 3601
gagucuccuccagguaaga

SEQ ID NO: 280359 - RNA, 19 nt, Artificial Sequence
  Description of Artificial Sequence: Synthetic oligonucleotide
  Antisense strand to SEQ ID NO: 280358
ucuuaccuggaggagacuc

SEQ ID NO: 280360 - RNA, 19 nt, Artificial Sequence
  Description of Artificial Sequence: Synthetic oligonucleotide
  Sense strand starting at position 2218 of SEQ ID NO: 3601
ccgugaacauuacuccaca

SEQ ID NO: 280361 - RNA, 19 nt, Artificial Sequence
  Description of Artificial Sequence: Synthetic oligonucleotide
  Antisense strand to SEQ ID NO: 280360
uguggaguaauguucacgg

SEQ ID NO: 280362 - RNA, 19 nt, Artificial Sequence
  Description of Artificial Sequence: Synthetic oligonucleotide
  Sense strand starting at position 2487 of SEQ ID NO: 3601
ccaagccuccucugagauu

SEQ ID NO: 280363 - RNA, 19 nt, Artificial Sequence
  Description of Artificial Sequence: Synthetic oligonucleotide
  Antisense strand to SEQ ID NO: 280362
aaucucagaggaggcuugg

SEQ ID NO: 280364 - RNA, 19 nt, Artificial Sequence
  Description of Artificial Sequence: Synthetic oligonucleotide
  Sense strand starting at position 2498 of SEQ ID NO: 3601
cugagauucuuccuccaug

SEQ ID NO: 280365 - RNA, 19 nt, Artificial Sequence
  Description of Artificial Sequence: Synthetic oligonucleotide
  Antisense strand to SEQ ID NO: 280364
cauggaggaagaaucucag

SEQ ID NO: 280366 - RNA, 19 nt, Artificial Sequence
  Description of Artificial Sequence: Synthetic oligonucleotide
  Sense strand starting at position 2592 of SEQ ID NO: 3601
gcuugagaaucucucuauu

SEQ ID NO: 280367 - RNA, 19 nt, Artificial Sequence
  Description of Artificial Sequence: Synthetic oligonucleotide
  Antisense strand to SEQ ID NO: 280366
aauagagagauucucaagc

SEQ ID NO: 280368 - RNA, 19 nt, Artificial Sequence
  Description of Artificial Sequence: Synthetic oligonucleotide
  Sense strand starting at position 2700 of SEQ ID NO: 3601
ggaggcugaauguggaaau

SEQ ID NO: 280369 - RNA, 19 nt, Artificial Sequence
  Description of Artificial Sequence: Synthetic oligonucleotide
  Antisense strand to SEQ ID NO: 280368
auuuccacauucagccucc

SEQ ID NO: 280370 - RNA, 19 nt, Artificial Sequence
  Description of Artificial Sequence: Synthetic oligonucleotide
  Sense strand starting at position 2710 of SEQ ID NO: 3601
uguggaaauacaugaaugu

SEQ ID NO: 280371 - RNA, 19 nt, Artificial Sequence
  Description of Artificial Sequence: Synthetic oligonucleotide
  Antisense strand to SEQ ID NO: 280370
acauucauguauuuccaca

SEQ ID NO: 280372 - RNA, 19 nt, Artificial Sequence
  Description of Artificial Sequence: Synthetic oligonucleotide
  Sense strand starting at position 2714 of SEQ ID NO: 3601
gaaauacaugaaugugcuu

SEQ ID NO: 280373 - RNA, 19 nt, Artificial Sequence
  Description of Artificial Sequence: Synthetic oligonucleotide
  Antisense strand to SEQ ID NO: 280372
aagcacauucauguauuuc

SEQ ID NO: 280374 - RNA, 19 nt, Artificial Sequence
  Description of Artificial Sequence: Synthetic oligonucleotide
  Sense strand starting at position 2741 of SEQ ID NO: 3601
uccaguucccuugaagaau

SEQ ID NO: 280375 - RNA, 19 nt, Artificial Sequence
  Description of Artificial Sequence: Synthetic oligonucleotide
  Antisense strand to SEQ ID NO: 280374
auucuucaagggaacugga

SEQ ID NO: 280376 - RNA, 19 nt, Artificial Sequence
  Description of Artificial Sequence: Synthetic oligonucleotide
  Sense strand starting at position 3185 of SEQ ID NO: 3601
ggagguuuguaccuacagu

SEQ ID NO: 280377 - RNA, 19 nt, Artificial Sequence
  Description of Artificial Sequence: Synthetic oligonucleotide
  Antisense strand to SEQ ID NO: 280376
acuguagguacaaaccucc

SEQ ID NO: 280378 - RNA, 19 nt, Artificial Sequence
  Description of Artificial Sequence: Synthetic oligonucleotide
  Sense strand starting at position 3736 of SEQ ID NO: 3601
gauccuuuacguuacugua

SEQ ID NO: 280379 - RNA, 19 nt, Artificial Sequence
  Description of Artificial Sequence: Synthetic oligonucleotide
  Antisense strand to SEQ ID NO: 280378
uacaguaacguaaaggauc

SEQ ID NO: 280380 - RNA, 19 nt, Artificial Sequence
  Description of Artificial Sequence: Synthetic oligonucleotide
  Sense strand starting at position 3807 of SEQ ID NO: 3601
ucuguuucccacuagauca

SEQ ID NO: 280381 - RNA, 19 nt, Artificial Sequence
  Description of Artificial Sequence: Synthetic oligonucleotide
  Antisense strand to SEQ ID NO: 280380
ugaucuagugggaaacaga

SEQ ID NO: 280382 - RNA, 19 nt, Artificial Sequence
  Description of Artificial Sequence: Synthetic oligonucleotide
  Sense strand starting at position 3870 of SEQ ID NO: 3601
ugaagaaagucugugacuu

SEQ ID NO: 280383 - RNA, 19 nt, Artificial Sequence
  Description of Artificial Sequence: Synthetic oligonucleotide
  Antisense strand to SEQ ID NO: 280382
aagucacagacuuucuuca

SEQ ID NO: 280384 - RNA, 19 nt, Artificial Sequence
  Description of Artificial Sequence: Synthetic oligonucleotide
  Sense strand starting at position 3871 of SEQ ID NO: 3601
gaagaaagucugugacuug

SEQ ID NO: 280385 - RNA, 19 nt, Artificial Sequence
  Description of Artificial Sequence: Synthetic oligonucleotide
  Antisense strand to SEQ ID NO: 280384
caagucacagacuuucuuc

SEQ ID NO: 280386 - RNA, 19 nt, Artificial Sequence
  Description of Artificial Sequence: Synthetic oligonucleotide
  Sense strand starting at position 3955 of SEQ ID NO: 3601
ucaccauggccuggaguaa

SEQ ID NO: 280387 - RNA, 19 nt, Artificial Sequence
  Description of Artificial Sequence: Synthetic oligonucleotide
  Antisense strand to SEQ ID NO: 280386
uuacuccaggccaugguga

SEQ ID NO: 280388 - RNA, 19 nt, Artificial Sequence
  Description of Artificial Sequence: Synthetic oligonucleotide
  Sense strand starting at position 3956 of SEQ ID NO: 3601
caccauggccuggaguaaa

SEQ ID NO: 280389 - RNA, 19 nt, Artificial Sequence
  Description of Artificial Sequence: Synthetic oligonucleotide
  Antisense strand to SEQ ID NO: 280388
uuuacuccaggccauggug

SEQ ID NO: 280390 - RNA, 19 nt, Artificial Sequence
  Description of Artificial Sequence: Synthetic oligonucleotide
  Sense strand starting at position 35 of SEQ ID NO: 3602
gucuauaaaccucgauaaa

SEQ ID NO: 280391 - RNA, 19 nt, Artificial Sequence
  Description of Artificial Sequence: Synthetic oligonucleotide
  Antisense strand to SEQ ID NO: 280390
uuuaucgagguuuauagac

SEQ ID NO: 280392 - RNA, 19 nt, Artificial Sequence
  Description of Artificial Sequence: Synthetic oligonucleotide
  Sense strand starting at position 57 of SEQ ID NO: 3602
guaaauccauguucuuuau

SEQ ID NO: 280393 - RNA, 19 nt, Artificial Sequence
  Description of Artificial Sequence: Synthetic oligonucleotide
  Antisense strand to SEQ ID NO: 280392
auaaagaacauggauuuac

SEQ ID NO: 280394 - RNA, 19 nt, Artificial Sequence
  Description of Artificial Sequence: Synthetic oligonucleotide
  Sense strand starting at position 61 of SEQ ID NO: 3602
auccauguucuuuauuguu

SEQ ID NO: 280395 - RNA, 19 nt, Artificial Sequence
  Description of Artificial Sequence: Synthetic oligonucleotide
  Antisense strand to SEQ ID NO: 280394
aacaauaaagaacauggau

SEQ ID NO: 280396 - RNA, 19 nt, Artificial Sequence
  Description of Artificial Sequence: Synthetic oligonucleotide
  Sense strand starting at position 66 of SEQ ID NO: 3602
uguucuuuauuguuaccaa

SEQ ID NO: 280397 - RNA, 19 nt, Artificial Sequence
  Description of Artificial Sequence: Synthetic oligonucleotide
  Antisense strand to SEQ ID NO: 280396
uugguaacaauaaagaaca

SEQ ID NO: 280398 - RNA, 19 nt, Artificial Sequence
  Description of Artificial Sequence: Synthetic oligonucleotide
  Sense strand starting at position 320 of SEQ ID NO: 3602
gcaagagccaugugacaca

SEQ ID NO: 280399 - RNA, 19 nt, Artificial Sequence
  Description of Artificial Sequence: Synthetic oligonucleotide
  Antisense strand to SEQ ID NO: 280398
ugugucacauggcucuugc

SEQ ID NO: 280400 - RNA, 19 nt, Artificial Sequence
  Description of Artificial Sequence: Synthetic oligonucleotide
  Sense strand starting at position 383 of SEQ ID NO: 3602
aaugucuagcaguaauuga

SEQ ID NO: 280401 - RNA, 19 nt, Artificial Sequence
  Description of Artificial Sequence: Synthetic oligonucleotide
  Antisense strand to SEQ ID NO: 280400
ucaauuacugcuagacauu

SEQ ID NO: 280402 - RNA, 19 nt, Artificial Sequence
  Description of Artificial Sequence: Synthetic oligonucleotide
  Sense strand starting at position 391 of SEQ ID NO: 3602
gcaguaauugaccaaacca

SEQ ID NO: 280403 - RNA, 19 nt, Artificial Sequence
  Description of Artificial Sequence: Synthetic oligonucleotide
  Antisense strand to SEQ ID NO: 280402
ugguuuggucaauuacugc

SEQ ID NO: 280404 - RNA, 19 nt, Artificial Sequence
  Description of Artificial Sequence: Synthetic oligonucleotide
  Sense strand starting at position 523 of SEQ ID NO: 3602
gcauguaaacuguagagga

SEQ ID NO: 280405 - RNA, 19 nt, Artificial Sequence
  Description of Artificial Sequence: Synthetic oligonucleotide
  Antisense strand to SEQ ID NO: 280404
uccucuacaguuuacaugc

SEQ ID NO: 280406 - RNA, 19 nt, Artificial Sequence
  Description of Artificial Sequence: Synthetic oligonucleotide
  Sense strand starting at position 527 of SEQ ID NO: 3602
guaaacuguagaggaaauu

SEQ ID NO: 280407 - RNA, 19 nt, Artificial Sequence
  Description of Artificial Sequence: Synthetic oligonucleotide
  Antisense strand to SEQ ID NO: 280406
aauuuccucuacaguuuac

SEQ ID NO: 280408 - RNA, 19 nt, Artificial Sequence
  Description of Artificial Sequence: Synthetic oligonucleotide
  Sense strand starting at position 639 of SEQ ID NO: 3602
uggugacuucuugaguaag

SEQ ID NO: 280409 - RNA, 19 nt, Artificial Sequence
  Description of Artificial Sequence: Synthetic oligonucleotide
  Antisense strand to SEQ ID NO: 280408
cuuacucaagaagucacca

SEQ ID NO: 280410 - RNA, 19 nt, Artificial Sequence
  Description of Artificial Sequence: Synthetic oligonucleotide
  Sense strand starting at position 641 of SEQ ID NO: 3602
gugacuucuugaguaagca

SEQ ID NO: 280411 - RNA, 19 nt, Artificial Sequence
  Description of Artificial Sequence: Synthetic oligonucleotide
  Antisense strand to SEQ ID NO: 280410
ugcuuacucaagaagucac

SEQ ID NO: 280412 - RNA, 19 nt, Artificial Sequence
  Description of Artificial Sequence: Synthetic oligonucleotide
  Sense strand starting at position 642 of SEQ ID NO: 3602
ugacuucuugaguaagcaa

SEQ ID NO: 280413 - RNA, 19 nt, Artificial Sequence
  Description of Artificial Sequence: Synthetic oligonucleotide
  Antisense strand to SEQ ID NO: 280412
uugcuuacucaagaaguca

SEQ ID NO: 280414 - RNA, 19 nt, Artificial Sequence
  Description of Artificial Sequence: Synthetic oligonucleotide
  Sense strand starting at position 645 of SEQ ID NO: 3602
cuucuugaguaagcaagaa

SEQ ID NO: 280415 - RNA, 19 nt, Artificial Sequence
  Description of Artificial Sequence: Synthetic oligonucleotide
  Antisense strand to SEQ ID NO: 280414
uucuugcuuacucaagaag

SEQ ID NO: 280416 - RNA, 19 nt, Artificial Sequence
  Description of Artificial Sequence: Synthetic oligonucleotide
  Sense strand starting at position 794 of SEQ ID NO: 3602
gcaagcuuccuuuaaucug

SEQ ID NO: 280417 - RNA, 19 nt, Artificial Sequence
  Description of Artificial Sequence: Synthetic oligonucleotide
  Antisense strand to SEQ ID NO: 280416
cagauuaaaggaagcuugc

SEQ ID NO: 280418 - RNA, 19 nt, Artificial Sequence
  Description of Artificial Sequence: Synthetic oligonucleotide
  Sense strand starting at position 805 of SEQ ID NO: 3602
uuaaucugcgaguaucaaa

SEQ ID NO: 280419 - RNA, 19 nt, Artificial Sequence
  Description of Artificial Sequence: Synthetic oligonucleotide
  Antisense strand to SEQ ID NO: 280418
uuugauacucgcagauuaa

SEQ ID NO: 280420 - RNA, 19 nt, Artificial Sequence
  Description of Artificial Sequence: Synthetic oligonucleotide
  Sense strand starting at position 826 of SEQ ID NO: 3602
gacauuucuuggcuuuagu

SEQ ID NO: 280421 - RNA, 19 nt, Artificial Sequence
  Description of Artificial Sequence: Synthetic oligonucleotide
  Antisense strand to SEQ ID NO: 280420
acuaaagccaagaaauguc

SEQ ID NO: 280422 - RNA, 19 nt, Artificial Sequence
  Description of Artificial Sequence: Synthetic oligonucleotide
  Sense strand starting at position 1138 of SEQ ID NO: 3602
aaguaaagcugguuucuac

SEQ ID NO: 280423 - RNA, 19 nt, Artificial Sequence
  Description of Artificial Sequence: Synthetic oligonucleotide
  Antisense strand to SEQ ID NO: 280422
guagaaaccagcuuuacuu

SEQ ID NO: 280424 - RNA, 19 nt, Artificial Sequence
  Description of Artificial Sequence: Synthetic oligonucleotide
  Sense strand starting at position 1271 of SEQ ID NO: 3602
cugccuccgagagaagaua

SEQ ID NO: 280425 - RNA, 19 nt, Artificial Sequence
  Description of Artificial Sequence: Synthetic oligonucleotide
  Antisense strand to SEQ ID NO: 280424
uaucuucucucggaggcag

SEQ ID NO: 280426 - RNA, 19 nt, Artificial Sequence
  Description of Artificial Sequence: Synthetic oligonucleotide
  Sense strand starting at position 1572 of SEQ ID NO: 3602
cggugcucuccugaacuca

SEQ ID NO: 280427 - RNA, 19 nt, Artificial Sequence
  Description of Artificial Sequence: Synthetic oligonucleotide
  Antisense strand to SEQ ID NO: 280426
ugaguucaggagagcaccg

SEQ ID NO: 280428 - RNA, 19 nt, Artificial Sequence
  Description of Artificial Sequence: Synthetic oligonucleotide
  Sense strand starting at position 1713 of SEQ ID NO: 3602
ggcuguuccgggagagcaa

SEQ ID NO: 280429 - RNA, 19 nt, Artificial Sequence
  Description of Artificial Sequence: Synthetic oligonucleotide
  Antisense strand to SEQ ID NO: 280428
uugcucucccggaacagcc

SEQ ID NO: 280430 - RNA, 19 nt, Artificial Sequence
  Description of Artificial Sequence: Synthetic oligonucleotide
  Sense strand starting at position 2137 of SEQ ID NO: 3602
uagugaugucaucagugag

SEQ ID NO: 280431 - RNA, 19 nt, Artificial Sequence
  Description of Artificial Sequence: Synthetic oligonucleotide
  Antisense strand to SEQ ID NO: 280430
cucacugaugacaucacua

SEQ ID NO: 280432 - RNA, 19 nt, Artificial Sequence
  Description of Artificial Sequence: Synthetic oligonucleotide
  Sense strand starting at position 2140 of SEQ ID NO: 3602
ugaugucaucagugagacg

SEQ ID NO: 280433 - RNA, 19 nt, Artificial Sequence
  Description of Artificial Sequence: Synthetic oligonucleotide
  Antisense strand to SEQ ID NO: 280432
cgucucacugaugacauca

SEQ ID NO: 280434 - RNA, 19 nt, Artificial Sequence
  Description of Artificial Sequence: Synthetic oligonucleotide
  Sense strand starting at position 2141 of SEQ ID NO: 3602
gaugucaucagugagacgu

SEQ ID NO: 280435 - RNA, 19 nt, Artificial Sequence
  Description of Artificial Sequence: Synthetic oligonucleotide
  Antisense strand to SEQ ID NO: 280434
acgucucacugaugacauc

SEQ ID NO: 280436 - RNA, 19 nt, Artificial Sequence
  Description of Artificial Sequence: Synthetic oligonucleotide
  Sense strand starting at position 2420 of SEQ ID NO: 3602
ggacguccgcucuaagaac

SEQ ID NO: 280437 - RNA, 19 nt, Artificial Sequence
  Description of Artificial Sequence: Synthetic oligonucleotide
  Antisense strand to SEQ ID NO: 280436
guucuuagagcggacgucc

SEQ ID NO: 280438 - RNA, 19 nt, Artificial Sequence
  Description of Artificial Sequence: Synthetic oligonucleotide
  Sense strand starting at position 2680 of SEQ ID NO: 3602
ggauguaucuuucugagac

SEQ ID NO: 280439 - RNA, 19 nt, Artificial Sequence
  Description of Artificial Sequence: Synthetic oligonucleotide
  Antisense strand to SEQ ID NO: 280438
gucucagaaagauacaucc

SEQ ID NO: 280440 - RNA, 19 nt, Artificial Sequence
  Description of Artificial Sequence: Synthetic oligonucleotide
  Sense strand starting at position 2840 of SEQ ID NO: 3602
gcuacuaacccugagccau

SEQ ID NO: 280441 - RNA, 19 nt, Artificial Sequence
  Description of Artificial Sequence: Synthetic oligonucleotide
  Antisense strand to SEQ ID NO: 280440
auggcucaggguuaguagc

SEQ ID NO: 280442 - RNA, 19 nt, Artificial Sequence
  Description of Artificial Sequence: Synthetic oligonucleotide
  Sense strand starting at position 2851 of SEQ ID NO: 3602
ugagccauucugcaagacu

SEQ ID NO: 280443 - RNA, 19 nt, Artificial Sequence
  Description of Artificial Sequence: Synthetic oligonucleotide
  Antisense strand to SEQ ID NO: 280442
agucuugcagaauggcuca

SEQ ID NO: 280444 - RNA, 19 nt, Artificial Sequence
  Description of Artificial Sequence: Synthetic oligonucleotide
  Sense strand starting at position 2918 of SEQ ID NO: 3602
uacaauuucugggaguaau

SEQ ID NO: 280445 - RNA, 19 nt, Artificial Sequence
  Description of Artificial Sequence: Synthetic oligonucleotide
  Antisense strand to SEQ ID NO: 280444
auuacucccagaaauugua

SEQ ID NO: 280446 - RNA, 19 nt, Artificial Sequence
  Description of Artificial Sequence: Synthetic oligonucleotide
  Sense strand starting at position 2977 of SEQ ID NO: 3602
cuuuaaucagcucaggaau

SEQ ID NO: 280447 - RNA, 19 nt, Artificial Sequence
  Description of Artificial Sequence: Synthetic oligonucleotide
  Antisense strand to SEQ ID NO: 280446
auuccugagcugauuaaag

SEQ ID NO: 280448 - RNA, 19 nt, Artificial Sequence
  Description of Artificial Sequence: Synthetic oligonucleotide
  Sense strand starting at position 3053 of SEQ ID NO: 3602
aguguaauacauuguccaa

SEQ ID NO: 280449 - RNA, 19 nt, Artificial Sequence
  Description of Artificial Sequence: Synthetic oligonucleotide
  Antisense strand to SEQ ID NO: 280448
uuggacaauguauuacacu

SEQ ID NO: 280450 - RNA, 19 nt, Artificial Sequence
  Description of Artificial Sequence: Synthetic oligonucleotide
  Sense strand starting at position 3056 of SEQ ID NO: 3602
guaauacauuguccaaagu

SEQ ID NO: 280451 - RNA, 19 nt, Artificial Sequence
  Description of Artificial Sequence: Synthetic oligonucleotide
  Antisense strand to SEQ ID NO: 280450
acuuuggacaauguauuac

SEQ ID NO: 280452 - RNA, 19 nt, Artificial Sequence
  Description of Artificial Sequence: Synthetic oligonucleotide
  Sense strand starting at position 3066 of SEQ ID NO: 3602
guccaaaguuuaucuucca

SEQ ID NO: 280453 - RNA, 19 nt, Artificial Sequence
  Description of Artificial Sequence: Synthetic oligonucleotide
  Antisense strand to SEQ ID NO: 280452
uggaagauaaacuuuggac

SEQ ID NO: 280454 - RNA, 19 nt, Artificial Sequence
  Description of Artificial Sequence: Synthetic oligonucleotide
  Sense strand starting at position 3110 of SEQ ID NO: 3602
uccugagacuuacugcaga

SEQ ID NO: 280455 - RNA, 19 nt, Artificial Sequence
  Description of Artificial Sequence: Synthetic oligonucleotide
  Antisense strand to SEQ ID NO: 280454
ucugcaguaagucucagga

SEQ ID NO: 280456 - RNA, 19 nt, Artificial Sequence
  Description of Artificial Sequence: Synthetic oligonucleotide
  Sense strand starting at position 3226 of SEQ ID NO: 3602
gccuuaguugaugaacuua

SEQ ID NO: 280457 - RNA, 19 nt, Artificial Sequence
  Description of Artificial Sequence: Synthetic oligonucleotide
  Antisense strand to SEQ ID NO: 280456
uaaguucaucaacuaaggc

SEQ ID NO: 280458 - RNA, 19 nt, Artificial Sequence
  Description of Artificial Sequence: Synthetic oligonucleotide
  Sense strand starting at position 3257 of SEQ ID NO: 3602
cgaguuugguuucugaaau

SEQ ID NO: 280459 - RNA, 19 nt, Artificial Sequence
  Description of Artificial Sequence: Synthetic oligonucleotide
  Antisense strand to SEQ ID NO: 280458
auuucagaaaccaaacucg

SEQ ID NO: 280460 - RNA, 19 nt, Artificial Sequence
  Description of Artificial Sequence: Synthetic oligonucleotide
  Sense strand starting at position 3275 of SEQ ID NO: 3602
ugaacauguugguuucuga

SEQ ID NO: 280461 - RNA, 19 nt, Artificial Sequence
  Description of Artificial Sequence: Synthetic oligonucleotide
  Antisense strand to SEQ ID NO: 280460
ucagaaaccaacauguuca

SEQ ID NO: 280462 - RNA, 19 nt, Artificial Sequence
  Description of Artificial Sequence: Synthetic oligonucleotide
  Sense strand starting at position 3278 of SEQ ID NO: 3602
acauguugguuucugaaau

SEQ ID NO: 280463 - RNA, 19 nt, Artificial Sequence
  Description of Artificial Sequence: Synthetic oligonucleotide
  Antisense strand to SEQ ID NO: 280462
auuucagaaaccaacaugu

SEQ ID NO: 280464 - RNA, 19 nt, Artificial Sequence
  Description of Artificial Sequence: Synthetic oligonucleotide
  Sense strand starting at position 3694 of SEQ ID NO: 3602
gcaagauucugucuugagg

SEQ ID NO: 280465 - RNA, 19 nt, Artificial Sequence
  Description of Artificial Sequence: Synthetic oligonucleotide
  Antisense strand to SEQ ID NO: 280464
ccucaagacagaaucuugc

SEQ ID NO: 280466 - RNA, 19 nt, Artificial Sequence
  Description of Artificial Sequence: Synthetic oligonucleotide
  Sense strand starting at position 3738 of SEQ ID NO: 3602
ugaccugagucacuaguaa

SEQ ID NO: 280467 - RNA, 19 nt, Artificial Sequence
  Description of Artificial Sequence: Synthetic oligonucleotide
  Antisense strand to SEQ ID NO: 280466
uuacuagugacucagguca

SEQ ID NO: 280468 - RNA, 19 nt, Artificial Sequence
  Description of Artificial Sequence: Synthetic oligonucleotide
  Sense strand starting at position 3855 of SEQ ID NO: 3602
ugggaaguauacucccaaa

SEQ ID NO: 280469 - RNA, 19 nt, Artificial Sequence
  Description of Artificial Sequence: Synthetic oligonucleotide
  Antisense strand to SEQ ID NO: 280468
uuugggaguauacuuccca

SEQ ID NO: 280470 - RNA, 19 nt, Artificial Sequence
  Description of Artificial Sequence: Synthetic oligonucleotide
  Sense strand starting at position 100 of SEQ ID NO: 3603
ucugauguacauuaaagua

SEQ ID NO: 280471 - RNA, 19 nt, Artificial Sequence
  Description of Artificial Sequence: Synthetic oligonucleotide
  Antisense strand to SEQ ID NO: 280470
uacuuuaauguacaucaga

SEQ ID NO: 280472 - RNA, 19 nt, Artificial Sequence
  Description of Artificial Sequence: Synthetic oligonucleotide
  Sense strand starting at position 116 of SEQ ID NO: 3603
guaugagaaucacugguca

SEQ ID NO: 280473 - RNA, 19 nt, Artificial Sequence
  Description of Artificial Sequence: Synthetic oligonucleotide
  Antisense strand to SEQ ID NO: 280472
ugaccagugauucucauac

SEQ ID NO: 280474 - RNA, 19 nt, Artificial Sequence
  Description of Artificial Sequence: Synthetic oligonucleotide
  Sense strand starting at position 160 of SEQ ID NO: 3603
uauuuaguuugggaagaug

SEQ ID NO: 280475 - RNA, 19 nt, Artificial Sequence
  Description of Artificial Sequence: Synthetic oligonucleotide
  Antisense strand to SEQ ID NO: 280474
caucuucccaaacuaaaua

SEQ ID NO: 280476 - RNA, 19 nt, Artificial Sequence
  Description of Artificial Sequence: Synthetic oligonucleotide
  Sense strand starting at position 168 of SEQ ID NO: 3603
uugggaagauguccauaac

SEQ ID NO: 280477 - RNA, 19 nt, Artificial Sequence
  Description of Artificial Sequence: Synthetic oligonucleotide
  Antisense strand to SEQ ID NO: 280476
guuauggacaucuucccaa

SEQ ID NO: 280478 - RNA, 19 nt, Artificial Sequence
  Description of Artificial Sequence: Synthetic oligonucleotide
  Sense strand starting at position 394 of SEQ ID NO: 3603
acuauuguaguccacaaua

SEQ ID NO: 280479 - RNA, 19 nt, Artificial Sequence
  Description of Artificial Sequence: Synthetic oligonucleotide
  Antisense strand to SEQ ID NO: 280478
uauuguggacuacaauagu

SEQ ID NO: 280480 - RNA, 19 nt, Artificial Sequence
  Description of Artificial Sequence: Synthetic oligonucleotide
  Sense strand starting at position 541 of SEQ ID NO: 3603
uguauauagcucuggacac

SEQ ID NO: 280481 - RNA, 19 nt, Artificial Sequence
  Description of Artificial Sequence: Synthetic oligonucleotide
  Antisense strand to SEQ ID NO: 280480
guguccagagcuauauaca

SEQ ID NO: 280482 - RNA, 19 nt, Artificial Sequence
  Description of Artificial Sequence: Synthetic oligonucleotide
  Sense strand starting at position 592 of SEQ ID NO: 3603
gguuaugucuuacugacac

SEQ ID NO: 280483 - RNA, 19 nt, Artificial Sequence
  Description of Artificial Sequence: Synthetic oligonucleotide
  Antisense strand to SEQ ID NO: 280482
gugucaguaagacauaacc

SEQ ID NO: 280484 - RNA, 19 nt, Artificial Sequence
  Description of Artificial Sequence: Synthetic oligonucleotide
  Sense strand starting at position 622 of SEQ ID NO: 3603
guaccacaggucuaacuau

SEQ ID NO: 280485 - RNA, 19 nt, Artificial Sequence
  Description of Artificial Sequence: Synthetic oligonucleotide
  Antisense strand to SEQ ID NO: 280484
auaguuagaccugugguac

SEQ ID NO: 280486 - RNA, 19 nt, Artificial Sequence
  Description of Artificial Sequence: Synthetic oligonucleotide
  Sense strand starting at position 793 of SEQ ID NO: 3603
acagaaaccuucucgaucu

SEQ ID NO: 280487 - RNA, 19 nt, Artificial Sequence
  Description of Artificial Sequence: Synthetic oligonucleotide
  Antisense strand to SEQ ID NO: 280486
agaucgagaagguuucugu

SEQ ID NO: 280488 - RNA, 19 nt, Artificial Sequence
  Description of Artificial Sequence: Synthetic oligonucleotide
  Sense strand starting at position 1105 of SEQ ID NO: 3603
aaauuaguugggcguaaua

SEQ ID NO: 280489 - RNA, 19 nt, Artificial Sequence
  Description of Artificial Sequence: Synthetic oligonucleotide
  Antisense strand to SEQ ID NO: 280488
uauuacgcccaacuaauuu

SEQ ID NO: 280490 - RNA, 19 nt, Artificial Sequence
  Description of Artificial Sequence: Synthetic oligonucleotide
  Sense strand starting at position 1305 of SEQ ID NO: 3603
gagugugacagauggacaa

SEQ ID NO: 280491 - RNA, 19 nt, Artificial Sequence
  Description of Artificial Sequence: Synthetic oligonucleotide
  Antisense strand to SEQ ID NO: 280490
uuguccaucugucacacuc

SEQ ID NO: 280492 - RNA, 19 nt, Artificial Sequence
  Description of Artificial Sequence: Synthetic oligonucleotide
  Sense strand starting at position 1403 of SEQ ID NO: 3603
aaguuuacugcuuacgaua

SEQ ID NO: 280493 - RNA, 19 nt, Artificial Sequence
  Description of Artificial Sequence: Synthetic oligonucleotide
  Antisense strand to SEQ ID NO: 280492
uaucguaagcaguaaacuu

SEQ ID NO: 280494 - RNA, 19 nt, Artificial Sequence
  Description of Artificial Sequence: Synthetic oligonucleotide
  Sense strand starting at position 1412 of SEQ ID NO: 3603
gcuuacgauaaugaguuaa

SEQ ID NO: 280495 - RNA, 19 nt, Artificial Sequence
  Description of Artificial Sequence: Synthetic oligonucleotide
  Antisense strand to SEQ ID NO: 280494
uuaacucauuaucguaagc

SEQ ID NO: 280496 - RNA, 19 nt, Artificial Sequence
  Description of Artificial Sequence: Synthetic oligonucleotide
  Sense strand starting at position 1414 of SEQ ID NO: 3603
uuacgauaaugaguuaaac

SEQ ID NO: 280497 - RNA, 19 nt, Artificial Sequence
  Description of Artificial Sequence: Synthetic oligonucleotide
  Antisense strand to SEQ ID NO: 280496
guuuaacucauuaucguaa

SEQ ID NO: 280498 - RNA, 19 nt, Artificial Sequence
  Description of Artificial Sequence: Synthetic oligonucleotide
  Sense strand starting at position 1896 of SEQ ID NO: 3603
gaauuuagauagugacaag

SEQ ID NO: 280499 - RNA, 19 nt, Artificial Sequence
  Description of Artificial Sequence: Synthetic oligonucleotide
  Antisense strand to SEQ ID NO: 280498
cuugucacuaucuaaauuc

SEQ ID NO: 280500 - RNA, 19 nt, Artificial Sequence
  Description of Artificial Sequence: Synthetic oligonucleotide
  Sense strand starting at position 2055 of SEQ ID NO: 3603
ugagucuugcccuaguaag

SEQ ID NO: 280501 - RNA, 19 nt, Artificial Sequence
  Description of Artificial Sequence: Synthetic oligonucleotide
  Antisense strand to SEQ ID NO: 280500
cuuacuagggcaagacuca

SEQ ID NO: 280502 - RNA, 19 nt, Artificial Sequence
  Description of Artificial Sequence: Synthetic oligonucleotide
  Sense strand starting at position 2095 of SEQ ID NO: 3603
caggucuguuaagucuuua

SEQ ID NO: 280503 - RNA, 19 nt, Artificial Sequence
  Description of Artificial Sequence: Synthetic oligonucleotide
  Antisense strand to SEQ ID NO: 280502
uaaagacuuaacagaccug

SEQ ID NO: 280504 - RNA, 19 nt, Artificial Sequence
  Description of Artificial Sequence: Synthetic oligonucleotide
  Sense strand starting at position 2119 of SEQ ID NO: 3603
cccucagcugguuaauaaa

SEQ ID NO: 280505 - RNA, 19 nt, Artificial Sequence
  Description of Artificial Sequence: Synthetic oligonucleotide
  Antisense strand to SEQ ID NO: 280504
uuuauuaaccagcugaggg

SEQ ID NO: 280506 - RNA, 19 nt, Artificial Sequence
  Description of Artificial Sequence: Synthetic oligonucleotide
  Sense strand starting at position 2197 of SEQ ID NO: 3603
aacagaagccaaggugaua

SEQ ID NO: 280507 - RNA, 19 nt, Artificial Sequence
  Description of Artificial Sequence: Synthetic oligonucleotide
  Antisense strand to SEQ ID NO: 280506
uaucaccuuggcuucuguu

SEQ ID NO: 280508 - RNA, 19 nt, Artificial Sequence
  Description of Artificial Sequence: Synthetic oligonucleotide
  Sense strand starting at position 2235 of SEQ ID NO: 3603
uguggauaagauuguauua

SEQ ID NO: 280509 - RNA, 19 nt, Artificial Sequence
  Description of Artificial Sequence: Synthetic oligonucleotide
  Antisense strand to SEQ ID NO: 280508
uaauacaaucuuauccaca

SEQ ID NO: 280510 - RNA, 19 nt, Artificial Sequence
  Description of Artificial Sequence: Synthetic oligonucleotide
  Sense strand starting at position 2291 of SEQ ID NO: 3603
ccauauuuguaguuaguac

SEQ ID NO: 280511 - RNA, 19 nt, Artificial Sequence
  Description of Artificial Sequence: Synthetic oligonucleotide
  Antisense strand to SEQ ID NO: 280510
guacuaacuacaaauaugg

SEQ ID NO: 280512 - RNA, 19 nt, Artificial Sequence
  Description of Artificial Sequence: Synthetic oligonucleotide
  Sense strand starting at position 2357 of SEQ ID NO: 3603
auuuauugauuguaaggca

SEQ ID NO: 280513 - RNA, 19 nt, Artificial Sequence
  Description of Artificial Sequence: Synthetic oligonucleotide
  Antisense strand to SEQ ID NO: 280512
ugccuuacaaucaauaaau

SEQ ID NO: 280514 - RNA, 19 nt, Artificial Sequence
  Description of Artificial Sequence: Synthetic oligonucleotide
  Sense strand starting at position 2424 of SEQ ID NO: 3603
caagaaguugcucaguuga

SEQ ID NO: 280515 - RNA, 19 nt, Artificial Sequence
  Description of Artificial Sequence: Synthetic oligonucleotide
  Antisense strand to SEQ ID NO: 280514
ucaacugagcaacuucuug

SEQ ID NO: 280516 - RNA, 19 nt, Artificial Sequence
  Description of Artificial Sequence: Synthetic oligonucleotide
  Sense strand starting at position 2426 of SEQ ID NO: 3603
agaaguugcucaguugauu

SEQ ID NO: 280517 - RNA, 19 nt, Artificial Sequence
  Description of Artificial Sequence: Synthetic oligonucleotide
  Antisense strand to SEQ ID NO: 280516
aaucaacugagcaacuucu

SEQ ID NO: 280518 - RNA, 19 nt, Artificial Sequence
  Description of Artificial Sequence: Synthetic oligonucleotide
  Sense strand starting at position 2434 of SEQ ID NO: 3603
cucaguugauuguccugaa

SEQ ID NO: 280519 - RNA, 19 nt, Artificial Sequence
  Description of Artificial Sequence: Synthetic oligonucleotide
  Antisense strand to SEQ ID NO: 280518
uucaggacaaucaacugag

SEQ ID NO: 280520 - RNA, 19 nt, Artificial Sequence
  Description of Artificial Sequence: Synthetic oligonucleotide
  Sense strand starting at position 2435 of SEQ ID NO: 3603
ucaguugauuguccugaaa

SEQ ID NO: 280521 - RNA, 19 nt, Artificial Sequence
  Description of Artificial Sequence: Synthetic oligonucleotide
  Antisense strand to SEQ ID NO: 280520
uuucaggacaaucaacuga

SEQ ID NO: 280522 - RNA, 19 nt, Artificial Sequence
  Description of Artificial Sequence: Synthetic oligonucleotide
  Sense strand starting at position 2438 of SEQ ID NO: 3603
guugauuguccugaaauaa

SEQ ID NO: 280523 - RNA, 19 nt, Artificial Sequence
  Description of Artificial Sequence: Synthetic oligonucleotide
  Antisense strand to SEQ ID NO: 280522
uuauuucaggacaaucaac

SEQ ID NO: 280524 - RNA, 19 nt, Artificial Sequence
  Description of Artificial Sequence: Synthetic oligonucleotide
  Sense strand starting at position 3094 of SEQ ID NO: 3603
gcaucugagcuuuauauug

SEQ ID NO: 280525 - RNA, 19 nt, Artificial Sequence
  Description of Artificial Sequence: Synthetic oligonucleotide
  Antisense strand to SEQ ID NO: 280524
caauauaaagcucagaugc

SEQ ID NO: 280526 - RNA, 19 nt, Artificial Sequence
  Description of Artificial Sequence: Synthetic oligonucleotide
  Sense strand starting at position 3293 of SEQ ID NO: 3603
ugccuugcuccgucaauca

SEQ ID NO: 280527 - RNA, 19 nt, Artificial Sequence
  Description of Artificial Sequence: Synthetic oligonucleotide
  Antisense strand to SEQ ID NO: 280526
ugauugacggagcaaggca

SEQ ID NO: 280528 - RNA, 19 nt, Artificial Sequence
  Description of Artificial Sequence: Synthetic oligonucleotide
  Sense strand starting at position 3304 of SEQ ID NO: 3603
gucaaucauuggccaggau

SEQ ID NO: 280529 - RNA, 19 nt, Artificial Sequence
  Description of Artificial Sequence: Synthetic oligonucleotide
  Antisense strand to SEQ ID NO: 280528
auccuggccaaugauugac

SEQ ID NO: 280530 - RNA, 19 nt, Artificial Sequence
  Description of Artificial Sequence: Synthetic oligonucleotide
  Sense strand starting at position 3387 of SEQ ID NO: 3603
ccaagaauagcagguccuu

SEQ ID NO: 280531 - RNA, 19 nt, Artificial Sequence
  Description of Artificial Sequence: Synthetic oligonucleotide
  Antisense strand to SEQ ID NO: 280530
aaggaccugcuauucuugg

SEQ ID NO: 280532 - RNA, 19 nt, Artificial Sequence
  Description of Artificial Sequence: Synthetic oligonucleotide
  Sense strand starting at position 3481 of SEQ ID NO: 3603
cagugagucuuucuuuaag

SEQ ID NO: 280533 - RNA, 19 nt, Artificial Sequence
  Description of Artificial Sequence: Synthetic oligonucleotide
  Antisense strand to SEQ ID NO: 280532
cuuaaagaaagacucacug

SEQ ID NO: 280534 - RNA, 19 nt, Artificial Sequence
  Description of Artificial Sequence: Synthetic oligonucleotide
  Sense strand starting at position 3491 of SEQ ID NO: 3603
uucuuuaagggaggucuga

SEQ ID NO: 280535 - RNA, 19 nt, Artificial Sequence
  Description of Artificial Sequence: Synthetic oligonucleotide
  Antisense strand to SEQ ID NO: 280534
ucagaccucccuuaaagaa

SEQ ID NO: 280536 - RNA, 19 nt, Artificial Sequence
  Description of Artificial Sequence: Synthetic oligonucleotide
  Sense strand starting at position 3618 of SEQ ID NO: 3603
ucguuuagaaucugcaaug

SEQ ID NO: 280537 - RNA, 19 nt, Artificial Sequence
  Description of Artificial Sequence: Synthetic oligonucleotide
  Antisense strand to SEQ ID NO: 280536
cauugcagauucuaaacga

SEQ ID NO: 280538 - RNA, 19 nt, Artificial Sequence
  Description of Artificial Sequence: Synthetic oligonucleotide
  Sense strand starting at position 3644 of SEQ ID NO: 3603
gucuauaguuuaccuggua

SEQ ID NO: 280539 - RNA, 19 nt, Artificial Sequence
  Description of Artificial Sequence: Synthetic oligonucleotide
  Antisense strand to SEQ ID NO: 280538
uaccagguaaacuauagac

SEQ ID NO: 280540 - RNA, 19 nt, Artificial Sequence
  Description of Artificial Sequence: Synthetic oligonucleotide
  Sense strand starting at position 3645 of SEQ ID NO: 3603
ucuauaguuuaccugguaa

SEQ ID NO: 280541 - RNA, 19 nt, Artificial Sequence
  Description of Artificial Sequence: Synthetic oligonucleotide
  Antisense strand to SEQ ID NO: 280540
uuaccagguaaacuauaga

SEQ ID NO: 280542 - RNA, 19 nt, Artificial Sequence
  Description of Artificial Sequence: Synthetic oligonucleotide
  Sense strand starting at position 3689 of SEQ ID NO: 3603
gauauuugcucuucuguga

SEQ ID NO: 280543 - RNA, 19 nt, Artificial Sequence
  Description of Artificial Sequence: Synthetic oligonucleotide
  Antisense strand to SEQ ID NO: 280542
ucacagaagagcaaauauc

SEQ ID NO: 280544 - RNA, 19 nt, Artificial Sequence
  Description of Artificial Sequence: Synthetic oligonucleotide
  Sense strand starting at position 3693 of SEQ ID NO: 3603
uuugcucuucugugaagac

SEQ ID NO: 280545 - RNA, 19 nt, Artificial Sequence
  Description of Artificial Sequence: Synthetic oligonucleotide
  Antisense strand to SEQ ID NO: 280544
gucuucacagaagagcaaa

SEQ ID NO: 280546 - RNA, 19 nt, Artificial Sequence
  Description of Artificial Sequence: Synthetic oligonucleotide
  Sense strand starting at position 3766 of SEQ ID NO: 3603
ucgauuggauucucacuca

SEQ ID NO: 280547 - RNA, 19 nt, Artificial Sequence
  Description of Artificial Sequence: Synthetic oligonucleotide
  Antisense strand to SEQ ID NO: 280546
ugagugagaauccaaucga

SEQ ID NO: 280548 - RNA, 19 nt, Artificial Sequence
  Description of Artificial Sequence: Synthetic oligonucleotide
  Sense strand starting at position 3839 of SEQ ID NO: 3603
uggacaggguguuuaaaga

SEQ ID NO: 280549 - RNA, 19 nt, Artificial Sequence
  Description of Artificial Sequence: Synthetic oligonucleotide
  Antisense strand to SEQ ID NO: 280548
ucuuuaaacacccugucca

SEQ ID NO: 280550 - RNA, 19 nt, Artificial Sequence
  Description of Artificial Sequence: Synthetic oligonucleotide
  Sense strand starting at position 2072 of SEQ ID NO: 3604
aaacaauggugcggugaaa

SEQ ID NO: 280551 - RNA, 19 nt, Artificial Sequence
  Description of Artificial Sequence: Synthetic oligonucleotide
  Antisense strand to SEQ ID NO: 280550
uuucaccgcaccauuguuu

SEQ ID NO: 280552 - RNA, 19 nt, Artificial Sequence
  Description of Artificial Sequence: Synthetic oligonucleotide
  Sense strand starting at position 2205 of SEQ ID NO: 3604
gucucugugagaggucaga

SEQ ID NO: 280553 - RNA, 19 nt, Artificial Sequence
  Description of Artificial Sequence: Synthetic oligonucleotide
  Antisense strand to SEQ ID NO: 280552
ucugaccucucacagagac

SEQ ID NO: 280554 - RNA, 19 nt, Artificial Sequence
  Description of Artificial Sequence: Synthetic oligonucleotide
  Sense strand starting at position 2373 of SEQ ID NO: 3604
acccaagacuuguauuaga

SEQ ID NO: 280555 - RNA, 19 nt, Artificial Sequence
  Description of Artificial Sequence: Synthetic oligonucleotide
  Antisense strand to SEQ ID NO: 280554
ucuaauacaagucuugggu

SEQ ID NO: 280556 - RNA, 19 nt, Artificial Sequence
  Description of Artificial Sequence: Synthetic oligonucleotide
  Sense strand starting at position 2378 of SEQ ID NO: 3604
agacuuguauuagacugaa

SEQ ID NO: 280557 - RNA, 19 nt, Artificial Sequence
  Description of Artificial Sequence: Synthetic oligonucleotide
  Antisense strand to SEQ ID NO: 280556
uucagucuaauacaagucu

SEQ ID NO: 280558 - RNA, 19 nt, Artificial Sequence
  Description of Artificial Sequence: Synthetic oligonucleotide
  Sense strand starting at position 2381 of SEQ ID NO: 3604
cuuguauuagacugaaucu

SEQ ID NO: 280559 - RNA, 19 nt, Artificial Sequence
  Description of Artificial Sequence: Synthetic oligonucleotide
  Antisense strand to SEQ ID NO: 280558
agauucagucuaauacaag

SEQ ID NO: 280560 - RNA, 19 nt, Artificial Sequence
  Description of Artificial Sequence: Synthetic oligonucleotide
  Sense strand starting at position 2480 of SEQ ID NO: 3604
agagcuuagaaauguaugu

SEQ ID NO: 280561 - RNA, 19 nt, Artificial Sequence
  Description of Artificial Sequence: Synthetic oligonucleotide
  Antisense strand to SEQ ID NO: 280560
acauacauuucuaagcucu

SEQ ID NO: 280562 - RNA, 19 nt, Artificial Sequence
  Description of Artificial Sequence: Synthetic oligonucleotide
  Sense strand starting at position 2487 of SEQ ID NO: 3604
agaaauguaugucguccau

SEQ ID NO: 280563 - RNA, 19 nt, Artificial Sequence
  Description of Artificial Sequence: Synthetic oligonucleotide
  Antisense strand to SEQ ID NO: 280562
auggacgacauacauuucu

SEQ ID NO: 280564 - RNA, 19 nt, Artificial Sequence
  Description of Artificial Sequence: Synthetic oligonucleotide
  Sense strand starting at position 2489 of SEQ ID NO: 3604
aaauguaugucguccaugu

SEQ ID NO: 280565 - RNA, 19 nt, Artificial Sequence
  Description of Artificial Sequence: Synthetic oligonucleotide
  Antisense strand to SEQ ID NO: 280564
acauggacgacauacauuu

SEQ ID NO: 280566 - RNA, 19 nt, Artificial Sequence
  Description of Artificial Sequence: Synthetic oligonucleotide
  Sense strand starting at position 2491 of SEQ ID NO: 3604
auguaugucguccauguau

SEQ ID NO: 280567 - RNA, 19 nt, Artificial Sequence
  Description of Artificial Sequence: Synthetic oligonucleotide
  Antisense strand to SEQ ID NO: 280566
auacauggacgacauacau

SEQ ID NO: 280568 - RNA, 19 nt, Artificial Sequence
  Description of Artificial Sequence: Synthetic oligonucleotide
  Sense strand starting at position 2493 of SEQ ID NO: 3604
guaugucguccauguauua

SEQ ID NO: 280569 - RNA, 19 nt, Artificial Sequence
  Description of Artificial Sequence: Synthetic oligonucleotide
  Antisense strand to SEQ ID NO: 280568
uaauacauggacgacauac

SEQ ID NO: 280570 - RNA, 19 nt, Artificial Sequence
  Description of Artificial Sequence: Synthetic oligonucleotide
  Sense strand starting at position 2500 of SEQ ID NO: 3604
guccauguauuauagugua

SEQ ID NO: 280571 - RNA, 19 nt, Artificial Sequence
  Description of Artificial Sequence: Synthetic oligonucleotide
  Antisense strand to SEQ ID NO: 280570
uacacuauaauacauggac

SEQ ID NO: 280572 - RNA, 19 nt, Artificial Sequence
  Description of Artificial Sequence: Synthetic oligonucleotide
  Sense strand starting at position 2503 of SEQ ID NO: 3604
cauguauuauaguguaagu

SEQ ID NO: 280573 - RNA, 19 nt, Artificial Sequence
  Description of Artificial Sequence: Synthetic oligonucleotide
  Antisense strand to SEQ ID NO: 280572
acuuacacuauaauacaug

SEQ ID NO: 280574 - RNA, 19 nt, Artificial Sequence
  Description of Artificial Sequence: Synthetic oligonucleotide
  Sense strand starting at position 2620 of SEQ ID NO: 3604
aguggagaguguaggauau

SEQ ID NO: 280575 - RNA, 19 nt, Artificial Sequence
  Description of Artificial Sequence: Synthetic oligonucleotide
  Antisense strand to SEQ ID NO: 280574
auauccuacacucuccacu

SEQ ID NO: 280576 - RNA, 19 nt, Artificial Sequence
  Description of Artificial Sequence: Synthetic oligonucleotide
  Sense strand starting at position 2708 of SEQ ID NO: 3604
uuucauuggugaguaugga

SEQ ID NO: 280577 - RNA, 19 nt, Artificial Sequence
  Description of Artificial Sequence: Synthetic oligonucleotide
  Antisense strand to SEQ ID NO: 280576
uccauacucaccaaugaaa

SEQ ID NO: 280578 - RNA, 19 nt, Artificial Sequence
  Description of Artificial Sequence: Synthetic oligonucleotide
  Sense strand starting at position 2709 of SEQ ID NO: 3604
uucauuggugaguauggaa

SEQ ID NO: 280579 - RNA, 19 nt, Artificial Sequence
  Description of Artificial Sequence: Synthetic oligonucleotide
  Antisense strand to SEQ ID NO: 280578
uuccauacucaccaaugaa

SEQ ID NO: 280580 - RNA, 19 nt, Artificial Sequence
  Description of Artificial Sequence: Synthetic oligonucleotide
  Sense strand starting at position 2712 of SEQ ID NO: 3604
auuggugaguauggaagau

SEQ ID NO: 280581 - RNA, 19 nt, Artificial Sequence
  Description of Artificial Sequence: Synthetic oligonucleotide
  Antisense strand to SEQ ID NO: 280580
aucuuccauacucaccaau

SEQ ID NO: 280582 - RNA, 19 nt, Artificial Sequence
  Description of Artificial Sequence: Synthetic oligonucleotide
  Sense strand starting at position 2716 of SEQ ID NO: 3604
gugaguauggaagaucagu

SEQ ID NO: 280583 - RNA, 19 nt, Artificial Sequence
  Description of Artificial Sequence: Synthetic oligonucleotide
  Antisense strand to SEQ ID NO: 280582
acugaucuuccauacucac

SEQ ID NO: 280584 - RNA, 19 nt, Artificial Sequence
  Description of Artificial Sequence: Synthetic oligonucleotide
  Sense strand starting at position 2721 of SEQ ID NO: 3604
uauggaagaucagucacuu

SEQ ID NO: 280585 - RNA, 19 nt, Artificial Sequence
  Description of Artificial Sequence: Synthetic oligonucleotide
  Antisense strand to SEQ ID NO: 280584
aagugacugaucuuccaua

SEQ ID NO: 280586 - RNA, 19 nt, Artificial Sequence
  Description of Artificial Sequence: Synthetic oligonucleotide
  Sense strand starting at position 2759 of SEQ ID NO: 3604
augaaacuaagguguugau

SEQ ID NO: 280587 - RNA, 19 nt, Artificial Sequence
  Description of Artificial Sequence: Synthetic oligonucleotide
  Antisense strand to SEQ ID NO: 280586
aucaacaccuuaguuucau

SEQ ID NO: 280588 - RNA, 19 nt, Artificial Sequence
  Description of Artificial Sequence: Synthetic oligonucleotide
  Sense strand starting at position 2818 of SEQ ID NO: 3604
gucaaauuguguucuggag

SEQ ID NO: 280589 - RNA, 19 nt, Artificial Sequence
  Description of Artificial Sequence: Synthetic oligonucleotide
  Antisense strand to SEQ ID NO: 280588
cuccagaacacaauuugac

SEQ ID NO: 280590 - RNA, 19 nt, Artificial Sequence
  Description of Artificial Sequence: Synthetic oligonucleotide
  Sense strand starting at position 2850 of SEQ ID NO: 3604
augaauguuugacaucgau

SEQ ID NO: 280591 - RNA, 19 nt, Artificial Sequence
  Description of Artificial Sequence: Synthetic oligonucleotide
  Antisense strand to SEQ ID NO: 280590
aucgaugucaaacauucau

SEQ ID NO: 280592 - RNA, 19 nt, Artificial Sequence
  Description of Artificial Sequence: Synthetic oligonucleotide
  Sense strand starting at position 2853 of SEQ ID NO: 3604
aauguuugacaucgaugua

SEQ ID NO: 280593 - RNA, 19 nt, Artificial Sequence
  Description of Artificial Sequence: Synthetic oligonucleotide
  Antisense strand to SEQ ID NO: 280592
uacaucgaugucaaacauu

SEQ ID NO: 280594 - RNA, 19 nt, Artificial Sequence
  Description of Artificial Sequence: Synthetic oligonucleotide
  Sense strand starting at position 2854 of SEQ ID NO: 3604
auguuugacaucgauguac

SEQ ID NO: 280595 - RNA, 19 nt, Artificial Sequence
  Description of Artificial Sequence: Synthetic oligonucleotide
  Antisense strand to SEQ ID NO: 280594
guacaucgaugucaaacau

SEQ ID NO: 280596 - RNA, 19 nt, Artificial Sequence
  Description of Artificial Sequence: Synthetic oligonucleotide
  Sense strand starting at position 2856 of SEQ ID NO: 3604
guuugacaucgauguacau

SEQ ID NO: 280597 - RNA, 19 nt, Artificial Sequence
  Description of Artificial Sequence: Synthetic oligonucleotide
  Antisense strand to SEQ ID NO: 280596
auguacaucgaugucaaac

SEQ ID NO: 280598 - RNA, 19 nt, Artificial Sequence
  Description of Artificial Sequence: Synthetic oligonucleotide
  Sense strand starting at position 2865 of SEQ ID NO: 3604
cgauguacauaacagaaau

SEQ ID NO: 280599 - RNA, 19 nt, Artificial Sequence
  Description of Artificial Sequence: Synthetic oligonucleotide
  Antisense strand to SEQ ID NO: 280598
auuucuguuauguacaucg

SEQ ID NO: 280600 - RNA, 19 nt, Artificial Sequence
  Description of Artificial Sequence: Synthetic oligonucleotide
  Sense strand starting at position 2997 of SEQ ID NO: 3604
agucauucuugagacauaa

SEQ ID NO: 280601 - RNA, 19 nt, Artificial Sequence
  Description of Artificial Sequence: Synthetic oligonucleotide
  Antisense strand to SEQ ID NO: 280600
uuaugucucaagaaugacu

SEQ ID NO: 280602 - RNA, 19 nt, Artificial Sequence
  Description of Artificial Sequence: Synthetic oligonucleotide
  Sense strand starting at position 3079 of SEQ ID NO: 3604
ucaauuaacggccauauaa

SEQ ID NO: 280603 - RNA, 19 nt, Artificial Sequence
  Description of Artificial Sequence: Synthetic oligonucleotide
  Antisense strand to SEQ ID NO: 280602
uuauauggccguuaauuga

SEQ ID NO: 280604 - RNA, 19 nt, Artificial Sequence
  Description of Artificial Sequence: Synthetic oligonucleotide
  Sense strand starting at position 3087 of SEQ ID NO: 3604
cggccauauaauuguuagu

SEQ ID NO: 280605 - RNA, 19 nt, Artificial Sequence
  Description of Artificial Sequence: Synthetic oligonucleotide
  Antisense strand to SEQ ID NO: 280604
acuaacaauuauauggccg

SEQ ID NO: 280606 - RNA, 19 nt, Artificial Sequence
  Description of Artificial Sequence: Synthetic oligonucleotide
  Sense strand starting at position 3089 of SEQ ID NO: 3604
gccauauaauuguuaguuu

SEQ ID NO: 280607 - RNA, 19 nt, Artificial Sequence
  Description of Artificial Sequence: Synthetic oligonucleotide
  Antisense strand to SEQ ID NO: 280606
aaacuaacaauuauauggc

SEQ ID NO: 280608 - RNA, 19 nt, Artificial Sequence
  Description of Artificial Sequence: Synthetic oligonucleotide
  Sense strand starting at position 3286 of SEQ ID NO: 3604
uuugaucaugcuugguaca

SEQ ID NO: 280609 - RNA, 19 nt, Artificial Sequence
  Description of Artificial Sequence: Synthetic oligonucleotide
  Antisense strand to SEQ ID NO: 280608
uguaccaagcaugaucaaa

SEQ ID NO: 280610 - RNA, 19 nt, Artificial Sequence
  Description of Artificial Sequence: Synthetic oligonucleotide
  Sense strand starting at position 3288 of SEQ ID NO: 3604
ugaucaugcuugguacacu

SEQ ID NO: 280611 - RNA, 19 nt, Artificial Sequence
  Description of Artificial Sequence: Synthetic oligonucleotide
  Antisense strand to SEQ ID NO: 280610
aguguaccaagcaugauca

SEQ ID NO: 280612 - RNA, 19 nt, Artificial Sequence
  Description of Artificial Sequence: Synthetic oligonucleotide
  Sense strand starting at position 3563 of SEQ ID NO: 3604
gcgagagaugcuugaaucu

SEQ ID NO: 280613 - RNA, 19 nt, Artificial Sequence
  Description of Artificial Sequence: Synthetic oligonucleotide
  Antisense strand to SEQ ID NO: 280612
agauucaagcaucucucgc

SEQ ID NO: 280614 - RNA, 19 nt, Artificial Sequence
  Description of Artificial Sequence: Synthetic oligonucleotide
  Sense strand starting at position 3674 of SEQ ID NO: 3604
agacaauugugguagccca

SEQ ID NO: 280615 - RNA, 19 nt, Artificial Sequence
  Description of Artificial Sequence: Synthetic oligonucleotide
  Antisense strand to SEQ ID NO: 280614
ugggcuaccacaauugucu

SEQ ID NO: 280616 - RNA, 19 nt, Artificial Sequence
  Description of Artificial Sequence: Synthetic oligonucleotide
  Sense strand starting at position 3862 of SEQ ID NO: 3604
ugagucugauaaccacaua

SEQ ID NO: 280617 - RNA, 19 nt, Artificial Sequence
  Description of Artificial Sequence: Synthetic oligonucleotide
  Antisense strand to SEQ ID NO: 280616
uaugugguuaucagacuca

SEQ ID NO: 280618 - RNA, 19 nt, Artificial Sequence
  Description of Artificial Sequence: Synthetic oligonucleotide
  Sense strand starting at position 3890 of SEQ ID NO: 3604
gcauaaaucucccaguaga

SEQ ID NO: 280619 - RNA, 19 nt, Artificial Sequence
  Description of Artificial Sequence: Synthetic oligonucleotide
  Antisense strand to SEQ ID NO: 280618
ucuacugggagauuuaugc

SEQ ID NO: 280620 - RNA, 19 nt, Artificial Sequence
  Description of Artificial Sequence: Synthetic oligonucleotide
  Sense strand starting at position 496 of SEQ ID NO: 3605
gcugguauuuauucccuaa

SEQ ID NO: 280621 - RNA, 19 nt, Artificial Sequence
  Description of Artificial Sequence: Synthetic oligonucleotide
  Antisense strand to SEQ ID NO: 280620
uuagggaauaaauaccagc

SEQ ID NO: 280622 - RNA, 19 nt, Artificial Sequence
  Description of Artificial Sequence: Synthetic oligonucleotide
  Sense strand starting at position 680 of SEQ ID NO: 3605
uauugucacugucugggaa

SEQ ID NO: 280623 - RNA, 19 nt, Artificial Sequence
  Description of Artificial Sequence: Synthetic oligonucleotide
  Antisense strand to SEQ ID NO: 280622
uucccagacagugacaaua

SEQ ID NO: 280624 - RNA, 19 nt, Artificial Sequence
  Description of Artificial Sequence: Synthetic oligonucleotide
  Sense strand starting at position 683 of SEQ ID NO: 3605
ugucacugucugggaagau

SEQ ID NO: 280625 - RNA, 19 nt, Artificial Sequence
  Description of Artificial Sequence: Synthetic oligonucleotide
  Antisense strand to SEQ ID NO: 280624
aucuucccagacagugaca

SEQ ID NO: 280626 - RNA, 19 nt, Artificial Sequence
  Description of Artificial Sequence: Synthetic oligonucleotide
  Sense strand starting at position 711 of SEQ ID NO: 3605
gcuguugucagagauaagu

SEQ ID NO: 280627 - RNA, 19 nt, Artificial Sequence
  Description of Artificial Sequence: Synthetic oligonucleotide
  Antisense strand to SEQ ID NO: 280626
acuuaucucugacaacagc

SEQ ID NO: 280628 - RNA, 19 nt, Artificial Sequence
  Description of Artificial Sequence: Synthetic oligonucleotide
  Sense strand starting at position 788 of SEQ ID NO: 3605
ugagauaugguaugcaauu

SEQ ID NO: 280629 - RNA, 19 nt, Artificial Sequence
  Description of Artificial Sequence: Synthetic oligonucleotide
  Antisense strand to SEQ ID NO: 280628
aauugcauaccauaucuca

SEQ ID NO: 280630 - RNA, 19 nt, Artificial Sequence
  Description of Artificial Sequence: Synthetic oligonucleotide
  Sense strand starting at position 789 of SEQ ID NO: 3605
gagauaugguaugcaauug

SEQ ID NO: 280631 - RNA, 19 nt, Artificial Sequence
  Description of Artificial Sequence: Synthetic oligonucleotide
  Antisense strand to SEQ ID NO: 280630
caauugcauaccauaucuc

SEQ ID NO: 280632 - RNA, 19 nt, Artificial Sequence
  Description of Artificial Sequence: Synthetic oligonucleotide
  Sense strand starting at position 807 of SEQ ID NO: 3605
ggcuacuagacuuggagua

SEQ ID NO: 280633 - RNA, 19 nt, Artificial Sequence
  Description of Artificial Sequence: Synthetic oligonucleotide
  Antisense strand to SEQ ID NO: 280632
uacuccaagucuaguagcc

SEQ ID NO: 280634 - RNA, 19 nt, Artificial Sequence
  Description of Artificial Sequence: Synthetic oligonucleotide
  Sense strand starting at position 947 of SEQ ID NO: 3605
aaaggcugugugcaacauu

SEQ ID NO: 280635 - RNA, 19 nt, Artificial Sequence
  Description of Artificial Sequence: Synthetic oligonucleotide
  Antisense strand to SEQ ID NO: 280634
aauguugcacacagccuuu

SEQ ID NO: 280636 - RNA, 19 nt, Artificial Sequence
  Description of Artificial Sequence: Synthetic oligonucleotide
  Sense strand starting at position 1020 of SEQ ID NO: 3605
cugagaauguaaccacagu

SEQ ID NO: 280637 - RNA, 19 nt, Artificial Sequence
  Description of Artificial Sequence: Synthetic oligonucleotide
  Antisense strand to SEQ ID NO: 280636
acugugguuacauucucag

SEQ ID NO: 280638 - RNA, 19 nt, Artificial Sequence
  Description of Artificial Sequence: Synthetic oligonucleotide
  Sense strand starting at position 1064 of SEQ ID NO: 3605
uagaaaugauaugaugaug

SEQ ID NO: 280639 - RNA, 19 nt, Artificial Sequence
  Description of Artificial Sequence: Synthetic oligonucleotide
  Antisense strand to SEQ ID NO: 280638
caucaucauaucauuucua

SEQ ID NO: 280640 - RNA, 19 nt, Artificial Sequence
  Description of Artificial Sequence: Synthetic oligonucleotide
  Sense strand starting at position 1186 of SEQ ID NO: 3605
agagcuacgacagaaguau

SEQ ID NO: 280641 - RNA, 19 nt, Artificial Sequence
  Description of Artificial Sequence: Synthetic oligonucleotide
  Antisense strand to SEQ ID NO: 280640
auacuucugucguagcucu

SEQ ID NO: 280642 - RNA, 19 nt, Artificial Sequence
  Description of Artificial Sequence: Synthetic oligonucleotide
  Sense strand starting at position 1624 of SEQ ID NO: 3605
caucuaaguggguaugcua

SEQ ID NO: 280643 - RNA, 19 nt, Artificial Sequence
  Description of Artificial Sequence: Synthetic oligonucleotide
  Antisense strand to SEQ ID NO: 280642
uagcauacccacuuagaug

SEQ ID NO: 280644 - RNA, 19 nt, Artificial Sequence
  Description of Artificial Sequence: Synthetic oligonucleotide
  Sense strand starting at position 1639 of SEQ ID NO: 3605
gcuaucuuucgauaaaugu

SEQ ID NO: 280645 - RNA, 19 nt, Artificial Sequence
  Description of Artificial Sequence: Synthetic oligonucleotide
  Antisense strand to SEQ ID NO: 280644
acauuuaucgaaagauagc

SEQ ID NO: 280646 - RNA, 19 nt, Artificial Sequence
  Description of Artificial Sequence: Synthetic oligonucleotide
  Sense strand starting at position 2293 of SEQ ID NO: 3605
gucgacauucguuauuaac

SEQ ID NO: 280647 - RNA, 19 nt, Artificial Sequence
  Description of Artificial Sequence: Synthetic oligonucleotide
  Antisense strand to SEQ ID NO: 280646
guuaauaacgaaugucgac

SEQ ID NO: 280648 - RNA, 19 nt, Artificial Sequence
  Description of Artificial Sequence: Synthetic oligonucleotide
  Sense strand starting at position 2299 of SEQ ID NO: 3605
auucguuauuaacugagca

SEQ ID NO: 280649 - RNA, 19 nt, Artificial Sequence
  Description of Artificial Sequence: Synthetic oligonucleotide
  Antisense strand to SEQ ID NO: 280648
ugcucaguuaauaacgaau

SEQ ID NO: 280650 - RNA, 19 nt, Artificial Sequence
  Description of Artificial Sequence: Synthetic oligonucleotide
  Sense strand starting at position 2303 of SEQ ID NO: 3605
guuauuaacugagcaggaa

SEQ ID NO: 280651 - RNA, 19 nt, Artificial Sequence
  Description of Artificial Sequence: Synthetic oligonucleotide
  Antisense strand to SEQ ID NO: 280650
uuccugcucaguuaauaac

SEQ ID NO: 280652 - RNA, 19 nt, Artificial Sequence
  Description of Artificial Sequence: Synthetic oligonucleotide
  Sense strand starting at position 2416 of SEQ ID NO: 3605
ggaccaaguagcugugaaa

SEQ ID NO: 280653 - RNA, 19 nt, Artificial Sequence
  Description of Artificial Sequence: Synthetic oligonucleotide
  Antisense strand to SEQ ID NO: 280652
uuucacagcuacuuggucc

SEQ ID NO: 280654 - RNA, 19 nt, Artificial Sequence
  Description of Artificial Sequence: Synthetic oligonucleotide
  Sense strand starting at position 2430 of SEQ ID NO: 3605
ugaaauuucuucugaagaa

SEQ ID NO: 280655 - RNA, 19 nt, Artificial Sequence
  Description of Artificial Sequence: Synthetic oligonucleotide
  Antisense strand to SEQ ID NO: 280654
uucuucagaagaaauuuca

SEQ ID NO: 280656 - RNA, 19 nt, Artificial Sequence
  Description of Artificial Sequence: Synthetic oligonucleotide
  Sense strand starting at position 2467 of SEQ ID NO: 3605
gagugagcucaguggagga

SEQ ID NO: 280657 - RNA, 19 nt, Artificial Sequence
  Description of Artificial Sequence: Synthetic oligonucleotide
  Antisense strand to SEQ ID NO: 280656
uccuccacugagcucacuc

SEQ ID NO: 280658 - RNA, 19 nt, Artificial Sequence
  Description of Artificial Sequence: Synthetic oligonucleotide
  Sense strand starting at position 2524 of SEQ ID NO: 3605
gugaaccucgaauauguga

SEQ ID NO: 280659 - RNA, 19 nt, Artificial Sequence
  Description of Artificial Sequence: Synthetic oligonucleotide
  Antisense strand to SEQ ID NO: 280658
ucacauauucgagguucac

SEQ ID NO: 280660 - RNA, 19 nt, Artificial Sequence
  Description of Artificial Sequence: Synthetic oligonucleotide
  Sense strand starting at position 2609 of SEQ ID NO: 3605
ucaggaggucuugacaugu

SEQ ID NO: 280661 - RNA, 19 nt, Artificial Sequence
  Description of Artificial Sequence: Synthetic oligonucleotide
  Antisense strand to SEQ ID NO: 280660
acaugucaagaccuccuga

SEQ ID NO: 280662 - RNA, 19 nt, Artificial Sequence
  Description of Artificial Sequence: Synthetic oligonucleotide
  Sense strand starting at position 2615 of SEQ ID NO: 3605
ggucuugacaugugccaaa

SEQ ID NO: 280663 - RNA, 19 nt, Artificial Sequence
  Description of Artificial Sequence: Synthetic oligonucleotide
  Antisense strand to SEQ ID NO: 280662
uuuggcacaugucaagacc

SEQ ID NO: 280664 - RNA, 19 nt, Artificial Sequence
  Description of Artificial Sequence: Synthetic oligonucleotide
  Sense strand starting at position 2704 of SEQ ID NO: 3605
guugguucccucgggaaag

SEQ ID NO: 280665 - RNA, 19 nt, Artificial Sequence
  Description of Artificial Sequence: Synthetic oligonucleotide
  Antisense strand to SEQ ID NO: 280664
cuuucccgagggaaccaac

SEQ ID NO: 280666 - RNA, 19 nt, Artificial Sequence
  Description of Artificial Sequence: Synthetic oligonucleotide
  Sense strand starting at position 2789 of SEQ ID NO: 3605
ucuuucggguuucugaaua

SEQ ID NO: 280667 - RNA, 19 nt, Artificial Sequence
  Description of Artificial Sequence: Synthetic oligonucleotide
  Antisense strand to SEQ ID NO: 280666
uauucagaaacccgaaaga

SEQ ID NO: 280668 - RNA, 19 nt, Artificial Sequence
  Description of Artificial Sequence: Synthetic oligonucleotide
  Sense strand starting at position 2836 of SEQ ID NO: 3605
aaccuaucucagugagcag

SEQ ID NO: 280669 - RNA, 19 nt, Artificial Sequence
  Description of Artificial Sequence: Synthetic oligonucleotide
  Antisense strand to SEQ ID NO: 280668
cugcucacugagauagguu

SEQ ID NO: 280670 - RNA, 19 nt, Artificial Sequence
  Description of Artificial Sequence: Synthetic oligonucleotide
  Sense strand starting at position 3098 of SEQ ID NO: 3605
augugugaacccuaucuga

SEQ ID NO: 280671 - RNA, 19 nt, Artificial Sequence
  Description of Artificial Sequence: Synthetic oligonucleotide
  Antisense strand to SEQ ID NO: 280670
ucagauaggguucacacau

SEQ ID NO: 280672 - RNA, 19 nt, Artificial Sequence
  Description of Artificial Sequence: Synthetic oligonucleotide
  Sense strand starting at position 3101 of SEQ ID NO: 3605
ugugaacccuaucugagau

SEQ ID NO: 280673 - RNA, 19 nt, Artificial Sequence
  Description of Artificial Sequence: Synthetic oligonucleotide
  Antisense strand to SEQ ID NO: 280672
aucucagauaggguucaca

SEQ ID NO: 280674 - RNA, 19 nt, Artificial Sequence
  Description of Artificial Sequence: Synthetic oligonucleotide
  Sense strand starting at position 3257 of SEQ ID NO: 3605
ugcuuccauccagaaaggu

SEQ ID NO: 280675 - RNA, 19 nt, Artificial Sequence
  Description of Artificial Sequence: Synthetic oligonucleotide
  Antisense strand to SEQ ID NO: 280674
accuuucuggauggaagca

SEQ ID NO: 280676 - RNA, 19 nt, Artificial Sequence
  Description of Artificial Sequence: Synthetic oligonucleotide
  Sense strand starting at position 3375 of SEQ ID NO: 3605
ggaaucagauaugcaccua

SEQ ID NO: 280677 - RNA, 19 nt, Artificial Sequence
  Description of Artificial Sequence: Synthetic oligonucleotide
  Antisense strand to SEQ ID NO: 280676
uaggugcauaucugauucc

SEQ ID NO: 280678 - RNA, 19 nt, Artificial Sequence
  Description of Artificial Sequence: Synthetic oligonucleotide
  Sense strand starting at position 3387 of SEQ ID NO: 3605
gcaccuaucuuagugagga

SEQ ID NO: 280679 - RNA, 19 nt, Artificial Sequence
  Description of Artificial Sequence: Synthetic oligonucleotide
  Antisense strand to SEQ ID NO: 280678
uccucacuaagauaggugc

SEQ ID NO: 280680 - RNA, 19 nt, Artificial Sequence
  Description of Artificial Sequence: Synthetic oligonucleotide
  Sense strand starting at position 3617 of SEQ ID NO: 3605
gggagacauuuaggaggua

SEQ ID NO: 280681 - RNA, 19 nt, Artificial Sequence
  Description of Artificial Sequence: Synthetic oligonucleotide
  Antisense strand to SEQ ID NO: 280680
uaccuccuaaaugucuccc

SEQ ID NO: 280682 - RNA, 19 nt, Artificial Sequence
  Description of Artificial Sequence: Synthetic oligonucleotide
  Sense strand starting at position 3618 of SEQ ID NO: 3605
ggagacauuuaggagguaa

SEQ ID NO: 280683 - RNA, 19 nt, Artificial Sequence
  Description of Artificial Sequence: Synthetic oligonucleotide
  Antisense strand to SEQ ID NO: 280682
uuaccuccuaaaugucucc

SEQ ID NO: 280684 - RNA, 19 nt, Artificial Sequence
  Description of Artificial Sequence: Synthetic oligonucleotide
  Sense strand starting at position 3633 of SEQ ID NO: 3605
guaagauugcuaggaccuu

SEQ ID NO: 280685 - RNA, 19 nt, Artificial Sequence
  Description of Artificial Sequence: Synthetic oligonucleotide
  Antisense strand to SEQ ID NO: 280684
aagguccuagcaaucuuac

SEQ ID NO: 280686 - RNA, 19 nt, Artificial Sequence
  Description of Artificial Sequence: Synthetic oligonucleotide
  Sense strand starting at position 3651 of SEQ ID NO: 3605
uggugauagcuuggacaug

SEQ ID NO: 280687 - RNA, 19 nt, Artificial Sequence
  Description of Artificial Sequence: Synthetic oligonucleotide
  Antisense strand to SEQ ID NO: 280686
cauguccaagcuaucacca

SEQ ID NO: 280688 - RNA, 19 nt, Artificial Sequence
  Description of Artificial Sequence: Synthetic oligonucleotide
  Sense strand starting at position 3708 of SEQ ID NO: 3605
agguuaccaccugggauau

SEQ ID NO: 280689 - RNA, 19 nt, Artificial Sequence
  Description of Artificial Sequence: Synthetic oligonucleotide
  Antisense strand to SEQ ID NO: 280688
auaucccaggugguaaccu

SEQ ID NO: 280690 - RNA, 19 nt, Artificial Sequence
  Description of Artificial Sequence: Synthetic oligonucleotide
  Sense strand starting at position 3709 of SEQ ID NO: 3605
gguuaccaccugggauauu

SEQ ID NO: 280691 - RNA, 19 nt, Artificial Sequence
  Description of Artificial Sequence: Synthetic oligonucleotide
  Antisense strand to SEQ ID NO: 280690
aauaucccaggugguaacc

SEQ ID NO: 280692 - RNA, 19 nt, Artificial Sequence
  Description of Artificial Sequence: Synthetic oligonucleotide
  Sense strand starting at position 3751 of SEQ ID NO: 3605
uuguuuguuaggcagaacu

SEQ ID NO: 280693 - RNA, 19 nt, Artificial Sequence
  Description of Artificial Sequence: Synthetic oligonucleotide
  Antisense strand to SEQ ID NO: 280692
aguucugccuaacaaacaa

SEQ ID NO: 280694 - RNA, 19 nt, Artificial Sequence
  Description of Artificial Sequence: Synthetic oligonucleotide
  Sense strand starting at position 3753 of SEQ ID NO: 3605
guuuguuaggcagaacuug

SEQ ID NO: 280695 - RNA, 19 nt, Artificial Sequence
  Description of Artificial Sequence: Synthetic oligonucleotide
  Antisense strand to SEQ ID NO: 280694
caaguucugccuaacaaac

SEQ ID NO: 280696 - RNA, 19 nt, Artificial Sequence
  Description of Artificial Sequence: Synthetic oligonucleotide
  Sense strand starting at position 3851 of SEQ ID NO: 3605
ccacuuugaggcugagaga

SEQ ID NO: 280697 - RNA, 19 nt, Artificial Sequence
  Description of Artificial Sequence: Synthetic oligonucleotide
  Antisense strand to SEQ ID NO: 280696
ucucucagccucaaagugg

SEQ ID NO: 280698 - RNA, 19 nt, Artificial Sequence
  Description of Artificial Sequence: Synthetic oligonucleotide
  Sense strand starting at position 3970 of SEQ ID NO: 3605
aggucuuuaguccaaucua

SEQ ID NO: 280699 - RNA, 19 nt, Artificial Sequence
  Description of Artificial Sequence: Synthetic oligonucleotide
  Antisense strand to SEQ ID NO: 280698
uagauuggacuaaagaccu

SEQ ID NO: 280700 - RNA, 19 nt, Artificial Sequence
  Description of Artificial Sequence: Synthetic oligonucleotide
  Sense strand starting at position 89 of SEQ ID NO: 3606
cuagauaugcaguaugauu

SEQ ID NO: 280701 - RNA, 19 nt, Artificial Sequence
  Description of Artificial Sequence: Synthetic oligonucleotide
  Antisense strand to SEQ ID NO: 280700
aaucauacugcauaucuag

SEQ ID NO: 280702 - RNA, 19 nt, Artificial Sequence
  Description of Artificial Sequence: Synthetic oligonucleotide
  Sense strand starting at position 199 of SEQ ID NO: 3606
gagucaaaguuauugagca

SEQ ID NO: 280703 - RNA, 19 nt, Artificial Sequence
  Description of Artificial Sequence: Synthetic oligonucleotide
  Antisense strand to SEQ ID NO: 280702
ugcucaauaacuuugacuc

SEQ ID NO: 280704 - RNA, 19 nt, Artificial Sequence
  Description of Artificial Sequence: Synthetic oligonucleotide
  Sense strand starting at position 372 of SEQ ID NO: 3606
aauguuacagcagguuaaa

SEQ ID NO: 280705 - RNA, 19 nt, Artificial Sequence
  Description of Artificial Sequence: Synthetic oligonucleotide
  Antisense strand to SEQ ID NO: 280704
uuuaaccugcuguaacauu

SEQ ID NO: 280706 - RNA, 19 nt, Artificial Sequence
  Description of Artificial Sequence: Synthetic oligonucleotide
  Sense strand starting at position 498 of SEQ ID NO: 3606
guaucucaacuguagagua

SEQ ID NO: 280707 - RNA, 19 nt, Artificial Sequence
  Description of Artificial Sequence: Synthetic oligonucleotide
  Antisense strand to SEQ ID NO: 280706
uacucuacaguugagauac

SEQ ID NO: 280708 - RNA, 19 nt, Artificial Sequence
  Description of Artificial Sequence: Synthetic oligonucleotide
  Sense strand starting at position 500 of SEQ ID NO: 3606
aucucaacuguagaguauu

SEQ ID NO: 280709 - RNA, 19 nt, Artificial Sequence
  Description of Artificial Sequence: Synthetic oligonucleotide
  Antisense strand to SEQ ID NO: 280708
aauacucuacaguugagau

SEQ ID NO: 280710 - RNA, 19 nt, Artificial Sequence
  Description of Artificial Sequence: Synthetic oligonucleotide
  Sense strand starting at position 543 of SEQ ID NO: 3606
ccaaacagucguuauuaaa

SEQ ID NO: 280711 - RNA, 19 nt, Artificial Sequence
  Description of Artificial Sequence: Synthetic oligonucleotide
  Antisense strand to SEQ ID NO: 280710
uuuaauaacgacuguuugg

SEQ ID NO: 280712 - RNA, 19 nt, Artificial Sequence
  Description of Artificial Sequence: Synthetic oligonucleotide
  Sense strand starting at position 581 of SEQ ID NO: 3606
uuucucuuacgagaagcuu

SEQ ID NO: 280713 - RNA, 19 nt, Artificial Sequence
  Description of Artificial Sequence: Synthetic oligonucleotide
  Antisense strand to SEQ ID NO: 280712
aagcuucucguaagagaaa

SEQ ID NO: 280714 - RNA, 19 nt, Artificial Sequence
  Description of Artificial Sequence: Synthetic oligonucleotide
  Sense strand starting at position 822 of SEQ ID NO: 3606
uacguaacuguccagacau

SEQ ID NO: 280715 - RNA, 19 nt, Artificial Sequence
  Description of Artificial Sequence: Synthetic oligonucleotide
  Antisense strand to SEQ ID NO: 280714
augucuggacaguuacgua

SEQ ID NO: 280716 - RNA, 19 nt, Artificial Sequence
  Description of Artificial Sequence: Synthetic oligonucleotide
  Sense strand starting at position 930 of SEQ ID NO: 3606
guuugaacugaucaagucu

SEQ ID NO: 280717 - RNA, 19 nt, Artificial Sequence
  Description of Artificial Sequence: Synthetic oligonucleotide
  Antisense strand to SEQ ID NO: 280716
agacuugaucaguucaaac

SEQ ID NO: 280718 - RNA, 19 nt, Artificial Sequence
  Description of Artificial Sequence: Synthetic oligonucleotide
  Sense strand starting at position 973 of SEQ ID NO: 3606
cugagugauggguagucau

SEQ ID NO: 280719 - RNA, 19 nt, Artificial Sequence
  Description of Artificial Sequence: Synthetic oligonucleotide
  Antisense strand to SEQ ID NO: 280718
augacuacccaucacucag

SEQ ID NO: 280720 - RNA, 19 nt, Artificial Sequence
  Description of Artificial Sequence: Synthetic oligonucleotide
  Sense strand starting at position 1082 of SEQ ID NO: 3606
accaguaaauguuugugaa

SEQ ID NO: 280721 - RNA, 19 nt, Artificial Sequence
  Description of Artificial Sequence: Synthetic oligonucleotide
  Antisense strand to SEQ ID NO: 280720
uucacaaacauuuacuggu

SEQ ID NO: 280722 - RNA, 19 nt, Artificial Sequence
  Description of Artificial Sequence: Synthetic oligonucleotide
  Sense strand starting at position 1228 of SEQ ID NO: 3606
uagcuagguuuggcaauuu

SEQ ID NO: 280723 - RNA, 19 nt, Artificial Sequence
  Description of Artificial Sequence: Synthetic oligonucleotide
  Antisense strand to SEQ ID NO: 280722
aaauugccaaaccuagcua

SEQ ID NO: 280724 - RNA, 19 nt, Artificial Sequence
  Description of Artificial Sequence: Synthetic oligonucleotide
  Sense strand starting at position 1367 of SEQ ID NO: 3606
gugauuuaguuuccuugua

SEQ ID NO: 280725 - RNA, 19 nt, Artificial Sequence
  Description of Artificial Sequence: Synthetic oligonucleotide
  Antisense strand to SEQ ID NO: 280724
uacaaggaaacuaaaucac

SEQ ID NO: 280726 - RNA, 19 nt, Artificial Sequence
  Description of Artificial Sequence: Synthetic oligonucleotide
  Sense strand starting at position 1424 of SEQ ID NO: 3606
ugucucuuccuuggacaaa

SEQ ID NO: 280727 - RNA, 19 nt, Artificial Sequence
  Description of Artificial Sequence: Synthetic oligonucleotide
  Antisense strand to SEQ ID NO: 280726
uuuguccaaggaagagaca

SEQ ID NO: 280728 - RNA, 19 nt, Artificial Sequence
  Description of Artificial Sequence: Synthetic oligonucleotide
  Sense strand starting at position 1473 of SEQ ID NO: 3606
auguauaucguguauagag

SEQ ID NO: 280729 - RNA, 19 nt, Artificial Sequence
  Description of Artificial Sequence: Synthetic oligonucleotide
  Antisense strand to SEQ ID NO: 280728
cucuauacacgauauacau

SEQ ID NO: 280730 - RNA, 19 nt, Artificial Sequence
  Description of Artificial Sequence: Synthetic oligonucleotide
  Sense strand starting at position 1527 of SEQ ID NO: 3606
gcuauuacugcggugcaca

SEQ ID NO: 280731 - RNA, 19 nt, Artificial Sequence
  Description of Artificial Sequence: Synthetic oligonucleotide
  Antisense strand to SEQ ID NO: 280730
ugugcaccgcaguaauagc

SEQ ID NO: 280732 - RNA, 19 nt, Artificial Sequence
  Description of Artificial Sequence: Synthetic oligonucleotide
  Sense strand starting at position 1637 of SEQ ID NO: 3606
agcuacucauuuggaauuu

SEQ ID NO: 280733 - RNA, 19 nt, Artificial Sequence
  Description of Artificial Sequence: Synthetic oligonucleotide
  Antisense strand to SEQ ID NO: 280732
aaauuccaaaugaguagcu

SEQ ID NO: 280734 - RNA, 19 nt, Artificial Sequence
  Description of Artificial Sequence: Synthetic oligonucleotide
  Sense strand starting at position 1735 of SEQ ID NO: 3606
auagcauucguugaaacaa

SEQ ID NO: 280735 - RNA, 19 nt, Artificial Sequence
  Description of Artificial Sequence: Synthetic oligonucleotide
  Antisense strand to SEQ ID NO: 280734
uuguuucaacgaaugcuau

SEQ ID NO: 280736 - RNA, 19 nt, Artificial Sequence
  Description of Artificial Sequence: Synthetic oligonucleotide
  Sense strand starting at position 1879 of SEQ ID NO: 3606
cuacuaggugguugggaau

SEQ ID NO: 280737 - RNA, 19 nt, Artificial Sequence
  Description of Artificial Sequence: Synthetic oligonucleotide
  Antisense strand to SEQ ID NO: 280736
auucccaaccaccuaguag

SEQ ID NO: 280738 - RNA, 19 nt, Artificial Sequence
  Description of Artificial Sequence: Synthetic oligonucleotide
  Sense strand starting at position 1985 of SEQ ID NO: 3606
auggaaaggaucuguccga

SEQ ID NO: 280739 - RNA, 19 nt, Artificial Sequence
  Description of Artificial Sequence: Synthetic oligonucleotide
  Antisense strand to SEQ ID NO: 280738
ucggacagauccuuuccau

SEQ ID NO: 280740 - RNA, 19 nt, Artificial Sequence
  Description of Artificial Sequence: Synthetic oligonucleotide
  Sense strand starting at position 2013 of SEQ ID NO: 3606
gggcuccaaucccuuaaua

SEQ ID NO: 280741 - RNA, 19 nt, Artificial Sequence
  Description of Artificial Sequence: Synthetic oligonucleotide
  Antisense strand to SEQ ID NO: 280740
uauuaagggauuggagccc

SEQ ID NO: 280742 - RNA, 19 nt, Artificial Sequence
  Description of Artificial Sequence: Synthetic oligonucleotide
  Sense strand starting at position 2453 of SEQ ID NO: 3606
cguguaguucugucagcac

SEQ ID NO: 280743 - RNA, 19 nt, Artificial Sequence
  Description of Artificial Sequence: Synthetic oligonucleotide
  Antisense strand to SEQ ID NO: 280742
gugcugacagaacuacacg

SEQ ID NO: 280744 - RNA, 19 nt, Artificial Sequence
  Description of Artificial Sequence: Synthetic oligonucleotide
  Sense strand starting at position 2479 of SEQ ID NO: 3606
aaucucucuguguauggaa

SEQ ID NO: 280745 - RNA, 19 nt, Artificial Sequence
  Description of Artificial Sequence: Synthetic oligonucleotide
  Antisense strand to SEQ ID NO: 280744
uuccauacacagagagauu

SEQ ID NO: 280746 - RNA, 19 nt, Artificial Sequence
  Description of Artificial Sequence: Synthetic oligonucleotide
  Sense strand starting at position 2618 of SEQ ID NO: 3606
uggaaauuauuauccggau

SEQ ID NO: 280747 - RNA, 19 nt, Artificial Sequence
  Description of Artificial Sequence: Synthetic oligonucleotide
  Antisense strand to SEQ ID NO: 280746
auccggauaauaauuucca

SEQ ID NO: 280748 - RNA, 19 nt, Artificial Sequence
  Description of Artificial Sequence: Synthetic oligonucleotide
  Sense strand starting at position 2619 of SEQ ID NO: 3606
ggaaauuauuauccggaua

SEQ ID NO: 280749 - RNA, 19 nt, Artificial Sequence
  Description of Artificial Sequence: Synthetic oligonucleotide
  Antisense strand to SEQ ID NO: 280748
uauccggauaauaauuucc

SEQ ID NO: 280750 - RNA, 19 nt, Artificial Sequence
  Description of Artificial Sequence: Synthetic oligonucleotide
  Sense strand starting at position 2690 of SEQ ID NO: 3606
gggauuucuucucaaauau

SEQ ID NO: 280751 - RNA, 19 nt, Artificial Sequence
  Description of Artificial Sequence: Synthetic oligonucleotide
  Antisense strand to SEQ ID NO: 280750
auauuugagaagaaauccc

SEQ ID NO: 280752 - RNA, 19 nt, Artificial Sequence
  Description of Artificial Sequence: Synthetic oligonucleotide
  Sense strand starting at position 2964 of SEQ ID NO: 3606
acuggugcucaguaauaaa

SEQ ID NO: 280753 - RNA, 19 nt, Artificial Sequence
  Description of Artificial Sequence: Synthetic oligonucleotide
  Antisense strand to SEQ ID NO: 280752
uuuauuacugagcaccagu

SEQ ID NO: 280754 - RNA, 19 nt, Artificial Sequence
  Description of Artificial Sequence: Synthetic oligonucleotide
  Sense strand starting at position 3125 of SEQ ID NO: 3606
agccuucuacuuuagguaa

SEQ ID NO: 280755 - RNA, 19 nt, Artificial Sequence
  Description of Artificial Sequence: Synthetic oligonucleotide
  Antisense strand to SEQ ID NO: 280754
uuaccuaaaguagaaggcu

SEQ ID NO: 280756 - RNA, 19 nt, Artificial Sequence
  Description of Artificial Sequence: Synthetic oligonucleotide
  Sense strand starting at position 3202 of SEQ ID NO: 3606
aguguaaauuccucuagag

SEQ ID NO: 280757 - RNA, 19 nt, Artificial Sequence
  Description of Artificial Sequence: Synthetic oligonucleotide
  Antisense strand to SEQ ID NO: 280756
cucuagaggaauuuacacu

SEQ ID NO: 280758 - RNA, 19 nt, Artificial Sequence
  Description of Artificial Sequence: Synthetic oligonucleotide
  Sense strand starting at position 3218 of SEQ ID NO: 3606
gagaaauguuuacuuaagu

SEQ ID NO: 280759 - RNA, 19 nt, Artificial Sequence
  Description of Artificial Sequence: Synthetic oligonucleotide
  Antisense strand to SEQ ID NO: 280758
acuuaaguaaacauuucuc

SEQ ID NO: 280760 - RNA, 19 nt, Artificial Sequence
  Description of Artificial Sequence: Synthetic oligonucleotide
  Sense strand starting at position 3310 of SEQ ID NO: 3606
aucagugaauucuccaagu

SEQ ID NO: 280761 - RNA, 19 nt, Artificial Sequence
  Description of Artificial Sequence: Synthetic oligonucleotide
  Antisense strand to SEQ ID NO: 280760
acuuggagaauucacugau

SEQ ID NO: 280762 - RNA, 19 nt, Artificial Sequence
  Description of Artificial Sequence: Synthetic oligonucleotide
  Sense strand starting at position 3424 of SEQ ID NO: 3606
gggugacuuguauagcuaa

SEQ ID NO: 280763 - RNA, 19 nt, Artificial Sequence
  Description of Artificial Sequence: Synthetic oligonucleotide
  Antisense strand to SEQ ID NO: 280762
uuagcuauacaagucaccc

SEQ ID NO: 280764 - RNA, 19 nt, Artificial Sequence
  Description of Artificial Sequence: Synthetic oligonucleotide
  Sense strand starting at position 3435 of SEQ ID NO: 3606
auagcuaagguguauauaa

SEQ ID NO: 280765 - RNA, 19 nt, Artificial Sequence
  Description of Artificial Sequence: Synthetic oligonucleotide
  Antisense strand to SEQ ID NO: 280764
uuauauacaccuuagcuau

SEQ ID NO: 280766 - RNA, 19 nt, Artificial Sequence
  Description of Artificial Sequence: Synthetic oligonucleotide
  Sense strand starting at position 3437 of SEQ ID NO: 3606
agcuaagguguauauaauu

SEQ ID NO: 280767 - RNA, 19 nt, Artificial Sequence
  Description of Artificial Sequence: Synthetic oligonucleotide
  Antisense strand to SEQ ID NO: 280766
aauuauauacaccuuagcu

SEQ ID NO: 280768 - RNA, 19 nt, Artificial Sequence
  Description of Artificial Sequence: Synthetic oligonucleotide
  Sense strand starting at position 3527 of SEQ ID NO: 3606
agucuagauugaucuguaa

SEQ ID NO: 280769 - RNA, 19 nt, Artificial Sequence
  Description of Artificial Sequence: Synthetic oligonucleotide
  Antisense strand to SEQ ID NO: 280768
uuacagaucaaucuagacu

SEQ ID NO: 280770 - RNA, 19 nt, Artificial Sequence
  Description of Artificial Sequence: Synthetic oligonucleotide
  Sense strand starting at position 3530 of SEQ ID NO: 3606
cuagauugaucuguaacuu

SEQ ID NO: 280771 - RNA, 19 nt, Artificial Sequence
  Description of Artificial Sequence: Synthetic oligonucleotide
  Antisense strand to SEQ ID NO: 280770
aaguuacagaucaaucuag

SEQ ID NO: 280772 - RNA, 19 nt, Artificial Sequence
  Description of Artificial Sequence: Synthetic oligonucleotide
  Sense strand starting at position 3534 of SEQ ID NO: 3606
auugaucuguaacuugaua

SEQ ID NO: 280773 - RNA, 19 nt, Artificial Sequence
  Description of Artificial Sequence: Synthetic oligonucleotide
  Antisense strand to SEQ ID NO: 280772
uaucaaguuacagaucaau

SEQ ID NO: 280774 - RNA, 19 nt, Artificial Sequence
  Description of Artificial Sequence: Synthetic oligonucleotide
  Sense strand starting at position 3580 of SEQ ID NO: 3606
ugcccaagagcacauuauu

SEQ ID NO: 280775 - RNA, 19 nt, Artificial Sequence
  Description of Artificial Sequence: Synthetic oligonucleotide
  Antisense strand to SEQ ID NO: 280774
aauaaugugcucuugggca

SEQ ID NO: 280776 - RNA, 19 nt, Artificial Sequence
  Description of Artificial Sequence: Synthetic oligonucleotide
  Sense strand starting at position 3630 of SEQ ID NO: 3606
acucuacauuguuuaagga

SEQ ID NO: 280777 - RNA, 19 nt, Artificial Sequence
  Description of Artificial Sequence: Synthetic oligonucleotide
  Antisense strand to SEQ ID NO: 280776
uccuuaaacaauguagagu

SEQ ID NO: 280778 - RNA, 19 nt, Artificial Sequence
  Description of Artificial Sequence: Synthetic oligonucleotide
  Sense strand starting at position 3963 of SEQ ID NO: 3606
auaagacuugucugaaucu

SEQ ID NO: 280779 - RNA, 19 nt, Artificial Sequence
  Description of Artificial Sequence: Synthetic oligonucleotide
  Antisense strand to SEQ ID NO: 280778
agauucagacaagucuuau

SEQ ID NO: 280780 - RNA, 19 nt, Artificial Sequence
  Description of Artificial Sequence: Synthetic oligonucleotide
  Sense strand starting at position 118 of SEQ ID NO: 3607
ugggaaauagcgcaagacu

SEQ ID NO: 280781 - RNA, 19 nt, Artificial Sequence
  Description of Artificial Sequence: Synthetic oligonucleotide
  Antisense strand to SEQ ID NO: 280780
agucuugcgcuauuuccca

SEQ ID NO: 280782 - RNA, 19 nt, Artificial Sequence
  Description of Artificial Sequence: Synthetic oligonucleotide
  Sense strand starting at position 269 of SEQ ID NO: 3607
ucauaugccguggaagacu

SEQ ID NO: 280783 - RNA, 19 nt, Artificial Sequence
  Description of Artificial Sequence: Synthetic oligonucleotide
  Antisense strand to SEQ ID NO: 280782
agucuuccacggcauauga

SEQ ID NO: 280784 - RNA, 19 nt, Artificial Sequence
  Description of Artificial Sequence: Synthetic oligonucleotide
  Sense strand starting at position 399 of SEQ ID NO: 3607
gggaaaucuggcugagauc

SEQ ID NO: 280785 - RNA, 19 nt, Artificial Sequence
  Description of Artificial Sequence: Synthetic oligonucleotide
  Antisense strand to SEQ ID NO: 280784
gaucucagccagauuuccc

SEQ ID NO: 280786 - RNA, 19 nt, Artificial Sequence
  Description of Artificial Sequence: Synthetic oligonucleotide
  Sense strand starting at position 408 of SEQ ID NO: 3607
ggcugagaucuccgauaag

SEQ ID NO: 280787 - RNA, 19 nt, Artificial Sequence
  Description of Artificial Sequence: Synthetic oligonucleotide
  Antisense strand to SEQ ID NO: 280786
cuuaucggagaucucagcc

SEQ ID NO: 280788 - RNA, 19 nt, Artificial Sequence
  Description of Artificial Sequence: Synthetic oligonucleotide
  Sense strand starting at position 429 of SEQ ID NO: 3607
ugcuguuuccaaugggaag

SEQ ID NO: 280789 - RNA, 19 nt, Artificial Sequence
  Description of Artificial Sequence: Synthetic oligonucleotide
  Antisense strand to SEQ ID NO: 280788
cuucccauuggaaacagca

SEQ ID NO: 280790 - RNA, 19 nt, Artificial Sequence
  Description of Artificial Sequence: Synthetic oligonucleotide
  Sense strand starting at position 559 of SEQ ID NO: 3607
gcuccuauuucguuuaauc

SEQ ID NO: 280791 - RNA, 19 nt, Artificial Sequence
  Description of Artificial Sequence: Synthetic oligonucleotide
  Antisense strand to SEQ ID NO: 280790
gauuaaacgaaauaggagc

SEQ ID NO: 280792 - RNA, 19 nt, Artificial Sequence
  Description of Artificial Sequence: Synthetic oligonucleotide
  Sense strand starting at position 643 of SEQ ID NO: 3607
gaucgugcuccacaucaca

SEQ ID NO: 280793 - RNA, 19 nt, Artificial Sequence
  Description of Artificial Sequence: Synthetic oligonucleotide
  Antisense strand to SEQ ID NO: 280792
ugugauguggagcacgauc

SEQ ID NO: 280794 - RNA, 19 nt, Artificial Sequence
  Description of Artificial Sequence: Synthetic oligonucleotide
  Sense strand starting at position 1095 of SEQ ID NO: 3607
cccgaagacucaccugaua

SEQ ID NO: 280795 - RNA, 19 nt, Artificial Sequence
  Description of Artificial Sequence: Synthetic oligonucleotide
  Antisense strand to SEQ ID NO: 280794
uaucaggugagucuucggg

SEQ ID NO: 280796 - RNA, 19 nt, Artificial Sequence
  Description of Artificial Sequence: Synthetic oligonucleotide
  Sense strand starting at position 2500 of SEQ ID NO: 3607
augacaucccauuagcagu

SEQ ID NO: 280797 - RNA, 19 nt, Artificial Sequence
  Description of Artificial Sequence: Synthetic oligonucleotide
  Antisense strand to SEQ ID NO: 280796
acugcuaaugggaugucau

SEQ ID NO: 280798 - RNA, 19 nt, Artificial Sequence
  Description of Artificial Sequence: Synthetic oligonucleotide
  Sense strand starting at position 2506 of SEQ ID NO: 3607
ucccauuagcaguaaugga

SEQ ID NO: 280799 - RNA, 19 nt, Artificial Sequence
  Description of Artificial Sequence: Synthetic oligonucleotide
  Antisense strand to SEQ ID NO: 280798
uccauuacugcuaauggga

SEQ ID NO: 280800 - RNA, 19 nt, Artificial Sequence
  Description of Artificial Sequence: Synthetic oligonucleotide
  Sense strand starting at position 2510 of SEQ ID NO: 3607
auuagcaguaauggaguua

SEQ ID NO: 280801 - RNA, 19 nt, Artificial Sequence
  Description of Artificial Sequence: Synthetic oligonucleotide
  Antisense strand to SEQ ID NO: 280800
uaacuccauuacugcuaau

SEQ ID NO: 280802 - RNA, 19 nt, Artificial Sequence
  Description of Artificial Sequence: Synthetic oligonucleotide
  Sense strand starting at position 2666 of SEQ ID NO: 3607
gcuucaucucgguggauuu

SEQ ID NO: 280803 - RNA, 19 nt, Artificial Sequence
  Description of Artificial Sequence: Synthetic oligonucleotide
  Antisense strand to SEQ ID NO: 280802
aaauccaccgagaugaagc

SEQ ID NO: 280804 - RNA, 19 nt, Artificial Sequence
  Description of Artificial Sequence: Synthetic oligonucleotide
  Sense strand starting at position 2788 of SEQ ID NO: 3607
gccucuuaucucuaaggga

SEQ ID NO: 280805 - RNA, 19 nt, Artificial Sequence
  Description of Artificial Sequence: Synthetic oligonucleotide
  Antisense strand to SEQ ID NO: 280804
ucccuuagagauaagaggc

SEQ ID NO: 280806 - RNA, 19 nt, Artificial Sequence
  Description of Artificial Sequence: Synthetic oligonucleotide
  Sense strand starting at position 2840 of SEQ ID NO: 3607
gcugcuagcacaguguaau

SEQ ID NO: 280807 - RNA, 19 nt, Artificial Sequence
  Description of Artificial Sequence: Synthetic oligonucleotide
  Antisense strand to SEQ ID NO: 280806
auuacacugugcuagcagc

SEQ ID NO: 280808 - RNA, 19 nt, Artificial Sequence
  Description of Artificial Sequence: Synthetic oligonucleotide
  Sense strand starting at position 2843 of SEQ ID NO: 3607
gcuagcacaguguaauuaa

SEQ ID NO: 280809 - RNA, 19 nt, Artificial Sequence
  Description of Artificial Sequence: Synthetic oligonucleotide
  Antisense strand to SEQ ID NO: 280808
uuaauuacacugugcuagc

SEQ ID NO: 280810 - RNA, 19 nt, Artificial Sequence
  Description of Artificial Sequence: Synthetic oligonucleotide
  Sense strand starting at position 2868 of SEQ ID NO: 3607
cauuguugaucauuguaag

SEQ ID NO: 280811 - RNA, 19 nt, Artificial Sequence
  Description of Artificial Sequence: Synthetic oligonucleotide
  Antisense strand to SEQ ID NO: 280810
cuuacaaugaucaacaaug

SEQ ID NO: 280812 - RNA, 19 nt, Artificial Sequence
  Description of Artificial Sequence: Synthetic oligonucleotide
  Sense strand starting at position 2874 of SEQ ID NO: 3607
ugaucauuguaaguuagga

SEQ ID NO: 280813 - RNA, 19 nt, Artificial Sequence
  Description of Artificial Sequence: Synthetic oligonucleotide
  Antisense strand to SEQ ID NO: 280812
uccuaacuuacaaugauca

SEQ ID NO: 280814 - RNA, 19 nt, Artificial Sequence
  Description of Artificial Sequence: Synthetic oligonucleotide
  Sense strand starting at position 2891 of SEQ ID NO: 3607
gaugcauguguauacuaua

SEQ ID NO: 280815 - RNA, 19 nt, Artificial Sequence
  Description of Artificial Sequence: Synthetic oligonucleotide
  Antisense strand to SEQ ID NO: 280814
uauaguauacacaugcauc

SEQ ID NO: 280816 - RNA, 19 nt, Artificial Sequence
  Description of Artificial Sequence: Synthetic oligonucleotide
  Sense strand starting at position 2896 of SEQ ID NO: 3607
auguguauacuauauugga

SEQ ID NO: 280817 - RNA, 19 nt, Artificial Sequence
  Description of Artificial Sequence: Synthetic oligonucleotide
  Antisense strand to SEQ ID NO: 280816
uccaauauaguauacacau

SEQ ID NO: 280818 - RNA, 19 nt, Artificial Sequence
  Description of Artificial Sequence: Synthetic oligonucleotide
  Sense strand starting at position 2913 of SEQ ID NO: 3607
gaggcuuugggccaugauu

SEQ ID NO: 280819 - RNA, 19 nt, Artificial Sequence
  Description of Artificial Sequence: Synthetic oligonucleotide
  Antisense strand to SEQ ID NO: 280818
aaucauggcccaaagccuc

SEQ ID NO: 280820 - RNA, 19 nt, Artificial Sequence
  Description of Artificial Sequence: Synthetic oligonucleotide
  Sense strand starting at position 2924 of SEQ ID NO: 3607
ccaugauuagauugcuaug

SEQ ID NO: 280821 - RNA, 19 nt, Artificial Sequence
  Description of Artificial Sequence: Synthetic oligonucleotide
  Antisense strand to SEQ ID NO: 280820
cauagcaaucuaaucaugg

SEQ ID NO: 280822 - RNA, 19 nt, Artificial Sequence
  Description of Artificial Sequence: Synthetic oligonucleotide
  Sense strand starting at position 2926 of SEQ ID NO: 3607
augauuagauugcuaugua

SEQ ID NO: 280823 - RNA, 19 nt, Artificial Sequence
  Description of Artificial Sequence: Synthetic oligonucleotide
  Antisense strand to SEQ ID NO: 280822
uacauagcaaucuaaucau

SEQ ID NO: 280824 - RNA, 19 nt, Artificial Sequence
  Description of Artificial Sequence: Synthetic oligonucleotide
  Sense strand starting at position 2988 of SEQ ID NO: 3607
acagaagcuuuaccuuagu

SEQ ID NO: 280825 - RNA, 19 nt, Artificial Sequence
  Description of Artificial Sequence: Synthetic oligonucleotide
  Antisense strand to SEQ ID NO: 280824
acuaagguaaagcuucugu

SEQ ID NO: 280826 - RNA, 19 nt, Artificial Sequence
  Description of Artificial Sequence: Synthetic oligonucleotide
  Sense strand starting at position 3004 of SEQ ID NO: 3607
agucuuaagugaccaacuu

SEQ ID NO: 280827 - RNA, 19 nt, Artificial Sequence
  Description of Artificial Sequence: Synthetic oligonucleotide
  Antisense strand to SEQ ID NO: 280826
aaguuggucacuuaagacu

SEQ ID NO: 280828 - RNA, 19 nt, Artificial Sequence
  Description of Artificial Sequence: Synthetic oligonucleotide
  Sense strand starting at position 3005 of SEQ ID NO: 3607
gucuuaagugaccaacuua

SEQ ID NO: 280829 - RNA, 19 nt, Artificial Sequence
  Description of Artificial Sequence: Synthetic oligonucleotide
  Antisense strand to SEQ ID NO: 280828
uaaguuggucacuuaagac

SEQ ID NO: 280830 - RNA, 19 nt, Artificial Sequence
  Description of Artificial Sequence: Synthetic oligonucleotide
  Sense strand starting at position 3163 of SEQ ID NO: 3607
guaggaggcuucucaaaga

SEQ ID NO: 280831 - RNA, 19 nt, Artificial Sequence
  Description of Artificial Sequence: Synthetic oligonucleotide
  Antisense strand to SEQ ID NO: 280830
ucuuugagaagccuccuac

SEQ ID NO: 280832 - RNA, 19 nt, Artificial Sequence
  Description of Artificial Sequence: Synthetic oligonucleotide
  Sense strand starting at position 3179 of SEQ ID NO: 3607
agaggaagcucccuaguau

SEQ ID NO: 280833 - RNA, 19 nt, Artificial Sequence
  Description of Artificial Sequence: Synthetic oligonucleotide
  Antisense strand to SEQ ID NO: 280832
auacuagggagcuuccucu

SEQ ID NO: 280834 - RNA, 19 nt, Artificial Sequence
  Description of Artificial Sequence: Synthetic oligonucleotide
  Sense strand starting at position 3180 of SEQ ID NO: 3607
gaggaagcucccuaguauu

SEQ ID NO: 280835 - RNA, 19 nt, Artificial Sequence
  Description of Artificial Sequence: Synthetic oligonucleotide
  Antisense strand to SEQ ID NO: 280834
aauacuagggagcuuccuc

SEQ ID NO: 280836 - RNA, 19 nt, Artificial Sequence
  Description of Artificial Sequence: Synthetic oligonucleotide
  Sense strand starting at position 3231 of SEQ ID NO: 3607
uuucuuacggaguaacagu

SEQ ID NO: 280837 - RNA, 19 nt, Artificial Sequence
  Description of Artificial Sequence: Synthetic oligonucleotide
  Antisense strand to SEQ ID NO: 280836
acuguuacuccguaagaaa

SEQ ID NO: 280838 - RNA, 19 nt, Artificial Sequence
  Description of Artificial Sequence: Synthetic oligonucleotide
  Sense strand starting at position 3281 of SEQ ID NO: 3607
ggauuaaaggagggcucua

SEQ ID NO: 280839 - RNA, 19 nt, Artificial Sequence
  Description of Artificial Sequence: Synthetic oligonucleotide
  Antisense strand to SEQ ID NO: 280838
uagagcccuccuuuaaucc

SEQ ID NO: 280840 - RNA, 19 nt, Artificial Sequence
  Description of Artificial Sequence: Synthetic oligonucleotide
  Sense strand starting at position 3311 of SEQ ID NO: 3607
gcaguuacuuaauuaggaa

SEQ ID NO: 280841 - RNA, 19 nt, Artificial Sequence
  Description of Artificial Sequence: Synthetic oligonucleotide
  Antisense strand to SEQ ID NO: 280840
uuccuaauuaaguaacugc

SEQ ID NO: 280842 - RNA, 19 nt, Artificial Sequence
  Description of Artificial Sequence: Synthetic oligonucleotide
  Sense strand starting at position 3374 of SEQ ID NO: 3607
accuccaugcuauagguaa

SEQ ID NO: 280843 - RNA, 19 nt, Artificial Sequence
  Description of Artificial Sequence: Synthetic oligonucleotide
  Antisense strand to SEQ ID NO: 280842
uuaccuauagcauggaggu

SEQ ID NO: 280844 - RNA, 19 nt, Artificial Sequence
  Description of Artificial Sequence: Synthetic oligonucleotide
  Sense strand starting at position 3392 of SEQ ID NO: 3607
agaagauguacaugcaagu

SEQ ID NO: 280845 - RNA, 19 nt, Artificial Sequence
  Description of Artificial Sequence: Synthetic oligonucleotide
  Antisense strand to SEQ ID NO: 280844
acuugcauguacaucuucu

SEQ ID NO: 280846 - RNA, 19 nt, Artificial Sequence
  Description of Artificial Sequence: Synthetic oligonucleotide
  Sense strand starting at position 3444 of SEQ ID NO: 3607
uggugagugccucaggaau

SEQ ID NO: 280847 - RNA, 19 nt, Artificial Sequence
  Description of Artificial Sequence: Synthetic oligonucleotide
  Antisense strand to SEQ ID NO: 280846
auuccugaggcacucacca

SEQ ID NO: 280848 - RNA, 19 nt, Artificial Sequence
  Description of Artificial Sequence: Synthetic oligonucleotide
  Sense strand starting at position 3455 of SEQ ID NO: 3607
ucaggaaugugagcuuaca

SEQ ID NO: 280849 - RNA, 19 nt, Artificial Sequence
  Description of Artificial Sequence: Synthetic oligonucleotide
  Antisense strand to SEQ ID NO: 280848
uguaagcucacauuccuga

SEQ ID NO: 280850 - RNA, 19 nt, Artificial Sequence
  Description of Artificial Sequence: Synthetic oligonucleotide
  Sense strand starting at position 3463 of SEQ ID NO: 3607
gugagcuuacauuagugau

SEQ ID NO: 280851 - RNA, 19 nt, Artificial Sequence
  Description of Artificial Sequence: Synthetic oligonucleotide
  Antisense strand to SEQ ID NO: 280850
aucacuaauguaagcucac

SEQ ID NO: 280852 - RNA, 19 nt, Artificial Sequence
  Description of Artificial Sequence: Synthetic oligonucleotide
  Sense strand starting at position 3507 of SEQ ID NO: 3607
ucaagugugugaucaccaa

SEQ ID NO: 280853 - RNA, 19 nt, Artificial Sequence
  Description of Artificial Sequence: Synthetic oligonucleotide
  Antisense strand to SEQ ID NO: 280852
uuggugaucacacacuuga

SEQ ID NO: 280854 - RNA, 19 nt, Artificial Sequence
  Description of Artificial Sequence: Synthetic oligonucleotide
  Sense strand starting at position 3511 of SEQ ID NO: 3607
gugugugaucaccaaucug

SEQ ID NO: 280855 - RNA, 19 nt, Artificial Sequence
  Description of Artificial Sequence: Synthetic oligonucleotide
  Antisense strand to SEQ ID NO: 280854
cagauuggugaucacacac

SEQ ID NO: 280856 - RNA, 19 nt, Artificial Sequence
  Description of Artificial Sequence: Synthetic oligonucleotide
  Sense strand starting at position 3616 of SEQ ID NO: 3607
gucaaaugcaaguauagag

SEQ ID NO: 280857 - RNA, 19 nt, Artificial Sequence
  Description of Artificial Sequence: Synthetic oligonucleotide
  Antisense strand to SEQ ID NO: 280856
cucuauacuugcauuugac

SEQ ID NO: 280858 - RNA, 19 nt, Artificial Sequence
  Description of Artificial Sequence: Synthetic oligonucleotide
  Sense strand starting at position 3670 of SEQ ID NO: 3607
ggguaugauaguugaggga

SEQ ID NO: 280859 - RNA, 19 nt, Artificial Sequence
  Description of Artificial Sequence: Synthetic oligonucleotide
  Antisense strand to SEQ ID NO: 280858
ucccucaacuaucauaccc

SEQ ID NO: 280860 - RNA, 19 nt, Artificial Sequence
  Description of Artificial Sequence: Synthetic oligonucleotide
  Sense strand starting at position 8 of SEQ ID NO: 3608
agacaaauagcuugauugu

SEQ ID NO: 280861 - RNA, 19 nt, Artificial Sequence
  Description of Artificial Sequence: Synthetic oligonucleotide
  Antisense strand to SEQ ID NO: 280860
acaaucaagcuauuugucu

SEQ ID NO: 280862 - RNA, 19 nt, Artificial Sequence
  Description of Artificial Sequence: Synthetic oligonucleotide
  Sense strand starting at position 32 of SEQ ID NO: 3608
ugucacagauaaguucuua

SEQ ID NO: 280863 - RNA, 19 nt, Artificial Sequence
  Description of Artificial Sequence: Synthetic oligonucleotide
  Antisense strand to SEQ ID NO: 280862
uaagaacuuaucugugaca

SEQ ID NO: 280864 - RNA, 19 nt, Artificial Sequence
  Description of Artificial Sequence: Synthetic oligonucleotide
  Sense strand starting at position 154 of SEQ ID NO: 3608
acagccugugcucaguaau

SEQ ID NO: 280865 - RNA, 19 nt, Artificial Sequence
  Description of Artificial Sequence: Synthetic oligonucleotide
  Antisense strand to SEQ ID NO: 280864
auuacugagcacaggcugu

SEQ ID NO: 280866 - RNA, 19 nt, Artificial Sequence
  Description of Artificial Sequence: Synthetic oligonucleotide
  Sense strand starting at position 229 of SEQ ID NO: 3608
uuuguuuguucuuccaaga

SEQ ID NO: 280867 - RNA, 19 nt, Artificial Sequence
  Description of Artificial Sequence: Synthetic oligonucleotide
  Antisense strand to SEQ ID NO: 280866
ucuuggaagaacaaacaaa

SEQ ID NO: 280868 - RNA, 19 nt, Artificial Sequence
  Description of Artificial Sequence: Synthetic oligonucleotide
  Sense strand starting at position 294 of SEQ ID NO: 3608
uuuggacuuucggcagaac

SEQ ID NO: 280869 - RNA, 19 nt, Artificial Sequence
  Description of Artificial Sequence: Synthetic oligonucleotide
  Antisense strand to SEQ ID NO: 280868
guucugccgaaaguccaaa

SEQ ID NO: 280870 - RNA, 19 nt, Artificial Sequence
  Description of Artificial Sequence: Synthetic oligonucleotide
  Sense strand starting at position 295 of SEQ ID NO: 3608
uuggacuuucggcagaaca

SEQ ID NO: 280871 - RNA, 19 nt, Artificial Sequence
  Description of Artificial Sequence: Synthetic oligonucleotide
  Antisense strand to SEQ ID NO: 280870
uguucugccgaaaguccaa

SEQ ID NO: 280872 - RNA, 19 nt, Artificial Sequence
  Description of Artificial Sequence: Synthetic oligonucleotide
  Sense strand starting at position 297 of SEQ ID NO: 3608
ggacuuucggcagaacaug

SEQ ID NO: 280873 - RNA, 19 nt, Artificial Sequence
  Description of Artificial Sequence: Synthetic oligonucleotide
  Antisense strand to SEQ ID NO: 280872
cauguucugccgaaagucc

SEQ ID NO: 280874 - RNA, 19 nt, Artificial Sequence
  Description of Artificial Sequence: Synthetic oligonucleotide
  Sense strand starting at position 334 of SEQ ID NO: 3608
caaggaaggucuuuauaug

SEQ ID NO: 280875 - RNA, 19 nt, Artificial Sequence
  Description of Artificial Sequence: Synthetic oligonucleotide
  Antisense strand to SEQ ID NO: 280874
cauauaaagaccuuccuug

SEQ ID NO: 280876 - RNA, 19 nt, Artificial Sequence
  Description of Artificial Sequence: Synthetic oligonucleotide
  Sense strand starting at position 344 of SEQ ID NO: 3608
cuuuauaugugaucgugac

SEQ ID NO: 280877 - RNA, 19 nt, Artificial Sequence
  Description of Artificial Sequence: Synthetic oligonucleotide
  Antisense strand to SEQ ID NO: 280876
gucacgaucacauauaaag

SEQ ID NO: 280878 - RNA, 19 nt, Artificial Sequence
  Description of Artificial Sequence: Synthetic oligonucleotide
  Sense strand starting at position 345 of SEQ ID NO: 3608
uuuauaugugaucgugaca

SEQ ID NO: 280879 - RNA, 19 nt, Artificial Sequence
  Description of Artificial Sequence: Synthetic oligonucleotide
  Antisense strand to SEQ ID NO: 280878
ugucacgaucacauauaaa

SEQ ID NO: 280880 - RNA, 19 nt, Artificial Sequence
  Description of Artificial Sequence: Synthetic oligonucleotide
  Sense strand starting at position 348 of SEQ ID NO: 3608
auaugugaucgugacauag

SEQ ID NO: 280881 - RNA, 19 nt, Artificial Sequence
  Description of Artificial Sequence: Synthetic oligonucleotide
  Antisense strand to SEQ ID NO: 280880
cuaugucacgaucacauau

SEQ ID NO: 280882 - RNA, 19 nt, Artificial Sequence
  Description of Artificial Sequence: Synthetic oligonucleotide
  Sense strand starting at position 352 of SEQ ID NO: 3608
gugaucgugacauaguguu

SEQ ID NO: 280883 - RNA, 19 nt, Artificial Sequence
  Description of Artificial Sequence: Synthetic oligonucleotide
  Antisense strand to SEQ ID NO: 280882
aacacuaugucacgaucac

SEQ ID NO: 280884 - RNA, 19 nt, Artificial Sequence
  Description of Artificial Sequence: Synthetic oligonucleotide
  Sense strand starting at position 398 of SEQ ID NO: 3608
gccucuggacacuaguaaa

SEQ ID NO: 280885 - RNA, 19 nt, Artificial Sequence
  Description of Artificial Sequence: Synthetic oligonucleotide
  Antisense strand to SEQ ID NO: 280884
uuuacuaguguccagaggc

SEQ ID NO: 280886 - RNA, 19 nt, Artificial Sequence
  Description of Artificial Sequence: Synthetic oligonucleotide
  Sense strand starting at position 408 of SEQ ID NO: 3608
acuaguaaagaacguuuau

SEQ ID NO: 280887 - RNA, 19 nt, Artificial Sequence
  Description of Artificial Sequence: Synthetic oligonucleotide
  Antisense strand to SEQ ID NO: 280886
auaaacguucuuuacuagu

SEQ ID NO: 280888 - RNA, 19 nt, Artificial Sequence
  Description of Artificial Sequence: Synthetic oligonucleotide
  Sense strand starting at position 485 of SEQ ID NO: 3608
agaaauguuuguuucuuag

SEQ ID NO: 280889 - RNA, 19 nt, Artificial Sequence
  Description of Artificial Sequence: Synthetic oligonucleotide
  Antisense strand to SEQ ID NO: 280888
cuaagaaacaaacauuucu

SEQ ID NO: 280890 - RNA, 19 nt, Artificial Sequence
  Description of Artificial Sequence: Synthetic oligonucleotide
  Sense strand starting at position 491 of SEQ ID NO: 3608
guuuguuucuuaguaaaug

SEQ ID NO: 280891 - RNA, 19 nt, Artificial Sequence
  Description of Artificial Sequence: Synthetic oligonucleotide
  Antisense strand to SEQ ID NO: 280890
cauuuacuaagaaacaaac

SEQ ID NO: 280892 - RNA, 19 nt, Artificial Sequence
  Description of Artificial Sequence: Synthetic oligonucleotide
  Sense strand starting at position 549 of SEQ ID NO: 3608
aaauuacugcgagauucug

SEQ ID NO: 280893 - RNA, 19 nt, Artificial Sequence
  Description of Artificial Sequence: Synthetic oligonucleotide
  Antisense strand to SEQ ID NO: 280892
cagaaucucgcaguaauuu

SEQ ID NO: 280894 - RNA, 19 nt, Artificial Sequence
  Description of Artificial Sequence: Synthetic oligonucleotide
  Sense strand starting at position 638 of SEQ ID NO: 3608
ugaggauucuaugcagauc

SEQ ID NO: 280895 - RNA, 19 nt, Artificial Sequence
  Description of Artificial Sequence: Synthetic oligonucleotide
  Antisense strand to SEQ ID NO: 280894
gaucugcauagaauccuca

SEQ ID NO: 280896 - RNA, 19 nt, Artificial Sequence
  Description of Artificial Sequence: Synthetic oligonucleotide
  Sense strand starting at position 945 of SEQ ID NO: 3608
agcuaaauacacggaauaa

SEQ ID NO: 280897 - RNA, 19 nt, Artificial Sequence
  Description of Artificial Sequence: Synthetic oligonucleotide
  Antisense strand to SEQ ID NO: 280896
uuauuccguguauuuagcu

SEQ ID NO: 280898 - RNA, 19 nt, Artificial Sequence
  Description of Artificial Sequence: Synthetic oligonucleotide
  Sense strand starting at position 1268 of SEQ ID NO: 3608
agacgugauuugcaaacaa

SEQ ID NO: 280899 - RNA, 19 nt, Artificial Sequence
  Description of Artificial Sequence: Synthetic oligonucleotide
  Antisense strand to SEQ ID NO: 280898
uuguuugcaaaucacgucu

SEQ ID NO: 280900 - RNA, 19 nt, Artificial Sequence
  Description of Artificial Sequence: Synthetic oligonucleotide
  Sense strand starting at position 1302 of SEQ ID NO: 3608
gacagauugucaguguuga

SEQ ID NO: 280901 - RNA, 19 nt, Artificial Sequence
  Description of Artificial Sequence: Synthetic oligonucleotide
  Antisense strand to SEQ ID NO: 280900
ucaacacugacaaucuguc

SEQ ID NO: 280902 - RNA, 19 nt, Artificial Sequence
  Description of Artificial Sequence: Synthetic oligonucleotide
  Sense strand starting at position 1303 of SEQ ID NO: 3608
acagauugucaguguugac

SEQ ID NO: 280903 - RNA, 19 nt, Artificial Sequence
  Description of Artificial Sequence: Synthetic oligonucleotide
  Antisense strand to SEQ ID NO: 280902
gucaacacugacaaucugu

SEQ ID NO: 280904 - RNA, 19 nt, Artificial Sequence
  Description of Artificial Sequence: Synthetic oligonucleotide
  Sense strand starting at position 1307 of SEQ ID NO: 3608
auugucaguguugacuaau

SEQ ID NO: 280905 - RNA, 19 nt, Artificial Sequence
  Description of Artificial Sequence: Synthetic oligonucleotide
  Antisense strand to SEQ ID NO: 280904
auuagucaacacugacaau

SEQ ID NO: 280906 - RNA, 19 nt, Artificial Sequence
  Description of Artificial Sequence: Synthetic oligonucleotide
  Sense strand starting at position 1344 of SEQ ID NO: 3608
ugguucugauucccgaaca

SEQ ID NO: 280907 - RNA, 19 nt, Artificial Sequence
  Description of Artificial Sequence: Synthetic oligonucleotide
  Antisense strand to SEQ ID NO: 280906
uguucgggaaucagaacca

SEQ ID NO: 280908 - RNA, 19 nt, Artificial Sequence
  Description of Artificial Sequence: Synthetic oligonucleotide
  Sense strand starting at position 2142 of SEQ ID NO: 3608
cugaaauguucuccgagca

SEQ ID NO: 280909 - RNA, 19 nt, Artificial Sequence
  Description of Artificial Sequence: Synthetic oligonucleotide
  Antisense strand to SEQ ID NO: 280908
ugcucggagaacauuucag

SEQ ID NO: 280910 - RNA, 19 nt, Artificial Sequence
  Description of Artificial Sequence: Synthetic oligonucleotide
  Sense strand starting at position 2143 of SEQ ID NO: 3608
ugaaauguucuccgagcaa

SEQ ID NO: 280911 - RNA, 19 nt, Artificial Sequence
  Description of Artificial Sequence: Synthetic oligonucleotide
  Antisense strand to SEQ ID NO: 280910
uugcucggagaacauuuca

SEQ ID NO: 280912 - RNA, 19 nt, Artificial Sequence
  Description of Artificial Sequence: Synthetic oligonucleotide
  Sense strand starting at position 2147 of SEQ ID NO: 3608
auguucuccgagcaaauaa

SEQ ID NO: 280913 - RNA, 19 nt, Artificial Sequence
  Description of Artificial Sequence: Synthetic oligonucleotide
  Antisense strand to SEQ ID NO: 280912
uuauuugcucggagaacau

SEQ ID NO: 280914 - RNA, 19 nt, Artificial Sequence
  Description of Artificial Sequence: Synthetic oligonucleotide
  Sense strand starting at position 2379 of SEQ ID NO: 3608
uggcgagacccguaguaac

SEQ ID NO: 280915 - RNA, 19 nt, Artificial Sequence
  Description of Artificial Sequence: Synthetic oligonucleotide
  Antisense strand to SEQ ID NO: 280914
guuacuacgggucucgcca

SEQ ID NO: 280916 - RNA, 19 nt, Artificial Sequence
  Description of Artificial Sequence: Synthetic oligonucleotide
  Sense strand starting at position 2424 of SEQ ID NO: 3608
cuggaaugcugcuccagau

SEQ ID NO: 280917 - RNA, 19 nt, Artificial Sequence
  Description of Artificial Sequence: Synthetic oligonucleotide
  Antisense strand to SEQ ID NO: 280916
aucuggagcagcauuccag

SEQ ID NO: 280918 - RNA, 19 nt, Artificial Sequence
  Description of Artificial Sequence: Synthetic oligonucleotide
  Sense strand starting at position 2437 of SEQ ID NO: 3608
ccagaucugcaggaugagu

SEQ ID NO: 280919 - RNA, 19 nt, Artificial Sequence
  Description of Artificial Sequence: Synthetic oligonucleotide
  Antisense strand to SEQ ID NO: 280918
acucauccugcagaucugg

SEQ ID NO: 280920 - RNA, 19 nt, Artificial Sequence
  Description of Artificial Sequence: Synthetic oligonucleotide
  Sense strand starting at position 2608 of SEQ ID NO: 3608
agagucuugagaugagguu

SEQ ID NO: 280921 - RNA, 19 nt, Artificial Sequence
  Description of Artificial Sequence: Synthetic oligonucleotide
  Antisense strand to SEQ ID NO: 280920
aaccucaucucaagacucu

SEQ ID NO: 280922 - RNA, 19 nt, Artificial Sequence
  Description of Artificial Sequence: Synthetic oligonucleotide
  Sense strand starting at position 2609 of SEQ ID NO: 3608
gagucuugagaugagguuu

SEQ ID NO: 280923 - RNA, 19 nt, Artificial Sequence
  Description of Artificial Sequence: Synthetic oligonucleotide
  Antisense strand to SEQ ID NO: 280922
aaaccucaucucaagacuc

SEQ ID NO: 280924 - RNA, 19 nt, Artificial Sequence
  Description of Artificial Sequence: Synthetic oligonucleotide
  Sense strand starting at position 2677 of SEQ ID NO: 3608
gguacauucguuuauguaa

SEQ ID NO: 280925 - RNA, 19 nt, Artificial Sequence
  Description of Artificial Sequence: Synthetic oligonucleotide
  Antisense strand to SEQ ID NO: 280924
uuacauaaacgaauguacc

SEQ ID NO: 280926 - RNA, 19 nt, Artificial Sequence
  Description of Artificial Sequence: Synthetic oligonucleotide
  Sense strand starting at position 2822 of SEQ ID NO: 3608
guauuauccuguuccgaga

SEQ ID NO: 280927 - RNA, 19 nt, Artificial Sequence
  Description of Artificial Sequence: Synthetic oligonucleotide
  Antisense strand to SEQ ID NO: 280926
ucucggaacaggauaauac

SEQ ID NO: 280928 - RNA, 19 nt, Artificial Sequence
  Description of Artificial Sequence: Synthetic oligonucleotide
  Sense strand starting at position 2836 of SEQ ID NO: 3608
cgagaacucuuagcaacag

SEQ ID NO: 280929 - RNA, 19 nt, Artificial Sequence
  Description of Artificial Sequence: Synthetic oligonucleotide
  Antisense strand to SEQ ID NO: 280928
cuguugcuaagaguucucg

SEQ ID NO: 280930 - RNA, 19 nt, Artificial Sequence
  Description of Artificial Sequence: Synthetic oligonucleotide
  Sense strand starting at position 2965 of SEQ ID NO: 3608
cagcauugcugagugacca

SEQ ID NO: 280931 - RNA, 19 nt, Artificial Sequence
  Description of Artificial Sequence: Synthetic oligonucleotide
  Antisense strand to SEQ ID NO: 280930
uggucacucagcaaugcug

SEQ ID NO: 280932 - RNA, 19 nt, Artificial Sequence
  Description of Artificial Sequence: Synthetic oligonucleotide
  Sense strand starting at position 2966 of SEQ ID NO: 3608
agcauugcugagugaccau

SEQ ID NO: 280933 - RNA, 19 nt, Artificial Sequence
  Description of Artificial Sequence: Synthetic oligonucleotide
  Antisense strand to SEQ ID NO: 280932
auggucacucagcaaugcu

SEQ ID NO: 280934 - RNA, 19 nt, Artificial Sequence
  Description of Artificial Sequence: Synthetic oligonucleotide
  Sense strand starting at position 3300 of SEQ ID NO: 3608
ugugcaagacacuguuaga

SEQ ID NO: 280935 - RNA, 19 nt, Artificial Sequence
  Description of Artificial Sequence: Synthetic oligonucleotide
  Antisense strand to SEQ ID NO: 280934
ucuaacagugucuugcaca

SEQ ID NO: 280936 - RNA, 19 nt, Artificial Sequence
  Description of Artificial Sequence: Synthetic oligonucleotide
  Sense strand starting at position 3750 of SEQ ID NO: 3608
ggacuuuggcugcauguuu

SEQ ID NO: 280937 - RNA, 19 nt, Artificial Sequence
  Description of Artificial Sequence: Synthetic oligonucleotide
  Antisense strand to SEQ ID NO: 280936
aaacaugcagccaaagucc

SEQ ID NO: 280938 - RNA, 19 nt, Artificial Sequence
  Description of Artificial Sequence: Synthetic oligonucleotide
  Sense strand starting at position 3806 of SEQ ID NO: 3608
gcaggagucuuucuuccca

SEQ ID NO: 280939 - RNA, 19 nt, Artificial Sequence
  Description of Artificial Sequence: Synthetic oligonucleotide
  Antisense strand to SEQ ID NO: 280938
ugggaagaaagacuccugc

SEQ ID NO: 280940 - RNA, 19 nt, Artificial Sequence
  Description of Artificial Sequence: Synthetic oligonucleotide
  Sense strand starting at position 338 of SEQ ID NO: 3609
aaccuaugcuuaguuacga

SEQ ID NO: 280941 - RNA, 19 nt, Artificial Sequence
  Description of Artificial Sequence: Synthetic oligonucleotide
  Antisense strand to SEQ ID NO: 280940
ucguaacuaagcauagguu

SEQ ID NO: 280942 - RNA, 19 nt, Artificial Sequence
  Description of Artificial Sequence: Synthetic oligonucleotide
  Sense strand starting at position 339 of SEQ ID NO: 3609
accuaugcuuaguuacgau

SEQ ID NO: 280943 - RNA, 19 nt, Artificial Sequence
  Description of Artificial Sequence: Synthetic oligonucleotide
  Antisense strand to SEQ ID NO: 280942
aucguaacuaagcauaggu

SEQ ID NO: 280944 - RNA, 19 nt, Artificial Sequence
  Description of Artificial Sequence: Synthetic oligonucleotide
  Sense strand starting at position 342 of SEQ ID NO: 3609
uaugcuuaguuacgauaag

SEQ ID NO: 280945 - RNA, 19 nt, Artificial Sequence
  Description of Artificial Sequence: Synthetic oligonucleotide
  Antisense strand to SEQ ID NO: 280944
cuuaucguaacuaagcaua

SEQ ID NO: 280946 - RNA, 19 nt, Artificial Sequence
  Description of Artificial Sequence: Synthetic oligonucleotide
  Sense strand starting at position 343 of SEQ ID NO: 3609
augcuuaguuacgauaaga

SEQ ID NO: 280947 - RNA, 19 nt, Artificial Sequence
  Description of Artificial Sequence: Synthetic oligonucleotide
  Antisense strand to SEQ ID NO: 280946
ucuuaucguaacuaagcau

SEQ ID NO: 280948 - RNA, 19 nt, Artificial Sequence
  Description of Artificial Sequence: Synthetic oligonucleotide
  Sense strand starting at position 383 of SEQ ID NO: 3609
uaaucauggucauccguga

SEQ ID NO: 280949 - RNA, 19 nt, Artificial Sequence
  Description of Artificial Sequence: Synthetic oligonucleotide
  Antisense strand to SEQ ID NO: 280948
ucacggaugaccaugauua

SEQ ID NO: 280950 - RNA, 19 nt, Artificial Sequence
  Description of Artificial Sequence: Synthetic oligonucleotide
  Sense strand starting at position 387 of SEQ ID NO: 3609
cauggucauccgugaguuu

SEQ ID NO: 280951 - RNA, 19 nt, Artificial Sequence
  Description of Artificial Sequence: Synthetic oligonucleotide
  Antisense strand to SEQ ID NO: 280950
aaacucacggaugaccaug

SEQ ID NO: 280952 - RNA, 19 nt, Artificial Sequence
  Description of Artificial Sequence: Synthetic oligonucleotide
  Sense strand starting at position 746 of SEQ ID NO: 3609
agugacuuguagcuaacau

SEQ ID NO: 280953 - RNA, 19 nt, Artificial Sequence
  Description of Artificial Sequence: Synthetic oligonucleotide
  Antisense strand to SEQ ID NO: 280952
auguuagcuacaagucacu

SEQ ID NO: 280954 - RNA, 19 nt, Artificial Sequence
  Description of Artificial Sequence: Synthetic oligonucleotide
  Sense strand starting at position 760 of SEQ ID NO: 3609
aacauuuagugcuaugugu

SEQ ID NO: 280955 - RNA, 19 nt, Artificial Sequence
  Description of Artificial Sequence: Synthetic oligonucleotide
  Antisense strand to SEQ ID NO: 280954
acacauagcacuaaauguu

SEQ ID NO: 280956 - RNA, 19 nt, Artificial Sequence
  Description of Artificial Sequence: Synthetic oligonucleotide
  Sense strand starting at position 762 of SEQ ID NO: 3609
cauuuagugcuauguguca

SEQ ID NO: 280957 - RNA, 19 nt, Artificial Sequence
  Description of Artificial Sequence: Synthetic oligonucleotide
  Antisense strand to SEQ ID NO: 280956
ugacacauagcacuaaaug

SEQ ID NO: 280958 - RNA, 19 nt, Artificial Sequence
  Description of Artificial Sequence: Synthetic oligonucleotide
  Sense strand starting at position 764 of SEQ ID NO: 3609
uuuagugcuaugugucaag

SEQ ID NO: 280959 - RNA, 19 nt, Artificial Sequence
  Description of Artificial Sequence: Synthetic oligonucleotide
  Antisense strand to SEQ ID NO: 280958
cuugacacauagcacuaaa

SEQ ID NO: 280960 - RNA, 19 nt, Artificial Sequence
  Description of Artificial Sequence: Synthetic oligonucleotide
  Sense strand starting at position 925 of SEQ ID NO: 3609
acucaagauucugcgcaca

SEQ ID NO: 280961 - RNA, 19 nt, Artificial Sequence
  Description of Artificial Sequence: Synthetic oligonucleotide
  Antisense strand to SEQ ID NO: 280960
ugugcgcagaaucuugagu

SEQ ID NO: 280962 - RNA, 19 nt, Artificial Sequence
  Description of Artificial Sequence: Synthetic oligonucleotide
  Sense strand starting at position 927 of SEQ ID NO: 3609
ucaagauucugcgcacauc

SEQ ID NO: 280963 - RNA, 19 nt, Artificial Sequence
  Description of Artificial Sequence: Synthetic oligonucleotide
  Antisense strand to SEQ ID NO: 280962
gaugugcgcagaaucuuga

SEQ ID NO: 280964 - RNA, 19 nt, Artificial Sequence
  Description of Artificial Sequence: Synthetic oligonucleotide
  Sense strand starting at position 1409 of SEQ ID NO: 3609
aguauauguccaggagaug

SEQ ID NO: 280965 - RNA, 19 nt, Artificial Sequence
  Description of Artificial Sequence: Synthetic oligonucleotide
  Antisense strand to SEQ ID NO: 280964
caucuccuggacauauacu

SEQ ID NO: 280966 - RNA, 19 nt, Artificial Sequence
  Description of Artificial Sequence: Synthetic oligonucleotide
  Sense strand starting at position 2156 of SEQ ID NO: 3609
ucagauuucggccgccagu

SEQ ID NO: 280967 - RNA, 19 nt, Artificial Sequence
  Description of Artificial Sequence: Synthetic oligonucleotide
  Antisense strand to SEQ ID NO: 280966
acuggcggccgaaaucuga

SEQ ID NO: 280968 - RNA, 19 nt, Artificial Sequence
  Description of Artificial Sequence: Synthetic oligonucleotide
  Sense strand starting at position 2188 of SEQ ID NO: 3609
ggcguagauuuccagcaga

SEQ ID NO: 280969 - RNA, 19 nt, Artificial Sequence
  Description of Artificial Sequence: Synthetic oligonucleotide
  Antisense strand to SEQ ID NO: 280968
ucugcuggaaaucuacgcc

SEQ ID NO: 280970 - RNA, 19 nt, Artificial Sequence
  Description of Artificial Sequence: Synthetic oligonucleotide
  Sense strand starting at position 2237 of SEQ ID NO: 3609
uuuggucacuuguucuaaa

SEQ ID NO: 280971 - RNA, 19 nt, Artificial Sequence
  Description of Artificial Sequence: Synthetic oligonucleotide
  Antisense strand to SEQ ID NO: 280970
uuuagaacaagugaccaaa

SEQ ID NO: 280972 - RNA, 19 nt, Artificial Sequence
  Description of Artificial Sequence: Synthetic oligonucleotide
  Sense strand starting at position 2238 of SEQ ID NO: 3609
uuggucacuuguucuaaau

SEQ ID NO: 280973 - RNA, 19 nt, Artificial Sequence
  Description of Artificial Sequence: Synthetic oligonucleotide
  Antisense strand to SEQ ID NO: 280972
auuuagaacaagugaccaa

SEQ ID NO: 280974 - RNA, 19 nt, Artificial Sequence
  Description of Artificial Sequence: Synthetic oligonucleotide
  Sense strand starting at position 2240 of SEQ ID NO: 3609
ggucacuuguucuaaauua

SEQ ID NO: 280975 - RNA, 19 nt, Artificial Sequence
  Description of Artificial Sequence: Synthetic oligonucleotide
  Antisense strand to SEQ ID NO: 280974
uaauuuagaacaagugacc

SEQ ID NO: 280976 - RNA, 19 nt, Artificial Sequence
  Description of Artificial Sequence: Synthetic oligonucleotide
  Sense strand starting at position 2255 of SEQ ID NO: 3609
auuauaagugcgcaaugca

SEQ ID NO: 280977 - RNA, 19 nt, Artificial Sequence
  Description of Artificial Sequence: Synthetic oligonucleotide
  Antisense strand to SEQ ID NO: 280976
ugcauugcgcacuuauaau

SEQ ID NO: 280978 - RNA, 19 nt, Artificial Sequence
  Description of Artificial Sequence: Synthetic oligonucleotide
  Sense strand starting at position 2263 of SEQ ID NO: 3609
ugcgcaaugcauuggaaga

SEQ ID NO: 280979 - RNA, 19 nt, Artificial Sequence
  Description of Artificial Sequence: Synthetic oligonucleotide
  Antisense strand to SEQ ID NO: 280978
ucuuccaaugcauugcgca

SEQ ID NO: 280980 - RNA, 19 nt, Artificial Sequence
  Description of Artificial Sequence: Synthetic oligonucleotide
  Sense strand starting at position 2264 of SEQ ID NO: 3609
gcgcaaugcauuggaagaa

SEQ ID NO: 280981 - RNA, 19 nt, Artificial Sequence
  Description of Artificial Sequence: Synthetic oligonucleotide
  Antisense strand to SEQ ID NO: 280980
uucuuccaaugcauugcgc

SEQ ID NO: 280982 - RNA, 19 nt, Artificial Sequence
  Description of Artificial Sequence: Synthetic oligonucleotide
  Sense strand starting at position 2265 of SEQ ID NO: 3609
cgcaaugcauuggaagaaa

SEQ ID NO: 280983 - RNA, 19 nt, Artificial Sequence
  Description of Artificial Sequence: Synthetic oligonucleotide
  Antisense strand to SEQ ID NO: 280982
uuucuuccaaugcauugcg

SEQ ID NO: 280984 - RNA, 19 nt, Artificial Sequence
  Description of Artificial Sequence: Synthetic oligonucleotide
  Sense strand starting at position 2294 of SEQ ID NO: 3609
aggccaauuuggugaacgu

SEQ ID NO: 280985 - RNA, 19 nt, Artificial Sequence
  Description of Artificial Sequence: Synthetic oligonucleotide
  Antisense strand to SEQ ID NO: 280984
acguucaccaaauuggccu

SEQ ID NO: 280986 - RNA, 19 nt, Artificial Sequence
  Description of Artificial Sequence: Synthetic oligonucleotide
  Sense strand starting at position 2309 of SEQ ID NO: 3609
acguguaaauuggaacaaa

SEQ ID NO: 280987 - RNA, 19 nt, Artificial Sequence
  Description of Artificial Sequence: Synthetic oligonucleotide
  Antisense strand to SEQ ID NO: 280986
uuuguuccaauuuacacgu

SEQ ID NO: 280988 - RNA, 19 nt, Artificial Sequence
  Description of Artificial Sequence: Synthetic oligonucleotide
  Sense strand starting at position 2321 of SEQ ID NO: 3609
gaacaaaguuucuggagau

SEQ ID NO: 280989 - RNA, 19 nt, Artificial Sequence
  Description of Artificial Sequence: Synthetic oligonucleotide
  Antisense strand to SEQ ID NO: 280988
aucuccagaaacuuuguuc

SEQ ID NO: 280990 - RNA, 19 nt, Artificial Sequence
  Description of Artificial Sequence: Synthetic oligonucleotide
  Sense strand starting at position 2322 of SEQ ID NO: 3609
aacaaaguuucuggagaug

SEQ ID NO: 280991 - RNA, 19 nt, Artificial Sequence
  Description of Artificial Sequence: Synthetic oligonucleotide
  Antisense strand to SEQ ID NO: 280990
caucuccagaaacuuuguu

SEQ ID NO: 280992 - RNA, 19 nt, Artificial Sequence
  Description of Artificial Sequence: Synthetic oligonucleotide
  Sense strand starting at position 2331 of SEQ ID NO: 3609
ucuggagaugacugguuaa

SEQ ID NO: 280993 - RNA, 19 nt, Artificial Sequence
  Description of Artificial Sequence: Synthetic oligonucleotide
  Antisense strand to SEQ ID NO: 280992
uuaaccagucaucuccaga

SEQ ID NO: 280994 - RNA, 19 nt, Artificial Sequence
  Description of Artificial Sequence: Synthetic oligonucleotide
  Sense strand starting at position 2360 of SEQ ID NO: 3609
ucggacaugugugaauacu

SEQ ID NO: 280995 - RNA, 19 nt, Artificial Sequence
  Description of Artificial Sequence: Synthetic oligonucleotide
  Antisense strand to SEQ ID NO: 280994
aguauucacacauguccga

SEQ ID NO: 280996 - RNA, 19 nt, Artificial Sequence
  Description of Artificial Sequence: Synthetic oligonucleotide
  Sense strand starting at position 2366 of SEQ ID NO: 3609
augugugaauacuaaagca

SEQ ID NO: 280997 - RNA, 19 nt, Artificial Sequence
  Description of Artificial Sequence: Synthetic oligonucleotide
  Antisense strand to SEQ ID NO: 280996
ugcuuuaguauucacacau

SEQ ID NO: 280998 - RNA, 19 nt, Artificial Sequence
  Description of Artificial Sequence: Synthetic oligonucleotide
  Sense strand starting at position 2674 of SEQ ID NO: 3609
gagacuccgucugaauuua

SEQ ID NO: 280999 - RNA, 19 nt, Artificial Sequence
  Description of Artificial Sequence: Synthetic oligonucleotide
  Antisense strand to SEQ ID NO: 280998
uaaauucagacggagucuc

SEQ ID NO: 281000 - RNA, 19 nt, Artificial Sequence
  Description of Artificial Sequence: Synthetic oligonucleotide
  Sense strand starting at position 3131 of SEQ ID NO: 3609
agaagaaguccgcgcauuc

SEQ ID NO: 281001 - RNA, 19 nt, Artificial Sequence
  Description of Artificial Sequence: Synthetic oligonucleotide
  Antisense strand to SEQ ID NO: 281000
gaaugcgcggacuucuucu

SEQ ID NO: 281002 - RNA, 19 nt, Artificial Sequence
  Description of Artificial Sequence: Synthetic oligonucleotide
  Sense strand starting at position 3307 of SEQ ID NO: 3609
uagccauucgccuggcaca

SEQ ID NO: 281003 - RNA, 19 nt, Artificial Sequence
  Description of Artificial Sequence: Synthetic oligonucleotide
  Antisense strand to SEQ ID NO: 281002
ugugccaggcgaauggcua

SEQ ID NO: 281004 - RNA, 19 nt, Artificial Sequence
  Description of Artificial Sequence: Synthetic oligonucleotide
  Sense strand starting at position 3719 of SEQ ID NO: 3609
gucugaauuauguggacaa

SEQ ID NO: 281005 - RNA, 19 nt, Artificial Sequence
  Description of Artificial Sequence: Synthetic oligonucleotide
  Antisense strand to SEQ ID NO: 281004
uuguccacauaauucagac

SEQ ID NO: 281006 - RNA, 19 nt, Artificial Sequence
  Description of Artificial Sequence: Synthetic oligonucleotide
  Sense strand starting at position 3720 of SEQ ID NO: 3609
ucugaauuauguggacaaa

SEQ ID NO: 281007 - RNA, 19 nt, Artificial Sequence
  Description of Artificial Sequence: Synthetic oligonucleotide
  Antisense strand to SEQ ID NO: 281006
uuuguccacauaauucaga

SEQ ID NO: 281008 - RNA, 19 nt, Artificial Sequence
  Description of Artificial Sequence: Synthetic oligonucleotide
  Sense strand starting at position 3739 of SEQ ID NO: 3609
uaucaaaugcguugacauu

SEQ ID NO: 281009 - RNA, 19 nt, Artificial Sequence
  Description of Artificial Sequence: Synthetic oligonucleotide
  Antisense strand to SEQ ID NO: 281008
aaugucaacgcauuugaua

SEQ ID NO: 281010 - RNA, 19 nt, Artificial Sequence
  Description of Artificial Sequence: Synthetic oligonucleotide
  Sense strand starting at position 3948 of SEQ ID NO: 3609
gugugugacccacauuaac

SEQ ID NO: 281011 - RNA, 19 nt, Artificial Sequence
  Description of Artificial Sequence: Synthetic oligonucleotide
  Antisense strand to SEQ ID NO: 281010
guuaaugugggucacacac

SEQ ID NO: 281012 - RNA, 19 nt, Artificial Sequence
  Description of Artificial Sequence: Synthetic oligonucleotide
  Sense strand starting at position 35 of SEQ ID NO: 3613
ucaucugacucuucugaug

SEQ ID NO: 281013 - RNA, 19 nt, Artificial Sequence
  Description of Artificial Sequence: Synthetic oligonucleotide
  Antisense strand to SEQ ID NO: 281012
caucagaagagucagauga

SEQ ID NO: 281014 - RNA, 19 nt, Artificial Sequence
  Description of Artificial Sequence: Synthetic oligonucleotide
  Sense strand starting at position 266 of SEQ ID NO: 3613
acggguuuccagugaauua

SEQ ID NO: 281015 - RNA, 19 nt, Artificial Sequence
  Description of Artificial Sequence: Synthetic oligonucleotide
  Antisense strand to SEQ ID NO: 281014
uaauucacuggaaacccgu

SEQ ID NO: 281016 - RNA, 19 nt, Artificial Sequence
  Description of Artificial Sequence: Synthetic oligonucleotide
  Sense strand starting at position 267 of SEQ ID NO: 3613
cggguuuccagugaauuac

SEQ ID NO: 281017 - RNA, 19 nt, Artificial Sequence
  Description of Artificial Sequence: Synthetic oligonucleotide
  Antisense strand to SEQ ID NO: 281016
guaauucacuggaaacccg

SEQ ID NO: 281018 - RNA, 19 nt, Artificial Sequence
  Description of Artificial Sequence: Synthetic oligonucleotide
  Sense strand starting at position 434 of SEQ ID NO: 3613
uguagauacuuaucacauu

SEQ ID NO: 281019 - RNA, 19 nt, Artificial Sequence
  Description of Artificial Sequence: Synthetic oligonucleotide
  Antisense strand to SEQ ID NO: 281018
aaugugauaaguaucuaca

SEQ ID NO: 281020 - RNA, 19 nt, Artificial Sequence
  Description of Artificial Sequence: Synthetic oligonucleotide
  Sense strand starting at position 614 of SEQ ID NO: 3613
cugagugguaauugaaagu

SEQ ID NO: 281021 - RNA, 19 nt, Artificial Sequence
  Description of Artificial Sequence: Synthetic oligonucleotide
  Antisense strand to SEQ ID NO: 281020
acuuucaauuaccacucag

SEQ ID NO: 281022 - RNA, 19 nt, Artificial Sequence
  Description of Artificial Sequence: Synthetic oligonucleotide
  Sense strand starting at position 717 of SEQ ID NO: 3613
ccuauaauagaguaugcaa

SEQ ID NO: 281023 - RNA, 19 nt, Artificial Sequence
  Description of Artificial Sequence: Synthetic oligonucleotide
  Antisense strand to SEQ ID NO: 281022
uugcauacucuauuauagg

SEQ ID NO: 281024 - RNA, 19 nt, Artificial Sequence
  Description of Artificial Sequence: Synthetic oligonucleotide
  Sense strand starting at position 761 of SEQ ID NO: 3613
guuugaucugguuacgaau

SEQ ID NO: 281025 - RNA, 19 nt, Artificial Sequence
  Description of Artificial Sequence: Synthetic oligonucleotide
  Antisense strand to SEQ ID NO: 281024
auucguaaccagaucaaac

SEQ ID NO: 281026 - RNA, 19 nt, Artificial Sequence
  Description of Artificial Sequence: Synthetic oligonucleotide
  Sense strand starting at position 832 of SEQ ID NO: 3613
ugcaaauagagaugucaug

SEQ ID NO: 281027 - RNA, 19 nt, Artificial Sequence
  Description of Artificial Sequence: Synthetic oligonucleotide
  Antisense strand to SEQ ID NO: 281026
caugacaucucuauuugca

SEQ ID NO: 281028 - RNA, 19 nt, Artificial Sequence
  Description of Artificial Sequence: Synthetic oligonucleotide
  Sense strand starting at position 841 of SEQ ID NO: 3613
agaugucaugcagauagcu

SEQ ID NO: 281029 - RNA, 19 nt, Artificial Sequence
  Description of Artificial Sequence: Synthetic oligonucleotide
  Antisense strand to SEQ ID NO: 281028
agcuaucugcaugacaucu

SEQ ID NO: 281030 - RNA, 19 nt, Artificial Sequence
  Description of Artificial Sequence: Synthetic oligonucleotide
  Sense strand starting at position 884 of SEQ ID NO: 3613
ugcaucaaacuccgaaauu

SEQ ID NO: 281031 - RNA, 19 nt, Artificial Sequence
  Description of Artificial Sequence: Synthetic oligonucleotide
  Antisense strand to SEQ ID NO: 281030
aauuucggaguuugaugca

SEQ ID NO: 281032 - RNA, 19 nt, Artificial Sequence
  Description of Artificial Sequence: Synthetic oligonucleotide
  Sense strand starting at position 918 of SEQ ID NO: 3613
cugcaagauuucuugcuca

SEQ ID NO: 281033 - RNA, 19 nt, Artificial Sequence
  Description of Artificial Sequence: Synthetic oligonucleotide
  Antisense strand to SEQ ID NO: 281032
ugagcaagaaaucuugcag

SEQ ID NO: 281034 - RNA, 19 nt, Artificial Sequence
  Description of Artificial Sequence: Synthetic oligonucleotide
  Sense strand starting at position 925 of SEQ ID NO: 3613
auuucuugcucaguucuua

SEQ ID NO: 281035 - RNA, 19 nt, Artificial Sequence
  Description of Artificial Sequence: Synthetic oligonucleotide
  Antisense strand to SEQ ID NO: 281034
uaagaacugagcaagaaau

SEQ ID NO: 281036 - RNA, 19 nt, Artificial Sequence
  Description of Artificial Sequence: Synthetic oligonucleotide
  Sense strand starting at position 992 of SEQ ID NO: 3613
uaacauacuguguaacguu

SEQ ID NO: 281037 - RNA, 19 nt, Artificial Sequence
  Description of Artificial Sequence: Synthetic oligonucleotide
  Antisense strand to SEQ ID NO: 281036
aacguuacacaguauguua

SEQ ID NO: 281038 - RNA, 19 nt, Artificial Sequence
  Description of Artificial Sequence: Synthetic oligonucleotide
  Sense strand starting at position 1007 of SEQ ID NO: 3613
cguuuaaaccugcaaucug

SEQ ID NO: 281039 - RNA, 19 nt, Artificial Sequence
  Description of Artificial Sequence: Synthetic oligonucleotide
  Antisense strand to SEQ ID NO: 281038
cagauugcagguuuaaacg

SEQ ID NO: 281040 - RNA, 19 nt, Artificial Sequence
  Description of Artificial Sequence: Synthetic oligonucleotide
  Sense strand starting at position 1104 of SEQ ID NO: 3613
gcugucgucgggaguuaca

SEQ ID NO: 281041 - RNA, 19 nt, Artificial Sequence
  Description of Artificial Sequence: Synthetic oligonucleotide
  Antisense strand to SEQ ID NO: 281040
uguaacucccgacgacagc

SEQ ID NO: 281042 - RNA, 19 nt, Artificial Sequence
  Description of Artificial Sequence: Synthetic oligonucleotide
  Sense strand starting at position 1116 of SEQ ID NO: 3613
aguuacaugcuuuaugguu

SEQ ID NO: 281043 - RNA, 19 nt, Artificial Sequence
  Description of Artificial Sequence: Synthetic oligonucleotide
  Antisense strand to SEQ ID NO: 281042
aaccauaaagcauguaacu

SEQ ID NO: 281044 - RNA, 19 nt, Artificial Sequence
  Description of Artificial Sequence: Synthetic oligonucleotide
  Sense strand starting at position 1162 of SEQ ID NO: 3613
ucccgagaagcagguauua

SEQ ID NO: 281045 - RNA, 19 nt, Artificial Sequence
  Description of Artificial Sequence: Synthetic oligonucleotide
  Antisense strand to SEQ ID NO: 281044
uaauaccugcuucucggga

SEQ ID NO: 281046 - RNA, 19 nt, Artificial Sequence
  Description of Artificial Sequence: Synthetic oligonucleotide
  Sense strand starting at position 1164 of SEQ ID NO: 3613
ccgagaagcagguauuaag

SEQ ID NO: 281047 - RNA, 19 nt, Artificial Sequence
  Description of Artificial Sequence: Synthetic oligonucleotide
  Antisense strand to SEQ ID NO: 281046
cuuaauaccugcuucucgg

SEQ ID NO: 281048 - RNA, 19 nt, Artificial Sequence
  Description of Artificial Sequence: Synthetic oligonucleotide
  Sense strand starting at position 1397 of SEQ ID NO: 3613
aggguaugcaucgauucuu

SEQ ID NO: 281049 - RNA, 19 nt, Artificial Sequence
  Description of Artificial Sequence: Synthetic oligonucleotide
  Antisense strand to SEQ ID NO: 281048
aagaaucgaugcauacccu

SEQ ID NO: 281050 - RNA, 19 nt, Artificial Sequence
  Description of Artificial Sequence: Synthetic oligonucleotide
  Sense strand starting at position 1530 of SEQ ID NO: 3613
cuccaccacguguaauaau

SEQ ID NO: 281051 - RNA, 19 nt, Artificial Sequence
  Description of Artificial Sequence: Synthetic oligonucleotide
  Antisense strand to SEQ ID NO: 281050
auuauuacacgugguggag

SEQ ID NO: 281052 - RNA, 19 nt, Artificial Sequence
  Description of Artificial Sequence: Synthetic oligonucleotide
  Sense strand starting at position 2332 of SEQ ID NO: 3613
cuuagaaacccaugagucu

SEQ ID NO: 281053 - RNA, 19 nt, Artificial Sequence
  Description of Artificial Sequence: Synthetic oligonucleotide
  Antisense strand to SEQ ID NO: 281052
agacucauggguuucuaag

SEQ ID NO: 281054 - RNA, 19 nt, Artificial Sequence
  Description of Artificial Sequence: Synthetic oligonucleotide
  Sense strand starting at position 2460 of SEQ ID NO: 3613
ucgagucucucagugagga

SEQ ID NO: 281055 - RNA, 19 nt, Artificial Sequence
  Description of Artificial Sequence: Synthetic oligonucleotide
  Antisense strand to SEQ ID NO: 281054
uccucacugagagacucga

SEQ ID NO: 281056 - RNA, 19 nt, Artificial Sequence
  Description of Artificial Sequence: Synthetic oligonucleotide
  Sense strand starting at position 2461 of SEQ ID NO: 3613
cgagucucucagugaggaa

SEQ ID NO: 281057 - RNA, 19 nt, Artificial Sequence
  Description of Artificial Sequence: Synthetic oligonucleotide
  Antisense strand to SEQ ID NO: 281056
uuccucacugagagacucg

SEQ ID NO: 281058 - RNA, 19 nt, Artificial Sequence
  Description of Artificial Sequence: Synthetic oligonucleotide
  Sense strand starting at position 2462 of SEQ ID NO: 3613
gagucucucagugaggaau

SEQ ID NO: 281059 - RNA, 19 nt, Artificial Sequence
  Description of Artificial Sequence: Synthetic oligonucleotide
  Antisense strand to SEQ ID NO: 281058
auuccucacugagagacuc

SEQ ID NO: 281060 - RNA, 19 nt, Artificial Sequence
  Description of Artificial Sequence: Synthetic oligonucleotide
  Sense strand starting at position 2605 of SEQ ID NO: 3613
ugaagucacuggccuugaa

SEQ ID NO: 281061 - RNA, 19 nt, Artificial Sequence
  Description of Artificial Sequence: Synthetic oligonucleotide
  Antisense strand to SEQ ID NO: 281060
uucaaggccagugacuuca

SEQ ID NO: 281062 - RNA, 19 nt, Artificial Sequence
  Description of Artificial Sequence: Synthetic oligonucleotide
  Sense strand starting at position 2773 of SEQ ID NO: 3613
uguugaauggguggugaua

SEQ ID NO: 281063 - RNA, 19 nt, Artificial Sequence
  Description of Artificial Sequence: Synthetic oligonucleotide
  Antisense strand to SEQ ID NO: 281062
uaucaccacccauucaaca

SEQ ID NO: 281064 - RNA, 19 nt, Artificial Sequence
  Description of Artificial Sequence: Synthetic oligonucleotide
  Sense strand starting at position 2822 of SEQ ID NO: 3613
augucaugucuacaaguua

SEQ ID NO: 281065 - RNA, 19 nt, Artificial Sequence
  Description of Artificial Sequence: Synthetic oligonucleotide
  Antisense strand to SEQ ID NO: 281064
uaacuuguagacaugacau

SEQ ID NO: 281066 - RNA, 19 nt, Artificial Sequence
  Description of Artificial Sequence: Synthetic oligonucleotide
  Sense strand starting at position 2874 of SEQ ID NO: 3613
gccaaugguuguuuaggaa

SEQ ID NO: 281067 - RNA, 19 nt, Artificial Sequence
  Description of Artificial Sequence: Synthetic oligonucleotide
  Antisense strand to SEQ ID NO: 281066
uuccuaaacaaccauuggc

SEQ ID NO: 281068 - RNA, 19 nt, Artificial Sequence
  Description of Artificial Sequence: Synthetic oligonucleotide
  Sense strand starting at position 2938 of SEQ ID NO: 3613
ugauauuuauggcacuaca

SEQ ID NO: 281069 - RNA, 19 nt, Artificial Sequence
  Description of Artificial Sequence: Synthetic oligonucleotide
  Antisense strand to SEQ ID NO: 281068
uguagugccauaaauauca

SEQ ID NO: 281070 - RNA, 19 nt, Artificial Sequence
  Description of Artificial Sequence: Synthetic oligonucleotide
  Sense strand starting at position 3173 of SEQ ID NO: 3613
gcuggauagccaggaucua

SEQ ID NO: 281071 - RNA, 19 nt, Artificial Sequence
  Description of Artificial Sequence: Synthetic oligonucleotide
  Antisense strand to SEQ ID NO: 281070
uagauccuggcuauccagc

SEQ ID NO: 281072 - RNA, 19 nt, Artificial Sequence
  Description of Artificial Sequence: Synthetic oligonucleotide
  Sense strand starting at position 3277 of SEQ ID NO: 3613
uucuaucauguuuaugcua

SEQ ID NO: 281073 - RNA, 19 nt, Artificial Sequence
  Description of Artificial Sequence: Synthetic oligonucleotide
  Antisense strand to SEQ ID NO: 281072
uagcauaaacaugauagaa

SEQ ID NO: 281074 - RNA, 19 nt, Artificial Sequence
  Description of Artificial Sequence: Synthetic oligonucleotide
  Sense strand starting at position 3373 of SEQ ID NO: 3613
gaggaacuguaucuccuau

SEQ ID NO: 281075 - RNA, 19 nt, Artificial Sequence
  Description of Artificial Sequence: Synthetic oligonucleotide
  Antisense strand to SEQ ID NO: 281074
auaggagauacaguuccuc

SEQ ID NO: 281076 - RNA, 19 nt, Artificial Sequence
  Description of Artificial Sequence: Synthetic oligonucleotide
  Sense strand starting at position 3375 of SEQ ID NO: 3613
ggaacuguaucuccuauau

SEQ ID NO: 281077 - RNA, 19 nt, Artificial Sequence
  Description of Artificial Sequence: Synthetic oligonucleotide
  Antisense strand to SEQ ID NO: 281076
auauaggagauacaguucc

SEQ ID NO: 281078 - RNA, 19 nt, Artificial Sequence
  Description of Artificial Sequence: Synthetic oligonucleotide
  Sense strand starting at position 3478 of SEQ ID NO: 3613
caaagaagguuuccaggua

SEQ ID NO: 281079 - RNA, 19 nt, Artificial Sequence
  Description of Artificial Sequence: Synthetic oligonucleotide
  Antisense strand to SEQ ID NO: 281078
uaccuggaaaccuucuuug

SEQ ID NO: 281080 - RNA, 19 nt, Artificial Sequence
  Description of Artificial Sequence: Synthetic oligonucleotide
  Sense strand starting at position 3557 of SEQ ID NO: 3613
cauagcuuugguuaugaua

SEQ ID NO: 281081 - RNA, 19 nt, Artificial Sequence
  Description of Artificial Sequence: Synthetic oligonucleotide
  Antisense strand to SEQ ID NO: 281080
uaucauaaccaaagcuaug

SEQ ID NO: 281082 - RNA, 19 nt, Artificial Sequence
  Description of Artificial Sequence: Synthetic oligonucleotide
  Sense strand starting at position 3600 of SEQ ID NO: 3613
acauccacugaguguuaga

SEQ ID NO: 281083 - RNA, 19 nt, Artificial Sequence
  Description of Artificial Sequence: Synthetic oligonucleotide
  Antisense strand to SEQ ID NO: 281082
ucuaacacucaguggaugu

SEQ ID NO: 281084 - RNA, 19 nt, Artificial Sequence
  Description of Artificial Sequence: Synthetic oligonucleotide
  Sense strand starting at position 3747 of SEQ ID NO: 3613
ugauauguaucaguacuuu

SEQ ID NO: 281085 - RNA, 19 nt, Artificial Sequence
  Description of Artificial Sequence: Synthetic oligonucleotide
  Antisense strand to SEQ ID NO: 281084
aaaguacugauacauauca

SEQ ID NO: 281086 - RNA, 19 nt, Artificial Sequence
  Description of Artificial Sequence: Synthetic oligonucleotide
  Sense strand starting at position 3770 of SEQ ID NO: 3613
gagaguguuaauuggauug

SEQ ID NO: 281087 - RNA, 19 nt, Artificial Sequence
  Description of Artificial Sequence: Synthetic oligonucleotide
  Antisense strand to SEQ ID NO: 281086
caauccaauuaacacucuc

SEQ ID NO: 281088 - RNA, 19 nt, Artificial Sequence
  Description of Artificial Sequence: Synthetic oligonucleotide
  Sense strand starting at position 3854 of SEQ ID NO: 3613
uaaggaguguagcucugau

SEQ ID NO: 281089 - RNA, 19 nt, Artificial Sequence
  Description of Artificial Sequence: Synthetic oligonucleotide
  Antisense strand to SEQ ID NO: 281088
aucagagcuacacuccuua

SEQ ID NO: 281090 - RNA, 19 nt, Artificial Sequence
  Description of Artificial Sequence: Synthetic oligonucleotide
  Sense strand starting at position 3950 of SEQ ID NO: 3613
cauccuuucgaaggagaac

SEQ ID NO: 281091 - RNA, 19 nt, Artificial Sequence
  Description of Artificial Sequence: Synthetic oligonucleotide
  Antisense strand to SEQ ID NO: 281090
guucuccuucgaaaggaug

SEQ ID NO: 281092 - RNA, 19 nt, Artificial Sequence
  Description of Artificial Sequence: Synthetic oligonucleotide
  Sense strand starting at position 33 of SEQ ID NO: 3610
acauaaagcgcuuaacagu

SEQ ID NO: 281093 - RNA, 19 nt, Artificial Sequence
  Description of Artificial Sequence: Synthetic oligonucleotide
  Antisense strand to SEQ ID NO: 281092
acuguuaagcgcuuuaugu

SEQ ID NO: 281094 - RNA, 19 nt, Artificial Sequence
  Description of Artificial Sequence: Synthetic oligonucleotide
  Sense strand starting at position 163 of SEQ ID NO: 3610
ccagaugauggcugaacaa

SEQ ID NO: 281095 - RNA, 19 nt, Artificial Sequence
  Description of Artificial Sequence: Synthetic oligonucleotide
  Antisense strand to SEQ ID NO: 281094
uuguucagccaucaucugg

SEQ ID NO: 281096 - RNA, 19 nt, Artificial Sequence
  Description of Artificial Sequence: Synthetic oligonucleotide
  Sense strand starting at position 225 of SEQ ID NO: 3610
cugaguucucaccaugccu

SEQ ID NO: 281097 - RNA, 19 nt, Artificial Sequence
  Description of Artificial Sequence: Synthetic oligonucleotide
  Antisense strand to SEQ ID NO: 281096
aggcauggugagaacucag

SEQ ID NO: 281098 - RNA, 19 nt, Artificial Sequence
  Description of Artificial Sequence: Synthetic oligonucleotide
  Sense strand starting at position 359 of SEQ ID NO: 3610
ugcuaucauuugguuaacu

SEQ ID NO: 281099 - RNA, 19 nt, Artificial Sequence
  Description of Artificial Sequence: Synthetic oligonucleotide
  Antisense strand to SEQ ID NO: 281098
aguuaaccaaaugauagca

SEQ ID NO: 281100 - RNA, 19 nt, Artificial Sequence
  Description of Artificial Sequence: Synthetic oligonucleotide
  Sense strand starting at position 385 of SEQ ID NO: 3610
auccuuuagggaugcugaa

SEQ ID NO: 281101 - RNA, 19 nt, Artificial Sequence
  Description of Artificial Sequence: Synthetic oligonucleotide
  Antisense strand to SEQ ID NO: 281100
uucagcaucccuaaaggau

SEQ ID NO: 281102 - RNA, 19 nt, Artificial Sequence
  Description of Artificial Sequence: Synthetic oligonucleotide
  Sense strand starting at position 442 of SEQ ID NO: 3610
ucucuuuguccuuggauga

SEQ ID NO: 281103 - RNA, 19 nt, Artificial Sequence
  Description of Artificial Sequence: Synthetic oligonucleotide
  Antisense strand to SEQ ID NO: 281102
ucauccaaggacaaagaga

SEQ ID NO: 281104 - RNA, 19 nt, Artificial Sequence
  Description of Artificial Sequence: Synthetic oligonucleotide
  Sense strand starting at position 443 of SEQ ID NO: 3610
cucuuuguccuuggaugaa

SEQ ID NO: 281105 - RNA, 19 nt, Artificial Sequence
  Description of Artificial Sequence: Synthetic oligonucleotide
  Antisense strand to SEQ ID NO: 281104
uucauccaaggacaaagag

SEQ ID NO: 281106 - RNA, 19 nt, Artificial Sequence
  Description of Artificial Sequence: Synthetic oligonucleotide
  Sense strand starting at position 548 of SEQ ID NO: 3610
ugucucauauuugugucua

SEQ ID NO: 281107 - RNA, 19 nt, Artificial Sequence
  Description of Artificial Sequence: Synthetic oligonucleotide
  Antisense strand to SEQ ID NO: 281106
uagacacaaauaugagaca

SEQ ID NO: 281108 - RNA, 19 nt, Artificial Sequence
  Description of Artificial Sequence: Synthetic oligonucleotide
  Sense strand starting at position 642 of SEQ ID NO: 3610
acaaguauguuugcugaau

SEQ ID NO: 281109 - RNA, 19 nt, Artificial Sequence
  Description of Artificial Sequence: Synthetic oligonucleotide
  Antisense strand to SEQ ID NO: 281108
auucagcaaacauacuugu

SEQ ID NO: 281110 - RNA, 19 nt, Artificial Sequence
  Description of Artificial Sequence: Synthetic oligonucleotide
  Sense strand starting at position 650 of SEQ ID NO: 3610
guuugcugaaugugacaga

SEQ ID NO: 281111 - RNA, 19 nt, Artificial Sequence
  Description of Artificial Sequence: Synthetic oligonucleotide
  Antisense strand to SEQ ID NO: 281110
ucugucacauucagcaaac

SEQ ID NO: 281112 - RNA, 19 nt, Artificial Sequence
  Description of Artificial Sequence: Synthetic oligonucleotide
  Sense strand starting at position 655 of SEQ ID NO: 3610
cugaaugugacagaagcuu

SEQ ID NO: 281113 - RNA, 19 nt, Artificial Sequence
  Description of Artificial Sequence: Synthetic oligonucleotide
  Antisense strand to SEQ ID NO: 281112
aagcuucugucacauucag

SEQ ID NO: 281114 - RNA, 19 nt, Artificial Sequence
  Description of Artificial Sequence: Synthetic oligonucleotide
  Sense strand starting at position 663 of SEQ ID NO: 3610
gacagaagcuucuuagaga

SEQ ID NO: 281115 - RNA, 19 nt, Artificial Sequence
  Description of Artificial Sequence: Synthetic oligonucleotide
  Antisense strand to SEQ ID NO: 281114
ucucuaagaagcuucuguc

SEQ ID NO: 281116 - RNA, 19 nt, Artificial Sequence
  Description of Artificial Sequence: Synthetic oligonucleotide
  Sense strand starting at position 670 of SEQ ID NO: 3610
gcuucuuagagaugaaaug

SEQ ID NO: 281117 - RNA, 19 nt, Artificial Sequence
  Description of Artificial Sequence: Synthetic oligonucleotide
  Antisense strand to SEQ ID NO: 281116
cauuucaucucuaagaagc

SEQ ID NO: 281118 - RNA, 19 nt, Artificial Sequence
  Description of Artificial Sequence: Synthetic oligonucleotide
  Sense strand starting at position 679 of SEQ ID NO: 3610
agaugaaauguuuaacgug

SEQ ID NO: 281119 - RNA, 19 nt, Artificial Sequence
  Description of Artificial Sequence: Synthetic oligonucleotide
  Antisense strand to SEQ ID NO: 281118
cacguuaaacauuucaucu

SEQ ID NO: 281120 - RNA, 19 nt, Artificial Sequence
  Description of Artificial Sequence: Synthetic oligonucleotide
  Sense strand starting at position 700 of SEQ ID NO: 3610
aucaauucuguugagguga

SEQ ID NO: 281121 - RNA, 19 nt, Artificial Sequence
  Description of Artificial Sequence: Synthetic oligonucleotide
  Antisense strand to SEQ ID NO: 281120
ucaccucaacagaauugau

SEQ ID NO: 281122 - RNA, 19 nt, Artificial Sequence
  Description of Artificial Sequence: Synthetic oligonucleotide
  Sense strand starting at position 849 of SEQ ID NO: 3610
ggaagcauuucggaaacua

SEQ ID NO: 281123 - RNA, 19 nt, Artificial Sequence
  Description of Artificial Sequence: Synthetic oligonucleotide
  Antisense strand to SEQ ID NO: 281122
uaguuuccgaaaugcuucc

SEQ ID NO: 281124 - RNA, 19 nt, Artificial Sequence
  Description of Artificial Sequence: Synthetic oligonucleotide
  Sense strand starting at position 857 of SEQ ID NO: 3610
uucggaaacuaguuuaaca

SEQ ID NO: 281125 - RNA, 19 nt, Artificial Sequence
  Description of Artificial Sequence: Synthetic oligonucleotide
  Antisense strand to SEQ ID NO: 281124
uguuaaacuaguuuccgaa

SEQ ID NO: 281126 - RNA, 19 nt, Artificial Sequence
  Description of Artificial Sequence: Synthetic oligonucleotide
  Sense strand starting at position 950 of SEQ ID NO: 3610
agcaacuacugguuauagu

SEQ ID NO: 281127 - RNA, 19 nt, Artificial Sequence
  Description of Artificial Sequence: Synthetic oligonucleotide
  Antisense strand to SEQ ID NO: 281126
acuauaaccaguaguugcu

SEQ ID NO: 281128 - RNA, 19 nt, Artificial Sequence
  Description of Artificial Sequence: Synthetic oligonucleotide
  Sense strand starting at position 951 of SEQ ID NO: 3610
gcaacuacugguuauagua

SEQ ID NO: 281129 - RNA, 19 nt, Artificial Sequence
  Description of Artificial Sequence: Synthetic oligonucleotide
  Antisense strand to SEQ ID NO: 281128
uacuauaaccaguaguugc

SEQ ID NO: 281130 - RNA, 19 nt, Artificial Sequence
  Description of Artificial Sequence: Synthetic oligonucleotide
  Sense strand starting at position 1044 of SEQ ID NO: 3610
cccugaucaucuucugaga

SEQ ID NO: 281131 - RNA, 19 nt, Artificial Sequence
  Description of Artificial Sequence: Synthetic oligonucleotide
  Antisense strand to SEQ ID NO: 281130
ucucagaagaugaucaggg

SEQ ID NO: 281132 - RNA, 19 nt, Artificial Sequence
  Description of Artificial Sequence: Synthetic oligonucleotide
  Sense strand starting at position 1091 of SEQ ID NO: 3610
guagaacucuuaguuauca

SEQ ID NO: 281133 - RNA, 19 nt, Artificial Sequence
  Description of Artificial Sequence: Synthetic oligonucleotide
  Antisense strand to SEQ ID NO: 281132
ugauaacuaagaguucuac

SEQ ID NO: 281134 - RNA, 19 nt, Artificial Sequence
  Description of Artificial Sequence: Synthetic oligonucleotide
  Sense strand starting at position 1115 of SEQ ID NO: 3610
guaacagaaugccuauaaa

SEQ ID NO: 281135 - RNA, 19 nt, Artificial Sequence
  Description of Artificial Sequence: Synthetic oligonucleotide
  Antisense strand to SEQ ID NO: 281134
uuuauaggcauucuguuac

SEQ ID NO: 281136 - RNA, 19 nt, Artificial Sequence
  Description of Artificial Sequence: Synthetic oligonucleotide
  Sense strand starting at position 1183 of SEQ ID NO: 3610
gggccuggagggugaaaua

SEQ ID NO: 281137 - RNA, 19 nt, Artificial Sequence
  Description of Artificial Sequence: Synthetic oligonucleotide
  Antisense strand to SEQ ID NO: 281136
uauuucacccuccaggccc

SEQ ID NO: 281138 - RNA, 19 nt, Artificial Sequence
  Description of Artificial Sequence: Synthetic oligonucleotide
  Sense strand starting at position 1482 of SEQ ID NO: 3610
uugggucugguggaacaua

SEQ ID NO: 281139 - RNA, 19 nt, Artificial Sequence
  Description of Artificial Sequence: Synthetic oligonucleotide
  Antisense strand to SEQ ID NO: 281138
uauguuccaccagacccaa

SEQ ID NO: 281140 - RNA, 19 nt, Artificial Sequence
  Description of Artificial Sequence: Synthetic oligonucleotide
  Sense strand starting at position 2269 of SEQ ID NO: 3610
ugcauuaucaggcaggcaa

SEQ ID NO: 281141 - RNA, 19 nt, Artificial Sequence
  Description of Artificial Sequence: Synthetic oligonucleotide
  Antisense strand to SEQ ID NO: 281140
uugccugccugauaaugca

SEQ ID NO: 281142 - RNA, 19 nt, Artificial Sequence
  Description of Artificial Sequence: Synthetic oligonucleotide
  Sense strand starting at position 2314 of SEQ ID NO: 3610
gggcauuccuaacucaaua

SEQ ID NO: 281143 - RNA, 19 nt, Artificial Sequence
  Description of Artificial Sequence: Synthetic oligonucleotide
  Antisense strand to SEQ ID NO: 281142
uauugaguuaggaaugccc

SEQ ID NO: 281144 - RNA, 19 nt, Artificial Sequence
  Description of Artificial Sequence: Synthetic oligonucleotide
  Sense strand starting at position 2391 of SEQ ID NO: 3610
cugaaauuguuaguauggu

SEQ ID NO: 281145 - RNA, 19 nt, Artificial Sequence
  Description of Artificial Sequence: Synthetic oligonucleotide
  Antisense strand to SEQ ID NO: 281144
accauacuaacaauuucag

SEQ ID NO: 281146 - RNA, 19 nt, Artificial Sequence
  Description of Artificial Sequence: Synthetic oligonucleotide
  Sense strand starting at position 2399 of SEQ ID NO: 3610
guuaguaugguggauaaag

SEQ ID NO: 281147 - RNA, 19 nt, Artificial Sequence
  Description of Artificial Sequence: Synthetic oligonucleotide
  Antisense strand to SEQ ID NO: 281146
cuuuauccaccauacuaac

SEQ ID NO: 281148 - RNA, 19 nt, Artificial Sequence
  Description of Artificial Sequence: Synthetic oligonucleotide
  Sense strand starting at position 2442 of SEQ ID NO: 3610
ugggauaucuguguucuga

SEQ ID NO: 281149 - RNA, 19 nt, Artificial Sequence
  Description of Artificial Sequence: Synthetic oligonucleotide
  Antisense strand to SEQ ID NO: 281148
ucagaacacagauauccca

SEQ ID NO: 281150 - RNA, 19 nt, Artificial Sequence
  Description of Artificial Sequence: Synthetic oligonucleotide
  Sense strand starting at position 2444 of SEQ ID NO: 3610
ggauaucuguguucugaga

SEQ ID NO: 281151 - RNA, 19 nt, Artificial Sequence
  Description of Artificial Sequence: Synthetic oligonucleotide
  Antisense strand to SEQ ID NO: 281150
ucucagaacacagauaucc

SEQ ID NO: 281152 - RNA, 19 nt, Artificial Sequence
  Description of Artificial Sequence: Synthetic oligonucleotide
  Sense strand starting at position 2524 of SEQ ID NO: 3610
agccuauuagagcaagauc

SEQ ID NO: 281153 - RNA, 19 nt, Artificial Sequence
  Description of Artificial Sequence: Synthetic oligonucleotide
  Antisense strand to SEQ ID NO: 281152
gaucuugcucuaauaggcu

SEQ ID NO: 281154 - RNA, 19 nt, Artificial Sequence
  Description of Artificial Sequence: Synthetic oligonucleotide
  Sense strand starting at position 2547 of SEQ ID NO: 3610
gccucuggaagguauauua

SEQ ID NO: 281155 - RNA, 19 nt, Artificial Sequence
  Description of Artificial Sequence: Synthetic oligonucleotide
  Antisense strand to SEQ ID NO: 281154
uaauauaccuuccagaggc

SEQ ID NO: 281156 - RNA, 19 nt, Artificial Sequence
  Description of Artificial Sequence: Synthetic oligonucleotide
  Sense strand starting at position 2632 of SEQ ID NO: 3610
cucacuguggcuugaaaga

SEQ ID NO: 281157 - RNA, 19 nt, Artificial Sequence
  Description of Artificial Sequence: Synthetic oligonucleotide
  Antisense strand to SEQ ID NO: 281156
ucuuucaagccacagugag

SEQ ID NO: 281158 - RNA, 19 nt, Artificial Sequence
  Description of Artificial Sequence: Synthetic oligonucleotide
  Sense strand starting at position 2950 of SEQ ID NO: 3610
aguuaacaauguuuacuga

SEQ ID NO: 281159 - RNA, 19 nt, Artificial Sequence
  Description of Artificial Sequence: Synthetic oligonucleotide
  Antisense strand to SEQ ID NO: 281158
ucaguaaacauuguuaacu

SEQ ID NO: 281160 - RNA, 19 nt, Artificial Sequence
  Description of Artificial Sequence: Synthetic oligonucleotide
  Sense strand starting at position 3166 of SEQ ID NO: 3610
uuuaauggcucuguaauuu

SEQ ID NO: 281161 - RNA, 19 nt, Artificial Sequence
  Description of Artificial Sequence: Synthetic oligonucleotide
  Antisense strand to SEQ ID NO: 281160
aaauuacagagccauuaaa

SEQ ID NO: 281162 - RNA, 19 nt, Artificial Sequence
  Description of Artificial Sequence: Synthetic oligonucleotide
  Sense strand starting at position 3406 of SEQ ID NO: 3610
guggacucaucaccucauu

SEQ ID NO: 281163 - RNA, 19 nt, Artificial Sequence
  Description of Artificial Sequence: Synthetic oligonucleotide
  Antisense strand to SEQ ID NO: 281162
aaugaggugaugaguccac

SEQ ID NO: 281164 - RNA, 19 nt, Artificial Sequence
  Description of Artificial Sequence: Synthetic oligonucleotide
  Sense strand starting at position 3553 of SEQ ID NO: 3610
uguucuagccauuggaaac

SEQ ID NO: 281165 - RNA, 19 nt, Artificial Sequence
  Description of Artificial Sequence: Synthetic oligonucleotide
  Antisense strand to SEQ ID NO: 281164
guuuccaauggcuagaaca

SEQ ID NO: 281166 - RNA, 19 nt, Artificial Sequence
  Description of Artificial Sequence: Synthetic oligonucleotide
  Sense strand starting at position 3580 of SEQ ID NO: 3610
acuaucugugcugagcaga

SEQ ID NO: 281167 - RNA, 19 nt, Artificial Sequence
  Description of Artificial Sequence: Synthetic oligonucleotide
  Antisense strand to SEQ ID NO: 281166
ucugcucagcacagauagu

SEQ ID NO: 281168 - RNA, 19 nt, Artificial Sequence
  Description of Artificial Sequence: Synthetic oligonucleotide
  Sense strand starting at position 3583 of SEQ ID NO: 3610
aucugugcugagcagaaau

SEQ ID NO: 281169 - RNA, 19 nt, Artificial Sequence
  Description of Artificial Sequence: Synthetic oligonucleotide
  Antisense strand to SEQ ID NO: 281168
auuucugcucagcacagau

SEQ ID NO: 281170 - RNA, 19 nt, Artificial Sequence
  Description of Artificial Sequence: Synthetic oligonucleotide
  Sense strand starting at position 3769 of SEQ ID NO: 3610
acuagugucaaagaguuua

SEQ ID NO: 281171 - RNA, 19 nt, Artificial Sequence
  Description of Artificial Sequence: Synthetic oligonucleotide
  Antisense strand to SEQ ID NO: 281170
uaaacucuuugacacuagu

SEQ ID NO: 281172 - RNA, 19 nt, Artificial Sequence
  Description of Artificial Sequence: Synthetic oligonucleotide
  Sense strand starting at position 314 of SEQ ID NO: 3611
gaaugcucauguguauuua

SEQ ID NO: 281173 - RNA, 19 nt, Artificial Sequence
  Description of Artificial Sequence: Synthetic oligonucleotide
  Antisense strand to SEQ ID NO: 281172
uaaauacacaugagcauuc

SEQ ID NO: 281174 - RNA, 19 nt, Artificial Sequence
  Description of Artificial Sequence: Synthetic oligonucleotide
  Sense strand starting at position 318 of SEQ ID NO: 3611
gcucauguguauuuauaga

SEQ ID NO: 281175 - RNA, 19 nt, Artificial Sequence
  Description of Artificial Sequence: Synthetic oligonucleotide
  Antisense strand to SEQ ID NO: 281174
ucuauaaauacacaugagc

SEQ ID NO: 281176 - RNA, 19 nt, Artificial Sequence
  Description of Artificial Sequence: Synthetic oligonucleotide
  Sense strand starting at position 685 of SEQ ID NO: 3611
agcaucauguggucacuaa

SEQ ID NO: 281177 - RNA, 19 nt, Artificial Sequence
  Description of Artificial Sequence: Synthetic oligonucleotide
  Antisense strand to SEQ ID NO: 281176
uuagugaccacaugaugcu

SEQ ID NO: 281178 - RNA, 19 nt, Artificial Sequence
  Description of Artificial Sequence: Synthetic oligonucleotide
  Sense strand starting at position 686 of SEQ ID NO: 3611
gcaucauguggucacuaau

SEQ ID NO: 281179 - RNA, 19 nt, Artificial Sequence
  Description of Artificial Sequence: Synthetic oligonucleotide
  Antisense strand to SEQ ID NO: 281178
auuagugaccacaugaugc

SEQ ID NO: 281180 - RNA, 19 nt, Artificial Sequence
  Description of Artificial Sequence: Synthetic oligonucleotide
  Sense strand starting at position 793 of SEQ ID NO: 3611
cacugucugggccauaaau

SEQ ID NO: 281181 - RNA, 19 nt, Artificial Sequence
  Description of Artificial Sequence: Synthetic oligonucleotide
  Antisense strand to SEQ ID NO: 281180
auuuauggcccagacagug

SEQ ID NO: 281182 - RNA, 19 nt, Artificial Sequence
  Description of Artificial Sequence: Synthetic oligonucleotide
  Sense strand starting at position 795 of SEQ ID NO: 3611
cugucugggccauaaauuc

SEQ ID NO: 281183 - RNA, 19 nt, Artificial Sequence
  Description of Artificial Sequence: Synthetic oligonucleotide
  Antisense strand to SEQ ID NO: 281182
gaauuuauggcccagacag

SEQ ID NO: 281184 - RNA, 19 nt, Artificial Sequence
  Description of Artificial Sequence: Synthetic oligonucleotide
  Sense strand starting at position 860 of SEQ ID NO: 3611
gugagccggcaugagaauu

SEQ ID NO: 281185 - RNA, 19 nt, Artificial Sequence
  Description of Artificial Sequence: Synthetic oligonucleotide
  Antisense strand to SEQ ID NO: 281184
aauucucaugccggcucac

SEQ ID NO: 281186 - RNA, 19 nt, Artificial Sequence
  Description of Artificial Sequence: Synthetic oligonucleotide
  Sense strand starting at position 912 of SEQ ID NO: 3611
cccuguucuaacgggaaau

SEQ ID NO: 281187 - RNA, 19 nt, Artificial Sequence
  Description of Artificial Sequence: Synthetic oligonucleotide
  Antisense strand to SEQ ID NO: 281186
auuucccguuagaacaggg

SEQ ID NO: 281188 - RNA, 19 nt, Artificial Sequence
  Description of Artificial Sequence: Synthetic oligonucleotide
  Sense strand starting at position 913 of SEQ ID NO: 3611
ccuguucuaacgggaaaug

SEQ ID NO: 281189 - RNA, 19 nt, Artificial Sequence
  Description of Artificial Sequence: Synthetic oligonucleotide
  Antisense strand to SEQ ID NO: 281188
cauuucccguuagaacagg

SEQ ID NO: 281190 - RNA, 19 nt, Artificial Sequence
  Description of Artificial Sequence: Synthetic oligonucleotide
  Sense strand starting at position 914 of SEQ ID NO: 3611
cuguucuaacgggaaaugu

SEQ ID NO: 281191 - RNA, 19 nt, Artificial Sequence
  Description of Artificial Sequence: Synthetic oligonucleotide
  Antisense strand to SEQ ID NO: 281190
acauuucccguuagaacag

SEQ ID NO: 281192 - RNA, 19 nt, Artificial Sequence
  Description of Artificial Sequence: Synthetic oligonucleotide
  Sense strand starting at position 1103 of SEQ ID NO: 3611
ugugcagaugcuuaaguga

SEQ ID NO: 281193 - RNA, 19 nt, Artificial Sequence
  Description of Artificial Sequence: Synthetic oligonucleotide
  Antisense strand to SEQ ID NO: 281192
ucacuuaagcaucugcaca

SEQ ID NO: 281194 - RNA, 19 nt, Artificial Sequence
  Description of Artificial Sequence: Synthetic oligonucleotide
  Sense strand starting at position 1108 of SEQ ID NO: 3611
agaugcuuaagugaugcua

SEQ ID NO: 281195 - RNA, 19 nt, Artificial Sequence
  Description of Artificial Sequence: Synthetic oligonucleotide
  Antisense strand to SEQ ID NO: 281194
uagcaucacuuaagcaucu

SEQ ID NO: 281196 - RNA, 19 nt, Artificial Sequence
  Description of Artificial Sequence: Synthetic oligonucleotide
  Sense strand starting at position 1289 of SEQ ID NO: 3611
gcaggcuggcuuuacauau

SEQ ID NO: 281197 - RNA, 19 nt, Artificial Sequence
  Description of Artificial Sequence: Synthetic oligonucleotide
  Antisense strand to SEQ ID NO: 281196
auauguaaagccagccugc

SEQ ID NO: 281198 - RNA, 19 nt, Artificial Sequence
  Description of Artificial Sequence: Synthetic oligonucleotide
  Sense strand starting at position 1345 of SEQ ID NO: 3611
agugaaaugcugggugaca

SEQ ID NO: 281199 - RNA, 19 nt, Artificial Sequence
  Description of Artificial Sequence: Synthetic oligonucleotide
  Antisense strand to SEQ ID NO: 281198
ugucacccagcauuucacu

SEQ ID NO: 281200 - RNA, 19 nt, Artificial Sequence
  Description of Artificial Sequence: Synthetic oligonucleotide
  Sense strand starting at position 1346 of SEQ ID NO: 3611
gugaaaugcugggugacaa

SEQ ID NO: 281201 - RNA, 19 nt, Artificial Sequence
  Description of Artificial Sequence: Synthetic oligonucleotide
  Antisense strand to SEQ ID NO: 281200
uugucacccagcauuucac

SEQ ID NO: 281202 - RNA, 19 nt, Artificial Sequence
  Description of Artificial Sequence: Synthetic oligonucleotide
  Sense strand starting at position 1347 of SEQ ID NO: 3611
ugaaaugcugggugacaaa

SEQ ID NO: 281203 - RNA, 19 nt, Artificial Sequence
  Description of Artificial Sequence: Synthetic oligonucleotide
  Antisense strand to SEQ ID NO: 281202
uuugucacccagcauuuca

SEQ ID NO: 281204 - RNA, 19 nt, Artificial Sequence
  Description of Artificial Sequence: Synthetic oligonucleotide
  Sense strand starting at position 1548 of SEQ ID NO: 3611
cuggauaaacacuggguua

SEQ ID NO: 281205 - RNA, 19 nt, Artificial Sequence
  Description of Artificial Sequence: Synthetic oligonucleotide
  Antisense strand to SEQ ID NO: 281204
uaacccaguguuuauccag

SEQ ID NO: 281206 - RNA, 19 nt, Artificial Sequence
  Description of Artificial Sequence: Synthetic oligonucleotide
  Sense strand starting at position 1564 of SEQ ID NO: 3611
uuaaacuguucucuguuaa

SEQ ID NO: 281207 - RNA, 19 nt, Artificial Sequence
  Description of Artificial Sequence: Synthetic oligonucleotide
  Antisense strand to SEQ ID NO: 281206
uuaacagagaacaguuuaa

SEQ ID NO: 281208 - RNA, 19 nt, Artificial Sequence
  Description of Artificial Sequence: Synthetic oligonucleotide
  Sense strand starting at position 1583 of SEQ ID NO: 3611
gaacuuuauuagguugaua

SEQ ID NO: 281209 - RNA, 19 nt, Artificial Sequence
  Description of Artificial Sequence: Synthetic oligonucleotide
  Antisense strand to SEQ ID NO: 281208
uaucaaccuaauaaaguuc

SEQ ID NO: 281210 - RNA, 19 nt, Artificial Sequence
  Description of Artificial Sequence: Synthetic oligonucleotide
  Sense strand starting at position 1621 of SEQ ID NO: 3611
agucuacuucuguaaauaa

SEQ ID NO: 281211 - RNA, 19 nt, Artificial Sequence
  Description of Artificial Sequence: Synthetic oligonucleotide
  Antisense strand to SEQ ID NO: 281210
uuauuuacagaaguagacu

SEQ ID NO: 281212 - RNA, 19 nt, Artificial Sequence
  Description of Artificial Sequence: Synthetic oligonucleotide
  Sense strand starting at position 1678 of SEQ ID NO: 3611
acaagcucccuguauaugu

SEQ ID NO: 281213 - RNA, 19 nt, Artificial Sequence
  Description of Artificial Sequence: Synthetic oligonucleotide
  Antisense strand to SEQ ID NO: 281212
acauauacagggagcuugu

SEQ ID NO: 281214 - RNA, 19 nt, Artificial Sequence
  Description of Artificial Sequence: Synthetic oligonucleotide
  Sense strand starting at position 1693 of SEQ ID NO: 3611
augugaacacacugcuaaa

SEQ ID NO: 281215 - RNA, 19 nt, Artificial Sequence
  Description of Artificial Sequence: Synthetic oligonucleotide
  Antisense strand to SEQ ID NO: 281214
uuuagcaguguguucacau

SEQ ID NO: 281216 - RNA, 19 nt, Artificial Sequence
  Description of Artificial Sequence: Synthetic oligonucleotide
  Sense strand starting at position 2197 of SEQ ID NO: 3611
auuuaugauuuaugcucga

SEQ ID NO: 281217 - RNA, 19 nt, Artificial Sequence
  Description of Artificial Sequence: Synthetic oligonucleotide
  Antisense strand to SEQ ID NO: 281216
ucgagcauaaaucauaaau

SEQ ID NO: 281218 - RNA, 19 nt, Artificial Sequence
  Description of Artificial Sequence: Synthetic oligonucleotide
  Sense strand starting at position 2249 of SEQ ID NO: 3611
agcugucauuuaccaguuu

SEQ ID NO: 281219 - RNA, 19 nt, Artificial Sequence
  Description of Artificial Sequence: Synthetic oligonucleotide
  Antisense strand to SEQ ID NO: 281218
aaacugguaaaugacagcu

SEQ ID NO: 281220 - RNA, 19 nt, Artificial Sequence
  Description of Artificial Sequence: Synthetic oligonucleotide
  Sense strand starting at position 2355 of SEQ ID NO: 3611
agggcacucuuucugagaa

SEQ ID NO: 281221 - RNA, 19 nt, Artificial Sequence
  Description of Artificial Sequence: Synthetic oligonucleotide
  Antisense strand to SEQ ID NO: 281220
uucucagaaagagugcccu

SEQ ID NO: 281222 - RNA, 19 nt, Artificial Sequence
  Description of Artificial Sequence: Synthetic oligonucleotide
  Sense strand starting at position 2435 of SEQ ID NO: 3611
gagcuauauugagcuauga

SEQ ID NO: 281223 - RNA, 19 nt, Artificial Sequence
  Description of Artificial Sequence: Synthetic oligonucleotide
  Antisense strand to SEQ ID NO: 281222
ucauagcucaauauagcuc

SEQ ID NO: 281224 - RNA, 19 nt, Artificial Sequence
  Description of Artificial Sequence: Synthetic oligonucleotide
  Sense strand starting at position 2444 of SEQ ID NO: 3611
ugagcuaugacuuagcaag

SEQ ID NO: 281225 - RNA, 19 nt, Artificial Sequence
  Description of Artificial Sequence: Synthetic oligonucleotide
  Antisense strand to SEQ ID NO: 281224
cuugcuaagucauagcuca

SEQ ID NO: 281226 - RNA, 19 nt, Artificial Sequence
  Description of Artificial Sequence: Synthetic oligonucleotide
  Sense strand starting at position 2753 of SEQ ID NO: 3611
uuacaaugauuacugaagu

SEQ ID NO: 281227 - RNA, 19 nt, Artificial Sequence
  Description of Artificial Sequence: Synthetic oligonucleotide
  Antisense strand to SEQ ID NO: 281226
acuucaguaaucauuguaa

SEQ ID NO: 281228 - RNA, 19 nt, Artificial Sequence
  Description of Artificial Sequence: Synthetic oligonucleotide
  Sense strand starting at position 2816 of SEQ ID NO: 3611
acuguuaagcaacagaauu

SEQ ID NO: 281229 - RNA, 19 nt, Artificial Sequence
  Description of Artificial Sequence: Synthetic oligonucleotide
  Antisense strand to SEQ ID NO: 281228
aauucuguugcuuaacagu

SEQ ID NO: 281230 - RNA, 19 nt, Artificial Sequence
  Description of Artificial Sequence: Synthetic oligonucleotide
  Sense strand starting at position 2824 of SEQ ID NO: 3611
gcaacagaauuugauggau

SEQ ID NO: 281231 - RNA, 19 nt, Artificial Sequence
  Description of Artificial Sequence: Synthetic oligonucleotide
  Antisense strand to SEQ ID NO: 281230
auccaucaaauucuguugc

SEQ ID NO: 281232 - RNA, 19 nt, Artificial Sequence
  Description of Artificial Sequence: Synthetic oligonucleotide
  Sense strand starting at position 3242 of SEQ ID NO: 3611
ggguaucaguucuucuuag

SEQ ID NO: 281233 - RNA, 19 nt, Artificial Sequence
  Description of Artificial Sequence: Synthetic oligonucleotide
  Antisense strand to SEQ ID NO: 281232
cuaagaagaacugauaccc

SEQ ID NO: 281234 - RNA, 19 nt, Artificial Sequence
  Description of Artificial Sequence: Synthetic oligonucleotide
  Sense strand starting at position 3243 of SEQ ID NO: 3611
gguaucaguucuucuuaga

SEQ ID NO: 281235 - RNA, 19 nt, Artificial Sequence
  Description of Artificial Sequence: Synthetic oligonucleotide
  Antisense strand to SEQ ID NO: 281234
ucuaagaagaacugauacc

SEQ ID NO: 281236 - RNA, 19 nt, Artificial Sequence
  Description of Artificial Sequence: Synthetic oligonucleotide
  Sense strand starting at position 3258 of SEQ ID NO: 3611
uagauuauaucacuugggu

SEQ ID NO: 281237 - RNA, 19 nt, Artificial Sequence
  Description of Artificial Sequence: Synthetic oligonucleotide
  Antisense strand to SEQ ID NO: 281236
acccaagugauauaaucua

SEQ ID NO: 281238 - RNA, 19 nt, Artificial Sequence
  Description of Artificial Sequence: Synthetic oligonucleotide
  Sense strand starting at position 3261 of SEQ ID NO: 3611
auuauaucacuuggguaaa

SEQ ID NO: 281239 - RNA, 19 nt, Artificial Sequence
  Description of Artificial Sequence: Synthetic oligonucleotide
  Antisense strand to SEQ ID NO: 281238
uuuacccaagugauauaau

SEQ ID NO: 281240 - RNA, 19 nt, Artificial Sequence
  Description of Artificial Sequence: Synthetic oligonucleotide
  Sense strand starting at position 3294 of SEQ ID NO: 3611
auugauuucugugcucuaa

SEQ ID NO: 281241 - RNA, 19 nt, Artificial Sequence
  Description of Artificial Sequence: Synthetic oligonucleotide
  Antisense strand to SEQ ID NO: 281240
uuagagcacagaaaucaau

SEQ ID NO: 281242 - RNA, 19 nt, Artificial Sequence
  Description of Artificial Sequence: Synthetic oligonucleotide
  Sense strand starting at position 3368 of SEQ ID NO: 3611
uaaaucugggcuugucacu

SEQ ID NO: 281243 - RNA, 19 nt, Artificial Sequence
  Description of Artificial Sequence: Synthetic oligonucleotide
  Antisense strand to SEQ ID NO: 281242
agugacaagcccagauuua

SEQ ID NO: 281244 - RNA, 19 nt, Artificial Sequence
  Description of Artificial Sequence: Synthetic oligonucleotide
  Sense strand starting at position 3567 of SEQ ID NO: 3611
cggucacuggaguauggua

SEQ ID NO: 281245 - RNA, 19 nt, Artificial Sequence
  Description of Artificial Sequence: Synthetic oligonucleotide
  Antisense strand to SEQ ID NO: 281244
uaccauacuccagugaccg

SEQ ID NO: 281246 - RNA, 19 nt, Artificial Sequence
  Description of Artificial Sequence: Synthetic oligonucleotide
  Sense strand starting at position 3696 of SEQ ID NO: 3611
gcuuaugaacuaugacaaa

SEQ ID NO: 281247 - RNA, 19 nt, Artificial Sequence
  Description of Artificial Sequence: Synthetic oligonucleotide
  Antisense strand to SEQ ID NO: 281246
uuugucauaguucauaagc

SEQ ID NO: 281248 - RNA, 19 nt, Artificial Sequence
  Description of Artificial Sequence: Synthetic oligonucleotide
  Sense strand starting at position 3874 of SEQ ID NO: 3611
acaagaauugcucaagccu

SEQ ID NO: 281249 - RNA, 19 nt, Artificial Sequence
  Description of Artificial Sequence: Synthetic oligonucleotide
  Antisense strand to SEQ ID NO: 281248
aggcuugagcaauucuugu

SEQ ID NO: 281250 - RNA, 19 nt, Artificial Sequence
  Description of Artificial Sequence: Synthetic oligonucleotide
  Sense strand starting at position 3906 of SEQ ID NO: 3611
ggcuuugaaagucaugacu

SEQ ID NO: 281251 - RNA, 19 nt, Artificial Sequence
  Description of Artificial Sequence: Synthetic oligonucleotide
  Antisense strand to SEQ ID NO: 281250
agucaugacuuucaaagcc

SEQ ID NO: 281252 - RNA, 19 nt, Artificial Sequence
  Description of Artificial Sequence: Synthetic oligonucleotide
  Sense strand starting at position 292 of SEQ ID NO: 3612
gaguaaggcaguuaaguaa

SEQ ID NO: 281253 - RNA, 19 nt, Artificial Sequence
  Description of Artificial Sequence: Synthetic oligonucleotide
  Antisense strand to SEQ ID NO: 281252
uuacuuaacugccuuacuc

SEQ ID NO: 281254 - RNA, 19 nt, Artificial Sequence
  Description of Artificial Sequence: Synthetic oligonucleotide
  Sense strand starting at position 345 of SEQ ID NO: 3612
cugggaguuuaacugaaac

SEQ ID NO: 281255 - RNA, 19 nt, Artificial Sequence
  Description of Artificial Sequence: Synthetic oligonucleotide
  Antisense strand to SEQ ID NO: 281254
guuucaguuaaacucccag

SEQ ID NO: 281256 - RNA, 19 nt, Artificial Sequence
  Description of Artificial Sequence: Synthetic oligonucleotide
  Sense strand starting at position 447 of SEQ ID NO: 3612
ucacgugugcuucugucua

SEQ ID NO: 281257 - RNA, 19 nt, Artificial Sequence
  Description of Artificial Sequence: Synthetic oligonucleotide
  Antisense strand to SEQ ID NO: 281256
uagacagaagcacacguga

SEQ ID NO: 281258 - RNA, 19 nt, Artificial Sequence
  Description of Artificial Sequence: Synthetic oligonucleotide
  Sense strand starting at position 499 of SEQ ID NO: 3612
acggccugagauugaucaa

SEQ ID NO: 281259 - RNA, 19 nt, Artificial Sequence
  Description of Artificial Sequence: Synthetic oligonucleotide
  Antisense strand to SEQ ID NO: 281258
uugaucaaucucaggccgu

SEQ ID NO: 281260 - RNA, 19 nt, Artificial Sequence
  Description of Artificial Sequence: Synthetic oligonucleotide
  Sense strand starting at position 500 of SEQ ID NO: 3612
cggccugagauugaucaau

SEQ ID NO: 281261 - RNA, 19 nt, Artificial Sequence
  Description of Artificial Sequence: Synthetic oligonucleotide
  Antisense strand to SEQ ID NO: 281260
auugaucaaucucaggccg

SEQ ID NO: 281262 - RNA, 19 nt, Artificial Sequence
  Description of Artificial Sequence: Synthetic oligonucleotide
  Sense strand starting at position 502 of SEQ ID NO: 3612
gccugagauugaucaauaa

SEQ ID NO: 281263 - RNA, 19 nt, Artificial Sequence
  Description of Artificial Sequence: Synthetic oligonucleotide
  Antisense strand to SEQ ID NO: 281262
uuauugaucaaucucaggc

SEQ ID NO: 281264 - RNA, 19 nt, Artificial Sequence
  Description of Artificial Sequence: Synthetic oligonucleotide
  Sense strand starting at position 582 of SEQ ID NO: 3612
cauucuuuggcugaaggga

SEQ ID NO: 281265 - RNA, 19 nt, Artificial Sequence
  Description of Artificial Sequence: Synthetic oligonucleotide
  Antisense strand to SEQ ID NO: 281264
ucccuucagccaaagaaug

SEQ ID NO: 281266 - RNA, 19 nt, Artificial Sequence
  Description of Artificial Sequence: Synthetic oligonucleotide
  Sense strand starting at position 817 of SEQ ID NO: 3612
gugcauuuaucugucaucu

SEQ ID NO: 281267 - RNA, 19 nt, Artificial Sequence
  Description of Artificial Sequence: Synthetic oligonucleotide
  Antisense strand to SEQ ID NO: 281266
agaugacagauaaaugcac

SEQ ID NO: 281268 - RNA, 19 nt, Artificial Sequence
  Description of Artificial Sequence: Synthetic oligonucleotide
  Sense strand starting at position 917 of SEQ ID NO: 3612
cacagaauuguugguagaa

SEQ ID NO: 281269 - RNA, 19 nt, Artificial Sequence
  Description of Artificial Sequence: Synthetic oligonucleotide
  Antisense strand to SEQ ID NO: 281268
uucuaccaacaauucugug

SEQ ID NO: 281270 - RNA, 19 nt, Artificial Sequence
  Description of Artificial Sequence: Synthetic oligonucleotide
  Sense strand starting at position 918 of SEQ ID NO: 3612
acagaauuguugguagaag

SEQ ID NO: 281271 - RNA, 19 nt, Artificial Sequence
  Description of Artificial Sequence: Synthetic oligonucleotide
  Antisense strand to SEQ ID NO: 281270
cuucuaccaacaauucugu

SEQ ID NO: 281272 - RNA, 19 nt, Artificial Sequence
  Description of Artificial Sequence: Synthetic oligonucleotide
  Sense strand starting at position 958 of SEQ ID NO: 3612
augucaacacuagauuagu

SEQ ID NO: 281273 - RNA, 19 nt, Artificial Sequence
  Description of Artificial Sequence: Synthetic oligonucleotide
  Antisense strand to SEQ ID NO: 281272
acuaaucuaguguugacau

SEQ ID NO: 281274 - RNA, 19 nt, Artificial Sequence
  Description of Artificial Sequence: Synthetic oligonucleotide
  Sense strand starting at position 1107 of SEQ ID NO: 3612
ucucacaguuaauugagau

SEQ ID NO: 281275 - RNA, 19 nt, Artificial Sequence
  Description of Artificial Sequence: Synthetic oligonucleotide
  Antisense strand to SEQ ID NO: 281274
aucucaauuaacugugaga

SEQ ID NO: 281276 - RNA, 19 nt, Artificial Sequence
  Description of Artificial Sequence: Synthetic oligonucleotide
  Sense strand starting at position 1145 of SEQ ID NO: 3612
guaacuggugaugacgaua

SEQ ID NO: 281277 - RNA, 19 nt, Artificial Sequence
  Description of Artificial Sequence: Synthetic oligonucleotide
  Antisense strand to SEQ ID NO: 281276
uaucgucaucaccaguuac

SEQ ID NO: 281278 - RNA, 19 nt, Artificial Sequence
  Description of Artificial Sequence: Synthetic oligonucleotide
  Sense strand starting at position 1232 of SEQ ID NO: 3612
agcuguguacauuacuaau

SEQ ID NO: 281279 - RNA, 19 nt, Artificial Sequence
  Description of Artificial Sequence: Synthetic oligonucleotide
  Antisense strand to SEQ ID NO: 281278
auuaguaauguacacagcu

SEQ ID NO: 281280 - RNA, 19 nt, Artificial Sequence
  Description of Artificial Sequence: Synthetic oligonucleotide
  Sense strand starting at position 1234 of SEQ ID NO: 3612
cuguguacauuacuaauaa

SEQ ID NO: 281281 - RNA, 19 nt, Artificial Sequence
  Description of Artificial Sequence: Synthetic oligonucleotide
  Antisense strand to SEQ ID NO: 281280
uuauuaguaauguacacag

SEQ ID NO: 281282 - RNA, 19 nt, Artificial Sequence
  Description of Artificial Sequence: Synthetic oligonucleotide
  Sense strand starting at position 1305 of SEQ ID NO: 3612
aucucaaggcugugaaaug

SEQ ID NO: 281283 - RNA, 19 nt, Artificial Sequence
  Description of Artificial Sequence: Synthetic oligonucleotide
  Antisense strand to SEQ ID NO: 281282
cauuucacagccuugagau

SEQ ID NO: 281284 - RNA, 19 nt, Artificial Sequence
  Description of Artificial Sequence: Synthetic oligonucleotide
  Sense strand starting at position 1342 of SEQ ID NO: 3612
agaagcuguuggccaaaga

SEQ ID NO: 281285 - RNA, 19 nt, Artificial Sequence
  Description of Artificial Sequence: Synthetic oligonucleotide
  Antisense strand to SEQ ID NO: 281284
ucuuuggccaacagcuucu

SEQ ID NO: 281286 - RNA, 19 nt, Artificial Sequence
  Description of Artificial Sequence: Synthetic oligonucleotide
  Sense strand starting at position 1712 of SEQ ID NO: 3612
gaacaauguccaggacauu

SEQ ID NO: 281287 - RNA, 19 nt, Artificial Sequence
  Description of Artificial Sequence: Synthetic oligonucleotide
  Antisense strand to SEQ ID NO: 281286
aauguccuggacauuguuc

SEQ ID NO: 281288 - RNA, 19 nt, Artificial Sequence
  Description of Artificial Sequence: Synthetic oligonucleotide
  Sense strand starting at position 1770 of SEQ ID NO: 3612
aucagaguucuagaguauu

SEQ ID NO: 281289 - RNA, 19 nt, Artificial Sequence
  Description of Artificial Sequence: Synthetic oligonucleotide
  Antisense strand to SEQ ID NO: 281288
aauacucuagaacucugau

SEQ ID NO: 281290 - RNA, 19 nt, Artificial Sequence
  Description of Artificial Sequence: Synthetic oligonucleotide
  Sense strand starting at position 1778 of SEQ ID NO: 3612
ucuagaguauuaccuacau

SEQ ID NO: 281291 - RNA, 19 nt, Artificial Sequence
  Description of Artificial Sequence: Synthetic oligonucleotide
  Antisense strand to SEQ ID NO: 281290
auguagguaauacucuaga

SEQ ID NO: 281292 - RNA, 19 nt, Artificial Sequence
  Description of Artificial Sequence: Synthetic oligonucleotide
  Sense strand starting at position 2311 of SEQ ID NO: 3612
ugaguuucagaacgguaau

SEQ ID NO: 281293 - RNA, 19 nt, Artificial Sequence
  Description of Artificial Sequence: Synthetic oligonucleotide
  Antisense strand to SEQ ID NO: 281292
auuaccguucugaaacuca

SEQ ID NO: 281294 - RNA, 19 nt, Artificial Sequence
  Description of Artificial Sequence: Synthetic oligonucleotide
  Sense strand starting at position 2503 of SEQ ID NO: 3612
uggaguugaaaggguuuau

SEQ ID NO: 281295 - RNA, 19 nt, Artificial Sequence
  Description of Artificial Sequence: Synthetic oligonucleotide
  Antisense strand to SEQ ID NO: 281294
auaaacccuuucaacucca

SEQ ID NO: 281296 - RNA, 19 nt, Artificial Sequence
  Description of Artificial Sequence: Synthetic oligonucleotide
  Sense strand starting at position 2517 of SEQ ID NO: 3612
uuuauacagccuuauggaa

SEQ ID NO: 281297 - RNA, 19 nt, Artificial Sequence
  Description of Artificial Sequence: Synthetic oligonucleotide
  Antisense strand to SEQ ID NO: 281296
uuccauaaggcuguauaaa

SEQ ID NO: 281298 - RNA, 19 nt, Artificial Sequence
  Description of Artificial Sequence: Synthetic oligonucleotide
  Sense strand starting at position 2530 of SEQ ID NO: 3612
auggaauuaucucugauug

SEQ ID NO: 281299 - RNA, 19 nt, Artificial Sequence
  Description of Artificial Sequence: Synthetic oligonucleotide
  Antisense strand to SEQ ID NO: 281298
caaucagagauaauuccau

SEQ ID NO: 281300 - RNA, 19 nt, Artificial Sequence
  Description of Artificial Sequence: Synthetic oligonucleotide
  Sense strand starting at position 2531 of SEQ ID NO: 3612
uggaauuaucucugauugu

SEQ ID NO: 281301 - RNA, 19 nt, Artificial Sequence
  Description of Artificial Sequence: Synthetic oligonucleotide
  Antisense strand to SEQ ID NO: 281300
acaaucagagauaauucca

SEQ ID NO: 281302 - RNA, 19 nt, Artificial Sequence
  Description of Artificial Sequence: Synthetic oligonucleotide
  Sense strand starting at position 2764 of SEQ ID NO: 3612
cuuuaucuggcccagaauu

SEQ ID NO: 281303 - RNA, 19 nt, Artificial Sequence
  Description of Artificial Sequence: Synthetic oligonucleotide
  Antisense strand to SEQ ID NO: 281302
aauucugggccagauaaag

SEQ ID NO: 281304 - RNA, 19 nt, Artificial Sequence
  Description of Artificial Sequence: Synthetic oligonucleotide
  Sense strand starting at position 2788 of SEQ ID NO: 3612
gucuuagccagucuguagu

SEQ ID NO: 281305 - RNA, 19 nt, Artificial Sequence
  Description of Artificial Sequence: Synthetic oligonucleotide
  Antisense strand to SEQ ID NO: 281304
acuacagacuggcuaagac

SEQ ID NO: 281306 - RNA, 19 nt, Artificial Sequence
  Description of Artificial Sequence: Synthetic oligonucleotide
  Sense strand starting at position 2817 of SEQ ID NO: 3612
ugucauauaauagguggaa

SEQ ID NO: 281307 - RNA, 19 nt, Artificial Sequence
  Description of Artificial Sequence: Synthetic oligonucleotide
  Antisense strand to SEQ ID NO: 281306
uuccaccuauuauaugaca

SEQ ID NO: 281308 - RNA, 19 nt, Artificial Sequence
  Description of Artificial Sequence: Synthetic oligonucleotide
  Sense strand starting at position 2818 of SEQ ID NO: 3612
gucauauaauagguggaaa

SEQ ID NO: 281309 - RNA, 19 nt, Artificial Sequence
  Description of Artificial Sequence: Synthetic oligonucleotide
  Antisense strand to SEQ ID NO: 281308
uuuccaccuauuauaugac

SEQ ID NO: 281310 - RNA, 19 nt, Artificial Sequence
  Description of Artificial Sequence: Synthetic oligonucleotide
  Sense strand starting at position 3105 of SEQ ID NO: 3612
agaaacuccugcuuuaagu

SEQ ID NO: 281311 - RNA, 19 nt, Artificial Sequence
  Description of Artificial Sequence: Synthetic oligonucleotide
  Antisense strand to SEQ ID NO: 281310
acuuaaagcaggaguuucu

SEQ ID NO: 281312 - RNA, 19 nt, Artificial Sequence
  Description of Artificial Sequence: Synthetic oligonucleotide
  Sense strand starting at position 3134 of SEQ ID NO: 3612
agaugagacuugccaagug

SEQ ID NO: 281313 - RNA, 19 nt, Artificial Sequence
  Description of Artificial Sequence: Synthetic oligonucleotide
  Antisense strand to SEQ ID NO: 281312
cacuuggcaagucucaucu

SEQ ID NO: 281314 - RNA, 19 nt, Artificial Sequence
  Description of Artificial Sequence: Synthetic oligonucleotide
  Sense strand starting at position 3149 of SEQ ID NO: 3612
agugguuugagaugaucuc

SEQ ID NO: 281315 - RNA, 19 nt, Artificial Sequence
  Description of Artificial Sequence: Synthetic oligonucleotide
  Antisense strand to SEQ ID NO: 281314
gagaucaucucaaaccacu

SEQ ID NO: 281316 - RNA, 19 nt, Artificial Sequence
  Description of Artificial Sequence: Synthetic oligonucleotide
  Sense strand starting at position 3168 of SEQ ID NO: 3612
caggcugggucauuacuaa

SEQ ID NO: 281317 - RNA, 19 nt, Artificial Sequence
  Description of Artificial Sequence: Synthetic oligonucleotide
  Antisense strand to SEQ ID NO: 281316
uuaguaaugacccagccug

SEQ ID NO: 281318 - RNA, 19 nt, Artificial Sequence
  Description of Artificial Sequence: Synthetic oligonucleotide
  Sense strand starting at position 3175 of SEQ ID NO: 3612
ggucauuacuaauuacuag

SEQ ID NO: 281319 - RNA, 19 nt, Artificial Sequence
  Description of Artificial Sequence: Synthetic oligonucleotide
  Antisense strand to SEQ ID NO: 281318
cuaguaauuaguaaugacc

SEQ ID NO: 281320 - RNA, 19 nt, Artificial Sequence
  Description of Artificial Sequence: Synthetic oligonucleotide
  Sense strand starting at position 3223 of SEQ ID NO: 3612
cuuugagcuccacauugau

SEQ ID NO: 281321 - RNA, 19 nt, Artificial Sequence
  Description of Artificial Sequence: Synthetic oligonucleotide
  Antisense strand to SEQ ID NO: 281320
aucaauguggagcucaaag

SEQ ID NO: 281322 - RNA, 19 nt, Artificial Sequence
  Description of Artificial Sequence: Synthetic oligonucleotide
  Sense strand starting at position 3230 of SEQ ID NO: 3612
cuccacauugauggugauu

SEQ ID NO: 281323 - RNA, 19 nt, Artificial Sequence
  Description of Artificial Sequence: Synthetic oligonucleotide
  Antisense strand to SEQ ID NO: 281322
aaucaccaucaauguggag

SEQ ID NO: 281324 - RNA, 19 nt, Artificial Sequence
  Description of Artificial Sequence: Synthetic oligonucleotide
  Sense strand starting at position 3671 of SEQ ID NO: 3612
cccagaugauccucuggga

SEQ ID NO: 281325 - RNA, 19 nt, Artificial Sequence
  Description of Artificial Sequence: Synthetic oligonucleotide
  Antisense strand to SEQ ID NO: 281324
ucccagaggaucaucuggg

SEQ ID NO: 281326 - RNA, 19 nt, Artificial Sequence
  Description of Artificial Sequence: Synthetic oligonucleotide
  Sense strand starting at position 3728 of SEQ ID NO: 3612
uaauaucuccgugagucua

SEQ ID NO: 281327 - RNA, 19 nt, Artificial Sequence
  Description of Artificial Sequence: Synthetic oligonucleotide
  Antisense strand to SEQ ID NO: 281326
uagacucacggagauauua

SEQ ID NO: 281328 - RNA, 19 nt, Artificial Sequence
  Description of Artificial Sequence: Synthetic oligonucleotide
  Sense strand starting at position 3771 of SEQ ID NO: 3612
aguaaaguauuaccuucua

SEQ ID NO: 281329 - RNA, 19 nt, Artificial Sequence
  Description of Artificial Sequence: Synthetic oligonucleotide
  Antisense strand to SEQ ID NO: 281328
uagaagguaauacuuuacu

SEQ ID NO: 281330 - RNA, 19 nt, Artificial Sequence
  Description of Artificial Sequence: Synthetic oligonucleotide
  Sense strand starting at position 3976 of SEQ ID NO: 3612
ucagguauagcacauauaa

SEQ ID NO: 281331 - RNA, 19 nt, Artificial Sequence
  Description of Artificial Sequence: Synthetic oligonucleotide
  Antisense strand to SEQ ID NO: 281330
uuauaugugcuauaccuga

SEQ ID NO: 281332 - RNA, 19 nt, Artificial Sequence
  Description of Artificial Sequence: Synthetic oligonucleotide
  Sense strand starting at position 90 of SEQ ID NO: 3614
acaaucuuugaaggucaga

SEQ ID NO: 281333 - RNA, 19 nt, Artificial Sequence
  Description of Artificial Sequence: Synthetic oligonucleotide
  Antisense strand to SEQ ID NO: 281332
ucugaccuucaaagauugu

SEQ ID NO: 281334 - RNA, 19 nt, Artificial Sequence
  Description of Artificial Sequence: Synthetic oligonucleotide
  Sense strand starting at position 126 of SEQ ID NO: 3614
gcuauugagcgucucuauu

SEQ ID NO: 281335 - RNA, 19 nt, Artificial Sequence
  Description of Artificial Sequence: Synthetic oligonucleotide
  Antisense strand to SEQ ID NO: 281334
aauagagacgcucaauagc

SEQ ID NO: 281336 - RNA, 19 nt, Artificial Sequence
  Description of Artificial Sequence: Synthetic oligonucleotide
  Sense strand starting at position 191 of SEQ ID NO: 3614
auagcaccaccaugugaaa

SEQ ID NO: 281337 - RNA, 19 nt, Artificial Sequence
  Description of Artificial Sequence: Synthetic oligonucleotide
  Antisense strand to SEQ ID NO: 281336
uuucacaugguggugcuau

SEQ ID NO: 281338 - RNA, 19 nt, Artificial Sequence
  Description of Artificial Sequence: Synthetic oligonucleotide
  Sense strand starting at position 221 of SEQ ID NO: 3614
ccaucugaaucugcugaaa

SEQ ID NO: 281339 - RNA, 19 nt, Artificial Sequence
  Description of Artificial Sequence: Synthetic oligonucleotide
  Antisense strand to SEQ ID NO: 281338
uuucagcagauucagaugg

SEQ ID NO: 281340 - RNA, 19 nt, Artificial Sequence
  Description of Artificial Sequence: Synthetic oligonucleotide
  Sense strand starting at position 530 of SEQ ID NO: 3614
gagguaaacaggugguguu

SEQ ID NO: 281341 - RNA, 19 nt, Artificial Sequence
  Description of Artificial Sequence: Synthetic oligonucleotide
  Antisense strand to SEQ ID NO: 281340
aacaccaccuguuuaccuc

SEQ ID NO: 281342 - RNA, 19 nt, Artificial Sequence
  Description of Artificial Sequence: Synthetic oligonucleotide
  Sense strand starting at position 797 of SEQ ID NO: 3614
uuuacuguuccuuaacggu

SEQ ID NO: 281343 - RNA, 19 nt, Artificial Sequence
  Description of Artificial Sequence: Synthetic oligonucleotide
  Antisense strand to SEQ ID NO: 281342
accguuaaggaacaguaaa

SEQ ID NO: 281344 - RNA, 19 nt, Artificial Sequence
  Description of Artificial Sequence: Synthetic oligonucleotide
  Sense strand starting at position 813 of SEQ ID NO: 3614
gguggacuuuaccuacaua

SEQ ID NO: 281345 - RNA, 19 nt, Artificial Sequence
  Description of Artificial Sequence: Synthetic oligonucleotide
  Antisense strand to SEQ ID NO: 281344
uauguagguaaaguccacc

SEQ ID NO: 281346 - RNA, 19 nt, Artificial Sequence
  Description of Artificial Sequence: Synthetic oligonucleotide
  Sense strand starting at position 843 of SEQ ID NO: 3614
acauuucccugagaaaugc

SEQ ID NO: 281347 - RNA, 19 nt, Artificial Sequence
  Description of Artificial Sequence: Synthetic oligonucleotide
  Antisense strand to SEQ ID NO: 281346
gcauuucucagggaaaugu

SEQ ID NO: 281348 - RNA, 19 nt, Artificial Sequence
  Description of Artificial Sequence: Synthetic oligonucleotide
  Sense strand starting at position 1016 of SEQ ID NO: 3614
aaaccaugucuucgagcuu

SEQ ID NO: 281349 - RNA, 19 nt, Artificial Sequence
  Description of Artificial Sequence: Synthetic oligonucleotide
  Antisense strand to SEQ ID NO: 281348
aagcucgaagacaugguuu

SEQ ID NO: 281350 - RNA, 19 nt, Artificial Sequence
  Description of Artificial Sequence: Synthetic oligonucleotide
  Sense strand starting at position 1027 of SEQ ID NO: 3614
ucgagcuuguaagcaauaa

SEQ ID NO: 281351 - RNA, 19 nt, Artificial Sequence
  Description of Artificial Sequence: Synthetic oligonucleotide
  Antisense strand to SEQ ID NO: 281350
uuauugcuuacaagcucga

SEQ ID NO: 281352 - RNA, 19 nt, Artificial Sequence
  Description of Artificial Sequence: Synthetic oligonucleotide
  Sense strand starting at position 1028 of SEQ ID NO: 3614
cgagcuuguaagcaauaag

SEQ ID NO: 281353 - RNA, 19 nt, Artificial Sequence
  Description of Artificial Sequence: Synthetic oligonucleotide
  Antisense strand to SEQ ID NO: 281352
cuuauugcuuacaagcucg

SEQ ID NO: 281354 - RNA, 19 nt, Artificial Sequence
  Description of Artificial Sequence: Synthetic oligonucleotide
  Sense strand starting at position 1031 of SEQ ID NO: 3614
gcuuguaagcaauaagguu

SEQ ID NO: 281355 - RNA, 19 nt, Artificial Sequence
  Description of Artificial Sequence: Synthetic oligonucleotide
  Antisense strand to SEQ ID NO: 281354
aaccuuauugcuuacaagc

SEQ ID NO: 281356 - RNA, 19 nt, Artificial Sequence
  Description of Artificial Sequence: Synthetic oligonucleotide
  Sense strand starting at position 1083 of SEQ ID NO: 3614
cuaagucacugccuuaaga

SEQ ID NO: 281357 - RNA, 19 nt, Artificial Sequence
  Description of Artificial Sequence: Synthetic oligonucleotide
  Antisense strand to SEQ ID NO: 281356
ucuuaaggcagugacuuag

SEQ ID NO: 281358 - RNA, 19 nt, Artificial Sequence
  Description of Artificial Sequence: Synthetic oligonucleotide
  Sense strand starting at position 1202 of SEQ ID NO: 3614
uuggauuuccggcgggaau

SEQ ID NO: 281359 - RNA, 19 nt, Artificial Sequence
  Description of Artificial Sequence: Synthetic oligonucleotide
  Antisense strand to SEQ ID NO: 281358
auucccgccggaaauccaa

SEQ ID NO: 281360 - RNA, 19 nt, Artificial Sequence
  Description of Artificial Sequence: Synthetic oligonucleotide
  Sense strand starting at position 2479 of SEQ ID NO: 3614
cuguccguguauucagaga

SEQ ID NO: 281361 - RNA, 19 nt, Artificial Sequence
  Description of Artificial Sequence: Synthetic oligonucleotide
  Antisense strand to SEQ ID NO: 281360
ucucugaauacacggacag

SEQ ID NO: 281362 - RNA, 19 nt, Artificial Sequence
  Description of Artificial Sequence: Synthetic oligonucleotide
  Sense strand starting at position 2536 of SEQ ID NO: 3614
ggaccauugucguugagau

SEQ ID NO: 281363 - RNA, 19 nt, Artificial Sequence
  Description of Artificial Sequence: Synthetic oligonucleotide
  Antisense strand to SEQ ID NO: 281362
aucucaacgacaauggucc

SEQ ID NO: 281364 - RNA, 19 nt, Artificial Sequence
  Description of Artificial Sequence: Synthetic oligonucleotide
  Sense strand starting at position 2537 of SEQ ID NO: 3614
gaccauugucguugagauc

SEQ ID NO: 281365 - RNA, 19 nt, Artificial Sequence
  Description of Artificial Sequence: Synthetic oligonucleotide
  Antisense strand to SEQ ID NO: 281364
gaucucaacgacaaugguc

SEQ ID NO: 281366 - RNA, 19 nt, Artificial Sequence
  Description of Artificial Sequence: Synthetic oligonucleotide
  Sense strand starting at position 2538 of SEQ ID NO: 3614
accauugucguugagaucu

SEQ ID NO: 281367 - RNA, 19 nt, Artificial Sequence
  Description of Artificial Sequence: Synthetic oligonucleotide
  Antisense strand to SEQ ID NO: 281366
agaucucaacgacaauggu

SEQ ID NO: 281368 - RNA, 19 nt, Artificial Sequence
  Description of Artificial Sequence: Synthetic oligonucleotide
  Sense strand starting at position 2715 of SEQ ID NO: 3614
aucggaauuguguaguagu

SEQ ID NO: 281369 - RNA, 19 nt, Artificial Sequence
  Description of Artificial Sequence: Synthetic oligonucleotide
  Antisense strand to SEQ ID NO: 281368
acuacuacacaauuccgau

SEQ ID NO: 281370 - RNA, 19 nt, Artificial Sequence
  Description of Artificial Sequence: Synthetic oligonucleotide
  Sense strand starting at position 2730 of SEQ ID NO: 3614
uaguaaggugucggcauuu

SEQ ID NO: 281371 - RNA, 19 nt, Artificial Sequence
  Description of Artificial Sequence: Synthetic oligonucleotide
  Antisense strand to SEQ ID NO: 281370
aaaugccgacaccuuacua

SEQ ID NO: 281372 - RNA, 19 nt, Artificial Sequence
  Description of Artificial Sequence: Synthetic oligonucleotide
  Sense strand starting at position 2790 of SEQ ID NO: 3614
gcuugacuucggcagacuu

SEQ ID NO: 281373 - RNA, 19 nt, Artificial Sequence
  Description of Artificial Sequence: Synthetic oligonucleotide
  Antisense strand to SEQ ID NO: 281372
aagucugccgaagucaagc

SEQ ID NO: 281374 - RNA, 19 nt, Artificial Sequence
  Description of Artificial Sequence: Synthetic oligonucleotide
  Sense strand starting at position 2902 of SEQ ID NO: 3614
caaagcaaguuuguugaca

SEQ ID NO: 281375 - RNA, 19 nt, Artificial Sequence
  Description of Artificial Sequence: Synthetic oligonucleotide
  Antisense strand to SEQ ID NO: 281374
ugucaacaaacuugcuuug

SEQ ID NO: 281376 - RNA, 19 nt, Artificial Sequence
  Description of Artificial Sequence: Synthetic oligonucleotide
  Sense strand starting at position 2910 of SEQ ID NO: 3614
guuuguugacagcauuaaa

SEQ ID NO: 281377 - RNA, 19 nt, Artificial Sequence
  Description of Artificial Sequence: Synthetic oligonucleotide
  Antisense strand to SEQ ID NO: 281376
uuuaaugcugucaacaaac

SEQ ID NO: 281378 - RNA, 19 nt, Artificial Sequence
  Description of Artificial Sequence: Synthetic oligonucleotide
  Sense strand starting at position 2941 of SEQ ID NO: 3614
uugggagugugaccugaaa

SEQ ID NO: 281379 - RNA, 19 nt, Artificial Sequence
  Description of Artificial Sequence: Synthetic oligonucleotide
  Antisense strand to SEQ ID NO: 281378
uuucaggucacacucccaa

SEQ ID NO: 281380 - RNA, 19 nt, Artificial Sequence
  Description of Artificial Sequence: Synthetic oligonucleotide
  Sense strand starting at position 2943 of SEQ ID NO: 3614
gggagugugaccugaaauu

SEQ ID NO: 281381 - RNA, 19 nt, Artificial Sequence
  Description of Artificial Sequence: Synthetic oligonucleotide
  Antisense strand to SEQ ID NO: 281380
aauuucaggucacacuccc

SEQ ID NO: 281382 - RNA, 19 nt, Artificial Sequence
  Description of Artificial Sequence: Synthetic oligonucleotide
  Sense strand starting at position 2952 of SEQ ID NO: 3614
accugaaauugguugcaau

SEQ ID NO: 281383 - RNA, 19 nt, Artificial Sequence
  Description of Artificial Sequence: Synthetic oligonucleotide
  Antisense strand to SEQ ID NO: 281382
auugcaaccaauuucaggu

SEQ ID NO: 281384 - RNA, 19 nt, Artificial Sequence
  Description of Artificial Sequence: Synthetic oligonucleotide
  Sense strand starting at position 2953 of SEQ ID NO: 3614
ccugaaauugguugcaaug

SEQ ID NO: 281385 - RNA, 19 nt, Artificial Sequence
  Description of Artificial Sequence: Synthetic oligonucleotide
  Antisense strand to SEQ ID NO: 281384
cauugcaaccaauuucagg

SEQ ID NO: 281386 - RNA, 19 nt, Artificial Sequence
  Description of Artificial Sequence: Synthetic oligonucleotide
  Sense strand starting at position 2993 of SEQ ID NO: 3614
cccaucugcuugcuaagaa

SEQ ID NO: 281387 - RNA, 19 nt, Artificial Sequence
  Description of Artificial Sequence: Synthetic oligonucleotide
  Antisense strand to SEQ ID NO: 281386
uucuuagcaagcagauggg

SEQ ID NO: 281388 - RNA, 19 nt, Artificial Sequence
  Description of Artificial Sequence: Synthetic oligonucleotide
  Sense strand starting at position 3064 of SEQ ID NO: 3614
ccucucuaagaaugagagu

SEQ ID NO: 281389 - RNA, 19 nt, Artificial Sequence
  Description of Artificial Sequence: Synthetic oligonucleotide
  Antisense strand to SEQ ID NO: 281388
acucucauucuuagagagg

SEQ ID NO: 281390 - RNA, 19 nt, Artificial Sequence
  Description of Artificial Sequence: Synthetic oligonucleotide
  Sense strand starting at position 3103 of SEQ ID NO: 3614
gccaaauccugguuugguu

SEQ ID NO: 281391 - RNA, 19 nt, Artificial Sequence
  Description of Artificial Sequence: Synthetic oligonucleotide
  Antisense strand to SEQ ID NO: 281390
aaccaaaccaggauuuggc

SEQ ID NO: 281392 - RNA, 19 nt, Artificial Sequence
  Description of Artificial Sequence: Synthetic oligonucleotide
  Sense strand starting at position 3105 of SEQ ID NO: 3614
caaauccugguuugguuaa

SEQ ID NO: 281393 - RNA, 19 nt, Artificial Sequence
  Description of Artificial Sequence: Synthetic oligonucleotide
  Antisense strand to SEQ ID NO: 281392
uuaaccaaaccaggauuug

SEQ ID NO: 281394 - RNA, 19 nt, Artificial Sequence
  Description of Artificial Sequence: Synthetic oligonucleotide
  Sense strand starting at position 3107 of SEQ ID NO: 3614
aauccugguuugguuaauu

SEQ ID NO: 281395 - RNA, 19 nt, Artificial Sequence
  Description of Artificial Sequence: Synthetic oligonucleotide
  Antisense strand to SEQ ID NO: 281394
aauuaaccaaaccaggauu

SEQ ID NO: 281396 - RNA, 19 nt, Artificial Sequence
  Description of Artificial Sequence: Synthetic oligonucleotide
  Sense strand starting at position 3112 of SEQ ID NO: 3614
ugguuugguuaauuacauu

SEQ ID NO: 281397 - RNA, 19 nt, Artificial Sequence
  Description of Artificial Sequence: Synthetic oligonucleotide
  Antisense strand to SEQ ID NO: 281396
aauguaauuaaccaaacca

SEQ ID NO: 281398 - RNA, 19 nt, Artificial Sequence
  Description of Artificial Sequence: Synthetic oligonucleotide
  Sense strand starting at position 3177 of SEQ ID NO: 3614
uuuguacaaucuguuccaa

SEQ ID NO: 281399 - RNA, 19 nt, Artificial Sequence
  Description of Artificial Sequence: Synthetic oligonucleotide
  Antisense strand to SEQ ID NO: 281398
uuggaacagauuguacaaa

SEQ ID NO: 281400 - RNA, 19 nt, Artificial Sequence
  Description of Artificial Sequence: Synthetic oligonucleotide
  Sense strand starting at position 3179 of SEQ ID NO: 3614
uguacaaucuguuccaaac

SEQ ID NO: 281401 - RNA, 19 nt, Artificial Sequence
  Description of Artificial Sequence: Synthetic oligonucleotide
  Antisense strand to SEQ ID NO: 281400
guuuggaacagauuguaca

SEQ ID NO: 281402 - RNA, 19 nt, Artificial Sequence
  Description of Artificial Sequence: Synthetic oligonucleotide
  Sense strand starting at position 3321 of SEQ ID NO: 3614
guaugucaauauucuugua

SEQ ID NO: 281403 - RNA, 19 nt, Artificial Sequence
  Description of Artificial Sequence: Synthetic oligonucleotide
  Antisense strand to SEQ ID NO: 281402
uacaagaauauugacauac

SEQ ID NO: 281404 - RNA, 19 nt, Artificial Sequence
  Description of Artificial Sequence: Synthetic oligonucleotide
  Sense strand starting at position 3349 of SEQ ID NO: 3614
acuaucucuugacuggauu

SEQ ID NO: 281405 - RNA, 19 nt, Artificial Sequence
  Description of Artificial Sequence: Synthetic oligonucleotide
  Antisense strand to SEQ ID NO: 281404
aauccagucaagagauagu

SEQ ID NO: 281406 - RNA, 19 nt, Artificial Sequence
  Description of Artificial Sequence: Synthetic oligonucleotide
  Sense strand starting at position 3350 of SEQ ID NO: 3614
cuaucucuugacuggauua

SEQ ID NO: 281407 - RNA, 19 nt, Artificial Sequence
  Description of Artificial Sequence: Synthetic oligonucleotide
  Antisense strand to SEQ ID NO: 281406
uaauccagucaagagauag

SEQ ID NO: 281408 - RNA, 19 nt, Artificial Sequence
  Description of Artificial Sequence: Synthetic oligonucleotide
  Sense strand starting at position 3420 of SEQ ID NO: 3614
uugaguuaauguccuuugu

SEQ ID NO: 281409 - RNA, 19 nt, Artificial Sequence
  Description of Artificial Sequence: Synthetic oligonucleotide
  Antisense strand to SEQ ID NO: 281408
acaaaggacauuaacucaa

SEQ ID NO: 281410 - RNA, 19 nt, Artificial Sequence
  Description of Artificial Sequence: Synthetic oligonucleotide
  Sense strand starting at position 3821 of SEQ ID NO: 3614
uccuuucuugugggaauca

SEQ ID NO: 281411 - RNA, 19 nt, Artificial Sequence
  Description of Artificial Sequence: Synthetic oligonucleotide
  Antisense strand to SEQ ID NO: 281410
ugauucccacaagaaagga

SEQ ID NO: 281412 - RNA, 19 nt, Artificial Sequence
  Description of Artificial Sequence: Synthetic oligonucleotide
  Sense strand starting at position 87 of SEQ ID NO: 3617
aaucuauggucaucuggaa

SEQ ID NO: 281413 - RNA, 19 nt, Artificial Sequence
  Description of Artificial Sequence: Synthetic oligonucleotide
  Antisense strand to SEQ ID NO: 281412
uuccagaugaccauagauu

SEQ ID NO: 281414 - RNA, 19 nt, Artificial Sequence
  Description of Artificial Sequence: Synthetic oligonucleotide
  Sense strand starting at position 229 of SEQ ID NO: 3617
uaaacaugugaauguguca

SEQ ID NO: 281415 - RNA, 19 nt, Artificial Sequence
  Description of Artificial Sequence: Synthetic oligonucleotide
  Antisense strand to SEQ ID NO: 281414
ugacacauucacauguuua

SEQ ID NO: 281416 - RNA, 19 nt, Artificial Sequence
  Description of Artificial Sequence: Synthetic oligonucleotide
  Sense strand starting at position 232 of SEQ ID NO: 3617
acaugugaaugugucaaau

SEQ ID NO: 281417 - RNA, 19 nt, Artificial Sequence
  Description of Artificial Sequence: Synthetic oligonucleotide
  Antisense strand to SEQ ID NO: 281416
auuugacacauucacaugu

SEQ ID NO: 281418 - RNA, 19 nt, Artificial Sequence
  Description of Artificial Sequence: Synthetic oligonucleotide
  Sense strand starting at position 302 of SEQ ID NO: 3617
ucagaauugcuguaagcaa

SEQ ID NO: 281419 - RNA, 19 nt, Artificial Sequence
  Description of Artificial Sequence: Synthetic oligonucleotide
  Antisense strand to SEQ ID NO: 281418
uugcuuacagcaauucuga

SEQ ID NO: 281420 - RNA, 19 nt, Artificial Sequence
  Description of Artificial Sequence: Synthetic oligonucleotide
  Sense strand starting at position 317 of SEQ ID NO: 3617
gcaacauugcuguaauuag

SEQ ID NO: 281421 - RNA, 19 nt, Artificial Sequence
  Description of Artificial Sequence: Synthetic oligonucleotide
  Antisense strand to SEQ ID NO: 281420
cuaauuacagcaauguugc

SEQ ID NO: 281422 - RNA, 19 nt, Artificial Sequence
  Description of Artificial Sequence: Synthetic oligonucleotide
  Sense strand starting at position 343 of SEQ ID NO: 3617
uggcguggcaauuaauuaa

SEQ ID NO: 281423 - RNA, 19 nt, Artificial Sequence
  Description of Artificial Sequence: Synthetic oligonucleotide
  Antisense strand to SEQ ID NO: 281422
uuaauuaauugccacgcca

SEQ ID NO: 281424 - RNA, 19 nt, Artificial Sequence
  Description of Artificial Sequence: Synthetic oligonucleotide
  Sense strand starting at position 369 of SEQ ID NO: 3617
uagaguccacucuguggaa

SEQ ID NO: 281425 - RNA, 19 nt, Artificial Sequence
  Description of Artificial Sequence: Synthetic oligonucleotide
  Antisense strand to SEQ ID NO: 281424
uuccacagaguggacucua

SEQ ID NO: 281426 - RNA, 19 nt, Artificial Sequence
  Description of Artificial Sequence: Synthetic oligonucleotide
  Sense strand starting at position 371 of SEQ ID NO: 3617
gaguccacucuguggaaga

SEQ ID NO: 281427 - RNA, 19 nt, Artificial Sequence
  Description of Artificial Sequence: Synthetic oligonucleotide
  Antisense strand to SEQ ID NO: 281426
ucuuccacagaguggacuc

SEQ ID NO: 281428 - RNA, 19 nt, Artificial Sequence
  Description of Artificial Sequence: Synthetic oligonucleotide
  Sense strand starting at position 901 of SEQ ID NO: 3617
acacaaaugugguuauuau

SEQ ID NO: 281429 - RNA, 19 nt, Artificial Sequence
  Description of Artificial Sequence: Synthetic oligonucleotide
  Antisense strand to SEQ ID NO: 281428
auaauaaccacauuugugu

SEQ ID NO: 281430 - RNA, 19 nt, Artificial Sequence
  Description of Artificial Sequence: Synthetic oligonucleotide
  Sense strand starting at position 911 of SEQ ID NO: 3617
gguuauuaucagcagcgga

SEQ ID NO: 281431 - RNA, 19 nt, Artificial Sequence
  Description of Artificial Sequence: Synthetic oligonucleotide
  Antisense strand to SEQ ID NO: 281430
uccgcugcugauaauaacc

SEQ ID NO: 281432 - RNA, 19 nt, Artificial Sequence
  Description of Artificial Sequence: Synthetic oligonucleotide
  Sense strand starting at position 931 of SEQ ID NO: 3617
gcaaauauggugcaucauu

SEQ ID NO: 281433 - RNA, 19 nt, Artificial Sequence
  Description of Artificial Sequence: Synthetic oligonucleotide
  Antisense strand to SEQ ID NO: 281432
aaugaugcaccauauuugc

SEQ ID NO: 281434 - RNA, 19 nt, Artificial Sequence
  Description of Artificial Sequence: Synthetic oligonucleotide
  Sense strand starting at position 992 of SEQ ID NO: 3617
uuuggaaugucccuaguag

SEQ ID NO: 281435 - RNA, 19 nt, Artificial Sequence
  Description of Artificial Sequence: Synthetic oligonucleotide
  Antisense strand to SEQ ID NO: 281434
cuacuagggacauuccaaa

SEQ ID NO: 281436 - RNA, 19 nt, Artificial Sequence
  Description of Artificial Sequence: Synthetic oligonucleotide
  Sense strand starting at position 1119 of SEQ ID NO: 3617
augaacgaauguuuggaaa

SEQ ID NO: 281437 - RNA, 19 nt, Artificial Sequence
  Description of Artificial Sequence: Synthetic oligonucleotide
  Antisense strand to SEQ ID NO: 281436
uuuccaaacauucguucau

SEQ ID NO: 281438 - RNA, 19 nt, Artificial Sequence
  Description of Artificial Sequence: Synthetic oligonucleotide
  Sense strand starting at position 1331 of SEQ ID NO: 3617
uuguccauuucugcuugaa

SEQ ID NO: 281439 - RNA, 19 nt, Artificial Sequence
  Description of Artificial Sequence: Synthetic oligonucleotide
  Antisense strand to SEQ ID NO: 281438
uucaagcagaaauggacaa

SEQ ID NO: 281440 - RNA, 19 nt, Artificial Sequence
  Description of Artificial Sequence: Synthetic oligonucleotide
  Sense strand starting at position 1397 of SEQ ID NO: 3617
auagguggauuauuaauca

SEQ ID NO: 281441 - RNA, 19 nt, Artificial Sequence
  Description of Artificial Sequence: Synthetic oligonucleotide
  Antisense strand to SEQ ID NO: 281440
ugauuaauaauccaccuau

SEQ ID NO: 281442 - RNA, 19 nt, Artificial Sequence
  Description of Artificial Sequence: Synthetic oligonucleotide
  Sense strand starting at position 1401 of SEQ ID NO: 3617
guggauuauuaaucagcaa

SEQ ID NO: 281443 - RNA, 19 nt, Artificial Sequence
  Description of Artificial Sequence: Synthetic oligonucleotide
  Antisense strand to SEQ ID NO: 281442
uugcugauuaauaauccac

SEQ ID NO: 281444 - RNA, 19 nt, Artificial Sequence
  Description of Artificial Sequence: Synthetic oligonucleotide
  Sense strand starting at position 1468 of SEQ ID NO: 3617
ggugaucaucaaugaaauu

SEQ ID NO: 281445 - RNA, 19 nt, Artificial Sequence
  Description of Artificial Sequence: Synthetic oligonucleotide
  Antisense strand to SEQ ID NO: 281444
aauuucauugaugaucacc

SEQ ID NO: 281446 - RNA, 19 nt, Artificial Sequence
  Description of Artificial Sequence: Synthetic oligonucleotide
  Sense strand starting at position 1522 of SEQ ID NO: 3617
ugaagaaaguuuguaaagu

SEQ ID NO: 281447 - RNA, 19 nt, Artificial Sequence
  Description of Artificial Sequence: Synthetic oligonucleotide
  Antisense strand to SEQ ID NO: 281446
acuuuacaaacuuucuuca

SEQ ID NO: 281448 - RNA, 19 nt, Artificial Sequence
  Description of Artificial Sequence: Synthetic oligonucleotide
  Sense strand starting at position 1590 of SEQ ID NO: 3617
ugucauaaccaagguugau

SEQ ID NO: 281449 - RNA, 19 nt, Artificial Sequence
  Description of Artificial Sequence: Synthetic oligonucleotide
  Antisense strand to SEQ ID NO: 281448
aucaaccuugguuaugaca

SEQ ID NO: 281450 - RNA, 19 nt, Artificial Sequence
  Description of Artificial Sequence: Synthetic oligonucleotide
  Sense strand starting at position 1990 of SEQ ID NO: 3617
cuuugagcucaaugaauua

SEQ ID NO: 281451 - RNA, 19 nt, Artificial Sequence
  Description of Artificial Sequence: Synthetic oligonucleotide
  Antisense strand to SEQ ID NO: 281450
uaauucauugagcucaaag

SEQ ID NO: 281452 - RNA, 19 nt, Artificial Sequence
  Description of Artificial Sequence: Synthetic oligonucleotide
  Sense strand starting at position 2008 of SEQ ID NO: 3617
aaagguuguuuggcuaaau

SEQ ID NO: 281453 - RNA, 19 nt, Artificial Sequence
  Description of Artificial Sequence: Synthetic oligonucleotide
  Antisense strand to SEQ ID NO: 281452
auuuagccaaacaaccuuu

SEQ ID NO: 281454 - RNA, 19 nt, Artificial Sequence
  Description of Artificial Sequence: Synthetic oligonucleotide
  Sense strand starting at position 2009 of SEQ ID NO: 3617
aagguuguuuggcuaaaug

SEQ ID NO: 281455 - RNA, 19 nt, Artificial Sequence
  Description of Artificial Sequence: Synthetic oligonucleotide
  Antisense strand to SEQ ID NO: 281454
cauuuagccaaacaaccuu

SEQ ID NO: 281456 - RNA, 19 nt, Artificial Sequence
  Description of Artificial Sequence: Synthetic oligonucleotide
  Sense strand starting at position 2087 of SEQ ID NO: 3617
uuccuuuccugggcuauaa

SEQ ID NO: 281457 - RNA, 19 nt, Artificial Sequence
  Description of Artificial Sequence: Synthetic oligonucleotide
  Antisense strand to SEQ ID NO: 281456
uuauagcccaggaaaggaa

SEQ ID NO: 281458 - RNA, 19 nt, Artificial Sequence
  Description of Artificial Sequence: Synthetic oligonucleotide
  Sense strand starting at position 2089 of SEQ ID NO: 3617
ccuuuccugggcuauaaau

SEQ ID NO: 281459 - RNA, 19 nt, Artificial Sequence
  Description of Artificial Sequence: Synthetic oligonucleotide
  Antisense strand to SEQ ID NO: 281458
auuuauagcccaggaaagg

SEQ ID NO: 281460 - RNA, 19 nt, Artificial Sequence
  Description of Artificial Sequence: Synthetic oligonucleotide
  Sense strand starting at position 2169 of SEQ ID NO: 3617
cagccuuagguauaugagu

SEQ ID NO: 281461 - RNA, 19 nt, Artificial Sequence
  Description of Artificial Sequence: Synthetic oligonucleotide
  Antisense strand to SEQ ID NO: 281460
acucauauaccuaaggcug

SEQ ID NO: 281462 - RNA, 19 nt, Artificial Sequence
  Description of Artificial Sequence: Synthetic oligonucleotide
  Sense strand starting at position 2336 of SEQ ID NO: 3617
cuuaaauaugguugauucu

SEQ ID NO: 281463 - RNA, 19 nt, Artificial Sequence
  Description of Artificial Sequence: Synthetic oligonucleotide
  Antisense strand to SEQ ID NO: 281462
agaaucaaccauauuuaag

SEQ ID NO: 281464 - RNA, 19 nt, Artificial Sequence
  Description of Artificial Sequence: Synthetic oligonucleotide
  Sense strand starting at position 2347 of SEQ ID NO: 3617
uugauucuucaagguggga

SEQ ID NO: 281465 - RNA, 19 nt, Artificial Sequence
  Description of Artificial Sequence: Synthetic oligonucleotide
  Antisense strand to SEQ ID NO: 281464
ucccaccuugaagaaucaa

SEQ ID NO: 281466 - RNA, 19 nt, Artificial Sequence
  Description of Artificial Sequence: Synthetic oligonucleotide
  Sense strand starting at position 2362 of SEQ ID NO: 3617
gggaguguaugucuggaau

SEQ ID NO: 281467 - RNA, 19 nt, Artificial Sequence
  Description of Artificial Sequence: Synthetic oligonucleotide
  Antisense strand to SEQ ID NO: 281466
auuccagacauacacuccc

SEQ ID NO: 281468 - RNA, 19 nt, Artificial Sequence
  Description of Artificial Sequence: Synthetic oligonucleotide
  Sense strand starting at position 2365 of SEQ ID NO: 3617
aguguaugucuggaaugaa

SEQ ID NO: 281469 - RNA, 19 nt, Artificial Sequence
  Description of Artificial Sequence: Synthetic oligonucleotide
  Antisense strand to SEQ ID NO: 281468
uucauuccagacauacacu

SEQ ID NO: 281470 - RNA, 19 nt, Artificial Sequence
  Description of Artificial Sequence: Synthetic oligonucleotide
  Sense strand starting at position 2514 of SEQ ID NO: 3617
ucuauuagaugucuaugua

SEQ ID NO: 281471 - RNA, 19 nt, Artificial Sequence
  Description of Artificial Sequence: Synthetic oligonucleotide
  Antisense strand to SEQ ID NO: 281470
uacauagacaucuaauaga

SEQ ID NO: 281472 - RNA, 19 nt, Artificial Sequence
  Description of Artificial Sequence: Synthetic oligonucleotide
  Sense strand starting at position 2515 of SEQ ID NO: 3617
cuauuagaugucuauguau

SEQ ID NO: 281473 - RNA, 19 nt, Artificial Sequence
  Description of Artificial Sequence: Synthetic oligonucleotide
  Antisense strand to SEQ ID NO: 281472
auacauagacaucuaauag

SEQ ID NO: 281474 - RNA, 19 nt, Artificial Sequence
  Description of Artificial Sequence: Synthetic oligonucleotide
  Sense strand starting at position 2517 of SEQ ID NO: 3617
auuagaugucuauguauug

SEQ ID NO: 281475 - RNA, 19 nt, Artificial Sequence
  Description of Artificial Sequence: Synthetic oligonucleotide
  Antisense strand to SEQ ID NO: 281474
caauacauagacaucuaau

SEQ ID NO: 281476 - RNA, 19 nt, Artificial Sequence
  Description of Artificial Sequence: Synthetic oligonucleotide
  Sense strand starting at position 2518 of SEQ ID NO: 3617
uuagaugucuauguauuga

SEQ ID NO: 281477 - RNA, 19 nt, Artificial Sequence
  Description of Artificial Sequence: Synthetic oligonucleotide
  Antisense strand to SEQ ID NO: 281476
ucaauacauagacaucuaa

SEQ ID NO: 281478 - RNA, 19 nt, Artificial Sequence
  Description of Artificial Sequence: Synthetic oligonucleotide
  Sense strand starting at position 2656 of SEQ ID NO: 3617
ucuuuacgugaguaacacu

SEQ ID NO: 281479 - RNA, 19 nt, Artificial Sequence
  Description of Artificial Sequence: Synthetic oligonucleotide
  Antisense strand to SEQ ID NO: 281478
aguguuacucacguaaaga

SEQ ID NO: 281480 - RNA, 19 nt, Artificial Sequence
  Description of Artificial Sequence: Synthetic oligonucleotide
  Sense strand starting at position 3111 of SEQ ID NO: 3617
gggcucagaugauuaacuu

SEQ ID NO: 281481 - RNA, 19 nt, Artificial Sequence
  Description of Artificial Sequence: Synthetic oligonucleotide
  Antisense strand to SEQ ID NO: 281480
aaguuaaucaucugagccc

SEQ ID NO: 281482 - RNA, 19 nt, Artificial Sequence
  Description of Artificial Sequence: Synthetic oligonucleotide
  Sense strand starting at position 3181 of SEQ ID NO: 3617
cuuugugugcauguuuauu

SEQ ID NO: 281483 - RNA, 19 nt, Artificial Sequence
  Description of Artificial Sequence: Synthetic oligonucleotide
  Antisense strand to SEQ ID NO: 281482
aauaaacaugcacacaaag

SEQ ID NO: 281484 - RNA, 19 nt, Artificial Sequence
  Description of Artificial Sequence: Synthetic oligonucleotide
  Sense strand starting at position 3340 of SEQ ID NO: 3617
uuuccuaauuacuuggaga

SEQ ID NO: 281485 - RNA, 19 nt, Artificial Sequence
  Description of Artificial Sequence: Synthetic oligonucleotide
  Antisense strand to SEQ ID NO: 281484
ucuccaaguaauuaggaaa

SEQ ID NO: 281486 - RNA, 19 nt, Artificial Sequence
  Description of Artificial Sequence: Synthetic oligonucleotide
  Sense strand starting at position 3437 of SEQ ID NO: 3617
ggugaagagucauccuaca

SEQ ID NO: 281487 - RNA, 19 nt, Artificial Sequence
  Description of Artificial Sequence: Synthetic oligonucleotide
  Antisense strand to SEQ ID NO: 281486
uguaggaugacucuucacc

SEQ ID NO: 281488 - RNA, 19 nt, Artificial Sequence
  Description of Artificial Sequence: Synthetic oligonucleotide
  Sense strand starting at position 3501 of SEQ ID NO: 3617
auuauaaguugucugaaac

SEQ ID NO: 281489 - RNA, 19 nt, Artificial Sequence
  Description of Artificial Sequence: Synthetic oligonucleotide
  Antisense strand to SEQ ID NO: 281488
guuucagacaacuuauaau

SEQ ID NO: 281490 - RNA, 19 nt, Artificial Sequence
  Description of Artificial Sequence: Synthetic oligonucleotide
  Sense strand starting at position 3502 of SEQ ID NO: 3617
uuauaaguugucugaaaca

SEQ ID NO: 281491 - RNA, 19 nt, Artificial Sequence
  Description of Artificial Sequence: Synthetic oligonucleotide
  Antisense strand to SEQ ID NO: 281490
uguuucagacaacuuauaa

SEQ ID NO: 281492 - RNA, 19 nt, Artificial Sequence
  Description of Artificial Sequence: Synthetic oligonucleotide
  Sense strand starting at position 5 of SEQ ID NO: 3615
ucuucuacauuugaaggaa

SEQ ID NO: 281493 - RNA, 19 nt, Artificial Sequence
  Description of Artificial Sequence: Synthetic oligonucleotide
  Antisense strand to SEQ ID NO: 281492
uuccuucaaauguagaaga

SEQ ID NO: 281494 - RNA, 19 nt, Artificial Sequence
  Description of Artificial Sequence: Synthetic oligonucleotide
  Sense strand starting at position 138 of SEQ ID NO: 3615
gggaaacucgaucgcagaa

SEQ ID NO: 281495 - RNA, 19 nt, Artificial Sequence
  Description of Artificial Sequence: Synthetic oligonucleotide
  Antisense strand to SEQ ID NO: 281494
uucugcgaucgaguuuccc

SEQ ID NO: 281496 - RNA, 19 nt, Artificial Sequence
  Description of Artificial Sequence: Synthetic oligonucleotide
  Sense strand starting at position 329 of SEQ ID NO: 3615
uuguccuaggcuuaucaca

SEQ ID NO: 281497 - RNA, 19 nt, Artificial Sequence
  Description of Artificial Sequence: Synthetic oligonucleotide
  Antisense strand to SEQ ID NO: 281496
ugugauaagccuaggacaa

SEQ ID NO: 281498 - RNA, 19 nt, Artificial Sequence
  Description of Artificial Sequence: Synthetic oligonucleotide
  Sense strand starting at position 352 of SEQ ID NO: 3615
aaacaacuauuuggugaga

SEQ ID NO: 281499 - RNA, 19 nt, Artificial Sequence
  Description of Artificial Sequence: Synthetic oligonucleotide
  Antisense strand to SEQ ID NO: 281498
ucucaccaaauaguuguuu

SEQ ID NO: 281500 - RNA, 19 nt, Artificial Sequence
  Description of Artificial Sequence: Synthetic oligonucleotide
  Sense strand starting at position 416 of SEQ ID NO: 3615
acgcgaucuccagaaacag

SEQ ID NO: 281501 - RNA, 19 nt, Artificial Sequence
  Description of Artificial Sequence: Synthetic oligonucleotide
  Antisense strand to SEQ ID NO: 281500
cuguuucuggagaucgcgu

SEQ ID NO: 281502 - RNA, 19 nt, Artificial Sequence
  Description of Artificial Sequence: Synthetic oligonucleotide
  Sense strand starting at position 431 of SEQ ID NO: 3615
acaggaaccuguuugguua

SEQ ID NO: 281503 - RNA, 19 nt, Artificial Sequence
  Description of Artificial Sequence: Synthetic oligonucleotide
  Antisense strand to SEQ ID NO: 281502
uaaccaaacagguuccugu

SEQ ID NO: 281504 - RNA, 19 nt, Artificial Sequence
  Description of Artificial Sequence: Synthetic oligonucleotide
  Sense strand starting at position 432 of SEQ ID NO: 3615
caggaaccuguuugguuau

SEQ ID NO: 281505 - RNA, 19 nt, Artificial Sequence
  Description of Artificial Sequence: Synthetic oligonucleotide
  Antisense strand to SEQ ID NO: 281504
auaaccaaacagguuccug

SEQ ID NO: 281506 - RNA, 19 nt, Artificial Sequence
  Description of Artificial Sequence: Synthetic oligonucleotide
  Sense strand starting at position 682 of SEQ ID NO: 3615
cgguucucuccguaauuug

SEQ ID NO: 281507 - RNA, 19 nt, Artificial Sequence
  Description of Artificial Sequence: Synthetic oligonucleotide
  Antisense strand to SEQ ID NO: 281506
caaauuacggagagaaccg

SEQ ID NO: 281508 - RNA, 19 nt, Artificial Sequence
  Description of Artificial Sequence: Synthetic oligonucleotide
  Sense strand starting at position 705 of SEQ ID NO: 3615
ccaggccucccagaguuaa

SEQ ID NO: 281509 - RNA, 19 nt, Artificial Sequence
  Description of Artificial Sequence: Synthetic oligonucleotide
  Antisense strand to SEQ ID NO: 281508
uuaacucugggaggccugg

SEQ ID NO: 281510 - RNA, 19 nt, Artificial Sequence
  Description of Artificial Sequence: Synthetic oligonucleotide
  Sense strand starting at position 715 of SEQ ID NO: 3615
cagaguuaaucaucagcug

SEQ ID NO: 281511 - RNA, 19 nt, Artificial Sequence
  Description of Artificial Sequence: Synthetic oligonucleotide
  Antisense strand to SEQ ID NO: 281510
cagcugaugauuaacucug

SEQ ID NO: 281512 - RNA, 19 nt, Artificial Sequence
  Description of Artificial Sequence: Synthetic oligonucleotide
  Sense strand starting at position 1010 of SEQ ID NO: 3615
uucuauauugcagacaguu

SEQ ID NO: 281513 - RNA, 19 nt, Artificial Sequence
  Description of Artificial Sequence: Synthetic oligonucleotide
  Antisense strand to SEQ ID NO: 281512
aacugucugcaauauagaa

SEQ ID NO: 281514 - RNA, 19 nt, Artificial Sequence
  Description of Artificial Sequence: Synthetic oligonucleotide
  Sense strand starting at position 1261 of SEQ ID NO: 3615
acuuucuguuuccuagaca

SEQ ID NO: 281515 - RNA, 19 nt, Artificial Sequence
  Description of Artificial Sequence: Synthetic oligonucleotide
  Antisense strand to SEQ ID NO: 281514
ugucuaggaaacagaaagu

SEQ ID NO: 281516 - RNA, 19 nt, Artificial Sequence
  Description of Artificial Sequence: Synthetic oligonucleotide
  Sense strand starting at position 1264 of SEQ ID NO: 3615
uucuguuuccuagacagga

SEQ ID NO: 281517 - RNA, 19 nt, Artificial Sequence
  Description of Artificial Sequence: Synthetic oligonucleotide
  Antisense strand to SEQ ID NO: 281516
uccugucuaggaaacagaa

SEQ ID NO: 281518 - RNA, 19 nt, Artificial Sequence
  Description of Artificial Sequence: Synthetic oligonucleotide
  Sense strand starting at position 1268 of SEQ ID NO: 3615
guuuccuagacaggaauga

SEQ ID NO: 281519 - RNA, 19 nt, Artificial Sequence
  Description of Artificial Sequence: Synthetic oligonucleotide
  Antisense strand to SEQ ID NO: 281518
ucauuccugucuaggaaac

SEQ ID NO: 281520 - RNA, 19 nt, Artificial Sequence
  Description of Artificial Sequence: Synthetic oligonucleotide
  Sense strand starting at position 1523 of SEQ ID NO: 3615
agaggaaaguucuccaguu

SEQ ID NO: 281521 - RNA, 19 nt, Artificial Sequence
  Description of Artificial Sequence: Synthetic oligonucleotide
  Antisense strand to SEQ ID NO: 281520
aacuggagaacuuuccucu

SEQ ID NO: 281522 - RNA, 19 nt, Artificial Sequence
  Description of Artificial Sequence: Synthetic oligonucleotide
  Sense strand starting at position 1524 of SEQ ID NO: 3615
gaggaaaguucuccaguua

SEQ ID NO: 281523 - RNA, 19 nt, Artificial Sequence
  Description of Artificial Sequence: Synthetic oligonucleotide
  Antisense strand to SEQ ID NO: 281522
uaacuggagaacuuuccuc

SEQ ID NO: 281524 - RNA, 19 nt, Artificial Sequence
  Description of Artificial Sequence: Synthetic oligonucleotide
  Sense strand starting at position 1525 of SEQ ID NO: 3615
aggaaaguucuccaguuac

SEQ ID NO: 281525 - RNA, 19 nt, Artificial Sequence
  Description of Artificial Sequence: Synthetic oligonucleotide
  Antisense strand to SEQ ID NO: 281524
guaacuggagaacuuuccu

SEQ ID NO: 281526 - RNA, 19 nt, Artificial Sequence
  Description of Artificial Sequence: Synthetic oligonucleotide
  Sense strand starting at position 2012 of SEQ ID NO: 3615
guggaaguugcucuguguu

SEQ ID NO: 281527 - RNA, 19 nt, Artificial Sequence
  Description of Artificial Sequence: Synthetic oligonucleotide
  Antisense strand to SEQ ID NO: 281526
aacacagagcaacuuccac

SEQ ID NO: 281528 - RNA, 19 nt, Artificial Sequence
  Description of Artificial Sequence: Synthetic oligonucleotide
  Sense strand starting at position 2148 of SEQ ID NO: 3615
aucuaagaaugcuuagguu

SEQ ID NO: 281529 - RNA, 19 nt, Artificial Sequence
  Description of Artificial Sequence: Synthetic oligonucleotide
  Antisense strand to SEQ ID NO: 281528
aaccuaagcauucuuagau

SEQ ID NO: 281530 - RNA, 19 nt, Artificial Sequence
  Description of Artificial Sequence: Synthetic oligonucleotide
  Sense strand starting at position 2244 of SEQ ID NO: 3615
ggcagcuuuaucugaagag

SEQ ID NO: 281531 - RNA, 19 nt, Artificial Sequence
  Description of Artificial Sequence: Synthetic oligonucleotide
  Antisense strand to SEQ ID NO: 281530
cucuucagauaaagcugcc

SEQ ID NO: 281532 - RNA, 19 nt, Artificial Sequence
  Description of Artificial Sequence: Synthetic oligonucleotide
  Sense strand starting at position 2248 of SEQ ID NO: 3615
gcuuuaucugaagagcucu

SEQ ID NO: 281533 - RNA, 19 nt, Artificial Sequence
  Description of Artificial Sequence: Synthetic oligonucleotide
  Antisense strand to SEQ ID NO: 281532
agagcucuucagauaaagc

SEQ ID NO: 281534 - RNA, 19 nt, Artificial Sequence
  Description of Artificial Sequence: Synthetic oligonucleotide
  Sense strand starting at position 2256 of SEQ ID NO: 3615
ugaagagcucuuggaagug

SEQ ID NO: 281535 - RNA, 19 nt, Artificial Sequence
  Description of Artificial Sequence: Synthetic oligonucleotide
  Antisense strand to SEQ ID NO: 281534
cacuuccaagagcucuuca

SEQ ID NO: 281536 - RNA, 19 nt, Artificial Sequence
  Description of Artificial Sequence: Synthetic oligonucleotide
  Sense strand starting at position 2282 of SEQ ID NO: 3615
guagcuuuagaccaaacuu

SEQ ID NO: 281537 - RNA, 19 nt, Artificial Sequence
  Description of Artificial Sequence: Synthetic oligonucleotide
  Antisense strand to SEQ ID NO: 281536
aaguuuggucuaaagcuac

SEQ ID NO: 281538 - RNA, 19 nt, Artificial Sequence
  Description of Artificial Sequence: Synthetic oligonucleotide
  Sense strand starting at position 2324 of SEQ ID NO: 3615
caucgagcagcugagauua

SEQ ID NO: 281539 - RNA, 19 nt, Artificial Sequence
  Description of Artificial Sequence: Synthetic oligonucleotide
  Antisense strand to SEQ ID NO: 281538
uaaucucagcugcucgaug

SEQ ID NO: 281540 - RNA, 19 nt, Artificial Sequence
  Description of Artificial Sequence: Synthetic oligonucleotide
  Sense strand starting at position 2348 of SEQ ID NO: 3615
cggcgagugugaaugcaaa

SEQ ID NO: 281541 - RNA, 19 nt, Artificial Sequence
  Description of Artificial Sequence: Synthetic oligonucleotide
  Antisense strand to SEQ ID NO: 281540
uuugcauucacacucgccg

SEQ ID NO: 281542 - RNA, 19 nt, Artificial Sequence
  Description of Artificial Sequence: Synthetic oligonucleotide
  Sense strand starting at position 2559 of SEQ ID NO: 3615
aaggaaagcccuugaagua

SEQ ID NO: 281543 - RNA, 19 nt, Artificial Sequence
  Description of Artificial Sequence: Synthetic oligonucleotide
  Antisense strand to SEQ ID NO: 281542
uacuucaagggcuuuccuu

SEQ ID NO: 281544 - RNA, 19 nt, Artificial Sequence
  Description of Artificial Sequence: Synthetic oligonucleotide
  Sense strand starting at position 2612 of SEQ ID NO: 3615
gacuucuugguauaguaag

SEQ ID NO: 281545 - RNA, 19 nt, Artificial Sequence
  Description of Artificial Sequence: Synthetic oligonucleotide
  Antisense strand to SEQ ID NO: 281544
cuuacuauaccaagaaguc

SEQ ID NO: 281546 - RNA, 19 nt, Artificial Sequence
  Description of Artificial Sequence: Synthetic oligonucleotide
  Sense strand starting at position 2619 of SEQ ID NO: 3615
ugguauaguaagggugaca

SEQ ID NO: 281547 - RNA, 19 nt, Artificial Sequence
  Description of Artificial Sequence: Synthetic oligonucleotide
  Antisense strand to SEQ ID NO: 281546
ugucacccuuacuauacca

SEQ ID NO: 281548 - RNA, 19 nt, Artificial Sequence
  Description of Artificial Sequence: Synthetic oligonucleotide
  Sense strand starting at position 2797 of SEQ ID NO: 3615
auaauaucuuacucagugu

SEQ ID NO: 281549 - RNA, 19 nt, Artificial Sequence
  Description of Artificial Sequence: Synthetic oligonucleotide
  Antisense strand to SEQ ID NO: 281548
acacugaguaagauauuau

SEQ ID NO: 281550 - RNA, 19 nt, Artificial Sequence
  Description of Artificial Sequence: Synthetic oligonucleotide
  Sense strand starting at position 2800 of SEQ ID NO: 3615
auaucuuacucaguguaag

SEQ ID NO: 281551 - RNA, 19 nt, Artificial Sequence
  Description of Artificial Sequence: Synthetic oligonucleotide
  Antisense strand to SEQ ID NO: 281550
cuuacacugaguaagauau

SEQ ID NO: 281552 - RNA, 19 nt, Artificial Sequence
  Description of Artificial Sequence: Synthetic oligonucleotide
  Sense strand starting at position 2840 of SEQ ID NO: 3615
auauuuaggcuuugucuca

SEQ ID NO: 281553 - RNA, 19 nt, Artificial Sequence
  Description of Artificial Sequence: Synthetic oligonucleotide
  Antisense strand to SEQ ID NO: 281552
ugagacaaagccuaaauau

SEQ ID NO: 281554 - RNA, 19 nt, Artificial Sequence
  Description of Artificial Sequence: Synthetic oligonucleotide
  Sense strand starting at position 2960 of SEQ ID NO: 3615
auacuaucagggcaguaau

SEQ ID NO: 281555 - RNA, 19 nt, Artificial Sequence
  Description of Artificial Sequence: Synthetic oligonucleotide
  Antisense strand to SEQ ID NO: 281554
auuacugcccugauaguau

SEQ ID NO: 281556 - RNA, 19 nt, Artificial Sequence
  Description of Artificial Sequence: Synthetic oligonucleotide
  Sense strand starting at position 2970 of SEQ ID NO: 3615
ggcaguaauuuguugucaa

SEQ ID NO: 281557 - RNA, 19 nt, Artificial Sequence
  Description of Artificial Sequence: Synthetic oligonucleotide
  Antisense strand to SEQ ID NO: 281556
uugacaacaaauuacugcc

SEQ ID NO: 281558 - RNA, 19 nt, Artificial Sequence
  Description of Artificial Sequence: Synthetic oligonucleotide
  Sense strand starting at position 2973 of SEQ ID NO: 3615
aguaauuuguugucaacuu

SEQ ID NO: 281559 - RNA, 19 nt, Artificial Sequence
  Description of Artificial Sequence: Synthetic oligonucleotide
  Antisense strand to SEQ ID NO: 281558
aaguugacaacaaauuacu

SEQ ID NO: 281560 - RNA, 19 nt, Artificial Sequence
  Description of Artificial Sequence: Synthetic oligonucleotide
  Sense strand starting at position 3271 of SEQ ID NO: 3615
ucacuuuguuuaccauuga

SEQ ID NO: 281561 - RNA, 19 nt, Artificial Sequence
  Description of Artificial Sequence: Synthetic oligonucleotide
  Antisense strand to SEQ ID NO: 281560
ucaaugguaaacaaaguga

SEQ ID NO: 281562 - RNA, 19 nt, Artificial Sequence
  Description of Artificial Sequence: Synthetic oligonucleotide
  Sense strand starting at position 3279 of SEQ ID NO: 3615
uuuaccauugacuggguua

SEQ ID NO: 281563 - RNA, 19 nt, Artificial Sequence
  Description of Artificial Sequence: Synthetic oligonucleotide
  Antisense strand to SEQ ID NO: 281562
uaacccagucaaugguaaa

SEQ ID NO: 281564 - RNA, 19 nt, Artificial Sequence
  Description of Artificial Sequence: Synthetic oligonucleotide
  Sense strand starting at position 3281 of SEQ ID NO: 3615
uaccauugacuggguuaau

SEQ ID NO: 281565 - RNA, 19 nt, Artificial Sequence
  Description of Artificial Sequence: Synthetic oligonucleotide
  Antisense strand to SEQ ID NO: 281564
auuaacccagucaauggua

SEQ ID NO: 281566 - RNA, 19 nt, Artificial Sequence
  Description of Artificial Sequence: Synthetic oligonucleotide
  Sense strand starting at position 3290 of SEQ ID NO: 3615
cuggguuaauuauucugau

SEQ ID NO: 281567 - RNA, 19 nt, Artificial Sequence
  Description of Artificial Sequence: Synthetic oligonucleotide
  Antisense strand to SEQ ID NO: 281566
aucagaauaauuaacccag

SEQ ID NO: 281568 - RNA, 19 nt, Artificial Sequence
  Description of Artificial Sequence: Synthetic oligonucleotide
  Sense strand starting at position 3291 of SEQ ID NO: 3615
uggguuaauuauucugaug

SEQ ID NO: 281569 - RNA, 19 nt, Artificial Sequence
  Description of Artificial Sequence: Synthetic oligonucleotide
  Antisense strand to SEQ ID NO: 281568
caucagaauaauuaaccca

SEQ ID NO: 281570 - RNA, 19 nt, Artificial Sequence
  Description of Artificial Sequence: Synthetic oligonucleotide
  Sense strand starting at position 3381 of SEQ ID NO: 3615
caggaaaguuaaguuguau

SEQ ID NO: 281571 - RNA, 19 nt, Artificial Sequence
  Description of Artificial Sequence: Synthetic oligonucleotide
  Antisense strand to SEQ ID NO: 281570
auacaacuuaacuuuccug

SEQ ID NO: 281572 - RNA, 19 nt, Artificial Sequence
  Description of Artificial Sequence: Synthetic oligonucleotide
  Sense strand starting at position 167 of SEQ ID NO: 3616
agauaugacguguaugaau

SEQ ID NO: 281573 - RNA, 19 nt, Artificial Sequence
  Description of Artificial Sequence: Synthetic oligonucleotide
  Antisense strand to SEQ ID NO: 281572
auucauacacgucauaucu

SEQ ID NO: 281574 - RNA, 19 nt, Artificial Sequence
  Description of Artificial Sequence: Synthetic oligonucleotide
  Sense strand starting at position 175 of SEQ ID NO: 3616
cguguaugaauguagaaug

SEQ ID NO: 281575 - RNA, 19 nt, Artificial Sequence
  Description of Artificial Sequence: Synthetic oligonucleotide
  Antisense strand to SEQ ID NO: 281574
cauucuacauucauacacg

SEQ ID NO: 281576 - RNA, 19 nt, Artificial Sequence
  Description of Artificial Sequence: Synthetic oligonucleotide
  Sense strand starting at position 186 of SEQ ID NO: 3616
guagaauguagucaauugu

SEQ ID NO: 281577 - RNA, 19 nt, Artificial Sequence
  Description of Artificial Sequence: Synthetic oligonucleotide
  Antisense strand to SEQ ID NO: 281576
acaauugacuacauucuac

SEQ ID NO: 281578 - RNA, 19 nt, Artificial Sequence
  Description of Artificial Sequence: Synthetic oligonucleotide
  Sense strand starting at position 270 of SEQ ID NO: 3616
ugccaugugcuauaaggaa

SEQ ID NO: 281579 - RNA, 19 nt, Artificial Sequence
  Description of Artificial Sequence: Synthetic oligonucleotide
  Antisense strand to SEQ ID NO: 281578
uuccuuauagcacauggca

SEQ ID NO: 281580 - RNA, 19 nt, Artificial Sequence
  Description of Artificial Sequence: Synthetic oligonucleotide
  Sense strand starting at position 430 of SEQ ID NO: 3616
ugcagagaauguuccagaa

SEQ ID NO: 281581 - RNA, 19 nt, Artificial Sequence
  Description of Artificial Sequence: Synthetic oligonucleotide
  Antisense strand to SEQ ID NO: 281580
uucuggaacauucucugca

SEQ ID NO: 281582 - RNA, 19 nt, Artificial Sequence
  Description of Artificial Sequence: Synthetic oligonucleotide
  Sense strand starting at position 545 of SEQ ID NO: 3616
uccgaaaggccuuaaauac

SEQ ID NO: 281583 - RNA, 19 nt, Artificial Sequence
  Description of Artificial Sequence: Synthetic oligonucleotide
  Antisense strand to SEQ ID NO: 281582
guauuuaaggccuuucgga

SEQ ID NO: 281584 - RNA, 19 nt, Artificial Sequence
  Description of Artificial Sequence: Synthetic oligonucleotide
  Sense strand starting at position 573 of SEQ ID NO: 3616
gagacugaacucuguucua

SEQ ID NO: 281585 - RNA, 19 nt, Artificial Sequence
  Description of Artificial Sequence: Synthetic oligonucleotide
  Antisense strand to SEQ ID NO: 281584
uagaacagaguucagucuc

SEQ ID NO: 281586 - RNA, 19 nt, Artificial Sequence
  Description of Artificial Sequence: Synthetic oligonucleotide
  Sense strand starting at position 965 of SEQ ID NO: 3616
uguaucuuuguacaagaaa

SEQ ID NO: 281587 - RNA, 19 nt, Artificial Sequence
  Description of Artificial Sequence: Synthetic oligonucleotide
  Antisense strand to SEQ ID NO: 281586
uuucuuguacaaagauaca

SEQ ID NO: 281588 - RNA, 19 nt, Artificial Sequence
  Description of Artificial Sequence: Synthetic oligonucleotide
  Sense strand starting at position 985 of SEQ ID NO: 3616
guaucauagugacugagau

SEQ ID NO: 281589 - RNA, 19 nt, Artificial Sequence
  Description of Artificial Sequence: Synthetic oligonucleotide
  Antisense strand to SEQ ID NO: 281588
aucucagucacuaugauac

SEQ ID NO: 281590 - RNA, 19 nt, Artificial Sequence
  Description of Artificial Sequence: Synthetic oligonucleotide
  Sense strand starting at position 986 of SEQ ID NO: 3616
uaucauagugacugagauu

SEQ ID NO: 281591 - RNA, 19 nt, Artificial Sequence
  Description of Artificial Sequence: Synthetic oligonucleotide
  Antisense strand to SEQ ID NO: 281590
aaucucagucacuaugaua

SEQ ID NO: 281592 - RNA, 19 nt, Artificial Sequence
  Description of Artificial Sequence: Synthetic oligonucleotide
  Sense strand starting at position 1498 of SEQ ID NO: 3616
ucauguucuuaagugauaa

SEQ ID NO: 281593 - RNA, 19 nt, Artificial Sequence
  Description of Artificial Sequence: Synthetic oligonucleotide
  Antisense strand to SEQ ID NO: 281592
uuaucacuuaagaacauga

SEQ ID NO: 281594 - RNA, 19 nt, Artificial Sequence
  Description of Artificial Sequence: Synthetic oligonucleotide
  Sense strand starting at position 1646 of SEQ ID NO: 3616
agauucuacuugccugaga

SEQ ID NO: 281595 - RNA, 19 nt, Artificial Sequence
  Description of Artificial Sequence: Synthetic oligonucleotide
  Antisense strand to SEQ ID NO: 281594
ucucaggcaaguagaaucu

SEQ ID NO: 281596 - RNA, 19 nt, Artificial Sequence
  Description of Artificial Sequence: Synthetic oligonucleotide
  Sense strand starting at position 1649 of SEQ ID NO: 3616
uucuacuugccugagagua

SEQ ID NO: 281597 - RNA, 19 nt, Artificial Sequence
  Description of Artificial Sequence: Synthetic oligonucleotide
  Antisense strand to SEQ ID NO: 281596
uacucucaggcaaguagaa

SEQ ID NO: 281598 - RNA, 19 nt, Artificial Sequence
  Description of Artificial Sequence: Synthetic oligonucleotide
  Sense strand starting at position 1654 of SEQ ID NO: 3616
cuugccugagaguaagauu

SEQ ID NO: 281599 - RNA, 19 nt, Artificial Sequence
  Description of Artificial Sequence: Synthetic oligonucleotide
  Antisense strand to SEQ ID NO: 281598
aaucuuacucucaggcaag

SEQ ID NO: 281600 - RNA, 19 nt, Artificial Sequence
  Description of Artificial Sequence: Synthetic oligonucleotide
  Sense strand starting at position 1777 of SEQ ID NO: 3616
acaacaaugcuguaaggua

SEQ ID NO: 281601 - RNA, 19 nt, Artificial Sequence
  Description of Artificial Sequence: Synthetic oligonucleotide
  Antisense strand to SEQ ID NO: 281600
uaccuuacagcauuguugu

SEQ ID NO: 281602 - RNA, 19 nt, Artificial Sequence
  Description of Artificial Sequence: Synthetic oligonucleotide
  Sense strand starting at position 1986 of SEQ ID NO: 3616
uaguguaaaggguaucacu

SEQ ID NO: 281603 - RNA, 19 nt, Artificial Sequence
  Description of Artificial Sequence: Synthetic oligonucleotide
  Antisense strand to SEQ ID NO: 281602
agugauacccuuuacacua

SEQ ID NO: 281604 - RNA, 19 nt, Artificial Sequence
  Description of Artificial Sequence: Synthetic oligonucleotide
  Sense strand starting at position 2035 of SEQ ID NO: 3616
gacagauuaucuguuacag

SEQ ID NO: 281605 - RNA, 19 nt, Artificial Sequence
  Description of Artificial Sequence: Synthetic oligonucleotide
  Antisense strand to SEQ ID NO: 281604
cuguaacagauaaucuguc

SEQ ID NO: 281606 - RNA, 19 nt, Artificial Sequence
  Description of Artificial Sequence: Synthetic oligonucleotide
  Sense strand starting at position 2371 of SEQ ID NO: 3616
gcaaucauugagcaccuga

SEQ ID NO: 281607 - RNA, 19 nt, Artificial Sequence
  Description of Artificial Sequence: Synthetic oligonucleotide
  Antisense strand to SEQ ID NO: 281606
ucaggugcucaaugauugc

SEQ ID NO: 281608 - RNA, 19 nt, Artificial Sequence
  Description of Artificial Sequence: Synthetic oligonucleotide
  Sense strand starting at position 2387 of SEQ ID NO: 3616
ugaccuaugccaggaacuu

SEQ ID NO: 281609 - RNA, 19 nt, Artificial Sequence
  Description of Artificial Sequence: Synthetic oligonucleotide
  Antisense strand to SEQ ID NO: 281608
aaguuccuggcauagguca

SEQ ID NO: 281610 - RNA, 19 nt, Artificial Sequence
  Description of Artificial Sequence: Synthetic oligonucleotide
  Sense strand starting at position 2514 of SEQ ID NO: 3616
accuaauguccauauguau

SEQ ID NO: 281611 - RNA, 19 nt, Artificial Sequence
  Description of Artificial Sequence: Synthetic oligonucleotide
  Antisense strand to SEQ ID NO: 281610
auacauauggacauuaggu

SEQ ID NO: 281612 - RNA, 19 nt, Artificial Sequence
  Description of Artificial Sequence: Synthetic oligonucleotide
  Sense strand starting at position 2551 of SEQ ID NO: 3616
agaccacuggagugacauu

SEQ ID NO: 281613 - RNA, 19 nt, Artificial Sequence
  Description of Artificial Sequence: Synthetic oligonucleotide
  Antisense strand to SEQ ID NO: 281612
aaugucacuccaguggucu

SEQ ID NO: 281614 - RNA, 19 nt, Artificial Sequence
  Description of Artificial Sequence: Synthetic oligonucleotide
  Sense strand starting at position 2562 of SEQ ID NO: 3616
gugacauuggaaugagucu

SEQ ID NO: 281615 - RNA, 19 nt, Artificial Sequence
  Description of Artificial Sequence: Synthetic oligonucleotide
  Antisense strand to SEQ ID NO: 281614
agacucauuccaaugucac

SEQ ID NO: 281616 - RNA, 19 nt, Artificial Sequence
  Description of Artificial Sequence: Synthetic oligonucleotide
  Sense strand starting at position 2621 of SEQ ID NO: 3616
ucuauuaauucugugaaag

SEQ ID NO: 281617 - RNA, 19 nt, Artificial Sequence
  Description of Artificial Sequence: Synthetic oligonucleotide
  Antisense strand to SEQ ID NO: 281616
cuuucacagaauuaauaga

SEQ ID NO: 281618 - RNA, 19 nt, Artificial Sequence
  Description of Artificial Sequence: Synthetic oligonucleotide
  Sense strand starting at position 2715 of SEQ ID NO: 3616
gcagaaacgcuggaucaaa

SEQ ID NO: 281619 - RNA, 19 nt, Artificial Sequence
  Description of Artificial Sequence: Synthetic oligonucleotide
  Antisense strand to SEQ ID NO: 281618
uuugauccagcguuucugc

SEQ ID NO: 281620 - RNA, 19 nt, Artificial Sequence
  Description of Artificial Sequence: Synthetic oligonucleotide
  Sense strand starting at position 2767 of SEQ ID NO: 3616
gaaagcagauuauuaaagu

SEQ ID NO: 281621 - RNA, 19 nt, Artificial Sequence
  Description of Artificial Sequence: Synthetic oligonucleotide
  Antisense strand to SEQ ID NO: 281620
acuuuaauaaucugcuuuc

SEQ ID NO: 281622 - RNA, 19 nt, Artificial Sequence
  Description of Artificial Sequence: Synthetic oligonucleotide
  Sense strand starting at position 2776 of SEQ ID NO: 3616
uuauuaaagucaucuggaa

SEQ ID NO: 281623 - RNA, 19 nt, Artificial Sequence
  Description of Artificial Sequence: Synthetic oligonucleotide
  Antisense strand to SEQ ID NO: 281622
uuccagaugacuuuaauaa

SEQ ID NO: 281624 - RNA, 19 nt, Artificial Sequence
  Description of Artificial Sequence: Synthetic oligonucleotide
  Sense strand starting at position 2837 of SEQ ID NO: 3616
ggccuuuccugaccuauuu

SEQ ID NO: 281625 - RNA, 19 nt, Artificial Sequence
  Description of Artificial Sequence: Synthetic oligonucleotide
  Antisense strand to SEQ ID NO: 281624
aaauaggucaggaaaggcc

SEQ ID NO: 281626 - RNA, 19 nt, Artificial Sequence
  Description of Artificial Sequence: Synthetic oligonucleotide
  Sense strand starting at position 3115 of SEQ ID NO: 3616
uuaauaaacgaguggauua

SEQ ID NO: 281627 - RNA, 19 nt, Artificial Sequence
  Description of Artificial Sequence: Synthetic oligonucleotide
  Antisense strand to SEQ ID NO: 281626
uaauccacucguuuauuaa

SEQ ID NO: 281628 - RNA, 19 nt, Artificial Sequence
  Description of Artificial Sequence: Synthetic oligonucleotide
  Sense strand starting at position 3126 of SEQ ID NO: 3616
guggauuaaugggugagga

SEQ ID NO: 281629 - RNA, 19 nt, Artificial Sequence
  Description of Artificial Sequence: Synthetic oligonucleotide
  Antisense strand to SEQ ID NO: 281628
uccucacccauuaauccac

SEQ ID NO: 281630 - RNA, 19 nt, Artificial Sequence
  Description of Artificial Sequence: Synthetic oligonucleotide
  Sense strand starting at position 3153 of SEQ ID NO: 3616
ucaugaaacuugucagagg

SEQ ID NO: 281631 - RNA, 19 nt, Artificial Sequence
  Description of Artificial Sequence: Synthetic oligonucleotide
  Antisense strand to SEQ ID NO: 281630
ccucugacaaguuucauga

SEQ ID NO: 281632 - RNA, 19 nt, Artificial Sequence
  Description of Artificial Sequence: Synthetic oligonucleotide
  Sense strand starting at position 3167 of SEQ ID NO: 3616
agagguuugucauugaaua

SEQ ID NO: 281633 - RNA, 19 nt, Artificial Sequence
  Description of Artificial Sequence: Synthetic oligonucleotide
  Antisense strand to SEQ ID NO: 281632
uauucaaugacaaaccucu

SEQ ID NO: 281634 - RNA, 19 nt, Artificial Sequence
  Description of Artificial Sequence: Synthetic oligonucleotide
  Sense strand starting at position 3168 of SEQ ID NO: 3616
gagguuugucauugaauau

SEQ ID NO: 281635 - RNA, 19 nt, Artificial Sequence
  Description of Artificial Sequence: Synthetic oligonucleotide
  Antisense strand to SEQ ID NO: 281634
auauucaaugacaaaccuc

SEQ ID NO: 281636 - RNA, 19 nt, Artificial Sequence
  Description of Artificial Sequence: Synthetic oligonucleotide
  Sense strand starting at position 3169 of SEQ ID NO: 3616
agguuugucauugaauaug

SEQ ID NO: 281637 - RNA, 19 nt, Artificial Sequence
  Description of Artificial Sequence: Synthetic oligonucleotide
  Antisense strand to SEQ ID NO: 281636
cauauucaaugacaaaccu

SEQ ID NO: 281638 - RNA, 19 nt, Artificial Sequence
  Description of Artificial Sequence: Synthetic oligonucleotide
  Sense strand starting at position 3172 of SEQ ID NO: 3616
uuugucauugaauaugagu

SEQ ID NO: 281639 - RNA, 19 nt, Artificial Sequence
  Description of Artificial Sequence: Synthetic oligonucleotide
  Antisense strand to SEQ ID NO: 281638
acucauauucaaugacaaa

SEQ ID NO: 281640 - RNA, 19 nt, Artificial Sequence
  Description of Artificial Sequence: Synthetic oligonucleotide
  Sense strand starting at position 3191 of SEQ ID NO: 3616
auauuuaugugagugugua

SEQ ID NO: 281641 - RNA, 19 nt, Artificial Sequence
  Description of Artificial Sequence: Synthetic oligonucleotide
  Antisense strand to SEQ ID NO: 281640
uacacacucacauaaauau

SEQ ID NO: 281642 - RNA, 19 nt, Artificial Sequence
  Description of Artificial Sequence: Synthetic oligonucleotide
  Sense strand starting at position 3192 of SEQ ID NO: 3616
uauuuaugugaguguguau

SEQ ID NO: 281643 - RNA, 19 nt, Artificial Sequence
  Description of Artificial Sequence: Synthetic oligonucleotide
  Antisense strand to SEQ ID NO: 281642
auacacacucacauaaaua

SEQ ID NO: 281644 - RNA, 19 nt, Artificial Sequence
  Description of Artificial Sequence: Synthetic oligonucleotide
  Sense strand starting at position 3479 of SEQ ID NO: 3616
cuguuacucacggaagagu

SEQ ID NO: 281645 - RNA, 19 nt, Artificial Sequence
  Description of Artificial Sequence: Synthetic oligonucleotide
  Antisense strand to SEQ ID NO: 281644
acucuuccgugaguaacag

SEQ ID NO: 281646 - RNA, 19 nt, Artificial Sequence
  Description of Artificial Sequence: Synthetic oligonucleotide
  Sense strand starting at position 3526 of SEQ ID NO: 3616
agacuaaacugguuucuca

SEQ ID NO: 281647 - RNA, 19 nt, Artificial Sequence
  Description of Artificial Sequence: Synthetic oligonucleotide
  Antisense strand to SEQ ID NO: 281646
ugagaaaccaguuuagucu

SEQ ID NO: 281648 - RNA, 19 nt, Artificial Sequence
  Description of Artificial Sequence: Synthetic oligonucleotide
  Sense strand starting at position 3700 of SEQ ID NO: 3616
gggcuaucagguuacaauc

SEQ ID NO: 281649 - RNA, 19 nt, Artificial Sequence
  Description of Artificial Sequence: Synthetic oligonucleotide
  Antisense strand to SEQ ID NO: 281648
gauuguaaccugauagccc

SEQ ID NO: 281650 - RNA, 19 nt, Artificial Sequence
  Description of Artificial Sequence: Synthetic oligonucleotide
  Sense strand starting at position 3794 of SEQ ID NO: 3616
uuccuauguguggacauua

SEQ ID NO: 281651 - RNA, 19 nt, Artificial Sequence
  Description of Artificial Sequence: Synthetic oligonucleotide
  Antisense strand to SEQ ID NO: 281650
uaauguccacacauaggaa

SEQ ID NO: 281652 - RNA, 19 nt, Artificial Sequence
  Description of Artificial Sequence: Synthetic oligonucleotide
  Sense strand starting at position 122 of SEQ ID NO: 3618
gaugaagguuuauuccuuu

SEQ ID NO: 281653 - RNA, 19 nt, Artificial Sequence
  Description of Artificial Sequence: Synthetic oligonucleotide
  Antisense strand to SEQ ID NO: 281652
aaaggaauaaaccuucauc

SEQ ID NO: 281654 - RNA, 19 nt, Artificial Sequence
  Description of Artificial Sequence: Synthetic oligonucleotide
  Sense strand starting at position 125 of SEQ ID NO: 3618
gaagguuuauuccuuuaug

SEQ ID NO: 281655 - RNA, 19 nt, Artificial Sequence
  Description of Artificial Sequence: Synthetic oligonucleotide
  Antisense strand to SEQ ID NO: 281654
cauaaaggaauaaaccuuc

SEQ ID NO: 281656 - RNA, 19 nt, Artificial Sequence
  Description of Artificial Sequence: Synthetic oligonucleotide
  Sense strand starting at position 128 of SEQ ID NO: 3618
gguuuauuccuuuauguaa

SEQ ID NO: 281657 - RNA, 19 nt, Artificial Sequence
  Description of Artificial Sequence: Synthetic oligonucleotide
  Antisense strand to SEQ ID NO: 281656
uuacauaaaggaauaaacc

SEQ ID NO: 281658 - RNA, 19 nt, Artificial Sequence
  Description of Artificial Sequence: Synthetic oligonucleotide
  Sense strand starting at position 282 of SEQ ID NO: 3618
uuguaaacacaguaauguu

SEQ ID NO: 281659 - RNA, 19 nt, Artificial Sequence
  Description of Artificial Sequence: Synthetic oligonucleotide
  Antisense strand to SEQ ID NO: 281658
aacauuacuguguuuacaa

SEQ ID NO: 281660 - RNA, 19 nt, Artificial Sequence
  Description of Artificial Sequence: Synthetic oligonucleotide
  Sense strand starting at position 305 of SEQ ID NO: 3618
cuacacagaugucugcaaa

SEQ ID NO: 281661 - RNA, 19 nt, Artificial Sequence
  Description of Artificial Sequence: Synthetic oligonucleotide
  Antisense strand to SEQ ID NO: 281660
uuugcagacaucuguguag

SEQ ID NO: 281662 - RNA, 19 nt, Artificial Sequence
  Description of Artificial Sequence: Synthetic oligonucleotide
  Sense strand starting at position 402 of SEQ ID NO: 3618
augugaccuugaccacaua

SEQ ID NO: 281663 - RNA, 19 nt, Artificial Sequence
  Description of Artificial Sequence: Synthetic oligonucleotide
  Antisense strand to SEQ ID NO: 281662
uauguggucaaggucacau

SEQ ID NO: 281664 - RNA, 19 nt, Artificial Sequence
  Description of Artificial Sequence: Synthetic oligonucleotide
  Sense strand starting at position 540 of SEQ ID NO: 3618
augcucugucaccaaagga

SEQ ID NO: 281665 - RNA, 19 nt, Artificial Sequence
  Description of Artificial Sequence: Synthetic oligonucleotide
  Antisense strand to SEQ ID NO: 281664
uccuuuggugacagagcau

SEQ ID NO: 281666 - RNA, 19 nt, Artificial Sequence
  Description of Artificial Sequence: Synthetic oligonucleotide
  Sense strand starting at position 584 of SEQ ID NO: 3618
cugacagaauaguucuaau

SEQ ID NO: 281667 - RNA, 19 nt, Artificial Sequence
  Description of Artificial Sequence: Synthetic oligonucleotide
  Antisense strand to SEQ ID NO: 281666
auuagaacuauucugucag

SEQ ID NO: 281668 - RNA, 19 nt, Artificial Sequence
  Description of Artificial Sequence: Synthetic oligonucleotide
  Sense strand starting at position 614 of SEQ ID NO: 3618
aauaaaggucauugguauu

SEQ ID NO: 281669 - RNA, 19 nt, Artificial Sequence
  Description of Artificial Sequence: Synthetic oligonucleotide
  Antisense strand to SEQ ID NO: 281668
aauaccaaugaccuuuauu

SEQ ID NO: 281670 - RNA, 19 nt, Artificial Sequence
  Description of Artificial Sequence: Synthetic oligonucleotide
  Sense strand starting at position 739 of SEQ ID NO: 3618
uucuaaucucaguggaaau

SEQ ID NO: 281671 - RNA, 19 nt, Artificial Sequence
  Description of Artificial Sequence: Synthetic oligonucleotide
  Antisense strand to SEQ ID NO: 281670
auuuccacugagauuagaa

SEQ ID NO: 281672 - RNA, 19 nt, Artificial Sequence
  Description of Artificial Sequence: Synthetic oligonucleotide
  Sense strand starting at position 750 of SEQ ID NO: 3618
guggaaauuugguaacaca

SEQ ID NO: 281673 - RNA, 19 nt, Artificial Sequence
  Description of Artificial Sequence: Synthetic oligonucleotide
  Antisense strand to SEQ ID NO: 281672
uguguuaccaaauuuccac

SEQ ID NO: 281674 - RNA, 19 nt, Artificial Sequence
  Description of Artificial Sequence: Synthetic oligonucleotide
  Sense strand starting at position 760 of SEQ ID NO: 3618
gguaacacagcuuauaaau

SEQ ID NO: 281675 - RNA, 19 nt, Artificial Sequence
  Description of Artificial Sequence: Synthetic oligonucleotide
  Antisense strand to SEQ ID NO: 281674
auuuauaagcuguguuacc

SEQ ID NO: 281676 - RNA, 19 nt, Artificial Sequence
  Description of Artificial Sequence: Synthetic oligonucleotide
  Sense strand starting at position 789 of SEQ ID NO: 3618
aagguuaaauugguuacau

SEQ ID NO: 281677 - RNA, 19 nt, Artificial Sequence
  Description of Artificial Sequence: Synthetic oligonucleotide
  Antisense strand to SEQ ID NO: 281676
auguaaccaauuuaaccuu

SEQ ID NO: 281678 - RNA, 19 nt, Artificial Sequence
  Description of Artificial Sequence: Synthetic oligonucleotide
  Sense strand starting at position 790 of SEQ ID NO: 3618
agguuaaauugguuacaug

SEQ ID NO: 281679 - RNA, 19 nt, Artificial Sequence
  Description of Artificial Sequence: Synthetic oligonucleotide
  Antisense strand to SEQ ID NO: 281678
cauguaaccaauuuaaccu

SEQ ID NO: 281680 - RNA, 19 nt, Artificial Sequence
  Description of Artificial Sequence: Synthetic oligonucleotide
  Sense strand starting at position 960 of SEQ ID NO: 3618
uguagcauaccugaucauu

SEQ ID NO: 281681 - RNA, 19 nt, Artificial Sequence
  Description of Artificial Sequence: Synthetic oligonucleotide
  Antisense strand to SEQ ID NO: 281680
aaugaucagguaugcuaca

SEQ ID NO: 281682 - RNA, 19 nt, Artificial Sequence
  Description of Artificial Sequence: Synthetic oligonucleotide
  Sense strand starting at position 1036 of SEQ ID NO: 3618
aguaauuggagugguagga

SEQ ID NO: 281683 - RNA, 19 nt, Artificial Sequence
  Description of Artificial Sequence: Synthetic oligonucleotide
  Antisense strand to SEQ ID NO: 281682
uccuaccacuccaauuacu

SEQ ID NO: 281684 - RNA, 19 nt, Artificial Sequence
  Description of Artificial Sequence: Synthetic oligonucleotide
  Sense strand starting at position 1059 of SEQ ID NO: 3618
cuuggaauaucugaauuua

SEQ ID NO: 281685 - RNA, 19 nt, Artificial Sequence
  Description of Artificial Sequence: Synthetic oligonucleotide
  Antisense strand to SEQ ID NO: 281684
uaaauucagauauuccaag

SEQ ID NO: 281686 - RNA, 19 nt, Artificial Sequence
  Description of Artificial Sequence: Synthetic oligonucleotide
  Sense strand starting at position 1150 of SEQ ID NO: 3618
ucagaaggaucugucuacu

SEQ ID NO: 281687 - RNA, 19 nt, Artificial Sequence
  Description of Artificial Sequence: Synthetic oligonucleotide
  Antisense strand to SEQ ID NO: 281686
aguagacagauccuucuga

SEQ ID NO: 281688 - RNA, 19 nt, Artificial Sequence
  Description of Artificial Sequence: Synthetic oligonucleotide
  Sense strand starting at position 1156 of SEQ ID NO: 3618
ggaucugucuacucaaucu

SEQ ID NO: 281689 - RNA, 19 nt, Artificial Sequence
  Description of Artificial Sequence: Synthetic oligonucleotide
  Antisense strand to SEQ ID NO: 281688
agauugaguagacagaucc

SEQ ID NO: 281690 - RNA, 19 nt, Artificial Sequence
  Description of Artificial Sequence: Synthetic oligonucleotide
  Sense strand starting at position 1330 of SEQ ID NO: 3618
cgacaaucaacauggugaa

SEQ ID NO: 281691 - RNA, 19 nt, Artificial Sequence
  Description of Artificial Sequence: Synthetic oligonucleotide
  Antisense strand to SEQ ID NO: 281690
uucaccauguugauugucg

SEQ ID NO: 281692 - RNA, 19 nt, Artificial Sequence
  Description of Artificial Sequence: Synthetic oligonucleotide
  Sense strand starting at position 1504 of SEQ ID NO: 3618
aaaugacgugggcaaaguu

SEQ ID NO: 281693 - RNA, 19 nt, Artificial Sequence
  Description of Artificial Sequence: Synthetic oligonucleotide
  Antisense strand to SEQ ID NO: 281692
aacuuugcccacgucauuu

SEQ ID NO: 281694 - RNA, 19 nt, Artificial Sequence
  Description of Artificial Sequence: Synthetic oligonucleotide
  Sense strand starting at position 1754 of SEQ ID NO: 3618
cacugucuaucccuggaga

SEQ ID NO: 281695 - RNA, 19 nt, Artificial Sequence
  Description of Artificial Sequence: Synthetic oligonucleotide
  Antisense strand to SEQ ID NO: 281694
ucuccagggauagacagug

SEQ ID NO: 281696 - RNA, 19 nt, Artificial Sequence
  Description of Artificial Sequence: Synthetic oligonucleotide
  Sense strand starting at position 2075 of SEQ ID NO: 3618
accugacugcccgaaauca

SEQ ID NO: 281697 - RNA, 19 nt, Artificial Sequence
  Description of Artificial Sequence: Synthetic oligonucleotide
  Antisense strand to SEQ ID NO: 281696
ugauuucgggcagucaggu

SEQ ID NO: 281698 - RNA, 19 nt, Artificial Sequence
  Description of Artificial Sequence: Synthetic oligonucleotide
  Sense strand starting at position 2114 of SEQ ID NO: 3618
cucuucuuccuggaauagu

SEQ ID NO: 281699 - RNA, 19 nt, Artificial Sequence
  Description of Artificial Sequence: Synthetic oligonucleotide
  Antisense strand to SEQ ID NO: 281698
acuauuccaggaagaagag

SEQ ID NO: 281700 - RNA, 19 nt, Artificial Sequence
  Description of Artificial Sequence: Synthetic oligonucleotide
  Sense strand starting at position 2503 of SEQ ID NO: 3618
ggagaacugugguuuaaau

SEQ ID NO: 281701 - RNA, 19 nt, Artificial Sequence
  Description of Artificial Sequence: Synthetic oligonucleotide
  Antisense strand to SEQ ID NO: 281700
auuuaaaccacaguucucc

SEQ ID NO: 281702 - RNA, 19 nt, Artificial Sequence
  Description of Artificial Sequence: Synthetic oligonucleotide
  Sense strand starting at position 2539 of SEQ ID NO: 3618
cuccucuuccuauggagaa

SEQ ID NO: 281703 - RNA, 19 nt, Artificial Sequence
  Description of Artificial Sequence: Synthetic oligonucleotide
  Antisense strand to SEQ ID NO: 281702
uucuccauaggaagaggag

SEQ ID NO: 281704 - RNA, 19 nt, Artificial Sequence
  Description of Artificial Sequence: Synthetic oligonucleotide
  Sense strand starting at position 2595 of SEQ ID NO: 3618
cgcugauucccucaagaac

SEQ ID NO: 281705 - RNA, 19 nt, Artificial Sequence
  Description of Artificial Sequence: Synthetic oligonucleotide
  Antisense strand to SEQ ID NO: 281704
guucuugagggaaucagcg

SEQ ID NO: 281706 - RNA, 19 nt, Artificial Sequence
  Description of Artificial Sequence: Synthetic oligonucleotide
  Sense strand starting at position 2924 of SEQ ID NO: 3618
cauguuuccguguuuguca

SEQ ID NO: 281707 - RNA, 19 nt, Artificial Sequence
  Description of Artificial Sequence: Synthetic oligonucleotide
  Antisense strand to SEQ ID NO: 281706
ugacaaacacggaaacaug

SEQ ID NO: 281708 - RNA, 19 nt, Artificial Sequence
  Description of Artificial Sequence: Synthetic oligonucleotide
  Sense strand starting at position 2971 of SEQ ID NO: 3618
gugcuuuagacgucuuugu

SEQ ID NO: 281709 - RNA, 19 nt, Artificial Sequence
  Description of Artificial Sequence: Synthetic oligonucleotide
  Antisense strand to SEQ ID NO: 281708
acaaagacgucuaaagcac

SEQ ID NO: 281710 - RNA, 19 nt, Artificial Sequence
  Description of Artificial Sequence: Synthetic oligonucleotide
  Sense strand starting at position 3129 of SEQ ID NO: 3618
gacucugaccaccguaaau

SEQ ID NO: 281711 - RNA, 19 nt, Artificial Sequence
  Description of Artificial Sequence: Synthetic oligonucleotide
  Antisense strand to SEQ ID NO: 281710
auuuacgguggucagaguc

SEQ ID NO: 281712 - RNA, 19 nt, Artificial Sequence
  Description of Artificial Sequence: Synthetic oligonucleotide
  Sense strand starting at position 3163 of SEQ ID NO: 3618
guguauuauagugcugcca

SEQ ID NO: 281713 - RNA, 19 nt, Artificial Sequence
  Description of Artificial Sequence: Synthetic oligonucleotide
  Antisense strand to SEQ ID NO: 281712
uggcagcacuauaauacac

SEQ ID NO: 281714 - RNA, 19 nt, Artificial Sequence
  Description of Artificial Sequence: Synthetic oligonucleotide
  Sense strand starting at position 3331 of SEQ ID NO: 3618
accuccucaugguugaaau

SEQ ID NO: 281715 - RNA, 19 nt, Artificial Sequence
  Description of Artificial Sequence: Synthetic oligonucleotide
  Antisense strand to SEQ ID NO: 281714
auuucaaccaugaggaggu

SEQ ID NO: 281716 - RNA, 19 nt, Artificial Sequence
  Description of Artificial Sequence: Synthetic oligonucleotide
  Sense strand starting at position 3363 of SEQ ID NO: 3618
gcgugaaaccuugcacugu

SEQ ID NO: 281717 - RNA, 19 nt, Artificial Sequence
  Description of Artificial Sequence: Synthetic oligonucleotide
  Antisense strand to SEQ ID NO: 281716
acagugcaagguuucacgc

SEQ ID NO: 281718 - RNA, 19 nt, Artificial Sequence
  Description of Artificial Sequence: Synthetic oligonucleotide
  Sense strand starting at position 3675 of SEQ ID NO: 3618
uuucucuuuggugauagaa

SEQ ID NO: 281719 - RNA, 19 nt, Artificial Sequence
  Description of Artificial Sequence: Synthetic oligonucleotide
  Antisense strand to SEQ ID NO: 281718
uucuaucaccaaagagaaa

SEQ ID NO: 281720 - RNA, 19 nt, Artificial Sequence
  Description of Artificial Sequence: Synthetic oligonucleotide
  Sense strand starting at position 3699 of SEQ ID NO: 3618
caauguuuauuugagagaa

SEQ ID NO: 281721 - RNA, 19 nt, Artificial Sequence
  Description of Artificial Sequence: Synthetic oligonucleotide
  Antisense strand to SEQ ID NO: 281720
uucucucaaauaaacauug

SEQ ID NO: 281722 - RNA, 19 nt, Artificial Sequence
  Description of Artificial Sequence: Synthetic oligonucleotide
  Sense strand starting at position 3857 of SEQ ID NO: 3618
caauuauuguucucaggga

SEQ ID NO: 281723 - RNA, 19 nt, Artificial Sequence
  Description of Artificial Sequence: Synthetic oligonucleotide
  Antisense strand to SEQ ID NO: 281722
ucccugagaacaauaauug

SEQ ID NO: 281724 - RNA, 19 nt, Artificial Sequence
  Description of Artificial Sequence: Synthetic oligonucleotide
  Sense strand starting at position 3861 of SEQ ID NO: 3618
uauuguucucagggaacag

SEQ ID NO: 281725 - RNA, 19 nt, Artificial Sequence
  Description of Artificial Sequence: Synthetic oligonucleotide
  Antisense strand to SEQ ID NO: 281724
cuguucccugagaacaaua

SEQ ID NO: 281726 - RNA, 19 nt, Artificial Sequence
  Description of Artificial Sequence: Synthetic oligonucleotide
  Sense strand starting at position 3918 of SEQ ID NO: 3618
guaauauaaugccugauaa

SEQ ID NO: 281727 - RNA, 19 nt, Artificial Sequence
  Description of Artificial Sequence: Synthetic oligonucleotide
  Antisense strand to SEQ ID NO: 281726
uuaucaggcauuauauuac

SEQ ID NO: 281728 - RNA, 19 nt, Artificial Sequence
  Description of Artificial Sequence: Synthetic oligonucleotide
  Sense strand starting at position 3928 of SEQ ID NO: 3618
gccugauaauggguagaua

SEQ ID NO: 281729 - RNA, 19 nt, Artificial Sequence
  Description of Artificial Sequence: Synthetic oligonucleotide
  Antisense strand to SEQ ID NO: 281728
uaucuacccauuaucaggc

SEQ ID NO: 281730 - RNA, 19 nt, Artificial Sequence
  Description of Artificial Sequence: Synthetic oligonucleotide
  Sense strand starting at position 3940 of SEQ ID NO: 3618
guagauaggugucuagaau

SEQ ID NO: 281731 - RNA, 19 nt, Artificial Sequence
  Description of Artificial Sequence: Synthetic oligonucleotide
  Antisense strand to SEQ ID NO: 281730
auucuagacaccuaucuac

SEQ ID NO: 281732 - RNA, 19 nt, Artificial Sequence
  Description of Artificial Sequence: Synthetic oligonucleotide
  Sense strand starting at position 816 of SEQ ID NO: 3619
gagaaaguauggcuaacau

SEQ ID NO: 281733 - RNA, 19 nt, Artificial Sequence
  Description of Artificial Sequence: Synthetic oligonucleotide
  Antisense strand to SEQ ID NO: 281732
auguuagccauacuuucuc

SEQ ID NO: 281734 - RNA, 19 nt, Artificial Sequence
  Description of Artificial Sequence: Synthetic oligonucleotide
  Sense strand starting at position 858 of SEQ ID NO: 3619
augaauaaugaggguuguu

SEQ ID NO: 281735 - RNA, 19 nt, Artificial Sequence
  Description of Artificial Sequence: Synthetic oligonucleotide
  Antisense strand to SEQ ID NO: 281734
aacaacccucauuauucau

SEQ ID NO: 281736 - RNA, 19 nt, Artificial Sequence
  Description of Artificial Sequence: Synthetic oligonucleotide
  Sense strand starting at position 1018 of SEQ ID NO: 3619
uuggccaucuuaucagaaa

SEQ ID NO: 281737 - RNA, 19 nt, Artificial Sequence
  Description of Artificial Sequence: Synthetic oligonucleotide
  Antisense strand to SEQ ID NO: 281736
uuucugauaagauggccaa

SEQ ID NO: 281738 - RNA, 19 nt, Artificial Sequence
  Description of Artificial Sequence: Synthetic oligonucleotide
  Sense strand starting at position 1101 of SEQ ID NO: 3619
uugacugcauuuguuuaua

SEQ ID NO: 281739 - RNA, 19 nt, Artificial Sequence
  Description of Artificial Sequence: Synthetic oligonucleotide
  Antisense strand to SEQ ID NO: 281738
uauaaacaaaugcagucaa

SEQ ID NO: 281740 - RNA, 19 nt, Artificial Sequence
  Description of Artificial Sequence: Synthetic oligonucleotide
  Sense strand starting at position 1198 of SEQ ID NO: 3619
uuugcauuuccgggacucu

SEQ ID NO: 281741 - RNA, 19 nt, Artificial Sequence
  Description of Artificial Sequence: Synthetic oligonucleotide
  Antisense strand to SEQ ID NO: 281740
agagucccggaaaugcaaa

SEQ ID NO: 281742 - RNA, 19 nt, Artificial Sequence
  Description of Artificial Sequence: Synthetic oligonucleotide
  Sense strand starting at position 1301 of SEQ ID NO: 3619
ugaauuugcuaagacaaga

SEQ ID NO: 281743 - RNA, 19 nt, Artificial Sequence
  Description of Artificial Sequence: Synthetic oligonucleotide
  Antisense strand to SEQ ID NO: 281742
ucuugucuuagcaaauuca

SEQ ID NO: 281744 - RNA, 19 nt, Artificial Sequence
  Description of Artificial Sequence: Synthetic oligonucleotide
  Sense strand starting at position 1312 of SEQ ID NO: 3619
agacaagaauucgcaccaa

SEQ ID NO: 281745 - RNA, 19 nt, Artificial Sequence
  Description of Artificial Sequence: Synthetic oligonucleotide
  Antisense strand to SEQ ID NO: 281744
uuggugcgaauucuugucu

SEQ ID NO: 281746 - RNA, 19 nt, Artificial Sequence
  Description of Artificial Sequence: Synthetic oligonucleotide
  Sense strand starting at position 1347 of SEQ ID NO: 3619
gaggaugucuuccugacuu

SEQ ID NO: 281747 - RNA, 19 nt, Artificial Sequence
  Description of Artificial Sequence: Synthetic oligonucleotide
  Antisense strand to SEQ ID NO: 281746
aagucaggaagacauccuc

SEQ ID NO: 281748 - RNA, 19 nt, Artificial Sequence
  Description of Artificial Sequence: Synthetic oligonucleotide
  Sense strand starting at position 2127 of SEQ ID NO: 3619
ccgagaggauuccucgaca

SEQ ID NO: 281749 - RNA, 19 nt, Artificial Sequence
  Description of Artificial Sequence: Synthetic oligonucleotide
  Antisense strand to SEQ ID NO: 281748
ugucgaggaauccucucgg

SEQ ID NO: 281750 - RNA, 19 nt, Artificial Sequence
  Description of Artificial Sequence: Synthetic oligonucleotide
  Sense strand starting at position 2144 of SEQ ID NO: 3619
caggaaauuugggaauucu

SEQ ID NO: 281751 - RNA, 19 nt, Artificial Sequence
  Description of Artificial Sequence: Synthetic oligonucleotide
  Antisense strand to SEQ ID NO: 281750
agaauucccaaauuuccug

SEQ ID NO: 281752 - RNA, 19 nt, Artificial Sequence
  Description of Artificial Sequence: Synthetic oligonucleotide
  Sense strand starting at position 2152 of SEQ ID NO: 3619
uugggaauucucuggguga

SEQ ID NO: 281753 - RNA, 19 nt, Artificial Sequence
  Description of Artificial Sequence: Synthetic oligonucleotide
  Antisense strand to SEQ ID NO: 281752
ucacccagagaauucccaa

SEQ ID NO: 281754 - RNA, 19 nt, Artificial Sequence
  Description of Artificial Sequence: Synthetic oligonucleotide
  Sense strand starting at position 2154 of SEQ ID NO: 3619
gggaauucucugggugaug

SEQ ID NO: 281755 - RNA, 19 nt, Artificial Sequence
  Description of Artificial Sequence: Synthetic oligonucleotide
  Antisense strand to SEQ ID NO: 281754
caucacccagagaauuccc

SEQ ID NO: 281756 - RNA, 19 nt, Artificial Sequence
  Description of Artificial Sequence: Synthetic oligonucleotide
  Sense strand starting at position 2157 of SEQ ID NO: 3619
aauucucugggugaugcau

SEQ ID NO: 281757 - RNA, 19 nt, Artificial Sequence
  Description of Artificial Sequence: Synthetic oligonucleotide
  Antisense strand to SEQ ID NO: 281756
augcaucacccagagaauu

SEQ ID NO: 281758 - RNA, 19 nt, Artificial Sequence
  Description of Artificial Sequence: Synthetic oligonucleotide
  Sense strand starting at position 2168 of SEQ ID NO: 3619
ugaugcaucagugauugca

SEQ ID NO: 281759 - RNA, 19 nt, Artificial Sequence
  Description of Artificial Sequence: Synthetic oligonucleotide
  Antisense strand to SEQ ID NO: 281758
ugcaaucacugaugcauca

SEQ ID NO: 281760 - RNA, 19 nt, Artificial Sequence
  Description of Artificial Sequence: Synthetic oligonucleotide
  Sense strand starting at position 2347 of SEQ ID NO: 3619
cagagagcccuagauguca

SEQ ID NO: 281761 - RNA, 19 nt, Artificial Sequence
  Description of Artificial Sequence: Synthetic oligonucleotide
  Antisense strand to SEQ ID NO: 281760
ugacaucuagggcucucug

SEQ ID NO: 281762 - RNA, 19 nt, Artificial Sequence
  Description of Artificial Sequence: Synthetic oligonucleotide
  Sense strand starting at position 2355 of SEQ ID NO: 3619
ccuagaugucaugauaguu

SEQ ID NO: 281763 - RNA, 19 nt, Artificial Sequence
  Description of Artificial Sequence: Synthetic oligonucleotide
  Antisense strand to SEQ ID NO: 281762
aacuaucaugacaucuagg

SEQ ID NO: 281764 - RNA, 19 nt, Artificial Sequence
  Description of Artificial Sequence: Synthetic oligonucleotide
  Sense strand starting at position 2384 of SEQ ID NO: 3619
ugcauuaucauguaaggga

SEQ ID NO: 281765 - RNA, 19 nt, Artificial Sequence
  Description of Artificial Sequence: Synthetic oligonucleotide
  Antisense strand to SEQ ID NO: 281764
ucccuuacaugauaaugca

SEQ ID NO: 281766 - RNA, 19 nt, Artificial Sequence
  Description of Artificial Sequence: Synthetic oligonucleotide
  Sense strand starting at position 2388 of SEQ ID NO: 3619
uuaucauguaagggaguua

SEQ ID NO: 281767 - RNA, 19 nt, Artificial Sequence
  Description of Artificial Sequence: Synthetic oligonucleotide
  Antisense strand to SEQ ID NO: 281766
uaacucccuuacaugauaa

SEQ ID NO: 281768 - RNA, 19 nt, Artificial Sequence
  Description of Artificial Sequence: Synthetic oligonucleotide
  Sense strand starting at position 2443 of SEQ ID NO: 3619
auucgaugccaugaaauug

SEQ ID NO: 281769 - RNA, 19 nt, Artificial Sequence
  Description of Artificial Sequence: Synthetic oligonucleotide
  Antisense strand to SEQ ID NO: 281768
caauuucauggcaucgaau

SEQ ID NO: 281770 - RNA, 19 nt, Artificial Sequence
  Description of Artificial Sequence: Synthetic oligonucleotide
  Sense strand starting at position 2679 of SEQ ID NO: 3619
gaacguauucucuaucaug

SEQ ID NO: 281771 - RNA, 19 nt, Artificial Sequence
  Description of Artificial Sequence: Synthetic oligonucleotide
  Antisense strand to SEQ ID NO: 281770
caugauagagaauacguuc

SEQ ID NO: 281772 - RNA, 19 nt, Artificial Sequence
  Description of Artificial Sequence: Synthetic oligonucleotide
  Sense strand starting at position 2785 of SEQ ID NO: 3619
cucagugaaaucuggaugu

SEQ ID NO: 281773 - RNA, 19 nt, Artificial Sequence
  Description of Artificial Sequence: Synthetic oligonucleotide
  Antisense strand to SEQ ID NO: 281772
acauccagauuucacugag

SEQ ID NO: 281774 - RNA, 19 nt, Artificial Sequence
  Description of Artificial Sequence: Synthetic oligonucleotide
  Sense strand starting at position 2787 of SEQ ID NO: 3619
cagugaaaucuggaugucu

SEQ ID NO: 281775 - RNA, 19 nt, Artificial Sequence
  Description of Artificial Sequence: Synthetic oligonucleotide
  Antisense strand to SEQ ID NO: 281774
agacauccagauuucacug

SEQ ID NO: 281776 - RNA, 19 nt, Artificial Sequence
  Description of Artificial Sequence: Synthetic oligonucleotide
  Sense strand starting at position 2814 of SEQ ID NO: 3619
cccuuauuaucuguccaga

SEQ ID NO: 281777 - RNA, 19 nt, Artificial Sequence
  Description of Artificial Sequence: Synthetic oligonucleotide
  Antisense strand to SEQ ID NO: 281776
ucuggacagauaauaaggg

SEQ ID NO: 281778 - RNA, 19 nt, Artificial Sequence
  Description of Artificial Sequence: Synthetic oligonucleotide
  Sense strand starting at position 2816 of SEQ ID NO: 3619
cuuauuaucuguccagacu

SEQ ID NO: 281779 - RNA, 19 nt, Artificial Sequence
  Description of Artificial Sequence: Synthetic oligonucleotide
  Antisense strand to SEQ ID NO: 281778
agucuggacagauaauaag

SEQ ID NO: 281780 - RNA, 19 nt, Artificial Sequence
  Description of Artificial Sequence: Synthetic oligonucleotide
  Sense strand starting at position 2817 of SEQ ID NO: 3619
uuauuaucuguccagacuu

SEQ ID NO: 281781 - RNA, 19 nt, Artificial Sequence
  Description of Artificial Sequence: Synthetic oligonucleotide
  Antisense strand to SEQ ID NO: 281780
aagucuggacagauaauaa

SEQ ID NO: 281782 - RNA, 19 nt, Artificial Sequence
  Description of Artificial Sequence: Synthetic oligonucleotide
  Sense strand starting at position 3230 of SEQ ID NO: 3619
cagaaaguguuagccugaa

SEQ ID NO: 281783 - RNA, 19 nt, Artificial Sequence
  Description of Artificial Sequence: Synthetic oligonucleotide
  Antisense strand to SEQ ID NO: 281782
uucaggcuaacacuuucug

SEQ ID NO: 281784 - RNA, 19 nt, Artificial Sequence
  Description of Artificial Sequence: Synthetic oligonucleotide
  Sense strand starting at position 3234 of SEQ ID NO: 3619
aaguguuagccugaaugua

SEQ ID NO: 281785 - RNA, 19 nt, Artificial Sequence
  Description of Artificial Sequence: Synthetic oligonucleotide
  Antisense strand to SEQ ID NO: 281784
uacauucaggcuaacacuu

SEQ ID NO: 281786 - RNA, 19 nt, Artificial Sequence
  Description of Artificial Sequence: Synthetic oligonucleotide
  Sense strand starting at position 3246 of SEQ ID NO: 3619
gaauguaagcaucagaguu

SEQ ID NO: 281787 - RNA, 19 nt, Artificial Sequence
  Description of Artificial Sequence: Synthetic oligonucleotide
  Antisense strand to SEQ ID NO: 281786
aacucugaugcuuacauuc

SEQ ID NO: 281788 - RNA, 19 nt, Artificial Sequence
  Description of Artificial Sequence: Synthetic oligonucleotide
  Sense strand starting at position 3280 of SEQ ID NO: 3619
ggaugcaaauacuucuaaa

SEQ ID NO: 281789 - RNA, 19 nt, Artificial Sequence
  Description of Artificial Sequence: Synthetic oligonucleotide
  Antisense strand to SEQ ID NO: 281788
uuuagaaguauuugcaucc

SEQ ID NO: 281790 - RNA, 19 nt, Artificial Sequence
  Description of Artificial Sequence: Synthetic oligonucleotide
  Sense strand starting at position 3395 of SEQ ID NO: 3619
cgcaaauggcacuaagaua

SEQ ID NO: 281791 - RNA, 19 nt, Artificial Sequence
  Description of Artificial Sequence: Synthetic oligonucleotide
  Antisense strand to SEQ ID NO: 281790
uaucuuagugccauuugcg

SEQ ID NO: 281792 - RNA, 19 nt, Artificial Sequence
  Description of Artificial Sequence: Synthetic oligonucleotide
  Sense strand starting at position 3432 of SEQ ID NO: 3619
uguacauugcuugaaauac

SEQ ID NO: 281793 - RNA, 19 nt, Artificial Sequence
  Description of Artificial Sequence: Synthetic oligonucleotide
  Antisense strand to SEQ ID NO: 281792
guauuucaagcaauguaca

SEQ ID NO: 281794 - RNA, 19 nt, Artificial Sequence
  Description of Artificial Sequence: Synthetic oligonucleotide
  Sense strand starting at position 3440 of SEQ ID NO: 3619
gcuugaaauacagguagua

SEQ ID NO: 281795 - RNA, 19 nt, Artificial Sequence
  Description of Artificial Sequence: Synthetic oligonucleotide
  Antisense strand to SEQ ID NO: 281794
uacuaccuguauuucaagc

SEQ ID NO: 281796 - RNA, 19 nt, Artificial Sequence
  Description of Artificial Sequence: Synthetic oligonucleotide
  Sense strand starting at position 3478 of SEQ ID NO: 3619
ggauccaccuaguuuauca

SEQ ID NO: 281797 - RNA, 19 nt, Artificial Sequence
  Description of Artificial Sequence: Synthetic oligonucleotide
  Antisense strand to SEQ ID NO: 281796
ugauaaacuagguggaucc

SEQ ID NO: 281798 - RNA, 19 nt, Artificial Sequence
  Description of Artificial Sequence: Synthetic oligonucleotide
  Sense strand starting at position 3485 of SEQ ID NO: 3619
ccuaguuuaucauuggaug

SEQ ID NO: 281799 - RNA, 19 nt, Artificial Sequence
  Description of Artificial Sequence: Synthetic oligonucleotide
  Antisense strand to SEQ ID NO: 281798
cauccaaugauaaacuagg

SEQ ID NO: 281800 - RNA, 19 nt, Artificial Sequence
  Description of Artificial Sequence: Synthetic oligonucleotide
  Sense strand starting at position 3491 of SEQ ID NO: 3619
uuaucauuggauggagcua

SEQ ID NO: 281801 - RNA, 19 nt, Artificial Sequence
  Description of Artificial Sequence: Synthetic oligonucleotide
  Antisense strand to SEQ ID NO: 281800
uagcuccauccaaugauaa

SEQ ID NO: 281802 - RNA, 19 nt, Artificial Sequence
  Description of Artificial Sequence: Synthetic oligonucleotide
  Sense strand starting at position 3507 of SEQ ID NO: 3619
cuauuuguuauacggcuga

SEQ ID NO: 281803 - RNA, 19 nt, Artificial Sequence
  Description of Artificial Sequence: Synthetic oligonucleotide
  Antisense strand to SEQ ID NO: 281802
ucagccguauaacaaauag

SEQ ID NO: 281804 - RNA, 19 nt, Artificial Sequence
  Description of Artificial Sequence: Synthetic oligonucleotide
  Sense strand starting at position 3512 of SEQ ID NO: 3619
uguuauacggcugaugaua

SEQ ID NO: 281805 - RNA, 19 nt, Artificial Sequence
  Description of Artificial Sequence: Synthetic oligonucleotide
  Antisense strand to SEQ ID NO: 281804
uaucaucagccguauaaca

SEQ ID NO: 281806 - RNA, 19 nt, Artificial Sequence
  Description of Artificial Sequence: Synthetic oligonucleotide
  Sense strand starting at position 3540 of SEQ ID NO: 3619
ggcacaaggcuaugaagau

SEQ ID NO: 281807 - RNA, 19 nt, Artificial Sequence
  Description of Artificial Sequence: Synthetic oligonucleotide
  Antisense strand to SEQ ID NO: 281806
aucuucauagccuugugcc

SEQ ID NO: 281808 - RNA, 19 nt, Artificial Sequence
  Description of Artificial Sequence: Synthetic oligonucleotide
  Sense strand starting at position 3875 of SEQ ID NO: 3619
ugagguagaucuguaugua

SEQ ID NO: 281809 - RNA, 19 nt, Artificial Sequence
  Description of Artificial Sequence: Synthetic oligonucleotide
  Antisense strand to SEQ ID NO: 281808
uacauacagaucuaccuca

SEQ ID NO: 281810 - RNA, 19 nt, Artificial Sequence
  Description of Artificial Sequence: Synthetic oligonucleotide
  Sense strand starting at position 3876 of SEQ ID NO: 3619
gagguagaucuguauguaa

SEQ ID NO: 281811 - RNA, 19 nt, Artificial Sequence
  Description of Artificial Sequence: Synthetic oligonucleotide
  Antisense strand to SEQ ID NO: 281810
uuacauacagaucuaccuc

SEQ ID NO: 281812 - RNA, 19 nt, Artificial Sequence
  Description of Artificial Sequence: Synthetic oligonucleotide
  Sense strand starting at position 48 of SEQ ID NO: 3620
uuauuuggguaauauccau

SEQ ID NO: 281813 - RNA, 19 nt, Artificial Sequence
  Description of Artificial Sequence: Synthetic oligonucleotide
  Antisense strand to SEQ ID NO: 281812
auggauauuacccaaauaa

SEQ ID NO: 281814 - RNA, 19 nt, Artificial Sequence
  Description of Artificial Sequence: Synthetic oligonucleotide
  Sense strand starting at position 131 of SEQ ID NO: 3620
auacauucguuacuuaagu

SEQ ID NO: 281815 - RNA, 19 nt, Artificial Sequence
  Description of Artificial Sequence: Synthetic oligonucleotide
  Antisense strand to SEQ ID NO: 281814
acuuaaguaacgaauguau

SEQ ID NO: 281816 - RNA, 19 nt, Artificial Sequence
  Description of Artificial Sequence: Synthetic oligonucleotide
  Sense strand starting at position 348 of SEQ ID NO: 3620
gaaguacuugcagaucaug

SEQ ID NO: 281817 - RNA, 19 nt, Artificial Sequence
  Description of Artificial Sequence: Synthetic oligonucleotide
  Antisense strand to SEQ ID NO: 281816
caugaucugcaaguacuuc

SEQ ID NO: 281818 - RNA, 19 nt, Artificial Sequence
  Description of Artificial Sequence: Synthetic oligonucleotide
  Sense strand starting at position 351 of SEQ ID NO: 3620
guacuugcagaucauguau

SEQ ID NO: 281819 - RNA, 19 nt, Artificial Sequence
  Description of Artificial Sequence: Synthetic oligonucleotide
  Antisense strand to SEQ ID NO: 281818
auacaugaucugcaaguac

SEQ ID NO: 281820 - RNA, 19 nt, Artificial Sequence
  Description of Artificial Sequence: Synthetic oligonucleotide
  Sense strand starting at position 359 of SEQ ID NO: 3620
agaucauguaugcgauaga

SEQ ID NO: 281821 - RNA, 19 nt, Artificial Sequence
  Description of Artificial Sequence: Synthetic oligonucleotide
  Antisense strand to SEQ ID NO: 281820
ucuaucgcauacaugaucu

SEQ ID NO: 281822 - RNA, 19 nt, Artificial Sequence
  Description of Artificial Sequence: Synthetic oligonucleotide
  Sense strand starting at position 362 of SEQ ID NO: 3620
ucauguaugcgauagaggu

SEQ ID NO: 281823 - RNA, 19 nt, Artificial Sequence
  Description of Artificial Sequence: Synthetic oligonucleotide
  Antisense strand to SEQ ID NO: 281822
accucuaucgcauacauga

SEQ ID NO: 281824 - RNA, 19 nt, Artificial Sequence
  Description of Artificial Sequence: Synthetic oligonucleotide
  Sense strand starting at position 366 of SEQ ID NO: 3620
guaugcgauagaggucuau

SEQ ID NO: 281825 - RNA, 19 nt, Artificial Sequence
  Description of Artificial Sequence: Synthetic oligonucleotide
  Antisense strand to SEQ ID NO: 281824
auagaccucuaucgcauac

SEQ ID NO: 281826 - RNA, 19 nt, Artificial Sequence
  Description of Artificial Sequence: Synthetic oligonucleotide
  Sense strand starting at position 370 of SEQ ID NO: 3620
gcgauagaggucuauuauc

SEQ ID NO: 281827 - RNA, 19 nt, Artificial Sequence
  Description of Artificial Sequence: Synthetic oligonucleotide
  Antisense strand to SEQ ID NO: 281826
gauaauagaccucuaucgc

SEQ ID NO: 281828 - RNA, 19 nt, Artificial Sequence
  Description of Artificial Sequence: Synthetic oligonucleotide
  Sense strand starting at position 375 of SEQ ID NO: 3620
agaggucuauuaucuagaa

SEQ ID NO: 281829 - RNA, 19 nt, Artificial Sequence
  Description of Artificial Sequence: Synthetic oligonucleotide
  Antisense strand to SEQ ID NO: 281828
uucuagauaauagaccucu

SEQ ID NO: 281830 - RNA, 19 nt, Artificial Sequence
  Description of Artificial Sequence: Synthetic oligonucleotide
  Sense strand starting at position 376 of SEQ ID NO: 3620
gaggucuauuaucuagaau

SEQ ID NO: 281831 - RNA, 19 nt, Artificial Sequence
  Description of Artificial Sequence: Synthetic oligonucleotide
  Antisense strand to SEQ ID NO: 281830
auucuagauaauagaccuc

SEQ ID NO: 281832 - RNA, 19 nt, Artificial Sequence
  Description of Artificial Sequence: Synthetic oligonucleotide
  Sense strand starting at position 507 of SEQ ID NO: 3620
ugcucaauuuaucaagagu

SEQ ID NO: 281833 - RNA, 19 nt, Artificial Sequence
  Description of Artificial Sequence: Synthetic oligonucleotide
  Antisense strand to SEQ ID NO: 281832
acucuugauaaauugagca

SEQ ID NO: 281834 - RNA, 19 nt, Artificial Sequence
  Description of Artificial Sequence: Synthetic oligonucleotide
  Sense strand starting at position 609 of SEQ ID NO: 3620
ugagcaggucauggagaaa

SEQ ID NO: 281835 - RNA, 19 nt, Artificial Sequence
  Description of Artificial Sequence: Synthetic oligonucleotide
  Antisense strand to SEQ ID NO: 281834
uuucuccaugaccugcuca

SEQ ID NO: 281836 - RNA, 19 nt, Artificial Sequence
  Description of Artificial Sequence: Synthetic oligonucleotide
  Sense strand starting at position 645 of SEQ ID NO: 3620
ugccgaugggaauguaaca

SEQ ID NO: 281837 - RNA, 19 nt, Artificial Sequence
  Description of Artificial Sequence: Synthetic oligonucleotide
  Antisense strand to SEQ ID NO: 281836
uguuacauucccaucggca

SEQ ID NO: 281838 - RNA, 19 nt, Artificial Sequence
  Description of Artificial Sequence: Synthetic oligonucleotide
  Sense strand starting at position 771 of SEQ ID NO: 3620
uucuuugaguucucacuua

SEQ ID NO: 281839 - RNA, 19 nt, Artificial Sequence
  Description of Artificial Sequence: Synthetic oligonucleotide
  Antisense strand to SEQ ID NO: 281838
uaagugagaacucaaagaa

SEQ ID NO: 281840 - RNA, 19 nt, Artificial Sequence
  Description of Artificial Sequence: Synthetic oligonucleotide
  Sense strand starting at position 826 of SEQ ID NO: 3620
augguaucgccagaaacca

SEQ ID NO: 281841 - RNA, 19 nt, Artificial Sequence
  Description of Artificial Sequence: Synthetic oligonucleotide
  Antisense strand to SEQ ID NO: 281840
ugguuucuggcgauaccau

SEQ ID NO: 281842 - RNA, 19 nt, Artificial Sequence
  Description of Artificial Sequence: Synthetic oligonucleotide
  Sense strand starting at position 865 of SEQ ID NO: 3620
ucccuuaucccugaggucu

SEQ ID NO: 281843 - RNA, 19 nt, Artificial Sequence
  Description of Artificial Sequence: Synthetic oligonucleotide
  Antisense strand to SEQ ID NO: 281842
agaccucagggauaaggga

SEQ ID NO: 281844 - RNA, 19 nt, Artificial Sequence
  Description of Artificial Sequence: Synthetic oligonucleotide
  Sense strand starting at position 927 of SEQ ID NO: 3620
ccucacaucuggccagaau

SEQ ID NO: 281845 - RNA, 19 nt, Artificial Sequence
  Description of Artificial Sequence: Synthetic oligonucleotide
  Antisense strand to SEQ ID NO: 281844
auucuggccagaugugagg

SEQ ID NO: 281846 - RNA, 19 nt, Artificial Sequence
  Description of Artificial Sequence: Synthetic oligonucleotide
  Sense strand starting at position 928 of SEQ ID NO: 3620
cucacaucuggccagaaua

SEQ ID NO: 281847 - RNA, 19 nt, Artificial Sequence
  Description of Artificial Sequence: Synthetic oligonucleotide
  Antisense strand to SEQ ID NO: 281846
uauucuggccagaugugag

SEQ ID NO: 281848 - RNA, 19 nt, Artificial Sequence
  Description of Artificial Sequence: Synthetic oligonucleotide
  Sense strand starting at position 970 of SEQ ID NO: 3620
ucaguuacgcuccugcuua

SEQ ID NO: 281849 - RNA, 19 nt, Artificial Sequence
  Description of Artificial Sequence: Synthetic oligonucleotide
  Antisense strand to SEQ ID NO: 281848
uaagcaggagcguaacuga

SEQ ID NO: 281850 - RNA, 19 nt, Artificial Sequence
  Description of Artificial Sequence: Synthetic oligonucleotide
  Sense strand starting at position 1548 of SEQ ID NO: 3620
agaagcauaugugcgaauu

SEQ ID NO: 281851 - RNA, 19 nt, Artificial Sequence
  Description of Artificial Sequence: Synthetic oligonucleotide
  Antisense strand to SEQ ID NO: 281850
aauucgcacauaugcuucu

SEQ ID NO: 281852 - RNA, 19 nt, Artificial Sequence
  Description of Artificial Sequence: Synthetic oligonucleotide
  Sense strand starting at position 1549 of SEQ ID NO: 3620
gaagcauaugugcgaauuu

SEQ ID NO: 281853 - RNA, 19 nt, Artificial Sequence
  Description of Artificial Sequence: Synthetic oligonucleotide
  Antisense strand to SEQ ID NO: 281852
aaauucgcacauaugcuuc

SEQ ID NO: 281854 - RNA, 19 nt, Artificial Sequence
  Description of Artificial Sequence: Synthetic oligonucleotide
  Sense strand starting at position 1610 of SEQ ID NO: 3620
ccgcgacuucguucgagaa

SEQ ID NO: 281855 - RNA, 19 nt, Artificial Sequence
  Description of Artificial Sequence: Synthetic oligonucleotide
  Antisense strand to SEQ ID NO: 281854
uucucgaacgaagucgcgg

SEQ ID NO: 281856 - RNA, 19 nt, Artificial Sequence
  Description of Artificial Sequence: Synthetic oligonucleotide
  Sense strand starting at position 2025 of SEQ ID NO: 3620
ccugucgggcaguaugaaa

SEQ ID NO: 281857 - RNA, 19 nt, Artificial Sequence
  Description of Artificial Sequence: Synthetic oligonucleotide
  Antisense strand to SEQ ID NO: 281856
uuucauacugcccgacagg

SEQ ID NO: 281858 - RNA, 19 nt, Artificial Sequence
  Description of Artificial Sequence: Synthetic oligonucleotide
  Sense strand starting at position 2216 of SEQ ID NO: 3620
cugcaaagucaccauauga

SEQ ID NO: 281859 - RNA, 19 nt, Artificial Sequence
  Description of Artificial Sequence: Synthetic oligonucleotide
  Antisense strand to SEQ ID NO: 281858
ucauauggugacuuugcag

SEQ ID NO: 281860 - RNA, 19 nt, Artificial Sequence
  Description of Artificial Sequence: Synthetic oligonucleotide
  Sense strand starting at position 2452 of SEQ ID NO: 3620
cagugaggcauuugucaug

SEQ ID NO: 281861 - RNA, 19 nt, Artificial Sequence
  Description of Artificial Sequence: Synthetic oligonucleotide
  Antisense strand to SEQ ID NO: 281860
caugacaaaugccucacug

SEQ ID NO: 281862 - RNA, 19 nt, Artificial Sequence
  Description of Artificial Sequence: Synthetic oligonucleotide
  Sense strand starting at position 2463 of SEQ ID NO: 3620
uugucaugagcacaggauu

SEQ ID NO: 281863 - RNA, 19 nt, Artificial Sequence
  Description of Artificial Sequence: Synthetic oligonucleotide
  Antisense strand to SEQ ID NO: 281862
aauccugugcucaugacaa

SEQ ID NO: 281864 - RNA, 19 nt, Artificial Sequence
  Description of Artificial Sequence: Synthetic oligonucleotide
  Sense strand starting at position 2623 of SEQ ID NO: 3620
cugguccugucuuuauuua

SEQ ID NO: 281865 - RNA, 19 nt, Artificial Sequence
  Description of Artificial Sequence: Synthetic oligonucleotide
  Antisense strand to SEQ ID NO: 281864
uaaauaaagacaggaccag

SEQ ID NO: 281866 - RNA, 19 nt, Artificial Sequence
  Description of Artificial Sequence: Synthetic oligonucleotide
  Sense strand starting at position 3080 of SEQ ID NO: 3620
ugccuagucuuauccuuga

SEQ ID NO: 281867 - RNA, 19 nt, Artificial Sequence
  Description of Artificial Sequence: Synthetic oligonucleotide
  Antisense strand to SEQ ID NO: 281866
ucaaggauaagacuaggca

SEQ ID NO: 281868 - RNA, 19 nt, Artificial Sequence
  Description of Artificial Sequence: Synthetic oligonucleotide
  Sense strand starting at position 3083 of SEQ ID NO: 3620
cuagucuuauccuugauag

SEQ ID NO: 281869 - RNA, 19 nt, Artificial Sequence
  Description of Artificial Sequence: Synthetic oligonucleotide
  Antisense strand to SEQ ID NO: 281868
cuaucaaggauaagacuag

SEQ ID NO: 281870 - RNA, 19 nt, Artificial Sequence
  Description of Artificial Sequence: Synthetic oligonucleotide
  Sense strand starting at position 3084 of SEQ ID NO: 3620
uagucuuauccuugauagg

SEQ ID NO: 281871 - RNA, 19 nt, Artificial Sequence
  Description of Artificial Sequence: Synthetic oligonucleotide
  Antisense strand to SEQ ID NO: 281870
ccuaucaaggauaagacua

SEQ ID NO: 281872 - RNA, 19 nt, Artificial Sequence
  Description of Artificial Sequence: Synthetic oligonucleotide
  Sense strand starting at position 3290 of SEQ ID NO: 3620
ggcugcagucucugaaaug

SEQ ID NO: 281873 - RNA, 19 nt, Artificial Sequence
  Description of Artificial Sequence: Synthetic oligonucleotide
  Antisense strand to SEQ ID NO: 281872
cauuucagagacugcagcc

SEQ ID NO: 281874 - RNA, 19 nt, Artificial Sequence
  Description of Artificial Sequence: Synthetic oligonucleotide
  Sense strand starting at position 3397 of SEQ ID NO: 3620
gaccgugagcauggaucuu

SEQ ID NO: 281875 - RNA, 19 nt, Artificial Sequence
  Description of Artificial Sequence: Synthetic oligonucleotide
  Antisense strand to SEQ ID NO: 281874
aagauccaugcucacgguc

SEQ ID NO: 281876 - RNA, 19 nt, Artificial Sequence
  Description of Artificial Sequence: Synthetic oligonucleotide
  Sense strand starting at position 3406 of SEQ ID NO: 3620
cauggaucuugggauaaug

SEQ ID NO: 281877 - RNA, 19 nt, Artificial Sequence
  Description of Artificial Sequence: Synthetic oligonucleotide
  Antisense strand to SEQ ID NO: 281876
cauuaucccaagauccaug

SEQ ID NO: 281878 - RNA, 19 nt, Artificial Sequence
  Description of Artificial Sequence: Synthetic oligonucleotide
  Sense strand starting at position 3424 of SEQ ID NO: 3620
guaauacacuuaucgcaaa

SEQ ID NO: 281879 - RNA, 19 nt, Artificial Sequence
  Description of Artificial Sequence: Synthetic oligonucleotide
  Antisense strand to SEQ ID NO: 281878
uuugcgauaaguguauuac

SEQ ID NO: 281880 - RNA, 19 nt, Artificial Sequence
  Description of Artificial Sequence: Synthetic oligonucleotide
  Sense strand starting at position 3515 of SEQ ID NO: 3620
uuuagaagucccuauguua

SEQ ID NO: 281881 - RNA, 19 nt, Artificial Sequence
  Description of Artificial Sequence: Synthetic oligonucleotide
  Antisense strand to SEQ ID NO: 281880
uaacauagggacuucuaaa

SEQ ID NO: 281882 - RNA, 19 nt, Artificial Sequence
  Description of Artificial Sequence: Synthetic oligonucleotide
  Sense strand starting at position 3522 of SEQ ID NO: 3620
gucccuauguuauuggaag

SEQ ID NO: 281883 - RNA, 19 nt, Artificial Sequence
  Description of Artificial Sequence: Synthetic oligonucleotide
  Antisense strand to SEQ ID NO: 281882
cuuccaauaacauagggac

SEQ ID NO: 281884 - RNA, 19 nt, Artificial Sequence
  Description of Artificial Sequence: Synthetic oligonucleotide
  Sense strand starting at position 3582 of SEQ ID NO: 3620
gccagagcugcugaugaga

SEQ ID NO: 281885 - RNA, 19 nt, Artificial Sequence
  Description of Artificial Sequence: Synthetic oligonucleotide
  Antisense strand to SEQ ID NO: 281884
ucucaucagcagcucuggc

SEQ ID NO: 281886 - RNA, 19 nt, Artificial Sequence
  Description of Artificial Sequence: Synthetic oligonucleotide
  Sense strand starting at position 3585 of SEQ ID NO: 3620
agagcugcugaugagauua

SEQ ID NO: 281887 - RNA, 19 nt, Artificial Sequence
  Description of Artificial Sequence: Synthetic oligonucleotide
  Antisense strand to SEQ ID NO: 281886
uaaucucaucagcagcucu

SEQ ID NO: 281888 - RNA, 19 nt, Artificial Sequence
  Description of Artificial Sequence: Synthetic oligonucleotide
  Sense strand starting at position 3848 of SEQ ID NO: 3620
uugagaaauuccucucuga

SEQ ID NO: 281889 - RNA, 19 nt, Artificial Sequence
  Description of Artificial Sequence: Synthetic oligonucleotide
  Antisense strand to SEQ ID NO: 281888
ucagagaggaauuucucaa

SEQ ID NO: 281890 - RNA, 19 nt, Artificial Sequence
  Description of Artificial Sequence: Synthetic oligonucleotide
  Sense strand starting at position 3971 of SEQ ID NO: 3620
caucgaagacagugaucau

SEQ ID NO: 281891 - RNA, 19 nt, Artificial Sequence
  Description of Artificial Sequence: Synthetic oligonucleotide
  Antisense strand to SEQ ID NO: 281890
augaucacugucuucgaug

SEQ ID NO: 281892 - RNA, 19 nt, Artificial Sequence
  Description of Artificial Sequence: Synthetic oligonucleotide
  Sense strand starting at position 163 of SEQ ID NO: 3621
gucauaauuggacagcgau

SEQ ID NO: 281893 - RNA, 19 nt, Artificial Sequence
  Description of Artificial Sequence: Synthetic oligonucleotide
  Antisense strand to SEQ ID NO: 281892
aucgcuguccaauuaugac

SEQ ID NO: 281894 - RNA, 19 nt, Artificial Sequence
  Description of Artificial Sequence: Synthetic oligonucleotide
  Sense strand starting at position 166 of SEQ ID NO: 3621
auaauuggacagcgauaaa

SEQ ID NO: 281895 - RNA, 19 nt, Artificial Sequence
  Description of Artificial Sequence: Synthetic oligonucleotide
  Antisense strand to SEQ ID NO: 281894
uuuaucgcuguccaauuau

SEQ ID NO: 281896 - RNA, 19 nt, Artificial Sequence
  Description of Artificial Sequence: Synthetic oligonucleotide
  Sense strand starting at position 231 of SEQ ID NO: 3621
gguauagcccaugauguaa

SEQ ID NO: 281897 - RNA, 19 nt, Artificial Sequence
  Description of Artificial Sequence: Synthetic oligonucleotide
  Antisense strand to SEQ ID NO: 281896
uuacaucaugggcuauacc

SEQ ID NO: 281898 - RNA, 19 nt, Artificial Sequence
  Description of Artificial Sequence: Synthetic oligonucleotide
  Sense strand starting at position 463 of SEQ ID NO: 3621
guuuacuguguuguuggua

SEQ ID NO: 281899 - RNA, 19 nt, Artificial Sequence
  Description of Artificial Sequence: Synthetic oligonucleotide
  Antisense strand to SEQ ID NO: 281898
uaccaacaacacaguaaac

SEQ ID NO: 281900 - RNA, 19 nt, Artificial Sequence
  Description of Artificial Sequence: Synthetic oligonucleotide
  Sense strand starting at position 572 of SEQ ID NO: 3621
auaccauucucaguuugga

SEQ ID NO: 281901 - RNA, 19 nt, Artificial Sequence
  Description of Artificial Sequence: Synthetic oligonucleotide
  Antisense strand to SEQ ID NO: 281900
uccaaacugagaaugguau

SEQ ID NO: 281902 - RNA, 19 nt, Artificial Sequence
  Description of Artificial Sequence: Synthetic oligonucleotide
  Sense strand starting at position 717 of SEQ ID NO: 3621
gaguccugauuugagauca

SEQ ID NO: 281903 - RNA, 19 nt, Artificial Sequence
  Description of Artificial Sequence: Synthetic oligonucleotide
  Antisense strand to SEQ ID NO: 281902
ugaucucaaaucaggacuc

SEQ ID NO: 281904 - RNA, 19 nt, Artificial Sequence
  Description of Artificial Sequence: Synthetic oligonucleotide
  Sense strand starting at position 736 of SEQ ID NO: 3621
cagggaguaagcugugaca

SEQ ID NO: 281905 - RNA, 19 nt, Artificial Sequence
  Description of Artificial Sequence: Synthetic oligonucleotide
  Antisense strand to SEQ ID NO: 281904
ugucacagcuuacucccug

SEQ ID NO: 281906 - RNA, 19 nt, Artificial Sequence
  Description of Artificial Sequence: Synthetic oligonucleotide
  Sense strand starting at position 759 of SEQ ID NO: 3621
ggcuacuacugaucaauaa

SEQ ID NO: 281907 - RNA, 19 nt, Artificial Sequence
  Description of Artificial Sequence: Synthetic oligonucleotide
  Antisense strand to SEQ ID NO: 281906
uuauugaucaguaguagcc

SEQ ID NO: 281908 - RNA, 19 nt, Artificial Sequence
  Description of Artificial Sequence: Synthetic oligonucleotide
  Sense strand starting at position 1071 of SEQ ID NO: 3621
auucuuucuguacauguau

SEQ ID NO: 281909 - RNA, 19 nt, Artificial Sequence
  Description of Artificial Sequence: Synthetic oligonucleotide
  Antisense strand to SEQ ID NO: 281908
auacauguacagaaagaau

SEQ ID NO: 281910 - RNA, 19 nt, Artificial Sequence
  Description of Artificial Sequence: Synthetic oligonucleotide
  Sense strand starting at position 1214 of SEQ ID NO: 3621
uauggaaaucugggcaucu

SEQ ID NO: 281911 - RNA, 19 nt, Artificial Sequence
  Description of Artificial Sequence: Synthetic oligonucleotide
  Antisense strand to SEQ ID NO: 281910
agaugcccagauuuccaua

SEQ ID NO: 281912 - RNA, 19 nt, Artificial Sequence
  Description of Artificial Sequence: Synthetic oligonucleotide
  Sense strand starting at position 1274 of SEQ ID NO: 3621
gaguuuggcagugaacuca

SEQ ID NO: 281913 - RNA, 19 nt, Artificial Sequence
  Description of Artificial Sequence: Synthetic oligonucleotide
  Antisense strand to SEQ ID NO: 281912
ugaguucacugccaaacuc

SEQ ID NO: 281914 - RNA, 19 nt, Artificial Sequence
  Description of Artificial Sequence: Synthetic oligonucleotide
  Sense strand starting at position 2288 of SEQ ID NO: 3621
ucaugacacucguuagaga

SEQ ID NO: 281915 - RNA, 19 nt, Artificial Sequence
  Description of Artificial Sequence: Synthetic oligonucleotide
  Antisense strand to SEQ ID NO: 281914
ucucuaacgagugucauga

SEQ ID NO: 281916 - RNA, 19 nt, Artificial Sequence
  Description of Artificial Sequence: Synthetic oligonucleotide
  Sense strand starting at position 2289 of SEQ ID NO: 3621
caugacacucguuagagau

SEQ ID NO: 281917 - RNA, 19 nt, Artificial Sequence
  Description of Artificial Sequence: Synthetic oligonucleotide
  Antisense strand to SEQ ID NO: 281916
aucucuaacgagugucaug

SEQ ID NO: 281918 - RNA, 19 nt, Artificial Sequence
  Description of Artificial Sequence: Synthetic oligonucleotide
  Sense strand starting at position 2293 of SEQ ID NO: 3621
acacucguuagagauggua

SEQ ID NO: 281919 - RNA, 19 nt, Artificial Sequence
  Description of Artificial Sequence: Synthetic oligonucleotide
  Antisense strand to SEQ ID NO: 281918
uaccaucucuaacgagugu

SEQ ID NO: 281920 - RNA, 19 nt, Artificial Sequence
  Description of Artificial Sequence: Synthetic oligonucleotide
  Sense strand starting at position 2343 of SEQ ID NO: 3621
ggagauagguccagggaca

SEQ ID NO: 281921 - RNA, 19 nt, Artificial Sequence
  Description of Artificial Sequence: Synthetic oligonucleotide
  Antisense strand to SEQ ID NO: 281920
ugucccuggaccuaucucc

SEQ ID NO: 281922 - RNA, 19 nt, Artificial Sequence
  Description of Artificial Sequence: Synthetic oligonucleotide
  Sense strand starting at position 2476 of SEQ ID NO: 3621
gagggaacaucaguguuaa

SEQ ID NO: 281923 - RNA, 19 nt, Artificial Sequence
  Description of Artificial Sequence: Synthetic oligonucleotide
  Antisense strand to SEQ ID NO: 281922
uuaacacugauguucccuc

SEQ ID NO: 281924 - RNA, 19 nt, Artificial Sequence
  Description of Artificial Sequence: Synthetic oligonucleotide
  Sense strand starting at position 2477 of SEQ ID NO: 3621
agggaacaucaguguuaag

SEQ ID NO: 281925 - RNA, 19 nt, Artificial Sequence
  Description of Artificial Sequence: Synthetic oligonucleotide
  Antisense strand to SEQ ID NO: 281924
cuuaacacugauguucccu

SEQ ID NO: 281926 - RNA, 19 nt, Artificial Sequence
  Description of Artificial Sequence: Synthetic oligonucleotide
  Sense strand starting at position 2486 of SEQ ID NO: 3621
caguguuaaggaggauucu

SEQ ID NO: 281927 - RNA, 19 nt, Artificial Sequence
  Description of Artificial Sequence: Synthetic oligonucleotide
  Antisense strand to SEQ ID NO: 281926
agaauccuccuuaacacug

SEQ ID NO: 281928 - RNA, 19 nt, Artificial Sequence
  Description of Artificial Sequence: Synthetic oligonucleotide
  Sense strand starting at position 2540 of SEQ ID NO: 3621
aggccagggugauugauau

SEQ ID NO: 281929 - RNA, 19 nt, Artificial Sequence
  Description of Artificial Sequence: Synthetic oligonucleotide
  Antisense strand to SEQ ID NO: 281928
auaucaaucacccuggccu

SEQ ID NO: 281930 - RNA, 19 nt, Artificial Sequence
  Description of Artificial Sequence: Synthetic oligonucleotide
  Sense strand starting at position 2547 of SEQ ID NO: 3621
ggugauugauauccauggu

SEQ ID NO: 281931 - RNA, 19 nt, Artificial Sequence
  Description of Artificial Sequence: Synthetic oligonucleotide
  Antisense strand to SEQ ID NO: 281930
accauggauaucaaucacc

SEQ ID NO: 281932 - RNA, 19 nt, Artificial Sequence
  Description of Artificial Sequence: Synthetic oligonucleotide
  Sense strand starting at position 2548 of SEQ ID NO: 3621
gugauugauauccauggua

SEQ ID NO: 281933 - RNA, 19 nt, Artificial Sequence
  Description of Artificial Sequence: Synthetic oligonucleotide
  Antisense strand to SEQ ID NO: 281932
uaccauggauaucaaucac

SEQ ID NO: 281934 - RNA, 19 nt, Artificial Sequence
  Description of Artificial Sequence: Synthetic oligonucleotide
  Sense strand starting at position 2550 of SEQ ID NO: 3621
gauugauauccaugguagu

SEQ ID NO: 281935 - RNA, 19 nt, Artificial Sequence
  Description of Artificial Sequence: Synthetic oligonucleotide
  Antisense strand to SEQ ID NO: 281934
acuaccauggauaucaauc

SEQ ID NO: 281936 - RNA, 19 nt, Artificial Sequence
  Description of Artificial Sequence: Synthetic oligonucleotide
  Sense strand starting at position 2551 of SEQ ID NO: 3621
auugauauccaugguaguc

SEQ ID NO: 281937 - RNA, 19 nt, Artificial Sequence
  Description of Artificial Sequence: Synthetic oligonucleotide
  Antisense strand to SEQ ID NO: 281936
gacuaccauggauaucaau

SEQ ID NO: 281938 - RNA, 19 nt, Artificial Sequence
  Description of Artificial Sequence: Synthetic oligonucleotide
  Sense strand starting at position 2556 of SEQ ID NO: 3621
uauccaugguagucagaca

SEQ ID NO: 281939 - RNA, 19 nt, Artificial Sequence
  Description of Artificial Sequence: Synthetic oligonucleotide
  Antisense strand to SEQ ID NO: 281938
ugucugacuaccauggaua

SEQ ID NO: 281940 - RNA, 19 nt, Artificial Sequence
  Description of Artificial Sequence: Synthetic oligonucleotide
  Sense strand starting at position 2711 of SEQ ID NO: 3621
gagaguugucaccaucuug

SEQ ID NO: 281941 - RNA, 19 nt, Artificial Sequence
  Description of Artificial Sequence: Synthetic oligonucleotide
  Antisense strand to SEQ ID NO: 281940
caagauggugacaacucuc

SEQ ID NO: 281942 - RNA, 19 nt, Artificial Sequence
  Description of Artificial Sequence: Synthetic oligonucleotide
  Sense strand starting at position 2719 of SEQ ID NO: 3621
ucaccaucuuggucauaag

SEQ ID NO: 281943 - RNA, 19 nt, Artificial Sequence
  Description of Artificial Sequence: Synthetic oligonucleotide
  Antisense strand to SEQ ID NO: 281942
cuuaugaccaagaugguga

SEQ ID NO: 281944 - RNA, 19 nt, Artificial Sequence
  Description of Artificial Sequence: Synthetic oligonucleotide
  Sense strand starting at position 2728 of SEQ ID NO: 3621
uggucauaagcucaauaga

SEQ ID NO: 281945 - RNA, 19 nt, Artificial Sequence
  Description of Artificial Sequence: Synthetic oligonucleotide
  Antisense strand to SEQ ID NO: 281944
ucuauugagcuuaugacca

SEQ ID NO: 281946 - RNA, 19 nt, Artificial Sequence
  Description of Artificial Sequence: Synthetic oligonucleotide
  Sense strand starting at position 2771 of SEQ ID NO: 3621
acuauauagcauuagaguu

SEQ ID NO: 281947 - RNA, 19 nt, Artificial Sequence
  Description of Artificial Sequence: Synthetic oligonucleotide
  Antisense strand to SEQ ID NO: 281946
aacucuaaugcuauauagu

SEQ ID NO: 281948 - RNA, 19 nt, Artificial Sequence
  Description of Artificial Sequence: Synthetic oligonucleotide
  Sense strand starting at position 2778 of SEQ ID NO: 3621
agcauuagaguuggaagga

SEQ ID NO: 281949 - RNA, 19 nt, Artificial Sequence
  Description of Artificial Sequence: Synthetic oligonucleotide
  Antisense strand to SEQ ID NO: 281948
uccuuccaacucuaaugcu

SEQ ID NO: 281950 - RNA, 19 nt, Artificial Sequence
  Description of Artificial Sequence: Synthetic oligonucleotide
  Sense strand starting at position 2818 of SEQ ID NO: 3621
cagcgucauuuguuagaga

SEQ ID NO: 281951 - RNA, 19 nt, Artificial Sequence
  Description of Artificial Sequence: Synthetic oligonucleotide
  Antisense strand to SEQ ID NO: 281950
ucucuaacaaaugacgcug

SEQ ID NO: 281952 - RNA, 19 nt, Artificial Sequence
  Description of Artificial Sequence: Synthetic oligonucleotide
  Sense strand starting at position 2841 of SEQ ID NO: 3621
gaaacugaggccuauagca

SEQ ID NO: 281953 - RNA, 19 nt, Artificial Sequence
  Description of Artificial Sequence: Synthetic oligonucleotide
  Antisense strand to SEQ ID NO: 281952
ugcuauaggccucaguuuc

SEQ ID NO: 281954 - RNA, 19 nt, Artificial Sequence
  Description of Artificial Sequence: Synthetic oligonucleotide
  Sense strand starting at position 3410 of SEQ ID NO: 3621
uggauuuagcaguggcauu

SEQ ID NO: 281955 - RNA, 19 nt, Artificial Sequence
  Description of Artificial Sequence: Synthetic oligonucleotide
  Antisense strand to SEQ ID NO: 281954
aaugccacugcuaaaucca

SEQ ID NO: 281956 - RNA, 19 nt, Artificial Sequence
  Description of Artificial Sequence: Synthetic oligonucleotide
  Sense strand starting at position 3468 of SEQ ID NO: 3621
ggcggaguucuucaaauga

SEQ ID NO: 281957 - RNA, 19 nt, Artificial Sequence
  Description of Artificial Sequence: Synthetic oligonucleotide
  Antisense strand to SEQ ID NO: 281956
ucauuugaagaacuccgcc

SEQ ID NO: 281958 - RNA, 19 nt, Artificial Sequence
  Description of Artificial Sequence: Synthetic oligonucleotide
  Sense strand starting at position 3485 of SEQ ID NO: 3621
gaacaaguucuggaugcua

SEQ ID NO: 281959 - RNA, 19 nt, Artificial Sequence
  Description of Artificial Sequence: Synthetic oligonucleotide
  Antisense strand to SEQ ID NO: 281958
uagcauccagaacuuguuc

SEQ ID NO: 281960 - RNA, 19 nt, Artificial Sequence
  Description of Artificial Sequence: Synthetic oligonucleotide
  Sense strand starting at position 3487 of SEQ ID NO: 3621
acaaguucuggaugcuaag

SEQ ID NO: 281961 - RNA, 19 nt, Artificial Sequence
  Description of Artificial Sequence: Synthetic oligonucleotide
  Antisense strand to SEQ ID NO: 281960
cuuagcauccagaacuugu

SEQ ID NO: 281962 - RNA, 19 nt, Artificial Sequence
  Description of Artificial Sequence: Synthetic oligonucleotide
  Sense strand starting at position 3504 of SEQ ID NO: 3621
agaccuagguugcuaugaa

SEQ ID NO: 281963 - RNA, 19 nt, Artificial Sequence
  Description of Artificial Sequence: Synthetic oligonucleotide
  Antisense strand to SEQ ID NO: 281962
uucauagcaaccuaggucu

SEQ ID NO: 281964 - RNA, 19 nt, Artificial Sequence
  Description of Artificial Sequence: Synthetic oligonucleotide
  Sense strand starting at position 3717 of SEQ ID NO: 3621
cuggacaaguuacuuaaua

SEQ ID NO: 281965 - RNA, 19 nt, Artificial Sequence
  Description of Artificial Sequence: Synthetic oligonucleotide
  Antisense strand to SEQ ID NO: 281964
uauuaaguaacuuguccag

SEQ ID NO: 281966 - RNA, 19 nt, Artificial Sequence
  Description of Artificial Sequence: Synthetic oligonucleotide
  Sense strand starting at position 3814 of SEQ ID NO: 3621
uggauuaguuaagcuugau

SEQ ID NO: 281967 - RNA, 19 nt, Artificial Sequence
  Description of Artificial Sequence: Synthetic oligonucleotide
  Antisense strand to SEQ ID NO: 281966
aucaagcuuaacuaaucca

SEQ ID NO: 281968 - RNA, 19 nt, Artificial Sequence
  Description of Artificial Sequence: Synthetic oligonucleotide
  Sense strand starting at position 3930 of SEQ ID NO: 3621
cuguguuauacugaaggga

SEQ ID NO: 281969 - RNA, 19 nt, Artificial Sequence
  Description of Artificial Sequence: Synthetic oligonucleotide
  Antisense strand to SEQ ID NO: 281968
ucccuucaguauaacacag

SEQ ID NO: 281970 - RNA, 19 nt, Artificial Sequence
  Description of Artificial Sequence: Synthetic oligonucleotide
  Sense strand starting at position 3934 of SEQ ID NO: 3621
guuauacugaagggaugua

SEQ ID NO: 281971 - RNA, 19 nt, Artificial Sequence
  Description of Artificial Sequence: Synthetic oligonucleotide
  Antisense strand to SEQ ID NO: 281970
uacaucccuucaguauaac

SEQ ID NO: 281972 - RNA, 19 nt, Artificial Sequence
  Description of Artificial Sequence: Synthetic oligonucleotide
  Sense strand starting at position 88 of SEQ ID NO: 3622
cugcuuucuggugacccaa

SEQ ID NO: 281973 - RNA, 19 nt, Artificial Sequence
  Description of Artificial Sequence: Synthetic oligonucleotide
  Antisense strand to SEQ ID NO: 281972
uugggucaccagaaagcag

SEQ ID NO: 281974 - RNA, 19 nt, Artificial Sequence
  Description of Artificial Sequence: Synthetic oligonucleotide
  Sense strand starting at position 102 of SEQ ID NO: 3622
cccaaaguaaagugggaau

SEQ ID NO: 281975 - RNA, 19 nt, Artificial Sequence
  Description of Artificial Sequence: Synthetic oligonucleotide
  Antisense strand to SEQ ID NO: 281974
auucccacuuuacuuuggg

SEQ ID NO: 281976 - RNA, 19 nt, Artificial Sequence
  Description of Artificial Sequence: Synthetic oligonucleotide
  Sense strand starting at position 270 of SEQ ID NO: 3622
cagagauucuuuguaccag

SEQ ID NO: 281977 - RNA, 19 nt, Artificial Sequence
  Description of Artificial Sequence: Synthetic oligonucleotide
  Antisense strand to SEQ ID NO: 281976
cugguacaaagaaucucug

SEQ ID NO: 281978 - RNA, 19 nt, Artificial Sequence
  Description of Artificial Sequence: Synthetic oligonucleotide
  Sense strand starting at position 395 of SEQ ID NO: 3622
agaguugugauagauguua

SEQ ID NO: 281979 - RNA, 19 nt, Artificial Sequence
  Description of Artificial Sequence: Synthetic oligonucleotide
  Antisense strand to SEQ ID NO: 281978
uaacaucuaucacaacucu

SEQ ID NO: 281980 - RNA, 19 nt, Artificial Sequence
  Description of Artificial Sequence: Synthetic oligonucleotide
  Sense strand starting at position 404 of SEQ ID NO: 3622
auagauguuaauggcugaa

SEQ ID NO: 281981 - RNA, 19 nt, Artificial Sequence
  Description of Artificial Sequence: Synthetic oligonucleotide
  Antisense strand to SEQ ID NO: 281980
uucagccauuaacaucuau

SEQ ID NO: 281982 - RNA, 19 nt, Artificial Sequence
  Description of Artificial Sequence: Synthetic oligonucleotide
  Sense strand starting at position 406 of SEQ ID NO: 3622
agauguuaauggcugaaga

SEQ ID NO: 281983 - RNA, 19 nt, Artificial Sequence
  Description of Artificial Sequence: Synthetic oligonucleotide
  Antisense strand to SEQ ID NO: 281982
ucuucagccauuaacaucu

SEQ ID NO: 281984 - RNA, 19 nt, Artificial Sequence
  Description of Artificial Sequence: Synthetic oligonucleotide
  Sense strand starting at position 407 of SEQ ID NO: 3622
gauguuaauggcugaagaa

SEQ ID NO: 281985 - RNA, 19 nt, Artificial Sequence
  Description of Artificial Sequence: Synthetic oligonucleotide
  Antisense strand to SEQ ID NO: 281984
uucuucagccauuaacauc

SEQ ID NO: 281986 - RNA, 19 nt, Artificial Sequence
  Description of Artificial Sequence: Synthetic oligonucleotide
  Sense strand starting at position 469 of SEQ ID NO: 3622
cuuccaaagcagugaaauu

SEQ ID NO: 281987 - RNA, 19 nt, Artificial Sequence
  Description of Artificial Sequence: Synthetic oligonucleotide
  Antisense strand to SEQ ID NO: 281986
aauuucacugcuuuggaag

SEQ ID NO: 281988 - RNA, 19 nt, Artificial Sequence
  Description of Artificial Sequence: Synthetic oligonucleotide
  Sense strand starting at position 518 of SEQ ID NO: 3622
aaaugaguucgggaggcau

SEQ ID NO: 281989 - RNA, 19 nt, Artificial Sequence
  Description of Artificial Sequence: Synthetic oligonucleotide
  Antisense strand to SEQ ID NO: 281988
augccucccgaacucauuu

SEQ ID NO: 281990 - RNA, 19 nt, Artificial Sequence
  Description of Artificial Sequence: Synthetic oligonucleotide
  Sense strand starting at position 522 of SEQ ID NO: 3622
gaguucgggaggcaucaaa

SEQ ID NO: 281991 - RNA, 19 nt, Artificial Sequence
  Description of Artificial Sequence: Synthetic oligonucleotide
  Antisense strand to SEQ ID NO: 281990
uuugaugccucccgaacuc

SEQ ID NO: 281992 - RNA, 19 nt, Artificial Sequence
  Description of Artificial Sequence: Synthetic oligonucleotide
  Sense strand starting at position 630 of SEQ ID NO: 3622
acuguuguuacccaagagu

SEQ ID NO: 281993 - RNA, 19 nt, Artificial Sequence
  Description of Artificial Sequence: Synthetic oligonucleotide
  Antisense strand to SEQ ID NO: 281992
acucuuggguaacaacagu

SEQ ID NO: 281994 - RNA, 19 nt, Artificial Sequence
  Description of Artificial Sequence: Synthetic oligonucleotide
  Sense strand starting at position 680 of SEQ ID NO: 3622
ggaaaucgaucuguggcaa

SEQ ID NO: 281995 - RNA, 19 nt, Artificial Sequence
  Description of Artificial Sequence: Synthetic oligonucleotide
  Antisense strand to SEQ ID NO: 281994
uugccacagaucgauuucc

SEQ ID NO: 281996 - RNA, 19 nt, Artificial Sequence
  Description of Artificial Sequence: Synthetic oligonucleotide
  Sense strand starting at position 681 of SEQ ID NO: 3622
gaaaucgaucuguggcaaa

SEQ ID NO: 281997 - RNA, 19 nt, Artificial Sequence
  Description of Artificial Sequence: Synthetic oligonucleotide
  Antisense strand to SEQ ID NO: 281996
uuugccacagaucgauuuc

SEQ ID NO: 281998 - RNA, 19 nt, Artificial Sequence
  Description of Artificial Sequence: Synthetic oligonucleotide
  Sense strand starting at position 764 of SEQ ID NO: 3622
cugaaaucugcccauuguc

SEQ ID NO: 281999 - RNA, 19 nt, Artificial Sequence
  Description of Artificial Sequence: Synthetic oligonucleotide
  Antisense strand to SEQ ID NO: 281998
gacaaugggcagauuucag

SEQ ID NO: 282000 - RNA, 19 nt, Artificial Sequence
  Description of Artificial Sequence: Synthetic oligonucleotide
  Sense strand starting at position 818 of SEQ ID NO: 3622
aucaaugaacgcgagugaa

SEQ ID NO: 282001 - RNA, 19 nt, Artificial Sequence
  Description of Artificial Sequence: Synthetic oligonucleotide
  Antisense strand to SEQ ID NO: 282000
uucacucgcguucauugau

SEQ ID NO: 282002 - RNA, 19 nt, Artificial Sequence
  Description of Artificial Sequence: Synthetic oligonucleotide
  Sense strand starting at position 1842 of SEQ ID NO: 3622
caaggaguuuccucccgga

SEQ ID NO: 282003 - RNA, 19 nt, Artificial Sequence
  Description of Artificial Sequence: Synthetic oligonucleotide
  Antisense strand to SEQ ID NO: 282002
uccgggaggaaacuccuug

SEQ ID NO: 282004 - RNA, 19 nt, Artificial Sequence
  Description of Artificial Sequence: Synthetic oligonucleotide
  Sense strand starting at position 2472 of SEQ ID NO: 3622
ccacaagacuaaucuaggu

SEQ ID NO: 282005 - RNA, 19 nt, Artificial Sequence
  Description of Artificial Sequence: Synthetic oligonucleotide
  Antisense strand to SEQ ID NO: 282004
accuagauuagucuugugg

SEQ ID NO: 282006 - RNA, 19 nt, Artificial Sequence
  Description of Artificial Sequence: Synthetic oligonucleotide
  Sense strand starting at position 2477 of SEQ ID NO: 3622
agacuaaucuaggugaccu

SEQ ID NO: 282007 - RNA, 19 nt, Artificial Sequence
  Description of Artificial Sequence: Synthetic oligonucleotide
  Antisense strand to SEQ ID NO: 282006
aggucaccuagauuagucu

SEQ ID NO: 282008 - RNA, 19 nt, Artificial Sequence
  Description of Artificial Sequence: Synthetic oligonucleotide
  Sense strand starting at position 2528 of SEQ ID NO: 3622
ccagaugugagacgugaaa

SEQ ID NO: 282009 - RNA, 19 nt, Artificial Sequence
  Description of Artificial Sequence: Synthetic oligonucleotide
  Antisense strand to SEQ ID NO: 282008
uuucacgucucacaucugg

SEQ ID NO: 282010 - RNA, 19 nt, Artificial Sequence
  Description of Artificial Sequence: Synthetic oligonucleotide
  Sense strand starting at position 2530 of SEQ ID NO: 3622
agaugugagacgugaaauc

SEQ ID NO: 282011 - RNA, 19 nt, Artificial Sequence
  Description of Artificial Sequence: Synthetic oligonucleotide
  Antisense strand to SEQ ID NO: 282010
gauuucacgucucacaucu

SEQ ID NO: 282012 - RNA, 19 nt, Artificial Sequence
  Description of Artificial Sequence: Synthetic oligonucleotide
  Sense strand starting at position 2666 of SEQ ID NO: 3622
ggcagaauguuauuagagg

SEQ ID NO: 282013 - RNA, 19 nt, Artificial Sequence
  Description of Artificial Sequence: Synthetic oligonucleotide
  Antisense strand to SEQ ID NO: 282012
ccucuaauaacauucugcc

SEQ ID NO: 282014 - RNA, 19 nt, Artificial Sequence
  Description of Artificial Sequence: Synthetic oligonucleotide
  Sense strand starting at position 2759 of SEQ ID NO: 3622
caaggaaacucccugaguu

SEQ ID NO: 282015 - RNA, 19 nt, Artificial Sequence
  Description of Artificial Sequence: Synthetic oligonucleotide
  Antisense strand to SEQ ID NO: 282014
aacucagggaguuuccuug

SEQ ID NO: 282016 - RNA, 19 nt, Artificial Sequence
  Description of Artificial Sequence: Synthetic oligonucleotide
  Sense strand starting at position 2760 of SEQ ID NO: 3622
aaggaaacucccugaguuu

SEQ ID NO: 282017 - RNA, 19 nt, Artificial Sequence
  Description of Artificial Sequence: Synthetic oligonucleotide
  Antisense strand to SEQ ID NO: 282016
aaacucagggaguuuccuu

SEQ ID NO: 282018 - RNA, 19 nt, Artificial Sequence
  Description of Artificial Sequence: Synthetic oligonucleotide
  Sense strand starting at position 2763 of SEQ ID NO: 3622
gaaacucccugaguuugga

SEQ ID NO: 282019 - RNA, 19 nt, Artificial Sequence
  Description of Artificial Sequence: Synthetic oligonucleotide
  Antisense strand to SEQ ID NO: 282018
uccaaacucagggaguuuc

SEQ ID NO: 282020 - RNA, 19 nt, Artificial Sequence
  Description of Artificial Sequence: Synthetic oligonucleotide
  Sense strand starting at position 2766 of SEQ ID NO: 3622
acucccugaguuuggaaua

SEQ ID NO: 282021 - RNA, 19 nt, Artificial Sequence
  Description of Artificial Sequence: Synthetic oligonucleotide
  Antisense strand to SEQ ID NO: 282020
uauuccaaacucagggagu

SEQ ID NO: 282022 - RNA, 19 nt, Artificial Sequence
  Description of Artificial Sequence: Synthetic oligonucleotide
  Sense strand starting at position 3026 of SEQ ID NO: 3622
uguacauacggauagcaua

SEQ ID NO: 282023 - RNA, 19 nt, Artificial Sequence
  Description of Artificial Sequence: Synthetic oligonucleotide
  Antisense strand to SEQ ID NO: 282022
uaugcuauccguauguaca

SEQ ID NO: 282024 - RNA, 19 nt, Artificial Sequence
  Description of Artificial Sequence: Synthetic oligonucleotide
  Sense strand starting at position 3125 of SEQ ID NO: 3622
cuuguuuacuuugucauuu

SEQ ID NO: 282025 - RNA, 19 nt, Artificial Sequence
  Description of Artificial Sequence: Synthetic oligonucleotide
  Antisense strand to SEQ ID NO: 282024
aaaugacaaaguaaacaag

SEQ ID NO: 282026 - RNA, 19 nt, Artificial Sequence
  Description of Artificial Sequence: Synthetic oligonucleotide
  Sense strand starting at position 3162 of SEQ ID NO: 3622
uuguuaauagcacaaggua

SEQ ID NO: 282027 - RNA, 19 nt, Artificial Sequence
  Description of Artificial Sequence: Synthetic oligonucleotide
  Antisense strand to SEQ ID NO: 282026
uaccuugugcuauuaacaa

SEQ ID NO: 282028 - RNA, 19 nt, Artificial Sequence
  Description of Artificial Sequence: Synthetic oligonucleotide
  Sense strand starting at position 3165 of SEQ ID NO: 3622
uuaauagcacaagguaaau

SEQ ID NO: 282029 - RNA, 19 nt, Artificial Sequence
  Description of Artificial Sequence: Synthetic oligonucleotide
  Antisense strand to SEQ ID NO: 282028
auuuaccuugugcuauuaa

SEQ ID NO: 282030 - RNA, 19 nt, Artificial Sequence
  Description of Artificial Sequence: Synthetic oligonucleotide
  Sense strand starting at position 3307 of SEQ ID NO: 3622
cguucuaugguuuagacaa

SEQ ID NO: 282031 - RNA, 19 nt, Artificial Sequence
  Description of Artificial Sequence: Synthetic oligonucleotide
  Antisense strand to SEQ ID NO: 282030
uugucuaaaccauagaacg

SEQ ID NO: 282032 - RNA, 19 nt, Artificial Sequence
  Description of Artificial Sequence: Synthetic oligonucleotide
  Sense strand starting at position 3605 of SEQ ID NO: 3622
gaacuaaauugugcuuuag

SEQ ID NO: 282033 - RNA, 19 nt, Artificial Sequence
  Description of Artificial Sequence: Synthetic oligonucleotide
  Antisense strand to SEQ ID NO: 282032
cuaaagcacaauuuaguuc

SEQ ID NO: 282034 - RNA, 19 nt, Artificial Sequence
  Description of Artificial Sequence: Synthetic oligonucleotide
  Sense strand starting at position 3607 of SEQ ID NO: 3622
acuaaauugugcuuuagga

SEQ ID NO: 282035 - RNA, 19 nt, Artificial Sequence
  Description of Artificial Sequence: Synthetic oligonucleotide
  Antisense strand to SEQ ID NO: 282034
uccuaaagcacaauuuagu

SEQ ID NO: 282036 - RNA, 19 nt, Artificial Sequence
  Description of Artificial Sequence: Synthetic oligonucleotide
  Sense strand starting at position 3609 of SEQ ID NO: 3622
uaaauugugcuuuaggaag

SEQ ID NO: 282037 - RNA, 19 nt, Artificial Sequence
  Description of Artificial Sequence: Synthetic oligonucleotide
  Antisense strand to SEQ ID NO: 282036
cuuccuaaagcacaauuua

SEQ ID NO: 282038 - RNA, 19 nt, Artificial Sequence
  Description of Artificial Sequence: Synthetic oligonucleotide
  Sense strand starting at position 3677 of SEQ ID NO: 3622
agaacaaucgcagaaguuc

SEQ ID NO: 282039 - RNA, 19 nt, Artificial Sequence
  Description of Artificial Sequence: Synthetic oligonucleotide
  Antisense strand to SEQ ID NO: 282038
gaacuucugcgauuguucu

SEQ ID NO: 282040 - RNA, 19 nt, Artificial Sequence
  Description of Artificial Sequence: Synthetic oligonucleotide
  Sense strand starting at position 3824 of SEQ ID NO: 3622
uaugacugaguugguauua

SEQ ID NO: 282041 - RNA, 19 nt, Artificial Sequence
  Description of Artificial Sequence: Synthetic oligonucleotide
  Antisense strand to SEQ ID NO: 282040
uaauaccaacucagucaua

SEQ ID NO: 282042 - RNA, 19 nt, Artificial Sequence
  Description of Artificial Sequence: Synthetic oligonucleotide
  Sense strand starting at position 3825 of SEQ ID NO: 3622
augacugaguugguauuau

SEQ ID NO: 282043 - RNA, 19 nt, Artificial Sequence
  Description of Artificial Sequence: Synthetic oligonucleotide
  Antisense strand to SEQ ID NO: 282042
auaauaccaacucagucau

SEQ ID NO: 282044 - RNA, 19 nt, Artificial Sequence
  Description of Artificial Sequence: Synthetic oligonucleotide
  Sense strand starting at position 3837 of SEQ ID NO: 3622
guauuauagcgcaguggag

SEQ ID NO: 282045 - RNA, 19 nt, Artificial Sequence
  Description of Artificial Sequence: Synthetic oligonucleotide
  Antisense strand to SEQ ID NO: 282044
cuccacugcgcuauaauac

SEQ ID NO: 282046 - RNA, 19 nt, Artificial Sequence
  Description of Artificial Sequence: Synthetic oligonucleotide
  Sense strand starting at position 3965 of SEQ ID NO: 3622
ggugaaucaugaccuggau

SEQ ID NO: 282047 - RNA, 19 nt, Artificial Sequence
  Description of Artificial Sequence: Synthetic oligonucleotide
  Antisense strand to SEQ ID NO: 282046
auccaggucaugauucacc

SEQ ID NO: 282048 - RNA, 19 nt, Artificial Sequence
  Description of Artificial Sequence: Synthetic oligonucleotide
  Sense strand starting at position 3967 of SEQ ID NO: 3622
ugaaucaugaccuggaugu

SEQ ID NO: 282049 - RNA, 19 nt, Artificial Sequence
  Description of Artificial Sequence: Synthetic oligonucleotide
  Antisense strand to SEQ ID NO: 282048
acauccaggucaugauuca

SEQ ID NO: 282050 - RNA, 19 nt, Artificial Sequence
  Description of Artificial Sequence: Synthetic oligonucleotide
  Sense strand starting at position 3968 of SEQ ID NO: 3622
gaaucaugaccuggaugug

SEQ ID NO: 282051 - RNA, 19 nt, Artificial Sequence
  Description of Artificial Sequence: Synthetic oligonucleotide
  Antisense strand to SEQ ID NO: 282050
cacauccaggucaugauuc

SEQ ID NO: 282052 - RNA, 19 nt, Artificial Sequence
  Description of Artificial Sequence: Synthetic oligonucleotide
  Sense strand starting at position 215 of SEQ ID NO: 3623
uuacauaugugauugaugu

SEQ ID NO: 282053 - RNA, 19 nt, Artificial Sequence
  Description of Artificial Sequence: Synthetic oligonucleotide
  Antisense strand to SEQ ID NO: 282052
acaucaaucacauauguaa

SEQ ID NO: 282054 - RNA, 19 nt, Artificial Sequence
  Description of Artificial Sequence: Synthetic oligonucleotide
  Sense strand starting at position 216 of SEQ ID NO: 3623
uacauaugugauugauguc

SEQ ID NO: 282055 - RNA, 19 nt, Artificial Sequence
  Description of Artificial Sequence: Synthetic oligonucleotide
  Antisense strand to SEQ ID NO: 282054
gacaucaaucacauaugua

SEQ ID NO: 282056 - RNA, 19 nt, Artificial Sequence
  Description of Artificial Sequence: Synthetic oligonucleotide
  Sense strand starting at position 382 of SEQ ID NO: 3623
gccuaagggcaucaugaaa

SEQ ID NO: 282057 - RNA, 19 nt, Artificial Sequence
  Description of Artificial Sequence: Synthetic oligonucleotide
  Antisense strand to SEQ ID NO: 282056
uuucaugaugcccuuaggc

SEQ ID NO: 282058 - RNA, 19 nt, Artificial Sequence
  Description of Artificial Sequence: Synthetic oligonucleotide
  Sense strand starting at position 420 of SEQ ID NO: 3623
ggaaccucuucucuagacu

SEQ ID NO: 282059 - RNA, 19 nt, Artificial Sequence
  Description of Artificial Sequence: Synthetic oligonucleotide
  Antisense strand to SEQ ID NO: 282058
agucuagagaagagguucc

SEQ ID NO: 282060 - RNA, 19 nt, Artificial Sequence
  Description of Artificial Sequence: Synthetic oligonucleotide
  Sense strand starting at position 440 of SEQ ID NO: 3623
aagagacucuacgucauau

SEQ ID NO: 282061 - RNA, 19 nt, Artificial Sequence
  Description of Artificial Sequence: Synthetic oligonucleotide
  Antisense strand to SEQ ID NO: 282060
auaugacguagagucucuu

SEQ ID NO: 282062 - RNA, 19 nt, Artificial Sequence
  Description of Artificial Sequence: Synthetic oligonucleotide
  Sense strand starting at position 442 of SEQ ID NO: 3623
gagacucuacgucauauag

SEQ ID NO: 282063 - RNA, 19 nt, Artificial Sequence
  Description of Artificial Sequence: Synthetic oligonucleotide
  Antisense strand to SEQ ID NO: 282062
cuauaugacguagagucuc

SEQ ID NO: 282064 - RNA, 19 nt, Artificial Sequence
  Description of Artificial Sequence: Synthetic oligonucleotide
  Sense strand starting at position 550 of SEQ ID NO: 3623
ccucaaucucaacggagaa

SEQ ID NO: 282065 - RNA, 19 nt, Artificial Sequence
  Description of Artificial Sequence: Synthetic oligonucleotide
  Antisense strand to SEQ ID NO: 282064
uucuccguugagauugagg

SEQ ID NO: 282066 - RNA, 19 nt, Artificial Sequence
  Description of Artificial Sequence: Synthetic oligonucleotide
  Sense strand starting at position 659 of SEQ ID NO: 3623
gcaaguguucuggagacag

SEQ ID NO: 282067 - RNA, 19 nt, Artificial Sequence
  Description of Artificial Sequence: Synthetic oligonucleotide
  Antisense strand to SEQ ID NO: 282066
cugucuccagaacacuugc

SEQ ID NO: 282068 - RNA, 19 nt, Artificial Sequence
  Description of Artificial Sequence: Synthetic oligonucleotide
  Sense strand starting at position 711 of SEQ ID NO: 3623
caguuuccucgcguuguaa

SEQ ID NO: 282069 - RNA, 19 nt, Artificial Sequence
  Description of Artificial Sequence: Synthetic oligonucleotide
  Antisense strand to SEQ ID NO: 282068
uuacaacgcgaggaaacug

SEQ ID NO: 282070 - RNA, 19 nt, Artificial Sequence
  Description of Artificial Sequence: Synthetic oligonucleotide
  Sense strand starting at position 712 of SEQ ID NO: 3623
aguuuccucgcguuguaaa

SEQ ID NO: 282071 - RNA, 19 nt, Artificial Sequence
  Description of Artificial Sequence: Synthetic oligonucleotide
  Antisense strand to SEQ ID NO: 282070
uuuacaacgcgaggaaacu

SEQ ID NO: 282072 - RNA, 19 nt, Artificial Sequence
  Description of Artificial Sequence: Synthetic oligonucleotide
  Sense strand starting at position 933 of SEQ ID NO: 3623
uguauucuacuuggaaauc

SEQ ID NO: 282073 - RNA, 19 nt, Artificial Sequence
  Description of Artificial Sequence: Synthetic oligonucleotide
  Antisense strand to SEQ ID NO: 282072
gauuuccaaguagaauaca

SEQ ID NO: 282074 - RNA, 19 nt, Artificial Sequence
  Description of Artificial Sequence: Synthetic oligonucleotide
  Sense strand starting at position 968 of SEQ ID NO: 3623
aaggauggugcugaguuua

SEQ ID NO: 282075 - RNA, 19 nt, Artificial Sequence
  Description of Artificial Sequence: Synthetic oligonucleotide
  Antisense strand to SEQ ID NO: 282074
uaaacucagcaccauccuu

SEQ ID NO: 282076 - RNA, 19 nt, Artificial Sequence
  Description of Artificial Sequence: Synthetic oligonucleotide
  Sense strand starting at position 1063 of SEQ ID NO: 3623
auaugagguccuuagcuag

SEQ ID NO: 282077 - RNA, 19 nt, Artificial Sequence
  Description of Artificial Sequence: Synthetic oligonucleotide
  Antisense strand to SEQ ID NO: 282076
cuagcuaaggaccucauau

SEQ ID NO: 282078 - RNA, 19 nt, Artificial Sequence
  Description of Artificial Sequence: Synthetic oligonucleotide
  Sense strand starting at position 2207 of SEQ ID NO: 3623
ucugaugaguacuuugaau

SEQ ID NO: 282079 - RNA, 19 nt, Artificial Sequence
  Description of Artificial Sequence: Synthetic oligonucleotide
  Antisense strand to SEQ ID NO: 282078
auucaaaguacucaucaga

SEQ ID NO: 282080 - RNA, 19 nt, Artificial Sequence
  Description of Artificial Sequence: Synthetic oligonucleotide
  Sense strand starting at position 2209 of SEQ ID NO: 3623
ugaugaguacuuugaauca

SEQ ID NO: 282081 - RNA, 19 nt, Artificial Sequence
  Description of Artificial Sequence: Synthetic oligonucleotide
  Antisense strand to SEQ ID NO: 282080
ugauucaaaguacucauca

SEQ ID NO: 282082 - RNA, 19 nt, Artificial Sequence
  Description of Artificial Sequence: Synthetic oligonucleotide
  Sense strand starting at position 2349 of SEQ ID NO: 3623
caagcugaagucugaggua

SEQ ID NO: 282083 - RNA, 19 nt, Artificial Sequence
  Description of Artificial Sequence: Synthetic oligonucleotide
  Antisense strand to SEQ ID NO: 282082
uaccucagacuucagcuug

SEQ ID NO: 282084 - RNA, 19 nt, Artificial Sequence
  Description of Artificial Sequence: Synthetic oligonucleotide
  Sense strand starting at position 2418 of SEQ ID NO: 3623
gaaauagaauggucgagua

SEQ ID NO: 282085 - RNA, 19 nt, Artificial Sequence
  Description of Artificial Sequence: Synthetic oligonucleotide
  Antisense strand to SEQ ID NO: 282084
uacucgaccauucuauuuc

SEQ ID NO: 282086 - RNA, 19 nt, Artificial Sequence
  Description of Artificial Sequence: Synthetic oligonucleotide
  Sense strand starting at position 2420 of SEQ ID NO: 3623
aauagaauggucgaguagu

SEQ ID NO: 282087 - RNA, 19 nt, Artificial Sequence
  Description of Artificial Sequence: Synthetic oligonucleotide
  Antisense strand to SEQ ID NO: 282086
acuacucgaccauucuauu

SEQ ID NO: 282088 - RNA, 19 nt, Artificial Sequence
  Description of Artificial Sequence: Synthetic oligonucleotide
  Sense strand starting at position 2538 of SEQ ID NO: 3623
guauuagaguuucuaauuc

SEQ ID NO: 282089 - RNA, 19 nt, Artificial Sequence
  Description of Artificial Sequence: Synthetic oligonucleotide
  Antisense strand to SEQ ID NO: 282088
gaauuagaaacucuaauac

SEQ ID NO: 282090 - RNA, 19 nt, Artificial Sequence
  Description of Artificial Sequence: Synthetic oligonucleotide
  Sense strand starting at position 2574 of SEQ ID NO: 3623
gccugauaauuugcacuuu

SEQ ID NO: 282091 - RNA, 19 nt, Artificial Sequence
  Description of Artificial Sequence: Synthetic oligonucleotide
  Antisense strand to SEQ ID NO: 282090
aaagugcaaauuaucaggc

SEQ ID NO: 282092 - RNA, 19 nt, Artificial Sequence
  Description of Artificial Sequence: Synthetic oligonucleotide
  Sense strand starting at position 2667 of SEQ ID NO: 3623
gucauuggucccuauuaaa

SEQ ID NO: 282093 - RNA, 19 nt, Artificial Sequence
  Description of Artificial Sequence: Synthetic oligonucleotide
  Antisense strand to SEQ ID NO: 282092
uuuaauagggaccaaugac

SEQ ID NO: 282094 - RNA, 19 nt, Artificial Sequence
  Description of Artificial Sequence: Synthetic oligonucleotide
  Sense strand starting at position 2864 of SEQ ID NO: 3623
cauuaauaucaggguuagu

SEQ ID NO: 282095 - RNA, 19 nt, Artificial Sequence
  Description of Artificial Sequence: Synthetic oligonucleotide
  Antisense strand to SEQ ID NO: 282094
acuaacccugauauuaaug

SEQ ID NO: 282096 - RNA, 19 nt, Artificial Sequence
  Description of Artificial Sequence: Synthetic oligonucleotide
  Sense strand starting at position 3044 of SEQ ID NO: 3623
gcuuacuuucuggaacugu

SEQ ID NO: 282097 - RNA, 19 nt, Artificial Sequence
  Description of Artificial Sequence: Synthetic oligonucleotide
  Antisense strand to SEQ ID NO: 282096
acaguuccagaaaguaagc

SEQ ID NO: 282098 - RNA, 19 nt, Artificial Sequence
  Description of Artificial Sequence: Synthetic oligonucleotide
  Sense strand starting at position 3129 of SEQ ID NO: 3623
ugucguuugagacaaacuc

SEQ ID NO: 282099 - RNA, 19 nt, Artificial Sequence
  Description of Artificial Sequence: Synthetic oligonucleotide
  Antisense strand to SEQ ID NO: 282098
gaguuugucucaaacgaca

SEQ ID NO: 282100 - RNA, 19 nt, Artificial Sequence
  Description of Artificial Sequence: Synthetic oligonucleotide
  Sense strand starting at position 3179 of SEQ ID NO: 3623
ccuuacauuugggaaggau

SEQ ID NO: 282101 - RNA, 19 nt, Artificial Sequence
  Description of Artificial Sequence: Synthetic oligonucleotide
  Antisense strand to SEQ ID NO: 282100
auccuucccaaauguaagg

SEQ ID NO: 282102 - RNA, 19 nt, Artificial Sequence
  Description of Artificial Sequence: Synthetic oligonucleotide
  Sense strand starting at position 3204 of SEQ ID NO: 3623
ugcaacuaauagucagaau

SEQ ID NO: 282103 - RNA, 19 nt, Artificial Sequence
  Description of Artificial Sequence: Synthetic oligonucleotide
  Antisense strand to SEQ ID NO: 282102
auucugacuauuaguugca

SEQ ID NO: 282104 - RNA, 19 nt, Artificial Sequence
  Description of Artificial Sequence: Synthetic oligonucleotide
  Sense strand starting at position 3244 of SEQ ID NO: 3623
ccaggagguuucuuaugag

SEQ ID NO: 282105 - RNA, 19 nt, Artificial Sequence
  Description of Artificial Sequence: Synthetic oligonucleotide
  Antisense strand to SEQ ID NO: 282104
cucauaagaaaccuccugg

SEQ ID NO: 282106 - RNA, 19 nt, Artificial Sequence
  Description of Artificial Sequence: Synthetic oligonucleotide
  Sense strand starting at position 3250 of SEQ ID NO: 3623
gguuucuuaugaguaauga

SEQ ID NO: 282107 - RNA, 19 nt, Artificial Sequence
  Description of Artificial Sequence: Synthetic oligonucleotide
  Antisense strand to SEQ ID NO: 282106
ucauuacucauaagaaacc

SEQ ID NO: 282108 - RNA, 19 nt, Artificial Sequence
  Description of Artificial Sequence: Synthetic oligonucleotide
  Sense strand starting at position 3251 of SEQ ID NO: 3623
guuucuuaugaguaaugag

SEQ ID NO: 282109 - RNA, 19 nt, Artificial Sequence
  Description of Artificial Sequence: Synthetic oligonucleotide
  Antisense strand to SEQ ID NO: 282108
cucauuacucauaagaaac

SEQ ID NO: 282110 - RNA, 19 nt, Artificial Sequence
  Description of Artificial Sequence: Synthetic oligonucleotide
  Sense strand starting at position 3260 of SEQ ID NO: 3623
gaguaaugagaauggagcu

SEQ ID NO: 282111 - RNA, 19 nt, Artificial Sequence
  Description of Artificial Sequence: Synthetic oligonucleotide
  Antisense strand to SEQ ID NO: 282110
agcuccauucucauuacuc

SEQ ID NO: 282112 - RNA, 19 nt, Artificial Sequence
  Description of Artificial Sequence: Synthetic oligonucleotide
  Sense strand starting at position 3273 of SEQ ID NO: 3623
ggagcucagaggugggaaa

SEQ ID NO: 282113 - RNA, 19 nt, Artificial Sequence
  Description of Artificial Sequence: Synthetic oligonucleotide
  Antisense strand to SEQ ID NO: 282112
uuucccaccucugagcucc

SEQ ID NO: 282114 - RNA, 19 nt, Artificial Sequence
  Description of Artificial Sequence: Synthetic oligonucleotide
  Sense strand starting at position 3614 of SEQ ID NO: 3623
ugacuuccuugaccagauu

SEQ ID NO: 282115 - RNA, 19 nt, Artificial Sequence
  Description of Artificial Sequence: Synthetic oligonucleotide
  Antisense strand to SEQ ID NO: 282114
aaucuggucaaggaaguca

SEQ ID NO: 282116 - RNA, 19 nt, Artificial Sequence
  Description of Artificial Sequence: Synthetic oligonucleotide
  Sense strand starting at position 3617 of SEQ ID NO: 3623
cuuccuugaccagauuguu

SEQ ID NO: 282117 - RNA, 19 nt, Artificial Sequence
  Description of Artificial Sequence: Synthetic oligonucleotide
  Antisense strand to SEQ ID NO: 282116
aacaaucuggucaaggaag

SEQ ID NO: 282118 - RNA, 19 nt, Artificial Sequence
  Description of Artificial Sequence: Synthetic oligonucleotide
  Sense strand starting at position 3620 of SEQ ID NO: 3623
ccuugaccagauuguuaag

SEQ ID NO: 282119 - RNA, 19 nt, Artificial Sequence
  Description of Artificial Sequence: Synthetic oligonucleotide
  Antisense strand to SEQ ID NO: 282118
cuuaacaaucuggucaagg

SEQ ID NO: 282120 - RNA, 19 nt, Artificial Sequence
  Description of Artificial Sequence: Synthetic oligonucleotide
  Sense strand starting at position 3653 of SEQ ID NO: 3623
agaggauaggauugugucu

SEQ ID NO: 282121 - RNA, 19 nt, Artificial Sequence
  Description of Artificial Sequence: Synthetic oligonucleotide
  Antisense strand to SEQ ID NO: 282120
agacacaauccuauccucu

SEQ ID NO: 282122 - RNA, 19 nt, Artificial Sequence
  Description of Artificial Sequence: Synthetic oligonucleotide
  Sense strand starting at position 3684 of SEQ ID NO: 3623
uggucuuugcaugggagga

SEQ ID NO: 282123 - RNA, 19 nt, Artificial Sequence
  Description of Artificial Sequence: Synthetic oligonucleotide
  Antisense strand to SEQ ID NO: 282122
uccucccaugcaaagacca

SEQ ID NO: 282124 - RNA, 19 nt, Artificial Sequence
  Description of Artificial Sequence: Synthetic oligonucleotide
  Sense strand starting at position 3805 of SEQ ID NO: 3623
ggucuucucucaucuagag

SEQ ID NO: 282125 - RNA, 19 nt, Artificial Sequence
  Description of Artificial Sequence: Synthetic oligonucleotide
  Antisense strand to SEQ ID NO: 282124
cucuagaugagagaagacc

SEQ ID NO: 282126 - RNA, 19 nt, Artificial Sequence
  Description of Artificial Sequence: Synthetic oligonucleotide
  Sense strand starting at position 3830 of SEQ ID NO: 3623
guggaauacauauguacag

SEQ ID NO: 282127 - RNA, 19 nt, Artificial Sequence
  Description of Artificial Sequence: Synthetic oligonucleotide
  Antisense strand to SEQ ID NO: 282126
cuguacauauguauuccac

SEQ ID NO: 282128 - RNA, 19 nt, Artificial Sequence
  Description of Artificial Sequence: Synthetic oligonucleotide
  Sense strand starting at position 3929 of SEQ ID NO: 3623
aguguaacugcuguguagu

SEQ ID NO: 282129 - RNA, 19 nt, Artificial Sequence
  Description of Artificial Sequence: Synthetic oligonucleotide
  Antisense strand to SEQ ID NO: 282128
acuacacagcaguuacacu

SEQ ID NO: 282130 - RNA, 19 nt, Artificial Sequence
  Description of Artificial Sequence: Synthetic oligonucleotide
  Sense strand starting at position 3965 of SEQ ID NO: 3623
ugaaaugauuaaucuguac

SEQ ID NO: 282131 - RNA, 19 nt, Artificial Sequence
  Description of Artificial Sequence: Synthetic oligonucleotide
  Antisense strand to SEQ ID NO: 282130
guacagauuaaucauuuca

SEQ ID NO: 282132 - RNA, 19 nt, Artificial Sequence
  Description of Artificial Sequence: Synthetic oligonucleotide
  Sense strand starting at position 259 of SEQ ID NO: 3625
augacccagugcuaauaaa

SEQ ID NO: 282133 - RNA, 19 nt, Artificial Sequence
  Description of Artificial Sequence: Synthetic oligonucleotide
  Antisense strand to SEQ ID NO: 282132
uuuauuagcacugggucau

SEQ ID NO: 282134 - RNA, 19 nt, Artificial Sequence
  Description of Artificial Sequence: Synthetic oligonucleotide
  Sense strand starting at position 447 of SEQ ID NO: 3625
gacaguguuggucaggcau

SEQ ID NO: 282135 - RNA, 19 nt, Artificial Sequence
  Description of Artificial Sequence: Synthetic oligonucleotide
  Antisense strand to SEQ ID NO: 282134
augccugaccaacacuguc

SEQ ID NO: 282136 - RNA, 19 nt, Artificial Sequence
  Description of Artificial Sequence: Synthetic oligonucleotide
  Sense strand starting at position 487 of SEQ ID NO: 3625
gccacuuuccuguauuauu

SEQ ID NO: 282137 - RNA, 19 nt, Artificial Sequence
  Description of Artificial Sequence: Synthetic oligonucleotide
  Antisense strand to SEQ ID NO: 282136
aauaauacaggaaaguggc

SEQ ID NO: 282138 - RNA, 19 nt, Artificial Sequence
  Description of Artificial Sequence: Synthetic oligonucleotide
  Sense strand starting at position 511 of SEQ ID NO: 3625
cggcucugccagcagaaau

SEQ ID NO: 282139 - RNA, 19 nt, Artificial Sequence
  Description of Artificial Sequence: Synthetic oligonucleotide
  Antisense strand to SEQ ID NO: 282138
auuucugcuggcagagccg

SEQ ID NO: 282140 - RNA, 19 nt, Artificial Sequence
  Description of Artificial Sequence: Synthetic oligonucleotide
  Sense strand starting at position 594 of SEQ ID NO: 3625
uggagaggccuucacggaa

SEQ ID NO: 282141 - RNA, 19 nt, Artificial Sequence
  Description of Artificial Sequence: Synthetic oligonucleotide
  Antisense strand to SEQ ID NO: 282140
uuccgugaaggccucucca

SEQ ID NO: 282142 - RNA, 19 nt, Artificial Sequence
  Description of Artificial Sequence: Synthetic oligonucleotide
  Sense strand starting at position 788 of SEQ ID NO: 3625
cguguucucagacaaagaa

SEQ ID NO: 282143 - RNA, 19 nt, Artificial Sequence
  Description of Artificial Sequence: Synthetic oligonucleotide
  Antisense strand to SEQ ID NO: 282142
uucuuugucugagaacacg

SEQ ID NO: 282144 - RNA, 19 nt, Artificial Sequence
  Description of Artificial Sequence: Synthetic oligonucleotide
  Sense strand starting at position 883 of SEQ ID NO: 3625
gguggcaaaucuguucuga

SEQ ID NO: 282145 - RNA, 19 nt, Artificial Sequence
  Description of Artificial Sequence: Synthetic oligonucleotide
  Antisense strand to SEQ ID NO: 282144
ucagaacagauuugccacc

SEQ ID NO: 282146 - RNA, 19 nt, Artificial Sequence
  Description of Artificial Sequence: Synthetic oligonucleotide
  Sense strand starting at position 885 of SEQ ID NO: 3625
uggcaaaucuguucugacu

SEQ ID NO: 282147 - RNA, 19 nt, Artificial Sequence
  Description of Artificial Sequence: Synthetic oligonucleotide
  Antisense strand to SEQ ID NO: 282146
agucagaacagauuugcca

SEQ ID NO: 282148 - RNA, 19 nt, Artificial Sequence
  Description of Artificial Sequence: Synthetic oligonucleotide
  Sense strand starting at position 945 of SEQ ID NO: 3625
cacgucuaucuccaaagga

SEQ ID NO: 282149 - RNA, 19 nt, Artificial Sequence
  Description of Artificial Sequence: Synthetic oligonucleotide
  Antisense strand to SEQ ID NO: 282148
uccuuuggagauagacgug

SEQ ID NO: 282150 - RNA, 19 nt, Artificial Sequence
  Description of Artificial Sequence: Synthetic oligonucleotide
  Sense strand starting at position 1147 of SEQ ID NO: 3625
ccgugcauuccuggaggua

SEQ ID NO: 282151 - RNA, 19 nt, Artificial Sequence
  Description of Artificial Sequence: Synthetic oligonucleotide
  Antisense strand to SEQ ID NO: 282150
uaccuccaggaaugcacgg

SEQ ID NO: 282152 - RNA, 19 nt, Artificial Sequence
  Description of Artificial Sequence: Synthetic oligonucleotide
  Sense strand starting at position 1148 of SEQ ID NO: 3625
cgugcauuccuggagguac

SEQ ID NO: 282153 - RNA, 19 nt, Artificial Sequence
  Description of Artificial Sequence: Synthetic oligonucleotide
  Antisense strand to SEQ ID NO: 282152
guaccuccaggaaugcacg

SEQ ID NO: 282154 - RNA, 19 nt, Artificial Sequence
  Description of Artificial Sequence: Synthetic oligonucleotide
  Sense strand starting at position 1215 of SEQ ID NO: 3625
ccaggcguuuacuccaaga

SEQ ID NO: 282155 - RNA, 19 nt, Artificial Sequence
  Description of Artificial Sequence: Synthetic oligonucleotide
  Antisense strand to SEQ ID NO: 282154
ucuuggaguaaacgccugg

SEQ ID NO: 282156 - RNA, 19 nt, Artificial Sequence
  Description of Artificial Sequence: Synthetic oligonucleotide
  Sense strand starting at position 1217 of SEQ ID NO: 3625
aggcguuuacuccaagauu

SEQ ID NO: 282157 - RNA, 19 nt, Artificial Sequence
  Description of Artificial Sequence: Synthetic oligonucleotide
  Antisense strand to SEQ ID NO: 282156
aaucuuggaguaaacgccu

SEQ ID NO: 282158 - RNA, 19 nt, Artificial Sequence
  Description of Artificial Sequence: Synthetic oligonucleotide
  Sense strand starting at position 1705 of SEQ ID NO: 3625
agcugcgccggguauuaau

SEQ ID NO: 282159 - RNA, 19 nt, Artificial Sequence
  Description of Artificial Sequence: Synthetic oligonucleotide
  Antisense strand to SEQ ID NO: 282158
auuaauacccggcgcagcu

SEQ ID NO: 282160 - RNA, 19 nt, Artificial Sequence
  Description of Artificial Sequence: Synthetic oligonucleotide
  Sense strand starting at position 1716 of SEQ ID NO: 3625
guauuaauagcccgagcca

SEQ ID NO: 282161 - RNA, 19 nt, Artificial Sequence
  Description of Artificial Sequence: Synthetic oligonucleotide
  Antisense strand to SEQ ID NO: 282160
uggcucgggcuauuaauac

SEQ ID NO: 282162 - RNA, 19 nt, Artificial Sequence
  Description of Artificial Sequence: Synthetic oligonucleotide
  Sense strand starting at position 2250 of SEQ ID NO: 3625
cagcguuccagcggagaaa

SEQ ID NO: 282163 - RNA, 19 nt, Artificial Sequence
  Description of Artificial Sequence: Synthetic oligonucleotide
  Antisense strand to SEQ ID NO: 282162
uuucuccgcuggaacgcug

SEQ ID NO: 282164 - RNA, 19 nt, Artificial Sequence
  Description of Artificial Sequence: Synthetic oligonucleotide
  Sense strand starting at position 2278 of SEQ ID NO: 3625
gaaccugaaccucgggaau

SEQ ID NO: 282165 - RNA, 19 nt, Artificial Sequence
  Description of Artificial Sequence: Synthetic oligonucleotide
  Antisense strand to SEQ ID NO: 282164
auucccgagguucagguuc

SEQ ID NO: 282166 - RNA, 19 nt, Artificial Sequence
  Description of Artificial Sequence: Synthetic oligonucleotide
  Sense strand starting at position 2290 of SEQ ID NO: 3625
cgggaaucugucugcaccu

SEQ ID NO: 282167 - RNA, 19 nt, Artificial Sequence
  Description of Artificial Sequence: Synthetic oligonucleotide
  Antisense strand to SEQ ID NO: 282166
aggugcagacagauucccg

SEQ ID NO: 282168 - RNA, 19 nt, Artificial Sequence
  Description of Artificial Sequence: Synthetic oligonucleotide
  Sense strand starting at position 2344 of SEQ ID NO: 3625
gugcguuagccucauaaag

SEQ ID NO: 282169 - RNA, 19 nt, Artificial Sequence
  Description of Artificial Sequence: Synthetic oligonucleotide
  Antisense strand to SEQ ID NO: 282168
cuuuaugaggcuaacgcac

SEQ ID NO: 282170 - RNA, 19 nt, Artificial Sequence
  Description of Artificial Sequence: Synthetic oligonucleotide
  Sense strand starting at position 2360 of SEQ ID NO: 3625
aaggguuuaccuggaucca

SEQ ID NO: 282171 - RNA, 19 nt, Artificial Sequence
  Description of Artificial Sequence: Synthetic oligonucleotide
  Antisense strand to SEQ ID NO: 282170
uggauccagguaaacccuu

SEQ ID NO: 282172 - RNA, 19 nt, Artificial Sequence
  Description of Artificial Sequence: Synthetic oligonucleotide
  Sense strand starting at position 2410 of SEQ ID NO: 3625
gcacuuucugcauaagaaa

SEQ ID NO: 282173 - RNA, 19 nt, Artificial Sequence
  Description of Artificial Sequence: Synthetic oligonucleotide
  Antisense strand to SEQ ID NO: 282172
uuucuuaugcagaaagugc

SEQ ID NO: 282174 - RNA, 19 nt, Artificial Sequence
  Description of Artificial Sequence: Synthetic oligonucleotide
  Sense strand starting at position 2470 of SEQ ID NO: 3625
ucccuauaugaucguggua

SEQ ID NO: 282175 - RNA, 19 nt, Artificial Sequence
  Description of Artificial Sequence: Synthetic oligonucleotide
  Antisense strand to SEQ ID NO: 282174
uaccacgaucauauaggga

SEQ ID NO: 282176 - RNA, 19 nt, Artificial Sequence
  Description of Artificial Sequence: Synthetic oligonucleotide
  Sense strand starting at position 2473 of SEQ ID NO: 3625
cuauaugaucgugguaccu

SEQ ID NO: 282177 - RNA, 19 nt, Artificial Sequence
  Description of Artificial Sequence: Synthetic oligonucleotide
  Antisense strand to SEQ ID NO: 282176
agguaccacgaucauauag

SEQ ID NO: 282178 - RNA, 19 nt, Artificial Sequence
  Description of Artificial Sequence: Synthetic oligonucleotide
  Sense strand starting at position 2500 of SEQ ID NO: 3625
ccguguugccaagaccauu

SEQ ID NO: 282179 - RNA, 19 nt, Artificial Sequence
  Description of Artificial Sequence: Synthetic oligonucleotide
  Antisense strand to SEQ ID NO: 282178
aauggucuuggcaacacgg

SEQ ID NO: 282180 - RNA, 19 nt, Artificial Sequence
  Description of Artificial Sequence: Synthetic oligonucleotide
  Sense strand starting at position 2549 of SEQ ID NO: 3625
ccaggcaucuuggacucaa

SEQ ID NO: 282181 - RNA, 19 nt, Artificial Sequence
  Description of Artificial Sequence: Synthetic oligonucleotide
  Antisense strand to SEQ ID NO: 282180
uugaguccaagaugccugg

SEQ ID NO: 282182 - RNA, 19 nt, Artificial Sequence
  Description of Artificial Sequence: Synthetic oligonucleotide
  Sense strand starting at position 2661 of SEQ ID NO: 3625
ggcuacuucuuccuaggga

SEQ ID NO: 282183 - RNA, 19 nt, Artificial Sequence
  Description of Artificial Sequence: Synthetic oligonucleotide
  Antisense strand to SEQ ID NO: 282182
ucccuaggaagaaguagcc

SEQ ID NO: 282184 - RNA, 19 nt, Artificial Sequence
  Description of Artificial Sequence: Synthetic oligonucleotide
  Sense strand starting at position 2662 of SEQ ID NO: 3625
gcuacuucuuccuagggaa

SEQ ID NO: 282185 - RNA, 19 nt, Artificial Sequence
  Description of Artificial Sequence: Synthetic oligonucleotide
  Antisense strand to SEQ ID NO: 282184
uucccuaggaagaaguagc

SEQ ID NO: 282186 - RNA, 19 nt, Artificial Sequence
  Description of Artificial Sequence: Synthetic oligonucleotide
  Sense strand starting at position 3233 of SEQ ID NO: 3625
guacauuauucuguuacac

SEQ ID NO: 282187 - RNA, 19 nt, Artificial Sequence
  Description of Artificial Sequence: Synthetic oligonucleotide
  Antisense strand to SEQ ID NO: 282186
guguaacagaauaauguac

SEQ ID NO: 282188 - RNA, 19 nt, Artificial Sequence
  Description of Artificial Sequence: Synthetic oligonucleotide
  Sense strand starting at position 3235 of SEQ ID NO: 3625
acauuauucuguuacacug

SEQ ID NO: 282189 - RNA, 19 nt, Artificial Sequence
  Description of Artificial Sequence: Synthetic oligonucleotide
  Antisense strand to SEQ ID NO: 282188
caguguaacagaauaaugu

SEQ ID NO: 282190 - RNA, 19 nt, Artificial Sequence
  Description of Artificial Sequence: Synthetic oligonucleotide
  Sense strand starting at position 3374 of SEQ ID NO: 3625
cagugucagaugugagaag

SEQ ID NO: 282191 - RNA, 19 nt, Artificial Sequence
  Description of Artificial Sequence: Synthetic oligonucleotide
  Antisense strand to SEQ ID NO: 282190
cuucucacaucugacacug

SEQ ID NO: 282192 - RNA, 19 nt, Artificial Sequence
  Description of Artificial Sequence: Synthetic oligonucleotide
  Sense strand starting at position 3401 of SEQ ID NO: 3625
acagcuuaguacucucaga

SEQ ID NO: 282193 - RNA, 19 nt, Artificial Sequence
  Description of Artificial Sequence: Synthetic oligonucleotide
  Antisense strand to SEQ ID NO: 282192
ucugagaguacuaagcugu

SEQ ID NO: 282194 - RNA, 19 nt, Artificial Sequence
  Description of Artificial Sequence: Synthetic oligonucleotide
  Sense strand starting at position 3406 of SEQ ID NO: 3625
uuaguacucucagauguag

SEQ ID NO: 282195 - RNA, 19 nt, Artificial Sequence
  Description of Artificial Sequence: Synthetic oligonucleotide
  Antisense strand to SEQ ID NO: 282194
cuacaucugagaguacuaa

SEQ ID NO: 282196 - RNA, 19 nt, Artificial Sequence
  Description of Artificial Sequence: Synthetic oligonucleotide
  Sense strand starting at position 3437 of SEQ ID NO: 3625
gugcgugugccugauauag

SEQ ID NO: 282197 - RNA, 19 nt, Artificial Sequence
  Description of Artificial Sequence: Synthetic oligonucleotide
  Antisense strand to SEQ ID NO: 282196
cuauaucaggcacacgcac

SEQ ID NO: 282198 - RNA, 19 nt, Artificial Sequence
  Description of Artificial Sequence: Synthetic oligonucleotide
  Sense strand starting at position 3447 of SEQ ID NO: 3625
cugauauagucagaagaaa

SEQ ID NO: 282199 - RNA, 19 nt, Artificial Sequence
  Description of Artificial Sequence: Synthetic oligonucleotide
  Antisense strand to SEQ ID NO: 282198
uuucuucugacuauaucag

SEQ ID NO: 282200 - RNA, 19 nt, Artificial Sequence
  Description of Artificial Sequence: Synthetic oligonucleotide
  Sense strand starting at position 3622 of SEQ ID NO: 3625
gcagucuauuaacugcaua

SEQ ID NO: 282201 - RNA, 19 nt, Artificial Sequence
  Description of Artificial Sequence: Synthetic oligonucleotide
  Antisense strand to SEQ ID NO: 282200
uaugcaguuaauagacugc

SEQ ID NO: 282202 - RNA, 19 nt, Artificial Sequence
  Description of Artificial Sequence: Synthetic oligonucleotide
  Sense strand starting at position 3743 of SEQ ID NO: 3625
cgcugaaauuauccaaauu

SEQ ID NO: 282203 - RNA, 19 nt, Artificial Sequence
  Description of Artificial Sequence: Synthetic oligonucleotide
  Antisense strand to SEQ ID NO: 282202
aauuuggauaauuucagcg

SEQ ID NO: 282204 - RNA, 19 nt, Artificial Sequence
  Description of Artificial Sequence: Synthetic oligonucleotide
  Sense strand starting at position 3816 of SEQ ID NO: 3625
ugauaaagauguuugucca

SEQ ID NO: 282205 - RNA, 19 nt, Artificial Sequence
  Description of Artificial Sequence: Synthetic oligonucleotide
  Antisense strand to SEQ ID NO: 282204
uggacaaacaucuuuauca

SEQ ID NO: 282206 - RNA, 19 nt, Artificial Sequence
  Description of Artificial Sequence: Synthetic oligonucleotide
  Sense strand starting at position 3817 of SEQ ID NO: 3625
gauaaagauguuuguccac

SEQ ID NO: 282207 - RNA, 19 nt, Artificial Sequence
  Description of Artificial Sequence: Synthetic oligonucleotide
  Antisense strand to SEQ ID NO: 282206
guggacaaacaucuuuauc

SEQ ID NO: 282208 - RNA, 19 nt, Artificial Sequence
  Description of Artificial Sequence: Synthetic oligonucleotide
  Sense strand starting at position 3899 of SEQ ID NO: 3625
gugaucucuccaggaaacu

SEQ ID NO: 282209 - RNA, 19 nt, Artificial Sequence
  Description of Artificial Sequence: Synthetic oligonucleotide
  Antisense strand to SEQ ID NO: 282208
aguuuccuggagagaucac

SEQ ID NO: 282210 - RNA, 19 nt, Artificial Sequence
  Description of Artificial Sequence: Synthetic oligonucleotide
  Sense strand starting at position 3908 of SEQ ID NO: 3625
ccaggaaacuguggauaua

SEQ ID NO: 282211 - RNA, 19 nt, Artificial Sequence
  Description of Artificial Sequence: Synthetic oligonucleotide
  Antisense strand to SEQ ID NO: 282210
uauauccacaguuuccugg

SEQ ID NO: 282212 - RNA, 19 nt, Artificial Sequence
  Description of Artificial Sequence: Synthetic oligonucleotide
  Sense strand starting at position 18 of SEQ ID NO: 3624
gacaguguuggucaggcau

SEQ ID NO: 282213 - RNA, 19 nt, Artificial Sequence
  Description of Artificial Sequence: Synthetic oligonucleotide
  Antisense strand to SEQ ID NO: 282212
augccugaccaacacuguc

SEQ ID NO: 282214 - RNA, 19 nt, Artificial Sequence
  Description of Artificial Sequence: Synthetic oligonucleotide
  Sense strand starting at position 58 of SEQ ID NO: 3624
gccacuuuccuguauuauu

SEQ ID NO: 282215 - RNA, 19 nt, Artificial Sequence
  Description of Artificial Sequence: Synthetic oligonucleotide
  Antisense strand to SEQ ID NO: 282214
aauaauacaggaaaguggc

SEQ ID NO: 282216 - RNA, 19 nt, Artificial Sequence
  Description of Artificial Sequence: Synthetic oligonucleotide
  Sense strand starting at position 82 of SEQ ID NO: 3624
cggcucugccagcagaaau

SEQ ID NO: 282217 - RNA, 19 nt, Artificial Sequence
  Description of Artificial Sequence: Synthetic oligonucleotide
  Antisense strand to SEQ ID NO: 282216
auuucugcuggcagagccg

SEQ ID NO: 282218 - RNA, 19 nt, Artificial Sequence
  Description of Artificial Sequence: Synthetic oligonucleotide
  Sense strand starting at position 165 of SEQ ID NO: 3624
uggagaggccuucacggaa

SEQ ID NO: 282219 - RNA, 19 nt, Artificial Sequence
  Description of Artificial Sequence: Synthetic oligonucleotide
  Antisense strand to SEQ ID NO: 282218
uuccgugaaggccucucca

SEQ ID NO: 282220 - RNA, 19 nt, Artificial Sequence
  Description of Artificial Sequence: Synthetic oligonucleotide
  Sense strand starting at position 359 of SEQ ID NO: 3624
cguguucucagacaaagaa

SEQ ID NO: 282221 - RNA, 19 nt, Artificial Sequence
  Description of Artificial Sequence: Synthetic oligonucleotide
  Antisense strand to SEQ ID NO: 282220
uucuuugucugagaacacg

SEQ ID NO: 282222 - RNA, 19 nt, Artificial Sequence
  Description of Artificial Sequence: Synthetic oligonucleotide
  Sense strand starting at position 454 of SEQ ID NO: 3624
gguggcaaaucuguucuga

SEQ ID NO: 282223 - RNA, 19 nt, Artificial Sequence
  Description of Artificial Sequence: Synthetic oligonucleotide
  Antisense strand to SEQ ID NO: 282222
ucagaacagauuugccacc

SEQ ID NO: 282224 - RNA, 19 nt, Artificial Sequence
  Description of Artificial Sequence: Synthetic oligonucleotide
  Sense strand starting at position 456 of SEQ ID NO: 3624
uggcaaaucuguucugacu

SEQ ID NO: 282225 - RNA, 19 nt, Artificial Sequence
  Description of Artificial Sequence: Synthetic oligonucleotide
  Antisense strand to SEQ ID NO: 282224
agucagaacagauuugcca

SEQ ID NO: 282226 - RNA, 19 nt, Artificial Sequence
  Description of Artificial Sequence: Synthetic oligonucleotide
  Sense strand starting at position 516 of SEQ ID NO: 3624
cacgucuaucuccaaagga

SEQ ID NO: 282227 - RNA, 19 nt, Artificial Sequence
  Description of Artificial Sequence: Synthetic oligonucleotide
  Antisense strand to SEQ ID NO: 282226
uccuuuggagauagacgug

SEQ ID NO: 282228 - RNA, 19 nt, Artificial Sequence
  Description of Artificial Sequence: Synthetic oligonucleotide
  Sense strand starting at position 718 of SEQ ID NO: 3624
ccgugcauuccuggaggua

SEQ ID NO: 282229 - RNA, 19 nt, Artificial Sequence
  Description of Artificial Sequence: Synthetic oligonucleotide
  Antisense strand to SEQ ID NO: 282228
uaccuccaggaaugcacgg

SEQ ID NO: 282230 - RNA, 19 nt, Artificial Sequence
  Description of Artificial Sequence: Synthetic oligonucleotide
  Sense strand starting at position 719 of SEQ ID NO: 3624
cgugcauuccuggagguac

SEQ ID NO: 282231 - RNA, 19 nt, Artificial Sequence
  Description of Artificial Sequence: Synthetic oligonucleotide
  Antisense strand to SEQ ID NO: 282230
guaccuccaggaaugcacg

SEQ ID NO: 282232 - RNA, 19 nt, Artificial Sequence
  Description of Artificial Sequence: Synthetic oligonucleotide
  Sense strand starting at position 786 of SEQ ID NO: 3624
ccaggcguuuacuccaaga

SEQ ID NO: 282233 - RNA, 19 nt, Artificial Sequence
  Description of Artificial Sequence: Synthetic oligonucleotide
  Antisense strand to SEQ ID NO: 282232
ucuuggaguaaacgccugg

SEQ ID NO: 282234 - RNA, 19 nt, Artificial Sequence
  Description of Artificial Sequence: Synthetic oligonucleotide
  Sense strand starting at position 788 of SEQ ID NO: 3624
aggcguuuacuccaagauu

SEQ ID NO: 282235 - RNA, 19 nt, Artificial Sequence
  Description of Artificial Sequence: Synthetic oligonucleotide
  Antisense strand to SEQ ID NO: 282234
aaucuuggaguaaacgccu

SEQ ID NO: 282236 - RNA, 19 nt, Artificial Sequence
  Description of Artificial Sequence: Synthetic oligonucleotide
  Sense strand starting at position 1276 of SEQ ID NO: 3624
agcugcgccggguauuaau

SEQ ID NO: 282237 - RNA, 19 nt, Artificial Sequence
  Description of Artificial Sequence: Synthetic oligonucleotide
  Antisense strand to SEQ ID NO: 282236
auuaauacccggcgcagcu

SEQ ID NO: 282238 - RNA, 19 nt, Artificial Sequence
  Description of Artificial Sequence: Synthetic oligonucleotide
  Sense strand starting at position 1287 of SEQ ID NO: 3624
guauuaauagcccgagcca

SEQ ID NO: 282239 - RNA, 19 nt, Artificial Sequence
  Description of Artificial Sequence: Synthetic oligonucleotide
  Antisense strand to SEQ ID NO: 282238
uggcucgggcuauuaauac

SEQ ID NO: 282240 - RNA, 19 nt, Artificial Sequence
  Description of Artificial Sequence: Synthetic oligonucleotide
  Sense strand starting at position 1821 of SEQ ID NO: 3624
cagcguuccagcggagaaa

SEQ ID NO: 282241 - RNA, 19 nt, Artificial Sequence
  Description of Artificial Sequence: Synthetic oligonucleotide
  Antisense strand to SEQ ID NO: 282240
uuucuccgcuggaacgcug

SEQ ID NO: 282242 - RNA, 19 nt, Artificial Sequence
  Description of Artificial Sequence: Synthetic oligonucleotide
  Sense strand starting at position 1849 of SEQ ID NO: 3624
gaaccugaaccucgggaau

SEQ ID NO: 282243 - RNA, 19 nt, Artificial Sequence
  Description of Artificial Sequence: Synthetic oligonucleotide
  Antisense strand to SEQ ID NO: 282242
auucccgagguucagguuc

SEQ ID NO: 282244 - RNA, 19 nt, Artificial Sequence
  Description of Artificial Sequence: Synthetic oligonucleotide
  Sense strand starting at position 1861 of SEQ ID NO: 3624
cgggaaucugucugcaccu

SEQ ID NO: 282245 - RNA, 19 nt, Artificial Sequence
  Description of Artificial Sequence: Synthetic oligonucleotide
  Antisense strand to SEQ ID NO: 282244
aggugcagacagauucccg

SEQ ID NO: 282246 - RNA, 19 nt, Artificial Sequence
  Description of Artificial Sequence: Synthetic oligonucleotide
  Sense strand starting at position 1915 of SEQ ID NO: 3624
gugcguuagccucauaaag

SEQ ID NO: 282247 - RNA, 19 nt, Artificial Sequence
  Description of Artificial Sequence: Synthetic oligonucleotide
  Antisense strand to SEQ ID NO: 282246
cuuuaugaggcuaacgcac

SEQ ID NO: 282248 - RNA, 19 nt, Artificial Sequence
  Description of Artificial Sequence: Synthetic oligonucleotide
  Sense strand starting at position 1931 of SEQ ID NO: 3624
aaggguuuaccuggaucca

SEQ ID NO: 282249 - RNA, 19 nt, Artificial Sequence
  Description of Artificial Sequence: Synthetic oligonucleotide
  Antisense strand to SEQ ID NO: 282248
uggauccagguaaacccuu

SEQ ID NO: 282250 - RNA, 19 nt, Artificial Sequence
  Description of Artificial Sequence: Synthetic oligonucleotide
  Sense strand starting at position 1981 of SEQ ID NO: 3624
gcacuuucugcauaagaaa

SEQ ID NO: 282251 - RNA, 19 nt, Artificial Sequence
  Description of Artificial Sequence: Synthetic oligonucleotide
  Antisense strand to SEQ ID NO: 282250
uuucuuaugcagaaagugc

SEQ ID NO: 282252 - RNA, 19 nt, Artificial Sequence
  Description of Artificial Sequence: Synthetic oligonucleotide
  Sense strand starting at position 2041 of SEQ ID NO: 3624
ucccuauaugaucguggua

SEQ ID NO: 282253 - RNA, 19 nt, Artificial Sequence
  Description of Artificial Sequence: Synthetic oligonucleotide
  Antisense strand to SEQ ID NO: 282252
uaccacgaucauauaggga

SEQ ID NO: 282254 - RNA, 19 nt, Artificial Sequence
  Description of Artificial Sequence: Synthetic oligonucleotide
  Sense strand starting at position 2044 of SEQ ID NO: 3624
cuauaugaucgugguaccu

SEQ ID NO: 282255 - RNA, 19 nt, Artificial Sequence
  Description of Artificial Sequence: Synthetic oligonucleotide
  Antisense strand to SEQ ID NO: 282254
agguaccacgaucauauag

SEQ ID NO: 282256 - RNA, 19 nt, Artificial Sequence
  Description of Artificial Sequence: Synthetic oligonucleotide
  Sense strand starting at position 2071 of SEQ ID NO: 3624
ccguguugccaagaccauu

SEQ ID NO: 282257 - RNA, 19 nt, Artificial Sequence
  Description of Artificial Sequence: Synthetic oligonucleotide
  Antisense strand to SEQ ID NO: 282256
aauggucuuggcaacacgg

SEQ ID NO: 282258 - RNA, 19 nt, Artificial Sequence
  Description of Artificial Sequence: Synthetic oligonucleotide
  Sense strand starting at position 2120 of SEQ ID NO: 3624
ccaggcaucuuggacucaa

SEQ ID NO: 282259 - RNA, 19 nt, Artificial Sequence
  Description of Artificial Sequence: Synthetic oligonucleotide
  Antisense strand to SEQ ID NO: 282258
uugaguccaagaugccugg

SEQ ID NO: 282260 - RNA, 19 nt, Artificial Sequence
  Description of Artificial Sequence: Synthetic oligonucleotide
  Sense strand starting at position 2232 of SEQ ID NO: 3624
ggcuacuucuuccuaggga

SEQ ID NO: 282261 - RNA, 19 nt, Artificial Sequence
  Description of Artificial Sequence: Synthetic oligonucleotide
  Antisense strand to SEQ ID NO: 282260
ucccuaggaagaaguagcc

SEQ ID NO: 282262 - RNA, 19 nt, Artificial Sequence
  Description of Artificial Sequence: Synthetic oligonucleotide
  Sense strand starting at position 2804 of SEQ ID NO: 3624
guacauuauucuguuacac

SEQ ID NO: 282263 - RNA, 19 nt, Artificial Sequence
  Description of Artificial Sequence: Synthetic oligonucleotide
  Antisense strand to SEQ ID NO: 282262
guguaacagaauaauguac

SEQ ID NO: 282264 - RNA, 19 nt, Artificial Sequence
  Description of Artificial Sequence: Synthetic oligonucleotide
  Sense strand starting at position 2806 of SEQ ID NO: 3624
acauuauucuguuacacug

SEQ ID NO: 282265 - RNA, 19 nt, Artificial Sequence
  Description of Artificial Sequence: Synthetic oligonucleotide
  Antisense strand to SEQ ID NO: 282264
caguguaacagaauaaugu

SEQ ID NO: 282266 - RNA, 19 nt, Artificial Sequence
  Description of Artificial Sequence: Synthetic oligonucleotide
  Sense strand starting at position 2945 of SEQ ID NO: 3624
cagugucagaugugagaag

SEQ ID NO: 282267 - RNA, 19 nt, Artificial Sequence
  Description of Artificial Sequence: Synthetic oligonucleotide
  Antisense strand to SEQ ID NO: 282266
cuucucacaucugacacug

SEQ ID NO: 282268 - RNA, 19 nt, Artificial Sequence
  Description of Artificial Sequence: Synthetic oligonucleotide
  Sense strand starting at position 2972 of SEQ ID NO: 3624
acagcuuaguacucucaga

SEQ ID NO: 282269 - RNA, 19 nt, Artificial Sequence
  Description of Artificial Sequence: Synthetic oligonucleotide
  Antisense strand to SEQ ID NO: 282268
ucugagaguacuaagcugu

SEQ ID NO: 282270 - RNA, 19 nt, Artificial Sequence
  Description of Artificial Sequence: Synthetic oligonucleotide
  Sense strand starting at position 3008 of SEQ ID NO: 3624
gugcgugugccugauauag

SEQ ID NO: 282271 - RNA, 19 nt, Artificial Sequence
  Description of Artificial Sequence: Synthetic oligonucleotide
  Antisense strand to SEQ ID NO: 282270
cuauaucaggcacacgcac

SEQ ID NO: 282272 - RNA, 19 nt, Artificial Sequence
  Description of Artificial Sequence: Synthetic oligonucleotide
  Sense strand starting at position 3018 of SEQ ID NO: 3624
cugauauagucagaagaaa

SEQ ID NO: 282273 - RNA, 19 nt, Artificial Sequence
  Description of Artificial Sequence: Synthetic oligonucleotide
  Antisense strand to SEQ ID NO: 282272
uuucuucugacuauaucag

SEQ ID NO: 282274 - RNA, 19 nt, Artificial Sequence
  Description of Artificial Sequence: Synthetic oligonucleotide
  Sense strand starting at position 3193 of SEQ ID NO: 3624
gcagucuauuaacugcaua

SEQ ID NO: 282275 - RNA, 19 nt, Artificial Sequence
  Description of Artificial Sequence: Synthetic oligonucleotide
  Antisense strand to SEQ ID NO: 282274
uaugcaguuaauagacugc

SEQ ID NO: 282276 - RNA, 19 nt, Artificial Sequence
  Description of Artificial Sequence: Synthetic oligonucleotide
  Sense strand starting at position 3314 of SEQ ID NO: 3624
cgcugaaauuauccaaauu

SEQ ID NO: 282277 - RNA, 19 nt, Artificial Sequence
  Description of Artificial Sequence: Synthetic oligonucleotide
  Antisense strand to SEQ ID NO: 282276
aauuuggauaauuucagcg

SEQ ID NO: 282278 - RNA, 19 nt, Artificial Sequence
  Description of Artificial Sequence: Synthetic oligonucleotide
  Sense strand starting at position 3387 of SEQ ID NO: 3624
ugauaaagauguuugucca

SEQ ID NO: 282279 - RNA, 19 nt, Artificial Sequence
  Description of Artificial Sequence: Synthetic oligonucleotide
  Antisense strand to SEQ ID NO: 282278
uggacaaacaucuuuauca

SEQ ID NO: 282280 - RNA, 19 nt, Artificial Sequence
  Description of Artificial Sequence: Synthetic oligonucleotide
  Sense strand starting at position 3388 of SEQ ID NO: 3624
gauaaagauguuuguccac

SEQ ID NO: 282281 - RNA, 19 nt, Artificial Sequence
  Description of Artificial Sequence: Synthetic oligonucleotide
  Antisense strand to SEQ ID NO: 282280
guggacaaacaucuuuauc

SEQ ID NO: 282282 - RNA, 19 nt, Artificial Sequence
  Description of Artificial Sequence: Synthetic oligonucleotide
  Sense strand starting at position 3470 of SEQ ID NO: 3624
gugaucucuccaggaaacu

SEQ ID NO: 282283 - RNA, 19 nt, Artificial Sequence
  Description of Artificial Sequence: Synthetic oligonucleotide
  Antisense strand to SEQ ID NO: 282282
aguuuccuggagagaucac

SEQ ID NO: 282284 - RNA, 19 nt, Artificial Sequence
  Description of Artificial Sequence: Synthetic oligonucleotide
  Sense strand starting at position 3479 of SEQ ID NO: 3624
ccaggaaacuguggauaua

SEQ ID NO: 282285 - RNA, 19 nt, Artificial Sequence
  Description of Artificial Sequence: Synthetic oligonucleotide
  Antisense strand to SEQ ID NO: 282284
uauauccacaguuuccugg

SEQ ID NO: 282286 - RNA, 19 nt, Artificial Sequence
  Description of Artificial Sequence: Synthetic oligonucleotide
  Sense strand starting at position 3713 of SEQ ID NO: 3624
cuaugcucccugcgucaga

SEQ ID NO: 282287 - RNA, 19 nt, Artificial Sequence
  Description of Artificial Sequence: Synthetic oligonucleotide
  Antisense strand to SEQ ID NO: 282286
ucugacgcagggagcauag

SEQ ID NO: 282288 - RNA, 19 nt, Artificial Sequence
  Description of Artificial Sequence: Synthetic oligonucleotide
  Sense strand starting at position 3772 of SEQ ID NO: 3624
ggacuacugugguucaaag

SEQ ID NO: 282289 - RNA, 19 nt, Artificial Sequence
  Description of Artificial Sequence: Synthetic oligonucleotide
  Antisense strand to SEQ ID NO: 282288
cuuugaaccacaguagucc

SEQ ID NO: 282290 - RNA, 19 nt, Artificial Sequence
  Description of Artificial Sequence: Synthetic oligonucleotide
  Sense strand starting at position 3853 of SEQ ID NO: 3624
guggaauucucagauuuga

SEQ ID NO: 282291 - RNA, 19 nt, Artificial Sequence
  Description of Artificial Sequence: Synthetic oligonucleotide
  Antisense strand to SEQ ID NO: 282290
ucaaaucugagaauuccac

SEQ ID NO: 282292 - RNA, 19 nt, Artificial Sequence
  Description of Artificial Sequence: Synthetic oligonucleotide
  Sense strand starting at position 18 of SEQ ID NO: 3626
cuauauagucggcaaucua

SEQ ID NO: 282293 - RNA, 19 nt, Artificial Sequence
  Description of Artificial Sequence: Synthetic oligonucleotide
  Antisense strand to SEQ ID NO: 282292
uagauugccgacuauauag

SEQ ID NO: 282294 - RNA, 19 nt, Artificial Sequence
  Description of Artificial Sequence: Synthetic oligonucleotide
  Sense strand starting at position 74 of SEQ ID NO: 3626
gaaguuggugcauaaagau

SEQ ID NO: 282295 - RNA, 19 nt, Artificial Sequence
  Description of Artificial Sequence: Synthetic oligonucleotide
  Antisense strand to SEQ ID NO: 282294
aucuuuaugcaccaacuuc

SEQ ID NO: 282296 - RNA, 19 nt, Artificial Sequence
  Description of Artificial Sequence: Synthetic oligonucleotide
  Sense strand starting at position 86 of SEQ ID NO: 3626
uaaagaugcuuuguugacu

SEQ ID NO: 282297 - RNA, 19 nt, Artificial Sequence
  Description of Artificial Sequence: Synthetic oligonucleotide
  Antisense strand to SEQ ID NO: 282296
agucaacaaagcaucuuua

SEQ ID NO: 282298 - RNA, 19 nt, Artificial Sequence
  Description of Artificial Sequence: Synthetic oligonucleotide
  Sense strand starting at position 89 of SEQ ID NO: 3626
agaugcuuuguugacugaa

SEQ ID NO: 282299 - RNA, 19 nt, Artificial Sequence
  Description of Artificial Sequence: Synthetic oligonucleotide
  Antisense strand to SEQ ID NO: 282298
uucagucaacaaagcaucu

SEQ ID NO: 282300 - RNA, 19 nt, Artificial Sequence
  Description of Artificial Sequence: Synthetic oligonucleotide
  Sense strand starting at position 507 of SEQ ID NO: 3626
ggaaguugugacggauaua

SEQ ID NO: 282301 - RNA, 19 nt, Artificial Sequence
  Description of Artificial Sequence: Synthetic oligonucleotide
  Antisense strand to SEQ ID NO: 282300
uauauccgucacaacuucc

SEQ ID NO: 282302 - RNA, 19 nt, Artificial Sequence
  Description of Artificial Sequence: Synthetic oligonucleotide
  Sense strand starting at position 508 of SEQ ID NO: 3626
gaaguugugacggauauac

SEQ ID NO: 282303 - RNA, 19 nt, Artificial Sequence
  Description of Artificial Sequence: Synthetic oligonucleotide
  Antisense strand to SEQ ID NO: 282302
guauauccgucacaacuuc

SEQ ID NO: 282304 - RNA, 19 nt, Artificial Sequence
  Description of Artificial Sequence: Synthetic oligonucleotide
  Sense strand starting at position 564 of SEQ ID NO: 3626
agaguaauguccgugauga

SEQ ID NO: 282305 - RNA, 19 nt, Artificial Sequence
  Description of Artificial Sequence: Synthetic oligonucleotide
  Antisense strand to SEQ ID NO: 282304
ucaucacggacauuacucu

SEQ ID NO: 282306 - RNA, 19 nt, Artificial Sequence
  Description of Artificial Sequence: Synthetic oligonucleotide
  Sense strand starting at position 566 of SEQ ID NO: 3626
aguaauguccgugaugaug

SEQ ID NO: 282307 - RNA, 19 nt, Artificial Sequence
  Description of Artificial Sequence: Synthetic oligonucleotide
  Antisense strand to SEQ ID NO: 282306
caucaucacggacauuacu

SEQ ID NO: 282308 - RNA, 19 nt, Artificial Sequence
  Description of Artificial Sequence: Synthetic oligonucleotide
  Sense strand starting at position 966 of SEQ ID NO: 3626
uucugagguuccuuuauag

SEQ ID NO: 282309 - RNA, 19 nt, Artificial Sequence
  Description of Artificial Sequence: Synthetic oligonucleotide
  Antisense strand to SEQ ID NO: 282308
cuauaaaggaaccucagaa

SEQ ID NO: 282310 - RNA, 19 nt, Artificial Sequence
  Description of Artificial Sequence: Synthetic oligonucleotide
  Sense strand starting at position 1008 of SEQ ID NO: 3626
ugggaugacugcucacuau

SEQ ID NO: 282311 - RNA, 19 nt, Artificial Sequence
  Description of Artificial Sequence: Synthetic oligonucleotide
  Antisense strand to SEQ ID NO: 282310
auagugagcagucauccca

SEQ ID NO: 282312 - RNA, 19 nt, Artificial Sequence
  Description of Artificial Sequence: Synthetic oligonucleotide
  Sense strand starting at position 1140 of SEQ ID NO: 3626
gcucuucuaccuugaagga

SEQ ID NO: 282313 - RNA, 19 nt, Artificial Sequence
  Description of Artificial Sequence: Synthetic oligonucleotide
  Antisense strand to SEQ ID NO: 282312
uccuucaagguagaagagc

SEQ ID NO: 282314 - RNA, 19 nt, Artificial Sequence
  Description of Artificial Sequence: Synthetic oligonucleotide
  Sense strand starting at position 1182 of SEQ ID NO: 3626
cugacuugguuucccugaa

SEQ ID NO: 282315 - RNA, 19 nt, Artificial Sequence
  Description of Artificial Sequence: Synthetic oligonucleotide
  Antisense strand to SEQ ID NO: 282314
uucagggaaaccaagucag

SEQ ID NO: 282316 - RNA, 19 nt, Artificial Sequence
  Description of Artificial Sequence: Synthetic oligonucleotide
  Sense strand starting at position 1186 of SEQ ID NO: 3626
cuugguuucccugaacaca

SEQ ID NO: 282317 - RNA, 19 nt, Artificial Sequence
  Description of Artificial Sequence: Synthetic oligonucleotide
  Antisense strand to SEQ ID NO: 282316
uguguucagggaaaccaag

SEQ ID NO: 282318 - RNA, 19 nt, Artificial Sequence
  Description of Artificial Sequence: Synthetic oligonucleotide
  Sense strand starting at position 1229 of SEQ ID NO: 3626
auuagugacugucuacaca

SEQ ID NO: 282319 - RNA, 19 nt, Artificial Sequence
  Description of Artificial Sequence: Synthetic oligonucleotide
  Antisense strand to SEQ ID NO: 282318
uguguagacagucacuaau

SEQ ID NO: 282320 - RNA, 19 nt, Artificial Sequence
  Description of Artificial Sequence: Synthetic oligonucleotide
  Sense strand starting at position 1342 of SEQ ID NO: 3626
gcuccaacuccuuaaugag

SEQ ID NO: 282321 - RNA, 19 nt, Artificial Sequence
  Description of Artificial Sequence: Synthetic oligonucleotide
  Antisense strand to SEQ ID NO: 282320
cucauuaaggaguuggagc

SEQ ID NO: 282322 - RNA, 19 nt, Artificial Sequence
  Description of Artificial Sequence: Synthetic oligonucleotide
  Sense strand starting at position 1350 of SEQ ID NO: 3626
uccuuaaugagguguggau

SEQ ID NO: 282323 - RNA, 19 nt, Artificial Sequence
  Description of Artificial Sequence: Synthetic oligonucleotide
  Antisense strand to SEQ ID NO: 282322
auccacaccucauuaagga

SEQ ID NO: 282324 - RNA, 19 nt, Artificial Sequence
  Description of Artificial Sequence: Synthetic oligonucleotide
  Sense strand starting at position 1354 of SEQ ID NO: 3626
uaaugagguguggauguau

SEQ ID NO: 282325 - RNA, 19 nt, Artificial Sequence
  Description of Artificial Sequence: Synthetic oligonucleotide
  Antisense strand to SEQ ID NO: 282324
auacauccacaccucauua

SEQ ID NO: 282326 - RNA, 19 nt, Artificial Sequence
  Description of Artificial Sequence: Synthetic oligonucleotide
  Sense strand starting at position 1362 of SEQ ID NO: 3626
uguggauguauauaaaugu

SEQ ID NO: 282327 - RNA, 19 nt, Artificial Sequence
  Description of Artificial Sequence: Synthetic oligonucleotide
  Antisense strand to SEQ ID NO: 282326
acauuuauauacauccaca

SEQ ID NO: 282328 - RNA, 19 nt, Artificial Sequence
  Description of Artificial Sequence: Synthetic oligonucleotide
  Sense strand starting at position 1368 of SEQ ID NO: 3626
uguauauaaaugugaagag

SEQ ID NO: 282329 - RNA, 19 nt, Artificial Sequence
  Description of Artificial Sequence: Synthetic oligonucleotide
  Antisense strand to SEQ ID NO: 282328
cucuucacauuuauauaca

SEQ ID NO: 282330 - RNA, 19 nt, Artificial Sequence
  Description of Artificial Sequence: Synthetic oligonucleotide
  Sense strand starting at position 1485 of SEQ ID NO: 3626
ugaagucuucagggcuaga

SEQ ID NO: 282331 - RNA, 19 nt, Artificial Sequence
  Description of Artificial Sequence: Synthetic oligonucleotide
  Antisense strand to SEQ ID NO: 282330
ucuagcccugaagacuuca

SEQ ID NO: 282332 - RNA, 19 nt, Artificial Sequence
  Description of Artificial Sequence: Synthetic oligonucleotide
  Sense strand starting at position 1502 of SEQ ID NO: 3626
gaaagaguugguuggugga

SEQ ID NO: 282333 - RNA, 19 nt, Artificial Sequence
  Description of Artificial Sequence: Synthetic oligonucleotide
  Antisense strand to SEQ ID NO: 282332
uccaccaaccaacucuuuc

SEQ ID NO: 282334 - RNA, 19 nt, Artificial Sequence
  Description of Artificial Sequence: Synthetic oligonucleotide
  Sense strand starting at position 1504 of SEQ ID NO: 3626
aagaguugguugguggaaa

SEQ ID NO: 282335 - RNA, 19 nt, Artificial Sequence
  Description of Artificial Sequence: Synthetic oligonucleotide
  Antisense strand to SEQ ID NO: 282334
uuuccaccaaccaacucuu

SEQ ID NO: 282336 - RNA, 19 nt, Artificial Sequence
  Description of Artificial Sequence: Synthetic oligonucleotide
  Sense strand starting at position 1530 of SEQ ID NO: 3626
uuaccuuggcucugagaca

SEQ ID NO: 282337 - RNA, 19 nt, Artificial Sequence
  Description of Artificial Sequence: Synthetic oligonucleotide
  Antisense strand to SEQ ID NO: 282336
ugucucagagccaagguaa

SEQ ID NO: 282338 - RNA, 19 nt, Artificial Sequence
  Description of Artificial Sequence: Synthetic oligonucleotide
  Sense strand starting at position 1718 of SEQ ID NO: 3626
cucagaauuucugagacca

SEQ ID NO: 282339 - RNA, 19 nt, Artificial Sequence
  Description of Artificial Sequence: Synthetic oligonucleotide
  Antisense strand to SEQ ID NO: 282338
uggucucagaaauucugag

SEQ ID NO: 282340 - RNA, 19 nt, Artificial Sequence
  Description of Artificial Sequence: Synthetic oligonucleotide
  Sense strand starting at position 1764 of SEQ ID NO: 3626
ucaaauguuucucuugaga

SEQ ID NO: 282341 - RNA, 19 nt, Artificial Sequence
  Description of Artificial Sequence: Synthetic oligonucleotide
  Antisense strand to SEQ ID NO: 282340
ucucaagagaaacauuuga

SEQ ID NO: 282342 - RNA, 19 nt, Artificial Sequence
  Description of Artificial Sequence: Synthetic oligonucleotide
  Sense strand starting at position 1767 of SEQ ID NO: 3626
aauguuucucuugagagug

SEQ ID NO: 282343 - RNA, 19 nt, Artificial Sequence
  Description of Artificial Sequence: Synthetic oligonucleotide
  Antisense strand to SEQ ID NO: 282342
cacucucaagagaaacauu

SEQ ID NO: 282344 - RNA, 19 nt, Artificial Sequence
  Description of Artificial Sequence: Synthetic oligonucleotide
  Sense strand starting at position 1992 of SEQ ID NO: 3626
gcuuuauaucaggaucuga

SEQ ID NO: 282345 - RNA, 19 nt, Artificial Sequence
  Description of Artificial Sequence: Synthetic oligonucleotide
  Antisense strand to SEQ ID NO: 282344
ucagauccugauauaaagc

SEQ ID NO: 282346 - RNA, 19 nt, Artificial Sequence
  Description of Artificial Sequence: Synthetic oligonucleotide
  Sense strand starting at position 2010 of SEQ ID NO: 3626
agauaagaaccacgucauu

SEQ ID NO: 282347 - RNA, 19 nt, Artificial Sequence
  Description of Artificial Sequence: Synthetic oligonucleotide
  Antisense strand to SEQ ID NO: 282346
aaugacgugguucuuaucu

SEQ ID NO: 282348 - RNA, 19 nt, Artificial Sequence
  Description of Artificial Sequence: Synthetic oligonucleotide
  Sense strand starting at position 2258 of SEQ ID NO: 3626
acaguagacuuccuuguau

SEQ ID NO: 282349 - RNA, 19 nt, Artificial Sequence
  Description of Artificial Sequence: Synthetic oligonucleotide
  Antisense strand to SEQ ID NO: 282348
auacaaggaagucuacugu

SEQ ID NO: 282350 - RNA, 19 nt, Artificial Sequence
  Description of Artificial Sequence: Synthetic oligonucleotide
  Sense strand starting at position 2499 of SEQ ID NO: 3626
acauauucucaaugugaga

SEQ ID NO: 282351 - RNA, 19 nt, Artificial Sequence
  Description of Artificial Sequence: Synthetic oligonucleotide
  Antisense strand to SEQ ID NO: 282350
ucucacauugagaauaugu

SEQ ID NO: 282352 - RNA, 19 nt, Artificial Sequence
  Description of Artificial Sequence: Synthetic oligonucleotide
  Sense strand starting at position 2512 of SEQ ID NO: 3626
gugagaauuguagagagcu

SEQ ID NO: 282353 - RNA, 19 nt, Artificial Sequence
  Description of Artificial Sequence: Synthetic oligonucleotide
  Antisense strand to SEQ ID NO: 282352
agcucucuacaauucucac

SEQ ID NO: 282354 - RNA, 19 nt, Artificial Sequence
  Description of Artificial Sequence: Synthetic oligonucleotide
  Sense strand starting at position 2599 of SEQ ID NO: 3626
aacuguuuguuaguaugaa

SEQ ID NO: 282355 - RNA, 19 nt, Artificial Sequence
  Description of Artificial Sequence: Synthetic oligonucleotide
  Antisense strand to SEQ ID NO: 282354
uucauacuaacaaacaguu

SEQ ID NO: 282356 - RNA, 19 nt, Artificial Sequence
  Description of Artificial Sequence: Synthetic oligonucleotide
  Sense strand starting at position 2618 of SEQ ID NO: 3626
gucaaagauugugugguga

SEQ ID NO: 282357 - RNA, 19 nt, Artificial Sequence
  Description of Artificial Sequence: Synthetic oligonucleotide
  Antisense strand to SEQ ID NO: 282356
ucaccacacaaucuuugac

SEQ ID NO: 282358 - RNA, 19 nt, Artificial Sequence
  Description of Artificial Sequence: Synthetic oligonucleotide
  Sense strand starting at position 2629 of SEQ ID NO: 3626
uguggugaaauugaguauu

SEQ ID NO: 282359 - RNA, 19 nt, Artificial Sequence
  Description of Artificial Sequence: Synthetic oligonucleotide
  Antisense strand to SEQ ID NO: 282358
aauacucaauuucaccaca

SEQ ID NO: 282360 - RNA, 19 nt, Artificial Sequence
  Description of Artificial Sequence: Synthetic oligonucleotide
  Sense strand starting at position 2639 of SEQ ID NO: 3626
uugaguauuuaccagaauc

SEQ ID NO: 282361 - RNA, 19 nt, Artificial Sequence
  Description of Artificial Sequence: Synthetic oligonucleotide
  Antisense strand to SEQ ID NO: 282360
gauucugguaaauacucaa

SEQ ID NO: 282362 - RNA, 19 nt, Artificial Sequence
  Description of Artificial Sequence: Synthetic oligonucleotide
  Sense strand starting at position 3026 of SEQ ID NO: 3626
uugucauaguauuugccua

SEQ ID NO: 282363 - RNA, 19 nt, Artificial Sequence
  Description of Artificial Sequence: Synthetic oligonucleotide
  Antisense strand to SEQ ID NO: 282362
uaggcaaauacuaugacaa

SEQ ID NO: 282364 - RNA, 19 nt, Artificial Sequence
  Description of Artificial Sequence: Synthetic oligonucleotide
  Sense strand starting at position 3271 of SEQ ID NO: 3626
uccagauaugguggcacau

SEQ ID NO: 282365 - RNA, 19 nt, Artificial Sequence
  Description of Artificial Sequence: Synthetic oligonucleotide
  Antisense strand to SEQ ID NO: 282364
augugccaccauaucugga

SEQ ID NO: 282366 - RNA, 19 nt, Artificial Sequence
  Description of Artificial Sequence: Synthetic oligonucleotide
  Sense strand starting at position 3597 of SEQ ID NO: 3626
ucagaaauauucuuccguu

SEQ ID NO: 282367 - RNA, 19 nt, Artificial Sequence
  Description of Artificial Sequence: Synthetic oligonucleotide
  Antisense strand to SEQ ID NO: 282366
aacggaagaauauuucuga

SEQ ID NO: 282368 - RNA, 19 nt, Artificial Sequence
  Description of Artificial Sequence: Synthetic oligonucleotide
  Sense strand starting at position 3630 of SEQ ID NO: 3626
uagggaagagucggguaua

SEQ ID NO: 282369 - RNA, 19 nt, Artificial Sequence
  Description of Artificial Sequence: Synthetic oligonucleotide
  Antisense strand to SEQ ID NO: 282368
uauacccgacucuucccua

SEQ ID NO: 282370 - RNA, 19 nt, Artificial Sequence
  Description of Artificial Sequence: Synthetic oligonucleotide
  Sense strand starting at position 3633 of SEQ ID NO: 3626
ggaagagucggguauacuu

SEQ ID NO: 282371 - RNA, 19 nt, Artificial Sequence
  Description of Artificial Sequence: Synthetic oligonucleotide
  Antisense strand to SEQ ID NO: 282370
aaguauacccgacucuucc

SEQ ID NO: 282372 - RNA, 19 nt, Artificial Sequence
  Description of Artificial Sequence: Synthetic oligonucleotide
  Sense strand starting at position 497 of SEQ ID NO: 3627
uggagcacucaguggagaa

SEQ ID NO: 282373 - RNA, 19 nt, Artificial Sequence
  Description of Artificial Sequence: Synthetic oligonucleotide
  Antisense strand to SEQ ID NO: 282372
uucuccacugagugcucca

SEQ ID NO: 282374 - RNA, 19 nt, Artificial Sequence
  Description of Artificial Sequence: Synthetic oligonucleotide
  Sense strand starting at position 538 of SEQ ID NO: 3627
agaccuuccagaggaugua

SEQ ID NO: 282375 - RNA, 19 nt, Artificial Sequence
  Description of Artificial Sequence: Synthetic oligonucleotide
  Antisense strand to SEQ ID NO: 282374
uacauccucuggaaggucu

SEQ ID NO: 282376 - RNA, 19 nt, Artificial Sequence
  Description of Artificial Sequence: Synthetic oligonucleotide
  Sense strand starting at position 629 of SEQ ID NO: 3627
gugucaaaugaugggauaa

SEQ ID NO: 282377 - RNA, 19 nt, Artificial Sequence
  Description of Artificial Sequence: Synthetic oligonucleotide
  Antisense strand to SEQ ID NO: 282376
uuaucccaucauuugacac

SEQ ID NO: 282378 - RNA, 19 nt, Artificial Sequence
  Description of Artificial Sequence: Synthetic oligonucleotide
  Sense strand starting at position 923 of SEQ ID NO: 3627
ggagauaauuaagaaagaa

SEQ ID NO: 282379 - RNA, 19 nt, Artificial Sequence
  Description of Artificial Sequence: Synthetic oligonucleotide
  Antisense strand to SEQ ID NO: 282378
uucuuucuuaauuaucucc

SEQ ID NO: 282380 - RNA, 19 nt, Artificial Sequence
  Description of Artificial Sequence: Synthetic oligonucleotide
  Sense strand starting at position 983 of SEQ ID NO: 3627
cuugguguccuuuauaaga

SEQ ID NO: 282381 - RNA, 19 nt, Artificial Sequence
  Description of Artificial Sequence: Synthetic oligonucleotide
  Antisense strand to SEQ ID NO: 282380
ucuuauaaaggacaccaag

SEQ ID NO: 282382 - RNA, 19 nt, Artificial Sequence
  Description of Artificial Sequence: Synthetic oligonucleotide
  Sense strand starting at position 1154 of SEQ ID NO: 3627
ggcuucugccuuuaaagac

SEQ ID NO: 282383 - RNA, 19 nt, Artificial Sequence
  Description of Artificial Sequence: Synthetic oligonucleotide
  Antisense strand to SEQ ID NO: 282382
gucuuuaaaggcagaagcc

SEQ ID NO: 282384 - RNA, 19 nt, Artificial Sequence
  Description of Artificial Sequence: Synthetic oligonucleotide
  Sense strand starting at position 1269 of SEQ ID NO: 3627
acugccaucgcauauagau

SEQ ID NO: 282385 - RNA, 19 nt, Artificial Sequence
  Description of Artificial Sequence: Synthetic oligonucleotide
  Antisense strand to SEQ ID NO: 282384
aucuauaugcgauggcagu

SEQ ID NO: 282386 - RNA, 19 nt, Artificial Sequence
  Description of Artificial Sequence: Synthetic oligonucleotide
  Sense strand starting at position 1317 of SEQ ID NO: 3627
accuauaagugguccuauu

SEQ ID NO: 282387 - RNA, 19 nt, Artificial Sequence
  Description of Artificial Sequence: Synthetic oligonucleotide
  Antisense strand to SEQ ID NO: 282386
aauaggaccacuuauaggu

SEQ ID NO: 282388 - RNA, 19 nt, Artificial Sequence
  Description of Artificial Sequence: Synthetic oligonucleotide
  Sense strand starting at position 1343 of SEQ ID NO: 3627
gucucaaacccaugaauga

SEQ ID NO: 282389 - RNA, 19 nt, Artificial Sequence
  Description of Artificial Sequence: Synthetic oligonucleotide
  Antisense strand to SEQ ID NO: 282388
ucauucauggguuugagac

SEQ ID NO: 282390 - RNA, 19 nt, Artificial Sequence
  Description of Artificial Sequence: Synthetic oligonucleotide
  Sense strand starting at position 1571 of SEQ ID NO: 3627
cgaguuggucugagccaug

SEQ ID NO: 282391 - RNA, 19 nt, Artificial Sequence
  Description of Artificial Sequence: Synthetic oligonucleotide
  Antisense strand to SEQ ID NO: 282390
cauggcucagaccaacucg

SEQ ID NO: 282392 - RNA, 19 nt, Artificial Sequence
  Description of Artificial Sequence: Synthetic oligonucleotide
  Sense strand starting at position 1624 of SEQ ID NO: 3627
aucagcaaucucuguagga

SEQ ID NO: 282393 - RNA, 19 nt, Artificial Sequence
  Description of Artificial Sequence: Synthetic oligonucleotide
  Antisense strand to SEQ ID NO: 282392
uccuacagagauugcugau

SEQ ID NO: 282394 - RNA, 19 nt, Artificial Sequence
  Description of Artificial Sequence: Synthetic oligonucleotide
  Sense strand starting at position 1625 of SEQ ID NO: 3627
ucagcaaucucuguaggag

SEQ ID NO: 282395 - RNA, 19 nt, Artificial Sequence
  Description of Artificial Sequence: Synthetic oligonucleotide
  Antisense strand to SEQ ID NO: 282394
cuccuacagagauugcuga

SEQ ID NO: 282396 - RNA, 19 nt, Artificial Sequence
  Description of Artificial Sequence: Synthetic oligonucleotide
  Sense strand starting at position 1626 of SEQ ID NO: 3627
cagcaaucucuguaggaga

SEQ ID NO: 282397 - RNA, 19 nt, Artificial Sequence
  Description of Artificial Sequence: Synthetic oligonucleotide
  Antisense strand to SEQ ID NO: 282396
ucuccuacagagauugcug

SEQ ID NO: 282398 - RNA, 19 nt, Artificial Sequence
  Description of Artificial Sequence: Synthetic oligonucleotide
  Sense strand starting at position 1787 of SEQ ID NO: 3627
aggccaaauuacccgaaau

SEQ ID NO: 282399 - RNA, 19 nt, Artificial Sequence
  Description of Artificial Sequence: Synthetic oligonucleotide
  Antisense strand to SEQ ID NO: 282398
auuucggguaauuuggccu

SEQ ID NO: 282400 - RNA, 19 nt, Artificial Sequence
  Description of Artificial Sequence: Synthetic oligonucleotide
  Sense strand starting at position 1789 of SEQ ID NO: 3627
gccaaauuacccgaaauca

SEQ ID NO: 282401 - RNA, 19 nt, Artificial Sequence
  Description of Artificial Sequence: Synthetic oligonucleotide
  Antisense strand to SEQ ID NO: 282400
ugauuucggguaauuuggc

SEQ ID NO: 282402 - RNA, 19 nt, Artificial Sequence
  Description of Artificial Sequence: Synthetic oligonucleotide
  Sense strand starting at position 1828 of SEQ ID NO: 3627
ucauuacuacugggaucuu

SEQ ID NO: 282403 - RNA, 19 nt, Artificial Sequence
  Description of Artificial Sequence: Synthetic oligonucleotide
  Antisense strand to SEQ ID NO: 282402
aagaucccaguaguaauga

SEQ ID NO: 282404 - RNA, 19 nt, Artificial Sequence
  Description of Artificial Sequence: Synthetic oligonucleotide
  Sense strand starting at position 2099 of SEQ ID NO: 3627
ucaggaauagcuuauuccu

SEQ ID NO: 282405 - RNA, 19 nt, Artificial Sequence
  Description of Artificial Sequence: Synthetic oligonucleotide
  Antisense strand to SEQ ID NO: 282404
aggaauaagcuauuccuga

SEQ ID NO: 282406 - RNA, 19 nt, Artificial Sequence
  Description of Artificial Sequence: Synthetic oligonucleotide
  Sense strand starting at position 2266 of SEQ ID NO: 3627
aguagauuucuuugugcua

SEQ ID NO: 282407 - RNA, 19 nt, Artificial Sequence
  Description of Artificial Sequence: Synthetic oligonucleotide
  Antisense strand to SEQ ID NO: 282406
uagcacaaagaaaucuacu

SEQ ID NO: 282408 - RNA, 19 nt, Artificial Sequence
  Description of Artificial Sequence: Synthetic oligonucleotide
  Sense strand starting at position 2267 of SEQ ID NO: 3627
guagauuucuuugugcuag

SEQ ID NO: 282409 - RNA, 19 nt, Artificial Sequence
  Description of Artificial Sequence: Synthetic oligonucleotide
  Antisense strand to SEQ ID NO: 282408
cuagcacaaagaaaucuac

SEQ ID NO: 282410 - RNA, 19 nt, Artificial Sequence
  Description of Artificial Sequence: Synthetic oligonucleotide
  Sense strand starting at position 2269 of SEQ ID NO: 3627
agauuucuuugugcuaggu

SEQ ID NO: 282411 - RNA, 19 nt, Artificial Sequence
  Description of Artificial Sequence: Synthetic oligonucleotide
  Antisense strand to SEQ ID NO: 282410
accuagcacaaagaaaucu

SEQ ID NO: 282412 - RNA, 19 nt, Artificial Sequence
  Description of Artificial Sequence: Synthetic oligonucleotide
  Sense strand starting at position 2283 of SEQ ID NO: 3627
uagguaaaugugggaugau

SEQ ID NO: 282413 - RNA, 19 nt, Artificial Sequence
  Description of Artificial Sequence: Synthetic oligonucleotide
  Antisense strand to SEQ ID NO: 282412
aucaucccacauuuaccua

SEQ ID NO: 282414 - RNA, 19 nt, Artificial Sequence
  Description of Artificial Sequence: Synthetic oligonucleotide
  Sense strand starting at position 2286 of SEQ ID NO: 3627
guaaaugugggaugauccu

SEQ ID NO: 282415 - RNA, 19 nt, Artificial Sequence
  Description of Artificial Sequence: Synthetic oligonucleotide
  Antisense strand to SEQ ID NO: 282414
aggaucaucccacauuuac

SEQ ID NO: 282416 - RNA, 19 nt, Artificial Sequence
  Description of Artificial Sequence: Synthetic oligonucleotide
  Sense strand starting at position 2292 of SEQ ID NO: 3627
gugggaugauccuuucuuu

SEQ ID NO: 282417 - RNA, 19 nt, Artificial Sequence
  Description of Artificial Sequence: Synthetic oligonucleotide
  Antisense strand to SEQ ID NO: 282416
aaagaaaggaucaucccac

SEQ ID NO: 282418 - RNA, 19 nt, Artificial Sequence
  Description of Artificial Sequence: Synthetic oligonucleotide
  Sense strand starting at position 2295 of SEQ ID NO: 3627
ggaugauccuuucuuuggu

SEQ ID NO: 282419 - RNA, 19 nt, Artificial Sequence
  Description of Artificial Sequence: Synthetic oligonucleotide
  Antisense strand to SEQ ID NO: 282418
accaaagaaaggaucaucc

SEQ ID NO: 282420 - RNA, 19 nt, Artificial Sequence
  Description of Artificial Sequence: Synthetic oligonucleotide
  Sense strand starting at position 2438 of SEQ ID NO: 3627
gaaggcaagguguauuagu

SEQ ID NO: 282421 - RNA, 19 nt, Artificial Sequence
  Description of Artificial Sequence: Synthetic oligonucleotide
  Antisense strand to SEQ ID NO: 282420
acuaauacaccuugccuuc

SEQ ID NO: 282422 - RNA, 19 nt, Artificial Sequence
  Description of Artificial Sequence: Synthetic oligonucleotide
  Sense strand starting at position 2835 of SEQ ID NO: 3627
ucacaagguuuaguaguua

SEQ ID NO: 282423 - RNA, 19 nt, Artificial Sequence
  Description of Artificial Sequence: Synthetic oligonucleotide
  Antisense strand to SEQ ID NO: 282422
uaacuacuaaaccuuguga

SEQ ID NO: 282424 - RNA, 19 nt, Artificial Sequence
  Description of Artificial Sequence: Synthetic oligonucleotide
  Sense strand starting at position 2855 of SEQ ID NO: 3627
guaaauuuaagccagcguu

SEQ ID NO: 282425 - RNA, 19 nt, Artificial Sequence
  Description of Artificial Sequence: Synthetic oligonucleotide
  Antisense strand to SEQ ID NO: 282424
aacgcuggcuuaaauuuac

SEQ ID NO: 282426 - RNA, 19 nt, Artificial Sequence
  Description of Artificial Sequence: Synthetic oligonucleotide
  Sense strand starting at position 2905 of SEQ ID NO: 3627
ugauacagauguucucaaa

SEQ ID NO: 282427 - RNA, 19 nt, Artificial Sequence
  Description of Artificial Sequence: Synthetic oligonucleotide
  Antisense strand to SEQ ID NO: 282426
uuugagaacaucuguauca

SEQ ID NO: 282428 - RNA, 19 nt, Artificial Sequence
  Description of Artificial Sequence: Synthetic oligonucleotide
  Sense strand starting at position 2947 of SEQ ID NO: 3627
ggagcugaugccuaaguaa

SEQ ID NO: 282429 - RNA, 19 nt, Artificial Sequence
  Description of Artificial Sequence: Synthetic oligonucleotide
  Antisense strand to SEQ ID NO: 282428
uuacuuaggcaucagcucc

SEQ ID NO: 282430 - RNA, 19 nt, Artificial Sequence
  Description of Artificial Sequence: Synthetic oligonucleotide
  Sense strand starting at position 2962 of SEQ ID NO: 3627
guaagcucaaaguaaugga

SEQ ID NO: 282431 - RNA, 19 nt, Artificial Sequence
  Description of Artificial Sequence: Synthetic oligonucleotide
  Antisense strand to SEQ ID NO: 282430
uccauuacuuugagcuuac

SEQ ID NO: 282432 - RNA, 19 nt, Artificial Sequence
  Description of Artificial Sequence: Synthetic oligonucleotide
  Sense strand starting at position 2972 of SEQ ID NO: 3627
aguaauggaauaugaaguu

SEQ ID NO: 282433 - RNA, 19 nt, Artificial Sequence
  Description of Artificial Sequence: Synthetic oligonucleotide
  Antisense strand to SEQ ID NO: 282432
aacuucauauuccauuacu

SEQ ID NO: 282434 - RNA, 19 nt, Artificial Sequence
  Description of Artificial Sequence: Synthetic oligonucleotide
  Sense strand starting at position 2978 of SEQ ID NO: 3627
ggaauaugaaguuguuggu

SEQ ID NO: 282435 - RNA, 19 nt, Artificial Sequence
  Description of Artificial Sequence: Synthetic oligonucleotide
  Antisense strand to SEQ ID NO: 282434
accaacaacuucauauucc

SEQ ID NO: 282436 - RNA, 19 nt, Artificial Sequence
  Description of Artificial Sequence: Synthetic oligonucleotide
  Sense strand starting at position 2984 of SEQ ID NO: 3627
ugaaguuguugguuugaag

SEQ ID NO: 282437 - RNA, 19 nt, Artificial Sequence
  Description of Artificial Sequence: Synthetic oligonucleotide
  Antisense strand to SEQ ID NO: 282436
cuucaaaccaacaacuuca

SEQ ID NO: 282438 - RNA, 19 nt, Artificial Sequence
  Description of Artificial Sequence: Synthetic oligonucleotide
  Sense strand starting at position 3002 of SEQ ID NO: 3627
gucaauugucuguuguugu

SEQ ID NO: 282439 - RNA, 19 nt, Artificial Sequence
  Description of Artificial Sequence: Synthetic oligonucleotide
  Antisense strand to SEQ ID NO: 282438
acaacaacagacaauugac

SEQ ID NO: 282440 - RNA, 19 nt, Artificial Sequence
  Description of Artificial Sequence: Synthetic oligonucleotide
  Sense strand starting at position 3007 of SEQ ID NO: 3627
uugucuguuguugugaagu

SEQ ID NO: 282441 - RNA, 19 nt, Artificial Sequence
  Description of Artificial Sequence: Synthetic oligonucleotide
  Antisense strand to SEQ ID NO: 282440
acuucacaacaacagacaa

SEQ ID NO: 282442 - RNA, 19 nt, Artificial Sequence
  Description of Artificial Sequence: Synthetic oligonucleotide
  Sense strand starting at position 3024 of SEQ ID NO: 3627
guuacagauagugauguga

SEQ ID NO: 282443 - RNA, 19 nt, Artificial Sequence
  Description of Artificial Sequence: Synthetic oligonucleotide
  Antisense strand to SEQ ID NO: 282442
ucacaucacuaucuguaac

SEQ ID NO: 282444 - RNA, 19 nt, Artificial Sequence
  Description of Artificial Sequence: Synthetic oligonucleotide
  Sense strand starting at position 3160 of SEQ ID NO: 3627
ggcuauaucaauugggaua

SEQ ID NO: 282445 - RNA, 19 nt, Artificial Sequence
  Description of Artificial Sequence: Synthetic oligonucleotide
  Antisense strand to SEQ ID NO: 282444
uaucccaauugauauagcc

SEQ ID NO: 282446 - RNA, 19 nt, Artificial Sequence
  Description of Artificial Sequence: Synthetic oligonucleotide
  Sense strand starting at position 3369 of SEQ ID NO: 3627
ucacauguaguuuaaagua

SEQ ID NO: 282447 - RNA, 19 nt, Artificial Sequence
  Description of Artificial Sequence: Synthetic oligonucleotide
  Antisense strand to SEQ ID NO: 282446
uacuuuaaacuacauguga

SEQ ID NO: 282448 - RNA, 19 nt, Artificial Sequence
  Description of Artificial Sequence: Synthetic oligonucleotide
  Sense strand starting at position 3454 of SEQ ID NO: 3627
uucucaguucugcaaggaa

SEQ ID NO: 282449 - RNA, 19 nt, Artificial Sequence
  Description of Artificial Sequence: Synthetic oligonucleotide
  Antisense strand to SEQ ID NO: 282448
uuccuugcagaacugagaa

SEQ ID NO: 282450 - RNA, 19 nt, Artificial Sequence
  Description of Artificial Sequence: Synthetic oligonucleotide
  Sense strand starting at position 3749 of SEQ ID NO: 3627
ggcugugaacuaggacaua

SEQ ID NO: 282451 - RNA, 19 nt, Artificial Sequence
  Description of Artificial Sequence: Synthetic oligonucleotide
  Antisense strand to SEQ ID NO: 282450
uauguccuaguucacagcc

SEQ ID NO: 282452 - RNA, 19 nt, Artificial Sequence
  Description of Artificial Sequence: Synthetic oligonucleotide
  Sense strand starting at position 80 of SEQ ID NO: 3629
guaggaaacucuuccuuga

SEQ ID NO: 282453 - RNA, 19 nt, Artificial Sequence
  Description of Artificial Sequence: Synthetic oligonucleotide
  Antisense strand to SEQ ID NO: 282452
ucaaggaagaguuuccuac

SEQ ID NO: 282454 - RNA, 19 nt, Artificial Sequence
  Description of Artificial Sequence: Synthetic oligonucleotide
  Sense strand starting at position 82 of SEQ ID NO: 3629
aggaaacucuuccuugacu

SEQ ID NO: 282455 - RNA, 19 nt, Artificial Sequence
  Description of Artificial Sequence: Synthetic oligonucleotide
  Antisense strand to SEQ ID NO: 282454
agucaaggaagaguuuccu

SEQ ID NO: 282456 - RNA, 19 nt, Artificial Sequence
  Description of Artificial Sequence: Synthetic oligonucleotide
  Sense strand starting at position 186 of SEQ ID NO: 3629
ugauguagcauuugugauu

SEQ ID NO: 282457 - RNA, 19 nt, Artificial Sequence
  Description of Artificial Sequence: Synthetic oligonucleotide
  Antisense strand to SEQ ID NO: 282456
aaucacaaaugcuacauca

SEQ ID NO: 282458 - RNA, 19 nt, Artificial Sequence
  Description of Artificial Sequence: Synthetic oligonucleotide
  Sense strand starting at position 191 of SEQ ID NO: 3629
uagcauuugugauuagcuu

SEQ ID NO: 282459 - RNA, 19 nt, Artificial Sequence
  Description of Artificial Sequence: Synthetic oligonucleotide
  Antisense strand to SEQ ID NO: 282458
aagcuaaucacaaaugcua

SEQ ID NO: 282460 - RNA, 19 nt, Artificial Sequence
  Description of Artificial Sequence: Synthetic oligonucleotide
  Sense strand starting at position 195 of SEQ ID NO: 3629
auuugugauuagcuuguga

SEQ ID NO: 282461 - RNA, 19 nt, Artificial Sequence
  Description of Artificial Sequence: Synthetic oligonucleotide
  Antisense strand to SEQ ID NO: 282460
ucacaagcuaaucacaaau

SEQ ID NO: 282462 - RNA, 19 nt, Artificial Sequence
  Description of Artificial Sequence: Synthetic oligonucleotide
  Sense strand starting at position 279 of SEQ ID NO: 3629
ucagaauaguaggcaaaga

SEQ ID NO: 282463 - RNA, 19 nt, Artificial Sequence
  Description of Artificial Sequence: Synthetic oligonucleotide
  Antisense strand to SEQ ID NO: 282462
ucuuugccuacuauucuga

SEQ ID NO: 282464 - RNA, 19 nt, Artificial Sequence
  Description of Artificial Sequence: Synthetic oligonucleotide
  Sense strand starting at position 344 of SEQ ID NO: 3629
auguaauacgccugaggaa

SEQ ID NO: 282465 - RNA, 19 nt, Artificial Sequence
  Description of Artificial Sequence: Synthetic oligonucleotide
  Antisense strand to SEQ ID NO: 282464
uuccucaggcguauuacau

SEQ ID NO: 282466 - RNA, 19 nt, Artificial Sequence
  Description of Artificial Sequence: Synthetic oligonucleotide
  Sense strand starting at position 588 of SEQ ID NO: 3629
gagcccaauccagacguau

SEQ ID NO: 282467 - RNA, 19 nt, Artificial Sequence
  Description of Artificial Sequence: Synthetic oligonucleotide
  Antisense strand to SEQ ID NO: 282466
auacgucuggauugggcuc

SEQ ID NO: 282468 - RNA, 19 nt, Artificial Sequence
  Description of Artificial Sequence: Synthetic oligonucleotide
  Sense strand starting at position 592 of SEQ ID NO: 3629
ccaauccagacguaugagu

SEQ ID NO: 282469 - RNA, 19 nt, Artificial Sequence
  Description of Artificial Sequence: Synthetic oligonucleotide
  Antisense strand to SEQ ID NO: 282468
acucauacgucuggauugg

SEQ ID NO: 282470 - RNA, 19 nt, Artificial Sequence
  Description of Artificial Sequence: Synthetic oligonucleotide
  Sense strand starting at position 790 of SEQ ID NO: 3629
cugugugaaagauaaacgu

SEQ ID NO: 282471 - RNA, 19 nt, Artificial Sequence
  Description of Artificial Sequence: Synthetic oligonucleotide
  Antisense strand to SEQ ID NO: 282470
acguuuaucuuucacacag

SEQ ID NO: 282472 - RNA, 19 nt, Artificial Sequence
  Description of Artificial Sequence: Synthetic oligonucleotide
  Sense strand starting at position 899 of SEQ ID NO: 3629
ucugcaucuguccaggauu

SEQ ID NO: 282473 - RNA, 19 nt, Artificial Sequence
  Description of Artificial Sequence: Synthetic oligonucleotide
  Antisense strand to SEQ ID NO: 282472
aauccuggacagaugcaga

SEQ ID NO: 282474 - RNA, 19 nt, Artificial Sequence
  Description of Artificial Sequence: Synthetic oligonucleotide
  Sense strand starting at position 1310 of SEQ ID NO: 3629
cccuccaguguauauuaga

SEQ ID NO: 282475 - RNA, 19 nt, Artificial Sequence
  Description of Artificial Sequence: Synthetic oligonucleotide
  Antisense strand to SEQ ID NO: 282474
ucuaauauacacuggaggg

SEQ ID NO: 282476 - RNA, 19 nt, Artificial Sequence
  Description of Artificial Sequence: Synthetic oligonucleotide
  Sense strand starting at position 1351 of SEQ ID NO: 3629
auuagaguccacugacuaa

SEQ ID NO: 282477 - RNA, 19 nt, Artificial Sequence
  Description of Artificial Sequence: Synthetic oligonucleotide
  Antisense strand to SEQ ID NO: 282476
uuagucaguggacucuaau

SEQ ID NO: 282478 - RNA, 19 nt, Artificial Sequence
  Description of Artificial Sequence: Synthetic oligonucleotide
  Sense strand starting at position 1482 of SEQ ID NO: 3629
acgucauuaccucacauga

SEQ ID NO: 282479 - RNA, 19 nt, Artificial Sequence
  Description of Artificial Sequence: Synthetic oligonucleotide
  Antisense strand to SEQ ID NO: 282478
ucaugugagguaaugacgu

SEQ ID NO: 282480 - RNA, 19 nt, Artificial Sequence
  Description of Artificial Sequence: Synthetic oligonucleotide
  Sense strand starting at position 1542 of SEQ ID NO: 3629
uagggaacccagugcuaga

SEQ ID NO: 282481 - RNA, 19 nt, Artificial Sequence
  Description of Artificial Sequence: Synthetic oligonucleotide
  Antisense strand to SEQ ID NO: 282480
ucuagcacuggguucccua

SEQ ID NO: 282482 - RNA, 19 nt, Artificial Sequence
  Description of Artificial Sequence: Synthetic oligonucleotide
  Sense strand starting at position 1763 of SEQ ID NO: 3629
ggacuaaagugaucuuggu

SEQ ID NO: 282483 - RNA, 19 nt, Artificial Sequence
  Description of Artificial Sequence: Synthetic oligonucleotide
  Antisense strand to SEQ ID NO: 282482
accaagaucacuuuagucc

SEQ ID NO: 282484 - RNA, 19 nt, Artificial Sequence
  Description of Artificial Sequence: Synthetic oligonucleotide
  Sense strand starting at position 1767 of SEQ ID NO: 3629
uaaagugaucuuggucaca

SEQ ID NO: 282485 - RNA, 19 nt, Artificial Sequence
  Description of Artificial Sequence: Synthetic oligonucleotide
  Antisense strand to SEQ ID NO: 282484
ugugaccaagaucacuuua

SEQ ID NO: 282486 - RNA, 19 nt, Artificial Sequence
  Description of Artificial Sequence: Synthetic oligonucleotide
  Sense strand starting at position 1769 of SEQ ID NO: 3629
aagugaucuuggucacauc

SEQ ID NO: 282487 - RNA, 19 nt, Artificial Sequence
  Description of Artificial Sequence: Synthetic oligonucleotide
  Antisense strand to SEQ ID NO: 282486
gaugugaccaagaucacuu

SEQ ID NO: 282488 - RNA, 19 nt, Artificial Sequence
  Description of Artificial Sequence: Synthetic oligonucleotide
  Sense strand starting at position 1798 of SEQ ID NO: 3629
uacaguucugaaugaguug

SEQ ID NO: 282489 - RNA, 19 nt, Artificial Sequence
  Description of Artificial Sequence: Synthetic oligonucleotide
  Antisense strand to SEQ ID NO: 282488
caacucauucagaacugua

SEQ ID NO: 282490 - RNA, 19 nt, Artificial Sequence
  Description of Artificial Sequence: Synthetic oligonucleotide
  Sense strand starting at position 1801 of SEQ ID NO: 3629
aguucugaaugaguuguga

SEQ ID NO: 282491 - RNA, 19 nt, Artificial Sequence
  Description of Artificial Sequence: Synthetic oligonucleotide
  Antisense strand to SEQ ID NO: 282490
ucacaacucauucagaacu

SEQ ID NO: 282492 - RNA, 19 nt, Artificial Sequence
  Description of Artificial Sequence: Synthetic oligonucleotide
  Sense strand starting at position 1803 of SEQ ID NO: 3629
uucugaaugaguugugaau

SEQ ID NO: 282493 - RNA, 19 nt, Artificial Sequence
  Description of Artificial Sequence: Synthetic oligonucleotide
  Antisense strand to SEQ ID NO: 282492
auucacaacucauucagaa

SEQ ID NO: 282494 - RNA, 19 nt, Artificial Sequence
  Description of Artificial Sequence: Synthetic oligonucleotide
  Sense strand starting at position 1972 of SEQ ID NO: 3629
uaccucucuggugggauau

SEQ ID NO: 282495 - RNA, 19 nt, Artificial Sequence
  Description of Artificial Sequence: Synthetic oligonucleotide
  Antisense strand to SEQ ID NO: 282494
auaucccaccagagaggua

SEQ ID NO: 282496 - RNA, 19 nt, Artificial Sequence
  Description of Artificial Sequence: Synthetic oligonucleotide
  Sense strand starting at position 2052 of SEQ ID NO: 3629
uggagugaagagugacaau

SEQ ID NO: 282497 - RNA, 19 nt, Artificial Sequence
  Description of Artificial Sequence: Synthetic oligonucleotide
  Antisense strand to SEQ ID NO: 282496
auugucacucuucacucca

SEQ ID NO: 282498 - RNA, 19 nt, Artificial Sequence
  Description of Artificial Sequence: Synthetic oligonucleotide
  Sense strand starting at position 2108 of SEQ ID NO: 3629
uggacucuuccuggcaaag

SEQ ID NO: 282499 - RNA, 19 nt, Artificial Sequence
  Description of Artificial Sequence: Synthetic oligonucleotide
  Antisense strand to SEQ ID NO: 282498
cuuugccaggaagagucca

SEQ ID NO: 282500 - RNA, 19 nt, Artificial Sequence
  Description of Artificial Sequence: Synthetic oligonucleotide
  Sense strand starting at position 2290 of SEQ ID NO: 3629
ucugguggguuucuuaaga

SEQ ID NO: 282501 - RNA, 19 nt, Artificial Sequence
  Description of Artificial Sequence: Synthetic oligonucleotide
  Antisense strand to SEQ ID NO: 282500
ucuuaagaaacccaccaga

SEQ ID NO: 282502 - RNA, 19 nt, Artificial Sequence
  Description of Artificial Sequence: Synthetic oligonucleotide
  Sense strand starting at position 2365 of SEQ ID NO: 3629
auaaauguuagguguuaag

SEQ ID NO: 282503 - RNA, 19 nt, Artificial Sequence
  Description of Artificial Sequence: Synthetic oligonucleotide
  Antisense strand to SEQ ID NO: 282502
cuuaacaccuaacauuuau

SEQ ID NO: 282504 - RNA, 19 nt, Artificial Sequence
  Description of Artificial Sequence: Synthetic oligonucleotide
  Sense strand starting at position 2372 of SEQ ID NO: 3629
uuagguguuaagugaagau

SEQ ID NO: 282505 - RNA, 19 nt, Artificial Sequence
  Description of Artificial Sequence: Synthetic oligonucleotide
  Antisense strand to SEQ ID NO: 282504
aucuucacuuaacaccuaa

SEQ ID NO: 282506 - RNA, 19 nt, Artificial Sequence
  Description of Artificial Sequence: Synthetic oligonucleotide
  Sense strand starting at position 2394 of SEQ ID NO: 3629
cgggaauuauaaguaucau

SEQ ID NO: 282507 - RNA, 19 nt, Artificial Sequence
  Description of Artificial Sequence: Synthetic oligonucleotide
  Antisense strand to SEQ ID NO: 282506
augauacuuauaauucccg

SEQ ID NO: 282508 - RNA, 19 nt, Artificial Sequence
  Description of Artificial Sequence: Synthetic oligonucleotide
  Sense strand starting at position 2986 of SEQ ID NO: 3629
guaaguuaugaucauccca

SEQ ID NO: 282509 - RNA, 19 nt, Artificial Sequence
  Description of Artificial Sequence: Synthetic oligonucleotide
  Antisense strand to SEQ ID NO: 282508
ugggaugaucauaacuuac

SEQ ID NO: 282510 - RNA, 19 nt, Artificial Sequence
  Description of Artificial Sequence: Synthetic oligonucleotide
  Sense strand starting at position 3152 of SEQ ID NO: 3629
cugccauuuggcuguacau

SEQ ID NO: 282511 - RNA, 19 nt, Artificial Sequence
  Description of Artificial Sequence: Synthetic oligonucleotide
  Antisense strand to SEQ ID NO: 282510
auguacagccaaauggcag

SEQ ID NO: 282512 - RNA, 19 nt, Artificial Sequence
  Description of Artificial Sequence: Synthetic oligonucleotide
  Sense strand starting at position 3405 of SEQ ID NO: 3629
uaugcagauguuuauagua

SEQ ID NO: 282513 - RNA, 19 nt, Artificial Sequence
  Description of Artificial Sequence: Synthetic oligonucleotide
  Antisense strand to SEQ ID NO: 282512
uacuauaaacaucugcaua

SEQ ID NO: 282514 - RNA, 19 nt, Artificial Sequence
  Description of Artificial Sequence: Synthetic oligonucleotide
  Sense strand starting at position 3432 of SEQ ID NO: 3629
ugacgaggucaugagaugu

SEQ ID NO: 282515 - RNA, 19 nt, Artificial Sequence
  Description of Artificial Sequence: Synthetic oligonucleotide
  Antisense strand to SEQ ID NO: 282514
acaucucaugaccucguca

SEQ ID NO: 282516 - RNA, 19 nt, Artificial Sequence
  Description of Artificial Sequence: Synthetic oligonucleotide
  Sense strand starting at position 3438 of SEQ ID NO: 3629
ggucaugagauguagcuca

SEQ ID NO: 282517 - RNA, 19 nt, Artificial Sequence
  Description of Artificial Sequence: Synthetic oligonucleotide
  Antisense strand to SEQ ID NO: 282516
ugagcuacaucucaugacc

SEQ ID NO: 282518 - RNA, 19 nt, Artificial Sequence
  Description of Artificial Sequence: Synthetic oligonucleotide
  Sense strand starting at position 3443 of SEQ ID NO: 3629
ugagauguagcucauccuu

SEQ ID NO: 282519 - RNA, 19 nt, Artificial Sequence
  Description of Artificial Sequence: Synthetic oligonucleotide
  Antisense strand to SEQ ID NO: 282518
aaggaugagcuacaucuca

SEQ ID NO: 282520 - RNA, 19 nt, Artificial Sequence
  Description of Artificial Sequence: Synthetic oligonucleotide
  Sense strand starting at position 3445 of SEQ ID NO: 3629
agauguagcucauccuuaa

SEQ ID NO: 282521 - RNA, 19 nt, Artificial Sequence
  Description of Artificial Sequence: Synthetic oligonucleotide
  Antisense strand to SEQ ID NO: 282520
uuaaggaugagcuacaucu

SEQ ID NO: 282522 - RNA, 19 nt, Artificial Sequence
  Description of Artificial Sequence: Synthetic oligonucleotide
  Sense strand starting at position 3707 of SEQ ID NO: 3629
ggaggaauauguucuagcu

SEQ ID NO: 282523 - RNA, 19 nt, Artificial Sequence
  Description of Artificial Sequence: Synthetic oligonucleotide
  Antisense strand to SEQ ID NO: 282522
agcuagaacauauuccucc

SEQ ID NO: 282524 - RNA, 19 nt, Artificial Sequence
  Description of Artificial Sequence: Synthetic oligonucleotide
  Sense strand starting at position 3776 of SEQ ID NO: 3629
caagauaccuaggagagaa

SEQ ID NO: 282525 - RNA, 19 nt, Artificial Sequence
  Description of Artificial Sequence: Synthetic oligonucleotide
  Antisense strand to SEQ ID NO: 282524
uucucuccuagguaucuug

SEQ ID NO: 282526 - RNA, 19 nt, Artificial Sequence
  Description of Artificial Sequence: Synthetic oligonucleotide
  Sense strand starting at position 3805 of SEQ ID NO: 3629
gcugacaguuuauuauuaa

SEQ ID NO: 282527 - RNA, 19 nt, Artificial Sequence
  Description of Artificial Sequence: Synthetic oligonucleotide
  Antisense strand to SEQ ID NO: 282526
uuaauaauaaacugucagc

SEQ ID NO: 282528 - RNA, 19 nt, Artificial Sequence
  Description of Artificial Sequence: Synthetic oligonucleotide
  Sense strand starting at position 3842 of SEQ ID NO: 3629
auugaaauagugugaccuu

SEQ ID NO: 282529 - RNA, 19 nt, Artificial Sequence
  Description of Artificial Sequence: Synthetic oligonucleotide
  Antisense strand to SEQ ID NO: 282528
aaggucacacuauuucaau

SEQ ID NO: 282530 - RNA, 19 nt, Artificial Sequence
  Description of Artificial Sequence: Synthetic oligonucleotide
  Sense strand starting at position 3861 of SEQ ID NO: 3629
uguaauaagccuuaagguu

SEQ ID NO: 282531 - RNA, 19 nt, Artificial Sequence
  Description of Artificial Sequence: Synthetic oligonucleotide
  Antisense strand to SEQ ID NO: 282530
aaccuuaaggcuuauuaca

SEQ ID NO: 282532 - RNA, 19 nt, Artificial Sequence
  Description of Artificial Sequence: Synthetic oligonucleotide
  Sense strand starting at position 79 of SEQ ID NO: 3628
guaggaaacucuuccuuga

SEQ ID NO: 282533 - RNA, 19 nt, Artificial Sequence
  Description of Artificial Sequence: Synthetic oligonucleotide
  Antisense strand to SEQ ID NO: 282532
ucaaggaagaguuuccuac

SEQ ID NO: 282534 - RNA, 19 nt, Artificial Sequence
  Description of Artificial Sequence: Synthetic oligonucleotide
  Sense strand starting at position 81 of SEQ ID NO: 3628
aggaaacucuuccuugacu

SEQ ID NO: 282535 - RNA, 19 nt, Artificial Sequence
  Description of Artificial Sequence: Synthetic oligonucleotide
  Antisense strand to SEQ ID NO: 282534
agucaaggaagaguuuccu

SEQ ID NO: 282536 - RNA, 19 nt, Artificial Sequence
  Description of Artificial Sequence: Synthetic oligonucleotide
  Sense strand starting at position 185 of SEQ ID NO: 3628
ugauguagcauuugugauu

SEQ ID NO: 282537 - RNA, 19 nt, Artificial Sequence
  Description of Artificial Sequence: Synthetic oligonucleotide
  Antisense strand to SEQ ID NO: 282536
aaucacaaaugcuacauca

SEQ ID NO: 282538 - RNA, 19 nt, Artificial Sequence
  Description of Artificial Sequence: Synthetic oligonucleotide
  Sense strand starting at position 190 of SEQ ID NO: 3628
uagcauuugugauuagcuu

SEQ ID NO: 282539 - RNA, 19 nt, Artificial Sequence
  Description of Artificial Sequence: Synthetic oligonucleotide
  Antisense strand to SEQ ID NO: 282538
aagcuaaucacaaaugcua

SEQ ID NO: 282540 - RNA, 19 nt, Artificial Sequence
  Description of Artificial Sequence: Synthetic oligonucleotide
  Sense strand starting at position 194 of SEQ ID NO: 3628
auuugugauuagcuuguga

SEQ ID NO: 282541 - RNA, 19 nt, Artificial Sequence
  Description of Artificial Sequence: Synthetic oligonucleotide
  Antisense strand to SEQ ID NO: 282540
ucacaagcuaaucacaaau

SEQ ID NO: 282542 - RNA, 19 nt, Artificial Sequence
  Description of Artificial Sequence: Synthetic oligonucleotide
  Sense strand starting at position 278 of SEQ ID NO: 3628
ucagaauaguaggcaaaga

SEQ ID NO: 282543 - RNA, 19 nt, Artificial Sequence
  Description of Artificial Sequence: Synthetic oligonucleotide
  Antisense strand to SEQ ID NO: 282542
ucuuugccuacuauucuga

SEQ ID NO: 282544 - RNA, 19 nt, Artificial Sequence
  Description of Artificial Sequence: Synthetic oligonucleotide
  Sense strand starting at position 343 of SEQ ID NO: 3628
auguaauacgccugaggaa

SEQ ID NO: 282545 - RNA, 19 nt, Artificial Sequence
  Description of Artificial Sequence: Synthetic oligonucleotide
  Antisense strand to SEQ ID NO: 282544
uuccucaggcguauuacau

SEQ ID NO: 282546 - RNA, 19 nt, Artificial Sequence
  Description of Artificial Sequence: Synthetic oligonucleotide
  Sense strand starting at position 587 of SEQ ID NO: 3628
gagcccaauccagacguau

SEQ ID NO: 282547 - RNA, 19 nt, Artificial Sequence
  Description of Artificial Sequence: Synthetic oligonucleotide
  Antisense strand to SEQ ID NO: 282546
auacgucuggauugggcuc

SEQ ID NO: 282548 - RNA, 19 nt, Artificial Sequence
  Description of Artificial Sequence: Synthetic oligonucleotide
  Sense strand starting at position 591 of SEQ ID NO: 3628
ccaauccagacguaugagu

SEQ ID NO: 282549 - RNA, 19 nt, Artificial Sequence
  Description of Artificial Sequence: Synthetic oligonucleotide
  Antisense strand to SEQ ID NO: 282548
acucauacgucuggauugg

SEQ ID NO: 282550 - RNA, 19 nt, Artificial Sequence
  Description of Artificial Sequence: Synthetic oligonucleotide
  Sense strand starting at position 789 of SEQ ID NO: 3628
cugugugaaagauaaacgu

SEQ ID NO: 282551 - RNA, 19 nt, Artificial Sequence
  Description of Artificial Sequence: Synthetic oligonucleotide
  Antisense strand to SEQ ID NO: 282550
acguuuaucuuucacacag

SEQ ID NO: 282552 - RNA, 19 nt, Artificial Sequence
  Description of Artificial Sequence: Synthetic oligonucleotide
  Sense strand starting at position 898 of SEQ ID NO: 3628
ucugcaucuguccaggauu

SEQ ID NO: 282553 - RNA, 19 nt, Artificial Sequence
  Description of Artificial Sequence: Synthetic oligonucleotide
  Antisense strand to SEQ ID NO: 282552
aauccuggacagaugcaga

SEQ ID NO: 282554 - RNA, 19 nt, Artificial Sequence
  Description of Artificial Sequence: Synthetic oligonucleotide
  Sense strand starting at position 1309 of SEQ ID NO: 3628
cccuccaguguauauuaga

SEQ ID NO: 282555 - RNA, 19 nt, Artificial Sequence
  Description of Artificial Sequence: Synthetic oligonucleotide
  Antisense strand to SEQ ID NO: 282554
ucuaauauacacuggaggg

SEQ ID NO: 282556 - RNA, 19 nt, Artificial Sequence
  Description of Artificial Sequence: Synthetic oligonucleotide
  Sense strand starting at position 1350 of SEQ ID NO: 3628
auuagaguccacugacuaa

SEQ ID NO: 282557 - RNA, 19 nt, Artificial Sequence
  Description of Artificial Sequence: Synthetic oligonucleotide
  Antisense strand to SEQ ID NO: 282556
uuagucaguggacucuaau

SEQ ID NO: 282558 - RNA, 19 nt, Artificial Sequence
  Description of Artificial Sequence: Synthetic oligonucleotide
  Sense strand starting at position 1481 of SEQ ID NO: 3628
acgucauuaccucacauga

SEQ ID NO: 282559 - RNA, 19 nt, Artificial Sequence
  Description of Artificial Sequence: Synthetic oligonucleotide
  Antisense strand to SEQ ID NO: 282558
ucaugugagguaaugacgu

SEQ ID NO: 282560 - RNA, 19 nt, Artificial Sequence
  Description of Artificial Sequence: Synthetic oligonucleotide
  Sense strand starting at position 1541 of SEQ ID NO: 3628
uagggaacccagugcuaga

SEQ ID NO: 282561 - RNA, 19 nt, Artificial Sequence
  Description of Artificial Sequence: Synthetic oligonucleotide
  Antisense strand to SEQ ID NO: 282560
ucuagcacuggguucccua

SEQ ID NO: 282562 - RNA, 19 nt, Artificial Sequence
  Description of Artificial Sequence: Synthetic oligonucleotide
  Sense strand starting at position 1762 of SEQ ID NO: 3628
ggacuaaagugaucuuggu

SEQ ID NO: 282563 - RNA, 19 nt, Artificial Sequence
  Description of Artificial Sequence: Synthetic oligonucleotide
  Antisense strand to SEQ ID NO: 282562
accaagaucacuuuagucc

SEQ ID NO: 282564 - RNA, 19 nt, Artificial Sequence
  Description of Artificial Sequence: Synthetic oligonucleotide
  Sense strand starting at position 1766 of SEQ ID NO: 3628
uaaagugaucuuggucaca

SEQ ID NO: 282565 - RNA, 19 nt, Artificial Sequence
  Description of Artificial Sequence: Synthetic oligonucleotide
  Antisense strand to SEQ ID NO: 282564
ugugaccaagaucacuuua

SEQ ID NO: 282566 - RNA, 19 nt, Artificial Sequence
  Description of Artificial Sequence: Synthetic oligonucleotide
  Sense strand starting at position 1768 of SEQ ID NO: 3628
aagugaucuuggucacauc

SEQ ID NO: 282567 - RNA, 19 nt, Artificial Sequence
  Description of Artificial Sequence: Synthetic oligonucleotide
  Antisense strand to SEQ ID NO: 282566
gaugugaccaagaucacuu

SEQ ID NO: 282568 - RNA, 19 nt, Artificial Sequence
  Description of Artificial Sequence: Synthetic oligonucleotide
  Sense strand starting at position 1797 of SEQ ID NO: 3628
uacaguucugaaugaguug

SEQ ID NO: 282569 - RNA, 19 nt, Artificial Sequence
  Description of Artificial Sequence: Synthetic oligonucleotide
  Antisense strand to SEQ ID NO: 282568
caacucauucagaacugua

SEQ ID NO: 282570 - RNA, 19 nt, Artificial Sequence
  Description of Artificial Sequence: Synthetic oligonucleotide
  Sense strand starting at position 1800 of SEQ ID NO: 3628
aguucugaaugaguuguga

SEQ ID NO: 282571 - RNA, 19 nt, Artificial Sequence
  Description of Artificial Sequence: Synthetic oligonucleotide
  Antisense strand to SEQ ID NO: 282570
ucacaacucauucagaacu

SEQ ID NO: 282572 - RNA, 19 nt, Artificial Sequence
  Description of Artificial Sequence: Synthetic oligonucleotide
  Sense strand starting at position 1802 of SEQ ID NO: 3628
uucugaaugaguugugaau

SEQ ID NO: 282573 - RNA, 19 nt, Artificial Sequence
  Description of Artificial Sequence: Synthetic oligonucleotide
  Antisense strand to SEQ ID NO: 282572
auucacaacucauucagaa

SEQ ID NO: 282574 - RNA, 19 nt, Artificial Sequence
  Description of Artificial Sequence: Synthetic oligonucleotide
  Sense strand starting at position 1971 of SEQ ID NO: 3628
uaccucucuggugggauau

SEQ ID NO: 282575 - RNA, 19 nt, Artificial Sequence
  Description of Artificial Sequence: Synthetic oligonucleotide
  Antisense strand to SEQ ID NO: 282574
auaucccaccagagaggua

SEQ ID NO: 282576 - RNA, 19 nt, Artificial Sequence
  Description of Artificial Sequence: Synthetic oligonucleotide
  Sense strand starting at position 2051 of SEQ ID NO: 3628
uggagugaagagugacaau

SEQ ID NO: 282577 - RNA, 19 nt, Artificial Sequence
  Description of Artificial Sequence: Synthetic oligonucleotide
  Antisense strand to SEQ ID NO: 282576
auugucacucuucacucca

SEQ ID NO: 282578 - RNA, 19 nt, Artificial Sequence
  Description of Artificial Sequence: Synthetic oligonucleotide
  Sense strand starting at position 2107 of SEQ ID NO: 3628
uggacucuuccuggcaaag

SEQ ID NO: 282579 - RNA, 19 nt, Artificial Sequence
  Description of Artificial Sequence: Synthetic oligonucleotide
  Antisense strand to SEQ ID NO: 282578
cuuugccaggaagagucca

SEQ ID NO: 282580 - RNA, 19 nt, Artificial Sequence
  Description of Artificial Sequence: Synthetic oligonucleotide
  Sense strand starting at position 2289 of SEQ ID NO: 3628
ucugguggguuucuuaaga

SEQ ID NO: 282581 - RNA, 19 nt, Artificial Sequence
  Description of Artificial Sequence: Synthetic oligonucleotide
  Antisense strand to SEQ ID NO: 282580
ucuuaagaaacccaccaga

SEQ ID NO: 282582 - RNA, 19 nt, Artificial Sequence
  Description of Artificial Sequence: Synthetic oligonucleotide
  Sense strand starting at position 2364 of SEQ ID NO: 3628
auaaauguuagguguuaag

SEQ ID NO: 282583 - RNA, 19 nt, Artificial Sequence
  Description of Artificial Sequence: Synthetic oligonucleotide
  Antisense strand to SEQ ID NO: 282582
cuuaacaccuaacauuuau

SEQ ID NO: 282584 - RNA, 19 nt, Artificial Sequence
  Description of Artificial Sequence: Synthetic oligonucleotide
  Sense strand starting at position 2371 of SEQ ID NO: 3628
uuagguguuaagugaagau

SEQ ID NO: 282585 - RNA, 19 nt, Artificial Sequence
  Description of Artificial Sequence: Synthetic oligonucleotide
  Antisense strand to SEQ ID NO: 282584
aucuucacuuaacaccuaa

SEQ ID NO: 282586 - RNA, 19 nt, Artificial Sequence
  Description of Artificial Sequence: Synthetic oligonucleotide
  Sense strand starting at position 2393 of SEQ ID NO: 3628
cgggaauuauaaguaucau

SEQ ID NO: 282587 - RNA, 19 nt, Artificial Sequence
  Description of Artificial Sequence: Synthetic oligonucleotide
  Antisense strand to SEQ ID NO: 282586
augauacuuauaauucccg

SEQ ID NO: 282588 - RNA, 19 nt, Artificial Sequence
  Description of Artificial Sequence: Synthetic oligonucleotide
  Sense strand starting at position 2985 of SEQ ID NO: 3628
guaaguuaugaucauccca

SEQ ID NO: 282589 - RNA, 19 nt, Artificial Sequence
  Description of Artificial Sequence: Synthetic oligonucleotide
  Antisense strand to SEQ ID NO: 282588
ugggaugaucauaacuuac

SEQ ID NO: 282590 - RNA, 19 nt, Artificial Sequence
  Description of Artificial Sequence: Synthetic oligonucleotide
  Sense strand starting at position 3151 of SEQ ID NO: 3628
cugccauuuggcuguacau

SEQ ID NO: 282591 - RNA, 19 nt, Artificial Sequence
  Description of Artificial Sequence: Synthetic oligonucleotide
  Antisense strand to SEQ ID NO: 282590
auguacagccaaauggcag

SEQ ID NO: 282592 - RNA, 19 nt, Artificial Sequence
  Description of Artificial Sequence: Synthetic oligonucleotide
  Sense strand starting at position 3404 of SEQ ID NO: 3628
uaugcagauguuuauagua

SEQ ID NO: 282593 - RNA, 19 nt, Artificial Sequence
  Description of Artificial Sequence: Synthetic oligonucleotide
  Antisense strand to SEQ ID NO: 282592
uacuauaaacaucugcaua

SEQ ID NO: 282594 - RNA, 19 nt, Artificial Sequence
  Description of Artificial Sequence: Synthetic oligonucleotide
  Sense strand starting at position 3431 of SEQ ID NO: 3628
ugacgaggucaugagaugu

SEQ ID NO: 282595 - RNA, 19 nt, Artificial Sequence
  Description of Artificial Sequence: Synthetic oligonucleotide
  Antisense strand to SEQ ID NO: 282594
acaucucaugaccucguca

SEQ ID NO: 282596 - RNA, 19 nt, Artificial Sequence
  Description of Artificial Sequence: Synthetic oligonucleotide
  Sense strand starting at position 3437 of SEQ ID NO: 3628
ggucaugagauguagcuca

SEQ ID NO: 282597 - RNA, 19 nt, Artificial Sequence
  Description of Artificial Sequence: Synthetic oligonucleotide
  Antisense strand to SEQ ID NO: 282596
ugagcuacaucucaugacc

SEQ ID NO: 282598 - RNA, 19 nt, Artificial Sequence
  Description of Artificial Sequence: Synthetic oligonucleotide
  Sense strand starting at position 3442 of SEQ ID NO: 3628
ugagauguagcucauccuu

SEQ ID NO: 282599 - RNA, 19 nt, Artificial Sequence
  Description of Artificial Sequence: Synthetic oligonucleotide
  Antisense strand to SEQ ID NO: 282598
aaggaugagcuacaucuca

SEQ ID NO: 282600 - RNA, 19 nt, Artificial Sequence
  Description of Artificial Sequence: Synthetic oligonucleotide
  Sense strand starting at position 3444 of SEQ ID NO: 3628
agauguagcucauccuuaa

SEQ ID NO: 282601 - RNA, 19 nt, Artificial Sequence
  Description of Artificial Sequence: Synthetic oligonucleotide
  Antisense strand to SEQ ID NO: 282600
uuaaggaugagcuacaucu

SEQ ID NO: 282602 - RNA, 19 nt, Artificial Sequence
  Description of Artificial Sequence: Synthetic oligonucleotide
  Sense strand starting at position 3706 of SEQ ID NO: 3628
ggaggaauauguucuagcu

SEQ ID NO: 282603 - RNA, 19 nt, Artificial Sequence
  Description of Artificial Sequence: Synthetic oligonucleotide
  Antisense strand to SEQ ID NO: 282602
agcuagaacauauuccucc

SEQ ID NO: 282604 - RNA, 19 nt, Artificial Sequence
  Description of Artificial Sequence: Synthetic oligonucleotide
  Sense strand starting at position 3775 of SEQ ID NO: 3628
caagauaccuaggagagaa

SEQ ID NO: 282605 - RNA, 19 nt, Artificial Sequence
  Description of Artificial Sequence: Synthetic oligonucleotide
  Antisense strand to SEQ ID NO: 282604
uucucuccuagguaucuug

SEQ ID NO: 282606 - RNA, 19 nt, Artificial Sequence
  Description of Artificial Sequence: Synthetic oligonucleotide
  Sense strand starting at position 3804 of SEQ ID NO: 3628
gcugacaguuuauuauuaa

SEQ ID NO: 282607 - RNA, 19 nt, Artificial Sequence
  Description of Artificial Sequence: Synthetic oligonucleotide
  Antisense strand to SEQ ID NO: 282606
uuaauaauaaacugucagc

SEQ ID NO: 282608 - RNA, 19 nt, Artificial Sequence
  Description of Artificial Sequence: Synthetic oligonucleotide
  Sense strand starting at position 3841 of SEQ ID NO: 3628
auugaaauagugugaccuu

SEQ ID NO: 282609 - RNA, 19 nt, Artificial Sequence
  Description of Artificial Sequence: Synthetic oligonucleotide
  Antisense strand to SEQ ID NO: 282608
aaggucacacuauuucaau

SEQ ID NO: 282610 - RNA, 19 nt, Artificial Sequence
  Description of Artificial Sequence: Synthetic oligonucleotide
  Sense strand starting at position 3860 of SEQ ID NO: 3628
uguaauaagccuuaagguu

SEQ ID NO: 282611 - RNA, 19 nt, Artificial Sequence
  Description of Artificial Sequence: Synthetic oligonucleotide
  Antisense strand to SEQ ID NO: 282610
aaccuuaaggcuuauuaca

SEQ ID NO: 282612 - RNA, 19 nt, Artificial Sequence
  Description of Artificial Sequence: Synthetic oligonucleotide
  Sense strand starting at position 43 of SEQ ID NO: 3630
uccucauugcuuugggaaa

SEQ ID NO: 282613 - RNA, 19 nt, Artificial Sequence
  Description of Artificial Sequence: Synthetic oligonucleotide
  Antisense strand to SEQ ID NO: 282612
uuucccaaagcaaugagga

SEQ ID NO: 282614 - RNA, 19 nt, Artificial Sequence
  Description of Artificial Sequence: Synthetic oligonucleotide
  Sense strand starting at position 107 of SEQ ID NO: 3630
auguuacuugcagaacaau

SEQ ID NO: 282615 - RNA, 19 nt, Artificial Sequence
  Description of Artificial Sequence: Synthetic oligonucleotide
  Antisense strand to SEQ ID NO: 282614
auuguucugcaaguaacau

SEQ ID NO: 282616 - RNA, 19 nt, Artificial Sequence
  Description of Artificial Sequence: Synthetic oligonucleotide
  Sense strand starting at position 122 of SEQ ID NO: 3630
caauaauugguguagcauu

SEQ ID NO: 282617 - RNA, 19 nt, Artificial Sequence
  Description of Artificial Sequence: Synthetic oligonucleotide
  Antisense strand to SEQ ID NO: 282616
aaugcuacaccaauuauug

SEQ ID NO: 282618 - RNA, 19 nt, Artificial Sequence
  Description of Artificial Sequence: Synthetic oligonucleotide
  Sense strand starting at position 129 of SEQ ID NO: 3630
ugguguagcauuugugauu

SEQ ID NO: 282619 - RNA, 19 nt, Artificial Sequence
  Description of Artificial Sequence: Synthetic oligonucleotide
  Antisense strand to SEQ ID NO: 282618
aaucacaaaugcuacacca

SEQ ID NO: 282620 - RNA, 19 nt, Artificial Sequence
  Description of Artificial Sequence: Synthetic oligonucleotide
  Sense strand starting at position 130 of SEQ ID NO: 3630
gguguagcauuugugauua

SEQ ID NO: 282621 - RNA, 19 nt, Artificial Sequence
  Description of Artificial Sequence: Synthetic oligonucleotide
  Antisense strand to SEQ ID NO: 282620
uaaucacaaaugcuacacc

SEQ ID NO: 282622 - RNA, 19 nt, Artificial Sequence
  Description of Artificial Sequence: Synthetic oligonucleotide
  Sense strand starting at position 134 of SEQ ID NO: 3630
uagcauuugugauuagccu

SEQ ID NO: 282623 - RNA, 19 nt, Artificial Sequence
  Description of Artificial Sequence: Synthetic oligonucleotide
  Antisense strand to SEQ ID NO: 282622
aggcuaaucacaaaugcua

SEQ ID NO: 282624 - RNA, 19 nt, Artificial Sequence
  Description of Artificial Sequence: Synthetic oligonucleotide
  Sense strand starting at position 149 of SEQ ID NO: 3630
gccugcgaaccucaaagau

SEQ ID NO: 282625 - RNA, 19 nt, Artificial Sequence
  Description of Artificial Sequence: Synthetic oligonucleotide
  Antisense strand to SEQ ID NO: 282624
aucuuugagguucgcaggc

SEQ ID NO: 282626 - RNA, 19 nt, Artificial Sequence
  Description of Artificial Sequence: Synthetic oligonucleotide
  Sense strand starting at position 241 of SEQ ID NO: 3630
cucccugaagcucagauaa

SEQ ID NO: 282627 - RNA, 19 nt, Artificial Sequence
  Description of Artificial Sequence: Synthetic oligonucleotide
  Antisense strand to SEQ ID NO: 282626
uuaucugagcuucagggag

SEQ ID NO: 282628 - RNA, 19 nt, Artificial Sequence
  Description of Artificial Sequence: Synthetic oligonucleotide
  Sense strand starting at position 298 of SEQ ID NO: 3630
uuuacaagaguccgacuaa

SEQ ID NO: 282629 - RNA, 19 nt, Artificial Sequence
  Description of Artificial Sequence: Synthetic oligonucleotide
  Antisense strand to SEQ ID NO: 282628
uuagucggacucuuguaaa

SEQ ID NO: 282630 - RNA, 19 nt, Artificial Sequence
  Description of Artificial Sequence: Synthetic oligonucleotide
  Sense strand starting at position 331 of SEQ ID NO: 3630
uagggaucuccguagaauu

SEQ ID NO: 282631 - RNA, 19 nt, Artificial Sequence
  Description of Artificial Sequence: Synthetic oligonucleotide
  Antisense strand to SEQ ID NO: 282630
aauucuacggagaucccua

SEQ ID NO: 282632 - RNA, 19 nt, Artificial Sequence
  Description of Artificial Sequence: Synthetic oligonucleotide
  Sense strand starting at position 333 of SEQ ID NO: 3630
gggaucuccguagaauuca

SEQ ID NO: 282633 - RNA, 19 nt, Artificial Sequence
  Description of Artificial Sequence: Synthetic oligonucleotide
  Antisense strand to SEQ ID NO: 282632
ugaauucuacggagauccc

SEQ ID NO: 282634 - RNA, 19 nt, Artificial Sequence
  Description of Artificial Sequence: Synthetic oligonucleotide
  Sense strand starting at position 474 of SEQ ID NO: 3630
aguaccuugagagguaaca

SEQ ID NO: 282635 - RNA, 19 nt, Artificial Sequence
  Description of Artificial Sequence: Synthetic oligonucleotide
  Antisense strand to SEQ ID NO: 282634
uguuaccucucaagguacu

SEQ ID NO: 282636 - RNA, 19 nt, Artificial Sequence
  Description of Artificial Sequence: Synthetic oligonucleotide
  Sense strand starting at position 499 of SEQ ID NO: 3630
ggaggauauacucgcaccu

SEQ ID NO: 282637 - RNA, 19 nt, Artificial Sequence
  Description of Artificial Sequence: Synthetic oligonucleotide
  Antisense strand to SEQ ID NO: 282636
aggugcgaguauauccucc

SEQ ID NO: 282638 - RNA, 19 nt, Artificial Sequence
  Description of Artificial Sequence: Synthetic oligonucleotide
  Sense strand starting at position 1207 of SEQ ID NO: 3630
gugggcuaucucuauauug

SEQ ID NO: 282639 - RNA, 19 nt, Artificial Sequence
  Description of Artificial Sequence: Synthetic oligonucleotide
  Antisense strand to SEQ ID NO: 282638
caauauagagauagcccac

SEQ ID NO: 282640 - RNA, 19 nt, Artificial Sequence
  Description of Artificial Sequence: Synthetic oligonucleotide
  Sense strand starting at position 1272 of SEQ ID NO: 3630
acacuuucccaccagugua

SEQ ID NO: 282641 - RNA, 19 nt, Artificial Sequence
  Description of Artificial Sequence: Synthetic oligonucleotide
  Antisense strand to SEQ ID NO: 282640
uacacuggugggaaagugu

SEQ ID NO: 282642 - RNA, 19 nt, Artificial Sequence
  Description of Artificial Sequence: Synthetic oligonucleotide
  Sense strand starting at position 1292 of SEQ ID NO: 3630
auuagaguccacugacuaa

SEQ ID NO: 282643 - RNA, 19 nt, Artificial Sequence
  Description of Artificial Sequence: Synthetic oligonucleotide
  Antisense strand to SEQ ID NO: 282642
uuagucaguggacucuaau

SEQ ID NO: 282644 - RNA, 19 nt, Artificial Sequence
  Description of Artificial Sequence: Synthetic oligonucleotide
  Sense strand starting at position 1483 of SEQ ID NO: 3630
uagggaacccagugcuaga

SEQ ID NO: 282645 - RNA, 19 nt, Artificial Sequence
  Description of Artificial Sequence: Synthetic oligonucleotide
  Antisense strand to SEQ ID NO: 282644
ucuagcacuggguucccua

SEQ ID NO: 282646 - RNA, 19 nt, Artificial Sequence
  Description of Artificial Sequence: Synthetic oligonucleotide
  Sense strand starting at position 1494 of SEQ ID NO: 3630
gugcuagaggcagagaaau

SEQ ID NO: 282647 - RNA, 19 nt, Artificial Sequence
  Description of Artificial Sequence: Synthetic oligonucleotide
  Antisense strand to SEQ ID NO: 282646
auuucucugccucuagcac

SEQ ID NO: 282648 - RNA, 19 nt, Artificial Sequence
  Description of Artificial Sequence: Synthetic oligonucleotide
  Sense strand starting at position 1845 of SEQ ID NO: 3630
ccaugcguucuccuguauu

SEQ ID NO: 282649 - RNA, 19 nt, Artificial Sequence
  Description of Artificial Sequence: Synthetic oligonucleotide
  Antisense strand to SEQ ID NO: 282648
aauacaggagaacgcaugg

SEQ ID NO: 282650 - RNA, 19 nt, Artificial Sequence
  Description of Artificial Sequence: Synthetic oligonucleotide
  Sense strand starting at position 1985 of SEQ ID NO: 3630
uggucacuggagugaauaa

SEQ ID NO: 282651 - RNA, 19 nt, Artificial Sequence
  Description of Artificial Sequence: Synthetic oligonucleotide
  Antisense strand to SEQ ID NO: 282650
uuauucacuccagugacca

SEQ ID NO: 282652 - RNA, 19 nt, Artificial Sequence
  Description of Artificial Sequence: Synthetic oligonucleotide
  Sense strand starting at position 1995 of SEQ ID NO: 3630
agugaauaacggcaauaug

SEQ ID NO: 282653 - RNA, 19 nt, Artificial Sequence
  Description of Artificial Sequence: Synthetic oligonucleotide
  Antisense strand to SEQ ID NO: 282652
cauauugccguuauucacu

SEQ ID NO: 282654 - RNA, 19 nt, Artificial Sequence
  Description of Artificial Sequence: Synthetic oligonucleotide
  Sense strand starting at position 2075 of SEQ ID NO: 3630
aggagacucuuccuggcaa

SEQ ID NO: 282655 - RNA, 19 nt, Artificial Sequence
  Description of Artificial Sequence: Synthetic oligonucleotide
  Antisense strand to SEQ ID NO: 282654
uugccaggaagagucuccu

SEQ ID NO: 282656 - RNA, 19 nt, Artificial Sequence
  Description of Artificial Sequence: Synthetic oligonucleotide
  Sense strand starting at position 2077 of SEQ ID NO: 3630
gagacucuuccuggcaaag

SEQ ID NO: 282657 - RNA, 19 nt, Artificial Sequence
  Description of Artificial Sequence: Synthetic oligonucleotide
  Antisense strand to SEQ ID NO: 282656
cuuugccaggaagagucuc

SEQ ID NO: 282658 - RNA, 19 nt, Artificial Sequence
  Description of Artificial Sequence: Synthetic oligonucleotide
  Sense strand starting at position 2100 of SEQ ID NO: 3630
ggaauuguuacagauguug

SEQ ID NO: 282659 - RNA, 19 nt, Artificial Sequence
  Description of Artificial Sequence: Synthetic oligonucleotide
  Antisense strand to SEQ ID NO: 282658
caacaucuguaacaauucc

SEQ ID NO: 282660 - RNA, 19 nt, Artificial Sequence
  Description of Artificial Sequence: Synthetic oligonucleotide
  Sense strand starting at position 2188 of SEQ ID NO: 3630
ccagauaucuucuucugag

SEQ ID NO: 282661 - RNA, 19 nt, Artificial Sequence
  Description of Artificial Sequence: Synthetic oligonucleotide
  Antisense strand to SEQ ID NO: 282660
cucagaagaagauaucugg

SEQ ID NO: 282662 - RNA, 19 nt, Artificial Sequence
  Description of Artificial Sequence: Synthetic oligonucleotide
  Sense strand starting at position 2268 of SEQ ID NO: 3630
gauauuacauaguuaugag

SEQ ID NO: 282663 - RNA, 19 nt, Artificial Sequence
  Description of Artificial Sequence: Synthetic oligonucleotide
  Antisense strand to SEQ ID NO: 282662
cucauaacuauguaauauc

SEQ ID NO: 282664 - RNA, 19 nt, Artificial Sequence
  Description of Artificial Sequence: Synthetic oligonucleotide
  Sense strand starting at position 2323 of SEQ ID NO: 3630
agcucacuucuauaggcau

SEQ ID NO: 282665 - RNA, 19 nt, Artificial Sequence
  Description of Artificial Sequence: Synthetic oligonucleotide
  Antisense strand to SEQ ID NO: 282664
augccuauagaagugagcu

SEQ ID NO: 282666 - RNA, 19 nt, Artificial Sequence
  Description of Artificial Sequence: Synthetic oligonucleotide
  Sense strand starting at position 2418 of SEQ ID NO: 3630
uuagauguguuggcaaaga

SEQ ID NO: 282667 - RNA, 19 nt, Artificial Sequence
  Description of Artificial Sequence: Synthetic oligonucleotide
  Antisense strand to SEQ ID NO: 282666
ucuuugccaacacaucuaa

SEQ ID NO: 282668 - RNA, 19 nt, Artificial Sequence
  Description of Artificial Sequence: Synthetic oligonucleotide
  Sense strand starting at position 2428 of SEQ ID NO: 3630
uggcaaagacaauguauua

SEQ ID NO: 282669 - RNA, 19 nt, Artificial Sequence
  Description of Artificial Sequence: Synthetic oligonucleotide
  Antisense strand to SEQ ID NO: 282668
uaauacauugucuuugcca

SEQ ID NO: 282670 - RNA, 19 nt, Artificial Sequence
  Description of Artificial Sequence: Synthetic oligonucleotide
  Sense strand starting at position 2435 of SEQ ID NO: 3630
gacaauguauuagucgaaa

SEQ ID NO: 282671 - RNA, 19 nt, Artificial Sequence
  Description of Artificial Sequence: Synthetic oligonucleotide
  Antisense strand to SEQ ID NO: 282670
uuucgacuaauacauuguc

SEQ ID NO: 282672 - RNA, 19 nt, Artificial Sequence
  Description of Artificial Sequence: Synthetic oligonucleotide
  Sense strand starting at position 2539 of SEQ ID NO: 3630
auaaucuugugagucauua

SEQ ID NO: 282673 - RNA, 19 nt, Artificial Sequence
  Description of Artificial Sequence: Synthetic oligonucleotide
  Antisense strand to SEQ ID NO: 282672
uaaugacucacaagauuau

SEQ ID NO: 282674 - RNA, 19 nt, Artificial Sequence
  Description of Artificial Sequence: Synthetic oligonucleotide
  Sense strand starting at position 2628 of SEQ ID NO: 3630
aagagauaguuccuugguu

SEQ ID NO: 282675 - RNA, 19 nt, Artificial Sequence
  Description of Artificial Sequence: Synthetic oligonucleotide
  Antisense strand to SEQ ID NO: 282674
aaccaaggaacuaucucuu

SEQ ID NO: 282676 - RNA, 19 nt, Artificial Sequence
  Description of Artificial Sequence: Synthetic oligonucleotide
  Sense strand starting at position 2629 of SEQ ID NO: 3630
agagauaguuccuugguuu

SEQ ID NO: 282677 - RNA, 19 nt, Artificial Sequence
  Description of Artificial Sequence: Synthetic oligonucleotide
  Antisense strand to SEQ ID NO: 282676
aaaccaaggaacuaucucu

SEQ ID NO: 282678 - RNA, 19 nt, Artificial Sequence
  Description of Artificial Sequence: Synthetic oligonucleotide
  Sense strand starting at position 2691 of SEQ ID NO: 3630
cuuagauugugaucuacac

SEQ ID NO: 282679 - RNA, 19 nt, Artificial Sequence
  Description of Artificial Sequence: Synthetic oligonucleotide
  Antisense strand to SEQ ID NO: 282678
guguagaucacaaucuaag

SEQ ID NO: 282680 - RNA, 19 nt, Artificial Sequence
  Description of Artificial Sequence: Synthetic oligonucleotide
  Sense strand starting at position 2944 of SEQ ID NO: 3630
gcccuugaacuugaugaau

SEQ ID NO: 282681 - RNA, 19 nt, Artificial Sequence
  Description of Artificial Sequence: Synthetic oligonucleotide
  Antisense strand to SEQ ID NO: 282680
auucaucaaguucaagggc

SEQ ID NO: 282682 - RNA, 19 nt, Artificial Sequence
  Description of Artificial Sequence: Synthetic oligonucleotide
  Sense strand starting at position 3012 of SEQ ID NO: 3630
agggaauauucuguaugac

SEQ ID NO: 282683 - RNA, 19 nt, Artificial Sequence
  Description of Artificial Sequence: Synthetic oligonucleotide
  Antisense strand to SEQ ID NO: 282682
gucauacagaauauucccu

SEQ ID NO: 282684 - RNA, 19 nt, Artificial Sequence
  Description of Artificial Sequence: Synthetic oligonucleotide
  Sense strand starting at position 3062 of SEQ ID NO: 3630
gguugucuugagggaaaua

SEQ ID NO: 282685 - RNA, 19 nt, Artificial Sequence
  Description of Artificial Sequence: Synthetic oligonucleotide
  Antisense strand to SEQ ID NO: 282684
uauuucccucaagacaacc

SEQ ID NO: 282686 - RNA, 19 nt, Artificial Sequence
  Description of Artificial Sequence: Synthetic oligonucleotide
  Sense strand starting at position 3203 of SEQ ID NO: 3630
caaagugaguuaguaaaug

SEQ ID NO: 282687 - RNA, 19 nt, Artificial Sequence
  Description of Artificial Sequence: Synthetic oligonucleotide
  Antisense strand to SEQ ID NO: 282686
cauuuacuaacucacuuug

SEQ ID NO: 282688 - RNA, 19 nt, Artificial Sequence
  Description of Artificial Sequence: Synthetic oligonucleotide
  Sense strand starting at position 3350 of SEQ ID NO: 3630
ugagaucucugguuaacau

SEQ ID NO: 282689 - RNA, 19 nt, Artificial Sequence
  Description of Artificial Sequence: Synthetic oligonucleotide
  Antisense strand to SEQ ID NO: 282688
auguuaaccagagaucuca

SEQ ID NO: 282690 - RNA, 19 nt, Artificial Sequence
  Description of Artificial Sequence: Synthetic oligonucleotide
  Sense strand starting at position 3858 of SEQ ID NO: 3630
gugguagguacauaaugau

SEQ ID NO: 282691 - RNA, 19 nt, Artificial Sequence
  Description of Artificial Sequence: Synthetic oligonucleotide
  Antisense strand to SEQ ID NO: 282690
aucauuauguaccuaccac

SEQ ID NO: 282692 - RNA, 19 nt, Artificial Sequence
  Description of Artificial Sequence: Synthetic oligonucleotide
  Sense strand starting at position 41 of SEQ ID NO: 3631
uuuacacgauuaucugaaa

SEQ ID NO: 282693 - RNA, 19 nt, Artificial Sequence
  Description of Artificial Sequence: Synthetic oligonucleotide
  Antisense strand to SEQ ID NO: 282692
uuucagauaaucguguaaa

SEQ ID NO: 282694 - RNA, 19 nt, Artificial Sequence
  Description of Artificial Sequence: Synthetic oligonucleotide
  Sense strand starting at position 65 of SEQ ID NO: 3631
gugucacuuaagugggaaa

SEQ ID NO: 282695 - RNA, 19 nt, Artificial Sequence
  Description of Artificial Sequence: Synthetic oligonucleotide
  Antisense strand to SEQ ID NO: 282694
uuucccacuuaagugacac

SEQ ID NO: 282696 - RNA, 19 nt, Artificial Sequence
  Description of Artificial Sequence: Synthetic oligonucleotide
  Sense strand starting at position 198 of SEQ ID NO: 3631
uggcauuguucugcucaac

SEQ ID NO: 282697 - RNA, 19 nt, Artificial Sequence
  Description of Artificial Sequence: Synthetic oligonucleotide
  Antisense strand to SEQ ID NO: 282696
guugagcagaacaaugcca

SEQ ID NO: 282698 - RNA, 19 nt, Artificial Sequence
  Description of Artificial Sequence: Synthetic oligonucleotide
  Sense strand starting at position 533 of SEQ ID NO: 3631
ccaaccacaucuguguaua

SEQ ID NO: 282699 - RNA, 19 nt, Artificial Sequence
  Description of Artificial Sequence: Synthetic oligonucleotide
  Antisense strand to SEQ ID NO: 282698
uauacacagaugugguugg

SEQ ID NO: 282700 - RNA, 19 nt, Artificial Sequence
  Description of Artificial Sequence: Synthetic oligonucleotide
  Sense strand starting at position 555 of SEQ ID NO: 3631
gagacuuucuugcucugca

SEQ ID NO: 282701 - RNA, 19 nt, Artificial Sequence
  Description of Artificial Sequence: Synthetic oligonucleotide
  Antisense strand to SEQ ID NO: 282700
ugcagagcaagaaagucuc

SEQ ID NO: 282702 - RNA, 19 nt, Artificial Sequence
  Description of Artificial Sequence: Synthetic oligonucleotide
  Sense strand starting at position 556 of SEQ ID NO: 3631
agacuuucuugcucugcaa

SEQ ID NO: 282703 - RNA, 19 nt, Artificial Sequence
  Description of Artificial Sequence: Synthetic oligonucleotide
  Antisense strand to SEQ ID NO: 282702
uugcagagcaagaaagucu

SEQ ID NO: 282704 - RNA, 19 nt, Artificial Sequence
  Description of Artificial Sequence: Synthetic oligonucleotide
  Sense strand starting at position 560 of SEQ ID NO: 3631
uuucuugcucugcaauguu

SEQ ID NO: 282705 - RNA, 19 nt, Artificial Sequence
  Description of Artificial Sequence: Synthetic oligonucleotide
  Antisense strand to SEQ ID NO: 282704
aacauugcagagcaagaaa

SEQ ID NO: 282706 - RNA, 19 nt, Artificial Sequence
  Description of Artificial Sequence: Synthetic oligonucleotide
  Sense strand starting at position 612 of SEQ ID NO: 3631
ucgagcauuuauuaaggga

SEQ ID NO: 282707 - RNA, 19 nt, Artificial Sequence
  Description of Artificial Sequence: Synthetic oligonucleotide
  Antisense strand to SEQ ID NO: 282706
ucccuuaauaaaugcucga

SEQ ID NO: 282708 - RNA, 19 nt, Artificial Sequence
  Description of Artificial Sequence: Synthetic oligonucleotide
  Sense strand starting at position 637 of SEQ ID NO: 3631
auagucacauaagugauaa

SEQ ID NO: 282709 - RNA, 19 nt, Artificial Sequence
  Description of Artificial Sequence: Synthetic oligonucleotide
  Antisense strand to SEQ ID NO: 282708
uuaucacuuaugugacuau

SEQ ID NO: 282710 - RNA, 19 nt, Artificial Sequence
  Description of Artificial Sequence: Synthetic oligonucleotide
  Sense strand starting at position 749 of SEQ ID NO: 3631
gucucuauucgucagauua

SEQ ID NO: 282711 - RNA, 19 nt, Artificial Sequence
  Description of Artificial Sequence: Synthetic oligonucleotide
  Antisense strand to SEQ ID NO: 282710
uaaucugacgaauagagac

SEQ ID NO: 282712 - RNA, 19 nt, Artificial Sequence
  Description of Artificial Sequence: Synthetic oligonucleotide
  Sense strand starting at position 1201 of SEQ ID NO: 3631
guacaacugucaguacaag

SEQ ID NO: 282713 - RNA, 19 nt, Artificial Sequence
  Description of Artificial Sequence: Synthetic oligonucleotide
  Antisense strand to SEQ ID NO: 282712
cuuguacugacaguuguac

SEQ ID NO: 282714 - RNA, 19 nt, Artificial Sequence
  Description of Artificial Sequence: Synthetic oligonucleotide
  Sense strand starting at position 1221 of SEQ ID NO: 3631
gggaucaccucuuugcauu

SEQ ID NO: 282715 - RNA, 19 nt, Artificial Sequence
  Description of Artificial Sequence: Synthetic oligonucleotide
  Antisense strand to SEQ ID NO: 282714
aaugcaaagaggugauccc

SEQ ID NO: 282716 - RNA, 19 nt, Artificial Sequence
  Description of Artificial Sequence: Synthetic oligonucleotide
  Sense strand starting at position 1229 of SEQ ID NO: 3631
cucuuugcauuugaugaaa

SEQ ID NO: 282717 - RNA, 19 nt, Artificial Sequence
  Description of Artificial Sequence: Synthetic oligonucleotide
  Antisense strand to SEQ ID NO: 282716
uuucaucaaaugcaaagag

SEQ ID NO: 282718 - RNA, 19 nt, Artificial Sequence
  Description of Artificial Sequence: Synthetic oligonucleotide
  Sense strand starting at position 1285 of SEQ ID NO: 3631
gaagguuccucauuccugu

SEQ ID NO: 282719 - RNA, 19 nt, Artificial Sequence
  Description of Artificial Sequence: Synthetic oligonucleotide
  Antisense strand to SEQ ID NO: 282718
acaggaaugaggaaccuuc

SEQ ID NO: 282720 - RNA, 19 nt, Artificial Sequence
  Description of Artificial Sequence: Synthetic oligonucleotide
  Sense strand starting at position 1397 of SEQ ID NO: 3631
aaaucaagucguugggaau

SEQ ID NO: 282721 - RNA, 19 nt, Artificial Sequence
  Description of Artificial Sequence: Synthetic oligonucleotide
  Antisense strand to SEQ ID NO: 282720
auucccaacgacuugauuu

SEQ ID NO: 282722 - RNA, 19 nt, Artificial Sequence
  Description of Artificial Sequence: Synthetic oligonucleotide
  Sense strand starting at position 1398 of SEQ ID NO: 3631
aaucaagucguugggaauu

SEQ ID NO: 282723 - RNA, 19 nt, Artificial Sequence
  Description of Artificial Sequence: Synthetic oligonucleotide
  Antisense strand to SEQ ID NO: 282722
aauucccaacgacuugauu

SEQ ID NO: 282724 - RNA, 19 nt, Artificial Sequence
  Description of Artificial Sequence: Synthetic oligonucleotide
  Sense strand starting at position 1415 of SEQ ID NO: 3631
uuucuaagguuccugcuau

SEQ ID NO: 282725 - RNA, 19 nt, Artificial Sequence
  Description of Artificial Sequence: Synthetic oligonucleotide
  Antisense strand to SEQ ID NO: 282724
auagcaggaaccuuagaaa

SEQ ID NO: 282726 - RNA, 19 nt, Artificial Sequence
  Description of Artificial Sequence: Synthetic oligonucleotide
  Sense strand starting at position 1463 of SEQ ID NO: 3631
uuggauucugcacgcaaac

SEQ ID NO: 282727 - RNA, 19 nt, Artificial Sequence
  Description of Artificial Sequence: Synthetic oligonucleotide
  Antisense strand to SEQ ID NO: 282726
guuugcgugcagaauccaa

SEQ ID NO: 282728 - RNA, 19 nt, Artificial Sequence
  Description of Artificial Sequence: Synthetic oligonucleotide
  Sense strand starting at position 2272 of SEQ ID NO: 3631
uuccgagugugguuuaaag

SEQ ID NO: 282729 - RNA, 19 nt, Artificial Sequence
  Description of Artificial Sequence: Synthetic oligonucleotide
  Antisense strand to SEQ ID NO: 282728
cuuuaaaccacacucggaa

SEQ ID NO: 282730 - RNA, 19 nt, Artificial Sequence
  Description of Artificial Sequence: Synthetic oligonucleotide
  Sense strand starting at position 2274 of SEQ ID NO: 3631
ccgagugugguuuaaaguu

SEQ ID NO: 282731 - RNA, 19 nt, Artificial Sequence
  Description of Artificial Sequence: Synthetic oligonucleotide
  Antisense strand to SEQ ID NO: 282730
aacuuuaaaccacacucgg

SEQ ID NO: 282732 - RNA, 19 nt, Artificial Sequence
  Description of Artificial Sequence: Synthetic oligonucleotide
  Sense strand starting at position 2427 of SEQ ID NO: 3631
cgacuucgcacaugcaaau

SEQ ID NO: 282733 - RNA, 19 nt, Artificial Sequence
  Description of Artificial Sequence: Synthetic oligonucleotide
  Antisense strand to SEQ ID NO: 282732
auuugcaugugcgaagucg

SEQ ID NO: 282734 - RNA, 19 nt, Artificial Sequence
  Description of Artificial Sequence: Synthetic oligonucleotide
  Sense strand starting at position 2512 of SEQ ID NO: 3631
cugucuucuucuguaauuc

SEQ ID NO: 282735 - RNA, 19 nt, Artificial Sequence
  Description of Artificial Sequence: Synthetic oligonucleotide
  Antisense strand to SEQ ID NO: 282734
gaauuacagaagaagacag

SEQ ID NO: 282736 - RNA, 19 nt, Artificial Sequence
  Description of Artificial Sequence: Synthetic oligonucleotide
  Sense strand starting at position 2580 of SEQ ID NO: 3631
ucuaaauugcgaggguacu

SEQ ID NO: 282737 - RNA, 19 nt, Artificial Sequence
  Description of Artificial Sequence: Synthetic oligonucleotide
  Antisense strand to SEQ ID NO: 282736
aguacccucgcaauuuaga

SEQ ID NO: 282738 - RNA, 19 nt, Artificial Sequence
  Description of Artificial Sequence: Synthetic oligonucleotide
  Sense strand starting at position 2595 of SEQ ID NO: 3631
uacugugaacuuuacguau

SEQ ID NO: 282739 - RNA, 19 nt, Artificial Sequence
  Description of Artificial Sequence: Synthetic oligonucleotide
  Antisense strand to SEQ ID NO: 282738
auacguaaaguucacagua

SEQ ID NO: 282740 - RNA, 19 nt, Artificial Sequence
  Description of Artificial Sequence: Synthetic oligonucleotide
  Sense strand starting at position 2656 of SEQ ID NO: 3631
ggaguucguugucucauua

SEQ ID NO: 282741 - RNA, 19 nt, Artificial Sequence
  Description of Artificial Sequence: Synthetic oligonucleotide
  Antisense strand to SEQ ID NO: 282740
uaaugagacaacgaacucc

SEQ ID NO: 282742 - RNA, 19 nt, Artificial Sequence
  Description of Artificial Sequence: Synthetic oligonucleotide
  Sense strand starting at position 2774 of SEQ ID NO: 3631
aggauaacuucguuuccuu

SEQ ID NO: 282743 - RNA, 19 nt, Artificial Sequence
  Description of Artificial Sequence: Synthetic oligonucleotide
  Antisense strand to SEQ ID NO: 282742
aaggaaacgaaguuauccu

SEQ ID NO: 282744 - RNA, 19 nt, Artificial Sequence
  Description of Artificial Sequence: Synthetic oligonucleotide
  Sense strand starting at position 2795 of SEQ ID NO: 3631
uuugaauaguaccugcuau

SEQ ID NO: 282745 - RNA, 19 nt, Artificial Sequence
  Description of Artificial Sequence: Synthetic oligonucleotide
  Antisense strand to SEQ ID NO: 282744
auagcagguacuauucaaa

SEQ ID NO: 282746 - RNA, 19 nt, Artificial Sequence
  Description of Artificial Sequence: Synthetic oligonucleotide
  Sense strand starting at position 2806 of SEQ ID NO: 3631
ccugcuaugcaucagauaa

SEQ ID NO: 282747 - RNA, 19 nt, Artificial Sequence
  Description of Artificial Sequence: Synthetic oligonucleotide
  Antisense strand to SEQ ID NO: 282746
uuaucugaugcauagcagg

SEQ ID NO: 282748 - RNA, 19 nt, Artificial Sequence
  Description of Artificial Sequence: Synthetic oligonucleotide
  Sense strand starting at position 2830 of SEQ ID NO: 3631
auacuuaaucuaugacgua

SEQ ID NO: 282749 - RNA, 19 nt, Artificial Sequence
  Description of Artificial Sequence: Synthetic oligonucleotide
  Antisense strand to SEQ ID NO: 282748
uacgucauagauuaaguau

SEQ ID NO: 282750 - RNA, 19 nt, Artificial Sequence
  Description of Artificial Sequence: Synthetic oligonucleotide
  Sense strand starting at position 2983 of SEQ ID NO: 3631
cccugucccuuacuaguua

SEQ ID NO: 282751 - RNA, 19 nt, Artificial Sequence
  Description of Artificial Sequence: Synthetic oligonucleotide
  Antisense strand to SEQ ID NO: 282750
uaacuaguaagggacaggg

SEQ ID NO: 282752 - RNA, 19 nt, Artificial Sequence
  Description of Artificial Sequence: Synthetic oligonucleotide
  Sense strand starting at position 3025 of SEQ ID NO: 3631
ggaauaucagccugccaua

SEQ ID NO: 282753 - RNA, 19 nt, Artificial Sequence
  Description of Artificial Sequence: Synthetic oligonucleotide
  Antisense strand to SEQ ID NO: 282752
uauggcaggcugauauucc

SEQ ID NO: 282754 - RNA, 19 nt, Artificial Sequence
  Description of Artificial Sequence: Synthetic oligonucleotide
  Sense strand starting at position 3062 of SEQ ID NO: 3631
ggacccauaugggcaaaua

SEQ ID NO: 282755 - RNA, 19 nt, Artificial Sequence
  Description of Artificial Sequence: Synthetic oligonucleotide
  Antisense strand to SEQ ID NO: 282754
uauuugcccauaugggucc

SEQ ID NO: 282756 - RNA, 19 nt, Artificial Sequence
  Description of Artificial Sequence: Synthetic oligonucleotide
  Sense strand starting at position 3107 of SEQ ID NO: 3631
cuguucuuuccacgaaaug

SEQ ID NO: 282757 - RNA, 19 nt, Artificial Sequence
  Description of Artificial Sequence: Synthetic oligonucleotide
  Antisense strand to SEQ ID NO: 282756
cauuucguggaaagaacag

SEQ ID NO: 282758 - RNA, 19 nt, Artificial Sequence
  Description of Artificial Sequence: Synthetic oligonucleotide
  Sense strand starting at position 3116 of SEQ ID NO: 3631
ccacgaaaugcgcaaugua

SEQ ID NO: 282759 - RNA, 19 nt, Artificial Sequence
  Description of Artificial Sequence: Synthetic oligonucleotide
  Antisense strand to SEQ ID NO: 282758
uacauugcgcauuucgugg

SEQ ID NO: 282760 - RNA, 19 nt, Artificial Sequence
  Description of Artificial Sequence: Synthetic oligonucleotide
  Sense strand starting at position 3119 of SEQ ID NO: 3631
cgaaaugcgcaauguacaa

SEQ ID NO: 282761 - RNA, 19 nt, Artificial Sequence
  Description of Artificial Sequence: Synthetic oligonucleotide
  Antisense strand to SEQ ID NO: 282760
uuguacauugcgcauuucg

SEQ ID NO: 282762 - RNA, 19 nt, Artificial Sequence
  Description of Artificial Sequence: Synthetic oligonucleotide
  Sense strand starting at position 3319 of SEQ ID NO: 3631
ggaaguuaucuuggaacca

SEQ ID NO: 282763 - RNA, 19 nt, Artificial Sequence
  Description of Artificial Sequence: Synthetic oligonucleotide
  Antisense strand to SEQ ID NO: 282762
ugguuccaagauaacuucc

SEQ ID NO: 282764 - RNA, 19 nt, Artificial Sequence
  Description of Artificial Sequence: Synthetic oligonucleotide
  Sense strand starting at position 3376 of SEQ ID NO: 3631
gagcaccauccuugauguu

SEQ ID NO: 282765 - RNA, 19 nt, Artificial Sequence
  Description of Artificial Sequence: Synthetic oligonucleotide
  Antisense strand to SEQ ID NO: 282764
aacaucaaggauggugcuc

SEQ ID NO: 282766 - RNA, 19 nt, Artificial Sequence
  Description of Artificial Sequence: Synthetic oligonucleotide
  Sense strand starting at position 3586 of SEQ ID NO: 3631
ugagcugaguccucaguuu

SEQ ID NO: 282767 - RNA, 19 nt, Artificial Sequence
  Description of Artificial Sequence: Synthetic oligonucleotide
  Antisense strand to SEQ ID NO: 282766
aaacugaggacucagcuca

SEQ ID NO: 282768 - RNA, 19 nt, Artificial Sequence
  Description of Artificial Sequence: Synthetic oligonucleotide
  Sense strand starting at position 3973 of SEQ ID NO: 3631
ggcagcagguccuugagau

SEQ ID NO: 282769 - RNA, 19 nt, Artificial Sequence
  Description of Artificial Sequence: Synthetic oligonucleotide
  Antisense strand to SEQ ID NO: 282768
aucucaaggaccugcugcc

SEQ ID NO: 282770 - RNA, 19 nt, Artificial Sequence
  Description of Artificial Sequence: Synthetic oligonucleotide
  Sense strand starting at position 3974 of SEQ ID NO: 3631
gcagcagguccuugagaua

SEQ ID NO: 282771 - RNA, 19 nt, Artificial Sequence
  Description of Artificial Sequence: Synthetic oligonucleotide
  Antisense strand to SEQ ID NO: 282770
uaucucaaggaccugcugc

SEQ ID NO: 282772 - RNA, 19 nt, Artificial Sequence
  Description of Artificial Sequence: Synthetic oligonucleotide
  Sense strand starting at position 58 of SEQ ID NO: 3632
cauugaagccuggaagugu

SEQ ID NO: 282773 - RNA, 19 nt, Artificial Sequence
  Description of Artificial Sequence: Synthetic oligonucleotide
  Antisense strand to SEQ ID NO: 282772
acacuuccaggcuucaaug

SEQ ID NO: 282774 - RNA, 19 nt, Artificial Sequence
  Description of Artificial Sequence: Synthetic oligonucleotide
  Sense strand starting at position 232 of SEQ ID NO: 3632
ucuuccagaucagugagau

SEQ ID NO: 282775 - RNA, 19 nt, Artificial Sequence
  Description of Artificial Sequence: Synthetic oligonucleotide
  Antisense strand to SEQ ID NO: 282774
aucucacugaucuggaaga

SEQ ID NO: 282776 - RNA, 19 nt, Artificial Sequence
  Description of Artificial Sequence: Synthetic oligonucleotide
  Sense strand starting at position 233 of SEQ ID NO: 3632
cuuccagaucagugagaua

SEQ ID NO: 282777 - RNA, 19 nt, Artificial Sequence
  Description of Artificial Sequence: Synthetic oligonucleotide
  Antisense strand to SEQ ID NO: 282776
uaucucacugaucuggaag

SEQ ID NO: 282778 - RNA, 19 nt, Artificial Sequence
  Description of Artificial Sequence: Synthetic oligonucleotide
  Sense strand starting at position 283 of SEQ ID NO: 3632
uguaguuaccaugagccau

SEQ ID NO: 282779 - RNA, 19 nt, Artificial Sequence
  Description of Artificial Sequence: Synthetic oligonucleotide
  Antisense strand to SEQ ID NO: 282778
auggcucaugguaacuaca

SEQ ID NO: 282780 - RNA, 19 nt, Artificial Sequence
  Description of Artificial Sequence: Synthetic oligonucleotide
  Sense strand starting at position 303 of SEQ ID NO: 3632
cuggacaggucuuuagaaa

SEQ ID NO: 282781 - RNA, 19 nt, Artificial Sequence
  Description of Artificial Sequence: Synthetic oligonucleotide
  Antisense strand to SEQ ID NO: 282780
uuucuaaagaccuguccag

SEQ ID NO: 282782 - RNA, 19 nt, Artificial Sequence
  Description of Artificial Sequence: Synthetic oligonucleotide
  Sense strand starting at position 338 of SEQ ID NO: 3632
cagucaaauggaugucuaa

SEQ ID NO: 282783 - RNA, 19 nt, Artificial Sequence
  Description of Artificial Sequence: Synthetic oligonucleotide
  Antisense strand to SEQ ID NO: 282782
uuagacauccauuugacug

SEQ ID NO: 282784 - RNA, 19 nt, Artificial Sequence
  Description of Artificial Sequence: Synthetic oligonucleotide
  Sense strand starting at position 345 of SEQ ID NO: 3632
auggaugucuaauaauuuc

SEQ ID NO: 282785 - RNA, 19 nt, Artificial Sequence
  Description of Artificial Sequence: Synthetic oligonucleotide
  Antisense strand to SEQ ID NO: 282784
gaaauuauuagacauccau

SEQ ID NO: 282786 - RNA, 19 nt, Artificial Sequence
  Description of Artificial Sequence: Synthetic oligonucleotide
  Sense strand starting at position 409 of SEQ ID NO: 3632
gagaaagccuccuuaagga

SEQ ID NO: 282787 - RNA, 19 nt, Artificial Sequence
  Description of Artificial Sequence: Synthetic oligonucleotide
  Antisense strand to SEQ ID NO: 282786
uccuuaaggaggcuuucuc

SEQ ID NO: 282788 - RNA, 19 nt, Artificial Sequence
  Description of Artificial Sequence: Synthetic oligonucleotide
  Sense strand starting at position 620 of SEQ ID NO: 3632
cggaaugugggcgagacau

SEQ ID NO: 282789 - RNA, 19 nt, Artificial Sequence
  Description of Artificial Sequence: Synthetic oligonucleotide
  Antisense strand to SEQ ID NO: 282788
augucucgcccacauuccg

SEQ ID NO: 282790 - RNA, 19 nt, Artificial Sequence
  Description of Artificial Sequence: Synthetic oligonucleotide
  Sense strand starting at position 632 of SEQ ID NO: 3632
gagacaucuccgcaaggcu

SEQ ID NO: 282791 - RNA, 19 nt, Artificial Sequence
  Description of Artificial Sequence: Synthetic oligonucleotide
  Antisense strand to SEQ ID NO: 282790
agccuugcggagaugucuc

SEQ ID NO: 282792 - RNA, 19 nt, Artificial Sequence
  Description of Artificial Sequence: Synthetic oligonucleotide
  Sense strand starting at position 771 of SEQ ID NO: 3632
aggaguuugcgcucucuuc

SEQ ID NO: 282793 - RNA, 19 nt, Artificial Sequence
  Description of Artificial Sequence: Synthetic oligonucleotide
  Antisense strand to SEQ ID NO: 282792
gaagagagcgcaaacuccu

SEQ ID NO: 282794 - RNA, 19 nt, Artificial Sequence
  Description of Artificial Sequence: Synthetic oligonucleotide
  Sense strand starting at position 1483 of SEQ ID NO: 3632
ccaagucucagugaaggua

SEQ ID NO: 282795 - RNA, 19 nt, Artificial Sequence
  Description of Artificial Sequence: Synthetic oligonucleotide
  Antisense strand to SEQ ID NO: 282794
uaccuucacugagacuugg

SEQ ID NO: 282796 - RNA, 19 nt, Artificial Sequence
  Description of Artificial Sequence: Synthetic oligonucleotide
  Sense strand starting at position 1746 of SEQ ID NO: 3632
acggauggcacguaagaua

SEQ ID NO: 282797 - RNA, 19 nt, Artificial Sequence
  Description of Artificial Sequence: Synthetic oligonucleotide
  Antisense strand to SEQ ID NO: 282796
uaucuuacgugccauccgu

SEQ ID NO: 282798 - RNA, 19 nt, Artificial Sequence
  Description of Artificial Sequence: Synthetic oligonucleotide
  Sense strand starting at position 1805 of SEQ ID NO: 3632
aaauaugaacagcgaugaa

SEQ ID NO: 282799 - RNA, 19 nt, Artificial Sequence
  Description of Artificial Sequence: Synthetic oligonucleotide
  Antisense strand to SEQ ID NO: 282798
uucaucgcuguucauauuu

SEQ ID NO: 282800 - RNA, 19 nt, Artificial Sequence
  Description of Artificial Sequence: Synthetic oligonucleotide
  Sense strand starting at position 1899 of SEQ ID NO: 3632
agaaaucauauagguucga

SEQ ID NO: 282801 - RNA, 19 nt, Artificial Sequence
  Description of Artificial Sequence: Synthetic oligonucleotide
  Antisense strand to SEQ ID NO: 282800
ucgaaccuauaugauuucu

SEQ ID NO: 282802 - RNA, 19 nt, Artificial Sequence
  Description of Artificial Sequence: Synthetic oligonucleotide
  Sense strand starting at position 1900 of SEQ ID NO: 3632
gaaaucauauagguucgau

SEQ ID NO: 282803 - RNA, 19 nt, Artificial Sequence
  Description of Artificial Sequence: Synthetic oligonucleotide
  Antisense strand to SEQ ID NO: 282802
aucgaaccuauaugauuuc

SEQ ID NO: 282804 - RNA, 19 nt, Artificial Sequence
  Description of Artificial Sequence: Synthetic oligonucleotide
  Sense strand starting at position 2334 of SEQ ID NO: 3632
uguaguaacuaacuagcua

SEQ ID NO: 282805 - RNA, 19 nt, Artificial Sequence
  Description of Artificial Sequence: Synthetic oligonucleotide
  Antisense strand to SEQ ID NO: 282804
uagcuaguuaguuacuaca

SEQ ID NO: 282806 - RNA, 19 nt, Artificial Sequence
  Description of Artificial Sequence: Synthetic oligonucleotide
  Sense strand starting at position 2527 of SEQ ID NO: 3632
accuaaggguuuguauagu

SEQ ID NO: 282807 - RNA, 19 nt, Artificial Sequence
  Description of Artificial Sequence: Synthetic oligonucleotide
  Antisense strand to SEQ ID NO: 282806
acuauacaaacccuuaggu

SEQ ID NO: 282808 - RNA, 19 nt, Artificial Sequence
  Description of Artificial Sequence: Synthetic oligonucleotide
  Sense strand starting at position 2600 of SEQ ID NO: 3632
aggguaauaguuugaguuu

SEQ ID NO: 282809 - RNA, 19 nt, Artificial Sequence
  Description of Artificial Sequence: Synthetic oligonucleotide
  Antisense strand to SEQ ID NO: 282808
aaacucaaacuauuacccu

SEQ ID NO: 282810 - RNA, 19 nt, Artificial Sequence
  Description of Artificial Sequence: Synthetic oligonucleotide
  Sense strand starting at position 2717 of SEQ ID NO: 3632
ucucuuaguccugggauau

SEQ ID NO: 282811 - RNA, 19 nt, Artificial Sequence
  Description of Artificial Sequence: Synthetic oligonucleotide
  Antisense strand to SEQ ID NO: 282810
auaucccaggacuaagaga

SEQ ID NO: 282812 - RNA, 19 nt, Artificial Sequence
  Description of Artificial Sequence: Synthetic oligonucleotide
  Sense strand starting at position 2718 of SEQ ID NO: 3632
cucuuaguccugggauaug

SEQ ID NO: 282813 - RNA, 19 nt, Artificial Sequence
  Description of Artificial Sequence: Synthetic oligonucleotide
  Antisense strand to SEQ ID NO: 282812
cauaucccaggacuaagag

SEQ ID NO: 282814 - RNA, 19 nt, Artificial Sequence
  Description of Artificial Sequence: Synthetic oligonucleotide
  Sense strand starting at position 2888 of SEQ ID NO: 3632
ucacuagguuccuugaaau

SEQ ID NO: 282815 - RNA, 19 nt, Artificial Sequence
  Description of Artificial Sequence: Synthetic oligonucleotide
  Antisense strand to SEQ ID NO: 282814
auuucaaggaaccuaguga

SEQ ID NO: 282816 - RNA, 19 nt, Artificial Sequence
  Description of Artificial Sequence: Synthetic oligonucleotide
  Sense strand starting at position 2919 of SEQ ID NO: 3632
aagugccauuuagaagaua

SEQ ID NO: 282817 - RNA, 19 nt, Artificial Sequence
  Description of Artificial Sequence: Synthetic oligonucleotide
  Antisense strand to SEQ ID NO: 282816
uaucuucuaaauggcacuu

SEQ ID NO: 282818 - RNA, 19 nt, Artificial Sequence
  Description of Artificial Sequence: Synthetic oligonucleotide
  Sense strand starting at position 3089 of SEQ ID NO: 3632
agcuguuucccuguguacu

SEQ ID NO: 282819 - RNA, 19 nt, Artificial Sequence
  Description of Artificial Sequence: Synthetic oligonucleotide
  Antisense strand to SEQ ID NO: 282818
aguacacagggaaacagcu

SEQ ID NO: 282820 - RNA, 19 nt, Artificial Sequence
  Description of Artificial Sequence: Synthetic oligonucleotide
  Sense strand starting at position 3107 of SEQ ID NO: 3632
ugcagugaacucugaagua

SEQ ID NO: 282821 - RNA, 19 nt, Artificial Sequence
  Description of Artificial Sequence: Synthetic oligonucleotide
  Antisense strand to SEQ ID NO: 282820
uacuucagaguucacugca

SEQ ID NO: 282822 - RNA, 19 nt, Artificial Sequence
  Description of Artificial Sequence: Synthetic oligonucleotide
  Sense strand starting at position 3141 of SEQ ID NO: 3632
ccuauacauguauaaguca

SEQ ID NO: 282823 - RNA, 19 nt, Artificial Sequence
  Description of Artificial Sequence: Synthetic oligonucleotide
  Antisense strand to SEQ ID NO: 282822
ugacuuauacauguauagg

SEQ ID NO: 282824 - RNA, 19 nt, Artificial Sequence
  Description of Artificial Sequence: Synthetic oligonucleotide
  Sense strand starting at position 3150 of SEQ ID NO: 3632
guauaagucacuuggugga

SEQ ID NO: 282825 - RNA, 19 nt, Artificial Sequence
  Description of Artificial Sequence: Synthetic oligonucleotide
  Antisense strand to SEQ ID NO: 282824
uccaccaagugacuuauac

SEQ ID NO: 282826 - RNA, 19 nt, Artificial Sequence
  Description of Artificial Sequence: Synthetic oligonucleotide
  Sense strand starting at position 3184 of SEQ ID NO: 3632
gacuauacucccuguaggu

SEQ ID NO: 282827 - RNA, 19 nt, Artificial Sequence
  Description of Artificial Sequence: Synthetic oligonucleotide
  Antisense strand to SEQ ID NO: 282826
accuacagggaguauaguc

SEQ ID NO: 282828 - RNA, 19 nt, Artificial Sequence
  Description of Artificial Sequence: Synthetic oligonucleotide
  Sense strand starting at position 3186 of SEQ ID NO: 3632
cuauacucccuguagguuu

SEQ ID NO: 282829 - RNA, 19 nt, Artificial Sequence
  Description of Artificial Sequence: Synthetic oligonucleotide
  Antisense strand to SEQ ID NO: 282828
aaaccuacagggaguauag

SEQ ID NO: 282830 - RNA, 19 nt, Artificial Sequence
  Description of Artificial Sequence: Synthetic oligonucleotide
  Sense strand starting at position 3317 of SEQ ID NO: 3632
acuagagguuuaucugguu

SEQ ID NO: 282831 - RNA, 19 nt, Artificial Sequence
  Description of Artificial Sequence: Synthetic oligonucleotide
  Antisense strand to SEQ ID NO: 282830
aaccagauaaaccucuagu

SEQ ID NO: 282832 - RNA, 19 nt, Artificial Sequence
  Description of Artificial Sequence: Synthetic oligonucleotide
  Sense strand starting at position 3330 of SEQ ID NO: 3632
cugguugucacugauuaug

SEQ ID NO: 282833 - RNA, 19 nt, Artificial Sequence
  Description of Artificial Sequence: Synthetic oligonucleotide
  Antisense strand to SEQ ID NO: 282832
cauaaucagugacaaccag

SEQ ID NO: 282834 - RNA, 19 nt, Artificial Sequence
  Description of Artificial Sequence: Synthetic oligonucleotide
  Sense strand starting at position 3341 of SEQ ID NO: 3632
ugauuauguacuggacaug

SEQ ID NO: 282835 - RNA, 19 nt, Artificial Sequence
  Description of Artificial Sequence: Synthetic oligonucleotide
  Antisense strand to SEQ ID NO: 282834
cauguccaguacauaauca

SEQ ID NO: 282836 - RNA, 19 nt, Artificial Sequence
  Description of Artificial Sequence: Synthetic oligonucleotide
  Sense strand starting at position 3419 of SEQ ID NO: 3632
ugcuuugugaaguauaaug

SEQ ID NO: 282837 - RNA, 19 nt, Artificial Sequence
  Description of Artificial Sequence: Synthetic oligonucleotide
  Antisense strand to SEQ ID NO: 282836
cauuauacuucacaaagca

SEQ ID NO: 282838 - RNA, 19 nt, Artificial Sequence
  Description of Artificial Sequence: Synthetic oligonucleotide
  Sense strand starting at position 3427 of SEQ ID NO: 3632
gaaguauaaugcuccugga

SEQ ID NO: 282839 - RNA, 19 nt, Artificial Sequence
  Description of Artificial Sequence: Synthetic oligonucleotide
  Antisense strand to SEQ ID NO: 282838
uccaggagcauuauacuuc

SEQ ID NO: 282840 - RNA, 19 nt, Artificial Sequence
  Description of Artificial Sequence: Synthetic oligonucleotide
  Sense strand starting at position 3450 of SEQ ID NO: 3632
gggaaauauuggucuuugg

SEQ ID NO: 282841 - RNA, 19 nt, Artificial Sequence
  Description of Artificial Sequence: Synthetic oligonucleotide
  Antisense strand to SEQ ID NO: 282840
ccaaagaccaauauuuccc

SEQ ID NO: 282842 - RNA, 19 nt, Artificial Sequence
  Description of Artificial Sequence: Synthetic oligonucleotide
  Sense strand starting at position 3523 of SEQ ID NO: 3632
ccaggagaauggcuaucaa

SEQ ID NO: 282843 - RNA, 19 nt, Artificial Sequence
  Description of Artificial Sequence: Synthetic oligonucleotide
  Antisense strand to SEQ ID NO: 282842
uugauagccauucuccugg

SEQ ID NO: 282844 - RNA, 19 nt, Artificial Sequence
  Description of Artificial Sequence: Synthetic oligonucleotide
  Sense strand starting at position 3624 of SEQ ID NO: 3632
ucagaagacuuagcagguu

SEQ ID NO: 282845 - RNA, 19 nt, Artificial Sequence
  Description of Artificial Sequence: Synthetic oligonucleotide
  Antisense strand to SEQ ID NO: 282844
aaccugcuaagucuucuga

SEQ ID NO: 282846 - RNA, 19 nt, Artificial Sequence
  Description of Artificial Sequence: Synthetic oligonucleotide
  Sense strand starting at position 3675 of SEQ ID NO: 3632
ggaacuuucuuucccaaga

SEQ ID NO: 282847 - RNA, 19 nt, Artificial Sequence
  Description of Artificial Sequence: Synthetic oligonucleotide
  Antisense strand to SEQ ID NO: 282846
ucuugggaaagaaaguucc

SEQ ID NO: 282848 - RNA, 19 nt, Artificial Sequence
  Description of Artificial Sequence: Synthetic oligonucleotide
  Sense strand starting at position 3882 of SEQ ID NO: 3632
cuguucuggcuuuacauau

SEQ ID NO: 282849 - RNA, 19 nt, Artificial Sequence
  Description of Artificial Sequence: Synthetic oligonucleotide
  Antisense strand to SEQ ID NO: 282848
auauguaaagccagaacag

SEQ ID NO: 282850 - RNA, 19 nt, Artificial Sequence
  Description of Artificial Sequence: Synthetic oligonucleotide
  Sense strand starting at position 3943 of SEQ ID NO: 3632
agacaagccugcuuaaaga

SEQ ID NO: 282851 - RNA, 19 nt, Artificial Sequence
  Description of Artificial Sequence: Synthetic oligonucleotide
  Antisense strand to SEQ ID NO: 282850
ucuuuaagcaggcuugucu

SEQ ID NO: 282852 - RNA, 19 nt, Artificial Sequence
  Description of Artificial Sequence: Synthetic oligonucleotide
  Sense strand starting at position 28 of SEQ ID NO: 3633
uggaauagcugggucuuau

SEQ ID NO: 282853 - RNA, 19 nt, Artificial Sequence
  Description of Artificial Sequence: Synthetic oligonucleotide
  Antisense strand to SEQ ID NO: 282852
auaagacccagcuauucca

SEQ ID NO: 282854 - RNA, 19 nt, Artificial Sequence
  Description of Artificial Sequence: Synthetic oligonucleotide
  Sense strand starting at position 264 of SEQ ID NO: 3633
aacugagaucugggauguu

SEQ ID NO: 282855 - RNA, 19 nt, Artificial Sequence
  Description of Artificial Sequence: Synthetic oligonucleotide
  Antisense strand to SEQ ID NO: 282854
aacaucccagaucucaguu

SEQ ID NO: 282856 - RNA, 19 nt, Artificial Sequence
  Description of Artificial Sequence: Synthetic oligonucleotide
  Sense strand starting at position 267 of SEQ ID NO: 3633
ugagaucugggauguuuca

SEQ ID NO: 282857 - RNA, 19 nt, Artificial Sequence
  Description of Artificial Sequence: Synthetic oligonucleotide
  Antisense strand to SEQ ID NO: 282856
ugaaacaucccagaucuca

SEQ ID NO: 282858 - RNA, 19 nt, Artificial Sequence
  Description of Artificial Sequence: Synthetic oligonucleotide
  Sense strand starting at position 552 of SEQ ID NO: 3633
guucgagagccuugacaac

SEQ ID NO: 282859 - RNA, 19 nt, Artificial Sequence
  Description of Artificial Sequence: Synthetic oligonucleotide
  Antisense strand to SEQ ID NO: 282858
guugucaaggcucucgaac

SEQ ID NO: 282860 - RNA, 19 nt, Artificial Sequence
  Description of Artificial Sequence: Synthetic oligonucleotide
  Sense strand starting at position 699 of SEQ ID NO: 3633
gcacucuagcauggacaau

SEQ ID NO: 282861 - RNA, 19 nt, Artificial Sequence
  Description of Artificial Sequence: Synthetic oligonucleotide
  Antisense strand to SEQ ID NO: 282860
auuguccaugcuagagugc

SEQ ID NO: 282862 - RNA, 19 nt, Artificial Sequence
  Description of Artificial Sequence: Synthetic oligonucleotide
  Sense strand starting at position 865 of SEQ ID NO: 3633
augguuaugcagcaaauua

SEQ ID NO: 282863 - RNA, 19 nt, Artificial Sequence
  Description of Artificial Sequence: Synthetic oligonucleotide
  Antisense strand to SEQ ID NO: 282862
uaauuugcugcauaaccau

SEQ ID NO: 282864 - RNA, 19 nt, Artificial Sequence
  Description of Artificial Sequence: Synthetic oligonucleotide
  Sense strand starting at position 964 of SEQ ID NO: 3633
uguguagcaagauaugaca

SEQ ID NO: 282865 - RNA, 19 nt, Artificial Sequence
  Description of Artificial Sequence: Synthetic oligonucleotide
  Antisense strand to SEQ ID NO: 282864
ugucauaucuugcuacaca

SEQ ID NO: 282866 - RNA, 19 nt, Artificial Sequence
  Description of Artificial Sequence: Synthetic oligonucleotide
  Sense strand starting at position 1024 of SEQ ID NO: 3633
ucaaacaggugauccauua

SEQ ID NO: 282867 - RNA, 19 nt, Artificial Sequence
  Description of Artificial Sequence: Synthetic oligonucleotide
  Antisense strand to SEQ ID NO: 282866
uaauggaucaccuguuuga

SEQ ID NO: 282868 - RNA, 19 nt, Artificial Sequence
  Description of Artificial Sequence: Synthetic oligonucleotide
  Sense strand starting at position 1193 of SEQ ID NO: 3633
ccaugcaaagccuguuaaa

SEQ ID NO: 282869 - RNA, 19 nt, Artificial Sequence
  Description of Artificial Sequence: Synthetic oligonucleotide
  Antisense strand to SEQ ID NO: 282868
uuuaacaggcuuugcaugg

SEQ ID NO: 282870 - RNA, 19 nt, Artificial Sequence
  Description of Artificial Sequence: Synthetic oligonucleotide
  Sense strand starting at position 1464 of SEQ ID NO: 3633
gacaguguugcacacuaaa

SEQ ID NO: 282871 - RNA, 19 nt, Artificial Sequence
  Description of Artificial Sequence: Synthetic oligonucleotide
  Antisense strand to SEQ ID NO: 282870
uuuagugugcaacacuguc

SEQ ID NO: 282872 - RNA, 19 nt, Artificial Sequence
  Description of Artificial Sequence: Synthetic oligonucleotide
  Sense strand starting at position 1630 of SEQ ID NO: 3633
ccugcuaccuuguuugaga

SEQ ID NO: 282873 - RNA, 19 nt, Artificial Sequence
  Description of Artificial Sequence: Synthetic oligonucleotide
  Antisense strand to SEQ ID NO: 282872
ucucaaacaagguagcagg

SEQ ID NO: 282874 - RNA, 19 nt, Artificial Sequence
  Description of Artificial Sequence: Synthetic oligonucleotide
  Sense strand starting at position 1695 of SEQ ID NO: 3633
guuugacaucuucggagaa

SEQ ID NO: 282875 - RNA, 19 nt, Artificial Sequence
  Description of Artificial Sequence: Synthetic oligonucleotide
  Antisense strand to SEQ ID NO: 282874
uucuccgaagaugucaaac

SEQ ID NO: 282876 - RNA, 19 nt, Artificial Sequence
  Description of Artificial Sequence: Synthetic oligonucleotide
  Sense strand starting at position 1723 of SEQ ID NO: 3633
ggagcugccagagaauagu

SEQ ID NO: 282877 - RNA, 19 nt, Artificial Sequence
  Description of Artificial Sequence: Synthetic oligonucleotide
  Antisense strand to SEQ ID NO: 282876
acuauucucuggcagcucc

SEQ ID NO: 282878 - RNA, 19 nt, Artificial Sequence
  Description of Artificial Sequence: Synthetic oligonucleotide
  Sense strand starting at position 1912 of SEQ ID NO: 3633
ggcagcuuugagcacugau

SEQ ID NO: 282879 - RNA, 19 nt, Artificial Sequence
  Description of Artificial Sequence: Synthetic oligonucleotide
  Antisense strand to SEQ ID NO: 282878
aucagugcucaaagcugcc

SEQ ID NO: 282880 - RNA, 19 nt, Artificial Sequence
  Description of Artificial Sequence: Synthetic oligonucleotide
  Sense strand starting at position 1915 of SEQ ID NO: 3633
agcuuugagcacugauuaa

SEQ ID NO: 282881 - RNA, 19 nt, Artificial Sequence
  Description of Artificial Sequence: Synthetic oligonucleotide
  Antisense strand to SEQ ID NO: 282880
uuaaucagugcucaaagcu

SEQ ID NO: 282882 - RNA, 19 nt, Artificial Sequence
  Description of Artificial Sequence: Synthetic oligonucleotide
  Sense strand starting at position 2132 of SEQ ID NO: 3633
gugagaacgcguuaacacu

SEQ ID NO: 282883 - RNA, 19 nt, Artificial Sequence
  Description of Artificial Sequence: Synthetic oligonucleotide
  Antisense strand to SEQ ID NO: 282882
aguguuaacgcguucucac

SEQ ID NO: 282884 - RNA, 19 nt, Artificial Sequence
  Description of Artificial Sequence: Synthetic oligonucleotide
  Sense strand starting at position 2208 of SEQ ID NO: 3633
gagaaugugauccggugga

SEQ ID NO: 282885 - RNA, 19 nt, Artificial Sequence
  Description of Artificial Sequence: Synthetic oligonucleotide
  Antisense strand to SEQ ID NO: 282884
uccaccggaucacauucuc

SEQ ID NO: 282886 - RNA, 19 nt, Artificial Sequence
  Description of Artificial Sequence: Synthetic oligonucleotide
  Sense strand starting at position 2212 of SEQ ID NO: 3633
augugauccgguggaaauu

SEQ ID NO: 282887 - RNA, 19 nt, Artificial Sequence
  Description of Artificial Sequence: Synthetic oligonucleotide
  Antisense strand to SEQ ID NO: 282886
aauuuccaccggaucacau

SEQ ID NO: 282888 - RNA, 19 nt, Artificial Sequence
  Description of Artificial Sequence: Synthetic oligonucleotide
  Sense strand starting at position 2213 of SEQ ID NO: 3633
ugugauccgguggaaauua

SEQ ID NO: 282889 - RNA, 19 nt, Artificial Sequence
  Description of Artificial Sequence: Synthetic oligonucleotide
  Antisense strand to SEQ ID NO: 282888
uaauuuccaccggaucaca

SEQ ID NO: 282890 - RNA, 19 nt, Artificial Sequence
  Description of Artificial Sequence: Synthetic oligonucleotide
  Sense strand starting at position 2249 of SEQ ID NO: 3633
aaggccgagaguuguaaga

SEQ ID NO: 282891 - RNA, 19 nt, Artificial Sequence
  Description of Artificial Sequence: Synthetic oligonucleotide
  Antisense strand to SEQ ID NO: 282890
ucuuacaacucucggccuu

SEQ ID NO: 282892 - RNA, 19 nt, Artificial Sequence
  Description of Artificial Sequence: Synthetic oligonucleotide
  Sense strand starting at position 2648 of SEQ ID NO: 3633
uuuaaauuccuaugcagag

SEQ ID NO: 282893 - RNA, 19 nt, Artificial Sequence
  Description of Artificial Sequence: Synthetic oligonucleotide
  Antisense strand to SEQ ID NO: 282892
cucugcauaggaauuuaaa

SEQ ID NO: 282894 - RNA, 19 nt, Artificial Sequence
  Description of Artificial Sequence: Synthetic oligonucleotide
  Sense strand starting at position 2649 of SEQ ID NO: 3633
uuaaauuccuaugcagaga

SEQ ID NO: 282895 - RNA, 19 nt, Artificial Sequence
  Description of Artificial Sequence: Synthetic oligonucleotide
  Antisense strand to SEQ ID NO: 282894
ucucugcauaggaauuuaa

SEQ ID NO: 282896 - RNA, 19 nt, Artificial Sequence
  Description of Artificial Sequence: Synthetic oligonucleotide
  Sense strand starting at position 2677 of SEQ ID NO: 3633
ccagcaagcaguugaagaa

SEQ ID NO: 282897 - RNA, 19 nt, Artificial Sequence
  Description of Artificial Sequence: Synthetic oligonucleotide
  Antisense strand to SEQ ID NO: 282896
uucuucaacugcuugcugg

SEQ ID NO: 282898 - RNA, 19 nt, Artificial Sequence
  Description of Artificial Sequence: Synthetic oligonucleotide
  Sense strand starting at position 2678 of SEQ ID NO: 3633
cagcaagcaguugaagaau

SEQ ID NO: 282899 - RNA, 19 nt, Artificial Sequence
  Description of Artificial Sequence: Synthetic oligonucleotide
  Antisense strand to SEQ ID NO: 282898
auucuucaacugcuugcug

SEQ ID NO: 282900 - RNA, 19 nt, Artificial Sequence
  Description of Artificial Sequence: Synthetic oligonucleotide
  Sense strand starting at position 2782 of SEQ ID NO: 3633
guccaacuaucaggaauuu

SEQ ID NO: 282901 - RNA, 19 nt, Artificial Sequence
  Description of Artificial Sequence: Synthetic oligonucleotide
  Antisense strand to SEQ ID NO: 282900
aaauuccugauaguuggac

SEQ ID NO: 282902 - RNA, 19 nt, Artificial Sequence
  Description of Artificial Sequence: Synthetic oligonucleotide
  Sense strand starting at position 2805 of SEQ ID NO: 3633
uugaguacuuccuuguuua

SEQ ID NO: 282903 - RNA, 19 nt, Artificial Sequence
  Description of Artificial Sequence: Synthetic oligonucleotide
  Antisense strand to SEQ ID NO: 282902
uaaacaaggaaguacucaa

SEQ ID NO: 282904 - RNA, 19 nt, Artificial Sequence
  Description of Artificial Sequence: Synthetic oligonucleotide
  Sense strand starting at position 2806 of SEQ ID NO: 3633
ugaguacuuccuuguuuaa

SEQ ID NO: 282905 - RNA, 19 nt, Artificial Sequence
  Description of Artificial Sequence: Synthetic oligonucleotide
  Antisense strand to SEQ ID NO: 282904
uuaaacaaggaaguacuca

SEQ ID NO: 282906 - RNA, 19 nt, Artificial Sequence
  Description of Artificial Sequence: Synthetic oligonucleotide
  Sense strand starting at position 2808 of SEQ ID NO: 3633
aguacuuccuuguuuaaug

SEQ ID NO: 282907 - RNA, 19 nt, Artificial Sequence
  Description of Artificial Sequence: Synthetic oligonucleotide
  Antisense strand to SEQ ID NO: 282906
cauuaaacaaggaaguacu

SEQ ID NO: 282908 - RNA, 19 nt, Artificial Sequence
  Description of Artificial Sequence: Synthetic oligonucleotide
  Sense strand starting at position 3196 of SEQ ID NO: 3633
gagguauucuuccucucag

SEQ ID NO: 282909 - RNA, 19 nt, Artificial Sequence
  Description of Artificial Sequence: Synthetic oligonucleotide
  Antisense strand to SEQ ID NO: 282908
cugagaggaagaauaccuc

SEQ ID NO: 282910 - RNA, 19 nt, Artificial Sequence
  Description of Artificial Sequence: Synthetic oligonucleotide
  Sense strand starting at position 3197 of SEQ ID NO: 3633
agguauucuuccucucagu

SEQ ID NO: 282911 - RNA, 19 nt, Artificial Sequence
  Description of Artificial Sequence: Synthetic oligonucleotide
  Antisense strand to SEQ ID NO: 282910
acugagaggaagaauaccu

SEQ ID NO: 282912 - RNA, 19 nt, Artificial Sequence
  Description of Artificial Sequence: Synthetic oligonucleotide
  Sense strand starting at position 3318 of SEQ ID NO: 3633
gugaacuaugauugucagu

SEQ ID NO: 282913 - RNA, 19 nt, Artificial Sequence
  Description of Artificial Sequence: Synthetic oligonucleotide
  Antisense strand to SEQ ID NO: 282912
acugacaaucauaguucac

SEQ ID NO: 282914 - RNA, 19 nt, Artificial Sequence
  Description of Artificial Sequence: Synthetic oligonucleotide
  Sense strand starting at position 3320 of SEQ ID NO: 3633
gaacuaugauugucaguug

SEQ ID NO: 282915 - RNA, 19 nt, Artificial Sequence
  Description of Artificial Sequence: Synthetic oligonucleotide
  Antisense strand to SEQ ID NO: 282914
caacugacaaucauaguuc

SEQ ID NO: 282916 - RNA, 19 nt, Artificial Sequence
  Description of Artificial Sequence: Synthetic oligonucleotide
  Sense strand starting at position 3383 of SEQ ID NO: 3633
agacauuccggauguccaa

SEQ ID NO: 282917 - RNA, 19 nt, Artificial Sequence
  Description of Artificial Sequence: Synthetic oligonucleotide
  Antisense strand to SEQ ID NO: 282916
uuggacauccggaaugucu

SEQ ID NO: 282918 - RNA, 19 nt, Artificial Sequence
  Description of Artificial Sequence: Synthetic oligonucleotide
  Sense strand starting at position 3450 of SEQ ID NO: 3633
agcaaugucagaugaaaga

SEQ ID NO: 282919 - RNA, 19 nt, Artificial Sequence
  Description of Artificial Sequence: Synthetic oligonucleotide
  Antisense strand to SEQ ID NO: 282918
ucuuucaucugacauugcu

SEQ ID NO: 282920 - RNA, 19 nt, Artificial Sequence
  Description of Artificial Sequence: Synthetic oligonucleotide
  Sense strand starting at position 3469 of SEQ ID NO: 3633
cuuagaauugcccaaacug

SEQ ID NO: 282921 - RNA, 19 nt, Artificial Sequence
  Description of Artificial Sequence: Synthetic oligonucleotide
  Antisense strand to SEQ ID NO: 282920
caguuugggcaauucuaag

SEQ ID NO: 282922 - RNA, 19 nt, Artificial Sequence
  Description of Artificial Sequence: Synthetic oligonucleotide
  Sense strand starting at position 3505 of SEQ ID NO: 3633
ugcacaguauugcugauaa

SEQ ID NO: 282923 - RNA, 19 nt, Artificial Sequence
  Description of Artificial Sequence: Synthetic oligonucleotide
  Antisense strand to SEQ ID NO: 282922
uuaucagcaauacugugca

SEQ ID NO: 282924 - RNA, 19 nt, Artificial Sequence
  Description of Artificial Sequence: Synthetic oligonucleotide
  Sense strand starting at position 3611 of SEQ ID NO: 3633
gugugugaggccuaaacaa

SEQ ID NO: 282925 - RNA, 19 nt, Artificial Sequence
  Description of Artificial Sequence: Synthetic oligonucleotide
  Antisense strand to SEQ ID NO: 282924
uuguuuaggccucacacac

SEQ ID NO: 282926 - RNA, 19 nt, Artificial Sequence
  Description of Artificial Sequence: Synthetic oligonucleotide
  Sense strand starting at position 3710 of SEQ ID NO: 3633
guaacuccauugucagaaa

SEQ ID NO: 282927 - RNA, 19 nt, Artificial Sequence
  Description of Artificial Sequence: Synthetic oligonucleotide
  Antisense strand to SEQ ID NO: 282926
uuucugacaauggaguuac

SEQ ID NO: 282928 - RNA, 19 nt, Artificial Sequence
  Description of Artificial Sequence: Synthetic oligonucleotide
  Sense strand starting at position 3825 of SEQ ID NO: 3633
gguaguaagagguaagcau

SEQ ID NO: 282929 - RNA, 19 nt, Artificial Sequence
  Description of Artificial Sequence: Synthetic oligonucleotide
  Antisense strand to SEQ ID NO: 282928
augcuuaccucuuacuacc

SEQ ID NO: 282930 - RNA, 19 nt, Artificial Sequence
  Description of Artificial Sequence: Synthetic oligonucleotide
  Sense strand starting at position 3837 of SEQ ID NO: 3633
uaagcauuuggcugaggca

SEQ ID NO: 282931 - RNA, 19 nt, Artificial Sequence
  Description of Artificial Sequence: Synthetic oligonucleotide
  Antisense strand to SEQ ID NO: 282930
ugccucagccaaaugcuua

SEQ ID NO: 282932 - RNA, 19 nt, Artificial Sequence
  Description of Artificial Sequence: Synthetic oligonucleotide
  Sense strand starting at position 43 of SEQ ID NO: 3634
uuuguagggccagaaaucu

SEQ ID NO: 282933 - RNA, 19 nt, Artificial Sequence
  Description of Artificial Sequence: Synthetic oligonucleotide
  Antisense strand to SEQ ID NO: 282932
agauuucuggcccuacaaa

SEQ ID NO: 282934 - RNA, 19 nt, Artificial Sequence
  Description of Artificial Sequence: Synthetic oligonucleotide
  Sense strand starting at position 86 of SEQ ID NO: 3634
cugucuuuccacuacagca

SEQ ID NO: 282935 - RNA, 19 nt, Artificial Sequence
  Description of Artificial Sequence: Synthetic oligonucleotide
  Antisense strand to SEQ ID NO: 282934
ugcuguaguggaaagacag

SEQ ID NO: 282936 - RNA, 19 nt, Artificial Sequence
  Description of Artificial Sequence: Synthetic oligonucleotide
  Sense strand starting at position 102 of SEQ ID NO: 3634
gcagcuaucaaagaaagug

SEQ ID NO: 282937 - RNA, 19 nt, Artificial Sequence
  Description of Artificial Sequence: Synthetic oligonucleotide
  Antisense strand to SEQ ID NO: 282936
cacuuucuuugauagcugc

SEQ ID NO: 282938 - RNA, 19 nt, Artificial Sequence
  Description of Artificial Sequence: Synthetic oligonucleotide
  Sense strand starting at position 188 of SEQ ID NO: 3634
aggacaacguuuccuuaau

SEQ ID NO: 282939 - RNA, 19 nt, Artificial Sequence
  Description of Artificial Sequence: Synthetic oligonucleotide
  Antisense strand to SEQ ID NO: 282938
auuaaggaaacguuguccu

SEQ ID NO: 282940 - RNA, 19 nt, Artificial Sequence
  Description of Artificial Sequence: Synthetic oligonucleotide
  Sense strand starting at position 189 of SEQ ID NO: 3634
ggacaacguuuccuuaaug

SEQ ID NO: 282941 - RNA, 19 nt, Artificial Sequence
  Description of Artificial Sequence: Synthetic oligonucleotide
  Antisense strand to SEQ ID NO: 282940
cauuaaggaaacguugucc

SEQ ID NO: 282942 - RNA, 19 nt, Artificial Sequence
  Description of Artificial Sequence: Synthetic oligonucleotide
  Sense strand starting at position 241 of SEQ ID NO: 3634
gugggaaguuggaaaugua

SEQ ID NO: 282943 - RNA, 19 nt, Artificial Sequence
  Description of Artificial Sequence: Synthetic oligonucleotide
  Antisense strand to SEQ ID NO: 282942
uacauuuccaacuucccac

SEQ ID NO: 282944 - RNA, 19 nt, Artificial Sequence
  Description of Artificial Sequence: Synthetic oligonucleotide
  Sense strand starting at position 413 of SEQ ID NO: 3634
aagauaggaguuugguaca

SEQ ID NO: 282945 - RNA, 19 nt, Artificial Sequence
  Description of Artificial Sequence: Synthetic oligonucleotide
  Antisense strand to SEQ ID NO: 282944
uguaccaaacuccuaucuu

SEQ ID NO: 282946 - RNA, 19 nt, Artificial Sequence
  Description of Artificial Sequence: Synthetic oligonucleotide
  Sense strand starting at position 504 of SEQ ID NO: 3634
gcgcaaauagccuaagaau

SEQ ID NO: 282947 - RNA, 19 nt, Artificial Sequence
  Description of Artificial Sequence: Synthetic oligonucleotide
  Antisense strand to SEQ ID NO: 282946
auucuuaggcuauuugcgc

SEQ ID NO: 282948 - RNA, 19 nt, Artificial Sequence
  Description of Artificial Sequence: Synthetic oligonucleotide
  Sense strand starting at position 528 of SEQ ID NO: 3634
ggaagagagccuuguauac

SEQ ID NO: 282949 - RNA, 19 nt, Artificial Sequence
  Description of Artificial Sequence: Synthetic oligonucleotide
  Antisense strand to SEQ ID NO: 282948
guauacaaggcucucuucc

SEQ ID NO: 282950 - RNA, 19 nt, Artificial Sequence
  Description of Artificial Sequence: Synthetic oligonucleotide
  Sense strand starting at position 570 of SEQ ID NO: 3634
aacuuuaggugagcucuua

SEQ ID NO: 282951 - RNA, 19 nt, Artificial Sequence
  Description of Artificial Sequence: Synthetic oligonucleotide
  Antisense strand to SEQ ID NO: 282950
uaagagcucaccuaaaguu

SEQ ID NO: 282952 - RNA, 19 nt, Artificial Sequence
  Description of Artificial Sequence: Synthetic oligonucleotide
  Sense strand starting at position 583 of SEQ ID NO: 3634
cucuuaaguguccaguaca

SEQ ID NO: 282953 - RNA, 19 nt, Artificial Sequence
  Description of Artificial Sequence: Synthetic oligonucleotide
  Antisense strand to SEQ ID NO: 282952
uguacuggacacuuaagag

SEQ ID NO: 282954 - RNA, 19 nt, Artificial Sequence
  Description of Artificial Sequence: Synthetic oligonucleotide
  Sense strand starting at position 586 of SEQ ID NO: 3634
uuaaguguccaguacagga

SEQ ID NO: 282955 - RNA, 19 nt, Artificial Sequence
  Description of Artificial Sequence: Synthetic oligonucleotide
  Antisense strand to SEQ ID NO: 282954
uccuguacuggacacuuaa

SEQ ID NO: 282956 - RNA, 19 nt, Artificial Sequence
  Description of Artificial Sequence: Synthetic oligonucleotide
  Sense strand starting at position 646 of SEQ ID NO: 3634
acccaagaauaugugugaa

SEQ ID NO: 282957 - RNA, 19 nt, Artificial Sequence
  Description of Artificial Sequence: Synthetic oligonucleotide
  Antisense strand to SEQ ID NO: 282956
uucacacauauucuugggu

SEQ ID NO: 282958 - RNA, 19 nt, Artificial Sequence
  Description of Artificial Sequence: Synthetic oligonucleotide
  Sense strand starting at position 648 of SEQ ID NO: 3634
ccaagaauaugugugaaag

SEQ ID NO: 282959 - RNA, 19 nt, Artificial Sequence
  Description of Artificial Sequence: Synthetic oligonucleotide
  Antisense strand to SEQ ID NO: 282958
cuuucacacauauucuugg

SEQ ID NO: 282960 - RNA, 19 nt, Artificial Sequence
  Description of Artificial Sequence: Synthetic oligonucleotide
  Sense strand starting at position 768 of SEQ ID NO: 3634
aauggcuuauucucggaga

SEQ ID NO: 282961 - RNA, 19 nt, Artificial Sequence
  Description of Artificial Sequence: Synthetic oligonucleotide
  Antisense strand to SEQ ID NO: 282960
ucuccgagaauaagccauu

SEQ ID NO: 282962 - RNA, 19 nt, Artificial Sequence
  Description of Artificial Sequence: Synthetic oligonucleotide
  Sense strand starting at position 925 of SEQ ID NO: 3634
aguacauggcgugagaaga

SEQ ID NO: 282963 - RNA, 19 nt, Artificial Sequence
  Description of Artificial Sequence: Synthetic oligonucleotide
  Antisense strand to SEQ ID NO: 282962
ucuucucacgccauguacu

SEQ ID NO: 282964 - RNA, 19 nt, Artificial Sequence
  Description of Artificial Sequence: Synthetic oligonucleotide
  Sense strand starting at position 935 of SEQ ID NO: 3634
gugagaagacguggagaua

SEQ ID NO: 282965 - RNA, 19 nt, Artificial Sequence
  Description of Artificial Sequence: Synthetic oligonucleotide
  Antisense strand to SEQ ID NO: 282964
uaucuccacgucuucucac

SEQ ID NO: 282966 - RNA, 19 nt, Artificial Sequence
  Description of Artificial Sequence: Synthetic oligonucleotide
  Sense strand starting at position 955 of SEQ ID NO: 3634
agagaauuagcagacguau

SEQ ID NO: 282967 - RNA, 19 nt, Artificial Sequence
  Description of Artificial Sequence: Synthetic oligonucleotide
  Antisense strand to SEQ ID NO: 282966
auacgucugcuaauucucu

SEQ ID NO: 282968 - RNA, 19 nt, Artificial Sequence
  Description of Artificial Sequence: Synthetic oligonucleotide
  Sense strand starting at position 957 of SEQ ID NO: 3634
agaauuagcagacguauau

SEQ ID NO: 282969 - RNA, 19 nt, Artificial Sequence
  Description of Artificial Sequence: Synthetic oligonucleotide
  Antisense strand to SEQ ID NO: 282968
auauacgucugcuaauucu

SEQ ID NO: 282970 - RNA, 19 nt, Artificial Sequence
  Description of Artificial Sequence: Synthetic oligonucleotide
  Sense strand starting at position 961 of SEQ ID NO: 3634
uuagcagacguauauuauc

SEQ ID NO: 282971 - RNA, 19 nt, Artificial Sequence
  Description of Artificial Sequence: Synthetic oligonucleotide
  Antisense strand to SEQ ID NO: 282970
gauaauauacgucugcuaa

SEQ ID NO: 282972 - RNA, 19 nt, Artificial Sequence
  Description of Artificial Sequence: Synthetic oligonucleotide
  Sense strand starting at position 969 of SEQ ID NO: 3634
cguauauuaucugcaauuu

SEQ ID NO: 282973 - RNA, 19 nt, Artificial Sequence
  Description of Artificial Sequence: Synthetic oligonucleotide
  Antisense strand to SEQ ID NO: 282972
aaauugcagauaauauacg

SEQ ID NO: 282974 - RNA, 19 nt, Artificial Sequence
  Description of Artificial Sequence: Synthetic oligonucleotide
  Sense strand starting at position 1002 of SEQ ID NO: 3634
uacauuaaggaguguuaug

SEQ ID NO: 282975 - RNA, 19 nt, Artificial Sequence
  Description of Artificial Sequence: Synthetic oligonucleotide
  Antisense strand to SEQ ID NO: 282974
cauaacacuccuuaaugua

SEQ ID NO: 282976 - RNA, 19 nt, Artificial Sequence
  Description of Artificial Sequence: Synthetic oligonucleotide
  Sense strand starting at position 1009 of SEQ ID NO: 3634
aggaguguuaugugagauu

SEQ ID NO: 282977 - RNA, 19 nt, Artificial Sequence
  Description of Artificial Sequence: Synthetic oligonucleotide
  Antisense strand to SEQ ID NO: 282976
aaucucacauaacacuccu

SEQ ID NO: 282978 - RNA, 19 nt, Artificial Sequence
  Description of Artificial Sequence: Synthetic oligonucleotide
  Sense strand starting at position 1162 of SEQ ID NO: 3634
agcguauuuagcgaacgga

SEQ ID NO: 282979 - RNA, 19 nt, Artificial Sequence
  Description of Artificial Sequence: Synthetic oligonucleotide
  Antisense strand to SEQ ID NO: 282978
uccguucgcuaaauacgcu

SEQ ID NO: 282980 - RNA, 19 nt, Artificial Sequence
  Description of Artificial Sequence: Synthetic oligonucleotide
  Sense strand starting at position 2513 of SEQ ID NO: 3634
ggguucccuccuuaagcaa

SEQ ID NO: 282981 - RNA, 19 nt, Artificial Sequence
  Description of Artificial Sequence: Synthetic oligonucleotide
  Antisense strand to SEQ ID NO: 282980
uugcuuaaggagggaaccc

SEQ ID NO: 282982 - RNA, 19 nt, Artificial Sequence
  Description of Artificial Sequence: Synthetic oligonucleotide
  Sense strand starting at position 2534 of SEQ ID NO: 3634
gauuuacagugacaucuag

SEQ ID NO: 282983 - RNA, 19 nt, Artificial Sequence
  Description of Artificial Sequence: Synthetic oligonucleotide
  Antisense strand to SEQ ID NO: 282982
cuagaugucacuguaaauc

SEQ ID NO: 282984 - RNA, 19 nt, Artificial Sequence
  Description of Artificial Sequence: Synthetic oligonucleotide
  Sense strand starting at position 2542 of SEQ ID NO: 3634
gugacaucuaguggagaaa

SEQ ID NO: 282985 - RNA, 19 nt, Artificial Sequence
  Description of Artificial Sequence: Synthetic oligonucleotide
  Antisense strand to SEQ ID NO: 282984
uuucuccacuagaugucac

SEQ ID NO: 282986 - RNA, 19 nt, Artificial Sequence
  Description of Artificial Sequence: Synthetic oligonucleotide
  Sense strand starting at position 2718 of SEQ ID NO: 3634
gcagcauugcgccugagua

SEQ ID NO: 282987 - RNA, 19 nt, Artificial Sequence
  Description of Artificial Sequence: Synthetic oligonucleotide
  Antisense strand to SEQ ID NO: 282986
uacucaggcgcaaugcugc

SEQ ID NO: 282988 - RNA, 19 nt, Artificial Sequence
  Description of Artificial Sequence: Synthetic oligonucleotide
  Sense strand starting at position 2726 of SEQ ID NO: 3634
gcgccugaguauuuguaaa

SEQ ID NO: 282989 - RNA, 19 nt, Artificial Sequence
  Description of Artificial Sequence: Synthetic oligonucleotide
  Antisense strand to SEQ ID NO: 282988
uuuacaaauacucaggcgc

SEQ ID NO: 282990 - RNA, 19 nt, Artificial Sequence
  Description of Artificial Sequence: Synthetic oligonucleotide
  Sense strand starting at position 2776 of SEQ ID NO: 3634
gcuggaguuacccgagaaa

SEQ ID NO: 282991 - RNA, 19 nt, Artificial Sequence
  Description of Artificial Sequence: Synthetic oligonucleotide
  Antisense strand to SEQ ID NO: 282990
uuucucggguaacuccagc

SEQ ID NO: 282992 - RNA, 19 nt, Artificial Sequence
  Description of Artificial Sequence: Synthetic oligonucleotide
  Sense strand starting at position 2779 of SEQ ID NO: 3634
ggaguuacccgagaaagca

SEQ ID NO: 282993 - RNA, 19 nt, Artificial Sequence
  Description of Artificial Sequence: Synthetic oligonucleotide
  Antisense strand to SEQ ID NO: 282992
ugcuuucucggguaacucc

SEQ ID NO: 282994 - RNA, 19 nt, Artificial Sequence
  Description of Artificial Sequence: Synthetic oligonucleotide
  Sense strand starting at position 2958 of SEQ ID NO: 3634
uguuguaaugcacaaacau

SEQ ID NO: 282995 - RNA, 19 nt, Artificial Sequence
  Description of Artificial Sequence: Synthetic oligonucleotide
  Antisense strand to SEQ ID NO: 282994
auguuugugcauuacaaca

SEQ ID NO: 282996 - RNA, 19 nt, Artificial Sequence
  Description of Artificial Sequence: Synthetic oligonucleotide
  Sense strand starting at position 3024 of SEQ ID NO: 3634
uuugcagguacuuaggaaa

SEQ ID NO: 282997 - RNA, 19 nt, Artificial Sequence
  Description of Artificial Sequence: Synthetic oligonucleotide
  Antisense strand to SEQ ID NO: 282996
uuuccuaaguaccugcaaa

SEQ ID NO: 282998 - RNA, 19 nt, Artificial Sequence
  Description of Artificial Sequence: Synthetic oligonucleotide
  Sense strand starting at position 3073 of SEQ ID NO: 3634
agaguuggaacuuguuuac

SEQ ID NO: 282999 - RNA, 19 nt, Artificial Sequence
  Description of Artificial Sequence: Synthetic oligonucleotide
  Antisense strand to SEQ ID NO: 282998
guaaacaaguuccaacucu

SEQ ID NO: 283000 - RNA, 19 nt, Artificial Sequence
  Description of Artificial Sequence: Synthetic oligonucleotide
  Sense strand starting at position 3076 of SEQ ID NO: 3634
guuggaacuuguuuacuag

SEQ ID NO: 283001 - RNA, 19 nt, Artificial Sequence
  Description of Artificial Sequence: Synthetic oligonucleotide
  Antisense strand to SEQ ID NO: 283000
cuaguaaacaaguuccaac

SEQ ID NO: 283002 - RNA, 19 nt, Artificial Sequence
  Description of Artificial Sequence: Synthetic oligonucleotide
  Sense strand starting at position 3079 of SEQ ID NO: 3634
ggaacuuguuuacuagcaa

SEQ ID NO: 283003 - RNA, 19 nt, Artificial Sequence
  Description of Artificial Sequence: Synthetic oligonucleotide
  Antisense strand to SEQ ID NO: 283002
uugcuaguaaacaaguucc

SEQ ID NO: 283004 - RNA, 19 nt, Artificial Sequence
  Description of Artificial Sequence: Synthetic oligonucleotide
  Sense strand starting at position 3181 of SEQ ID NO: 3634
aguauucucgucgcuaauc

SEQ ID NO: 283005 - RNA, 19 nt, Artificial Sequence
  Description of Artificial Sequence: Synthetic oligonucleotide
  Antisense strand to SEQ ID NO: 283004
gauuagcgacgagaauacu

SEQ ID NO: 283006 - RNA, 19 nt, Artificial Sequence
  Description of Artificial Sequence: Synthetic oligonucleotide
  Sense strand starting at position 3191 of SEQ ID NO: 3634
ucgcuaauccaacgaauuu

SEQ ID NO: 283007 - RNA, 19 nt, Artificial Sequence
  Description of Artificial Sequence: Synthetic oligonucleotide
  Antisense strand to SEQ ID NO: 283006
aaauucguuggauuagcga

SEQ ID NO: 283008 - RNA, 19 nt, Artificial Sequence
  Description of Artificial Sequence: Synthetic oligonucleotide
  Sense strand starting at position 3829 of SEQ ID NO: 3634
ccaacugaccuuggcaaua

SEQ ID NO: 283009 - RNA, 19 nt, Artificial Sequence
  Description of Artificial Sequence: Synthetic oligonucleotide
  Antisense strand to SEQ ID NO: 283008
uauugccaaggucaguugg

SEQ ID NO: 283010 - RNA, 19 nt, Artificial Sequence
  Description of Artificial Sequence: Synthetic oligonucleotide
  Sense strand starting at position 3869 of SEQ ID NO: 3634
ugguauuaacugcaaacua

SEQ ID NO: 283011 - RNA, 19 nt, Artificial Sequence
  Description of Artificial Sequence: Synthetic oligonucleotide
  Antisense strand to SEQ ID NO: 283010
uaguuugcaguuaauacca

SEQ ID NO: 283012 - RNA, 19 nt, Artificial Sequence
  Description of Artificial Sequence: Synthetic oligonucleotide
  Sense strand starting at position 121 of SEQ ID NO: 3635
aaaucaauggugugaacau

SEQ ID NO: 283013 - RNA, 19 nt, Artificial Sequence
  Description of Artificial Sequence: Synthetic oligonucleotide
  Antisense strand to SEQ ID NO: 283012
auguucacaccauugauuu

SEQ ID NO: 283014 - RNA, 19 nt, Artificial Sequence
  Description of Artificial Sequence: Synthetic oligonucleotide
  Sense strand starting at position 210 of SEQ ID NO: 3635
uugguuacuucucugauaa

SEQ ID NO: 283015 - RNA, 19 nt, Artificial Sequence
  Description of Artificial Sequence: Synthetic oligonucleotide
  Antisense strand to SEQ ID NO: 283014
uuaucagagaaguaaccaa

SEQ ID NO: 283016 - RNA, 19 nt, Artificial Sequence
  Description of Artificial Sequence: Synthetic oligonucleotide
  Sense strand starting at position 211 of SEQ ID NO: 3635
ugguuacuucucugauaau

SEQ ID NO: 283017 - RNA, 19 nt, Artificial Sequence
  Description of Artificial Sequence: Synthetic oligonucleotide
  Antisense strand to SEQ ID NO: 283016
auuaucagagaaguaacca

SEQ ID NO: 283018 - RNA, 19 nt, Artificial Sequence
  Description of Artificial Sequence: Synthetic oligonucleotide
  Sense strand starting at position 395 of SEQ ID NO: 3635
guuugcuggccagcuuaau

SEQ ID NO: 283019 - RNA, 19 nt, Artificial Sequence
  Description of Artificial Sequence: Synthetic oligonucleotide
  Antisense strand to SEQ ID NO: 283018
auuaagcuggccagcaaac

SEQ ID NO: 283020 - RNA, 19 nt, Artificial Sequence
  Description of Artificial Sequence: Synthetic oligonucleotide
  Sense strand starting at position 440 of SEQ ID NO: 3635
uugcuucuugcacaaagau

SEQ ID NO: 283021 - RNA, 19 nt, Artificial Sequence
  Description of Artificial Sequence: Synthetic oligonucleotide
  Antisense strand to SEQ ID NO: 283020
aucuuugugcaagaagcaa

SEQ ID NO: 283022 - RNA, 19 nt, Artificial Sequence
  Description of Artificial Sequence: Synthetic oligonucleotide
  Sense strand starting at position 593 of SEQ ID NO: 3635
aaauguguggcucauuaga

SEQ ID NO: 283023 - RNA, 19 nt, Artificial Sequence
  Description of Artificial Sequence: Synthetic oligonucleotide
  Antisense strand to SEQ ID NO: 283022
ucuaaugagccacacauuu

SEQ ID NO: 283024 - RNA, 19 nt, Artificial Sequence
  Description of Artificial Sequence: Synthetic oligonucleotide
  Sense strand starting at position 735 of SEQ ID NO: 3635
uugucugugcaguuguaca

SEQ ID NO: 283025 - RNA, 19 nt, Artificial Sequence
  Description of Artificial Sequence: Synthetic oligonucleotide
  Antisense strand to SEQ ID NO: 283024
uguacaacugcacagacaa

SEQ ID NO: 283026 - RNA, 19 nt, Artificial Sequence
  Description of Artificial Sequence: Synthetic oligonucleotide
  Sense strand starting at position 748 of SEQ ID NO: 3635
uguacaguacucuaaaguu

SEQ ID NO: 283027 - RNA, 19 nt, Artificial Sequence
  Description of Artificial Sequence: Synthetic oligonucleotide
  Antisense strand to SEQ ID NO: 283026
aacuuuagaguacuguaca

SEQ ID NO: 283028 - RNA, 19 nt, Artificial Sequence
  Description of Artificial Sequence: Synthetic oligonucleotide
  Sense strand starting at position 842 of SEQ ID NO: 3635
guuuauuuguguuuccaac

SEQ ID NO: 283029 - RNA, 19 nt, Artificial Sequence
  Description of Artificial Sequence: Synthetic oligonucleotide
  Antisense strand to SEQ ID NO: 283028
guuggaaacacaaauaaac

SEQ ID NO: 283030 - RNA, 19 nt, Artificial Sequence
  Description of Artificial Sequence: Synthetic oligonucleotide
  Sense strand starting at position 844 of SEQ ID NO: 3635
uuauuuguguuuccaacuu

SEQ ID NO: 283031 - RNA, 19 nt, Artificial Sequence
  Description of Artificial Sequence: Synthetic oligonucleotide
  Antisense strand to SEQ ID NO: 283030
aaguuggaaacacaaauaa

SEQ ID NO: 283032 - RNA, 19 nt, Artificial Sequence
  Description of Artificial Sequence: Synthetic oligonucleotide
  Sense strand starting at position 868 of SEQ ID NO: 3635
aacagagaguuucucuguu

SEQ ID NO: 283033 - RNA, 19 nt, Artificial Sequence
  Description of Artificial Sequence: Synthetic oligonucleotide
  Antisense strand to SEQ ID NO: 283032
aacagagaaacucucuguu

SEQ ID NO: 283034 - RNA, 19 nt, Artificial Sequence
  Description of Artificial Sequence: Synthetic oligonucleotide
  Sense strand starting at position 872 of SEQ ID NO: 3635
gagaguuucucuguuaggg

SEQ ID NO: 283035 - RNA, 19 nt, Artificial Sequence
  Description of Artificial Sequence: Synthetic oligonucleotide
  Antisense strand to SEQ ID NO: 283034
cccuaacagagaaacucuc

SEQ ID NO: 283036 - RNA, 19 nt, Artificial Sequence
  Description of Artificial Sequence: Synthetic oligonucleotide
  Sense strand starting at position 1034 of SEQ ID NO: 3635
agaauugucuuagcaaaca

SEQ ID NO: 283037 - RNA, 19 nt, Artificial Sequence
  Description of Artificial Sequence: Synthetic oligonucleotide
  Antisense strand to SEQ ID NO: 283036
uguuugcuaagacaauucu

SEQ ID NO: 283038 - RNA, 19 nt, Artificial Sequence
  Description of Artificial Sequence: Synthetic oligonucleotide
  Sense strand starting at position 1052 of SEQ ID NO: 3635
acucuuccacgauaugaug

SEQ ID NO: 283039 - RNA, 19 nt, Artificial Sequence
  Description of Artificial Sequence: Synthetic oligonucleotide
  Antisense strand to SEQ ID NO: 283038
caucauaucguggaagagu

SEQ ID NO: 283040 - RNA, 19 nt, Artificial Sequence
  Description of Artificial Sequence: Synthetic oligonucleotide
  Sense strand starting at position 1330 of SEQ ID NO: 3635
gaagcauuauuguuugaau

SEQ ID NO: 283041 - RNA, 19 nt, Artificial Sequence
  Description of Artificial Sequence: Synthetic oligonucleotide
  Antisense strand to SEQ ID NO: 283040
auucaaacaauaaugcuuc

SEQ ID NO: 283042 - RNA, 19 nt, Artificial Sequence
  Description of Artificial Sequence: Synthetic oligonucleotide
  Sense strand starting at position 1454 of SEQ ID NO: 3635
aaguaccuuguagaguaaa

SEQ ID NO: 283043 - RNA, 19 nt, Artificial Sequence
  Description of Artificial Sequence: Synthetic oligonucleotide
  Antisense strand to SEQ ID NO: 283042
uuuacucuacaagguacuu

SEQ ID NO: 283044 - RNA, 19 nt, Artificial Sequence
  Description of Artificial Sequence: Synthetic oligonucleotide
  Sense strand starting at position 1683 of SEQ ID NO: 3635
agacuuaacugcuuugauu

SEQ ID NO: 283045 - RNA, 19 nt, Artificial Sequence
  Description of Artificial Sequence: Synthetic oligonucleotide
  Antisense strand to SEQ ID NO: 283044
aaucaaagcaguuaagucu

SEQ ID NO: 283046 - RNA, 19 nt, Artificial Sequence
  Description of Artificial Sequence: Synthetic oligonucleotide
  Sense strand starting at position 1869 of SEQ ID NO: 3635
gaggcugggcuugaucuua

SEQ ID NO: 283047 - RNA, 19 nt, Artificial Sequence
  Description of Artificial Sequence: Synthetic oligonucleotide
  Antisense strand to SEQ ID NO: 283046
uaagaucaagcccagccuc

SEQ ID NO: 283048 - RNA, 19 nt, Artificial Sequence
  Description of Artificial Sequence: Synthetic oligonucleotide
  Sense strand starting at position 1906 of SEQ ID NO: 3635
uacaacuuagcggagaauu

SEQ ID NO: 283049 - RNA, 19 nt, Artificial Sequence
  Description of Artificial Sequence: Synthetic oligonucleotide
  Antisense strand to SEQ ID NO: 283048
aauucuccgcuaaguugua

SEQ ID NO: 283050 - RNA, 19 nt, Artificial Sequence
  Description of Artificial Sequence: Synthetic oligonucleotide
  Sense strand starting at position 1987 of SEQ ID NO: 3635
gugcuuugucuauuccagu

SEQ ID NO: 283051 - RNA, 19 nt, Artificial Sequence
  Description of Artificial Sequence: Synthetic oligonucleotide
  Antisense strand to SEQ ID NO: 283050
acuggaauagacaaagcac

SEQ ID NO: 283052 - RNA, 19 nt, Artificial Sequence
  Description of Artificial Sequence: Synthetic oligonucleotide
  Sense strand starting at position 2000 of SEQ ID NO: 3635
uccaguuggcuggaugaua

SEQ ID NO: 283053 - RNA, 19 nt, Artificial Sequence
  Description of Artificial Sequence: Synthetic oligonucleotide
  Antisense strand to SEQ ID NO: 283052
uaucauccagccaacugga

SEQ ID NO: 283054 - RNA, 19 nt, Artificial Sequence
  Description of Artificial Sequence: Synthetic oligonucleotide
  Sense strand starting at position 2056 of SEQ ID NO: 3635
gggcaacuuggauguaauu

SEQ ID NO: 283055 - RNA, 19 nt, Artificial Sequence
  Description of Artificial Sequence: Synthetic oligonucleotide
  Antisense strand to SEQ ID NO: 283054
aauuacauccaaguugccc

SEQ ID NO: 283056 - RNA, 19 nt, Artificial Sequence
  Description of Artificial Sequence: Synthetic oligonucleotide
  Sense strand starting at position 2065 of SEQ ID NO: 3635
ggauguaauuaucuacaag

SEQ ID NO: 283057 - RNA, 19 nt, Artificial Sequence
  Description of Artificial Sequence: Synthetic oligonucleotide
  Antisense strand to SEQ ID NO: 283056
cuuguagauaauuacaucc

SEQ ID NO: 283058 - RNA, 19 nt, Artificial Sequence
  Description of Artificial Sequence: Synthetic oligonucleotide
  Sense strand starting at position 2068 of SEQ ID NO: 3635
uguaauuaucuacaaguag

SEQ ID NO: 283059 - RNA, 19 nt, Artificial Sequence
  Description of Artificial Sequence: Synthetic oligonucleotide
  Antisense strand to SEQ ID NO: 283058
cuacuuguagauaauuaca

SEQ ID NO: 283060 - RNA, 19 nt, Artificial Sequence
  Description of Artificial Sequence: Synthetic oligonucleotide
  Sense strand starting at position 2099 of SEQ ID NO: 3635
gacauaguggcacacaauu

SEQ ID NO: 283061 - RNA, 19 nt, Artificial Sequence
  Description of Artificial Sequence: Synthetic oligonucleotide
  Antisense strand to SEQ ID NO: 283060
aauugugugccacuauguc

SEQ ID NO: 283062 - RNA, 19 nt, Artificial Sequence
  Description of Artificial Sequence: Synthetic oligonucleotide
  Sense strand starting at position 2306 of SEQ ID NO: 3635
aagaguggauucucaacau

SEQ ID NO: 283063 - RNA, 19 nt, Artificial Sequence
  Description of Artificial Sequence: Synthetic oligonucleotide
  Antisense strand to SEQ ID NO: 283062
auguugagaauccacucuu

SEQ ID NO: 283064 - RNA, 19 nt, Artificial Sequence
  Description of Artificial Sequence: Synthetic oligonucleotide
  Sense strand starting at position 2422 of SEQ ID NO: 3635
ccuuuaagucuuuaguuag

SEQ ID NO: 283065 - RNA, 19 nt, Artificial Sequence
  Description of Artificial Sequence: Synthetic oligonucleotide
  Antisense strand to SEQ ID NO: 283064
cuaacuaaagacuuaaagg

SEQ ID NO: 283066 - RNA, 19 nt, Artificial Sequence
  Description of Artificial Sequence: Synthetic oligonucleotide
  Sense strand starting at position 2449 of SEQ ID NO: 3635
aggauuucuuuccauauga

SEQ ID NO: 283067 - RNA, 19 nt, Artificial Sequence
  Description of Artificial Sequence: Synthetic oligonucleotide
  Antisense strand to SEQ ID NO: 283066
ucauauggaaagaaauccu

SEQ ID NO: 283068 - RNA, 19 nt, Artificial Sequence
  Description of Artificial Sequence: Synthetic oligonucleotide
  Sense strand starting at position 2569 of SEQ ID NO: 3635
aggagagacaguuaugugu

SEQ ID NO: 283069 - RNA, 19 nt, Artificial Sequence
  Description of Artificial Sequence: Synthetic oligonucleotide
  Antisense strand to SEQ ID NO: 283068
acacauaacugucucuccu

SEQ ID NO: 283070 - RNA, 19 nt, Artificial Sequence
  Description of Artificial Sequence: Synthetic oligonucleotide
  Sense strand starting at position 2629 of SEQ ID NO: 3635
cuacuauuagaaggcuuau

SEQ ID NO: 283071 - RNA, 19 nt, Artificial Sequence
  Description of Artificial Sequence: Synthetic oligonucleotide
  Antisense strand to SEQ ID NO: 283070
auaagccuucuaauaguag

SEQ ID NO: 283072 - RNA, 19 nt, Artificial Sequence
  Description of Artificial Sequence: Synthetic oligonucleotide
  Sense strand starting at position 2894 of SEQ ID NO: 3635
gcuuguauucucuagaauc

SEQ ID NO: 283073 - RNA, 19 nt, Artificial Sequence
  Description of Artificial Sequence: Synthetic oligonucleotide
  Antisense strand to SEQ ID NO: 283072
gauucuagagaauacaagc

SEQ ID NO: 283074 - RNA, 19 nt, Artificial Sequence
  Description of Artificial Sequence: Synthetic oligonucleotide
  Sense strand starting at position 3038 of SEQ ID NO: 3635
uugaaauccucagcuaaag

SEQ ID NO: 283075 - RNA, 19 nt, Artificial Sequence
  Description of Artificial Sequence: Synthetic oligonucleotide
  Antisense strand to SEQ ID NO: 283074
cuuuagcugaggauuucaa

SEQ ID NO: 283076 - RNA, 19 nt, Artificial Sequence
  Description of Artificial Sequence: Synthetic oligonucleotide
  Sense strand starting at position 3281 of SEQ ID NO: 3635
gcuucuuaggccuacuaga

SEQ ID NO: 283077 - RNA, 19 nt, Artificial Sequence
  Description of Artificial Sequence: Synthetic oligonucleotide
  Antisense strand to SEQ ID NO: 283076
ucuaguaggccuaagaagc

SEQ ID NO: 283078 - RNA, 19 nt, Artificial Sequence
  Description of Artificial Sequence: Synthetic oligonucleotide
  Sense strand starting at position 3299 of SEQ ID NO: 3635
agauguaaucuugggcaag

SEQ ID NO: 283079 - RNA, 19 nt, Artificial Sequence
  Description of Artificial Sequence: Synthetic oligonucleotide
  Antisense strand to SEQ ID NO: 283078
cuugcccaagauuacaucu

SEQ ID NO: 283080 - RNA, 19 nt, Artificial Sequence
  Description of Artificial Sequence: Synthetic oligonucleotide
  Sense strand starting at position 3368 of SEQ ID NO: 3635
uacauaggcuuguuaugaa

SEQ ID NO: 283081 - RNA, 19 nt, Artificial Sequence
  Description of Artificial Sequence: Synthetic oligonucleotide
  Antisense strand to SEQ ID NO: 283080
uucauaacaagccuaugua

SEQ ID NO: 283082 - RNA, 19 nt, Artificial Sequence
  Description of Artificial Sequence: Synthetic oligonucleotide
  Sense strand starting at position 3378 of SEQ ID NO: 3635
uguuaugaaggcugaauga

SEQ ID NO: 283083 - RNA, 19 nt, Artificial Sequence
  Description of Artificial Sequence: Synthetic oligonucleotide
  Antisense strand to SEQ ID NO: 283082
ucauucagccuucauaaca

SEQ ID NO: 283084 - RNA, 19 nt, Artificial Sequence
  Description of Artificial Sequence: Synthetic oligonucleotide
  Sense strand starting at position 3904 of SEQ ID NO: 3635
ggaaucuuugaaggucacu

SEQ ID NO: 283085 - RNA, 19 nt, Artificial Sequence
  Description of Artificial Sequence: Synthetic oligonucleotide
  Antisense strand to SEQ ID NO: 283084
agugaccuucaaagauucc

SEQ ID NO: 283086 - RNA, 19 nt, Artificial Sequence
  Description of Artificial Sequence: Synthetic oligonucleotide
  Sense strand starting at position 3929 of SEQ ID NO: 3635
uacugaagugccuggaaga

SEQ ID NO: 283087 - RNA, 19 nt, Artificial Sequence
  Description of Artificial Sequence: Synthetic oligonucleotide
  Antisense strand to SEQ ID NO: 283086
ucuuccaggcacuucagua

SEQ ID NO: 283088 - RNA, 19 nt, Artificial Sequence
  Description of Artificial Sequence: Synthetic oligonucleotide
  Sense strand starting at position 3930 of SEQ ID NO: 3635
acugaagugccuggaagau

SEQ ID NO: 283089 - RNA, 19 nt, Artificial Sequence
  Description of Artificial Sequence: Synthetic oligonucleotide
  Antisense strand to SEQ ID NO: 283088
aucuuccaggcacuucagu

SEQ ID NO: 283090 - RNA, 19 nt, Artificial Sequence
  Description of Artificial Sequence: Synthetic oligonucleotide
  Sense strand starting at position 3934 of SEQ ID NO: 3635
aagugccuggaagauuauu

SEQ ID NO: 283091 - RNA, 19 nt, Artificial Sequence
  Description of Artificial Sequence: Synthetic oligonucleotide
  Antisense strand to SEQ ID NO: 283090
aauaaucuuccaggcacuu

SEQ ID NO: 283092 - RNA, 19 nt, Artificial Sequence
  Description of Artificial Sequence: Synthetic oligonucleotide
  Sense strand starting at position 407 of SEQ ID NO: 3636
cuuggucuagaccaucaua

SEQ ID NO: 283093 - RNA, 19 nt, Artificial Sequence
  Description of Artificial Sequence: Synthetic oligonucleotide
  Antisense strand to SEQ ID NO: 283092
uaugauggucuagaccaag

SEQ ID NO: 283094 - RNA, 19 nt, Artificial Sequence
  Description of Artificial Sequence: Synthetic oligonucleotide
  Sense strand starting at position 469 of SEQ ID NO: 3636
ggaggauguucagguauuu

SEQ ID NO: 283095 - RNA, 19 nt, Artificial Sequence
  Description of Artificial Sequence: Synthetic oligonucleotide
  Antisense strand to SEQ ID NO: 283094
aaauaccugaacauccucc

SEQ ID NO: 283096 - RNA, 19 nt, Artificial Sequence
  Description of Artificial Sequence: Synthetic oligonucleotide
  Sense strand starting at position 561 of SEQ ID NO: 3636
gcgaacugaagucauugaa

SEQ ID NO: 283097 - RNA, 19 nt, Artificial Sequence
  Description of Artificial Sequence: Synthetic oligonucleotide
  Antisense strand to SEQ ID NO: 283096
uucaaugacuucaguucgc

SEQ ID NO: 283098 - RNA, 19 nt, Artificial Sequence
  Description of Artificial Sequence: Synthetic oligonucleotide
  Sense strand starting at position 587 of SEQ ID NO: 3636
cugaguccuuucuucuaag

SEQ ID NO: 283099 - RNA, 19 nt, Artificial Sequence
  Description of Artificial Sequence: Synthetic oligonucleotide
  Antisense strand to SEQ ID NO: 283098
cuuagaagaaaggacucag

SEQ ID NO: 283100 - RNA, 19 nt, Artificial Sequence
  Description of Artificial Sequence: Synthetic oligonucleotide
  Sense strand starting at position 588 of SEQ ID NO: 3636
ugaguccuuucuucuaaga

SEQ ID NO: 283101 - RNA, 19 nt, Artificial Sequence
  Description of Artificial Sequence: Synthetic oligonucleotide
  Antisense strand to SEQ ID NO: 283100
ucuuagaagaaaggacuca

SEQ ID NO: 283102 - RNA, 19 nt, Artificial Sequence
  Description of Artificial Sequence: Synthetic oligonucleotide
  Sense strand starting at position 599 of SEQ ID NO: 3636
uucuaagaacgaugcauga

SEQ ID NO: 283103 - RNA, 19 nt, Artificial Sequence
  Description of Artificial Sequence: Synthetic oligonucleotide
  Antisense strand to SEQ ID NO: 283102
ucaugcaucguucuuagaa

SEQ ID NO: 283104 - RNA, 19 nt, Artificial Sequence
  Description of Artificial Sequence: Synthetic oligonucleotide
  Sense strand starting at position 675 of SEQ ID NO: 3636
cgcuguguacuucaguauu

SEQ ID NO: 283105 - RNA, 19 nt, Artificial Sequence
  Description of Artificial Sequence: Synthetic oligonucleotide
  Antisense strand to SEQ ID NO: 283104
aauacugaaguacacagcg

SEQ ID NO: 283106 - RNA, 19 nt, Artificial Sequence
  Description of Artificial Sequence: Synthetic oligonucleotide
  Sense strand starting at position 752 of SEQ ID NO: 3636
ggaggaaagugguaacugu

SEQ ID NO: 283107 - RNA, 19 nt, Artificial Sequence
  Description of Artificial Sequence: Synthetic oligonucleotide
  Antisense strand to SEQ ID NO: 283106
acaguuaccacuuuccucc

SEQ ID NO: 283108 - RNA, 19 nt, Artificial Sequence
  Description of Artificial Sequence: Synthetic oligonucleotide
  Sense strand starting at position 756 of SEQ ID NO: 3636
gaaagugguaacuguuuag

SEQ ID NO: 283109 - RNA, 19 nt, Artificial Sequence
  Description of Artificial Sequence: Synthetic oligonucleotide
  Antisense strand to SEQ ID NO: 283108
cuaaacaguuaccacuuuc

SEQ ID NO: 283110 - RNA, 19 nt, Artificial Sequence
  Description of Artificial Sequence: Synthetic oligonucleotide
  Sense strand starting at position 772 of SEQ ID NO: 3636
uaggccugccaggguuaua

SEQ ID NO: 283111 - RNA, 19 nt, Artificial Sequence
  Description of Artificial Sequence: Synthetic oligonucleotide
  Antisense strand to SEQ ID NO: 283110
uauaacccuggcaggccua

SEQ ID NO: 283112 - RNA, 19 nt, Artificial Sequence
  Description of Artificial Sequence: Synthetic oligonucleotide
  Sense strand starting at position 783 of SEQ ID NO: 3636
ggguuauaaucacaaacac

SEQ ID NO: 283113 - RNA, 19 nt, Artificial Sequence
  Description of Artificial Sequence: Synthetic oligonucleotide
  Antisense strand to SEQ ID NO: 283112
guguuugugauuauaaccc

SEQ ID NO: 283114 - RNA, 19 nt, Artificial Sequence
  Description of Artificial Sequence: Synthetic oligonucleotide
  Sense strand starting at position 851 of SEQ ID NO: 3636
agaaauaugcuuugaaacu

SEQ ID NO: 283115 - RNA, 19 nt, Artificial Sequence
  Description of Artificial Sequence: Synthetic oligonucleotide
  Antisense strand to SEQ ID NO: 283114
aguuucaaagcauauuucu

SEQ ID NO: 283116 - RNA, 19 nt, Artificial Sequence
  Description of Artificial Sequence: Synthetic oligonucleotide
  Sense strand starting at position 978 of SEQ ID NO: 3636
augaguuucucagucccaa

SEQ ID NO: 283117 - RNA, 19 nt, Artificial Sequence
  Description of Artificial Sequence: Synthetic oligonucleotide
  Antisense strand to SEQ ID NO: 283116
uugggacugagaaacucau

SEQ ID NO: 283118 - RNA, 19 nt, Artificial Sequence
  Description of Artificial Sequence: Synthetic oligonucleotide
  Sense strand starting at position 1065 of SEQ ID NO: 3636
ugcggaaugcauugcuaaa

SEQ ID NO: 283119 - RNA, 19 nt, Artificial Sequence
  Description of Artificial Sequence: Synthetic oligonucleotide
  Antisense strand to SEQ ID NO: 283118
uuuagcaaugcauuccgca

SEQ ID NO: 283120 - RNA, 19 nt, Artificial Sequence
  Description of Artificial Sequence: Synthetic oligonucleotide
  Sense strand starting at position 1098 of SEQ ID NO: 3636
agcuuuaaauuaggaaaca

SEQ ID NO: 283121 - RNA, 19 nt, Artificial Sequence
  Description of Artificial Sequence: Synthetic oligonucleotide
  Antisense strand to SEQ ID NO: 283120
uguuuccuaauuuaaagcu

SEQ ID NO: 283122 - RNA, 19 nt, Artificial Sequence
  Description of Artificial Sequence: Synthetic oligonucleotide
  Sense strand starting at position 1099 of SEQ ID NO: 3636
gcuuuaaauuaggaaacau

SEQ ID NO: 283123 - RNA, 19 nt, Artificial Sequence
  Description of Artificial Sequence: Synthetic oligonucleotide
  Antisense strand to SEQ ID NO: 283122
auguuuccuaauuuaaagc

SEQ ID NO: 283124 - RNA, 19 nt, Artificial Sequence
  Description of Artificial Sequence: Synthetic oligonucleotide
  Sense strand starting at position 1227 of SEQ ID NO: 3636
ggauggcuuuccgcgggaa

SEQ ID NO: 283125 - RNA, 19 nt, Artificial Sequence
  Description of Artificial Sequence: Synthetic oligonucleotide
  Antisense strand to SEQ ID NO: 283124
uucccgcggaaagccaucc

SEQ ID NO: 283126 - RNA, 19 nt, Artificial Sequence
  Description of Artificial Sequence: Synthetic oligonucleotide
  Sense strand starting at position 1662 of SEQ ID NO: 3636
cucgguguuuacuuuagaa

SEQ ID NO: 283127 - RNA, 19 nt, Artificial Sequence
  Description of Artificial Sequence: Synthetic oligonucleotide
  Antisense strand to SEQ ID NO: 283126
uucuaaaguaaacaccgag

SEQ ID NO: 283128 - RNA, 19 nt, Artificial Sequence
  Description of Artificial Sequence: Synthetic oligonucleotide
  Sense strand starting at position 1664 of SEQ ID NO: 3636
cgguguuuacuuuagaaag

SEQ ID NO: 283129 - RNA, 19 nt, Artificial Sequence
  Description of Artificial Sequence: Synthetic oligonucleotide
  Antisense strand to SEQ ID NO: 283128
cuuucuaaaguaaacaccg

SEQ ID NO: 283130 - RNA, 19 nt, Artificial Sequence
  Description of Artificial Sequence: Synthetic oligonucleotide
  Sense strand starting at position 2069 of SEQ ID NO: 3636
ccaagagguucugaugaau

SEQ ID NO: 283131 - RNA, 19 nt, Artificial Sequence
  Description of Artificial Sequence: Synthetic oligonucleotide
  Antisense strand to SEQ ID NO: 283130
auucaucagaaccucuugg

SEQ ID NO: 283132 - RNA, 19 nt, Artificial Sequence
  Description of Artificial Sequence: Synthetic oligonucleotide
  Sense strand starting at position 2081 of SEQ ID NO: 3636
gaugaauuggucugggcga

SEQ ID NO: 283133 - RNA, 19 nt, Artificial Sequence
  Description of Artificial Sequence: Synthetic oligonucleotide
  Antisense strand to SEQ ID NO: 283132
ucgcccagaccaauucauc

SEQ ID NO: 283134 - RNA, 19 nt, Artificial Sequence
  Description of Artificial Sequence: Synthetic oligonucleotide
  Sense strand starting at position 2337 of SEQ ID NO: 3636
aagagccauuuaugucagu

SEQ ID NO: 283135 - RNA, 19 nt, Artificial Sequence
  Description of Artificial Sequence: Synthetic oligonucleotide
  Antisense strand to SEQ ID NO: 283134
acugacauaaauggcucuu

SEQ ID NO: 283136 - RNA, 19 nt, Artificial Sequence
  Description of Artificial Sequence: Synthetic oligonucleotide
  Sense strand starting at position 2342 of SEQ ID NO: 3636
ccauuuaugucagugucau

SEQ ID NO: 283137 - RNA, 19 nt, Artificial Sequence
  Description of Artificial Sequence: Synthetic oligonucleotide
  Antisense strand to SEQ ID NO: 283136
augacacugacauaaaugg

SEQ ID NO: 283138 - RNA, 19 nt, Artificial Sequence
  Description of Artificial Sequence: Synthetic oligonucleotide
  Sense strand starting at position 2343 of SEQ ID NO: 3636
cauuuaugucagugucauu

SEQ ID NO: 283139 - RNA, 19 nt, Artificial Sequence
  Description of Artificial Sequence: Synthetic oligonucleotide
  Antisense strand to SEQ ID NO: 283138
aaugacacugacauaaaug

SEQ ID NO: 283140 - RNA, 19 nt, Artificial Sequence
  Description of Artificial Sequence: Synthetic oligonucleotide
  Sense strand starting at position 2355 of SEQ ID NO: 3636
ugucauugcugugugacau

SEQ ID NO: 283141 - RNA, 19 nt, Artificial Sequence
  Description of Artificial Sequence: Synthetic oligonucleotide
  Antisense strand to SEQ ID NO: 283140
augucacacagcaaugaca

SEQ ID NO: 283142 - RNA, 19 nt, Artificial Sequence
  Description of Artificial Sequence: Synthetic oligonucleotide
  Sense strand starting at position 2356 of SEQ ID NO: 3636
gucauugcugugugacaug

SEQ ID NO: 283143 - RNA, 19 nt, Artificial Sequence
  Description of Artificial Sequence: Synthetic oligonucleotide
  Antisense strand to SEQ ID NO: 283142
caugucacacagcaaugac

SEQ ID NO: 283144 - RNA, 19 nt, Artificial Sequence
  Description of Artificial Sequence: Synthetic oligonucleotide
  Sense strand starting at position 2430 of SEQ ID NO: 3636
gugaguauuaagcgacauu

SEQ ID NO: 283145 - RNA, 19 nt, Artificial Sequence
  Description of Artificial Sequence: Synthetic oligonucleotide
  Antisense strand to SEQ ID NO: 283144
aaugucgcuuaauacucac

SEQ ID NO: 283146 - RNA, 19 nt, Artificial Sequence
  Description of Artificial Sequence: Synthetic oligonucleotide
  Sense strand starting at position 2431 of SEQ ID NO: 3636
ugaguauuaagcgacauuc

SEQ ID NO: 283147 - RNA, 19 nt, Artificial Sequence
  Description of Artificial Sequence: Synthetic oligonucleotide
  Antisense strand to SEQ ID NO: 283146
gaaugucgcuuaauacuca

SEQ ID NO: 283148 - RNA, 19 nt, Artificial Sequence
  Description of Artificial Sequence: Synthetic oligonucleotide
  Sense strand starting at position 2460 of SEQ ID NO: 3636
cuguguuguagucagagcu

SEQ ID NO: 283149 - RNA, 19 nt, Artificial Sequence
  Description of Artificial Sequence: Synthetic oligonucleotide
  Antisense strand to SEQ ID NO: 283148
agcucugacuacaacacag

SEQ ID NO: 283150 - RNA, 19 nt, Artificial Sequence
  Description of Artificial Sequence: Synthetic oligonucleotide
  Sense strand starting at position 2467 of SEQ ID NO: 3636
guagucagagcucagucau

SEQ ID NO: 283151 - RNA, 19 nt, Artificial Sequence
  Description of Artificial Sequence: Synthetic oligonucleotide
  Antisense strand to SEQ ID NO: 283150
augacugagcucugacuac

SEQ ID NO: 283152 - RNA, 19 nt, Artificial Sequence
  Description of Artificial Sequence: Synthetic oligonucleotide
  Sense strand starting at position 2477 of SEQ ID NO: 3636
cucagucaugcagccguua

SEQ ID NO: 283153 - RNA, 19 nt, Artificial Sequence
  Description of Artificial Sequence: Synthetic oligonucleotide
  Antisense strand to SEQ ID NO: 283152
uaacggcugcaugacugag

SEQ ID NO: 283154 - RNA, 19 nt, Artificial Sequence
  Description of Artificial Sequence: Synthetic oligonucleotide
  Sense strand starting at position 2516 of SEQ ID NO: 3636
agagucuccggguaaggau

SEQ ID NO: 283155 - RNA, 19 nt, Artificial Sequence
  Description of Artificial Sequence: Synthetic oligonucleotide
  Antisense strand to SEQ ID NO: 283154
auccuuacccggagacucu

SEQ ID NO: 283156 - RNA, 19 nt, Artificial Sequence
  Description of Artificial Sequence: Synthetic oligonucleotide
  Sense strand starting at position 2563 of SEQ ID NO: 3636
ccgacuugacagcaacaaa

SEQ ID NO: 283157 - RNA, 19 nt, Artificial Sequence
  Description of Artificial Sequence: Synthetic oligonucleotide
  Antisense strand to SEQ ID NO: 283156
uuuguugcugucaagucgg

SEQ ID NO: 283158 - RNA, 19 nt, Artificial Sequence
  Description of Artificial Sequence: Synthetic oligonucleotide
  Sense strand starting at position 2748 of SEQ ID NO: 3636
gaaacuaacgaguguuggu

SEQ ID NO: 283159 - RNA, 19 nt, Artificial Sequence
  Description of Artificial Sequence: Synthetic oligonucleotide
  Antisense strand to SEQ ID NO: 283158
accaacacucguuaguuuc

SEQ ID NO: 283160 - RNA, 19 nt, Artificial Sequence
  Description of Artificial Sequence: Synthetic oligonucleotide
  Sense strand starting at position 3204 of SEQ ID NO: 3636
ucccaauucugaguguaua

SEQ ID NO: 283161 - RNA, 19 nt, Artificial Sequence
  Description of Artificial Sequence: Synthetic oligonucleotide
  Antisense strand to SEQ ID NO: 283160
uauacacucagaauuggga

SEQ ID NO: 283162 - RNA, 19 nt, Artificial Sequence
  Description of Artificial Sequence: Synthetic oligonucleotide
  Sense strand starting at position 3205 of SEQ ID NO: 3636
cccaauucugaguguauac

SEQ ID NO: 283163 - RNA, 19 nt, Artificial Sequence
  Description of Artificial Sequence: Synthetic oligonucleotide
  Antisense strand to SEQ ID NO: 283162
guauacacucagaauuggg

SEQ ID NO: 283164 - RNA, 19 nt, Artificial Sequence
  Description of Artificial Sequence: Synthetic oligonucleotide
  Sense strand starting at position 3594 of SEQ ID NO: 3636
ucuggaaauagaugcugau

SEQ ID NO: 283165 - RNA, 19 nt, Artificial Sequence
  Description of Artificial Sequence: Synthetic oligonucleotide
  Antisense strand to SEQ ID NO: 283164
aucagcaucuauuuccaga

SEQ ID NO: 283166 - RNA, 19 nt, Artificial Sequence
  Description of Artificial Sequence: Synthetic oligonucleotide
  Sense strand starting at position 3649 of SEQ ID NO: 3636
cacugaauugugugcuuau

SEQ ID NO: 283167 - RNA, 19 nt, Artificial Sequence
  Description of Artificial Sequence: Synthetic oligonucleotide
  Antisense strand to SEQ ID NO: 283166
auaagcacacaauucagug

SEQ ID NO: 283168 - RNA, 19 nt, Artificial Sequence
  Description of Artificial Sequence: Synthetic oligonucleotide
  Sense strand starting at position 3650 of SEQ ID NO: 3636
acugaauugugugcuuaua

SEQ ID NO: 283169 - RNA, 19 nt, Artificial Sequence
  Description of Artificial Sequence: Synthetic oligonucleotide
  Antisense strand to SEQ ID NO: 283168
uauaagcacacaauucagu

SEQ ID NO: 283170 - RNA, 19 nt, Artificial Sequence
  Description of Artificial Sequence: Synthetic oligonucleotide
  Sense strand starting at position 3868 of SEQ ID NO: 3636
cagagaucuccauggccag

SEQ ID NO: 283171 - RNA, 19 nt, Artificial Sequence
  Description of Artificial Sequence: Synthetic oligonucleotide
  Antisense strand to SEQ ID NO: 283170
cuggccauggagaucucug

SEQ ID NO: 283172 - RNA, 19 nt, Artificial Sequence
  Description of Artificial Sequence: Synthetic oligonucleotide
  Sense strand starting at position 219 of SEQ ID NO: 3637
gcuaccugacguuaucaaa

SEQ ID NO: 283173 - RNA, 19 nt, Artificial Sequence
  Description of Artificial Sequence: Synthetic oligonucleotide
  Antisense strand to SEQ ID NO: 283172
uuugauaacgucagguagc

SEQ ID NO: 283174 - RNA, 19 nt, Artificial Sequence
  Description of Artificial Sequence: Synthetic oligonucleotide
  Sense strand starting at position 1389 of SEQ ID NO: 3637
gagguaaggccuuauacca

SEQ ID NO: 283175 - RNA, 19 nt, Artificial Sequence
  Description of Artificial Sequence: Synthetic oligonucleotide
  Antisense strand to SEQ ID NO: 283174
ugguauaaggccuuaccuc

SEQ ID NO: 283176 - RNA, 19 nt, Artificial Sequence
  Description of Artificial Sequence: Synthetic oligonucleotide
  Sense strand starting at position 1412 of SEQ ID NO: 3637
cagaguagaugguauaagu

SEQ ID NO: 283177 - RNA, 19 nt, Artificial Sequence
  Description of Artificial Sequence: Synthetic oligonucleotide
  Antisense strand to SEQ ID NO: 283176
acuuauaccaucuacucug

SEQ ID NO: 283178 - RNA, 19 nt, Artificial Sequence
  Description of Artificial Sequence: Synthetic oligonucleotide
  Sense strand starting at position 1432 of SEQ ID NO: 3637
cagaguagaugguauagua

SEQ ID NO: 283179 - RNA, 19 nt, Artificial Sequence
  Description of Artificial Sequence: Synthetic oligonucleotide
  Antisense strand to SEQ ID NO: 283178
uacuauaccaucuacucug

SEQ ID NO: 283180 - RNA, 19 nt, Artificial Sequence
  Description of Artificial Sequence: Synthetic oligonucleotide
  Sense strand starting at position 1440 of SEQ ID NO: 3637
augguauaguacucggcua

SEQ ID NO: 283181 - RNA, 19 nt, Artificial Sequence
  Description of Artificial Sequence: Synthetic oligonucleotide
  Antisense strand to SEQ ID NO: 283180
uagccgaguacuauaccau

SEQ ID NO: 283182 - RNA, 19 nt, Artificial Sequence
  Description of Artificial Sequence: Synthetic oligonucleotide
  Sense strand starting at position 1441 of SEQ ID NO: 3637
ugguauaguacucggcuaa

SEQ ID NO: 283183 - RNA, 19 nt, Artificial Sequence
  Description of Artificial Sequence: Synthetic oligonucleotide
  Antisense strand to SEQ ID NO: 283182
uuagccgaguacuauacca

SEQ ID NO: 283184 - RNA, 19 nt, Artificial Sequence
  Description of Artificial Sequence: Synthetic oligonucleotide
  Sense strand starting at position 1442 of SEQ ID NO: 3637
gguauaguacucggcuaaa

SEQ ID NO: 283185 - RNA, 19 nt, Artificial Sequence
  Description of Artificial Sequence: Synthetic oligonucleotide
  Antisense strand to SEQ ID NO: 283184
uuuagccgaguacuauacc

SEQ ID NO: 283186 - RNA, 19 nt, Artificial Sequence
  Description of Artificial Sequence: Synthetic oligonucleotide
  Sense strand starting at position 1445 of SEQ ID NO: 3637
auaguacucggcuaaagua

SEQ ID NO: 283187 - RNA, 19 nt, Artificial Sequence
  Description of Artificial Sequence: Synthetic oligonucleotide
  Antisense strand to SEQ ID NO: 283186
uacuuuagccgaguacuau

SEQ ID NO: 283188 - RNA, 19 nt, Artificial Sequence
  Description of Artificial Sequence: Synthetic oligonucleotide
  Sense strand starting at position 1453 of SEQ ID NO: 3637
cggcuaaaguacuuuaaau

SEQ ID NO: 283189 - RNA, 19 nt, Artificial Sequence
  Description of Artificial Sequence: Synthetic oligonucleotide
  Antisense strand to SEQ ID NO: 283188
auuuaaaguacuuuagccg

SEQ ID NO: 283190 - RNA, 19 nt, Artificial Sequence
  Description of Artificial Sequence: Synthetic oligonucleotide
  Sense strand starting at position 1504 of SEQ ID NO: 3637
uaagcaauauguguguaaa

SEQ ID NO: 283191 - RNA, 19 nt, Artificial Sequence
  Description of Artificial Sequence: Synthetic oligonucleotide
  Antisense strand to SEQ ID NO: 283190
uuuacacacauauugcuua

SEQ ID NO: 283192 - RNA, 19 nt, Artificial Sequence
  Description of Artificial Sequence: Synthetic oligonucleotide
  Sense strand starting at position 76 of SEQ ID NO: 3638
cugggaugaugcgugcaaa

SEQ ID NO: 283193 - RNA, 19 nt, Artificial Sequence
  Description of Artificial Sequence: Synthetic oligonucleotide
  Antisense strand to SEQ ID NO: 283192
uuugcacgcaucaucccag

SEQ ID NO: 283194 - RNA, 19 nt, Artificial Sequence
  Description of Artificial Sequence: Synthetic oligonucleotide
  Sense strand starting at position 77 of SEQ ID NO: 3638
ugggaugaugcgugcaaag

SEQ ID NO: 283195 - RNA, 19 nt, Artificial Sequence
  Description of Artificial Sequence: Synthetic oligonucleotide
  Antisense strand to SEQ ID NO: 283194
cuuugcacgcaucauccca

SEQ ID NO: 283196 - RNA, 19 nt, Artificial Sequence
  Description of Artificial Sequence: Synthetic oligonucleotide
  Sense strand starting at position 79 of SEQ ID NO: 3638
ggaugaugcgugcaaagca

SEQ ID NO: 283197 - RNA, 19 nt, Artificial Sequence
  Description of Artificial Sequence: Synthetic oligonucleotide
  Antisense strand to SEQ ID NO: 283196
ugcuuugcacgcaucaucc

SEQ ID NO: 283198 - RNA, 19 nt, Artificial Sequence
  Description of Artificial Sequence: Synthetic oligonucleotide
  Sense strand starting at position 87 of SEQ ID NO: 3638
cgugcaaagcauuaagaaa

SEQ ID NO: 283199 - RNA, 19 nt, Artificial Sequence
  Description of Artificial Sequence: Synthetic oligonucleotide
  Antisense strand to SEQ ID NO: 283198
uuucuuaaugcuuugcacg

SEQ ID NO: 283200 - RNA, 19 nt, Artificial Sequence
  Description of Artificial Sequence: Synthetic oligonucleotide
  Sense strand starting at position 250 of SEQ ID NO: 3638
uggccacuggucugagaag

SEQ ID NO: 283201 - RNA, 19 nt, Artificial Sequence
  Description of Artificial Sequence: Synthetic oligonucleotide
  Antisense strand to SEQ ID NO: 283200
cuucucagaccaguggcca

SEQ ID NO: 283202 - RNA, 19 nt, Artificial Sequence
  Description of Artificial Sequence: Synthetic oligonucleotide
  Sense strand starting at position 251 of SEQ ID NO: 3638
ggccacuggucugagaaga

SEQ ID NO: 283203 - RNA, 19 nt, Artificial Sequence
  Description of Artificial Sequence: Synthetic oligonucleotide
  Antisense strand to SEQ ID NO: 283202
ucuucucagaccaguggcc

SEQ ID NO: 283204 - RNA, 19 nt, Artificial Sequence
  Description of Artificial Sequence: Synthetic oligonucleotide
  Sense strand starting at position 628 of SEQ ID NO: 3638
gcuauugguuaauuaugau

SEQ ID NO: 283205 - RNA, 19 nt, Artificial Sequence
  Description of Artificial Sequence: Synthetic oligonucleotide
  Antisense strand to SEQ ID NO: 283204
aucauaauuaaccaauagc

SEQ ID NO: 283206 - RNA, 19 nt, Artificial Sequence
  Description of Artificial Sequence: Synthetic oligonucleotide
  Sense strand starting at position 759 of SEQ ID NO: 3638
gguuaucucugaguaguau

SEQ ID NO: 283207 - RNA, 19 nt, Artificial Sequence
  Description of Artificial Sequence: Synthetic oligonucleotide
  Antisense strand to SEQ ID NO: 283206
auacuacucagagauaacc

SEQ ID NO: 283208 - RNA, 19 nt, Artificial Sequence
  Description of Artificial Sequence: Synthetic oligonucleotide
  Sense strand starting at position 760 of SEQ ID NO: 3638
guuaucucugaguaguaua

SEQ ID NO: 283209 - RNA, 19 nt, Artificial Sequence
  Description of Artificial Sequence: Synthetic oligonucleotide
  Antisense strand to SEQ ID NO: 283208
uauacuacucagagauaac

SEQ ID NO: 283210 - RNA, 19 nt, Artificial Sequence
  Description of Artificial Sequence: Synthetic oligonucleotide
  Sense strand starting at position 763 of SEQ ID NO: 3638
aucucugaguaguauaauu

SEQ ID NO: 283211 - RNA, 19 nt, Artificial Sequence
  Description of Artificial Sequence: Synthetic oligonucleotide
  Antisense strand to SEQ ID NO: 283210
aauuauacuacucagagau

SEQ ID NO: 283212 - RNA, 19 nt, Artificial Sequence
  Description of Artificial Sequence: Synthetic oligonucleotide
  Sense strand starting at position 765 of SEQ ID NO: 3638
cucugaguaguauaauuau

SEQ ID NO: 283213 - RNA, 19 nt, Artificial Sequence
  Description of Artificial Sequence: Synthetic oligonucleotide
  Antisense strand to SEQ ID NO: 283212
auaauuauacuacucagag

SEQ ID NO: 283214 - RNA, 19 nt, Artificial Sequence
  Description of Artificial Sequence: Synthetic oligonucleotide
  Sense strand starting at position 1164 of SEQ ID NO: 3638
uuuggugugcaaggcuaaa

SEQ ID NO: 283215 - RNA, 19 nt, Artificial Sequence
  Description of Artificial Sequence: Synthetic oligonucleotide
  Antisense strand to SEQ ID NO: 283214
uuuagccuugcacaccaaa

SEQ ID NO: 283216 - RNA, 19 nt, Artificial Sequence
  Description of Artificial Sequence: Synthetic oligonucleotide
  Sense strand starting at position 1221 of SEQ ID NO: 3638
guaauuacagucuagagug

SEQ ID NO: 283217 - RNA, 19 nt, Artificial Sequence
  Description of Artificial Sequence: Synthetic oligonucleotide
  Antisense strand to SEQ ID NO: 283216
cacucuagacuguaauuac

SEQ ID NO: 283218 - RNA, 19 nt, Artificial Sequence
  Description of Artificial Sequence: Synthetic oligonucleotide
  Sense strand starting at position 1388 of SEQ ID NO: 3638
gagguaaggccuuauacca

SEQ ID NO: 283219 - RNA, 19 nt, Artificial Sequence
  Description of Artificial Sequence: Synthetic oligonucleotide
  Antisense strand to SEQ ID NO: 283218
ugguauaaggccuuaccuc

SEQ ID NO: 283220 - RNA, 19 nt, Artificial Sequence
  Description of Artificial Sequence: Synthetic oligonucleotide
  Sense strand starting at position 1411 of SEQ ID NO: 3638
cagaguagaugguauaagu

SEQ ID NO: 283221 - RNA, 19 nt, Artificial Sequence
  Description of Artificial Sequence: Synthetic oligonucleotide
  Antisense strand to SEQ ID NO: 283220
acuuauaccaucuacucug

SEQ ID NO: 283222 - RNA, 19 nt, Artificial Sequence
  Description of Artificial Sequence: Synthetic oligonucleotide
  Sense strand starting at position 1431 of SEQ ID NO: 3638
cagaguagaugguauagua

SEQ ID NO: 283223 - RNA, 19 nt, Artificial Sequence
  Description of Artificial Sequence: Synthetic oligonucleotide
  Antisense strand to SEQ ID NO: 283222
uacuauaccaucuacucug

SEQ ID NO: 283224 - RNA, 19 nt, Artificial Sequence
  Description of Artificial Sequence: Synthetic oligonucleotide
  Sense strand starting at position 1439 of SEQ ID NO: 3638
augguauaguacucggcua

SEQ ID NO: 283225 - RNA, 19 nt, Artificial Sequence
  Description of Artificial Sequence: Synthetic oligonucleotide
  Antisense strand to SEQ ID NO: 283224
uagccgaguacuauaccau

SEQ ID NO: 283226 - RNA, 19 nt, Artificial Sequence
  Description of Artificial Sequence: Synthetic oligonucleotide
  Sense strand starting at position 1440 of SEQ ID NO: 3638
ugguauaguacucggcuaa

SEQ ID NO: 283227 - RNA, 19 nt, Artificial Sequence
  Description of Artificial Sequence: Synthetic oligonucleotide
  Antisense strand to SEQ ID NO: 283226
uuagccgaguacuauacca

SEQ ID NO: 283228 - RNA, 19 nt, Artificial Sequence
  Description of Artificial Sequence: Synthetic oligonucleotide
  Sense strand starting at position 1441 of SEQ ID NO: 3638
gguauaguacucggcuaaa

SEQ ID NO: 283229 - RNA, 19 nt, Artificial Sequence
  Description of Artificial Sequence: Synthetic oligonucleotide
  Antisense strand to SEQ ID NO: 283228
uuuagccgaguacuauacc

SEQ ID NO: 283230 - RNA, 19 nt, Artificial Sequence
  Description of Artificial Sequence: Synthetic oligonucleotide
  Sense strand starting at position 1444 of SEQ ID NO: 3638
auaguacucggcuaaagua

SEQ ID NO: 283231 - RNA, 19 nt, Artificial Sequence
  Description of Artificial Sequence: Synthetic oligonucleotide
  Antisense strand to SEQ ID NO: 283230
uacuuuagccgaguacuau

SEQ ID NO: 283232 - RNA, 19 nt, Artificial Sequence
  Description of Artificial Sequence: Synthetic oligonucleotide
  Sense strand starting at position 1452 of SEQ ID NO: 3638
cggcuaaaguacuuuaaau

SEQ ID NO: 283233 - RNA, 19 nt, Artificial Sequence
  Description of Artificial Sequence: Synthetic oligonucleotide
  Antisense strand to SEQ ID NO: 283232
auuuaaaguacuuuagccg

SEQ ID NO: 283234 - RNA, 19 nt, Artificial Sequence
  Description of Artificial Sequence: Synthetic oligonucleotide
  Sense strand starting at position 1951 of SEQ ID NO: 3638
cuaagcggucuguguuaaa

SEQ ID NO: 283235 - RNA, 19 nt, Artificial Sequence
  Description of Artificial Sequence: Synthetic oligonucleotide
  Antisense strand to SEQ ID NO: 283234
uuuaacacagaccgcuuag

SEQ ID NO: 283236 - RNA, 19 nt, Artificial Sequence
  Description of Artificial Sequence: Synthetic oligonucleotide
  Sense strand starting at position 2013 of SEQ ID NO: 3638
gagugauaacuggguccua

SEQ ID NO: 283237 - RNA, 19 nt, Artificial Sequence
  Description of Artificial Sequence: Synthetic oligonucleotide
  Antisense strand to SEQ ID NO: 283236
uaggacccaguuaucacuc

SEQ ID NO: 283238 - RNA, 19 nt, Artificial Sequence
  Description of Artificial Sequence: Synthetic oligonucleotide
  Sense strand starting at position 2109 of SEQ ID NO: 3638
ugcaaacauguuuguacua

SEQ ID NO: 283239 - RNA, 19 nt, Artificial Sequence
  Description of Artificial Sequence: Synthetic oligonucleotide
  Antisense strand to SEQ ID NO: 283238
uaguacaaacauguuugca

SEQ ID NO: 283240 - RNA, 19 nt, Artificial Sequence
  Description of Artificial Sequence: Synthetic oligonucleotide
  Sense strand starting at position 2110 of SEQ ID NO: 3638
gcaaacauguuuguacuau

SEQ ID NO: 283241 - RNA, 19 nt, Artificial Sequence
  Description of Artificial Sequence: Synthetic oligonucleotide
  Antisense strand to SEQ ID NO: 283240
auaguacaaacauguuugc

SEQ ID NO: 283242 - RNA, 19 nt, Artificial Sequence
  Description of Artificial Sequence: Synthetic oligonucleotide
  Sense strand starting at position 2263 of SEQ ID NO: 3638
agaugcaagcauuaccuaa

SEQ ID NO: 283243 - RNA, 19 nt, Artificial Sequence
  Description of Artificial Sequence: Synthetic oligonucleotide
  Antisense strand to SEQ ID NO: 283242
uuagguaaugcuugcaucu

SEQ ID NO: 283244 - RNA, 19 nt, Artificial Sequence
  Description of Artificial Sequence: Synthetic oligonucleotide
  Sense strand starting at position 3065 of SEQ ID NO: 3638
ggaugacuacagcgaaacu

SEQ ID NO: 283245 - RNA, 19 nt, Artificial Sequence
  Description of Artificial Sequence: Synthetic oligonucleotide
  Antisense strand to SEQ ID NO: 283244
aguuucgcuguagucaucc

SEQ ID NO: 283246 - RNA, 19 nt, Artificial Sequence
  Description of Artificial Sequence: Synthetic oligonucleotide
  Sense strand starting at position 3272 of SEQ ID NO: 3638
cuuuauuucugaugucauu

SEQ ID NO: 283247 - RNA, 19 nt, Artificial Sequence
  Description of Artificial Sequence: Synthetic oligonucleotide
  Antisense strand to SEQ ID NO: 283246
aaugacaucagaaauaaag

SEQ ID NO: 283248 - RNA, 19 nt, Artificial Sequence
  Description of Artificial Sequence: Synthetic oligonucleotide
  Sense strand starting at position 3678 of SEQ ID NO: 3638
guggcuccacaucaauuau

SEQ ID NO: 283249 - RNA, 19 nt, Artificial Sequence
  Description of Artificial Sequence: Synthetic oligonucleotide
  Antisense strand to SEQ ID NO: 283248
auaauugauguggagccac

SEQ ID NO: 283250 - RNA, 19 nt, Artificial Sequence
  Description of Artificial Sequence: Synthetic oligonucleotide
  Sense strand starting at position 3889 of SEQ ID NO: 3638
ucccgucaguuugcaauau

SEQ ID NO: 283251 - RNA, 19 nt, Artificial Sequence
  Description of Artificial Sequence: Synthetic oligonucleotide
  Antisense strand to SEQ ID NO: 283250
auauugcaaacugacggga

SEQ ID NO: 283252 - RNA, 19 nt, Artificial Sequence
  Description of Artificial Sequence: Synthetic oligonucleotide
  Sense strand starting at position 3893 of SEQ ID NO: 3638
gucaguuugcaauaugcaa

SEQ ID NO: 283253 - RNA, 19 nt, Artificial Sequence
  Description of Artificial Sequence: Synthetic oligonucleotide
  Antisense strand to SEQ ID NO: 283252
uugcauauugcaaacugac

SEQ ID NO: 283254 - RNA, 19 nt, Artificial Sequence
  Description of Artificial Sequence: Synthetic oligonucleotide
  Sense strand starting at position 3960 of SEQ ID NO: 3638
ccaaguaugucauagcuga

SEQ ID NO: 283255 - RNA, 19 nt, Artificial Sequence
  Description of Artificial Sequence: Synthetic oligonucleotide
  Antisense strand to SEQ ID NO: 283254
ucagcuaugacauacuugg

SEQ ID NO: 283256 - RNA, 19 nt, Artificial Sequence
  Description of Artificial Sequence: Synthetic oligonucleotide
  Sense strand starting at position 495 of SEQ ID NO: 3639
cugccaaugucuugccuaa

SEQ ID NO: 283257 - RNA, 19 nt, Artificial Sequence
  Description of Artificial Sequence: Synthetic oligonucleotide
  Antisense strand to SEQ ID NO: 283256
uuaggcaagacauuggcag

SEQ ID NO: 283258 - RNA, 19 nt, Artificial Sequence
  Description of Artificial Sequence: Synthetic oligonucleotide
  Sense strand starting at position 3062 of SEQ ID NO: 3639
auaucuuucuuccagguua

SEQ ID NO: 283259 - RNA, 19 nt, Artificial Sequence
  Description of Artificial Sequence: Synthetic oligonucleotide
  Antisense strand to SEQ ID NO: 283258
uaaccuggaagaaagauau

SEQ ID NO: 283260 - RNA, 19 nt, Artificial Sequence
  Description of Artificial Sequence: Synthetic oligonucleotide
  Sense strand starting at position 3064 of SEQ ID NO: 3639
aucuuucuuccagguuacu

SEQ ID NO: 283261 - RNA, 19 nt, Artificial Sequence
  Description of Artificial Sequence: Synthetic oligonucleotide
  Antisense strand to SEQ ID NO: 283260
aguaaccuggaagaaagau

SEQ ID NO: 283262 - RNA, 19 nt, Artificial Sequence
  Description of Artificial Sequence: Synthetic oligonucleotide
  Sense strand starting at position 3175 of SEQ ID NO: 3639
ucuccuacuucuguaacga

SEQ ID NO: 283263 - RNA, 19 nt, Artificial Sequence
  Description of Artificial Sequence: Synthetic oligonucleotide
  Antisense strand to SEQ ID NO: 283262
ucguuacagaaguaggaga

SEQ ID NO: 283264 - RNA, 19 nt, Artificial Sequence
  Description of Artificial Sequence: Synthetic oligonucleotide
  Sense strand starting at position 3179 of SEQ ID NO: 3639
cuacuucuguaacgacaua

SEQ ID NO: 283265 - RNA, 19 nt, Artificial Sequence
  Description of Artificial Sequence: Synthetic oligonucleotide
  Antisense strand to SEQ ID NO: 283264
uaugucguuacagaaguag

SEQ ID NO: 283266 - RNA, 19 nt, Artificial Sequence
  Description of Artificial Sequence: Synthetic oligonucleotide
  Sense strand starting at position 3191 of SEQ ID NO: 3639
cgacauagauuacaucaca

SEQ ID NO: 283267 - RNA, 19 nt, Artificial Sequence
  Description of Artificial Sequence: Synthetic oligonucleotide
  Antisense strand to SEQ ID NO: 283266
ugugauguaaucuaugucg

SEQ ID NO: 283268 - RNA, 19 nt, Artificial Sequence
  Description of Artificial Sequence: Synthetic oligonucleotide
  Sense strand starting at position 3202 of SEQ ID NO: 3639
acaucacaucuuugguaga

SEQ ID NO: 283269 - RNA, 19 nt, Artificial Sequence
  Description of Artificial Sequence: Synthetic oligonucleotide
  Antisense strand to SEQ ID NO: 283268
ucuaccaaagaugugaugu

SEQ ID NO: 283270 - RNA, 19 nt, Artificial Sequence
  Description of Artificial Sequence: Synthetic oligonucleotide
  Sense strand starting at position 3204 of SEQ ID NO: 3639
aucacaucuuugguagaaa

SEQ ID NO: 283271 - RNA, 19 nt, Artificial Sequence
  Description of Artificial Sequence: Synthetic oligonucleotide
  Antisense strand to SEQ ID NO: 283270
uuucuaccaaagaugugau

SEQ ID NO: 283272 - RNA, 19 nt, Artificial Sequence
  Description of Artificial Sequence: Synthetic oligonucleotide
  Sense strand starting at position 3425 of SEQ ID NO: 3639
gucugccuccuuugaaguu

SEQ ID NO: 283273 - RNA, 19 nt, Artificial Sequence
  Description of Artificial Sequence: Synthetic oligonucleotide
  Antisense strand to SEQ ID NO: 283272
aacuucaaaggaggcagac

SEQ ID NO: 283274 - RNA, 19 nt, Artificial Sequence
  Description of Artificial Sequence: Synthetic oligonucleotide
  Sense strand starting at position 3477 of SEQ ID NO: 3639
ggaagucacugucaucacu

SEQ ID NO: 283275 - RNA, 19 nt, Artificial Sequence
  Description of Artificial Sequence: Synthetic oligonucleotide
  Antisense strand to SEQ ID NO: 283274
agugaugacagugacuucc

SEQ ID NO: 283276 - RNA, 19 nt, Artificial Sequence
  Description of Artificial Sequence: Synthetic oligonucleotide
  Sense strand starting at position 3609 of SEQ ID NO: 3639
caaccuggguuccugaaua

SEQ ID NO: 283277 - RNA, 19 nt, Artificial Sequence
  Description of Artificial Sequence: Synthetic oligonucleotide
  Antisense strand to SEQ ID NO: 283276
uauucaggaacccagguug

SEQ ID NO: 283278 - RNA, 19 nt, Artificial Sequence
  Description of Artificial Sequence: Synthetic oligonucleotide
  Sense strand starting at position 3627 of SEQ ID NO: 3639
aacuguguggccuguuuau

SEQ ID NO: 283279 - RNA, 19 nt, Artificial Sequence
  Description of Artificial Sequence: Synthetic oligonucleotide
  Antisense strand to SEQ ID NO: 283278
auaaacaggccacacaguu

SEQ ID NO: 283280 - RNA, 19 nt, Artificial Sequence
  Description of Artificial Sequence: Synthetic oligonucleotide
  Sense strand starting at position 3634 of SEQ ID NO: 3639
uggccuguuuaucugcuaa

SEQ ID NO: 283281 - RNA, 19 nt, Artificial Sequence
  Description of Artificial Sequence: Synthetic oligonucleotide
  Antisense strand to SEQ ID NO: 283280
uuagcagauaaacaggcca

SEQ ID NO: 283282 - RNA, 19 nt, Artificial Sequence
  Description of Artificial Sequence: Synthetic oligonucleotide
  Sense strand starting at position 3646 of SEQ ID NO: 3639
cugcuaagcccuguuaugu

SEQ ID NO: 283283 - RNA, 19 nt, Artificial Sequence
  Description of Artificial Sequence: Synthetic oligonucleotide
  Antisense strand to SEQ ID NO: 283282
acauaacagggcuuagcag

SEQ ID NO: 283284 - RNA, 19 nt, Artificial Sequence
  Description of Artificial Sequence: Synthetic oligonucleotide
  Sense strand starting at position 3681 of SEQ ID NO: 3639
uuuauuguguuugagccau

SEQ ID NO: 283285 - RNA, 19 nt, Artificial Sequence
  Description of Artificial Sequence: Synthetic oligonucleotide
  Antisense strand to SEQ ID NO: 283284
auggcucaaacacaauaaa

SEQ ID NO: 283286 - RNA, 19 nt, Artificial Sequence
  Description of Artificial Sequence: Synthetic oligonucleotide
  Sense strand starting at position 3685 of SEQ ID NO: 3639
uuguguuugagccauugua

SEQ ID NO: 283287 - RNA, 19 nt, Artificial Sequence
  Description of Artificial Sequence: Synthetic oligonucleotide
  Antisense strand to SEQ ID NO: 283286
uacaauggcucaaacacaa

SEQ ID NO: 283288 - RNA, 19 nt, Artificial Sequence
  Description of Artificial Sequence: Synthetic oligonucleotide
  Sense strand starting at position 127 of SEQ ID NO: 3640
agagcugucaaguagaguu

SEQ ID NO: 283289 - RNA, 19 nt, Artificial Sequence
  Description of Artificial Sequence: Synthetic oligonucleotide
  Antisense strand to SEQ ID NO: 283288
aacucuacuugacagcucu

SEQ ID NO: 283290 - RNA, 19 nt, Artificial Sequence
  Description of Artificial Sequence: Synthetic oligonucleotide
  Sense strand starting at position 134 of SEQ ID NO: 3640
ucaaguagaguuugagaag

SEQ ID NO: 283291 - RNA, 19 nt, Artificial Sequence
  Description of Artificial Sequence: Synthetic oligonucleotide
  Antisense strand to SEQ ID NO: 283290
cuucucaaacucuacuuga

SEQ ID NO: 283292 - RNA, 19 nt, Artificial Sequence
  Description of Artificial Sequence: Synthetic oligonucleotide
  Sense strand starting at position 143 of SEQ ID NO: 3640
guuugagaaguaggaauca

SEQ ID NO: 283293 - RNA, 19 nt, Artificial Sequence
  Description of Artificial Sequence: Synthetic oligonucleotide
  Antisense strand to SEQ ID NO: 283292
ugauuccuacuucucaaac

SEQ ID NO: 283294 - RNA, 19 nt, Artificial Sequence
  Description of Artificial Sequence: Synthetic oligonucleotide
  Sense strand starting at position 564 of SEQ ID NO: 3640
agagaagauuaacaaauga

SEQ ID NO: 283295 - RNA, 19 nt, Artificial Sequence
  Description of Artificial Sequence: Synthetic oligonucleotide
  Antisense strand to SEQ ID NO: 283294
ucauuuguuaaucuucucu

SEQ ID NO: 283296 - RNA, 19 nt, Artificial Sequence
  Description of Artificial Sequence: Synthetic oligonucleotide
  Sense strand starting at position 848 of SEQ ID NO: 3640
uccauauuccguugaaauc

SEQ ID NO: 283297 - RNA, 19 nt, Artificial Sequence
  Description of Artificial Sequence: Synthetic oligonucleotide
  Antisense strand to SEQ ID NO: 283296
gauuucaacggaauaugga

SEQ ID NO: 283298 - RNA, 19 nt, Artificial Sequence
  Description of Artificial Sequence: Synthetic oligonucleotide
  Sense strand starting at position 1528 of SEQ ID NO: 3640
gggcgaaccugaucucuua

SEQ ID NO: 283299 - RNA, 19 nt, Artificial Sequence
  Description of Artificial Sequence: Synthetic oligonucleotide
  Antisense strand to SEQ ID NO: 283298
uaagagaucagguucgccc

SEQ ID NO: 283300 - RNA, 19 nt, Artificial Sequence
  Description of Artificial Sequence: Synthetic oligonucleotide
  Sense strand starting at position 2020 of SEQ ID NO: 3640
cgccaauuccaacaggaaa

SEQ ID NO: 283301 - RNA, 19 nt, Artificial Sequence
  Description of Artificial Sequence: Synthetic oligonucleotide
  Antisense strand to SEQ ID NO: 283300
uuuccuguuggaauuggcg

SEQ ID NO: 283302 - RNA, 19 nt, Artificial Sequence
  Description of Artificial Sequence: Synthetic oligonucleotide
  Sense strand starting at position 2300 of SEQ ID NO: 3640
agcugaacuuguuccaauc

SEQ ID NO: 283303 - RNA, 19 nt, Artificial Sequence
  Description of Artificial Sequence: Synthetic oligonucleotide
  Antisense strand to SEQ ID NO: 283302
gauuggaacaaguucagcu

SEQ ID NO: 283304 - RNA, 19 nt, Artificial Sequence
  Description of Artificial Sequence: Synthetic oligonucleotide
  Sense strand starting at position 2381 of SEQ ID NO: 3640
uuguaaagacauugugacu

SEQ ID NO: 283305 - RNA, 19 nt, Artificial Sequence
  Description of Artificial Sequence: Synthetic oligonucleotide
  Antisense strand to SEQ ID NO: 283304
agucacaaugucuuuacaa

SEQ ID NO: 283306 - RNA, 19 nt, Artificial Sequence
  Description of Artificial Sequence: Synthetic oligonucleotide
  Sense strand starting at position 2386 of SEQ ID NO: 3640
aagacauugugacucagau

SEQ ID NO: 283307 - RNA, 19 nt, Artificial Sequence
  Description of Artificial Sequence: Synthetic oligonucleotide
  Antisense strand to SEQ ID NO: 283306
aucugagucacaaugucuu

SEQ ID NO: 283308 - RNA, 19 nt, Artificial Sequence
  Description of Artificial Sequence: Synthetic oligonucleotide
  Sense strand starting at position 2626 of SEQ ID NO: 3640
uuaauucuagaaugugcuu

SEQ ID NO: 283309 - RNA, 19 nt, Artificial Sequence
  Description of Artificial Sequence: Synthetic oligonucleotide
  Antisense strand to SEQ ID NO: 283308
aagcacauucuagaauuaa

SEQ ID NO: 283310 - RNA, 19 nt, Artificial Sequence
  Description of Artificial Sequence: Synthetic oligonucleotide
  Sense strand starting at position 2743 of SEQ ID NO: 3640
acuacaaggucugcaaaga

SEQ ID NO: 283311 - RNA, 19 nt, Artificial Sequence
  Description of Artificial Sequence: Synthetic oligonucleotide
  Antisense strand to SEQ ID NO: 283310
ucuuugcagaccuuguagu

SEQ ID NO: 283312 - RNA, 19 nt, Artificial Sequence
  Description of Artificial Sequence: Synthetic oligonucleotide
  Sense strand starting at position 2781 of SEQ ID NO: 3640
guaggaggugacugagauu

SEQ ID NO: 283313 - RNA, 19 nt, Artificial Sequence
  Description of Artificial Sequence: Synthetic oligonucleotide
  Antisense strand to SEQ ID NO: 283312
aaucucagucaccuccuac

SEQ ID NO: 283314 - RNA, 19 nt, Artificial Sequence
  Description of Artificial Sequence: Synthetic oligonucleotide
  Sense strand starting at position 2784 of SEQ ID NO: 3640
ggaggugacugagauuaug

SEQ ID NO: 283315 - RNA, 19 nt, Artificial Sequence
  Description of Artificial Sequence: Synthetic oligonucleotide
  Antisense strand to SEQ ID NO: 283314
cauaaucucagucaccucc

SEQ ID NO: 283316 - RNA, 19 nt, Artificial Sequence
  Description of Artificial Sequence: Synthetic oligonucleotide
  Sense strand starting at position 2790 of SEQ ID NO: 3640
gacugagauuauguaauua

SEQ ID NO: 283317 - RNA, 19 nt, Artificial Sequence
  Description of Artificial Sequence: Synthetic oligonucleotide
  Antisense strand to SEQ ID NO: 283316
uaauuacauaaucucaguc

SEQ ID NO: 283318 - RNA, 19 nt, Artificial Sequence
  Description of Artificial Sequence: Synthetic oligonucleotide
  Sense strand starting at position 2924 of SEQ ID NO: 3640
aaucuucuguggguguuua

SEQ ID NO: 283319 - RNA, 19 nt, Artificial Sequence
  Description of Artificial Sequence: Synthetic oligonucleotide
  Antisense strand to SEQ ID NO: 283318
uaaacacccacagaagauu

SEQ ID NO: 283320 - RNA, 19 nt, Artificial Sequence
  Description of Artificial Sequence: Synthetic oligonucleotide
  Sense strand starting at position 2971 of SEQ ID NO: 3640
caugccaguuguguugaaa

SEQ ID NO: 283321 - RNA, 19 nt, Artificial Sequence
  Description of Artificial Sequence: Synthetic oligonucleotide
  Antisense strand to SEQ ID NO: 283320
uuucaacacaacuggcaug

SEQ ID NO: 283322 - RNA, 19 nt, Artificial Sequence
  Description of Artificial Sequence: Synthetic oligonucleotide
  Sense strand starting at position 2974 of SEQ ID NO: 3640
gccaguuguguugaaauau

SEQ ID NO: 283323 - RNA, 19 nt, Artificial Sequence
  Description of Artificial Sequence: Synthetic oligonucleotide
  Antisense strand to SEQ ID NO: 283322
auauuucaacacaacuggc

SEQ ID NO: 283324 - RNA, 19 nt, Artificial Sequence
  Description of Artificial Sequence: Synthetic oligonucleotide
  Sense strand starting at position 2999 of SEQ ID NO: 3640
agcugucaugcagaagaga

SEQ ID NO: 283325 - RNA, 19 nt, Artificial Sequence
  Description of Artificial Sequence: Synthetic oligonucleotide
  Antisense strand to SEQ ID NO: 283324
ucucuucugcaugacagcu

SEQ ID NO: 283326 - RNA, 19 nt, Artificial Sequence
  Description of Artificial Sequence: Synthetic oligonucleotide
  Sense strand starting at position 3045 of SEQ ID NO: 3640
ggguauaacuaacauuaag

SEQ ID NO: 283327 - RNA, 19 nt, Artificial Sequence
  Description of Artificial Sequence: Synthetic oligonucleotide
  Antisense strand to SEQ ID NO: 283326
cuuaauguuaguuauaccc

SEQ ID NO: 283328 - RNA, 19 nt, Artificial Sequence
  Description of Artificial Sequence: Synthetic oligonucleotide
  Sense strand starting at position 3064 of SEQ ID NO: 3640
ggaagaaagucauagggua

SEQ ID NO: 283329 - RNA, 19 nt, Artificial Sequence
  Description of Artificial Sequence: Synthetic oligonucleotide
  Antisense strand to SEQ ID NO: 283328
uacccuaugacuuucuucc

SEQ ID NO: 283330 - RNA, 19 nt, Artificial Sequence
  Description of Artificial Sequence: Synthetic oligonucleotide
  Sense strand starting at position 3112 of SEQ ID NO: 3640
uuucuaauagugcauagua

SEQ ID NO: 283331 - RNA, 19 nt, Artificial Sequence
  Description of Artificial Sequence: Synthetic oligonucleotide
  Antisense strand to SEQ ID NO: 283330
uacuaugcacuauuagaaa

SEQ ID NO: 283332 - RNA, 19 nt, Artificial Sequence
  Description of Artificial Sequence: Synthetic oligonucleotide
  Sense strand starting at position 3114 of SEQ ID NO: 3640
ucuaauagugcauaguauu

SEQ ID NO: 283333 - RNA, 19 nt, Artificial Sequence
  Description of Artificial Sequence: Synthetic oligonucleotide
  Antisense strand to SEQ ID NO: 283332
aauacuaugcacuauuaga

SEQ ID NO: 283334 - RNA, 19 nt, Artificial Sequence
  Description of Artificial Sequence: Synthetic oligonucleotide
  Sense strand starting at position 3211 of SEQ ID NO: 3640
ugaugcuugcagggauuaa

SEQ ID NO: 283335 - RNA, 19 nt, Artificial Sequence
  Description of Artificial Sequence: Synthetic oligonucleotide
  Antisense strand to SEQ ID NO: 283334
uuaaucccugcaagcauca

SEQ ID NO: 283336 - RNA, 19 nt, Artificial Sequence
  Description of Artificial Sequence: Synthetic oligonucleotide
  Sense strand starting at position 3401 of SEQ ID NO: 3640
aaagaauaauguguguaug

SEQ ID NO: 283337 - RNA, 19 nt, Artificial Sequence
  Description of Artificial Sequence: Synthetic oligonucleotide
  Antisense strand to SEQ ID NO: 283336
cauacacacauuauucuuu

SEQ ID NO: 283338 - RNA, 19 nt, Artificial Sequence
  Description of Artificial Sequence: Synthetic oligonucleotide
  Sense strand starting at position 3459 of SEQ ID NO: 3640
uuggaugcccguugagaau

SEQ ID NO: 283339 - RNA, 19 nt, Artificial Sequence
  Description of Artificial Sequence: Synthetic oligonucleotide
  Antisense strand to SEQ ID NO: 283338
auucucaacgggcauccaa

SEQ ID NO: 283340 - RNA, 19 nt, Artificial Sequence
  Description of Artificial Sequence: Synthetic oligonucleotide
  Sense strand starting at position 3468 of SEQ ID NO: 3640
cguugagaauguuuauauu

SEQ ID NO: 283341 - RNA, 19 nt, Artificial Sequence
  Description of Artificial Sequence: Synthetic oligonucleotide
  Antisense strand to SEQ ID NO: 283340
aauauaaacauucucaacg

SEQ ID NO: 283342 - RNA, 19 nt, Artificial Sequence
  Description of Artificial Sequence: Synthetic oligonucleotide
  Sense strand starting at position 3498 of SEQ ID NO: 3640
ugagguuuaugguuagcaa

SEQ ID NO: 283343 - RNA, 19 nt, Artificial Sequence
  Description of Artificial Sequence: Synthetic oligonucleotide
  Antisense strand to SEQ ID NO: 283342
uugcuaaccauaaaccuca

SEQ ID NO: 283344 - RNA, 19 nt, Artificial Sequence
  Description of Artificial Sequence: Synthetic oligonucleotide
  Sense strand starting at position 3499 of SEQ ID NO: 3640
gagguuuaugguuagcaaa

SEQ ID NO: 283345 - RNA, 19 nt, Artificial Sequence
  Description of Artificial Sequence: Synthetic oligonucleotide
  Antisense strand to SEQ ID NO: 283344
uuugcuaaccauaaaccuc

SEQ ID NO: 283346 - RNA, 19 nt, Artificial Sequence
  Description of Artificial Sequence: Synthetic oligonucleotide
  Sense strand starting at position 3545 of SEQ ID NO: 3640
uaucuuauuguauggcaga

SEQ ID NO: 283347 - RNA, 19 nt, Artificial Sequence
  Description of Artificial Sequence: Synthetic oligonucleotide
  Antisense strand to SEQ ID NO: 283346
ucugccauacaauaagaua

SEQ ID NO: 283348 - RNA, 19 nt, Artificial Sequence
  Description of Artificial Sequence: Synthetic oligonucleotide
  Sense strand starting at position 3562 of SEQ ID NO: 3640
gaaggagauuuccauagua

SEQ ID NO: 283349 - RNA, 19 nt, Artificial Sequence
  Description of Artificial Sequence: Synthetic oligonucleotide
  Antisense strand to SEQ ID NO: 283348
uacuauggaaaucuccuuc

SEQ ID NO: 283350 - RNA, 19 nt, Artificial Sequence
  Description of Artificial Sequence: Synthetic oligonucleotide
  Sense strand starting at position 3567 of SEQ ID NO: 3640
agauuuccauaguagaaua

SEQ ID NO: 283351 - RNA, 19 nt, Artificial Sequence
  Description of Artificial Sequence: Synthetic oligonucleotide
  Antisense strand to SEQ ID NO: 283350
uauucuacuauggaaaucu

SEQ ID NO: 283352 - RNA, 19 nt, Artificial Sequence
  Description of Artificial Sequence: Synthetic oligonucleotide
  Sense strand starting at position 3724 of SEQ ID NO: 3640
acuguaggguuacugagaa

SEQ ID NO: 283353 - RNA, 19 nt, Artificial Sequence
  Description of Artificial Sequence: Synthetic oligonucleotide
  Antisense strand to SEQ ID NO: 283352
uucucaguaacccuacagu

SEQ ID NO: 283354 - RNA, 19 nt, Artificial Sequence
  Description of Artificial Sequence: Synthetic oligonucleotide
  Sense strand starting at position 3728 of SEQ ID NO: 3640
uaggguuacugagaaauua

SEQ ID NO: 283355 - RNA, 19 nt, Artificial Sequence
  Description of Artificial Sequence: Synthetic oligonucleotide
  Antisense strand to SEQ ID NO: 283354
uaauuucucaguaacccua

SEQ ID NO: 283356 - RNA, 19 nt, Artificial Sequence
  Description of Artificial Sequence: Synthetic oligonucleotide
  Sense strand starting at position 3771 of SEQ ID NO: 3640
acuuuauauugccuaguau

SEQ ID NO: 283357 - RNA, 19 nt, Artificial Sequence
  Description of Artificial Sequence: Synthetic oligonucleotide
  Antisense strand to SEQ ID NO: 283356
auacuaggcaauauaaagu

SEQ ID NO: 283358 - RNA, 19 nt, Artificial Sequence
  Description of Artificial Sequence: Synthetic oligonucleotide
  Sense strand starting at position 3772 of SEQ ID NO: 3640
cuuuauauugccuaguaug

SEQ ID NO: 283359 - RNA, 19 nt, Artificial Sequence
  Description of Artificial Sequence: Synthetic oligonucleotide
  Antisense strand to SEQ ID NO: 283358
cauacuaggcaauauaaag

SEQ ID NO: 283360 - RNA, 19 nt, Artificial Sequence
  Description of Artificial Sequence: Synthetic oligonucleotide
  Sense strand starting at position 3786 of SEQ ID NO: 3640
guauguagacagcaauaau

SEQ ID NO: 283361 - RNA, 19 nt, Artificial Sequence
  Description of Artificial Sequence: Synthetic oligonucleotide
  Antisense strand to SEQ ID NO: 283360
auuauugcugucuacauac

SEQ ID NO: 283362 - RNA, 19 nt, Artificial Sequence
  Description of Artificial Sequence: Synthetic oligonucleotide
  Sense strand starting at position 3856 of SEQ ID NO: 3640
cguaucacaucagcugaua

SEQ ID NO: 283363 - RNA, 19 nt, Artificial Sequence
  Description of Artificial Sequence: Synthetic oligonucleotide
  Antisense strand to SEQ ID NO: 283362
uaucagcugaugugauacg

SEQ ID NO: 283364 - RNA, 19 nt, Artificial Sequence
  Description of Artificial Sequence: Synthetic oligonucleotide
  Sense strand starting at position 3893 of SEQ ID NO: 3640
uuaaguuucugguuaucug

SEQ ID NO: 283365 - RNA, 19 nt, Artificial Sequence
  Description of Artificial Sequence: Synthetic oligonucleotide
  Antisense strand to SEQ ID NO: 283364
cagauaaccagaaacuuaa

SEQ ID NO: 283366 - RNA, 19 nt, Artificial Sequence
  Description of Artificial Sequence: Synthetic oligonucleotide
  Sense strand starting at position 3903 of SEQ ID NO: 3640
gguuaucugguguagaaug

SEQ ID NO: 283367 - RNA, 19 nt, Artificial Sequence
  Description of Artificial Sequence: Synthetic oligonucleotide
  Antisense strand to SEQ ID NO: 283366
cauucuacaccagauaacc

SEQ ID NO: 283368 - RNA, 19 nt, Artificial Sequence
  Description of Artificial Sequence: Synthetic oligonucleotide
  Sense strand starting at position 2072 of SEQ ID NO: 3641
gaacuuguguccugcguca

SEQ ID NO: 283369 - RNA, 19 nt, Artificial Sequence
  Description of Artificial Sequence: Synthetic oligonucleotide
  Antisense strand to SEQ ID NO: 283368
ugacgcaggacacaaguuc

SEQ ID NO: 283370 - RNA, 19 nt, Artificial Sequence
  Description of Artificial Sequence: Synthetic oligonucleotide
  Sense strand starting at position 2074 of SEQ ID NO: 3641
acuuguguccugcgucaac

SEQ ID NO: 283371 - RNA, 19 nt, Artificial Sequence
  Description of Artificial Sequence: Synthetic oligonucleotide
  Antisense strand to SEQ ID NO: 283370
guugacgcaggacacaagu

SEQ ID NO: 283372 - RNA, 19 nt, Artificial Sequence
  Description of Artificial Sequence: Synthetic oligonucleotide
  Sense strand starting at position 2085 of SEQ ID NO: 3641
gcgucaacaguguguggaa

SEQ ID NO: 283373 - RNA, 19 nt, Artificial Sequence
  Description of Artificial Sequence: Synthetic oligonucleotide
  Antisense strand to SEQ ID NO: 283372
uuccacacacuguugacgc

SEQ ID NO: 283374 - RNA, 19 nt, Artificial Sequence
  Description of Artificial Sequence: Synthetic oligonucleotide
  Sense strand starting at position 3092 of SEQ ID NO: 3641
cgcaaaugugcugguuuga

SEQ ID NO: 283375 - RNA, 19 nt, Artificial Sequence
  Description of Artificial Sequence: Synthetic oligonucleotide
  Antisense strand to SEQ ID NO: 283374
ucaaaccagcacauuugcg

SEQ ID NO: 283376 - RNA, 19 nt, Artificial Sequence
  Description of Artificial Sequence: Synthetic oligonucleotide
  Sense strand starting at position 3629 of SEQ ID NO: 3641
agagcacauugguaagagu

SEQ ID NO: 283377 - RNA, 19 nt, Artificial Sequence
  Description of Artificial Sequence: Synthetic oligonucleotide
  Antisense strand to SEQ ID NO: 283376
acucuuaccaaugugcucu

SEQ ID NO: 283378 - RNA, 19 nt, Artificial Sequence
  Description of Artificial Sequence: Synthetic oligonucleotide
  Sense strand starting at position 3632 of SEQ ID NO: 3641
gcacauugguaagagugua

SEQ ID NO: 283379 - RNA, 19 nt, Artificial Sequence
  Description of Artificial Sequence: Synthetic oligonucleotide
  Antisense strand to SEQ ID NO: 283378
uacacucuuaccaaugugc

SEQ ID NO: 283380 - RNA, 19 nt, Artificial Sequence
  Description of Artificial Sequence: Synthetic oligonucleotide
  Sense strand starting at position 2045 of SEQ ID NO: 3642
gaacuuguguccugcguca

SEQ ID NO: 283381 - RNA, 19 nt, Artificial Sequence
  Description of Artificial Sequence: Synthetic oligonucleotide
  Antisense strand to SEQ ID NO: 283380
ugacgcaggacacaaguuc

SEQ ID NO: 283382 - RNA, 19 nt, Artificial Sequence
  Description of Artificial Sequence: Synthetic oligonucleotide
  Sense strand starting at position 2047 of SEQ ID NO: 3642
acuuguguccugcgucaac

SEQ ID NO: 283383 - RNA, 19 nt, Artificial Sequence
  Description of Artificial Sequence: Synthetic oligonucleotide
  Antisense strand to SEQ ID NO: 283382
guugacgcaggacacaagu

SEQ ID NO: 283384 - RNA, 19 nt, Artificial Sequence
  Description of Artificial Sequence: Synthetic oligonucleotide
  Sense strand starting at position 2058 of SEQ ID NO: 3642
gcgucaacaguguguggaa

SEQ ID NO: 283385 - RNA, 19 nt, Artificial Sequence
  Description of Artificial Sequence: Synthetic oligonucleotide
  Antisense strand to SEQ ID NO: 283384
uuccacacacuguugacgc

SEQ ID NO: 283386 - RNA, 19 nt, Artificial Sequence
  Description of Artificial Sequence: Synthetic oligonucleotide
  Sense strand starting at position 2547 of SEQ ID NO: 3642
accaguauuuagugguauu

SEQ ID NO: 283387 - RNA, 19 nt, Artificial Sequence
  Description of Artificial Sequence: Synthetic oligonucleotide
  Antisense strand to SEQ ID NO: 283386
aauaccacuaaauacuggu

SEQ ID NO: 283388 - RNA, 19 nt, Artificial Sequence
  Description of Artificial Sequence: Synthetic oligonucleotide
  Sense strand starting at position 2895 of SEQ ID NO: 3642
gccaucagccaauguguua

SEQ ID NO: 283389 - RNA, 19 nt, Artificial Sequence
  Description of Artificial Sequence: Synthetic oligonucleotide
  Antisense strand to SEQ ID NO: 283388
uaacacauuggcugauggc

SEQ ID NO: 283390 - RNA, 19 nt, Artificial Sequence
  Description of Artificial Sequence: Synthetic oligonucleotide
  Sense strand starting at position 2900 of SEQ ID NO: 3642
cagccaauguguuagacua

SEQ ID NO: 283391 - RNA, 19 nt, Artificial Sequence
  Description of Artificial Sequence: Synthetic oligonucleotide
  Antisense strand to SEQ ID NO: 283390
uagucuaacacauuggcug

SEQ ID NO: 283392 - RNA, 19 nt, Artificial Sequence
  Description of Artificial Sequence: Synthetic oligonucleotide
  Sense strand starting at position 2902 of SEQ ID NO: 3642
gccaauguguuagacuauc

SEQ ID NO: 283393 - RNA, 19 nt, Artificial Sequence
  Description of Artificial Sequence: Synthetic oligonucleotide
  Antisense strand to SEQ ID NO: 283392
gauagucuaacacauuggc

SEQ ID NO: 283394 - RNA, 19 nt, Artificial Sequence
  Description of Artificial Sequence: Synthetic oligonucleotide
  Sense strand starting at position 3078 of SEQ ID NO: 3642
gccgcuuugcguccugaau

SEQ ID NO: 283395 - RNA, 19 nt, Artificial Sequence
  Description of Artificial Sequence: Synthetic oligonucleotide
  Antisense strand to SEQ ID NO: 283394
auucaggacgcaaagcggc

SEQ ID NO: 283396 - RNA, 19 nt, Artificial Sequence
  Description of Artificial Sequence: Synthetic oligonucleotide
  Sense strand starting at position 3080 of SEQ ID NO: 3642
cgcuuugcguccugaaugu

SEQ ID NO: 283397 - RNA, 19 nt, Artificial Sequence
  Description of Artificial Sequence: Synthetic oligonucleotide
  Antisense strand to SEQ ID NO: 283396
acauucaggacgcaaagcg

SEQ ID NO: 283398 - RNA, 19 nt, Artificial Sequence
  Description of Artificial Sequence: Synthetic oligonucleotide
  Sense strand starting at position 3087 of SEQ ID NO: 3642
cguccugaaugucaugaca

SEQ ID NO: 283399 - RNA, 19 nt, Artificial Sequence
  Description of Artificial Sequence: Synthetic oligonucleotide
  Antisense strand to SEQ ID NO: 283398
ugucaugacauucaggacg

SEQ ID NO: 283400 - RNA, 19 nt, Artificial Sequence
  Description of Artificial Sequence: Synthetic oligonucleotide
  Sense strand starting at position 3089 of SEQ ID NO: 3642
uccugaaugucaugacagu

SEQ ID NO: 283401 - RNA, 19 nt, Artificial Sequence
  Description of Artificial Sequence: Synthetic oligonucleotide
  Antisense strand to SEQ ID NO: 283400
acugucaugacauucagga

SEQ ID NO: 283402 - RNA, 19 nt, Artificial Sequence
  Description of Artificial Sequence: Synthetic oligonucleotide
  Sense strand starting at position 3095 of SEQ ID NO: 3642
augucaugacagugaugau

SEQ ID NO: 283403 - RNA, 19 nt, Artificial Sequence
  Description of Artificial Sequence: Synthetic oligonucleotide
  Antisense strand to SEQ ID NO: 283402
aucaucacugucaugacau

SEQ ID NO: 283404 - RNA, 19 nt, Artificial Sequence
  Description of Artificial Sequence: Synthetic oligonucleotide
  Sense strand starting at position 3098 of SEQ ID NO: 3642
ucaugacagugaugauaac

SEQ ID NO: 283405 - RNA, 19 nt, Artificial Sequence
  Description of Artificial Sequence: Synthetic oligonucleotide
  Antisense strand to SEQ ID NO: 283404
guuaucaucacugucauga

SEQ ID NO: 283406 - RNA, 19 nt, Artificial Sequence
  Description of Artificial Sequence: Synthetic oligonucleotide
  Sense strand starting at position 3104 of SEQ ID NO: 3642
cagugaugauaacaguaau

SEQ ID NO: 283407 - RNA, 19 nt, Artificial Sequence
  Description of Artificial Sequence: Synthetic oligonucleotide
  Antisense strand to SEQ ID NO: 283406
auuacuguuaucaucacug

SEQ ID NO: 283408 - RNA, 19 nt, Artificial Sequence
  Description of Artificial Sequence: Synthetic oligonucleotide
  Sense strand starting at position 3216 of SEQ ID NO: 3642
ggagucauccugugugccu

SEQ ID NO: 283409 - RNA, 19 nt, Artificial Sequence
  Description of Artificial Sequence: Synthetic oligonucleotide
  Antisense strand to SEQ ID NO: 283408
aggcacacaggaugacucc

SEQ ID NO: 283410 - RNA, 19 nt, Artificial Sequence
  Description of Artificial Sequence: Synthetic oligonucleotide
  Sense strand starting at position 3229 of SEQ ID NO: 3642
gugccucagucagaccauu

SEQ ID NO: 283411 - RNA, 19 nt, Artificial Sequence
  Description of Artificial Sequence: Synthetic oligonucleotide
  Antisense strand to SEQ ID NO: 283410
aauggucugacugaggcac

SEQ ID NO: 283412 - RNA, 19 nt, Artificial Sequence
  Description of Artificial Sequence: Synthetic oligonucleotide
  Sense strand starting at position 3254 of SEQ ID NO: 3642
guacaaugaccguaaguag

SEQ ID NO: 283413 - RNA, 19 nt, Artificial Sequence
  Description of Artificial Sequence: Synthetic oligonucleotide
  Antisense strand to SEQ ID NO: 283412
cuacuuacggucauuguac

SEQ ID NO: 283414 - RNA, 19 nt, Artificial Sequence
  Description of Artificial Sequence: Synthetic oligonucleotide
  Sense strand starting at position 3286 of SEQ ID NO: 3642
uuuggaugaugucaacuau

SEQ ID NO: 283415 - RNA, 19 nt, Artificial Sequence
  Description of Artificial Sequence: Synthetic oligonucleotide
  Antisense strand to SEQ ID NO: 283414
auaguugacaucauccaaa

SEQ ID NO: 283416 - RNA, 19 nt, Artificial Sequence
  Description of Artificial Sequence: Synthetic oligonucleotide
  Sense strand starting at position 3354 of SEQ ID NO: 3642
gcugguguaagagauaaac

SEQ ID NO: 283417 - RNA, 19 nt, Artificial Sequence
  Description of Artificial Sequence: Synthetic oligonucleotide
  Antisense strand to SEQ ID NO: 283416
guuuaucucuuacaccagc

SEQ ID NO: 283418 - RNA, 19 nt, Artificial Sequence
  Description of Artificial Sequence: Synthetic oligonucleotide
  Sense strand starting at position 3374 of SEQ ID NO: 3642
auuugaacuugucagaaca

SEQ ID NO: 283419 - RNA, 19 nt, Artificial Sequence
  Description of Artificial Sequence: Synthetic oligonucleotide
  Antisense strand to SEQ ID NO: 283418
uguucugacaaguucaaau

SEQ ID NO: 283420 - RNA, 19 nt, Artificial Sequence
  Description of Artificial Sequence: Synthetic oligonucleotide
  Sense strand starting at position 3376 of SEQ ID NO: 3642
uugaacuugucagaacauc

SEQ ID NO: 283421 - RNA, 19 nt, Artificial Sequence
  Description of Artificial Sequence: Synthetic oligonucleotide
  Antisense strand to SEQ ID NO: 283420
gauguucugacaaguucaa

SEQ ID NO: 283422 - RNA, 19 nt, Artificial Sequence
  Description of Artificial Sequence: Synthetic oligonucleotide
  Sense strand starting at position 3524 of SEQ ID NO: 3642
uuagcagucauagguaaug

SEQ ID NO: 283423 - RNA, 19 nt, Artificial Sequence
  Description of Artificial Sequence: Synthetic oligonucleotide
  Antisense strand to SEQ ID NO: 283422
cauuaccuaugacugcuaa

SEQ ID NO: 283424 - RNA, 19 nt, Artificial Sequence
  Description of Artificial Sequence: Synthetic oligonucleotide
  Sense strand starting at position 3526 of SEQ ID NO: 3642
agcagucauagguaauguu

SEQ ID NO: 283425 - RNA, 19 nt, Artificial Sequence
  Description of Artificial Sequence: Synthetic oligonucleotide
  Antisense strand to SEQ ID NO: 283424
aacauuaccuaugacugcu

SEQ ID NO: 283426 - RNA, 19 nt, Artificial Sequence
  Description of Artificial Sequence: Synthetic oligonucleotide
  Sense strand starting at position 3534 of SEQ ID NO: 3642
uagguaauguugucggaaa

SEQ ID NO: 283427 - RNA, 19 nt, Artificial Sequence
  Description of Artificial Sequence: Synthetic oligonucleotide
  Antisense strand to SEQ ID NO: 283426
uuuccgacaacauuaccua

SEQ ID NO: 283428 - RNA, 19 nt, Artificial Sequence
  Description of Artificial Sequence: Synthetic oligonucleotide
  Sense strand starting at position 3564 of SEQ ID NO: 3642
guggguugguuguacaaga

SEQ ID NO: 283429 - RNA, 19 nt, Artificial Sequence
  Description of Artificial Sequence: Synthetic oligonucleotide
  Antisense strand to SEQ ID NO: 283428
ucuuguacaaccaacccac

SEQ ID NO: 283430 - RNA, 19 nt, Artificial Sequence
  Description of Artificial Sequence: Synthetic oligonucleotide
  Sense strand starting at position 3590 of SEQ ID NO: 3642
guuagaauuugcuuucuuc

SEQ ID NO: 283431 - RNA, 19 nt, Artificial Sequence
  Description of Artificial Sequence: Synthetic oligonucleotide
  Antisense strand to SEQ ID NO: 283430
gaagaaagcaaauucuaac

SEQ ID NO: 283432 - RNA, 19 nt, Artificial Sequence
  Description of Artificial Sequence: Synthetic oligonucleotide
  Sense strand starting at position 3597 of SEQ ID NO: 3642
uuugcuuucuucugagcuu

SEQ ID NO: 283433 - RNA, 19 nt, Artificial Sequence
  Description of Artificial Sequence: Synthetic oligonucleotide
  Antisense strand to SEQ ID NO: 283432
aagcucagaagaaagcaaa

SEQ ID NO: 283434 - RNA, 19 nt, Artificial Sequence
  Description of Artificial Sequence: Synthetic oligonucleotide
  Sense strand starting at position 3598 of SEQ ID NO: 3642
uugcuuucuucugagcuua

SEQ ID NO: 283435 - RNA, 19 nt, Artificial Sequence
  Description of Artificial Sequence: Synthetic oligonucleotide
  Antisense strand to SEQ ID NO: 283434
uaagcucagaagaaagcaa

SEQ ID NO: 283436 - RNA, 19 nt, Artificial Sequence
  Description of Artificial Sequence: Synthetic oligonucleotide
  Sense strand starting at position 3600 of SEQ ID NO: 3642
gcuuucuucugagcuuaag

SEQ ID NO: 283437 - RNA, 19 nt, Artificial Sequence
  Description of Artificial Sequence: Synthetic oligonucleotide
  Antisense strand to SEQ ID NO: 283436
cuuaagcucagaagaaagc

SEQ ID NO: 283438 - RNA, 19 nt, Artificial Sequence
  Description of Artificial Sequence: Synthetic oligonucleotide
  Sense strand starting at position 3606 of SEQ ID NO: 3642
uucugagcuuaaguacuaa

SEQ ID NO: 283439 - RNA, 19 nt, Artificial Sequence
  Description of Artificial Sequence: Synthetic oligonucleotide
  Antisense strand to SEQ ID NO: 283438
uuaguacuuaagcucagaa

SEQ ID NO: 283440 - RNA, 19 nt, Artificial Sequence
  Description of Artificial Sequence: Synthetic oligonucleotide
  Sense strand starting at position 3610 of SEQ ID NO: 3642
gagcuuaaguacuaaagua

SEQ ID NO: 283441 - RNA, 19 nt, Artificial Sequence
  Description of Artificial Sequence: Synthetic oligonucleotide
  Antisense strand to SEQ ID NO: 283440
uacuuuaguacuuaagcuc

SEQ ID NO: 283442 - RNA, 19 nt, Artificial Sequence
  Description of Artificial Sequence: Synthetic oligonucleotide
  Sense strand starting at position 3652 of SEQ ID NO: 3642
ggaagaauguaggcagcua

SEQ ID NO: 283443 - RNA, 19 nt, Artificial Sequence
  Description of Artificial Sequence: Synthetic oligonucleotide
  Antisense strand to SEQ ID NO: 283442
uagcugccuacauucuucc

SEQ ID NO: 283444 - RNA, 19 nt, Artificial Sequence
  Description of Artificial Sequence: Synthetic oligonucleotide
  Sense strand starting at position 3660 of SEQ ID NO: 3642
guaggcagcuaaucugaga

SEQ ID NO: 283445 - RNA, 19 nt, Artificial Sequence
  Description of Artificial Sequence: Synthetic oligonucleotide
  Antisense strand to SEQ ID NO: 283444
ucucagauuagcugccuac

SEQ ID NO: 283446 - RNA, 19 nt, Artificial Sequence
  Description of Artificial Sequence: Synthetic oligonucleotide
  Sense strand starting at position 3663 of SEQ ID NO: 3642
ggcagcuaaucugagaagu

SEQ ID NO: 283447 - RNA, 19 nt, Artificial Sequence
  Description of Artificial Sequence: Synthetic oligonucleotide
  Antisense strand to SEQ ID NO: 283446
acuucucagauuagcugcc

SEQ ID NO: 283448 - RNA, 19 nt, Artificial Sequence
  Description of Artificial Sequence: Synthetic oligonucleotide
  Sense strand starting at position 3719 of SEQ ID NO: 3642
agcuuuaacugagagcuga

SEQ ID NO: 283449 - RNA, 19 nt, Artificial Sequence
  Description of Artificial Sequence: Synthetic oligonucleotide
  Antisense strand to SEQ ID NO: 283448
ucagcucucaguuaaagcu

SEQ ID NO: 283450 - RNA, 19 nt, Artificial Sequence
  Description of Artificial Sequence: Synthetic oligonucleotide
  Sense strand starting at position 3803 of SEQ ID NO: 3642
ucuuaaguguaggauuuaa

SEQ ID NO: 283451 - RNA, 19 nt, Artificial Sequence
  Description of Artificial Sequence: Synthetic oligonucleotide
  Antisense strand to SEQ ID NO: 283450
uuaaauccuacacuuaaga

SEQ ID NO: 283452 - RNA, 19 nt, Artificial Sequence
  Description of Artificial Sequence: Synthetic oligonucleotide
  Sense strand starting at position 3825 of SEQ ID NO: 3642
ggaacugaguaggagcaau

SEQ ID NO: 283453 - RNA, 19 nt, Artificial Sequence
  Description of Artificial Sequence: Synthetic oligonucleotide
  Antisense strand to SEQ ID NO: 283452
auugcuccuacucaguucc

SEQ ID NO: 283454 - RNA, 19 nt, Artificial Sequence
  Description of Artificial Sequence: Synthetic oligonucleotide
  Sense strand starting at position 641 of SEQ ID NO: 3646
aagagauuguaccauacga

SEQ ID NO: 283455 - RNA, 19 nt, Artificial Sequence
  Description of Artificial Sequence: Synthetic oligonucleotide
  Antisense strand to SEQ ID NO: 283454
ucguaugguacaaucucuu

SEQ ID NO: 283456 - RNA, 19 nt, Artificial Sequence
  Description of Artificial Sequence: Synthetic oligonucleotide
  Sense strand starting at position 675 of SEQ ID NO: 3646
ugagaugucuacuuauaca

SEQ ID NO: 283457 - RNA, 19 nt, Artificial Sequence
  Description of Artificial Sequence: Synthetic oligonucleotide
  Antisense strand to SEQ ID NO: 283456
uguauaaguagacaucuca

SEQ ID NO: 283458 - RNA, 19 nt, Artificial Sequence
  Description of Artificial Sequence: Synthetic oligonucleotide
  Sense strand starting at position 1157 of SEQ ID NO: 3646
ugugguauuauugggcaca

SEQ ID NO: 283459 - RNA, 19 nt, Artificial Sequence
  Description of Artificial Sequence: Synthetic oligonucleotide
  Antisense strand to SEQ ID NO: 283458
ugugcccaauaauaccaca

SEQ ID NO: 283460 - RNA, 19 nt, Artificial Sequence
  Description of Artificial Sequence: Synthetic oligonucleotide
  Sense strand starting at position 1159 of SEQ ID NO: 3646
ugguauuauugggcacaga

SEQ ID NO: 283461 - RNA, 19 nt, Artificial Sequence
  Description of Artificial Sequence: Synthetic oligonucleotide
  Antisense strand to SEQ ID NO: 283460
ucugugcccaauaauacca

SEQ ID NO: 283462 - RNA, 19 nt, Artificial Sequence
  Description of Artificial Sequence: Synthetic oligonucleotide
  Sense strand starting at position 1160 of SEQ ID NO: 3646
gguauuauugggcacagac

SEQ ID NO: 283463 - RNA, 19 nt, Artificial Sequence
  Description of Artificial Sequence: Synthetic oligonucleotide
  Antisense strand to SEQ ID NO: 283462
gucugugcccaauaauacc

SEQ ID NO: 283464 - RNA, 19 nt, Artificial Sequence
  Description of Artificial Sequence: Synthetic oligonucleotide
  Sense strand starting at position 1225 of SEQ ID NO: 3646
ucgcuugagccggagaguu

SEQ ID NO: 283465 - RNA, 19 nt, Artificial Sequence
  Description of Artificial Sequence: Synthetic oligonucleotide
  Antisense strand to SEQ ID NO: 283464
aacucuccggcucaagcga

SEQ ID NO: 283466 - RNA, 19 nt, Artificial Sequence
  Description of Artificial Sequence: Synthetic oligonucleotide
  Sense strand starting at position 1599 of SEQ ID NO: 3646
ugugacugccaacgugaau

SEQ ID NO: 283467 - RNA, 19 nt, Artificial Sequence
  Description of Artificial Sequence: Synthetic oligonucleotide
  Antisense strand to SEQ ID NO: 283466
auucacguuggcagucaca

SEQ ID NO: 283468 - RNA, 19 nt, Artificial Sequence
  Description of Artificial Sequence: Synthetic oligonucleotide
  Sense strand starting at position 2656 of SEQ ID NO: 3646
ucacucaggucauugcuaa

SEQ ID NO: 283469 - RNA, 19 nt, Artificial Sequence
  Description of Artificial Sequence: Synthetic oligonucleotide
  Antisense strand to SEQ ID NO: 283468
uuagcaaugaccugaguga

SEQ ID NO: 283470 - RNA, 19 nt, Artificial Sequence
  Description of Artificial Sequence: Synthetic oligonucleotide
  Sense strand starting at position 2660 of SEQ ID NO: 3646
ucaggucauugcuaaguuu

SEQ ID NO: 283471 - RNA, 19 nt, Artificial Sequence
  Description of Artificial Sequence: Synthetic oligonucleotide
  Antisense strand to SEQ ID NO: 283470
aaacuuagcaaugaccuga

SEQ ID NO: 283472 - RNA, 19 nt, Artificial Sequence
  Description of Artificial Sequence: Synthetic oligonucleotide
  Sense strand starting at position 2739 of SEQ ID NO: 3646
uugcauaguucgucaguca

SEQ ID NO: 283473 - RNA, 19 nt, Artificial Sequence
  Description of Artificial Sequence: Synthetic oligonucleotide
  Antisense strand to SEQ ID NO: 283472
ugacugacgaacuaugcaa

SEQ ID NO: 283474 - RNA, 19 nt, Artificial Sequence
  Description of Artificial Sequence: Synthetic oligonucleotide
  Sense strand starting at position 2740 of SEQ ID NO: 3646
ugcauaguucgucagucaa

SEQ ID NO: 283475 - RNA, 19 nt, Artificial Sequence
  Description of Artificial Sequence: Synthetic oligonucleotide
  Antisense strand to SEQ ID NO: 283474
uugacugacgaacuaugca

SEQ ID NO: 283476 - RNA, 19 nt, Artificial Sequence
  Description of Artificial Sequence: Synthetic oligonucleotide
  Sense strand starting at position 2742 of SEQ ID NO: 3646
cauaguucgucagucaaac

SEQ ID NO: 283477 - RNA, 19 nt, Artificial Sequence
  Description of Artificial Sequence: Synthetic oligonucleotide
  Antisense strand to SEQ ID NO: 283476
guuugacugacgaacuaug

SEQ ID NO: 283478 - RNA, 19 nt, Artificial Sequence
  Description of Artificial Sequence: Synthetic oligonucleotide
  Sense strand starting at position 2748 of SEQ ID NO: 3646
ucgucagucaaacaucagu

SEQ ID NO: 283479 - RNA, 19 nt, Artificial Sequence
  Description of Artificial Sequence: Synthetic oligonucleotide
  Antisense strand to SEQ ID NO: 283478
acugauguuugacugacga

SEQ ID NO: 283480 - RNA, 19 nt, Artificial Sequence
  Description of Artificial Sequence: Synthetic oligonucleotide
  Sense strand starting at position 2753 of SEQ ID NO: 3646
agucaaacaucaguuaaag

SEQ ID NO: 283481 - RNA, 19 nt, Artificial Sequence
  Description of Artificial Sequence: Synthetic oligonucleotide
  Antisense strand to SEQ ID NO: 283480
cuuuaacugauguuugacu

SEQ ID NO: 283482 - RNA, 19 nt, Artificial Sequence
  Description of Artificial Sequence: Synthetic oligonucleotide
  Sense strand starting at position 3037 of SEQ ID NO: 3646
gacuaaucugcaggucguu

SEQ ID NO: 283483 - RNA, 19 nt, Artificial Sequence
  Description of Artificial Sequence: Synthetic oligonucleotide
  Antisense strand to SEQ ID NO: 283482
aacgaccugcagauuaguc

SEQ ID NO: 283484 - RNA, 19 nt, Artificial Sequence
  Description of Artificial Sequence: Synthetic oligonucleotide
  Sense strand starting at position 3050 of SEQ ID NO: 3646
gucguuugcucgucuccaa

SEQ ID NO: 283485 - RNA, 19 nt, Artificial Sequence
  Description of Artificial Sequence: Synthetic oligonucleotide
  Antisense strand to SEQ ID NO: 283484
uuggagacgagcaaacgac

SEQ ID NO: 283486 - RNA, 19 nt, Artificial Sequence
  Description of Artificial Sequence: Synthetic oligonucleotide
  Sense strand starting at position 3051 of SEQ ID NO: 3646
ucguuugcucgucuccaaa

SEQ ID NO: 283487 - RNA, 19 nt, Artificial Sequence
  Description of Artificial Sequence: Synthetic oligonucleotide
  Antisense strand to SEQ ID NO: 283486
uuuggagacgagcaaacga

SEQ ID NO: 283488 - RNA, 19 nt, Artificial Sequence
  Description of Artificial Sequence: Synthetic oligonucleotide
  Sense strand starting at position 3768 of SEQ ID NO: 3646
ugggaacuuugauuacucu

SEQ ID NO: 283489 - RNA, 19 nt, Artificial Sequence
  Description of Artificial Sequence: Synthetic oligonucleotide
  Antisense strand to SEQ ID NO: 283488
agaguaaucaaaguuccca

SEQ ID NO: 283490 - RNA, 19 nt, Artificial Sequence
  Description of Artificial Sequence: Synthetic oligonucleotide
  Sense strand starting at position 3816 of SEQ ID NO: 3646
aacgcauaauuugagagaa

SEQ ID NO: 283491 - RNA, 19 nt, Artificial Sequence
  Description of Artificial Sequence: Synthetic oligonucleotide
  Antisense strand to SEQ ID NO: 283490
uucucucaaauuaugcguu

SEQ ID NO: 283492 - RNA, 19 nt, Artificial Sequence
  Description of Artificial Sequence: Synthetic oligonucleotide
  Sense strand starting at position 3818 of SEQ ID NO: 3646
cgcauaauuugagagaaug

SEQ ID NO: 283493 - RNA, 19 nt, Artificial Sequence
  Description of Artificial Sequence: Synthetic oligonucleotide
  Antisense strand to SEQ ID NO: 283492
cauucucucaaauuaugcg

SEQ ID NO: 283494 - RNA, 19 nt, Artificial Sequence
  Description of Artificial Sequence: Synthetic oligonucleotide
  Sense strand starting at position 3938 of SEQ ID NO: 3646
ggcucaucuccacaacaug

SEQ ID NO: 283495 - RNA, 19 nt, Artificial Sequence
  Description of Artificial Sequence: Synthetic oligonucleotide
  Antisense strand to SEQ ID NO: 283494
cauguuguggagaugagcc

SEQ ID NO: 283496 - RNA, 19 nt, Artificial Sequence
  Description of Artificial Sequence: Synthetic oligonucleotide
  Sense strand starting at position 350 of SEQ ID NO: 3643
ucggauuacagacgaagaa

SEQ ID NO: 283497 - RNA, 19 nt, Artificial Sequence
  Description of Artificial Sequence: Synthetic oligonucleotide
  Antisense strand to SEQ ID NO: 283496
uucuucgucuguaauccga

SEQ ID NO: 283498 - RNA, 19 nt, Artificial Sequence
  Description of Artificial Sequence: Synthetic oligonucleotide
  Sense strand starting at position 422 of SEQ ID NO: 3643
agaggagacuaacaaauga

SEQ ID NO: 283499 - RNA, 19 nt, Artificial Sequence
  Description of Artificial Sequence: Synthetic oligonucleotide
  Antisense strand to SEQ ID NO: 283498
ucauuuguuagucuccucu

SEQ ID NO: 283500 - RNA, 19 nt, Artificial Sequence
  Description of Artificial Sequence: Synthetic oligonucleotide
  Sense strand starting at position 773 of SEQ ID NO: 3643
aaauguaagagagguguca

SEQ ID NO: 283501 - RNA, 19 nt, Artificial Sequence
  Description of Artificial Sequence: Synthetic oligonucleotide
  Antisense strand to SEQ ID NO: 283500
ugacaccucucuuacauuu

SEQ ID NO: 283502 - RNA, 19 nt, Artificial Sequence
  Description of Artificial Sequence: Synthetic oligonucleotide
  Sense strand starting at position 775 of SEQ ID NO: 3643
auguaagagaggugucaua

SEQ ID NO: 283503 - RNA, 19 nt, Artificial Sequence
  Description of Artificial Sequence: Synthetic oligonucleotide
  Antisense strand to SEQ ID NO: 283502
uaugacaccucucuuacau

SEQ ID NO: 283504 - RNA, 19 nt, Artificial Sequence
  Description of Artificial Sequence: Synthetic oligonucleotide
  Sense strand starting at position 2272 of SEQ ID NO: 3643
aagagauuguaccauacga

SEQ ID NO: 283505 - RNA, 19 nt, Artificial Sequence
  Description of Artificial Sequence: Synthetic oligonucleotide
  Antisense strand to SEQ ID NO: 283504
ucguaugguacaaucucuu

SEQ ID NO: 283506 - RNA, 19 nt, Artificial Sequence
  Description of Artificial Sequence: Synthetic oligonucleotide
  Sense strand starting at position 2306 of SEQ ID NO: 3643
ugagaugucuacuuauaca

SEQ ID NO: 283507 - RNA, 19 nt, Artificial Sequence
  Description of Artificial Sequence: Synthetic oligonucleotide
  Antisense strand to SEQ ID NO: 283506
uguauaaguagacaucuca

SEQ ID NO: 283508 - RNA, 19 nt, Artificial Sequence
  Description of Artificial Sequence: Synthetic oligonucleotide
  Sense strand starting at position 2788 of SEQ ID NO: 3643
ugugguauuauugggcaca

SEQ ID NO: 283509 - RNA, 19 nt, Artificial Sequence
  Description of Artificial Sequence: Synthetic oligonucleotide
  Antisense strand to SEQ ID NO: 283508
ugugcccaauaauaccaca

SEQ ID NO: 283510 - RNA, 19 nt, Artificial Sequence
  Description of Artificial Sequence: Synthetic oligonucleotide
  Sense strand starting at position 2790 of SEQ ID NO: 3643
ugguauuauugggcacaga

SEQ ID NO: 283511 - RNA, 19 nt, Artificial Sequence
  Description of Artificial Sequence: Synthetic oligonucleotide
  Antisense strand to SEQ ID NO: 283510
ucugugcccaauaauacca

SEQ ID NO: 283512 - RNA, 19 nt, Artificial Sequence
  Description of Artificial Sequence: Synthetic oligonucleotide
  Sense strand starting at position 2791 of SEQ ID NO: 3643
gguauuauugggcacagac

SEQ ID NO: 283513 - RNA, 19 nt, Artificial Sequence
  Description of Artificial Sequence: Synthetic oligonucleotide
  Antisense strand to SEQ ID NO: 283512
gucugugcccaauaauacc

SEQ ID NO: 283514 - RNA, 19 nt, Artificial Sequence
  Description of Artificial Sequence: Synthetic oligonucleotide
  Sense strand starting at position 2856 of SEQ ID NO: 3643
ucgcuugagccggagaguu

SEQ ID NO: 283515 - RNA, 19 nt, Artificial Sequence
  Description of Artificial Sequence: Synthetic oligonucleotide
  Antisense strand to SEQ ID NO: 283514
aacucuccggcucaagcga

SEQ ID NO: 283516 - RNA, 19 nt, Artificial Sequence
  Description of Artificial Sequence: Synthetic oligonucleotide
  Sense strand starting at position 3230 of SEQ ID NO: 3643
ugugacugccaacgugaau

SEQ ID NO: 283517 - RNA, 19 nt, Artificial Sequence
  Description of Artificial Sequence: Synthetic oligonucleotide
  Antisense strand to SEQ ID NO: 283516
auucacguuggcagucaca

SEQ ID NO: 283518 - RNA, 19 nt, Artificial Sequence
  Description of Artificial Sequence: Synthetic oligonucleotide
  Sense strand starting at position 790 of SEQ ID NO: 3644
aaauguaagagagguguca

SEQ ID NO: 283519 - RNA, 19 nt, Artificial Sequence
  Description of Artificial Sequence: Synthetic oligonucleotide
  Antisense strand to SEQ ID NO: 283518
ugacaccucucuuacauuu

SEQ ID NO: 283520 - RNA, 19 nt, Artificial Sequence
  Description of Artificial Sequence: Synthetic oligonucleotide
  Sense strand starting at position 792 of SEQ ID NO: 3644
auguaagagaggugucaua

SEQ ID NO: 283521 - RNA, 19 nt, Artificial Sequence
  Description of Artificial Sequence: Synthetic oligonucleotide
  Antisense strand to SEQ ID NO: 283520
uaugacaccucucuuacau

SEQ ID NO: 283522 - RNA, 19 nt, Artificial Sequence
  Description of Artificial Sequence: Synthetic oligonucleotide
  Sense strand starting at position 1520 of SEQ ID NO: 3644
gugcgcgaucggccagaaa

SEQ ID NO: 283523 - RNA, 19 nt, Artificial Sequence
  Description of Artificial Sequence: Synthetic oligonucleotide
  Antisense strand to SEQ ID NO: 283522
uuucuggccgaucgcgcac

SEQ ID NO: 283524 - RNA, 19 nt, Artificial Sequence
  Description of Artificial Sequence: Synthetic oligonucleotide
  Sense strand starting at position 2503 of SEQ ID NO: 3644
ucauuaauuggauguaaac

SEQ ID NO: 283525 - RNA, 19 nt, Artificial Sequence
  Description of Artificial Sequence: Synthetic oligonucleotide
  Antisense strand to SEQ ID NO: 283524
guuuacauccaauuaauga

SEQ ID NO: 283526 - RNA, 19 nt, Artificial Sequence
  Description of Artificial Sequence: Synthetic oligonucleotide
  Sense strand starting at position 2514 of SEQ ID NO: 3644
auguaaacaugucuacaca

SEQ ID NO: 283527 - RNA, 19 nt, Artificial Sequence
  Description of Artificial Sequence: Synthetic oligonucleotide
  Antisense strand to SEQ ID NO: 283526
uguguagacauguuuacau

SEQ ID NO: 283528 - RNA, 19 nt, Artificial Sequence
  Description of Artificial Sequence: Synthetic oligonucleotide
  Sense strand starting at position 2705 of SEQ ID NO: 3644
gaauguuuauagcaguacu

SEQ ID NO: 283529 - RNA, 19 nt, Artificial Sequence
  Description of Artificial Sequence: Synthetic oligonucleotide
  Antisense strand to SEQ ID NO: 283528
aguacugcuauaaacauuc

SEQ ID NO: 283530 - RNA, 19 nt, Artificial Sequence
  Description of Artificial Sequence: Synthetic oligonucleotide
  Sense strand starting at position 2787 of SEQ ID NO: 3644
ugugguauuauugggcaca

SEQ ID NO: 283531 - RNA, 19 nt, Artificial Sequence
  Description of Artificial Sequence: Synthetic oligonucleotide
  Antisense strand to SEQ ID NO: 283530
ugugcccaauaauaccaca

SEQ ID NO: 283532 - RNA, 19 nt, Artificial Sequence
  Description of Artificial Sequence: Synthetic oligonucleotide
  Sense strand starting at position 2789 of SEQ ID NO: 3644
ugguauuauugggcacaga

SEQ ID NO: 283533 - RNA, 19 nt, Artificial Sequence
  Description of Artificial Sequence: Synthetic oligonucleotide
  Antisense strand to SEQ ID NO: 283532
ucugugcccaauaauacca

SEQ ID NO: 283534 - RNA, 19 nt, Artificial Sequence
  Description of Artificial Sequence: Synthetic oligonucleotide
  Sense strand starting at position 2790 of SEQ ID NO: 3644
gguauuauugggcacagac

SEQ ID NO: 283535 - RNA, 19 nt, Artificial Sequence
  Description of Artificial Sequence: Synthetic oligonucleotide
  Antisense strand to SEQ ID NO: 283534
gucugugcccaauaauacc

SEQ ID NO: 283536 - RNA, 19 nt, Artificial Sequence
  Description of Artificial Sequence: Synthetic oligonucleotide
  Sense strand starting at position 2855 of SEQ ID NO: 3644
ucgcuugagccggagaguu

SEQ ID NO: 283537 - RNA, 19 nt, Artificial Sequence
  Description of Artificial Sequence: Synthetic oligonucleotide
  Antisense strand to SEQ ID NO: 283536
aacucuccggcucaagcga

SEQ ID NO: 283538 - RNA, 19 nt, Artificial Sequence
  Description of Artificial Sequence: Synthetic oligonucleotide
  Sense strand starting at position 2896 of SEQ ID NO: 3644
agugaugcuccuugaucca

SEQ ID NO: 283539 - RNA, 19 nt, Artificial Sequence
  Description of Artificial Sequence: Synthetic oligonucleotide
  Antisense strand to SEQ ID NO: 283538
uggaucaaggagcaucacu

SEQ ID NO: 283540 - RNA, 19 nt, Artificial Sequence
  Description of Artificial Sequence: Synthetic oligonucleotide
  Sense strand starting at position 2903 of SEQ ID NO: 3644
cuccuugauccaugcagga

SEQ ID NO: 283541 - RNA, 19 nt, Artificial Sequence
  Description of Artificial Sequence: Synthetic oligonucleotide
  Antisense strand to SEQ ID NO: 283540
uccugcauggaucaaggag

SEQ ID NO: 283542 - RNA, 19 nt, Artificial Sequence
  Description of Artificial Sequence: Synthetic oligonucleotide
  Sense strand starting at position 2924 of SEQ ID NO: 3644
ugugaucaggccugugaag

SEQ ID NO: 283543 - RNA, 19 nt, Artificial Sequence
  Description of Artificial Sequence: Synthetic oligonucleotide
  Antisense strand to SEQ ID NO: 283542
cuucacaggccugaucaca

SEQ ID NO: 283544 - RNA, 19 nt, Artificial Sequence
  Description of Artificial Sequence: Synthetic oligonucleotide
  Sense strand starting at position 2926 of SEQ ID NO: 3644
ugaucaggccugugaagag

SEQ ID NO: 283545 - RNA, 19 nt, Artificial Sequence
  Description of Artificial Sequence: Synthetic oligonucleotide
  Antisense strand to SEQ ID NO: 283544
cucuucacaggccugauca

SEQ ID NO: 283546 - RNA, 19 nt, Artificial Sequence
  Description of Artificial Sequence: Synthetic oligonucleotide
  Sense strand starting at position 2964 of SEQ ID NO: 3644
gcgacauagugagaucucu

SEQ ID NO: 283547 - RNA, 19 nt, Artificial Sequence
  Description of Artificial Sequence: Synthetic oligonucleotide
  Antisense strand to SEQ ID NO: 283546
agagaucucacuaugucgc

SEQ ID NO: 283548 - RNA, 19 nt, Artificial Sequence
  Description of Artificial Sequence: Synthetic oligonucleotide
  Sense strand starting at position 2970 of SEQ ID NO: 3644
uagugagaucucugucuca

SEQ ID NO: 283549 - RNA, 19 nt, Artificial Sequence
  Description of Artificial Sequence: Synthetic oligonucleotide
  Antisense strand to SEQ ID NO: 283548
ugagacagagaucucacua

SEQ ID NO: 283550 - RNA, 19 nt, Artificial Sequence
  Description of Artificial Sequence: Synthetic oligonucleotide
  Sense strand starting at position 2973 of SEQ ID NO: 3644
ugagaucucugucucaaag

SEQ ID NO: 283551 - RNA, 19 nt, Artificial Sequence
  Description of Artificial Sequence: Synthetic oligonucleotide
  Antisense strand to SEQ ID NO: 283550
cuuugagacagagaucuca

SEQ ID NO: 283552 - RNA, 19 nt, Artificial Sequence
  Description of Artificial Sequence: Synthetic oligonucleotide
  Sense strand starting at position 2975 of SEQ ID NO: 3644
agaucucugucucaaagaa

SEQ ID NO: 283553 - RNA, 19 nt, Artificial Sequence
  Description of Artificial Sequence: Synthetic oligonucleotide
  Antisense strand to SEQ ID NO: 283552
uucuuugagacagagaucu

SEQ ID NO: 283554 - RNA, 19 nt, Artificial Sequence
  Description of Artificial Sequence: Synthetic oligonucleotide
  Sense strand starting at position 3179 of SEQ ID NO: 3644
guagacuagugauugccaa

SEQ ID NO: 283555 - RNA, 19 nt, Artificial Sequence
  Description of Artificial Sequence: Synthetic oligonucleotide
  Antisense strand to SEQ ID NO: 283554
uuggcaaucacuagucuac

SEQ ID NO: 283556 - RNA, 19 nt, Artificial Sequence
  Description of Artificial Sequence: Synthetic oligonucleotide
  Sense strand starting at position 3229 of SEQ ID NO: 3644
ugugacugccaacgugaau

SEQ ID NO: 283557 - RNA, 19 nt, Artificial Sequence
  Description of Artificial Sequence: Synthetic oligonucleotide
  Antisense strand to SEQ ID NO: 283556
auucacguuggcagucaca

SEQ ID NO: 283558 - RNA, 19 nt, Artificial Sequence
  Description of Artificial Sequence: Synthetic oligonucleotide
  Sense strand starting at position 3349 of SEQ ID NO: 3644
auuaaauccuauggagaug

SEQ ID NO: 283559 - RNA, 19 nt, Artificial Sequence
  Description of Artificial Sequence: Synthetic oligonucleotide
  Antisense strand to SEQ ID NO: 283558
caucuccauaggauuuaau

SEQ ID NO: 283560 - RNA, 19 nt, Artificial Sequence
  Description of Artificial Sequence: Synthetic oligonucleotide
  Sense strand starting at position 3437 of SEQ ID NO: 3644
ucugcagucugguuccaaa

SEQ ID NO: 283561 - RNA, 19 nt, Artificial Sequence
  Description of Artificial Sequence: Synthetic oligonucleotide
  Antisense strand to SEQ ID NO: 283560
uuuggaaccagacugcaga

SEQ ID NO: 283562 - RNA, 19 nt, Artificial Sequence
  Description of Artificial Sequence: Synthetic oligonucleotide
  Sense strand starting at position 3522 of SEQ ID NO: 3644
gccaguugugucugugggu

SEQ ID NO: 283563 - RNA, 19 nt, Artificial Sequence
  Description of Artificial Sequence: Synthetic oligonucleotide
  Antisense strand to SEQ ID NO: 283562
acccacagacacaacuggc

SEQ ID NO: 283564 - RNA, 19 nt, Artificial Sequence
  Description of Artificial Sequence: Synthetic oligonucleotide
  Sense strand starting at position 3525 of SEQ ID NO: 3644
aguugugucugugggugau

SEQ ID NO: 283565 - RNA, 19 nt, Artificial Sequence
  Description of Artificial Sequence: Synthetic oligonucleotide
  Antisense strand to SEQ ID NO: 283564
aucacccacagacacaacu

SEQ ID NO: 283566 - RNA, 19 nt, Artificial Sequence
  Description of Artificial Sequence: Synthetic oligonucleotide
  Sense strand starting at position 3537 of SEQ ID NO: 3644
gggugauggucucucaguu

SEQ ID NO: 283567 - RNA, 19 nt, Artificial Sequence
  Description of Artificial Sequence: Synthetic oligonucleotide
  Antisense strand to SEQ ID NO: 283566
aacugagagaccaucaccc

SEQ ID NO: 283568 - RNA, 19 nt, Artificial Sequence
  Description of Artificial Sequence: Synthetic oligonucleotide
  Sense strand starting at position 3559 of SEQ ID NO: 3644
cugucaaucuuuggugugu

SEQ ID NO: 283569 - RNA, 19 nt, Artificial Sequence
  Description of Artificial Sequence: Synthetic oligonucleotide
  Antisense strand to SEQ ID NO: 283568
acacaccaaagauugacag

SEQ ID NO: 283570 - RNA, 19 nt, Artificial Sequence
  Description of Artificial Sequence: Synthetic oligonucleotide
  Sense strand starting at position 3560 of SEQ ID NO: 3644
ugucaaucuuugguguguu

SEQ ID NO: 283571 - RNA, 19 nt, Artificial Sequence
  Description of Artificial Sequence: Synthetic oligonucleotide
  Antisense strand to SEQ ID NO: 283570
aacacaccaaagauugaca

SEQ ID NO: 283572 - RNA, 19 nt, Artificial Sequence
  Description of Artificial Sequence: Synthetic oligonucleotide
  Sense strand starting at position 3563 of SEQ ID NO: 3644
caaucuuugguguguugaa

SEQ ID NO: 283573 - RNA, 19 nt, Artificial Sequence
  Description of Artificial Sequence: Synthetic oligonucleotide
  Antisense strand to SEQ ID NO: 283572
uucaacacaccaaagauug

SEQ ID NO: 283574 - RNA, 19 nt, Artificial Sequence
  Description of Artificial Sequence: Synthetic oligonucleotide
  Sense strand starting at position 3584 of SEQ ID NO: 3644
ggacgagaucuaugcagga

SEQ ID NO: 283575 - RNA, 19 nt, Artificial Sequence
  Description of Artificial Sequence: Synthetic oligonucleotide
  Antisense strand to SEQ ID NO: 283574
uccugcauagaucucgucc

SEQ ID NO: 283576 - RNA, 19 nt, Artificial Sequence
  Description of Artificial Sequence: Synthetic oligonucleotide
  Sense strand starting at position 3625 of SEQ ID NO: 3644
gguuuauagacagguuaau

SEQ ID NO: 283577 - RNA, 19 nt, Artificial Sequence
  Description of Artificial Sequence: Synthetic oligonucleotide
  Antisense strand to SEQ ID NO: 283576
auuaaccugucuauaaacc

SEQ ID NO: 283578 - RNA, 19 nt, Artificial Sequence
  Description of Artificial Sequence: Synthetic oligonucleotide
  Sense strand starting at position 3791 of SEQ ID NO: 3644
aggacugaauuggaagaga

SEQ ID NO: 283579 - RNA, 19 nt, Artificial Sequence
  Description of Artificial Sequence: Synthetic oligonucleotide
  Antisense strand to SEQ ID NO: 283578
ucucuuccaauucaguccu

SEQ ID NO: 283580 - RNA, 19 nt, Artificial Sequence
  Description of Artificial Sequence: Synthetic oligonucleotide
  Sense strand starting at position 3845 of SEQ ID NO: 3644
agcucugucaguuggagaa

SEQ ID NO: 283581 - RNA, 19 nt, Artificial Sequence
  Description of Artificial Sequence: Synthetic oligonucleotide
  Antisense strand to SEQ ID NO: 283580
uucuccaacugacagagcu

SEQ ID NO: 283582 - RNA, 19 nt, Artificial Sequence
  Description of Artificial Sequence: Synthetic oligonucleotide
  Sense strand starting at position 3849 of SEQ ID NO: 3644
cugucaguuggagaagguu

SEQ ID NO: 283583 - RNA, 19 nt, Artificial Sequence
  Description of Artificial Sequence: Synthetic oligonucleotide
  Antisense strand to SEQ ID NO: 283582
aaccuucuccaacugacag

SEQ ID NO: 283584 - RNA, 19 nt, Artificial Sequence
  Description of Artificial Sequence: Synthetic oligonucleotide
  Sense strand starting at position 3934 of SEQ ID NO: 3644
ugggcugagguaugagaga

SEQ ID NO: 283585 - RNA, 19 nt, Artificial Sequence
  Description of Artificial Sequence: Synthetic oligonucleotide
  Antisense strand to SEQ ID NO: 283584
ucucucauaccucagccca

SEQ ID NO: 283586 - RNA, 19 nt, Artificial Sequence
  Description of Artificial Sequence: Synthetic oligonucleotide
  Sense strand starting at position 872 of SEQ ID NO: 3647
ucauuaauuggauguaaac

SEQ ID NO: 283587 - RNA, 19 nt, Artificial Sequence
  Description of Artificial Sequence: Synthetic oligonucleotide
  Antisense strand to SEQ ID NO: 283586
guuuacauccaauuaauga

SEQ ID NO: 283588 - RNA, 19 nt, Artificial Sequence
  Description of Artificial Sequence: Synthetic oligonucleotide
  Sense strand starting at position 883 of SEQ ID NO: 3647
auguaaacaugucuacaca

SEQ ID NO: 283589 - RNA, 19 nt, Artificial Sequence
  Description of Artificial Sequence: Synthetic oligonucleotide
  Antisense strand to SEQ ID NO: 283588
uguguagacauguuuacau

SEQ ID NO: 283590 - RNA, 19 nt, Artificial Sequence
  Description of Artificial Sequence: Synthetic oligonucleotide
  Sense strand starting at position 1156 of SEQ ID NO: 3647
ugugguauuauugggcaca

SEQ ID NO: 283591 - RNA, 19 nt, Artificial Sequence
  Description of Artificial Sequence: Synthetic oligonucleotide
  Antisense strand to SEQ ID NO: 283590
ugugcccaauaauaccaca

SEQ ID NO: 283592 - RNA, 19 nt, Artificial Sequence
  Description of Artificial Sequence: Synthetic oligonucleotide
  Sense strand starting at position 1158 of SEQ ID NO: 3647
ugguauuauugggcacaga

SEQ ID NO: 283593 - RNA, 19 nt, Artificial Sequence
  Description of Artificial Sequence: Synthetic oligonucleotide
  Antisense strand to SEQ ID NO: 283592
ucugugcccaauaauacca

SEQ ID NO: 283594 - RNA, 19 nt, Artificial Sequence
  Description of Artificial Sequence: Synthetic oligonucleotide
  Sense strand starting at position 1159 of SEQ ID NO: 3647
gguauuauugggcacagac

SEQ ID NO: 283595 - RNA, 19 nt, Artificial Sequence
  Description of Artificial Sequence: Synthetic oligonucleotide
  Antisense strand to SEQ ID NO: 283594
gucugugcccaauaauacc

SEQ ID NO: 283596 - RNA, 19 nt, Artificial Sequence
  Description of Artificial Sequence: Synthetic oligonucleotide
  Sense strand starting at position 1265 of SEQ ID NO: 3647
agugaugcuccuugaucca

SEQ ID NO: 283597 - RNA, 19 nt, Artificial Sequence
  Description of Artificial Sequence: Synthetic oligonucleotide
  Antisense strand to SEQ ID NO: 283596
uggaucaaggagcaucacu

SEQ ID NO: 283598 - RNA, 19 nt, Artificial Sequence
  Description of Artificial Sequence: Synthetic oligonucleotide
  Sense strand starting at position 1272 of SEQ ID NO: 3647
cuccuugauccaugcagga

SEQ ID NO: 283599 - RNA, 19 nt, Artificial Sequence
  Description of Artificial Sequence: Synthetic oligonucleotide
  Antisense strand to SEQ ID NO: 283598
uccugcauggaucaaggag

SEQ ID NO: 283600 - RNA, 19 nt, Artificial Sequence
  Description of Artificial Sequence: Synthetic oligonucleotide
  Sense strand starting at position 1293 of SEQ ID NO: 3647
ugugaucaggccugugaag

SEQ ID NO: 283601 - RNA, 19 nt, Artificial Sequence
  Description of Artificial Sequence: Synthetic oligonucleotide
  Antisense strand to SEQ ID NO: 283600
cuucacaggccugaucaca

SEQ ID NO: 283602 - RNA, 19 nt, Artificial Sequence
  Description of Artificial Sequence: Synthetic oligonucleotide
  Sense strand starting at position 1295 of SEQ ID NO: 3647
ugaucaggccugugaagag

SEQ ID NO: 283603 - RNA, 19 nt, Artificial Sequence
  Description of Artificial Sequence: Synthetic oligonucleotide
  Antisense strand to SEQ ID NO: 283602
cucuucacaggccugauca

SEQ ID NO: 283604 - RNA, 19 nt, Artificial Sequence
  Description of Artificial Sequence: Synthetic oligonucleotide
  Sense strand starting at position 1339 of SEQ ID NO: 3647
uagugagaucucugucuca

SEQ ID NO: 283605 - RNA, 19 nt, Artificial Sequence
  Description of Artificial Sequence: Synthetic oligonucleotide
  Antisense strand to SEQ ID NO: 283604
ugagacagagaucucacua

SEQ ID NO: 283606 - RNA, 19 nt, Artificial Sequence
  Description of Artificial Sequence: Synthetic oligonucleotide
  Sense strand starting at position 1342 of SEQ ID NO: 3647
ugagaucucugucucaaag

SEQ ID NO: 283607 - RNA, 19 nt, Artificial Sequence
  Description of Artificial Sequence: Synthetic oligonucleotide
  Antisense strand to SEQ ID NO: 283606
cuuugagacagagaucuca

SEQ ID NO: 283608 - RNA, 19 nt, Artificial Sequence
  Description of Artificial Sequence: Synthetic oligonucleotide
  Sense strand starting at position 1548 of SEQ ID NO: 3647
guagacuagugauugccaa

SEQ ID NO: 283609 - RNA, 19 nt, Artificial Sequence
  Description of Artificial Sequence: Synthetic oligonucleotide
  Antisense strand to SEQ ID NO: 283608
uuggcaaucacuagucuac

SEQ ID NO: 283610 - RNA, 19 nt, Artificial Sequence
  Description of Artificial Sequence: Synthetic oligonucleotide
  Sense strand starting at position 1932 of SEQ ID NO: 3647
caaucuuugguguguugaa

SEQ ID NO: 283611 - RNA, 19 nt, Artificial Sequence
  Description of Artificial Sequence: Synthetic oligonucleotide
  Antisense strand to SEQ ID NO: 283610
uucaacacaccaaagauug

SEQ ID NO: 283612 - RNA, 19 nt, Artificial Sequence
  Description of Artificial Sequence: Synthetic oligonucleotide
  Sense strand starting at position 1953 of SEQ ID NO: 3647
ggacgagaucuaugcagga

SEQ ID NO: 283613 - RNA, 19 nt, Artificial Sequence
  Description of Artificial Sequence: Synthetic oligonucleotide
  Antisense strand to SEQ ID NO: 283612
uccugcauagaucucgucc

SEQ ID NO: 283614 - RNA, 19 nt, Artificial Sequence
  Description of Artificial Sequence: Synthetic oligonucleotide
  Sense strand starting at position 1994 of SEQ ID NO: 3647
gguuuauagacagguuaau

SEQ ID NO: 283615 - RNA, 19 nt, Artificial Sequence
  Description of Artificial Sequence: Synthetic oligonucleotide
  Antisense strand to SEQ ID NO: 283614
auuaaccugucuauaaacc

SEQ ID NO: 283616 - RNA, 19 nt, Artificial Sequence
  Description of Artificial Sequence: Synthetic oligonucleotide
  Sense strand starting at position 2160 of SEQ ID NO: 3647
aggacugaauuggaagaga

SEQ ID NO: 283617 - RNA, 19 nt, Artificial Sequence
  Description of Artificial Sequence: Synthetic oligonucleotide
  Antisense strand to SEQ ID NO: 283616
ucucuuccaauucaguccu

SEQ ID NO: 283618 - RNA, 19 nt, Artificial Sequence
  Description of Artificial Sequence: Synthetic oligonucleotide
  Sense strand starting at position 2214 of SEQ ID NO: 3647
agcucugucaguuggagaa

SEQ ID NO: 283619 - RNA, 19 nt, Artificial Sequence
  Description of Artificial Sequence: Synthetic oligonucleotide
  Antisense strand to SEQ ID NO: 283618
uucuccaacugacagagcu

SEQ ID NO: 283620 - RNA, 19 nt, Artificial Sequence
  Description of Artificial Sequence: Synthetic oligonucleotide
  Sense strand starting at position 2218 of SEQ ID NO: 3647
cugucaguuggagaagguu

SEQ ID NO: 283621 - RNA, 19 nt, Artificial Sequence
  Description of Artificial Sequence: Synthetic oligonucleotide
  Antisense strand to SEQ ID NO: 283620
aaccuucuccaacugacag

SEQ ID NO: 283622 - RNA, 19 nt, Artificial Sequence
  Description of Artificial Sequence: Synthetic oligonucleotide
  Sense strand starting at position 2303 of SEQ ID NO: 3647
ugggcugagguaugagaga

SEQ ID NO: 283623 - RNA, 19 nt, Artificial Sequence
  Description of Artificial Sequence: Synthetic oligonucleotide
  Antisense strand to SEQ ID NO: 283622
ucucucauaccucagccca

SEQ ID NO: 283624 - RNA, 19 nt, Artificial Sequence
  Description of Artificial Sequence: Synthetic oligonucleotide
  Sense strand starting at position 2354 of SEQ ID NO: 3647
ucuggauucccucggaaug

SEQ ID NO: 283625 - RNA, 19 nt, Artificial Sequence
  Description of Artificial Sequence: Synthetic oligonucleotide
  Antisense strand to SEQ ID NO: 283624
cauuccgagggaauccaga

SEQ ID NO: 283626 - RNA, 19 nt, Artificial Sequence
  Description of Artificial Sequence: Synthetic oligonucleotide
  Sense strand starting at position 2355 of SEQ ID NO: 3647
cuggauucccucggaaugu

SEQ ID NO: 283627 - RNA, 19 nt, Artificial Sequence
  Description of Artificial Sequence: Synthetic oligonucleotide
  Antisense strand to SEQ ID NO: 283626
acauuccgagggaauccag

SEQ ID NO: 283628 - RNA, 19 nt, Artificial Sequence
  Description of Artificial Sequence: Synthetic oligonucleotide
  Sense strand starting at position 2390 of SEQ ID NO: 3647
cguuacuugagccagaaau

SEQ ID NO: 283629 - RNA, 19 nt, Artificial Sequence
  Description of Artificial Sequence: Synthetic oligonucleotide
  Antisense strand to SEQ ID NO: 283628
auuucuggcucaaguaacg

SEQ ID NO: 283630 - RNA, 19 nt, Artificial Sequence
  Description of Artificial Sequence: Synthetic oligonucleotide
  Sense strand starting at position 2526 of SEQ ID NO: 3647
ucuggucuucuugggaaag

SEQ ID NO: 283631 - RNA, 19 nt, Artificial Sequence
  Description of Artificial Sequence: Synthetic oligonucleotide
  Antisense strand to SEQ ID NO: 283630
cuuucccaagaagaccaga

SEQ ID NO: 283632 - RNA, 19 nt, Artificial Sequence
  Description of Artificial Sequence: Synthetic oligonucleotide
  Sense strand starting at position 2547 of SEQ ID NO: 3647
gccugcaacuauuuaguuu

SEQ ID NO: 283633 - RNA, 19 nt, Artificial Sequence
  Description of Artificial Sequence: Synthetic oligonucleotide
  Antisense strand to SEQ ID NO: 283632
aaacuaaauaguugcaggc

SEQ ID NO: 283634 - RNA, 19 nt, Artificial Sequence
  Description of Artificial Sequence: Synthetic oligonucleotide
  Sense strand starting at position 2655 of SEQ ID NO: 3647
ucacucaggucauugcuaa

SEQ ID NO: 283635 - RNA, 19 nt, Artificial Sequence
  Description of Artificial Sequence: Synthetic oligonucleotide
  Antisense strand to SEQ ID NO: 283634
uuagcaaugaccugaguga

SEQ ID NO: 283636 - RNA, 19 nt, Artificial Sequence
  Description of Artificial Sequence: Synthetic oligonucleotide
  Sense strand starting at position 2684 of SEQ ID NO: 3647
uggcauuuguuugcuuuaa

SEQ ID NO: 283637 - RNA, 19 nt, Artificial Sequence
  Description of Artificial Sequence: Synthetic oligonucleotide
  Antisense strand to SEQ ID NO: 283636
uuaaagcaaacaaaugcca

SEQ ID NO: 283638 - RNA, 19 nt, Artificial Sequence
  Description of Artificial Sequence: Synthetic oligonucleotide
  Sense strand starting at position 2685 of SEQ ID NO: 3647
ggcauuuguuugcuuuaau

SEQ ID NO: 283639 - RNA, 19 nt, Artificial Sequence
  Description of Artificial Sequence: Synthetic oligonucleotide
  Antisense strand to SEQ ID NO: 283638
auuaaagcaaacaaaugcc

SEQ ID NO: 283640 - RNA, 19 nt, Artificial Sequence
  Description of Artificial Sequence: Synthetic oligonucleotide
  Sense strand starting at position 2686 of SEQ ID NO: 3647
gcauuuguuugcuuuaauu

SEQ ID NO: 283641 - RNA, 19 nt, Artificial Sequence
  Description of Artificial Sequence: Synthetic oligonucleotide
  Antisense strand to SEQ ID NO: 283640
aauuaaagcaaacaaaugc

SEQ ID NO: 283642 - RNA, 19 nt, Artificial Sequence
  Description of Artificial Sequence: Synthetic oligonucleotide
  Sense strand starting at position 2747 of SEQ ID NO: 3647
ucgucagucaaacaucagu

SEQ ID NO: 283643 - RNA, 19 nt, Artificial Sequence
  Description of Artificial Sequence: Synthetic oligonucleotide
  Antisense strand to SEQ ID NO: 283642
acugauguuugacugacga

SEQ ID NO: 283644 - RNA, 19 nt, Artificial Sequence
  Description of Artificial Sequence: Synthetic oligonucleotide
  Sense strand starting at position 2752 of SEQ ID NO: 3647
agucaaacaucaguuaaag

SEQ ID NO: 283645 - RNA, 19 nt, Artificial Sequence
  Description of Artificial Sequence: Synthetic oligonucleotide
  Antisense strand to SEQ ID NO: 283644
cuuuaacugauguuugacu

SEQ ID NO: 283646 - RNA, 19 nt, Artificial Sequence
  Description of Artificial Sequence: Synthetic oligonucleotide
  Sense strand starting at position 2763 of SEQ ID NO: 3647
aguuaaagccaauaugguu

SEQ ID NO: 283647 - RNA, 19 nt, Artificial Sequence
  Description of Artificial Sequence: Synthetic oligonucleotide
  Antisense strand to SEQ ID NO: 283646
aaccauauuggcuuuaacu

SEQ ID NO: 283648 - RNA, 19 nt, Artificial Sequence
  Description of Artificial Sequence: Synthetic oligonucleotide
  Sense strand starting at position 2972 of SEQ ID NO: 3647
gugugaagaguuuacuaag

SEQ ID NO: 283649 - RNA, 19 nt, Artificial Sequence
  Description of Artificial Sequence: Synthetic oligonucleotide
  Antisense strand to SEQ ID NO: 283648
cuuaguaaacucuucacac

SEQ ID NO: 283650 - RNA, 19 nt, Artificial Sequence
  Description of Artificial Sequence: Synthetic oligonucleotide
  Sense strand starting at position 3050 of SEQ ID NO: 3647
ucguuugcucgucuccaaa

SEQ ID NO: 283651 - RNA, 19 nt, Artificial Sequence
  Description of Artificial Sequence: Synthetic oligonucleotide
  Antisense strand to SEQ ID NO: 283650
uuuggagacgagcaaacga

SEQ ID NO: 283652 - RNA, 19 nt, Artificial Sequence
  Description of Artificial Sequence: Synthetic oligonucleotide
  Sense strand starting at position 3106 of SEQ ID NO: 3647
uccuccuggucacugauau

SEQ ID NO: 283653 - RNA, 19 nt, Artificial Sequence
  Description of Artificial Sequence: Synthetic oligonucleotide
  Antisense strand to SEQ ID NO: 283652
auaucagugaccaggagga

SEQ ID NO: 283654 - RNA, 19 nt, Artificial Sequence
  Description of Artificial Sequence: Synthetic oligonucleotide
  Sense strand starting at position 3107 of SEQ ID NO: 3647
ccuccuggucacugauauc

SEQ ID NO: 283655 - RNA, 19 nt, Artificial Sequence
  Description of Artificial Sequence: Synthetic oligonucleotide
  Antisense strand to SEQ ID NO: 283654
gauaucagugaccaggagg

SEQ ID NO: 283656 - RNA, 19 nt, Artificial Sequence
  Description of Artificial Sequence: Synthetic oligonucleotide
  Sense strand starting at position 3767 of SEQ ID NO: 3647
ugggaacuuugauuacucu

SEQ ID NO: 283657 - RNA, 19 nt, Artificial Sequence
  Description of Artificial Sequence: Synthetic oligonucleotide
  Antisense strand to SEQ ID NO: 283656
agaguaaucaaaguuccca

SEQ ID NO: 283658 - RNA, 19 nt, Artificial Sequence
  Description of Artificial Sequence: Synthetic oligonucleotide
  Sense strand starting at position 3785 of SEQ ID NO: 3647
uuuaaagaaucugaagaug

SEQ ID NO: 283659 - RNA, 19 nt, Artificial Sequence
  Description of Artificial Sequence: Synthetic oligonucleotide
  Antisense strand to SEQ ID NO: 283658
caucuucagauucuuuaaa

SEQ ID NO: 283660 - RNA, 19 nt, Artificial Sequence
  Description of Artificial Sequence: Synthetic oligonucleotide
  Sense strand starting at position 3815 of SEQ ID NO: 3647
aacgcauaauuugagagaa

SEQ ID NO: 283661 - RNA, 19 nt, Artificial Sequence
  Description of Artificial Sequence: Synthetic oligonucleotide
  Antisense strand to SEQ ID NO: 283660
uucucucaaauuaugcguu

SEQ ID NO: 283662 - RNA, 19 nt, Artificial Sequence
  Description of Artificial Sequence: Synthetic oligonucleotide
  Sense strand starting at position 3817 of SEQ ID NO: 3647
cgcauaauuugagagaaug

SEQ ID NO: 283663 - RNA, 19 nt, Artificial Sequence
  Description of Artificial Sequence: Synthetic oligonucleotide
  Antisense strand to SEQ ID NO: 283662
cauucucucaaauuaugcg

SEQ ID NO: 283664 - RNA, 19 nt, Artificial Sequence
  Description of Artificial Sequence: Synthetic oligonucleotide
  Sense strand starting at position 3937 of SEQ ID NO: 3647
ggcucaucuccacaacaug

SEQ ID NO: 283665 - RNA, 19 nt, Artificial Sequence
  Description of Artificial Sequence: Synthetic oligonucleotide
  Antisense strand to SEQ ID NO: 283664
cauguuguggagaugagcc

SEQ ID NO: 283666 - RNA, 19 nt, Artificial Sequence
  Description of Artificial Sequence: Synthetic oligonucleotide
  Sense strand starting at position 41 of SEQ ID NO: 3645
accuaugcuuaguuaugau

SEQ ID NO: 283667 - RNA, 19 nt, Artificial Sequence
  Description of Artificial Sequence: Synthetic oligonucleotide
  Antisense strand to SEQ ID NO: 283666
aucauaacuaagcauaggu

SEQ ID NO: 283668 - RNA, 19 nt, Artificial Sequence
  Description of Artificial Sequence: Synthetic oligonucleotide
  Sense strand starting at position 44 of SEQ ID NO: 3645
uaugcuuaguuaugauaag

SEQ ID NO: 283669 - RNA, 19 nt, Artificial Sequence
  Description of Artificial Sequence: Synthetic oligonucleotide
  Antisense strand to SEQ ID NO: 283668
cuuaucauaacuaagcaua

SEQ ID NO: 283670 - RNA, 19 nt, Artificial Sequence
  Description of Artificial Sequence: Synthetic oligonucleotide
  Sense strand starting at position 45 of SEQ ID NO: 3645
augcuuaguuaugauaaga

SEQ ID NO: 283671 - RNA, 19 nt, Artificial Sequence
  Description of Artificial Sequence: Synthetic oligonucleotide
  Antisense strand to SEQ ID NO: 283670
ucuuaucauaacuaagcau

SEQ ID NO: 283672 - RNA, 19 nt, Artificial Sequence
  Description of Artificial Sequence: Synthetic oligonucleotide
  Sense strand starting at position 85 of SEQ ID NO: 3645
uaaucauggucauccguga

SEQ ID NO: 283673 - RNA, 19 nt, Artificial Sequence
  Description of Artificial Sequence: Synthetic oligonucleotide
  Antisense strand to SEQ ID NO: 283672
ucacggaugaccaugauua

SEQ ID NO: 283674 - RNA, 19 nt, Artificial Sequence
  Description of Artificial Sequence: Synthetic oligonucleotide
  Sense strand starting at position 89 of SEQ ID NO: 3645
cauggucauccgugaguuu

SEQ ID NO: 283675 - RNA, 19 nt, Artificial Sequence
  Description of Artificial Sequence: Synthetic oligonucleotide
  Antisense strand to SEQ ID NO: 283674
aaacucacggaugaccaug

SEQ ID NO: 283676 - RNA, 19 nt, Artificial Sequence
  Description of Artificial Sequence: Synthetic oligonucleotide
  Sense strand starting at position 437 of SEQ ID NO: 3645
agugacuuguagcuaacau

SEQ ID NO: 283677 - RNA, 19 nt, Artificial Sequence
  Description of Artificial Sequence: Synthetic oligonucleotide
  Antisense strand to SEQ ID NO: 283676
auguuagcuacaagucacu

SEQ ID NO: 283678 - RNA, 19 nt, Artificial Sequence
  Description of Artificial Sequence: Synthetic oligonucleotide
  Sense strand starting at position 451 of SEQ ID NO: 3645
aacauuuagugcuaugugu

SEQ ID NO: 283679 - RNA, 19 nt, Artificial Sequence
  Description of Artificial Sequence: Synthetic oligonucleotide
  Antisense strand to SEQ ID NO: 283678
acacauagcacuaaauguu

SEQ ID NO: 283680 - RNA, 19 nt, Artificial Sequence
  Description of Artificial Sequence: Synthetic oligonucleotide
  Sense strand starting at position 453 of SEQ ID NO: 3645
cauuuagugcuauguguca

SEQ ID NO: 283681 - RNA, 19 nt, Artificial Sequence
  Description of Artificial Sequence: Synthetic oligonucleotide
  Antisense strand to SEQ ID NO: 283680
ugacacauagcacuaaaug

SEQ ID NO: 283682 - RNA, 19 nt, Artificial Sequence
  Description of Artificial Sequence: Synthetic oligonucleotide
  Sense strand starting at position 455 of SEQ ID NO: 3645
uuuagugcuaugugucaag

SEQ ID NO: 283683 - RNA, 19 nt, Artificial Sequence
  Description of Artificial Sequence: Synthetic oligonucleotide
  Antisense strand to SEQ ID NO: 283682
cuugacacauagcacuaaa

SEQ ID NO: 283684 - RNA, 19 nt, Artificial Sequence
  Description of Artificial Sequence: Synthetic oligonucleotide
  Sense strand starting at position 458 of SEQ ID NO: 3645
agugcuaugugucaagcaa

SEQ ID NO: 283685 - RNA, 19 nt, Artificial Sequence
  Description of Artificial Sequence: Synthetic oligonucleotide
  Antisense strand to SEQ ID NO: 283684
uugcuugacacauagcacu

SEQ ID NO: 283686 - RNA, 19 nt, Artificial Sequence
  Description of Artificial Sequence: Synthetic oligonucleotide
  Sense strand starting at position 465 of SEQ ID NO: 3645
ugugucaagcaauaaccua

SEQ ID NO: 283687 - RNA, 19 nt, Artificial Sequence
  Description of Artificial Sequence: Synthetic oligonucleotide
  Antisense strand to SEQ ID NO: 283686
uagguuauugcuugacaca

SEQ ID NO: 283688 - RNA, 19 nt, Artificial Sequence
  Description of Artificial Sequence: Synthetic oligonucleotide
  Sense strand starting at position 577 of SEQ ID NO: 3645
aaacgacagugcugugauu

SEQ ID NO: 283689 - RNA, 19 nt, Artificial Sequence
  Description of Artificial Sequence: Synthetic oligonucleotide
  Antisense strand to SEQ ID NO: 283688
aaucacagcacugucguuu

SEQ ID NO: 283690 - RNA, 19 nt, Artificial Sequence
  Description of Artificial Sequence: Synthetic oligonucleotide
  Sense strand starting at position 579 of SEQ ID NO: 3645
acgacagugcugugauuau

SEQ ID NO: 283691 - RNA, 19 nt, Artificial Sequence
  Description of Artificial Sequence: Synthetic oligonucleotide
  Antisense strand to SEQ ID NO: 283690
auaaucacagcacugucgu

SEQ ID NO: 283692 - RNA, 19 nt, Artificial Sequence
  Description of Artificial Sequence: Synthetic oligonucleotide
  Sense strand starting at position 616 of SEQ ID NO: 3645
acucaagauucugcgcaca

SEQ ID NO: 283693 - RNA, 19 nt, Artificial Sequence
  Description of Artificial Sequence: Synthetic oligonucleotide
  Antisense strand to SEQ ID NO: 283692
ugugcgcagaaucuugagu

SEQ ID NO: 283694 - RNA, 19 nt, Artificial Sequence
  Description of Artificial Sequence: Synthetic oligonucleotide
  Sense strand starting at position 618 of SEQ ID NO: 3645
ucaagauucugcgcacauc

SEQ ID NO: 283695 - RNA, 19 nt, Artificial Sequence
  Description of Artificial Sequence: Synthetic oligonucleotide
  Antisense strand to SEQ ID NO: 283694
gaugugcgcagaaucuuga

SEQ ID NO: 283696 - RNA, 19 nt, Artificial Sequence
  Description of Artificial Sequence: Synthetic oligonucleotide
  Sense strand starting at position 675 of SEQ ID NO: 3645
ugacuaaagucuuauugaa

SEQ ID NO: 283697 - RNA, 19 nt, Artificial Sequence
  Description of Artificial Sequence: Synthetic oligonucleotide
  Antisense strand to SEQ ID NO: 283696
uucaauaagacuuuaguca

SEQ ID NO: 283698 - RNA, 19 nt, Artificial Sequence
  Description of Artificial Sequence: Synthetic oligonucleotide
  Sense strand starting at position 941 of SEQ ID NO: 3645
gacuuuccgugucauuugu

SEQ ID NO: 283699 - RNA, 19 nt, Artificial Sequence
  Description of Artificial Sequence: Synthetic oligonucleotide
  Antisense strand to SEQ ID NO: 283698
acaaaugacacggaaaguc

SEQ ID NO: 283700 - RNA, 19 nt, Artificial Sequence
  Description of Artificial Sequence: Synthetic oligonucleotide
  Sense strand starting at position 945 of SEQ ID NO: 3645
uuccgugucauuugugcca

SEQ ID NO: 283701 - RNA, 19 nt, Artificial Sequence
  Description of Artificial Sequence: Synthetic oligonucleotide
  Antisense strand to SEQ ID NO: 283700
uggcacaaaugacacggaa

SEQ ID NO: 283702 - RNA, 19 nt, Artificial Sequence
  Description of Artificial Sequence: Synthetic oligonucleotide
  Sense strand starting at position 976 of SEQ ID NO: 3645
aaauguccacgcugagaug

SEQ ID NO: 283703 - RNA, 19 nt, Artificial Sequence
  Description of Artificial Sequence: Synthetic oligonucleotide
  Antisense strand to SEQ ID NO: 283702
caucucagcguggacauuu

SEQ ID NO: 283704 - RNA, 19 nt, Artificial Sequence
  Description of Artificial Sequence: Synthetic oligonucleotide
  Sense strand starting at position 2657 of SEQ ID NO: 3645
cugucaguuucuccauuau

SEQ ID NO: 283705 - RNA, 19 nt, Artificial Sequence
  Description of Artificial Sequence: Synthetic oligonucleotide
  Antisense strand to SEQ ID NO: 283704
auaauggagaaacugacag

SEQ ID NO: 283706 - RNA, 19 nt, Artificial Sequence
  Description of Artificial Sequence: Synthetic oligonucleotide
  Sense strand starting at position 2673 of SEQ ID NO: 3645
uaucuucugguuuggugau

SEQ ID NO: 283707 - RNA, 19 nt, Artificial Sequence
  Description of Artificial Sequence: Synthetic oligonucleotide
  Antisense strand to SEQ ID NO: 283706
aucaccaaaccagaagaua

SEQ ID NO: 283708 - RNA, 19 nt, Artificial Sequence
  Description of Artificial Sequence: Synthetic oligonucleotide
  Sense strand starting at position 2674 of SEQ ID NO: 3645
aucuucugguuuggugaua

SEQ ID NO: 283709 - RNA, 19 nt, Artificial Sequence
  Description of Artificial Sequence: Synthetic oligonucleotide
  Antisense strand to SEQ ID NO: 283708
uaucaccaaaccagaagau

SEQ ID NO: 283710 - RNA, 19 nt, Artificial Sequence
  Description of Artificial Sequence: Synthetic oligonucleotide
  Sense strand starting at position 2675 of SEQ ID NO: 3645
ucuucugguuuggugauaa

SEQ ID NO: 283711 - RNA, 19 nt, Artificial Sequence
  Description of Artificial Sequence: Synthetic oligonucleotide
  Antisense strand to SEQ ID NO: 283710
uuaucaccaaaccagaaga

SEQ ID NO: 283712 - RNA, 19 nt, Artificial Sequence
  Description of Artificial Sequence: Synthetic oligonucleotide
  Sense strand starting at position 2679 of SEQ ID NO: 3645
cugguuuggugauaaauga

SEQ ID NO: 283713 - RNA, 19 nt, Artificial Sequence
  Description of Artificial Sequence: Synthetic oligonucleotide
  Antisense strand to SEQ ID NO: 283712
ucauuuaucaccaaaccag

SEQ ID NO: 283714 - RNA, 19 nt, Artificial Sequence
  Description of Artificial Sequence: Synthetic oligonucleotide
  Sense strand starting at position 3205 of SEQ ID NO: 3645
gggacaagauccuggcuuu

SEQ ID NO: 283715 - RNA, 19 nt, Artificial Sequence
  Description of Artificial Sequence: Synthetic oligonucleotide
  Antisense strand to SEQ ID NO: 283714
aaagccaggaucuuguccc

SEQ ID NO: 283716 - RNA, 19 nt, Artificial Sequence
  Description of Artificial Sequence: Synthetic oligonucleotide
  Sense strand starting at position 641 of SEQ ID NO: 3646
aagagauuguaccauacga

SEQ ID NO: 283717 - RNA, 19 nt, Artificial Sequence
  Description of Artificial Sequence: Synthetic oligonucleotide
  Antisense strand to SEQ ID NO: 283716
ucguaugguacaaucucuu

SEQ ID NO: 283718 - RNA, 19 nt, Artificial Sequence
  Description of Artificial Sequence: Synthetic oligonucleotide
  Sense strand starting at position 675 of SEQ ID NO: 3646
ugagaugucuacuuauaca

SEQ ID NO: 283719 - RNA, 19 nt, Artificial Sequence
  Description of Artificial Sequence: Synthetic oligonucleotide
  Antisense strand to SEQ ID NO: 283718
uguauaaguagacaucuca

SEQ ID NO: 283720 - RNA, 19 nt, Artificial Sequence
  Description of Artificial Sequence: Synthetic oligonucleotide
  Sense strand starting at position 1157 of SEQ ID NO: 3646
ugugguauuauugggcaca

SEQ ID NO: 283721 - RNA, 19 nt, Artificial Sequence
  Description of Artificial Sequence: Synthetic oligonucleotide
  Antisense strand to SEQ ID NO: 283720
ugugcccaauaauaccaca

SEQ ID NO: 283722 - RNA, 19 nt, Artificial Sequence
  Description of Artificial Sequence: Synthetic oligonucleotide
  Sense strand starting at position 1159 of SEQ ID NO: 3646
ugguauuauugggcacaga

SEQ ID NO: 283723 - RNA, 19 nt, Artificial Sequence
  Description of Artificial Sequence: Synthetic oligonucleotide
  Antisense strand to SEQ ID NO: 283722
ucugugcccaauaauacca

SEQ ID NO: 283724 - RNA, 19 nt, Artificial Sequence
  Description of Artificial Sequence: Synthetic oligonucleotide
  Sense strand starting at position 1160 of SEQ ID NO: 3646
gguauuauugggcacagac

SEQ ID NO: 283725 - RNA, 19 nt, Artificial Sequence
  Description of Artificial Sequence: Synthetic oligonucleotide
  Antisense strand to SEQ ID NO: 283724
gucugugcccaauaauacc

SEQ ID NO: 283726 - RNA, 19 nt, Artificial Sequence
  Description of Artificial Sequence: Synthetic oligonucleotide
  Sense strand starting at position 1225 of SEQ ID NO: 3646
ucgcuugagccggagaguu

SEQ ID NO: 283727 - RNA, 19 nt, Artificial Sequence
  Description of Artificial Sequence: Synthetic oligonucleotide
  Antisense strand to SEQ ID NO: 283726
aacucuccggcucaagcga

SEQ ID NO: 283728 - RNA, 19 nt, Artificial Sequence
  Description of Artificial Sequence: Synthetic oligonucleotide
  Sense strand starting at position 1599 of SEQ ID NO: 3646
ugugacugccaacgugaau

SEQ ID NO: 283729 - RNA, 19 nt, Artificial Sequence
  Description of Artificial Sequence: Synthetic oligonucleotide
  Antisense strand to SEQ ID NO: 283728
auucacguuggcagucaca

SEQ ID NO: 283730 - RNA, 19 nt, Artificial Sequence
  Description of Artificial Sequence: Synthetic oligonucleotide
  Sense strand starting at position 2656 of SEQ ID NO: 3646
ucacucaggucauugcuaa

SEQ ID NO: 283731 - RNA, 19 nt, Artificial Sequence
  Description of Artificial Sequence: Synthetic oligonucleotide
  Antisense strand to SEQ ID NO: 283730
uuagcaaugaccugaguga

SEQ ID NO: 283732 - RNA, 19 nt, Artificial Sequence
  Description of Artificial Sequence: Synthetic oligonucleotide
  Sense strand starting at position 2660 of SEQ ID NO: 3646
ucaggucauugcuaaguuu

SEQ ID NO: 283733 - RNA, 19 nt, Artificial Sequence
  Description of Artificial Sequence: Synthetic oligonucleotide
  Antisense strand to SEQ ID NO: 283732
aaacuuagcaaugaccuga

SEQ ID NO: 283734 - RNA, 19 nt, Artificial Sequence
  Description of Artificial Sequence: Synthetic oligonucleotide
  Sense strand starting at position 2739 of SEQ ID NO: 3646
uugcauaguucgucaguca

SEQ ID NO: 283735 - RNA, 19 nt, Artificial Sequence
  Description of Artificial Sequence: Synthetic oligonucleotide
  Antisense strand to SEQ ID NO: 283734
ugacugacgaacuaugcaa

SEQ ID NO: 283736 - RNA, 19 nt, Artificial Sequence
  Description of Artificial Sequence: Synthetic oligonucleotide
  Sense strand starting at position 2740 of SEQ ID NO: 3646
ugcauaguucgucagucaa

SEQ ID NO: 283737 - RNA, 19 nt, Artificial Sequence
  Description of Artificial Sequence: Synthetic oligonucleotide
  Antisense strand to SEQ ID NO: 283736
uugacugacgaacuaugca

SEQ ID NO: 283738 - RNA, 19 nt, Artificial Sequence
  Description of Artificial Sequence: Synthetic oligonucleotide
  Sense strand starting at position 2742 of SEQ ID NO: 3646
cauaguucgucagucaaac

SEQ ID NO: 283739 - RNA, 19 nt, Artificial Sequence
  Description of Artificial Sequence: Synthetic oligonucleotide
  Antisense strand to SEQ ID NO: 283738
guuugacugacgaacuaug

SEQ ID NO: 283740 - RNA, 19 nt, Artificial Sequence
  Description of Artificial Sequence: Synthetic oligonucleotide
  Sense strand starting at position 2748 of SEQ ID NO: 3646
ucgucagucaaacaucagu

SEQ ID NO: 283741 - RNA, 19 nt, Artificial Sequence
  Description of Artificial Sequence: Synthetic oligonucleotide
  Antisense strand to SEQ ID NO: 283740
acugauguuugacugacga

SEQ ID NO: 283742 - RNA, 19 nt, Artificial Sequence
  Description of Artificial Sequence: Synthetic oligonucleotide
  Sense strand starting at position 2753 of SEQ ID NO: 3646
agucaaacaucaguuaaag

SEQ ID NO: 283743 - RNA, 19 nt, Artificial Sequence
  Description of Artificial Sequence: Synthetic oligonucleotide
  Antisense strand to SEQ ID NO: 283742
cuuuaacugauguuugacu

SEQ ID NO: 283744 - RNA, 19 nt, Artificial Sequence
  Description of Artificial Sequence: Synthetic oligonucleotide
  Sense strand starting at position 3037 of SEQ ID NO: 3646
gacuaaucugcaggucguu

SEQ ID NO: 283745 - RNA, 19 nt, Artificial Sequence
  Description of Artificial Sequence: Synthetic oligonucleotide
  Antisense strand to SEQ ID NO: 283744
aacgaccugcagauuaguc

SEQ ID NO: 283746 - RNA, 19 nt, Artificial Sequence
  Description of Artificial Sequence: Synthetic oligonucleotide
  Sense strand starting at position 3050 of SEQ ID NO: 3646
gucguuugcucgucuccaa

SEQ ID NO: 283747 - RNA, 19 nt, Artificial Sequence
  Description of Artificial Sequence: Synthetic oligonucleotide
  Antisense strand to SEQ ID NO: 283746
uuggagacgagcaaacgac

SEQ ID NO: 283748 - RNA, 19 nt, Artificial Sequence
  Description of Artificial Sequence: Synthetic oligonucleotide
  Sense strand starting at position 3051 of SEQ ID NO: 3646
ucguuugcucgucuccaaa

SEQ ID NO: 283749 - RNA, 19 nt, Artificial Sequence
  Description of Artificial Sequence: Synthetic oligonucleotide
  Antisense strand to SEQ ID NO: 283748
uuuggagacgagcaaacga

SEQ ID NO: 283750 - RNA, 19 nt, Artificial Sequence
  Description of Artificial Sequence: Synthetic oligonucleotide
  Sense strand starting at position 3768 of SEQ ID NO: 3646
ugggaacuuugauuacucu

SEQ ID NO: 283751 - RNA, 19 nt, Artificial Sequence
  Description of Artificial Sequence: Synthetic oligonucleotide
  Antisense strand to SEQ ID NO: 283750
agaguaaucaaaguuccca

SEQ ID NO: 283752 - RNA, 19 nt, Artificial Sequence
  Description of Artificial Sequence: Synthetic oligonucleotide
  Sense strand starting at position 3816 of SEQ ID NO: 3646
aacgcauaauuugagagaa

SEQ ID NO: 283753 - RNA, 19 nt, Artificial Sequence
  Description of Artificial Sequence: Synthetic oligonucleotide
  Antisense strand to SEQ ID NO: 283752
uucucucaaauuaugcguu

SEQ ID NO: 283754 - RNA, 19 nt, Artificial Sequence
  Description of Artificial Sequence: Synthetic oligonucleotide
  Sense strand starting at position 3818 of SEQ ID NO: 3646
cgcauaauuugagagaaug

SEQ ID NO: 283755 - RNA, 19 nt, Artificial Sequence
  Description of Artificial Sequence: Synthetic oligonucleotide
  Antisense strand to SEQ ID NO: 283754
cauucucucaaauuaugcg

SEQ ID NO: 283756 - RNA, 19 nt, Artificial Sequence
  Description of Artificial Sequence: Synthetic oligonucleotide
  Sense strand starting at position 3938 of SEQ ID NO: 3646
ggcucaucuccacaacaug

SEQ ID NO: 283757 - RNA, 19 nt, Artificial Sequence
  Description of Artificial Sequence: Synthetic oligonucleotide
  Antisense strand to SEQ ID NO: 283756
cauguuguggagaugagcc

SEQ ID NO: 283758 - RNA, 19 nt, Artificial Sequence
  Description of Artificial Sequence: Synthetic oligonucleotide
  Sense strand starting at position 872 of SEQ ID NO: 3647
ucauuaauuggauguaaac

SEQ ID NO: 283759 - RNA, 19 nt, Artificial Sequence
  Description of Artificial Sequence: Synthetic oligonucleotide
  Antisense strand to SEQ ID NO: 283758
guuuacauccaauuaauga

SEQ ID NO: 283760 - RNA, 19 nt, Artificial Sequence
  Description of Artificial Sequence: Synthetic oligonucleotide
  Sense strand starting at position 883 of SEQ ID NO: 3647
auguaaacaugucuacaca

SEQ ID NO: 283761 - RNA, 19 nt, Artificial Sequence
  Description of Artificial Sequence: Synthetic oligonucleotide
  Antisense strand to SEQ ID NO: 283760
uguguagacauguuuacau

SEQ ID NO: 283762 - RNA, 19 nt, Artificial Sequence
  Description of Artificial Sequence: Synthetic oligonucleotide
  Sense strand starting at position 1156 of SEQ ID NO: 3647
ugugguauuauugggcaca

SEQ ID NO: 283763 - RNA, 19 nt, Artificial Sequence
  Description of Artificial Sequence: Synthetic oligonucleotide
  Antisense strand to SEQ ID NO: 283762
ugugcccaauaauaccaca

SEQ ID NO: 283764 - RNA, 19 nt, Artificial Sequence
  Description of Artificial Sequence: Synthetic oligonucleotide
  Sense strand starting at position 1158 of SEQ ID NO: 3647
ugguauuauugggcacaga

SEQ ID NO: 283765 - RNA, 19 nt, Artificial Sequence
  Description of Artificial Sequence: Synthetic oligonucleotide
  Antisense strand to SEQ ID NO: 283764
ucugugcccaauaauacca

SEQ ID NO: 283766 - RNA, 19 nt, Artificial Sequence
  Description of Artificial Sequence: Synthetic oligonucleotide
  Sense strand starting at position 1159 of SEQ ID NO: 3647
gguauuauugggcacagac

SEQ ID NO: 283767 - RNA, 19 nt, Artificial Sequence
  Description of Artificial Sequence: Synthetic oligonucleotide
  Antisense strand to SEQ ID NO: 283766
gucugugcccaauaauacc

SEQ ID NO: 283768 - RNA, 19 nt, Artificial Sequence
  Description of Artificial Sequence: Synthetic oligonucleotide
  Sense strand starting at position 1265 of SEQ ID NO: 3647
agugaugcuccuugaucca

SEQ ID NO: 283769 - RNA, 19 nt, Artificial Sequence
  Description of Artificial Sequence: Synthetic oligonucleotide
  Antisense strand to SEQ ID NO: 283768
uggaucaaggagcaucacu

SEQ ID NO: 283770 - RNA, 19 nt, Artificial Sequence
  Description of Artificial Sequence: Synthetic oligonucleotide
  Sense strand starting at position 1272 of SEQ ID NO: 3647
cuccuugauccaugcagga

SEQ ID NO: 283771 - RNA, 19 nt, Artificial Sequence
  Description of Artificial Sequence: Synthetic oligonucleotide
  Antisense strand to SEQ ID NO: 283770
uccugcauggaucaaggag

SEQ ID NO: 283772 - RNA, 19 nt, Artificial Sequence
  Description of Artificial Sequence: Synthetic oligonucleotide
  Sense strand starting at position 1293 of SEQ ID NO: 3647
ugugaucaggccugugaag

SEQ ID NO: 283773 - RNA, 19 nt, Artificial Sequence
  Description of Artificial Sequence: Synthetic oligonucleotide
  Antisense strand to SEQ ID NO: 283772
cuucacaggccugaucaca

SEQ ID NO: 283774 - RNA, 19 nt, Artificial Sequence
  Description of Artificial Sequence: Synthetic oligonucleotide
  Sense strand starting at position 1295 of SEQ ID NO: 3647
ugaucaggccugugaagag

SEQ ID NO: 283775 - RNA, 19 nt, Artificial Sequence
  Description of Artificial Sequence: Synthetic oligonucleotide
  Antisense strand to SEQ ID NO: 283774
cucuucacaggccugauca

SEQ ID NO: 283776 - RNA, 19 nt, Artificial Sequence
  Description of Artificial Sequence: Synthetic oligonucleotide
  Sense strand starting at position 1339 of SEQ ID NO: 3647
uagugagaucucugucuca

SEQ ID NO: 283777 - RNA, 19 nt, Artificial Sequence
  Description of Artificial Sequence: Synthetic oligonucleotide
  Antisense strand to SEQ ID NO: 283776
ugagacagagaucucacua

SEQ ID NO: 283778 - RNA, 19 nt, Artificial Sequence
  Description of Artificial Sequence: Synthetic oligonucleotide
  Sense strand starting at position 1342 of SEQ ID NO: 3647
ugagaucucugucucaaag

SEQ ID NO: 283779 - RNA, 19 nt, Artificial Sequence
  Description of Artificial Sequence: Synthetic oligonucleotide
  Antisense strand to SEQ ID NO: 283778
cuuugagacagagaucuca

SEQ ID NO: 283780 - RNA, 19 nt, Artificial Sequence
  Description of Artificial Sequence: Synthetic oligonucleotide
  Sense strand starting at position 1548 of SEQ ID NO: 3647
guagacuagugauugccaa

SEQ ID NO: 283781 - RNA, 19 nt, Artificial Sequence
  Description of Artificial Sequence: Synthetic oligonucleotide
  Antisense strand to SEQ ID NO: 283780
uuggcaaucacuagucuac

SEQ ID NO: 283782 - RNA, 19 nt, Artificial Sequence
  Description of Artificial Sequence: Synthetic oligonucleotide
  Sense strand starting at position 1932 of SEQ ID NO: 3647
caaucuuugguguguugaa

SEQ ID NO: 283783 - RNA, 19 nt, Artificial Sequence
  Description of Artificial Sequence: Synthetic oligonucleotide
  Antisense strand to SEQ ID NO: 283782
uucaacacaccaaagauug

SEQ ID NO: 283784 - RNA, 19 nt, Artificial Sequence
  Description of Artificial Sequence: Synthetic oligonucleotide
  Sense strand starting at position 1953 of SEQ ID NO: 3647
ggacgagaucuaugcagga

SEQ ID NO: 283785 - RNA, 19 nt, Artificial Sequence
  Description of Artificial Sequence: Synthetic oligonucleotide
  Antisense strand to SEQ ID NO: 283784
uccugcauagaucucgucc

SEQ ID NO: 283786 - RNA, 19 nt, Artificial Sequence
  Description of Artificial Sequence: Synthetic oligonucleotide
  Sense strand starting at position 1994 of SEQ ID NO: 3647
gguuuauagacagguuaau

SEQ ID NO: 283787 - RNA, 19 nt, Artificial Sequence
  Description of Artificial Sequence: Synthetic oligonucleotide
  Antisense strand to SEQ ID NO: 283786
auuaaccugucuauaaacc

SEQ ID NO: 283788 - RNA, 19 nt, Artificial Sequence
  Description of Artificial Sequence: Synthetic oligonucleotide
  Sense strand starting at position 2160 of SEQ ID NO: 3647
aggacugaauuggaagaga

SEQ ID NO: 283789 - RNA, 19 nt, Artificial Sequence
  Description of Artificial Sequence: Synthetic oligonucleotide
  Antisense strand to SEQ ID NO: 283788
ucucuuccaauucaguccu

SEQ ID NO: 283790 - RNA, 19 nt, Artificial Sequence
  Description of Artificial Sequence: Synthetic oligonucleotide
  Sense strand starting at position 2214 of SEQ ID NO: 3647
agcucugucaguuggagaa

SEQ ID NO: 283791 - RNA, 19 nt, Artificial Sequence
  Description of Artificial Sequence: Synthetic oligonucleotide
  Antisense strand to SEQ ID NO: 283790
uucuccaacugacagagcu

SEQ ID NO: 283792 - RNA, 19 nt, Artificial Sequence
  Description of Artificial Sequence: Synthetic oligonucleotide
  Sense strand starting at position 2218 of SEQ ID NO: 3647
cugucaguuggagaagguu

SEQ ID NO: 283793 - RNA, 19 nt, Artificial Sequence
  Description of Artificial Sequence: Synthetic oligonucleotide
  Antisense strand to SEQ ID NO: 283792
aaccuucuccaacugacag

SEQ ID NO: 283794 - RNA, 19 nt, Artificial Sequence
  Description of Artificial Sequence: Synthetic oligonucleotide
  Sense strand starting at position 2303 of SEQ ID NO: 3647
ugggcugagguaugagaga

SEQ ID NO: 283795 - RNA, 19 nt, Artificial Sequence
  Description of Artificial Sequence: Synthetic oligonucleotide
  Antisense strand to SEQ ID NO: 283794
ucucucauaccucagccca

SEQ ID NO: 283796 - RNA, 19 nt, Artificial Sequence
  Description of Artificial Sequence: Synthetic oligonucleotide
  Sense strand starting at position 2354 of SEQ ID NO: 3647
ucuggauucccucggaaug

SEQ ID NO: 283797 - RNA, 19 nt, Artificial Sequence
  Description of Artificial Sequence: Synthetic oligonucleotide
  Antisense strand to SEQ ID NO: 283796
cauuccgagggaauccaga

SEQ ID NO: 283798 - RNA, 19 nt, Artificial Sequence
  Description of Artificial Sequence: Synthetic oligonucleotide
  Sense strand starting at position 2355 of SEQ ID NO: 3647
cuggauucccucggaaugu

SEQ ID NO: 283799 - RNA, 19 nt, Artificial Sequence
  Description of Artificial Sequence: Synthetic oligonucleotide
  Antisense strand to SEQ ID NO: 283798
acauuccgagggaauccag

SEQ ID NO: 283800 - RNA, 19 nt, Artificial Sequence
  Description of Artificial Sequence: Synthetic oligonucleotide
  Sense strand starting at position 2390 of SEQ ID NO: 3647
cguuacuugagccagaaau

SEQ ID NO: 283801 - RNA, 19 nt, Artificial Sequence
  Description of Artificial Sequence: Synthetic oligonucleotide
  Antisense strand to SEQ ID NO: 283800
auuucuggcucaaguaacg

SEQ ID NO: 283802 - RNA, 19 nt, Artificial Sequence
  Description of Artificial Sequence: Synthetic oligonucleotide
  Sense strand starting at position 2526 of SEQ ID NO: 3647
ucuggucuucuugggaaag

SEQ ID NO: 283803 - RNA, 19 nt, Artificial Sequence
  Description of Artificial Sequence: Synthetic oligonucleotide
  Antisense strand to SEQ ID NO: 283802
cuuucccaagaagaccaga

SEQ ID NO: 283804 - RNA, 19 nt, Artificial Sequence
  Description of Artificial Sequence: Synthetic oligonucleotide
  Sense strand starting at position 2547 of SEQ ID NO: 3647
gccugcaacuauuuaguuu

SEQ ID NO: 283805 - RNA, 19 nt, Artificial Sequence
  Description of Artificial Sequence: Synthetic oligonucleotide
  Antisense strand to SEQ ID NO: 283804
aaacuaaauaguugcaggc

SEQ ID NO: 283806 - RNA, 19 nt, Artificial Sequence
  Description of Artificial Sequence: Synthetic oligonucleotide
  Sense strand starting at position 2655 of SEQ ID NO: 3647
ucacucaggucauugcuaa

SEQ ID NO: 283807 - RNA, 19 nt, Artificial Sequence
  Description of Artificial Sequence: Synthetic oligonucleotide
  Antisense strand to SEQ ID NO: 283806
uuagcaaugaccugaguga

SEQ ID NO: 283808 - RNA, 19 nt, Artificial Sequence
  Description of Artificial Sequence: Synthetic oligonucleotide
  Sense strand starting at position 2684 of SEQ ID NO: 3647
uggcauuuguuugcuuuaa

SEQ ID NO: 283809 - RNA, 19 nt, Artificial Sequence
  Description of Artificial Sequence: Synthetic oligonucleotide
  Antisense strand to SEQ ID NO: 283808
uuaaagcaaacaaaugcca

SEQ ID NO: 283810 - RNA, 19 nt, Artificial Sequence
  Description of Artificial Sequence: Synthetic oligonucleotide
  Sense strand starting at position 2685 of SEQ ID NO: 3647
ggcauuuguuugcuuuaau

SEQ ID NO: 283811 - RNA, 19 nt, Artificial Sequence
  Description of Artificial Sequence: Synthetic oligonucleotide
  Antisense strand to SEQ ID NO: 283810
auuaaagcaaacaaaugcc

SEQ ID NO: 283812 - RNA, 19 nt, Artificial Sequence
  Description of Artificial Sequence: Synthetic oligonucleotide
  Sense strand starting at position 2686 of SEQ ID NO: 3647
gcauuuguuugcuuuaauu

SEQ ID NO: 283813 - RNA, 19 nt, Artificial Sequence
  Description of Artificial Sequence: Synthetic oligonucleotide
  Antisense strand to SEQ ID NO: 283812
aauuaaagcaaacaaaugc

SEQ ID NO: 283814 - RNA, 19 nt, Artificial Sequence
  Description of Artificial Sequence: Synthetic oligonucleotide
  Sense strand starting at position 2747 of SEQ ID NO: 3647
ucgucagucaaacaucagu

SEQ ID NO: 283815 - RNA, 19 nt, Artificial Sequence
  Description of Artificial Sequence: Synthetic oligonucleotide
  Antisense strand to SEQ ID NO: 283814
acugauguuugacugacga

SEQ ID NO: 283816 - RNA, 19 nt, Artificial Sequence
  Description of Artificial Sequence: Synthetic oligonucleotide
  Sense strand starting at position 2752 of SEQ ID NO: 3647
agucaaacaucaguuaaag

SEQ ID NO: 283817 - RNA, 19 nt, Artificial Sequence
  Description of Artificial Sequence: Synthetic oligonucleotide
  Antisense strand to SEQ ID NO: 283816
cuuuaacugauguuugacu

SEQ ID NO: 283818 - RNA, 19 nt, Artificial Sequence
  Description of Artificial Sequence: Synthetic oligonucleotide
  Sense strand starting at position 2763 of SEQ ID NO: 3647
aguuaaagccaauaugguu

SEQ ID NO: 283819 - RNA, 19 nt, Artificial Sequence
  Description of Artificial Sequence: Synthetic oligonucleotide
  Antisense strand to SEQ ID NO: 283818
aaccauauuggcuuuaacu

SEQ ID NO: 283820 - RNA, 19 nt, Artificial Sequence
  Description of Artificial Sequence: Synthetic oligonucleotide
  Sense strand starting at position 2972 of SEQ ID NO: 3647
gugugaagaguuuacuaag

SEQ ID NO: 283821 - RNA, 19 nt, Artificial Sequence
  Description of Artificial Sequence: Synthetic oligonucleotide
  Antisense strand to SEQ ID NO: 283820
cuuaguaaacucuucacac

SEQ ID NO: 283822 - RNA, 19 nt, Artificial Sequence
  Description of Artificial Sequence: Synthetic oligonucleotide
  Sense strand starting at position 3050 of SEQ ID NO: 3647
ucguuugcucgucuccaaa

SEQ ID NO: 283823 - RNA, 19 nt, Artificial Sequence
  Description of Artificial Sequence: Synthetic oligonucleotide
  Antisense strand to SEQ ID NO: 283822
uuuggagacgagcaaacga

SEQ ID NO: 283824 - RNA, 19 nt, Artificial Sequence
  Description of Artificial Sequence: Synthetic oligonucleotide
  Sense strand starting at position 3106 of SEQ ID NO: 3647
uccuccuggucacugauau

SEQ ID NO: 283825 - RNA, 19 nt, Artificial Sequence
  Description of Artificial Sequence: Synthetic oligonucleotide
  Antisense strand to SEQ ID NO: 283824
auaucagugaccaggagga

SEQ ID NO: 283826 - RNA, 19 nt, Artificial Sequence
  Description of Artificial Sequence: Synthetic oligonucleotide
  Sense strand starting at position 3107 of SEQ ID NO: 3647
ccuccuggucacugauauc

SEQ ID NO: 283827 - RNA, 19 nt, Artificial Sequence
  Description of Artificial Sequence: Synthetic oligonucleotide
  Antisense strand to SEQ ID NO: 283826
gauaucagugaccaggagg

SEQ ID NO: 283828 - RNA, 19 nt, Artificial Sequence
  Description of Artificial Sequence: Synthetic oligonucleotide
  Sense strand starting at position 3767 of SEQ ID NO: 3647
ugggaacuuugauuacucu

SEQ ID NO: 283829 - RNA, 19 nt, Artificial Sequence
  Description of Artificial Sequence: Synthetic oligonucleotide
  Antisense strand to SEQ ID NO: 283828
agaguaaucaaaguuccca

SEQ ID NO: 283830 - RNA, 19 nt, Artificial Sequence
  Description of Artificial Sequence: Synthetic oligonucleotide
  Sense strand starting at position 3785 of SEQ ID NO: 3647
uuuaaagaaucugaagaug

SEQ ID NO: 283831 - RNA, 19 nt, Artificial Sequence
  Description of Artificial Sequence: Synthetic oligonucleotide
  Antisense strand to SEQ ID NO: 283830
caucuucagauucuuuaaa

SEQ ID NO: 283832 - RNA, 19 nt, Artificial Sequence
  Description of Artificial Sequence: Synthetic oligonucleotide
  Sense strand starting at position 3815 of SEQ ID NO: 3647
aacgcauaauuugagagaa

SEQ ID NO: 283833 - RNA, 19 nt, Artificial Sequence
  Description of Artificial Sequence: Synthetic oligonucleotide
  Antisense strand to SEQ ID NO: 283832
uucucucaaauuaugcguu

SEQ ID NO: 283834 - RNA, 19 nt, Artificial Sequence
  Description of Artificial Sequence: Synthetic oligonucleotide
  Sense strand starting at position 3817 of SEQ ID NO: 3647
cgcauaauuugagagaaug

SEQ ID NO: 283835 - RNA, 19 nt, Artificial Sequence
  Description of Artificial Sequence: Synthetic oligonucleotide
  Antisense strand to SEQ ID NO: 283834
cauucucucaaauuaugcg

SEQ ID NO: 283836 - RNA, 19 nt, Artificial Sequence
  Description of Artificial Sequence: Synthetic oligonucleotide
  Sense strand starting at position 3937 of SEQ ID NO: 3647
ggcucaucuccacaacaug

SEQ ID NO: 283837 - RNA, 19 nt, Artificial Sequence
  Description of Artificial Sequence: Synthetic oligonucleotide
  Antisense strand to SEQ ID NO: 283836
cauguuguggagaugagcc

SEQ ID NO: 283838 - RNA, 19 nt, Artificial Sequence
  Description of Artificial Sequence: Synthetic oligonucleotide
  Sense strand starting at position 235 of SEQ ID NO: 3648
ucggauuacagacgaagaa

SEQ ID NO: 283839 - RNA, 19 nt, Artificial Sequence
  Description of Artificial Sequence: Synthetic oligonucleotide
  Antisense strand to SEQ ID NO: 283838
uucuucgucuguaauccga

SEQ ID NO: 283840 - RNA, 19 nt, Artificial Sequence
  Description of Artificial Sequence: Synthetic oligonucleotide
  Sense strand starting at position 307 of SEQ ID NO: 3648
agaggagacuaacaaauga

SEQ ID NO: 283841 - RNA, 19 nt, Artificial Sequence
  Description of Artificial Sequence: Synthetic oligonucleotide
  Antisense strand to SEQ ID NO: 283840
ucauuuguuagucuccucu

SEQ ID NO: 283842 - RNA, 19 nt, Artificial Sequence
  Description of Artificial Sequence: Synthetic oligonucleotide
  Sense strand starting at position 658 of SEQ ID NO: 3648
aaauguaagagagguguca

SEQ ID NO: 283843 - RNA, 19 nt, Artificial Sequence
  Description of Artificial Sequence: Synthetic oligonucleotide
  Antisense strand to SEQ ID NO: 283842
ugacaccucucuuacauuu

SEQ ID NO: 283844 - RNA, 19 nt, Artificial Sequence
  Description of Artificial Sequence: Synthetic oligonucleotide
  Sense strand starting at position 660 of SEQ ID NO: 3648
auguaagagaggugucaua

SEQ ID NO: 283845 - RNA, 19 nt, Artificial Sequence
  Description of Artificial Sequence: Synthetic oligonucleotide
  Antisense strand to SEQ ID NO: 283844
uaugacaccucucuuacau

SEQ ID NO: 283846 - RNA, 19 nt, Artificial Sequence
  Description of Artificial Sequence: Synthetic oligonucleotide
  Sense strand starting at position 2157 of SEQ ID NO: 3648
aagagauuguaccauacga

SEQ ID NO: 283847 - RNA, 19 nt, Artificial Sequence
  Description of Artificial Sequence: Synthetic oligonucleotide
  Antisense strand to SEQ ID NO: 283846
ucguaugguacaaucucuu

SEQ ID NO: 283848 - RNA, 19 nt, Artificial Sequence
  Description of Artificial Sequence: Synthetic oligonucleotide
  Sense strand starting at position 2191 of SEQ ID NO: 3648
ugagaugucuacuuauaca

SEQ ID NO: 283849 - RNA, 19 nt, Artificial Sequence
  Description of Artificial Sequence: Synthetic oligonucleotide
  Antisense strand to SEQ ID NO: 283848
uguauaaguagacaucuca

SEQ ID NO: 283850 - RNA, 19 nt, Artificial Sequence
  Description of Artificial Sequence: Synthetic oligonucleotide
  Sense strand starting at position 2673 of SEQ ID NO: 3648
ugugguauuauugggcaca

SEQ ID NO: 283851 - RNA, 19 nt, Artificial Sequence
  Description of Artificial Sequence: Synthetic oligonucleotide
  Antisense strand to SEQ ID NO: 283850
ugugcccaauaauaccaca

SEQ ID NO: 283852 - RNA, 19 nt, Artificial Sequence
  Description of Artificial Sequence: Synthetic oligonucleotide
  Sense strand starting at position 2675 of SEQ ID NO: 3648
ugguauuauugggcacaga

SEQ ID NO: 283853 - RNA, 19 nt, Artificial Sequence
  Description of Artificial Sequence: Synthetic oligonucleotide
  Antisense strand to SEQ ID NO: 283852
ucugugcccaauaauacca

SEQ ID NO: 283854 - RNA, 19 nt, Artificial Sequence
  Description of Artificial Sequence: Synthetic oligonucleotide
  Sense strand starting at position 2676 of SEQ ID NO: 3648
gguauuauugggcacagac

SEQ ID NO: 283855 - RNA, 19 nt, Artificial Sequence
  Description of Artificial Sequence: Synthetic oligonucleotide
  Antisense strand to SEQ ID NO: 283854
gucugugcccaauaauacc

SEQ ID NO: 283856 - RNA, 19 nt, Artificial Sequence
  Description of Artificial Sequence: Synthetic oligonucleotide
  Sense strand starting at position 2741 of SEQ ID NO: 3648
ucgcuugagccggagaguu

SEQ ID NO: 283857 - RNA, 19 nt, Artificial Sequence
  Description of Artificial Sequence: Synthetic oligonucleotide
  Antisense strand to SEQ ID NO: 283856
aacucuccggcucaagcga

SEQ ID NO: 283858 - RNA, 19 nt, Artificial Sequence
  Description of Artificial Sequence: Synthetic oligonucleotide
  Sense strand starting at position 3115 of SEQ ID NO: 3648
ugugacugccaacgugaau

SEQ ID NO: 283859 - RNA, 19 nt, Artificial Sequence
  Description of Artificial Sequence: Synthetic oligonucleotide
  Antisense strand to SEQ ID NO: 283858
auucacguuggcagucaca

SEQ ID NO: 283860 - RNA, 19 nt, Artificial Sequence
  Description of Artificial Sequence: Synthetic oligonucleotide
  Sense strand starting at position 675 of SEQ ID NO: 3649
aaauguaagagagguguca

SEQ ID NO: 283861 - RNA, 19 nt, Artificial Sequence
  Description of Artificial Sequence: Synthetic oligonucleotide
  Antisense strand to SEQ ID NO: 283860
ugacaccucucuuacauuu

SEQ ID NO: 283862 - RNA, 19 nt, Artificial Sequence
  Description of Artificial Sequence: Synthetic oligonucleotide
  Sense strand starting at position 677 of SEQ ID NO: 3649
auguaagagaggugucaua

SEQ ID NO: 283863 - RNA, 19 nt, Artificial Sequence
  Description of Artificial Sequence: Synthetic oligonucleotide
  Antisense strand to SEQ ID NO: 283862
uaugacaccucucuuacau

SEQ ID NO: 283864 - RNA, 19 nt, Artificial Sequence
  Description of Artificial Sequence: Synthetic oligonucleotide
  Sense strand starting at position 1405 of SEQ ID NO: 3649
gugcgcgaucggccagaaa

SEQ ID NO: 283865 - RNA, 19 nt, Artificial Sequence
  Description of Artificial Sequence: Synthetic oligonucleotide
  Antisense strand to SEQ ID NO: 283864
uuucuggccgaucgcgcac

SEQ ID NO: 283866 - RNA, 19 nt, Artificial Sequence
  Description of Artificial Sequence: Synthetic oligonucleotide
  Sense strand starting at position 2388 of SEQ ID NO: 3649
ucauuaauuggauguaaac

SEQ ID NO: 283867 - RNA, 19 nt, Artificial Sequence
  Description of Artificial Sequence: Synthetic oligonucleotide
  Antisense strand to SEQ ID NO: 283866
guuuacauccaauuaauga

SEQ ID NO: 283868 - RNA, 19 nt, Artificial Sequence
  Description of Artificial Sequence: Synthetic oligonucleotide
  Sense strand starting at position 2399 of SEQ ID NO: 3649
auguaaacaugucuacaca

SEQ ID NO: 283869 - RNA, 19 nt, Artificial Sequence
  Description of Artificial Sequence: Synthetic oligonucleotide
  Antisense strand to SEQ ID NO: 283868
uguguagacauguuuacau

SEQ ID NO: 283870 - RNA, 19 nt, Artificial Sequence
  Description of Artificial Sequence: Synthetic oligonucleotide
  Sense strand starting at position 2590 of SEQ ID NO: 3649
gaauguuuauagcaguacu

SEQ ID NO: 283871 - RNA, 19 nt, Artificial Sequence
  Description of Artificial Sequence: Synthetic oligonucleotide
  Antisense strand to SEQ ID NO: 283870
aguacugcuauaaacauuc

SEQ ID NO: 283872 - RNA, 19 nt, Artificial Sequence
  Description of Artificial Sequence: Synthetic oligonucleotide
  Sense strand starting at position 2672 of SEQ ID NO: 3649
ugugguauuauugggcaca

SEQ ID NO: 283873 - RNA, 19 nt, Artificial Sequence
  Description of Artificial Sequence: Synthetic oligonucleotide
  Antisense strand to SEQ ID NO: 283872
ugugcccaauaauaccaca

SEQ ID NO: 283874 - RNA, 19 nt, Artificial Sequence
  Description of Artificial Sequence: Synthetic oligonucleotide
  Sense strand starting at position 2674 of SEQ ID NO: 3649
ugguauuauugggcacaga

SEQ ID NO: 283875 - RNA, 19 nt, Artificial Sequence
  Description of Artificial Sequence: Synthetic oligonucleotide
  Antisense strand to SEQ ID NO: 283874
ucugugcccaauaauacca

SEQ ID NO: 283876 - RNA, 19 nt, Artificial Sequence
  Description of Artificial Sequence: Synthetic oligonucleotide
  Sense strand starting at position 2675 of SEQ ID NO: 3649
gguauuauugggcacagac

SEQ ID NO: 283877 - RNA, 19 nt, Artificial Sequence
  Description of Artificial Sequence: Synthetic oligonucleotide
  Antisense strand to SEQ ID NO: 283876
gucugugcccaauaauacc

SEQ ID NO: 283878 - RNA, 19 nt, Artificial Sequence
  Description of Artificial Sequence: Synthetic oligonucleotide
  Sense strand starting at position 2740 of SEQ ID NO: 3649
ucgcuugagccggagaguu

SEQ ID NO: 283879 - RNA, 19 nt, Artificial Sequence
  Description of Artificial Sequence: Synthetic oligonucleotide
  Antisense strand to SEQ ID NO: 283878
aacucuccggcucaagcga

SEQ ID NO: 283880 - RNA, 19 nt, Artificial Sequence
  Description of Artificial Sequence: Synthetic oligonucleotide
  Sense strand starting at position 2781 of SEQ ID NO: 3649
agugaugcuccuugaucca

SEQ ID NO: 283881 - RNA, 19 nt, Artificial Sequence
  Description of Artificial Sequence: Synthetic oligonucleotide
  Antisense strand to SEQ ID NO: 283880
uggaucaaggagcaucacu

SEQ ID NO: 283882 - RNA, 19 nt, Artificial Sequence
  Description of Artificial Sequence: Synthetic oligonucleotide
  Sense strand starting at position 2788 of SEQ ID NO: 3649
cuccuugauccaugcagga

SEQ ID NO: 283883 - RNA, 19 nt, Artificial Sequence
  Description of Artificial Sequence: Synthetic oligonucleotide
  Antisense strand to SEQ ID NO: 283882
uccugcauggaucaaggag

SEQ ID NO: 283884 - RNA, 19 nt, Artificial Sequence
  Description of Artificial Sequence: Synthetic oligonucleotide
  Sense strand starting at position 2809 of SEQ ID NO: 3649
ugugaucaggccugugaag

SEQ ID NO: 283885 - RNA, 19 nt, Artificial Sequence
  Description of Artificial Sequence: Synthetic oligonucleotide
  Antisense strand to SEQ ID NO: 283884
cuucacaggccugaucaca

SEQ ID NO: 283886 - RNA, 19 nt, Artificial Sequence
  Description of Artificial Sequence: Synthetic oligonucleotide
  Sense strand starting at position 2811 of SEQ ID NO: 3649
ugaucaggccugugaagag

SEQ ID NO: 283887 - RNA, 19 nt, Artificial Sequence
  Description of Artificial Sequence: Synthetic oligonucleotide
  Antisense strand to SEQ ID NO: 283886
cucuucacaggccugauca

SEQ ID NO: 283888 - RNA, 19 nt, Artificial Sequence
  Description of Artificial Sequence: Synthetic oligonucleotide
  Sense strand starting at position 2849 of SEQ ID NO: 3649
gcgacauagugagaucucu

SEQ ID NO: 283889 - RNA, 19 nt, Artificial Sequence
  Description of Artificial Sequence: Synthetic oligonucleotide
  Antisense strand to SEQ ID NO: 283888
agagaucucacuaugucgc

SEQ ID NO: 283890 - RNA, 19 nt, Artificial Sequence
  Description of Artificial Sequence: Synthetic oligonucleotide
  Sense strand starting at position 2855 of SEQ ID NO: 3649
uagugagaucucugucuca

SEQ ID NO: 283891 - RNA, 19 nt, Artificial Sequence
  Description of Artificial Sequence: Synthetic oligonucleotide
  Antisense strand to SEQ ID NO: 283890
ugagacagagaucucacua

SEQ ID NO: 283892 - RNA, 19 nt, Artificial Sequence
  Description of Artificial Sequence: Synthetic oligonucleotide
  Sense strand starting at position 2858 of SEQ ID NO: 3649
ugagaucucugucucaaag

SEQ ID NO: 283893 - RNA, 19 nt, Artificial Sequence
  Description of Artificial Sequence: Synthetic oligonucleotide
  Antisense strand to SEQ ID NO: 283892
cuuugagacagagaucuca

SEQ ID NO: 283894 - RNA, 19 nt, Artificial Sequence
  Description of Artificial Sequence: Synthetic oligonucleotide
  Sense strand starting at position 2860 of SEQ ID NO: 3649
agaucucugucucaaagaa

SEQ ID NO: 283895 - RNA, 19 nt, Artificial Sequence
  Description of Artificial Sequence: Synthetic oligonucleotide
  Antisense strand to SEQ ID NO: 283894
uucuuugagacagagaucu

SEQ ID NO: 283896 - RNA, 19 nt, Artificial Sequence
  Description of Artificial Sequence: Synthetic oligonucleotide
  Sense strand starting at position 3064 of SEQ ID NO: 3649
guagacuagugauugccaa

SEQ ID NO: 283897 - RNA, 19 nt, Artificial Sequence
  Description of Artificial Sequence: Synthetic oligonucleotide
  Antisense strand to SEQ ID NO: 283896
uuggcaaucacuagucuac

SEQ ID NO: 283898 - RNA, 19 nt, Artificial Sequence
  Description of Artificial Sequence: Synthetic oligonucleotide
  Sense strand starting at position 3114 of SEQ ID NO: 3649
ugugacugccaacgugaau

SEQ ID NO: 283899 - RNA, 19 nt, Artificial Sequence
  Description of Artificial Sequence: Synthetic oligonucleotide
  Antisense strand to SEQ ID NO: 283898
auucacguuggcagucaca

SEQ ID NO: 283900 - RNA, 19 nt, Artificial Sequence
  Description of Artificial Sequence: Synthetic oligonucleotide
  Sense strand starting at position 3234 of SEQ ID NO: 3649
auuaaauccuauggagaug

SEQ ID NO: 283901 - RNA, 19 nt, Artificial Sequence
  Description of Artificial Sequence: Synthetic oligonucleotide
  Antisense strand to SEQ ID NO: 283900
caucuccauaggauuuaau

SEQ ID NO: 283902 - RNA, 19 nt, Artificial Sequence
  Description of Artificial Sequence: Synthetic oligonucleotide
  Sense strand starting at position 3322 of SEQ ID NO: 3649
ucugcagucugguuccaaa

SEQ ID NO: 283903 - RNA, 19 nt, Artificial Sequence
  Description of Artificial Sequence: Synthetic oligonucleotide
  Antisense strand to SEQ ID NO: 283902
uuuggaaccagacugcaga

SEQ ID NO: 283904 - RNA, 19 nt, Artificial Sequence
  Description of Artificial Sequence: Synthetic oligonucleotide
  Sense strand starting at position 3407 of SEQ ID NO: 3649
gccaguugugucugugggu

SEQ ID NO: 283905 - RNA, 19 nt, Artificial Sequence
  Description of Artificial Sequence: Synthetic oligonucleotide
  Antisense strand to SEQ ID NO: 283904
acccacagacacaacuggc

SEQ ID NO: 283906 - RNA, 19 nt, Artificial Sequence
  Description of Artificial Sequence: Synthetic oligonucleotide
  Sense strand starting at position 3410 of SEQ ID NO: 3649
aguugugucugugggugau

SEQ ID NO: 283907 - RNA, 19 nt, Artificial Sequence
  Description of Artificial Sequence: Synthetic oligonucleotide
  Antisense strand to SEQ ID NO: 283906
aucacccacagacacaacu

SEQ ID NO: 283908 - RNA, 19 nt, Artificial Sequence
  Description of Artificial Sequence: Synthetic oligonucleotide
  Sense strand starting at position 3422 of SEQ ID NO: 3649
gggugauggucucucaguu

SEQ ID NO: 283909 - RNA, 19 nt, Artificial Sequence
  Description of Artificial Sequence: Synthetic oligonucleotide
  Antisense strand to SEQ ID NO: 283908
aacugagagaccaucaccc

SEQ ID NO: 283910 - RNA, 19 nt, Artificial Sequence
  Description of Artificial Sequence: Synthetic oligonucleotide
  Sense strand starting at position 3444 of SEQ ID NO: 3649
cugucaaucuuuggugugu

SEQ ID NO: 283911 - RNA, 19 nt, Artificial Sequence
  Description of Artificial Sequence: Synthetic oligonucleotide
  Antisense strand to SEQ ID NO: 283910
acacaccaaagauugacag

SEQ ID NO: 283912 - RNA, 19 nt, Artificial Sequence
  Description of Artificial Sequence: Synthetic oligonucleotide
  Sense strand starting at position 3445 of SEQ ID NO: 3649
ugucaaucuuugguguguu

SEQ ID NO: 283913 - RNA, 19 nt, Artificial Sequence
  Description of Artificial Sequence: Synthetic oligonucleotide
  Antisense strand to SEQ ID NO: 283912
aacacaccaaagauugaca

SEQ ID NO: 283914 - RNA, 19 nt, Artificial Sequence
  Description of Artificial Sequence: Synthetic oligonucleotide
  Sense strand starting at position 3448 of SEQ ID NO: 3649
caaucuuugguguguugaa

SEQ ID NO: 283915 - RNA, 19 nt, Artificial Sequence
  Description of Artificial Sequence: Synthetic oligonucleotide
  Antisense strand to SEQ ID NO: 283914
uucaacacaccaaagauug

SEQ ID NO: 283916 - RNA, 19 nt, Artificial Sequence
  Description of Artificial Sequence: Synthetic oligonucleotide
  Sense strand starting at position 3469 of SEQ ID NO: 3649
ggacgagaucuaugcagga

SEQ ID NO: 283917 - RNA, 19 nt, Artificial Sequence
  Description of Artificial Sequence: Synthetic oligonucleotide
  Antisense strand to SEQ ID NO: 283916
uccugcauagaucucgucc

SEQ ID NO: 283918 - RNA, 19 nt, Artificial Sequence
  Description of Artificial Sequence: Synthetic oligonucleotide
  Sense strand starting at position 3510 of SEQ ID NO: 3649
gguuuauagacagguuaau

SEQ ID NO: 283919 - RNA, 19 nt, Artificial Sequence
  Description of Artificial Sequence: Synthetic oligonucleotide
  Antisense strand to SEQ ID NO: 283918
auuaaccugucuauaaacc

SEQ ID NO: 283920 - RNA, 19 nt, Artificial Sequence
  Description of Artificial Sequence: Synthetic oligonucleotide
  Sense strand starting at position 3676 of SEQ ID NO: 3649
aggacugaauuggaagaga

SEQ ID NO: 283921 - RNA, 19 nt, Artificial Sequence
  Description of Artificial Sequence: Synthetic oligonucleotide
  Antisense strand to SEQ ID NO: 283920
ucucuuccaauucaguccu

SEQ ID NO: 283922 - RNA, 19 nt, Artificial Sequence
  Description of Artificial Sequence: Synthetic oligonucleotide
  Sense strand starting at position 3730 of SEQ ID NO: 3649
agcucugucaguuggagaa

SEQ ID NO: 283923 - RNA, 19 nt, Artificial Sequence
  Description of Artificial Sequence: Synthetic oligonucleotide
  Antisense strand to SEQ ID NO: 283922
uucuccaacugacagagcu

SEQ ID NO: 283924 - RNA, 19 nt, Artificial Sequence
  Description of Artificial Sequence: Synthetic oligonucleotide
  Sense strand starting at position 3734 of SEQ ID NO: 3649
cugucaguuggagaagguu

SEQ ID NO: 283925 - RNA, 19 nt, Artificial Sequence
  Description of Artificial Sequence: Synthetic oligonucleotide
  Antisense strand to SEQ ID NO: 283924
aaccuucuccaacugacag

SEQ ID NO: 283926 - RNA, 19 nt, Artificial Sequence
  Description of Artificial Sequence: Synthetic oligonucleotide
  Sense strand starting at position 3819 of SEQ ID NO: 3649
ugggcugagguaugagaga

SEQ ID NO: 283927 - RNA, 19 nt, Artificial Sequence
  Description of Artificial Sequence: Synthetic oligonucleotide
  Antisense strand to SEQ ID NO: 283926
ucucucauaccucagccca

SEQ ID NO: 283928 - RNA, 19 nt, Artificial Sequence
  Description of Artificial Sequence: Synthetic oligonucleotide
  Sense strand starting at position 3870 of SEQ ID NO: 3649
ucuggauucccucggaaug

SEQ ID NO: 283929 - RNA, 19 nt, Artificial Sequence
  Description of Artificial Sequence: Synthetic oligonucleotide
  Antisense strand to SEQ ID NO: 283928
cauuccgagggaauccaga

SEQ ID NO: 283930 - RNA, 19 nt, Artificial Sequence
  Description of Artificial Sequence: Synthetic oligonucleotide
  Sense strand starting at position 3871 of SEQ ID NO: 3649
cuggauucccucggaaugu

SEQ ID NO: 283931 - RNA, 19 nt, Artificial Sequence
  Description of Artificial Sequence: Synthetic oligonucleotide
  Antisense strand to SEQ ID NO: 283930
acauuccgagggaauccag

SEQ ID NO: 283932 - RNA, 19 nt, Artificial Sequence
  Description of Artificial Sequence: Synthetic oligonucleotide
  Sense strand starting at position 3872 of SEQ ID NO: 3649
uggauucccucggaauguu

SEQ ID NO: 283933 - RNA, 19 nt, Artificial Sequence
  Description of Artificial Sequence: Synthetic oligonucleotide
  Antisense strand to SEQ ID NO: 283932
aacauuccgagggaaucca

SEQ ID NO: 283934 - RNA, 19 nt, Artificial Sequence
  Description of Artificial Sequence: Synthetic oligonucleotide
  Sense strand starting at position 3904 of SEQ ID NO: 3649
cccguuacuugagccagaa

SEQ ID NO: 283935 - RNA, 19 nt, Artificial Sequence
  Description of Artificial Sequence: Synthetic oligonucleotide
  Antisense strand to SEQ ID NO: 283934
uucuggcucaaguaacggg

SEQ ID NO: 283936 - RNA, 19 nt, Artificial Sequence
  Description of Artificial Sequence: Synthetic oligonucleotide
  Sense strand starting at position 3906 of SEQ ID NO: 3649
cguuacuugagccagaaau

SEQ ID NO: 283937 - RNA, 19 nt, Artificial Sequence
  Description of Artificial Sequence: Synthetic oligonucleotide
  Antisense strand to SEQ ID NO: 283936
auuucuggcucaaguaacg

SEQ ID NO: 283938 - RNA, 19 nt, Artificial Sequence
  Description of Artificial Sequence: Synthetic oligonucleotide
  Sense strand starting at position 322 of SEQ ID NO: 3650
agugacuuguagcuaacau

SEQ ID NO: 283939 - RNA, 19 nt, Artificial Sequence
  Description of Artificial Sequence: Synthetic oligonucleotide
  Antisense strand to SEQ ID NO: 283938
auguuagcuacaagucacu

SEQ ID NO: 283940 - RNA, 19 nt, Artificial Sequence
  Description of Artificial Sequence: Synthetic oligonucleotide
  Sense strand starting at position 336 of SEQ ID NO: 3650
aacauuuagugcuaugugu

SEQ ID NO: 283941 - RNA, 19 nt, Artificial Sequence
  Description of Artificial Sequence: Synthetic oligonucleotide
  Antisense strand to SEQ ID NO: 283940
acacauagcacuaaauguu

SEQ ID NO: 283942 - RNA, 19 nt, Artificial Sequence
  Description of Artificial Sequence: Synthetic oligonucleotide
  Sense strand starting at position 338 of SEQ ID NO: 3650
cauuuagugcuauguguca

SEQ ID NO: 283943 - RNA, 19 nt, Artificial Sequence
  Description of Artificial Sequence: Synthetic oligonucleotide
  Antisense strand to SEQ ID NO: 283942
ugacacauagcacuaaaug

SEQ ID NO: 283944 - RNA, 19 nt, Artificial Sequence
  Description of Artificial Sequence: Synthetic oligonucleotide
  Sense strand starting at position 340 of SEQ ID NO: 3650
uuuagugcuaugugucaag

SEQ ID NO: 283945 - RNA, 19 nt, Artificial Sequence
  Description of Artificial Sequence: Synthetic oligonucleotide
  Antisense strand to SEQ ID NO: 283944
cuugacacauagcacuaaa

SEQ ID NO: 283946 - RNA, 19 nt, Artificial Sequence
  Description of Artificial Sequence: Synthetic oligonucleotide
  Sense strand starting at position 343 of SEQ ID NO: 3650
agugcuaugugucaagcaa

SEQ ID NO: 283947 - RNA, 19 nt, Artificial Sequence
  Description of Artificial Sequence: Synthetic oligonucleotide
  Antisense strand to SEQ ID NO: 283946
uugcuugacacauagcacu

SEQ ID NO: 283948 - RNA, 19 nt, Artificial Sequence
  Description of Artificial Sequence: Synthetic oligonucleotide
  Sense strand starting at position 350 of SEQ ID NO: 3650
ugugucaagcaauaaccua

SEQ ID NO: 283949 - RNA, 19 nt, Artificial Sequence
  Description of Artificial Sequence: Synthetic oligonucleotide
  Antisense strand to SEQ ID NO: 283948
uagguuauugcuugacaca

SEQ ID NO: 283950 - RNA, 19 nt, Artificial Sequence
  Description of Artificial Sequence: Synthetic oligonucleotide
  Sense strand starting at position 462 of SEQ ID NO: 3650
aaacgacagugcugugauu

SEQ ID NO: 283951 - RNA, 19 nt, Artificial Sequence
  Description of Artificial Sequence: Synthetic oligonucleotide
  Antisense strand to SEQ ID NO: 283950
aaucacagcacugucguuu

SEQ ID NO: 283952 - RNA, 19 nt, Artificial Sequence
  Description of Artificial Sequence: Synthetic oligonucleotide
  Sense strand starting at position 464 of SEQ ID NO: 3650
acgacagugcugugauuau

SEQ ID NO: 283953 - RNA, 19 nt, Artificial Sequence
  Description of Artificial Sequence: Synthetic oligonucleotide
  Antisense strand to SEQ ID NO: 283952
auaaucacagcacugucgu

SEQ ID NO: 283954 - RNA, 19 nt, Artificial Sequence
  Description of Artificial Sequence: Synthetic oligonucleotide
  Sense strand starting at position 501 of SEQ ID NO: 3650
acucaagauucugcgcaca

SEQ ID NO: 283955 - RNA, 19 nt, Artificial Sequence
  Description of Artificial Sequence: Synthetic oligonucleotide
  Antisense strand to SEQ ID NO: 283954
ugugcgcagaaucuugagu

SEQ ID NO: 283956 - RNA, 19 nt, Artificial Sequence
  Description of Artificial Sequence: Synthetic oligonucleotide
  Sense strand starting at position 503 of SEQ ID NO: 3650
ucaagauucugcgcacauc

SEQ ID NO: 283957 - RNA, 19 nt, Artificial Sequence
  Description of Artificial Sequence: Synthetic oligonucleotide
  Antisense strand to SEQ ID NO: 283956
gaugugcgcagaaucuuga

SEQ ID NO: 283958 - RNA, 19 nt, Artificial Sequence
  Description of Artificial Sequence: Synthetic oligonucleotide
  Sense strand starting at position 560 of SEQ ID NO: 3650
ugacuaaagucuuauugaa

SEQ ID NO: 283959 - RNA, 19 nt, Artificial Sequence
  Description of Artificial Sequence: Synthetic oligonucleotide
  Antisense strand to SEQ ID NO: 283958
uucaauaagacuuuaguca

SEQ ID NO: 283960 - RNA, 19 nt, Artificial Sequence
  Description of Artificial Sequence: Synthetic oligonucleotide
  Sense strand starting at position 826 of SEQ ID NO: 3650
gacuuuccgugucauuugu

SEQ ID NO: 283961 - RNA, 19 nt, Artificial Sequence
  Description of Artificial Sequence: Synthetic oligonucleotide
  Antisense strand to SEQ ID NO: 283960
acaaaugacacggaaaguc

SEQ ID NO: 283962 - RNA, 19 nt, Artificial Sequence
  Description of Artificial Sequence: Synthetic oligonucleotide
  Sense strand starting at position 830 of SEQ ID NO: 3650
uuccgugucauuugugcca

SEQ ID NO: 283963 - RNA, 19 nt, Artificial Sequence
  Description of Artificial Sequence: Synthetic oligonucleotide
  Antisense strand to SEQ ID NO: 283962
uggcacaaaugacacggaa

SEQ ID NO: 283964 - RNA, 19 nt, Artificial Sequence
  Description of Artificial Sequence: Synthetic oligonucleotide
  Sense strand starting at position 861 of SEQ ID NO: 3650
aaauguccacgcugagaug

SEQ ID NO: 283965 - RNA, 19 nt, Artificial Sequence
  Description of Artificial Sequence: Synthetic oligonucleotide
  Antisense strand to SEQ ID NO: 283964
caucucagcguggacauuu

SEQ ID NO: 283966 - RNA, 19 nt, Artificial Sequence
  Description of Artificial Sequence: Synthetic oligonucleotide
  Sense strand starting at position 2542 of SEQ ID NO: 3650
cugucaguuucuccauuau

SEQ ID NO: 283967 - RNA, 19 nt, Artificial Sequence
  Description of Artificial Sequence: Synthetic oligonucleotide
  Antisense strand to SEQ ID NO: 283966
auaauggagaaacugacag

SEQ ID NO: 283968 - RNA, 19 nt, Artificial Sequence
  Description of Artificial Sequence: Synthetic oligonucleotide
  Sense strand starting at position 2558 of SEQ ID NO: 3650
uaucuucugguuuggugau

SEQ ID NO: 283969 - RNA, 19 nt, Artificial Sequence
  Description of Artificial Sequence: Synthetic oligonucleotide
  Antisense strand to SEQ ID NO: 283968
aucaccaaaccagaagaua

SEQ ID NO: 283970 - RNA, 19 nt, Artificial Sequence
  Description of Artificial Sequence: Synthetic oligonucleotide
  Sense strand starting at position 2559 of SEQ ID NO: 3650
aucuucugguuuggugaua

SEQ ID NO: 283971 - RNA, 19 nt, Artificial Sequence
  Description of Artificial Sequence: Synthetic oligonucleotide
  Antisense strand to SEQ ID NO: 283970
uaucaccaaaccagaagau

SEQ ID NO: 283972 - RNA, 19 nt, Artificial Sequence
  Description of Artificial Sequence: Synthetic oligonucleotide
  Sense strand starting at position 2560 of SEQ ID NO: 3650
ucuucugguuuggugauaa

SEQ ID NO: 283973 - RNA, 19 nt, Artificial Sequence
  Description of Artificial Sequence: Synthetic oligonucleotide
  Antisense strand to SEQ ID NO: 283972
uuaucaccaaaccagaaga

SEQ ID NO: 283974 - RNA, 19 nt, Artificial Sequence
  Description of Artificial Sequence: Synthetic oligonucleotide
  Sense strand starting at position 2564 of SEQ ID NO: 3650
cugguuuggugauaaauga

SEQ ID NO: 283975 - RNA, 19 nt, Artificial Sequence
  Description of Artificial Sequence: Synthetic oligonucleotide
  Antisense strand to SEQ ID NO: 283974
ucauuuaucaccaaaccag

SEQ ID NO: 283976 - RNA, 19 nt, Artificial Sequence
  Description of Artificial Sequence: Synthetic oligonucleotide
  Sense strand starting at position 3090 of SEQ ID NO: 3650
gggacaagauccuggcuuu

SEQ ID NO: 283977 - RNA, 19 nt, Artificial Sequence
  Description of Artificial Sequence: Synthetic oligonucleotide
  Antisense strand to SEQ ID NO: 283976
aaagccaggaucuuguccc

SEQ ID NO: 283978 - RNA, 19 nt, Artificial Sequence
  Description of Artificial Sequence: Synthetic oligonucleotide
  Sense strand starting at position 7 of SEQ ID NO: 3651
aguuguacgacauauggga

SEQ ID NO: 283979 - RNA, 19 nt, Artificial Sequence
  Description of Artificial Sequence: Synthetic oligonucleotide
  Antisense strand to SEQ ID NO: 283978
ucccauaugucguacaacu

SEQ ID NO: 283980 - RNA, 19 nt, Artificial Sequence
  Description of Artificial Sequence: Synthetic oligonucleotide
  Sense strand starting at position 9 of SEQ ID NO: 3651
uuguacgacauaugggaaa

SEQ ID NO: 283981 - RNA, 19 nt, Artificial Sequence
  Description of Artificial Sequence: Synthetic oligonucleotide
  Antisense strand to SEQ ID NO: 283980
uuucccauaugucguacaa

SEQ ID NO: 283982 - RNA, 19 nt, Artificial Sequence
  Description of Artificial Sequence: Synthetic oligonucleotide
  Sense strand starting at position 11 of SEQ ID NO: 3651
guacgacauaugggaaaca

SEQ ID NO: 283983 - RNA, 19 nt, Artificial Sequence
  Description of Artificial Sequence: Synthetic oligonucleotide
  Antisense strand to SEQ ID NO: 283982
uguuucccauaugucguac

SEQ ID NO: 283984 - RNA, 19 nt, Artificial Sequence
  Description of Artificial Sequence: Synthetic oligonucleotide
  Sense strand starting at position 67 of SEQ ID NO: 3651
cuugcaagucacuauguua

SEQ ID NO: 283985 - RNA, 19 nt, Artificial Sequence
  Description of Artificial Sequence: Synthetic oligonucleotide
  Antisense strand to SEQ ID NO: 283984
uaacauagugacuugcaag

SEQ ID NO: 283986 - RNA, 19 nt, Artificial Sequence
  Description of Artificial Sequence: Synthetic oligonucleotide
  Sense strand starting at position 129 of SEQ ID NO: 3651
accaaauucugggucaaag

SEQ ID NO: 283987 - RNA, 19 nt, Artificial Sequence
  Description of Artificial Sequence: Synthetic oligonucleotide
  Antisense strand to SEQ ID NO: 283986
cuuugacccagaauuuggu

SEQ ID NO: 283988 - RNA, 19 nt, Artificial Sequence
  Description of Artificial Sequence: Synthetic oligonucleotide
  Sense strand starting at position 334 of SEQ ID NO: 3651
agcgguuacagugauccaa

SEQ ID NO: 283989 - RNA, 19 nt, Artificial Sequence
  Description of Artificial Sequence: Synthetic oligonucleotide
  Antisense strand to SEQ ID NO: 283988
uuggaucacuguaaccgcu

SEQ ID NO: 283990 - RNA, 19 nt, Artificial Sequence
  Description of Artificial Sequence: Synthetic oligonucleotide
  Sense strand starting at position 336 of SEQ ID NO: 3651
cgguuacagugauccaaga

SEQ ID NO: 283991 - RNA, 19 nt, Artificial Sequence
  Description of Artificial Sequence: Synthetic oligonucleotide
  Antisense strand to SEQ ID NO: 283990
ucuuggaucacuguaaccg

SEQ ID NO: 283992 - RNA, 19 nt, Artificial Sequence
  Description of Artificial Sequence: Synthetic oligonucleotide
  Sense strand starting at position 487 of SEQ ID NO: 3651
ccacaauagcauuaguaug

SEQ ID NO: 283993 - RNA, 19 nt, Artificial Sequence
  Description of Artificial Sequence: Synthetic oligonucleotide
  Antisense strand to SEQ ID NO: 283992
cauacuaaugcuauugugg

SEQ ID NO: 283994 - RNA, 19 nt, Artificial Sequence
  Description of Artificial Sequence: Synthetic oligonucleotide
  Sense strand starting at position 563 of SEQ ID NO: 3651
ugagaaucccgagguaaac

SEQ ID NO: 283995 - RNA, 19 nt, Artificial Sequence
  Description of Artificial Sequence: Synthetic oligonucleotide
  Antisense strand to SEQ ID NO: 283994
guuuaccucgggauucuca

SEQ ID NO: 283996 - RNA, 19 nt, Artificial Sequence
  Description of Artificial Sequence: Synthetic oligonucleotide
  Sense strand starting at position 699 of SEQ ID NO: 3651
uaauaacaucuuugagggu

SEQ ID NO: 283997 - RNA, 19 nt, Artificial Sequence
  Description of Artificial Sequence: Synthetic oligonucleotide
  Antisense strand to SEQ ID NO: 283996
acccucaaagauguuauua

SEQ ID NO: 283998 - RNA, 19 nt, Artificial Sequence
  Description of Artificial Sequence: Synthetic oligonucleotide
  Sense strand starting at position 773 of SEQ ID NO: 3651
gagguaacauguccaaguu

SEQ ID NO: 283999 - RNA, 19 nt, Artificial Sequence
  Description of Artificial Sequence: Synthetic oligonucleotide
  Antisense strand to SEQ ID NO: 283998
aacuuggacauguuaccuc

SEQ ID NO: 284000 - RNA, 19 nt, Artificial Sequence
  Description of Artificial Sequence: Synthetic oligonucleotide
  Sense strand starting at position 774 of SEQ ID NO: 3651
agguaacauguccaaguuu

SEQ ID NO: 284001 - RNA, 19 nt, Artificial Sequence
  Description of Artificial Sequence: Synthetic oligonucleotide
  Antisense strand to SEQ ID NO: 284000
aaacuuggacauguuaccu

SEQ ID NO: 284002 - RNA, 19 nt, Artificial Sequence
  Description of Artificial Sequence: Synthetic oligonucleotide
  Sense strand starting at position 982 of SEQ ID NO: 3651
ccaagugaugcugauccua

SEQ ID NO: 284003 - RNA, 19 nt, Artificial Sequence
  Description of Artificial Sequence: Synthetic oligonucleotide
  Antisense strand to SEQ ID NO: 284002
uaggaucagcaucacuugg

SEQ ID NO: 284004 - RNA, 19 nt, Artificial Sequence
  Description of Artificial Sequence: Synthetic oligonucleotide
  Sense strand starting at position 1044 of SEQ ID NO: 3651
uugaaagaauacuugcuuu

SEQ ID NO: 284005 - RNA, 19 nt, Artificial Sequence
  Description of Artificial Sequence: Synthetic oligonucleotide
  Antisense strand to SEQ ID NO: 284004
aaagcaaguauucuuucaa

SEQ ID NO: 284006 - RNA, 19 nt, Artificial Sequence
  Description of Artificial Sequence: Synthetic oligonucleotide
  Sense strand starting at position 1089 of SEQ ID NO: 3651
accagaagccuuuaaaguu

SEQ ID NO: 284007 - RNA, 19 nt, Artificial Sequence
  Description of Artificial Sequence: Synthetic oligonucleotide
  Antisense strand to SEQ ID NO: 284006
aacuuuaaaggcuucuggu

SEQ ID NO: 284008 - RNA, 19 nt, Artificial Sequence
  Description of Artificial Sequence: Synthetic oligonucleotide
  Sense strand starting at position 1096 of SEQ ID NO: 3651
gccuuuaaaguuuauuaga

SEQ ID NO: 284009 - RNA, 19 nt, Artificial Sequence
  Description of Artificial Sequence: Synthetic oligonucleotide
  Antisense strand to SEQ ID NO: 284008
ucuaauaaacuuuaaaggc

SEQ ID NO: 284010 - RNA, 19 nt, Artificial Sequence
  Description of Artificial Sequence: Synthetic oligonucleotide
  Sense strand starting at position 1195 of SEQ ID NO: 3651
cugggagucacugagugua

SEQ ID NO: 284011 - RNA, 19 nt, Artificial Sequence
  Description of Artificial Sequence: Synthetic oligonucleotide
  Antisense strand to SEQ ID NO: 284010
uacacucagugacucccag

SEQ ID NO: 284012 - RNA, 19 nt, Artificial Sequence
  Description of Artificial Sequence: Synthetic oligonucleotide
  Sense strand starting at position 1197 of SEQ ID NO: 3651
gggagucacugaguguacu

SEQ ID NO: 284013 - RNA, 19 nt, Artificial Sequence
  Description of Artificial Sequence: Synthetic oligonucleotide
  Antisense strand to SEQ ID NO: 284012
aguacacucagugacuccc

SEQ ID NO: 284014 - RNA, 19 nt, Artificial Sequence
  Description of Artificial Sequence: Synthetic oligonucleotide
  Sense strand starting at position 1297 of SEQ ID NO: 3651
agaguuuaugcucaguuua

SEQ ID NO: 284015 - RNA, 19 nt, Artificial Sequence
  Description of Artificial Sequence: Synthetic oligonucleotide
  Antisense strand to SEQ ID NO: 284014
uaaacugagcauaaacucu

SEQ ID NO: 284016 - RNA, 19 nt, Artificial Sequence
  Description of Artificial Sequence: Synthetic oligonucleotide
  Sense strand starting at position 1346 of SEQ ID NO: 3651
uguaaacguuuauccaaag

SEQ ID NO: 284017 - RNA, 19 nt, Artificial Sequence
  Description of Artificial Sequence: Synthetic oligonucleotide
  Antisense strand to SEQ ID NO: 284016
cuuuggauaaacguuuaca

SEQ ID NO: 284018 - RNA, 19 nt, Artificial Sequence
  Description of Artificial Sequence: Synthetic oligonucleotide
  Sense strand starting at position 1464 of SEQ ID NO: 3651
gaaagcugucccgagagca

SEQ ID NO: 284019 - RNA, 19 nt, Artificial Sequence
  Description of Artificial Sequence: Synthetic oligonucleotide
  Antisense strand to SEQ ID NO: 284018
ugcucucgggacagcuuuc

SEQ ID NO: 284020 - RNA, 19 nt, Artificial Sequence
  Description of Artificial Sequence: Synthetic oligonucleotide
  Sense strand starting at position 2146 of SEQ ID NO: 3651
cucuaagcuccaugugaaa

SEQ ID NO: 284021 - RNA, 19 nt, Artificial Sequence
  Description of Artificial Sequence: Synthetic oligonucleotide
  Antisense strand to SEQ ID NO: 284020
uuucacauggagcuuagag

SEQ ID NO: 284022 - RNA, 19 nt, Artificial Sequence
  Description of Artificial Sequence: Synthetic oligonucleotide
  Sense strand starting at position 2153 of SEQ ID NO: 3651
cuccaugugaaauguggau

SEQ ID NO: 284023 - RNA, 19 nt, Artificial Sequence
  Description of Artificial Sequence: Synthetic oligonucleotide
  Antisense strand to SEQ ID NO: 284022
auccacauuucacauggag

SEQ ID NO: 284024 - RNA, 19 nt, Artificial Sequence
  Description of Artificial Sequence: Synthetic oligonucleotide
  Sense strand starting at position 2155 of SEQ ID NO: 3651
ccaugugaaauguggauaa

SEQ ID NO: 284025 - RNA, 19 nt, Artificial Sequence
  Description of Artificial Sequence: Synthetic oligonucleotide
  Antisense strand to SEQ ID NO: 284024
uuauccacauuucacaugg

SEQ ID NO: 284026 - RNA, 19 nt, Artificial Sequence
  Description of Artificial Sequence: Synthetic oligonucleotide
  Sense strand starting at position 2168 of SEQ ID NO: 3651
ggauaauauuccuuacugc

SEQ ID NO: 284027 - RNA, 19 nt, Artificial Sequence
  Description of Artificial Sequence: Synthetic oligonucleotide
  Antisense strand to SEQ ID NO: 284026
gcaguaaggaauauuaucc

SEQ ID NO: 284028 - RNA, 19 nt, Artificial Sequence
  Description of Artificial Sequence: Synthetic oligonucleotide
  Sense strand starting at position 2680 of SEQ ID NO: 3651
gaguuaggcuaaguuaaau

SEQ ID NO: 284029 - RNA, 19 nt, Artificial Sequence
  Description of Artificial Sequence: Synthetic oligonucleotide
  Antisense strand to SEQ ID NO: 284028
auuuaacuuagccuaacuc

SEQ ID NO: 284030 - RNA, 19 nt, Artificial Sequence
  Description of Artificial Sequence: Synthetic oligonucleotide
  Sense strand starting at position 3104 of SEQ ID NO: 3651
gugagaucgcguccaugca

SEQ ID NO: 284031 - RNA, 19 nt, Artificial Sequence
  Description of Artificial Sequence: Synthetic oligonucleotide
  Antisense strand to SEQ ID NO: 284030
ugcauggacgcgaucucac

SEQ ID NO: 284032 - RNA, 19 nt, Artificial Sequence
  Description of Artificial Sequence: Synthetic oligonucleotide
  Sense strand starting at position 3170 of SEQ ID NO: 3651
cuuacuauuugguauggaa

SEQ ID NO: 284033 - RNA, 19 nt, Artificial Sequence
  Description of Artificial Sequence: Synthetic oligonucleotide
  Antisense strand to SEQ ID NO: 284032
uuccauaccaaauaguaag

SEQ ID NO: 284034 - RNA, 19 nt, Artificial Sequence
  Description of Artificial Sequence: Synthetic oligonucleotide
  Sense strand starting at position 3173 of SEQ ID NO: 3651
acuauuugguauggaauuu

SEQ ID NO: 284035 - RNA, 19 nt, Artificial Sequence
  Description of Artificial Sequence: Synthetic oligonucleotide
  Antisense strand to SEQ ID NO: 284034
aaauuccauaccaaauagu

SEQ ID NO: 284036 - RNA, 19 nt, Artificial Sequence
  Description of Artificial Sequence: Synthetic oligonucleotide
  Sense strand starting at position 3191 of SEQ ID NO: 3651
uucugauagcuaggguaaa

SEQ ID NO: 284037 - RNA, 19 nt, Artificial Sequence
  Description of Artificial Sequence: Synthetic oligonucleotide
  Antisense strand to SEQ ID NO: 284036
uuuacccuagcuaucagaa

SEQ ID NO: 284038 - RNA, 19 nt, Artificial Sequence
  Description of Artificial Sequence: Synthetic oligonucleotide
  Sense strand starting at position 3227 of SEQ ID NO: 3651
aaggaauccgaguauccga

SEQ ID NO: 284039 - RNA, 19 nt, Artificial Sequence
  Description of Artificial Sequence: Synthetic oligonucleotide
  Antisense strand to SEQ ID NO: 284038
ucggauacucggauuccuu

SEQ ID NO: 284040 - RNA, 19 nt, Artificial Sequence
  Description of Artificial Sequence: Synthetic oligonucleotide
  Sense strand starting at position 3230 of SEQ ID NO: 3651
gaauccgaguauccgaaua

SEQ ID NO: 284041 - RNA, 19 nt, Artificial Sequence
  Description of Artificial Sequence: Synthetic oligonucleotide
  Antisense strand to SEQ ID NO: 284040
uauucggauacucggauuc

SEQ ID NO: 284042 - RNA, 19 nt, Artificial Sequence
  Description of Artificial Sequence: Synthetic oligonucleotide
  Sense strand starting at position 3235 of SEQ ID NO: 3651
cgaguauccgaauacaggu

SEQ ID NO: 284043 - RNA, 19 nt, Artificial Sequence
  Description of Artificial Sequence: Synthetic oligonucleotide
  Antisense strand to SEQ ID NO: 284042
accuguauucggauacucg

SEQ ID NO: 284044 - RNA, 19 nt, Artificial Sequence
  Description of Artificial Sequence: Synthetic oligonucleotide
  Sense strand starting at position 3283 of SEQ ID NO: 3651
guuguagcagcuguguuua

SEQ ID NO: 284045 - RNA, 19 nt, Artificial Sequence
  Description of Artificial Sequence: Synthetic oligonucleotide
  Antisense strand to SEQ ID NO: 284044
uaaacacagcugcuacaac

SEQ ID NO: 284046 - RNA, 19 nt, Artificial Sequence
  Description of Artificial Sequence: Synthetic oligonucleotide
  Sense strand starting at position 3323 of SEQ ID NO: 3651
cugccuaaaccagaagagu

SEQ ID NO: 284047 - RNA, 19 nt, Artificial Sequence
  Description of Artificial Sequence: Synthetic oligonucleotide
  Antisense strand to SEQ ID NO: 284046
acucuucugguuuaggcag

SEQ ID NO: 284048 - RNA, 19 nt, Artificial Sequence
  Description of Artificial Sequence: Synthetic oligonucleotide
  Sense strand starting at position 3348 of SEQ ID NO: 3651
uuugccauuguguauuaaa

SEQ ID NO: 284049 - RNA, 19 nt, Artificial Sequence
  Description of Artificial Sequence: Synthetic oligonucleotide
  Antisense strand to SEQ ID NO: 284048
uuuaauacacaauggcaaa

SEQ ID NO: 284050 - RNA, 19 nt, Artificial Sequence
  Description of Artificial Sequence: Synthetic oligonucleotide
  Sense strand starting at position 3462 of SEQ ID NO: 3651
agaagauucuuagcaaauu

SEQ ID NO: 284051 - RNA, 19 nt, Artificial Sequence
  Description of Artificial Sequence: Synthetic oligonucleotide
  Antisense strand to SEQ ID NO: 284050
aauuugcuaagaaucuucu

SEQ ID NO: 284052 - RNA, 19 nt, Artificial Sequence
  Description of Artificial Sequence: Synthetic oligonucleotide
  Sense strand starting at position 3606 of SEQ ID NO: 3651
guaaauugccuauagaggu

SEQ ID NO: 284053 - RNA, 19 nt, Artificial Sequence
  Description of Artificial Sequence: Synthetic oligonucleotide
  Antisense strand to SEQ ID NO: 284052
accucuauaggcaauuuac

SEQ ID NO: 284054 - RNA, 19 nt, Artificial Sequence
  Description of Artificial Sequence: Synthetic oligonucleotide
  Sense strand starting at position 3802 of SEQ ID NO: 3651
aucaaaugcagaggugauu

SEQ ID NO: 284055 - RNA, 19 nt, Artificial Sequence
  Description of Artificial Sequence: Synthetic oligonucleotide
  Antisense strand to SEQ ID NO: 284054
aaucaccucugcauuugau

SEQ ID NO: 284056 - RNA, 19 nt, Artificial Sequence
  Description of Artificial Sequence: Synthetic oligonucleotide
  Sense strand starting at position 3829 of SEQ ID NO: 3651
gccacaaaucaagaagucu

SEQ ID NO: 284057 - RNA, 19 nt, Artificial Sequence
  Description of Artificial Sequence: Synthetic oligonucleotide
  Antisense strand to SEQ ID NO: 284056
agacuucuugauuuguggc

SEQ ID NO: 284058 - RNA, 19 nt, Artificial Sequence
  Description of Artificial Sequence: Synthetic oligonucleotide
  Sense strand starting at position 2037 of SEQ ID NO: 3652
uccggccacuuucuuaaua

SEQ ID NO: 284059 - RNA, 19 nt, Artificial Sequence
  Description of Artificial Sequence: Synthetic oligonucleotide
  Antisense strand to SEQ ID NO: 284058
uauuaagaaaguggccgga

SEQ ID NO: 284060 - RNA, 19 nt, Artificial Sequence
  Description of Artificial Sequence: Synthetic oligonucleotide
  Sense strand starting at position 2038 of SEQ ID NO: 3652
ccggccacuuucuuaauau

SEQ ID NO: 284061 - RNA, 19 nt, Artificial Sequence
  Description of Artificial Sequence: Synthetic oligonucleotide
  Antisense strand to SEQ ID NO: 284060
auauuaagaaaguggccgg

SEQ ID NO: 284062 - RNA, 19 nt, Artificial Sequence
  Description of Artificial Sequence: Synthetic oligonucleotide
  Sense strand starting at position 2039 of SEQ ID NO: 3652
cggccacuuucuuaauaua

SEQ ID NO: 284063 - RNA, 19 nt, Artificial Sequence
  Description of Artificial Sequence: Synthetic oligonucleotide
  Antisense strand to SEQ ID NO: 284062
uauauuaagaaaguggccg

SEQ ID NO: 284064 - RNA, 19 nt, Artificial Sequence
  Description of Artificial Sequence: Synthetic oligonucleotide
  Sense strand starting at position 2055 of SEQ ID NO: 3652
auagccguccaaugggaaa

SEQ ID NO: 284065 - RNA, 19 nt, Artificial Sequence
  Description of Artificial Sequence: Synthetic oligonucleotide
  Antisense strand to SEQ ID NO: 284064
uuucccauuggacggcuau

SEQ ID NO: 284066 - RNA, 19 nt, Artificial Sequence
  Description of Artificial Sequence: Synthetic oligonucleotide
  Sense strand starting at position 2680 of SEQ ID NO: 3652
agcuuaggucucuagguga

SEQ ID NO: 284067 - RNA, 19 nt, Artificial Sequence
  Description of Artificial Sequence: Synthetic oligonucleotide
  Antisense strand to SEQ ID NO: 284066
ucaccuagagaccuaagcu

SEQ ID NO: 284068 - RNA, 19 nt, Artificial Sequence
  Description of Artificial Sequence: Synthetic oligonucleotide
  Sense strand starting at position 2683 of SEQ ID NO: 3652
uuaggucucuaggugaaga

SEQ ID NO: 284069 - RNA, 19 nt, Artificial Sequence
  Description of Artificial Sequence: Synthetic oligonucleotide
  Antisense strand to SEQ ID NO: 284068
ucuucaccuagagaccuaa

SEQ ID NO: 284070 - RNA, 19 nt, Artificial Sequence
  Description of Artificial Sequence: Synthetic oligonucleotide
  Sense strand starting at position 2684 of SEQ ID NO: 3652
uaggucucuaggugaagau

SEQ ID NO: 284071 - RNA, 19 nt, Artificial Sequence
  Description of Artificial Sequence: Synthetic oligonucleotide
  Antisense strand to SEQ ID NO: 284070
aucuucaccuagagaccua

SEQ ID NO: 284072 - RNA, 19 nt, Artificial Sequence
  Description of Artificial Sequence: Synthetic oligonucleotide
  Sense strand starting at position 2685 of SEQ ID NO: 3652
aggucucuaggugaagauu

SEQ ID NO: 284073 - RNA, 19 nt, Artificial Sequence
  Description of Artificial Sequence: Synthetic oligonucleotide
  Antisense strand to SEQ ID NO: 284072
aaucuucaccuagagaccu

SEQ ID NO: 284074 - RNA, 19 nt, Artificial Sequence
  Description of Artificial Sequence: Synthetic oligonucleotide
  Sense strand starting at position 2694 of SEQ ID NO: 3652
ggugaagauuaagggaaga

SEQ ID NO: 284075 - RNA, 19 nt, Artificial Sequence
  Description of Artificial Sequence: Synthetic oligonucleotide
  Antisense strand to SEQ ID NO: 284074
ucuucccuuaaucuucacc

SEQ ID NO: 284076 - RNA, 19 nt, Artificial Sequence
  Description of Artificial Sequence: Synthetic oligonucleotide
  Sense strand starting at position 2750 of SEQ ID NO: 3652
ggucgaggcucgaacacuu

SEQ ID NO: 284077 - RNA, 19 nt, Artificial Sequence
  Description of Artificial Sequence: Synthetic oligonucleotide
  Antisense strand to SEQ ID NO: 284076
aaguguucgagccucgacc

SEQ ID NO: 284078 - RNA, 19 nt, Artificial Sequence
  Description of Artificial Sequence: Synthetic oligonucleotide
  Sense strand starting at position 2757 of SEQ ID NO: 3652
gcucgaacacuuggaggaa

SEQ ID NO: 284079 - RNA, 19 nt, Artificial Sequence
  Description of Artificial Sequence: Synthetic oligonucleotide
  Antisense strand to SEQ ID NO: 284078
uuccuccaaguguucgagc

SEQ ID NO: 284080 - RNA, 19 nt, Artificial Sequence
  Description of Artificial Sequence: Synthetic oligonucleotide
  Sense strand starting at position 2845 of SEQ ID NO: 3652
agagaacugucugagauaa

SEQ ID NO: 284081 - RNA, 19 nt, Artificial Sequence
  Description of Artificial Sequence: Synthetic oligonucleotide
  Antisense strand to SEQ ID NO: 284080
uuaucucagacaguucucu

SEQ ID NO: 284082 - RNA, 19 nt, Artificial Sequence
  Description of Artificial Sequence: Synthetic oligonucleotide
  Sense strand starting at position 2888 of SEQ ID NO: 3652
uguacaauagaauguacaa

SEQ ID NO: 284083 - RNA, 19 nt, Artificial Sequence
  Description of Artificial Sequence: Synthetic oligonucleotide
  Antisense strand to SEQ ID NO: 284082
uuguacauucuauuguaca

SEQ ID NO: 284084 - RNA, 19 nt, Artificial Sequence
  Description of Artificial Sequence: Synthetic oligonucleotide
  Sense strand starting at position 3341 of SEQ ID NO: 3652
acucauuuauccuguagau

SEQ ID NO: 284085 - RNA, 19 nt, Artificial Sequence
  Description of Artificial Sequence: Synthetic oligonucleotide
  Antisense strand to SEQ ID NO: 284084
aucuacaggauaaaugagu

SEQ ID NO: 284086 - RNA, 19 nt, Artificial Sequence
  Description of Artificial Sequence: Synthetic oligonucleotide
  Sense strand starting at position 3350 of SEQ ID NO: 3652
uccuguagauccugcauga

SEQ ID NO: 284087 - RNA, 19 nt, Artificial Sequence
  Description of Artificial Sequence: Synthetic oligonucleotide
  Antisense strand to SEQ ID NO: 284086
ucaugcaggaucuacagga

SEQ ID NO: 284088 - RNA, 19 nt, Artificial Sequence
  Description of Artificial Sequence: Synthetic oligonucleotide
  Sense strand starting at position 3354 of SEQ ID NO: 3652
guagauccugcaugaaaug

SEQ ID NO: 284089 - RNA, 19 nt, Artificial Sequence
  Description of Artificial Sequence: Synthetic oligonucleotide
  Antisense strand to SEQ ID NO: 284088
cauuucaugcaggaucuac

SEQ ID NO: 284090 - RNA, 19 nt, Artificial Sequence
  Description of Artificial Sequence: Synthetic oligonucleotide
  Sense strand starting at position 3405 of SEQ ID NO: 3652
accgauuucuacggauaaa

SEQ ID NO: 284091 - RNA, 19 nt, Artificial Sequence
  Description of Artificial Sequence: Synthetic oligonucleotide
  Antisense strand to SEQ ID NO: 284090
uuuauccguagaaaucggu

SEQ ID NO: 284092 - RNA, 19 nt, Artificial Sequence
  Description of Artificial Sequence: Synthetic oligonucleotide
  Sense strand starting at position 3547 of SEQ ID NO: 3652
gcucaugagugcuaaagua

SEQ ID NO: 284093 - RNA, 19 nt, Artificial Sequence
  Description of Artificial Sequence: Synthetic oligonucleotide
  Antisense strand to SEQ ID NO: 284092
uacuuuagcacucaugagc

SEQ ID NO: 284094 - RNA, 19 nt, Artificial Sequence
  Description of Artificial Sequence: Synthetic oligonucleotide
  Sense strand starting at position 3590 of SEQ ID NO: 3652
cuauccauugcaugggaaa

SEQ ID NO: 284095 - RNA, 19 nt, Artificial Sequence
  Description of Artificial Sequence: Synthetic oligonucleotide
  Antisense strand to SEQ ID NO: 284094
uuucccaugcaauggauag

SEQ ID NO: 284096 - RNA, 19 nt, Artificial Sequence
  Description of Artificial Sequence: Synthetic oligonucleotide
  Sense strand starting at position 3592 of SEQ ID NO: 3652
auccauugcaugggaaaug

SEQ ID NO: 284097 - RNA, 19 nt, Artificial Sequence
  Description of Artificial Sequence: Synthetic oligonucleotide
  Antisense strand to SEQ ID NO: 284096
cauuucccaugcaauggau

SEQ ID NO: 284098 - RNA, 19 nt, Artificial Sequence
  Description of Artificial Sequence: Synthetic oligonucleotide
  Sense strand starting at position 3601 of SEQ ID NO: 3652
augggaaaugucugcaaac

SEQ ID NO: 284099 - RNA, 19 nt, Artificial Sequence
  Description of Artificial Sequence: Synthetic oligonucleotide
  Antisense strand to SEQ ID NO: 284098
guuugcagacauuucccau

SEQ ID NO: 284100 - RNA, 19 nt, Artificial Sequence
  Description of Artificial Sequence: Synthetic oligonucleotide
  Sense strand starting at position 3602 of SEQ ID NO: 3652
ugggaaaugucugcaaacu

SEQ ID NO: 284101 - RNA, 19 nt, Artificial Sequence
  Description of Artificial Sequence: Synthetic oligonucleotide
  Antisense strand to SEQ ID NO: 284100
aguuugcagacauuuccca

SEQ ID NO: 284102 - RNA, 19 nt, Artificial Sequence
  Description of Artificial Sequence: Synthetic oligonucleotide
  Sense strand starting at position 3692 of SEQ ID NO: 3652
gucucugucaguuguugga

SEQ ID NO: 284103 - RNA, 19 nt, Artificial Sequence
  Description of Artificial Sequence: Synthetic oligonucleotide
  Antisense strand to SEQ ID NO: 284102
uccaacaacugacagagac

SEQ ID NO: 284104 - RNA, 19 nt, Artificial Sequence
  Description of Artificial Sequence: Synthetic oligonucleotide
  Sense strand starting at position 3714 of SEQ ID NO: 3652
ccaggauucugucuuaucu

SEQ ID NO: 284105 - RNA, 19 nt, Artificial Sequence
  Description of Artificial Sequence: Synthetic oligonucleotide
  Antisense strand to SEQ ID NO: 284104
agauaagacagaauccugg

SEQ ID NO: 284106 - RNA, 19 nt, Artificial Sequence
  Description of Artificial Sequence: Synthetic oligonucleotide
  Sense strand starting at position 3723 of SEQ ID NO: 3652
ugucuuaucuccgcaucuu

SEQ ID NO: 284107 - RNA, 19 nt, Artificial Sequence
  Description of Artificial Sequence: Synthetic oligonucleotide
  Antisense strand to SEQ ID NO: 284106
aagaugcggagauaagaca

SEQ ID NO: 284108 - RNA, 19 nt, Artificial Sequence
  Description of Artificial Sequence: Synthetic oligonucleotide
  Sense strand starting at position 3724 of SEQ ID NO: 3652
gucuuaucuccgcaucuug

SEQ ID NO: 284109 - RNA, 19 nt, Artificial Sequence
  Description of Artificial Sequence: Synthetic oligonucleotide
  Antisense strand to SEQ ID NO: 284108
caagaugcggagauaagac

SEQ ID NO: 284110 - RNA, 19 nt, Artificial Sequence
  Description of Artificial Sequence: Synthetic oligonucleotide
  Sense strand starting at position 3792 of SEQ ID NO: 3652
gggaauuaacccgaaugcu

SEQ ID NO: 284111 - RNA, 19 nt, Artificial Sequence
  Description of Artificial Sequence: Synthetic oligonucleotide
  Antisense strand to SEQ ID NO: 284110
agcauucggguuaauuccc

SEQ ID NO: 284112 - RNA, 19 nt, Artificial Sequence
  Description of Artificial Sequence: Synthetic oligonucleotide
  Sense strand starting at position 3851 of SEQ ID NO: 3652
guuccacacuucgcuuuaa

SEQ ID NO: 284113 - RNA, 19 nt, Artificial Sequence
  Description of Artificial Sequence: Synthetic oligonucleotide
  Antisense strand to SEQ ID NO: 284112
uuaaagcgaaguguggaac

SEQ ID NO: 284114 - RNA, 19 nt, Artificial Sequence
  Description of Artificial Sequence: Synthetic oligonucleotide
  Sense strand starting at position 3904 of SEQ ID NO: 3652
gccugugaucccugggcgu

SEQ ID NO: 284115 - RNA, 19 nt, Artificial Sequence
  Description of Artificial Sequence: Synthetic oligonucleotide
  Antisense strand to SEQ ID NO: 284114
acgcccagggaucacaggc

SEQ ID NO: 284116 - RNA, 19 nt, Artificial Sequence
  Description of Artificial Sequence: Synthetic oligonucleotide
  Sense strand starting at position 29 of SEQ ID NO: 3653
aucauagugcuggauucua

SEQ ID NO: 284117 - RNA, 19 nt, Artificial Sequence
  Description of Artificial Sequence: Synthetic oligonucleotide
  Antisense strand to SEQ ID NO: 284116
uagaauccagcacuaugau

SEQ ID NO: 284118 - RNA, 19 nt, Artificial Sequence
  Description of Artificial Sequence: Synthetic oligonucleotide
  Sense strand starting at position 431 of SEQ ID NO: 3653
cccagagugcaaugauguu

SEQ ID NO: 284119 - RNA, 19 nt, Artificial Sequence
  Description of Artificial Sequence: Synthetic oligonucleotide
  Antisense strand to SEQ ID NO: 284118
aacaucauugcacucuggg

SEQ ID NO: 284120 - RNA, 19 nt, Artificial Sequence
  Description of Artificial Sequence: Synthetic oligonucleotide
  Sense strand starting at position 574 of SEQ ID NO: 3653
gagaccuggucaucugcaa

SEQ ID NO: 284121 - RNA, 19 nt, Artificial Sequence
  Description of Artificial Sequence: Synthetic oligonucleotide
  Antisense strand to SEQ ID NO: 284120
uugcagaugaccaggucuc

SEQ ID NO: 284122 - RNA, 19 nt, Artificial Sequence
  Description of Artificial Sequence: Synthetic oligonucleotide
  Sense strand starting at position 578 of SEQ ID NO: 3653
ccuggucaucugcaacuaa

SEQ ID NO: 284123 - RNA, 19 nt, Artificial Sequence
  Description of Artificial Sequence: Synthetic oligonucleotide
  Antisense strand to SEQ ID NO: 284122
uuaguugcagaugaccagg

SEQ ID NO: 284124 - RNA, 19 nt, Artificial Sequence
  Description of Artificial Sequence: Synthetic oligonucleotide
  Sense strand starting at position 722 of SEQ ID NO: 3653
gggcuuauccggcucuguu

SEQ ID NO: 284125 - RNA, 19 nt, Artificial Sequence
  Description of Artificial Sequence: Synthetic oligonucleotide
  Antisense strand to SEQ ID NO: 284124
aacagagccggauaagccc

SEQ ID NO: 284126 - RNA, 19 nt, Artificial Sequence
  Description of Artificial Sequence: Synthetic oligonucleotide
  Sense strand starting at position 723 of SEQ ID NO: 3653
ggcuuauccggcucuguuu

SEQ ID NO: 284127 - RNA, 19 nt, Artificial Sequence
  Description of Artificial Sequence: Synthetic oligonucleotide
  Antisense strand to SEQ ID NO: 284126
aaacagagccggauaagcc

SEQ ID NO: 284128 - RNA, 19 nt, Artificial Sequence
  Description of Artificial Sequence: Synthetic oligonucleotide
  Sense strand starting at position 757 of SEQ ID NO: 3653
cuaauuugcugacuuguua

SEQ ID NO: 284129 - RNA, 19 nt, Artificial Sequence
  Description of Artificial Sequence: Synthetic oligonucleotide
  Antisense strand to SEQ ID NO: 284128
uaacaagucagcaaauuag

SEQ ID NO: 284130 - RNA, 19 nt, Artificial Sequence
  Description of Artificial Sequence: Synthetic oligonucleotide
  Sense strand starting at position 761 of SEQ ID NO: 3653
uuugcugacuuguuacaag

SEQ ID NO: 284131 - RNA, 19 nt, Artificial Sequence
  Description of Artificial Sequence: Synthetic oligonucleotide
  Antisense strand to SEQ ID NO: 284130
cuuguaacaagucagcaaa

SEQ ID NO: 284132 - RNA, 19 nt, Artificial Sequence
  Description of Artificial Sequence: Synthetic oligonucleotide
  Sense strand starting at position 2661 of SEQ ID NO: 3653
ccgguaacuaagggagaua

SEQ ID NO: 284133 - RNA, 19 nt, Artificial Sequence
  Description of Artificial Sequence: Synthetic oligonucleotide
  Antisense strand to SEQ ID NO: 284132
uaucucccuuaguuaccgg

SEQ ID NO: 284134 - RNA, 19 nt, Artificial Sequence
  Description of Artificial Sequence: Synthetic oligonucleotide
  Sense strand starting at position 2673 of SEQ ID NO: 3653
ggagauacagcguguugaa

SEQ ID NO: 284135 - RNA, 19 nt, Artificial Sequence
  Description of Artificial Sequence: Synthetic oligonucleotide
  Antisense strand to SEQ ID NO: 284134
uucaacacgcuguaucucc

SEQ ID NO: 284136 - RNA, 19 nt, Artificial Sequence
  Description of Artificial Sequence: Synthetic oligonucleotide
  Sense strand starting at position 2815 of SEQ ID NO: 3653
cccaauguuccucaaaggu

SEQ ID NO: 284137 - RNA, 19 nt, Artificial Sequence
  Description of Artificial Sequence: Synthetic oligonucleotide
  Antisense strand to SEQ ID NO: 284136
accuuugaggaacauuggg

SEQ ID NO: 284138 - RNA, 19 nt, Artificial Sequence
  Description of Artificial Sequence: Synthetic oligonucleotide
  Sense strand starting at position 2838 of SEQ ID NO: 3653
cguuguaaucccggagaac

SEQ ID NO: 284139 - RNA, 19 nt, Artificial Sequence
  Description of Artificial Sequence: Synthetic oligonucleotide
  Antisense strand to SEQ ID NO: 284138
guucuccgggauuacaacg

SEQ ID NO: 284140 - RNA, 19 nt, Artificial Sequence
  Description of Artificial Sequence: Synthetic oligonucleotide
  Sense strand starting at position 2839 of SEQ ID NO: 3653
guuguaaucccggagaacu

SEQ ID NO: 284141 - RNA, 19 nt, Artificial Sequence
  Description of Artificial Sequence: Synthetic oligonucleotide
  Antisense strand to SEQ ID NO: 284140
aguucuccgggauuacaac

SEQ ID NO: 284142 - RNA, 19 nt, Artificial Sequence
  Description of Artificial Sequence: Synthetic oligonucleotide
  Sense strand starting at position 2861 of SEQ ID NO: 3653
acacacuagugcucugaaa

SEQ ID NO: 284143 - RNA, 19 nt, Artificial Sequence
  Description of Artificial Sequence: Synthetic oligonucleotide
  Antisense strand to SEQ ID NO: 284142
uuucagagcacuagugugu

SEQ ID NO: 284144 - RNA, 19 nt, Artificial Sequence
  Description of Artificial Sequence: Synthetic oligonucleotide
  Sense strand starting at position 2863 of SEQ ID NO: 3653
acacuagugcucugaaacu

SEQ ID NO: 284145 - RNA, 19 nt, Artificial Sequence
  Description of Artificial Sequence: Synthetic oligonucleotide
  Antisense strand to SEQ ID NO: 284144
aguuucagagcacuagugu

SEQ ID NO: 284146 - RNA, 19 nt, Artificial Sequence
  Description of Artificial Sequence: Synthetic oligonucleotide
  Sense strand starting at position 2965 of SEQ ID NO: 3653
ccaagaaugcagcauugaa

SEQ ID NO: 284147 - RNA, 19 nt, Artificial Sequence
  Description of Artificial Sequence: Synthetic oligonucleotide
  Antisense strand to SEQ ID NO: 284146
uucaaugcugcauucuugg

SEQ ID NO: 284148 - RNA, 19 nt, Artificial Sequence
  Description of Artificial Sequence: Synthetic oligonucleotide
  Sense strand starting at position 3070 of SEQ ID NO: 3653
aucgauucacagcguuaga

SEQ ID NO: 284149 - RNA, 19 nt, Artificial Sequence
  Description of Artificial Sequence: Synthetic oligonucleotide
  Antisense strand to SEQ ID NO: 284148
ucuaacgcugugaaucgau

SEQ ID NO: 284150 - RNA, 19 nt, Artificial Sequence
  Description of Artificial Sequence: Synthetic oligonucleotide
  Sense strand starting at position 3235 of SEQ ID NO: 3653
gggaaaugcucacuguugu

SEQ ID NO: 284151 - RNA, 19 nt, Artificial Sequence
  Description of Artificial Sequence: Synthetic oligonucleotide
  Antisense strand to SEQ ID NO: 284150
acaacagugagcauuuccc

SEQ ID NO: 284152 - RNA, 19 nt, Artificial Sequence
  Description of Artificial Sequence: Synthetic oligonucleotide
  Sense strand starting at position 3236 of SEQ ID NO: 3653
ggaaaugcucacuguugua

SEQ ID NO: 284153 - RNA, 19 nt, Artificial Sequence
  Description of Artificial Sequence: Synthetic oligonucleotide
  Antisense strand to SEQ ID NO: 284152
uacaacagugagcauuucc

SEQ ID NO: 284154 - RNA, 19 nt, Artificial Sequence
  Description of Artificial Sequence: Synthetic oligonucleotide
  Sense strand starting at position 3249 of SEQ ID NO: 3653
guuguauucccguuccuca

SEQ ID NO: 284155 - RNA, 19 nt, Artificial Sequence
  Description of Artificial Sequence: Synthetic oligonucleotide
  Antisense strand to SEQ ID NO: 284154
ugaggaacgggaauacaac

SEQ ID NO: 284156 - RNA, 19 nt, Artificial Sequence
  Description of Artificial Sequence: Synthetic oligonucleotide
  Sense strand starting at position 3317 of SEQ ID NO: 3653
ccaggaagucuucggaaau

SEQ ID NO: 284157 - RNA, 19 nt, Artificial Sequence
  Description of Artificial Sequence: Synthetic oligonucleotide
  Antisense strand to SEQ ID NO: 284156
auuuccgaagacuuccugg

SEQ ID NO: 284158 - RNA, 19 nt, Artificial Sequence
  Description of Artificial Sequence: Synthetic oligonucleotide
  Sense strand starting at position 3327 of SEQ ID NO: 3653
uucggaaaucacuguaagu

SEQ ID NO: 284159 - RNA, 19 nt, Artificial Sequence
  Description of Artificial Sequence: Synthetic oligonucleotide
  Antisense strand to SEQ ID NO: 284158
acuuacagugauuuccgaa

SEQ ID NO: 284160 - RNA, 19 nt, Artificial Sequence
  Description of Artificial Sequence: Synthetic oligonucleotide
  Sense strand starting at position 3329 of SEQ ID NO: 3653
cggaaaucacuguaaguuc

SEQ ID NO: 284161 - RNA, 19 nt, Artificial Sequence
  Description of Artificial Sequence: Synthetic oligonucleotide
  Antisense strand to SEQ ID NO: 284160
gaacuuacagugauuuccg

SEQ ID NO: 284162 - RNA, 19 nt, Artificial Sequence
  Description of Artificial Sequence: Synthetic oligonucleotide
  Sense strand starting at position 3337 of SEQ ID NO: 3653
acuguaaguuccuugcaga

SEQ ID NO: 284163 - RNA, 19 nt, Artificial Sequence
  Description of Artificial Sequence: Synthetic oligonucleotide
  Antisense strand to SEQ ID NO: 284162
ucugcaaggaacuuacagu

SEQ ID NO: 284164 - RNA, 19 nt, Artificial Sequence
  Description of Artificial Sequence: Synthetic oligonucleotide
  Sense strand starting at position 3338 of SEQ ID NO: 3653
cuguaaguuccuugcagau

SEQ ID NO: 284165 - RNA, 19 nt, Artificial Sequence
  Description of Artificial Sequence: Synthetic oligonucleotide
  Antisense strand to SEQ ID NO: 284164
aucugcaaggaacuuacag

SEQ ID NO: 284166 - RNA, 19 nt, Artificial Sequence
  Description of Artificial Sequence: Synthetic oligonucleotide
  Sense strand starting at position 3347 of SEQ ID NO: 3653
ccuugcagauucucauuga

SEQ ID NO: 284167 - RNA, 19 nt, Artificial Sequence
  Description of Artificial Sequence: Synthetic oligonucleotide
  Antisense strand to SEQ ID NO: 284166
ucaaugagaaucugcaagg

SEQ ID NO: 284168 - RNA, 19 nt, Artificial Sequence
  Description of Artificial Sequence: Synthetic oligonucleotide
  Sense strand starting at position 3351 of SEQ ID NO: 3653
gcagauucucauugagccu

SEQ ID NO: 284169 - RNA, 19 nt, Artificial Sequence
  Description of Artificial Sequence: Synthetic oligonucleotide
  Antisense strand to SEQ ID NO: 284168
aggcucaaugagaaucugc

SEQ ID NO: 284170 - RNA, 19 nt, Artificial Sequence
  Description of Artificial Sequence: Synthetic oligonucleotide
  Sense strand starting at position 3396 of SEQ ID NO: 3653
gcgugucugcgacuaggua

SEQ ID NO: 284171 - RNA, 19 nt, Artificial Sequence
  Description of Artificial Sequence: Synthetic oligonucleotide
  Antisense strand to SEQ ID NO: 284170
uaccuagucgcagacacgc

SEQ ID NO: 284172 - RNA, 19 nt, Artificial Sequence
  Description of Artificial Sequence: Synthetic oligonucleotide
  Sense strand starting at position 3616 of SEQ ID NO: 3653
agggacucguguccugaaa

SEQ ID NO: 284173 - RNA, 19 nt, Artificial Sequence
  Description of Artificial Sequence: Synthetic oligonucleotide
  Antisense strand to SEQ ID NO: 284172
uuucaggacacgagucccu

SEQ ID NO: 284174 - RNA, 19 nt, Artificial Sequence
  Description of Artificial Sequence: Synthetic oligonucleotide
  Sense strand starting at position 3715 of SEQ ID NO: 3653
caguguuaccuugagcaug

SEQ ID NO: 284175 - RNA, 19 nt, Artificial Sequence
  Description of Artificial Sequence: Synthetic oligonucleotide
  Antisense strand to SEQ ID NO: 284174
caugcucaagguaacacug

SEQ ID NO: 284176 - RNA, 19 nt, Artificial Sequence
  Description of Artificial Sequence: Synthetic oligonucleotide
  Sense strand starting at position 3767 of SEQ ID NO: 3653
cuauaaaugugagcuaaga

SEQ ID NO: 284177 - RNA, 19 nt, Artificial Sequence
  Description of Artificial Sequence: Synthetic oligonucleotide
  Antisense strand to SEQ ID NO: 284176
ucuuagcucacauuuauag

SEQ ID NO: 284178 - RNA, 19 nt, Artificial Sequence
  Description of Artificial Sequence: Synthetic oligonucleotide
  Sense strand starting at position 3769 of SEQ ID NO: 3653
auaaaugugagcuaagagu

SEQ ID NO: 284179 - RNA, 19 nt, Artificial Sequence
  Description of Artificial Sequence: Synthetic oligonucleotide
  Antisense strand to SEQ ID NO: 284178
acucuuagcucacauuuau

SEQ ID NO: 284180 - RNA, 19 nt, Artificial Sequence
  Description of Artificial Sequence: Synthetic oligonucleotide
  Sense strand starting at position 3789 of SEQ ID NO: 3653
ggagaagcucugggaaugu

SEQ ID NO: 284181 - RNA, 19 nt, Artificial Sequence
  Description of Artificial Sequence: Synthetic oligonucleotide
  Antisense strand to SEQ ID NO: 284180
acauucccagagcuucucc

SEQ ID NO: 284182 - RNA, 19 nt, Artificial Sequence
  Description of Artificial Sequence: Synthetic oligonucleotide
  Sense strand starting at position 3793 of SEQ ID NO: 3653
aagcucugggaaugucaua

SEQ ID NO: 284183 - RNA, 19 nt, Artificial Sequence
  Description of Artificial Sequence: Synthetic oligonucleotide
  Antisense strand to SEQ ID NO: 284182
uaugacauucccagagcuu

SEQ ID NO: 284184 - RNA, 19 nt, Artificial Sequence
  Description of Artificial Sequence: Synthetic oligonucleotide
  Sense strand starting at position 3824 of SEQ ID NO: 3653
gggaacugauguccgauga

SEQ ID NO: 284185 - RNA, 19 nt, Artificial Sequence
  Description of Artificial Sequence: Synthetic oligonucleotide
  Antisense strand to SEQ ID NO: 284184
ucaucggacaucaguuccc

SEQ ID NO: 284186 - RNA, 19 nt, Artificial Sequence
  Description of Artificial Sequence: Synthetic oligonucleotide
  Sense strand starting at position 3825 of SEQ ID NO: 3653
ggaacugauguccgaugaa

SEQ ID NO: 284187 - RNA, 19 nt, Artificial Sequence
  Description of Artificial Sequence: Synthetic oligonucleotide
  Antisense strand to SEQ ID NO: 284186
uucaucggacaucaguucc

SEQ ID NO: 284188 - RNA, 19 nt, Artificial Sequence
  Description of Artificial Sequence: Synthetic oligonucleotide
  Sense strand starting at position 3828 of SEQ ID NO: 3653
acugauguccgaugaauca

SEQ ID NO: 284189 - RNA, 19 nt, Artificial Sequence
  Description of Artificial Sequence: Synthetic oligonucleotide
  Antisense strand to SEQ ID NO: 284188
ugauucaucggacaucagu

SEQ ID NO: 284190 - RNA, 19 nt, Artificial Sequence
  Description of Artificial Sequence: Synthetic oligonucleotide
  Sense strand starting at position 3837 of SEQ ID NO: 3653
cgaugaaucaugcaguggu

SEQ ID NO: 284191 - RNA, 19 nt, Artificial Sequence
  Description of Artificial Sequence: Synthetic oligonucleotide
  Antisense strand to SEQ ID NO: 284190
accacugcaugauucaucg

SEQ ID NO: 284192 - RNA, 19 nt, Artificial Sequence
  Description of Artificial Sequence: Synthetic oligonucleotide
  Sense strand starting at position 3841 of SEQ ID NO: 3653
gaaucaugcaguggugacu

SEQ ID NO: 284193 - RNA, 19 nt, Artificial Sequence
  Description of Artificial Sequence: Synthetic oligonucleotide
  Antisense strand to SEQ ID NO: 284192
agucaccacugcaugauuc

SEQ ID NO: 284194 - RNA, 19 nt, Artificial Sequence
  Description of Artificial Sequence: Synthetic oligonucleotide
  Sense strand starting at position 3864 of SEQ ID NO: 3653
uggugacagugaccucauu

SEQ ID NO: 284195 - RNA, 19 nt, Artificial Sequence
  Description of Artificial Sequence: Synthetic oligonucleotide
  Antisense strand to SEQ ID NO: 284194
aaugaggucacugucacca

SEQ ID NO: 284196 - RNA, 19 nt, Artificial Sequence
  Description of Artificial Sequence: Synthetic oligonucleotide
  Sense strand starting at position 42 of SEQ ID NO: 3654
ugauaaagcguguaaggua

SEQ ID NO: 284197 - RNA, 19 nt, Artificial Sequence
  Description of Artificial Sequence: Synthetic oligonucleotide
  Antisense strand to SEQ ID NO: 284196
uaccuuacacgcuuuauca

SEQ ID NO: 284198 - RNA, 19 nt, Artificial Sequence
  Description of Artificial Sequence: Synthetic oligonucleotide
  Sense strand starting at position 47 of SEQ ID NO: 3654
aagcguguaagguaauuaa

SEQ ID NO: 284199 - RNA, 19 nt, Artificial Sequence
  Description of Artificial Sequence: Synthetic oligonucleotide
  Antisense strand to SEQ ID NO: 284198
uuaauuaccuuacacgcuu

SEQ ID NO: 284200 - RNA, 19 nt, Artificial Sequence
  Description of Artificial Sequence: Synthetic oligonucleotide
  Sense strand starting at position 50 of SEQ ID NO: 3654
cguguaagguaauuaagaa

SEQ ID NO: 284201 - RNA, 19 nt, Artificial Sequence
  Description of Artificial Sequence: Synthetic oligonucleotide
  Antisense strand to SEQ ID NO: 284200
uucuuaauuaccuuacacg

SEQ ID NO: 284202 - RNA, 19 nt, Artificial Sequence
  Description of Artificial Sequence: Synthetic oligonucleotide
  Sense strand starting at position 66 of SEQ ID NO: 3654
gaaaguaccugagaagcuu

SEQ ID NO: 284203 - RNA, 19 nt, Artificial Sequence
  Description of Artificial Sequence: Synthetic oligonucleotide
  Antisense strand to SEQ ID NO: 284202
aagcuucucagguacuuuc

SEQ ID NO: 284204 - RNA, 19 nt, Artificial Sequence
  Description of Artificial Sequence: Synthetic oligonucleotide
  Sense strand starting at position 110 of SEQ ID NO: 3654
ucaguauuauugcuguuau

SEQ ID NO: 284205 - RNA, 19 nt, Artificial Sequence
  Description of Artificial Sequence: Synthetic oligonucleotide
  Antisense strand to SEQ ID NO: 284204
auaacagcaauaauacuga

SEQ ID NO: 284206 - RNA, 19 nt, Artificial Sequence
  Description of Artificial Sequence: Synthetic oligonucleotide
  Sense strand starting at position 650 of SEQ ID NO: 3654
uuaaguaguugacaggaaa

SEQ ID NO: 284207 - RNA, 19 nt, Artificial Sequence
  Description of Artificial Sequence: Synthetic oligonucleotide
  Antisense strand to SEQ ID NO: 284206
uuuccugucaacuacuuaa

SEQ ID NO: 284208 - RNA, 19 nt, Artificial Sequence
  Description of Artificial Sequence: Synthetic oligonucleotide
  Sense strand starting at position 747 of SEQ ID NO: 3654
agguaagguccuuaagggu

SEQ ID NO: 284209 - RNA, 19 nt, Artificial Sequence
  Description of Artificial Sequence: Synthetic oligonucleotide
  Antisense strand to SEQ ID NO: 284208
acccuuaaggaccuuaccu

SEQ ID NO: 284210 - RNA, 19 nt, Artificial Sequence
  Description of Artificial Sequence: Synthetic oligonucleotide
  Sense strand starting at position 838 of SEQ ID NO: 3654
guacaugcaaguugugaca

SEQ ID NO: 284211 - RNA, 19 nt, Artificial Sequence
  Description of Artificial Sequence: Synthetic oligonucleotide
  Antisense strand to SEQ ID NO: 284210
ugucacaacuugcauguac

SEQ ID NO: 284212 - RNA, 19 nt, Artificial Sequence
  Description of Artificial Sequence: Synthetic oligonucleotide
  Sense strand starting at position 851 of SEQ ID NO: 3654
gugacaaccugacuccaaa

SEQ ID NO: 284213 - RNA, 19 nt, Artificial Sequence
  Description of Artificial Sequence: Synthetic oligonucleotide
  Antisense strand to SEQ ID NO: 284212
uuuggagucagguugucac

SEQ ID NO: 284214 - RNA, 19 nt, Artificial Sequence
  Description of Artificial Sequence: Synthetic oligonucleotide
  Sense strand starting at position 882 of SEQ ID NO: 3654
ggaucccuauuccuaguua

SEQ ID NO: 284215 - RNA, 19 nt, Artificial Sequence
  Description of Artificial Sequence: Synthetic oligonucleotide
  Antisense strand to SEQ ID NO: 284214
uaacuaggaauagggaucc

SEQ ID NO: 284216 - RNA, 19 nt, Artificial Sequence
  Description of Artificial Sequence: Synthetic oligonucleotide
  Sense strand starting at position 995 of SEQ ID NO: 3654
aguguauugcucuguuaaa

SEQ ID NO: 284217 - RNA, 19 nt, Artificial Sequence
  Description of Artificial Sequence: Synthetic oligonucleotide
  Antisense strand to SEQ ID NO: 284216
uuuaacagagcaauacacu

SEQ ID NO: 284218 - RNA, 19 nt, Artificial Sequence
  Description of Artificial Sequence: Synthetic oligonucleotide
  Sense strand starting at position 1180 of SEQ ID NO: 3654
ccgggaacgucaccuagaa

SEQ ID NO: 284219 - RNA, 19 nt, Artificial Sequence
  Description of Artificial Sequence: Synthetic oligonucleotide
  Antisense strand to SEQ ID NO: 284218
uucuaggugacguucccgg

SEQ ID NO: 284220 - RNA, 19 nt, Artificial Sequence
  Description of Artificial Sequence: Synthetic oligonucleotide
  Sense strand starting at position 1248 of SEQ ID NO: 3654
uugcuagacuucuagaacu

SEQ ID NO: 284221 - RNA, 19 nt, Artificial Sequence
  Description of Artificial Sequence: Synthetic oligonucleotide
  Antisense strand to SEQ ID NO: 284220
aguucuagaagucuagcaa

SEQ ID NO: 284222 - RNA, 19 nt, Artificial Sequence
  Description of Artificial Sequence: Synthetic oligonucleotide
  Sense strand starting at position 1250 of SEQ ID NO: 3654
gcuagacuucuagaacuca

SEQ ID NO: 284223 - RNA, 19 nt, Artificial Sequence
  Description of Artificial Sequence: Synthetic oligonucleotide
  Antisense strand to SEQ ID NO: 284222
ugaguucuagaagucuagc

SEQ ID NO: 284224 - RNA, 19 nt, Artificial Sequence
  Description of Artificial Sequence: Synthetic oligonucleotide
  Sense strand starting at position 1836 of SEQ ID NO: 3654
cgauauuuaucccaccuag

SEQ ID NO: 284225 - RNA, 19 nt, Artificial Sequence
  Description of Artificial Sequence: Synthetic oligonucleotide
  Antisense strand to SEQ ID NO: 284224
cuaggugggauaaauaucg

SEQ ID NO: 284226 - RNA, 19 nt, Artificial Sequence
  Description of Artificial Sequence: Synthetic oligonucleotide
  Sense strand starting at position 2052 of SEQ ID NO: 3654
gcggcacaccggaguuauc

SEQ ID NO: 284227 - RNA, 19 nt, Artificial Sequence
  Description of Artificial Sequence: Synthetic oligonucleotide
  Antisense strand to SEQ ID NO: 284226
gauaacuccggugugccgc

SEQ ID NO: 284228 - RNA, 19 nt, Artificial Sequence
  Description of Artificial Sequence: Synthetic oligonucleotide
  Sense strand starting at position 2061 of SEQ ID NO: 3654
cggaguuaucgaucgccuc

SEQ ID NO: 284229 - RNA, 19 nt, Artificial Sequence
  Description of Artificial Sequence: Synthetic oligonucleotide
  Antisense strand to SEQ ID NO: 284228
gaggcgaucgauaacuccg

SEQ ID NO: 284230 - RNA, 19 nt, Artificial Sequence
  Description of Artificial Sequence: Synthetic oligonucleotide
  Sense strand starting at position 2164 of SEQ ID NO: 3654
aggcgagagacuugaaauu

SEQ ID NO: 284231 - RNA, 19 nt, Artificial Sequence
  Description of Artificial Sequence: Synthetic oligonucleotide
  Antisense strand to SEQ ID NO: 284230
aauuucaagucucucgccu

SEQ ID NO: 284232 - RNA, 19 nt, Artificial Sequence
  Description of Artificial Sequence: Synthetic oligonucleotide
  Sense strand starting at position 2189 of SEQ ID NO: 3654
gugaguuaauugcucagac

SEQ ID NO: 284233 - RNA, 19 nt, Artificial Sequence
  Description of Artificial Sequence: Synthetic oligonucleotide
  Antisense strand to SEQ ID NO: 284232
gucugagcaauuaacucac

SEQ ID NO: 284234 - RNA, 19 nt, Artificial Sequence
  Description of Artificial Sequence: Synthetic oligonucleotide
  Sense strand starting at position 2190 of SEQ ID NO: 3654
ugaguuaauugcucagacu

SEQ ID NO: 284235 - RNA, 19 nt, Artificial Sequence
  Description of Artificial Sequence: Synthetic oligonucleotide
  Antisense strand to SEQ ID NO: 284234
agucugagcaauuaacuca

SEQ ID NO: 284236 - RNA, 19 nt, Artificial Sequence
  Description of Artificial Sequence: Synthetic oligonucleotide
  Sense strand starting at position 2191 of SEQ ID NO: 3654
gaguuaauugcucagacuc

SEQ ID NO: 284237 - RNA, 19 nt, Artificial Sequence
  Description of Artificial Sequence: Synthetic oligonucleotide
  Antisense strand to SEQ ID NO: 284236
gagucugagcaauuaacuc

SEQ ID NO: 284238 - RNA, 19 nt, Artificial Sequence
  Description of Artificial Sequence: Synthetic oligonucleotide
  Sense strand starting at position 2255 of SEQ ID NO: 3654
aaguccagugcuuguugaa

SEQ ID NO: 284239 - RNA, 19 nt, Artificial Sequence
  Description of Artificial Sequence: Synthetic oligonucleotide
  Antisense strand to SEQ ID NO: 284238
uucaacaagcacuggacuu

SEQ ID NO: 284240 - RNA, 19 nt, Artificial Sequence
  Description of Artificial Sequence: Synthetic oligonucleotide
  Sense strand starting at position 2306 of SEQ ID NO: 3654
uaacguacuguuggguuua

SEQ ID NO: 284241 - RNA, 19 nt, Artificial Sequence
  Description of Artificial Sequence: Synthetic oligonucleotide
  Antisense strand to SEQ ID NO: 284240
uaaacccaacaguacguua

SEQ ID NO: 284242 - RNA, 19 nt, Artificial Sequence
  Description of Artificial Sequence: Synthetic oligonucleotide
  Sense strand starting at position 2311 of SEQ ID NO: 3654
uacuguuggguuuaagacu

SEQ ID NO: 284243 - RNA, 19 nt, Artificial Sequence
  Description of Artificial Sequence: Synthetic oligonucleotide
  Antisense strand to SEQ ID NO: 284242
agucuuaaacccaacagua

SEQ ID NO: 284244 - RNA, 19 nt, Artificial Sequence
  Description of Artificial Sequence: Synthetic oligonucleotide
  Sense strand starting at position 2669 of SEQ ID NO: 3654
aucucaagcuggucuagau

SEQ ID NO: 284245 - RNA, 19 nt, Artificial Sequence
  Description of Artificial Sequence: Synthetic oligonucleotide
  Antisense strand to SEQ ID NO: 284244
aucuagaccagcuugagau

SEQ ID NO: 284246 - RNA, 19 nt, Artificial Sequence
  Description of Artificial Sequence: Synthetic oligonucleotide
  Sense strand starting at position 2810 of SEQ ID NO: 3654
ucaggucuuaagcguacau

SEQ ID NO: 284247 - RNA, 19 nt, Artificial Sequence
  Description of Artificial Sequence: Synthetic oligonucleotide
  Antisense strand to SEQ ID NO: 284246
auguacgcuuaagaccuga

SEQ ID NO: 284248 - RNA, 19 nt, Artificial Sequence
  Description of Artificial Sequence: Synthetic oligonucleotide
  Sense strand starting at position 2812 of SEQ ID NO: 3654
aggucuuaagcguacauaa

SEQ ID NO: 284249 - RNA, 19 nt, Artificial Sequence
  Description of Artificial Sequence: Synthetic oligonucleotide
  Antisense strand to SEQ ID NO: 284248
uuauguacgcuuaagaccu

SEQ ID NO: 284250 - RNA, 19 nt, Artificial Sequence
  Description of Artificial Sequence: Synthetic oligonucleotide
  Sense strand starting at position 2814 of SEQ ID NO: 3654
gucuuaagcguacauaaca

SEQ ID NO: 284251 - RNA, 19 nt, Artificial Sequence
  Description of Artificial Sequence: Synthetic oligonucleotide
  Antisense strand to SEQ ID NO: 284250
uguuauguacgcuuaagac

SEQ ID NO: 284252 - RNA, 19 nt, Artificial Sequence
  Description of Artificial Sequence: Synthetic oligonucleotide
  Sense strand starting at position 2842 of SEQ ID NO: 3654
ggauauucguuauuaaacu

SEQ ID NO: 284253 - RNA, 19 nt, Artificial Sequence
  Description of Artificial Sequence: Synthetic oligonucleotide
  Antisense strand to SEQ ID NO: 284252
aguuuaauaacgaauaucc

SEQ ID NO: 284254 - RNA, 19 nt, Artificial Sequence
  Description of Artificial Sequence: Synthetic oligonucleotide
  Sense strand starting at position 2843 of SEQ ID NO: 3654
gauauucguuauuaaacug

SEQ ID NO: 284255 - RNA, 19 nt, Artificial Sequence
  Description of Artificial Sequence: Synthetic oligonucleotide
  Antisense strand to SEQ ID NO: 284254
caguuuaauaacgaauauc

SEQ ID NO: 284256 - RNA, 19 nt, Artificial Sequence
  Description of Artificial Sequence: Synthetic oligonucleotide
  Sense strand starting at position 2878 of SEQ ID NO: 3654
gcccauaugcauuguaauu

SEQ ID NO: 284257 - RNA, 19 nt, Artificial Sequence
  Description of Artificial Sequence: Synthetic oligonucleotide
  Antisense strand to SEQ ID NO: 284256
aauuacaaugcauaugggc

SEQ ID NO: 284258 - RNA, 19 nt, Artificial Sequence
  Description of Artificial Sequence: Synthetic oligonucleotide
  Sense strand starting at position 2920 of SEQ ID NO: 3654
ggaugugcauucuucuguu

SEQ ID NO: 284259 - RNA, 19 nt, Artificial Sequence
  Description of Artificial Sequence: Synthetic oligonucleotide
  Antisense strand to SEQ ID NO: 284258
aacagaagaaugcacaucc

SEQ ID NO: 284260 - RNA, 19 nt, Artificial Sequence
  Description of Artificial Sequence: Synthetic oligonucleotide
  Sense strand starting at position 2973 of SEQ ID NO: 3654
agggcuucuucccuagaga

SEQ ID NO: 284261 - RNA, 19 nt, Artificial Sequence
  Description of Artificial Sequence: Synthetic oligonucleotide
  Antisense strand to SEQ ID NO: 284260
ucucuagggaagaagcccu

SEQ ID NO: 284262 - RNA, 19 nt, Artificial Sequence
  Description of Artificial Sequence: Synthetic oligonucleotide
  Sense strand starting at position 2976 of SEQ ID NO: 3654
gcuucuucccuagagaaac

SEQ ID NO: 284263 - RNA, 19 nt, Artificial Sequence
  Description of Artificial Sequence: Synthetic oligonucleotide
  Antisense strand to SEQ ID NO: 284262
guuucucuagggaagaagc

SEQ ID NO: 284264 - RNA, 19 nt, Artificial Sequence
  Description of Artificial Sequence: Synthetic oligonucleotide
  Sense strand starting at position 2987 of SEQ ID NO: 3654
agagaaacgucaguaaaca

SEQ ID NO: 284265 - RNA, 19 nt, Artificial Sequence
  Description of Artificial Sequence: Synthetic oligonucleotide
  Antisense strand to SEQ ID NO: 284264
uguuuacugacguuucucu

SEQ ID NO: 284266 - RNA, 19 nt, Artificial Sequence
  Description of Artificial Sequence: Synthetic oligonucleotide
  Sense strand starting at position 3013 of SEQ ID NO: 3654
agucauuucuccuuacugu

SEQ ID NO: 284267 - RNA, 19 nt, Artificial Sequence
  Description of Artificial Sequence: Synthetic oligonucleotide
  Antisense strand to SEQ ID NO: 284266
acaguaaggagaaaugacu

SEQ ID NO: 284268 - RNA, 19 nt, Artificial Sequence
  Description of Artificial Sequence: Synthetic oligonucleotide
  Sense strand starting at position 3020 of SEQ ID NO: 3654
ucuccuuacugugaauaug

SEQ ID NO: 284269 - RNA, 19 nt, Artificial Sequence
  Description of Artificial Sequence: Synthetic oligonucleotide
  Antisense strand to SEQ ID NO: 284268
cauauucacaguaaggaga

SEQ ID NO: 284270 - RNA, 19 nt, Artificial Sequence
  Description of Artificial Sequence: Synthetic oligonucleotide
  Sense strand starting at position 3373 of SEQ ID NO: 3654
gugcacucuccacaacaga

SEQ ID NO: 284271 - RNA, 19 nt, Artificial Sequence
  Description of Artificial Sequence: Synthetic oligonucleotide
  Antisense strand to SEQ ID NO: 284270
ucuguuguggagagugcac

SEQ ID NO: 284272 - RNA, 19 nt, Artificial Sequence
  Description of Artificial Sequence: Synthetic oligonucleotide
  Sense strand starting at position 3391 of SEQ ID NO: 3654
acaggauugcauuaacucu

SEQ ID NO: 284273 - RNA, 19 nt, Artificial Sequence
  Description of Artificial Sequence: Synthetic oligonucleotide
  Antisense strand to SEQ ID NO: 284272
agaguuaaugcaauccugu

SEQ ID NO: 284274 - RNA, 19 nt, Artificial Sequence
  Description of Artificial Sequence: Synthetic oligonucleotide
  Sense strand starting at position 3505 of SEQ ID NO: 3654
gcucuagaagugggauguu

SEQ ID NO: 284275 - RNA, 19 nt, Artificial Sequence
  Description of Artificial Sequence: Synthetic oligonucleotide
  Antisense strand to SEQ ID NO: 284274
aacaucccacuucuagagc

SEQ ID NO: 284276 - RNA, 19 nt, Artificial Sequence
  Description of Artificial Sequence: Synthetic oligonucleotide
  Sense strand starting at position 45 of SEQ ID NO: 3655
ugauaaagcguguaaggua

SEQ ID NO: 284277 - RNA, 19 nt, Artificial Sequence
  Description of Artificial Sequence: Synthetic oligonucleotide
  Antisense strand to SEQ ID NO: 284276
uaccuuacacgcuuuauca

SEQ ID NO: 284278 - RNA, 19 nt, Artificial Sequence
  Description of Artificial Sequence: Synthetic oligonucleotide
  Sense strand starting at position 50 of SEQ ID NO: 3655
aagcguguaagguaauuaa

SEQ ID NO: 284279 - RNA, 19 nt, Artificial Sequence
  Description of Artificial Sequence: Synthetic oligonucleotide
  Antisense strand to SEQ ID NO: 284278
uuaauuaccuuacacgcuu

SEQ ID NO: 284280 - RNA, 19 nt, Artificial Sequence
  Description of Artificial Sequence: Synthetic oligonucleotide
  Sense strand starting at position 53 of SEQ ID NO: 3655
cguguaagguaauuaagaa

SEQ ID NO: 284281 - RNA, 19 nt, Artificial Sequence
  Description of Artificial Sequence: Synthetic oligonucleotide
  Antisense strand to SEQ ID NO: 284280
uucuuaauuaccuuacacg

SEQ ID NO: 284282 - RNA, 19 nt, Artificial Sequence
  Description of Artificial Sequence: Synthetic oligonucleotide
  Sense strand starting at position 69 of SEQ ID NO: 3655
gaaaguaccugagaagcuu

SEQ ID NO: 284283 - RNA, 19 nt, Artificial Sequence
  Description of Artificial Sequence: Synthetic oligonucleotide
  Antisense strand to SEQ ID NO: 284282
aagcuucucagguacuuuc

SEQ ID NO: 284284 - RNA, 19 nt, Artificial Sequence
  Description of Artificial Sequence: Synthetic oligonucleotide
  Sense strand starting at position 113 of SEQ ID NO: 3655
ucaguauuauugcuguuau

SEQ ID NO: 284285 - RNA, 19 nt, Artificial Sequence
  Description of Artificial Sequence: Synthetic oligonucleotide
  Antisense strand to SEQ ID NO: 284284
auaacagcaauaauacuga

SEQ ID NO: 284286 - RNA, 19 nt, Artificial Sequence
  Description of Artificial Sequence: Synthetic oligonucleotide
  Sense strand starting at position 653 of SEQ ID NO: 3655
uuaaguaguugacaggaaa

SEQ ID NO: 284287 - RNA, 19 nt, Artificial Sequence
  Description of Artificial Sequence: Synthetic oligonucleotide
  Antisense strand to SEQ ID NO: 284286
uuuccugucaacuacuuaa

SEQ ID NO: 284288 - RNA, 19 nt, Artificial Sequence
  Description of Artificial Sequence: Synthetic oligonucleotide
  Sense strand starting at position 750 of SEQ ID NO: 3655
agguaagguccuuaagggu

SEQ ID NO: 284289 - RNA, 19 nt, Artificial Sequence
  Description of Artificial Sequence: Synthetic oligonucleotide
  Antisense strand to SEQ ID NO: 284288
acccuuaaggaccuuaccu

SEQ ID NO: 284290 - RNA, 19 nt, Artificial Sequence
  Description of Artificial Sequence: Synthetic oligonucleotide
  Sense strand starting at position 841 of SEQ ID NO: 3655
guacaugcaaguugugaca

SEQ ID NO: 284291 - RNA, 19 nt, Artificial Sequence
  Description of Artificial Sequence: Synthetic oligonucleotide
  Antisense strand to SEQ ID NO: 284290
ugucacaacuugcauguac

SEQ ID NO: 284292 - RNA, 19 nt, Artificial Sequence
  Description of Artificial Sequence: Synthetic oligonucleotide
  Sense strand starting at position 854 of SEQ ID NO: 3655
gugacaaccugacuccaaa

SEQ ID NO: 284293 - RNA, 19 nt, Artificial Sequence
  Description of Artificial Sequence: Synthetic oligonucleotide
  Antisense strand to SEQ ID NO: 284292
uuuggagucagguugucac

SEQ ID NO: 284294 - RNA, 19 nt, Artificial Sequence
  Description of Artificial Sequence: Synthetic oligonucleotide
  Sense strand starting at position 885 of SEQ ID NO: 3655
ggaucccuauuccuaguua

SEQ ID NO: 284295 - RNA, 19 nt, Artificial Sequence
  Description of Artificial Sequence: Synthetic oligonucleotide
  Antisense strand to SEQ ID NO: 284294
uaacuaggaauagggaucc

SEQ ID NO: 284296 - RNA, 19 nt, Artificial Sequence
  Description of Artificial Sequence: Synthetic oligonucleotide
  Sense strand starting at position 998 of SEQ ID NO: 3655
aguguauugcucuguuaaa

SEQ ID NO: 284297 - RNA, 19 nt, Artificial Sequence
  Description of Artificial Sequence: Synthetic oligonucleotide
  Antisense strand to SEQ ID NO: 284296
uuuaacagagcaauacacu

SEQ ID NO: 284298 - RNA, 19 nt, Artificial Sequence
  Description of Artificial Sequence: Synthetic oligonucleotide
  Sense strand starting at position 1183 of SEQ ID NO: 3655
ccgggaacgucaccuagaa

SEQ ID NO: 284299 - RNA, 19 nt, Artificial Sequence
  Description of Artificial Sequence: Synthetic oligonucleotide
  Antisense strand to SEQ ID NO: 284298
uucuaggugacguucccgg

SEQ ID NO: 284300 - RNA, 19 nt, Artificial Sequence
  Description of Artificial Sequence: Synthetic oligonucleotide
  Sense strand starting at position 1251 of SEQ ID NO: 3655
uugcuagacuucuagaacu

SEQ ID NO: 284301 - RNA, 19 nt, Artificial Sequence
  Description of Artificial Sequence: Synthetic oligonucleotide
  Antisense strand to SEQ ID NO: 284300
aguucuagaagucuagcaa

SEQ ID NO: 284302 - RNA, 19 nt, Artificial Sequence
  Description of Artificial Sequence: Synthetic oligonucleotide
  Sense strand starting at position 1253 of SEQ ID NO: 3655
gcuagacuucuagaacuca

SEQ ID NO: 284303 - RNA, 19 nt, Artificial Sequence
  Description of Artificial Sequence: Synthetic oligonucleotide
  Antisense strand to SEQ ID NO: 284302
ugaguucuagaagucuagc

SEQ ID NO: 284304 - RNA, 19 nt, Artificial Sequence
  Description of Artificial Sequence: Synthetic oligonucleotide
  Sense strand starting at position 1839 of SEQ ID NO: 3655
cgauauuuaucccaccuag

SEQ ID NO: 284305 - RNA, 19 nt, Artificial Sequence
  Description of Artificial Sequence: Synthetic oligonucleotide
  Antisense strand to SEQ ID NO: 284304
cuaggugggauaaauaucg

SEQ ID NO: 284306 - RNA, 19 nt, Artificial Sequence
  Description of Artificial Sequence: Synthetic oligonucleotide
  Sense strand starting at position 2055 of SEQ ID NO: 3655
gcggcacaccggaguuauc

SEQ ID NO: 284307 - RNA, 19 nt, Artificial Sequence
  Description of Artificial Sequence: Synthetic oligonucleotide
  Antisense strand to SEQ ID NO: 284306
gauaacuccggugugccgc

SEQ ID NO: 284308 - RNA, 19 nt, Artificial Sequence
  Description of Artificial Sequence: Synthetic oligonucleotide
  Sense strand starting at position 2064 of SEQ ID NO: 3655
cggaguuaucgaucgccuc

SEQ ID NO: 284309 - RNA, 19 nt, Artificial Sequence
  Description of Artificial Sequence: Synthetic oligonucleotide
  Antisense strand to SEQ ID NO: 284308
gaggcgaucgauaacuccg

SEQ ID NO: 284310 - RNA, 19 nt, Artificial Sequence
  Description of Artificial Sequence: Synthetic oligonucleotide
  Sense strand starting at position 2167 of SEQ ID NO: 3655
aggcgagagacuugaaauu

SEQ ID NO: 284311 - RNA, 19 nt, Artificial Sequence
  Description of Artificial Sequence: Synthetic oligonucleotide
  Antisense strand to SEQ ID NO: 284310
aauuucaagucucucgccu

SEQ ID NO: 284312 - RNA, 19 nt, Artificial Sequence
  Description of Artificial Sequence: Synthetic oligonucleotide
  Sense strand starting at position 2192 of SEQ ID NO: 3655
gugaguuaauugcucagac

SEQ ID NO: 284313 - RNA, 19 nt, Artificial Sequence
  Description of Artificial Sequence: Synthetic oligonucleotide
  Antisense strand to SEQ ID NO: 284312
gucugagcaauuaacucac

SEQ ID NO: 284314 - RNA, 19 nt, Artificial Sequence
  Description of Artificial Sequence: Synthetic oligonucleotide
  Sense strand starting at position 2193 of SEQ ID NO: 3655
ugaguuaauugcucagacu

SEQ ID NO: 284315 - RNA, 19 nt, Artificial Sequence
  Description of Artificial Sequence: Synthetic oligonucleotide
  Antisense strand to SEQ ID NO: 284314
agucugagcaauuaacuca

SEQ ID NO: 284316 - RNA, 19 nt, Artificial Sequence
  Description of Artificial Sequence: Synthetic oligonucleotide
  Sense strand starting at position 2194 of SEQ ID NO: 3655
gaguuaauugcucagacuc

SEQ ID NO: 284317 - RNA, 19 nt, Artificial Sequence
  Description of Artificial Sequence: Synthetic oligonucleotide
  Antisense strand to SEQ ID NO: 284316
gagucugagcaauuaacuc

SEQ ID NO: 284318 - RNA, 19 nt, Artificial Sequence
  Description of Artificial Sequence: Synthetic oligonucleotide
  Sense strand starting at position 2258 of SEQ ID NO: 3655
aaguccagugcuuguugaa

SEQ ID NO: 284319 - RNA, 19 nt, Artificial Sequence
  Description of Artificial Sequence: Synthetic oligonucleotide
  Antisense strand to SEQ ID NO: 284318
uucaacaagcacuggacuu

SEQ ID NO: 284320 - RNA, 19 nt, Artificial Sequence
  Description of Artificial Sequence: Synthetic oligonucleotide
  Sense strand starting at position 2309 of SEQ ID NO: 3655
uaacguacuguuggguuua

SEQ ID NO: 284321 - RNA, 19 nt, Artificial Sequence
  Description of Artificial Sequence: Synthetic oligonucleotide
  Antisense strand to SEQ ID NO: 284320
uaaacccaacaguacguua

SEQ ID NO: 284322 - RNA, 19 nt, Artificial Sequence
  Description of Artificial Sequence: Synthetic oligonucleotide
  Sense strand starting at position 2314 of SEQ ID NO: 3655
uacuguuggguuuaagacu

SEQ ID NO: 284323 - RNA, 19 nt, Artificial Sequence
  Description of Artificial Sequence: Synthetic oligonucleotide
  Antisense strand to SEQ ID NO: 284322
agucuuaaacccaacagua

SEQ ID NO: 284324 - RNA, 19 nt, Artificial Sequence
  Description of Artificial Sequence: Synthetic oligonucleotide
  Sense strand starting at position 2672 of SEQ ID NO: 3655
aucucaagcuggucuagau

SEQ ID NO: 284325 - RNA, 19 nt, Artificial Sequence
  Description of Artificial Sequence: Synthetic oligonucleotide
  Antisense strand to SEQ ID NO: 284324
aucuagaccagcuugagau

SEQ ID NO: 284326 - RNA, 19 nt, Artificial Sequence
  Description of Artificial Sequence: Synthetic oligonucleotide
  Sense strand starting at position 2813 of SEQ ID NO: 3655
ucaggucuuaagcguacau

SEQ ID NO: 284327 - RNA, 19 nt, Artificial Sequence
  Description of Artificial Sequence: Synthetic oligonucleotide
  Antisense strand to SEQ ID NO: 284326
auguacgcuuaagaccuga

SEQ ID NO: 284328 - RNA, 19 nt, Artificial Sequence
  Description of Artificial Sequence: Synthetic oligonucleotide
  Sense strand starting at position 2815 of SEQ ID NO: 3655
aggucuuaagcguacauaa

SEQ ID NO: 284329 - RNA, 19 nt, Artificial Sequence
  Description of Artificial Sequence: Synthetic oligonucleotide
  Antisense strand to SEQ ID NO: 284328
uuauguacgcuuaagaccu

SEQ ID NO: 284330 - RNA, 19 nt, Artificial Sequence
  Description of Artificial Sequence: Synthetic oligonucleotide
  Sense strand starting at position 2817 of SEQ ID NO: 3655
gucuuaagcguacauaaca

SEQ ID NO: 284331 - RNA, 19 nt, Artificial Sequence
  Description of Artificial Sequence: Synthetic oligonucleotide
  Antisense strand to SEQ ID NO: 284330
uguuauguacgcuuaagac

SEQ ID NO: 284332 - RNA, 19 nt, Artificial Sequence
  Description of Artificial Sequence: Synthetic oligonucleotide
  Sense strand starting at position 2845 of SEQ ID NO: 3655
ggauauucguuauuaaacu

SEQ ID NO: 284333 - RNA, 19 nt, Artificial Sequence
  Description of Artificial Sequence: Synthetic oligonucleotide
  Antisense strand to SEQ ID NO: 284332
aguuuaauaacgaauaucc

SEQ ID NO: 284334 - RNA, 19 nt, Artificial Sequence
  Description of Artificial Sequence: Synthetic oligonucleotide
  Sense strand starting at position 2846 of SEQ ID NO: 3655
gauauucguuauuaaacug

SEQ ID NO: 284335 - RNA, 19 nt, Artificial Sequence
  Description of Artificial Sequence: Synthetic oligonucleotide
  Antisense strand to SEQ ID NO: 284334
caguuuaauaacgaauauc

SEQ ID NO: 284336 - RNA, 19 nt, Artificial Sequence
  Description of Artificial Sequence: Synthetic oligonucleotide
  Sense strand starting at position 2881 of SEQ ID NO: 3655
gcccauaugcauuguaauu

SEQ ID NO: 284337 - RNA, 19 nt, Artificial Sequence
  Description of Artificial Sequence: Synthetic oligonucleotide
  Antisense strand to SEQ ID NO: 284336
aauuacaaugcauaugggc

SEQ ID NO: 284338 - RNA, 19 nt, Artificial Sequence
  Description of Artificial Sequence: Synthetic oligonucleotide
  Sense strand starting at position 2923 of SEQ ID NO: 3655
ggaugugcauucuucuguu

SEQ ID NO: 284339 - RNA, 19 nt, Artificial Sequence
  Description of Artificial Sequence: Synthetic oligonucleotide
  Antisense strand to SEQ ID NO: 284338
aacagaagaaugcacaucc

SEQ ID NO: 284340 - RNA, 19 nt, Artificial Sequence
  Description of Artificial Sequence: Synthetic oligonucleotide
  Sense strand starting at position 2976 of SEQ ID NO: 3655
agggcuucuucccuagaga

SEQ ID NO: 284341 - RNA, 19 nt, Artificial Sequence
  Description of Artificial Sequence: Synthetic oligonucleotide
  Antisense strand to SEQ ID NO: 284340
ucucuagggaagaagcccu

SEQ ID NO: 284342 - RNA, 19 nt, Artificial Sequence
  Description of Artificial Sequence: Synthetic oligonucleotide
  Sense strand starting at position 2979 of SEQ ID NO: 3655
gcuucuucccuagagaaac

SEQ ID NO: 284343 - RNA, 19 nt, Artificial Sequence
  Description of Artificial Sequence: Synthetic oligonucleotide
  Antisense strand to SEQ ID NO: 284342
guuucucuagggaagaagc

SEQ ID NO: 284344 - RNA, 19 nt, Artificial Sequence
  Description of Artificial Sequence: Synthetic oligonucleotide
  Sense strand starting at position 2990 of SEQ ID NO: 3655
agagaaacgucaguaaaca

SEQ ID NO: 284345 - RNA, 19 nt, Artificial Sequence
  Description of Artificial Sequence: Synthetic oligonucleotide
  Antisense strand to SEQ ID NO: 284344
uguuuacugacguuucucu

SEQ ID NO: 284346 - RNA, 19 nt, Artificial Sequence
  Description of Artificial Sequence: Synthetic oligonucleotide
  Sense strand starting at position 3016 of SEQ ID NO: 3655
agucauuucuccuuacugu

SEQ ID NO: 284347 - RNA, 19 nt, Artificial Sequence
  Description of Artificial Sequence: Synthetic oligonucleotide
  Antisense strand to SEQ ID NO: 284346
acaguaaggagaaaugacu

SEQ ID NO: 284348 - RNA, 19 nt, Artificial Sequence
  Description of Artificial Sequence: Synthetic oligonucleotide
  Sense strand starting at position 3023 of SEQ ID NO: 3655
ucuccuuacugugaauaug

SEQ ID NO: 284349 - RNA, 19 nt, Artificial Sequence
  Description of Artificial Sequence: Synthetic oligonucleotide
  Antisense strand to SEQ ID NO: 284348
cauauucacaguaaggaga

SEQ ID NO: 284350 - RNA, 19 nt, Artificial Sequence
  Description of Artificial Sequence: Synthetic oligonucleotide
  Sense strand starting at position 3376 of SEQ ID NO: 3655
gugcacucuccacaacaga

SEQ ID NO: 284351 - RNA, 19 nt, Artificial Sequence
  Description of Artificial Sequence: Synthetic oligonucleotide
  Antisense strand to SEQ ID NO: 284350
ucuguuguggagagugcac

SEQ ID NO: 284352 - RNA, 19 nt, Artificial Sequence
  Description of Artificial Sequence: Synthetic oligonucleotide
  Sense strand starting at position 3394 of SEQ ID NO: 3655
acaggauugcauuaacucu

SEQ ID NO: 284353 - RNA, 19 nt, Artificial Sequence
  Description of Artificial Sequence: Synthetic oligonucleotide
  Antisense strand to SEQ ID NO: 284352
agaguuaaugcaauccugu

SEQ ID NO: 284354 - RNA, 19 nt, Artificial Sequence
  Description of Artificial Sequence: Synthetic oligonucleotide
  Sense strand starting at position 3508 of SEQ ID NO: 3655
gcucuagaagugggauguu

SEQ ID NO: 284355 - RNA, 19 nt, Artificial Sequence
  Description of Artificial Sequence: Synthetic oligonucleotide
  Antisense strand to SEQ ID NO: 284354
aacaucccacuucuagagc

SEQ ID NO: 284356 - RNA, 19 nt, Artificial Sequence
  Description of Artificial Sequence: Synthetic oligonucleotide
  Sense strand starting at position 164 of SEQ ID NO: 3656
aggcaacuuuaggcaaauu

SEQ ID NO: 284357 - RNA, 19 nt, Artificial Sequence
  Description of Artificial Sequence: Synthetic oligonucleotide
  Antisense strand to SEQ ID NO: 284356
aauuugccuaaaguugccu

SEQ ID NO: 284358 - RNA, 19 nt, Artificial Sequence
  Description of Artificial Sequence: Synthetic oligonucleotide
  Sense strand starting at position 198 of SEQ ID NO: 3656
ccugcaaagugaucauuaa

SEQ ID NO: 284359 - RNA, 19 nt, Artificial Sequence
  Description of Artificial Sequence: Synthetic oligonucleotide
  Antisense strand to SEQ ID NO: 284358
uuaaugaucacuuugcagg

SEQ ID NO: 284360 - RNA, 19 nt, Artificial Sequence
  Description of Artificial Sequence: Synthetic oligonucleotide
  Sense strand starting at position 199 of SEQ ID NO: 3656
cugcaaagugaucauuaag

SEQ ID NO: 284361 - RNA, 19 nt, Artificial Sequence
  Description of Artificial Sequence: Synthetic oligonucleotide
  Antisense strand to SEQ ID NO: 284360
cuuaaugaucacuuugcag

SEQ ID NO: 284362 - RNA, 19 nt, Artificial Sequence
  Description of Artificial Sequence: Synthetic oligonucleotide
  Sense strand starting at position 249 of SEQ ID NO: 3656
ugauaaagcguguaaggua

SEQ ID NO: 284363 - RNA, 19 nt, Artificial Sequence
  Description of Artificial Sequence: Synthetic oligonucleotide
  Antisense strand to SEQ ID NO: 284362
uaccuuacacgcuuuauca

SEQ ID NO: 284364 - RNA, 19 nt, Artificial Sequence
  Description of Artificial Sequence: Synthetic oligonucleotide
  Sense strand starting at position 254 of SEQ ID NO: 3656
aagcguguaagguaauuaa

SEQ ID NO: 284365 - RNA, 19 nt, Artificial Sequence
  Description of Artificial Sequence: Synthetic oligonucleotide
  Antisense strand to SEQ ID NO: 284364
uuaauuaccuuacacgcuu

SEQ ID NO: 284366 - RNA, 19 nt, Artificial Sequence
  Description of Artificial Sequence: Synthetic oligonucleotide
  Sense strand starting at position 257 of SEQ ID NO: 3656
cguguaagguaauuaagaa

SEQ ID NO: 284367 - RNA, 19 nt, Artificial Sequence
  Description of Artificial Sequence: Synthetic oligonucleotide
  Antisense strand to SEQ ID NO: 284366
uucuuaauuaccuuacacg

SEQ ID NO: 284368 - RNA, 19 nt, Artificial Sequence
  Description of Artificial Sequence: Synthetic oligonucleotide
  Sense strand starting at position 273 of SEQ ID NO: 3656
gaaaguaccugagaagcuu

SEQ ID NO: 284369 - RNA, 19 nt, Artificial Sequence
  Description of Artificial Sequence: Synthetic oligonucleotide
  Antisense strand to SEQ ID NO: 284368
aagcuucucagguacuuuc

SEQ ID NO: 284370 - RNA, 19 nt, Artificial Sequence
  Description of Artificial Sequence: Synthetic oligonucleotide
  Sense strand starting at position 317 of SEQ ID NO: 3656
ucaguauuauugcuguuau

SEQ ID NO: 284371 - RNA, 19 nt, Artificial Sequence
  Description of Artificial Sequence: Synthetic oligonucleotide
  Antisense strand to SEQ ID NO: 284370
auaacagcaauaauacuga

SEQ ID NO: 284372 - RNA, 19 nt, Artificial Sequence
  Description of Artificial Sequence: Synthetic oligonucleotide
  Sense strand starting at position 857 of SEQ ID NO: 3656
uuaaguaguugacaggaaa

SEQ ID NO: 284373 - RNA, 19 nt, Artificial Sequence
  Description of Artificial Sequence: Synthetic oligonucleotide
  Antisense strand to SEQ ID NO: 284372
uuuccugucaacuacuuaa

SEQ ID NO: 284374 - RNA, 19 nt, Artificial Sequence
  Description of Artificial Sequence: Synthetic oligonucleotide
  Sense strand starting at position 954 of SEQ ID NO: 3656
agguaagguccuuaagggu

SEQ ID NO: 284375 - RNA, 19 nt, Artificial Sequence
  Description of Artificial Sequence: Synthetic oligonucleotide
  Antisense strand to SEQ ID NO: 284374
acccuuaaggaccuuaccu

SEQ ID NO: 284376 - RNA, 19 nt, Artificial Sequence
  Description of Artificial Sequence: Synthetic oligonucleotide
  Sense strand starting at position 1045 of SEQ ID NO: 3656
guacaugcaaguugugaca

SEQ ID NO: 284377 - RNA, 19 nt, Artificial Sequence
  Description of Artificial Sequence: Synthetic oligonucleotide
  Antisense strand to SEQ ID NO: 284376
ugucacaacuugcauguac

SEQ ID NO: 284378 - RNA, 19 nt, Artificial Sequence
  Description of Artificial Sequence: Synthetic oligonucleotide
  Sense strand starting at position 1058 of SEQ ID NO: 3656
gugacaaccugacuccaaa

SEQ ID NO: 284379 - RNA, 19 nt, Artificial Sequence
  Description of Artificial Sequence: Synthetic oligonucleotide
  Antisense strand to SEQ ID NO: 284378
uuuggagucagguugucac

SEQ ID NO: 284380 - RNA, 19 nt, Artificial Sequence
  Description of Artificial Sequence: Synthetic oligonucleotide
  Sense strand starting at position 1089 of SEQ ID NO: 3656
ggaucccuauuccuaguua

SEQ ID NO: 284381 - RNA, 19 nt, Artificial Sequence
  Description of Artificial Sequence: Synthetic oligonucleotide
  Antisense strand to SEQ ID NO: 284380
uaacuaggaauagggaucc

SEQ ID NO: 284382 - RNA, 19 nt, Artificial Sequence
  Description of Artificial Sequence: Synthetic oligonucleotide
  Sense strand starting at position 1202 of SEQ ID NO: 3656
aguguauugcucuguuaaa

SEQ ID NO: 284383 - RNA, 19 nt, Artificial Sequence
  Description of Artificial Sequence: Synthetic oligonucleotide
  Antisense strand to SEQ ID NO: 284382
uuuaacagagcaauacacu

SEQ ID NO: 284384 - RNA, 19 nt, Artificial Sequence
  Description of Artificial Sequence: Synthetic oligonucleotide
  Sense strand starting at position 1387 of SEQ ID NO: 3656
ccgggaacgucaccuagaa

SEQ ID NO: 284385 - RNA, 19 nt, Artificial Sequence
  Description of Artificial Sequence: Synthetic oligonucleotide
  Antisense strand to SEQ ID NO: 284384
uucuaggugacguucccgg

SEQ ID NO: 284386 - RNA, 19 nt, Artificial Sequence
  Description of Artificial Sequence: Synthetic oligonucleotide
  Sense strand starting at position 1457 of SEQ ID NO: 3656
gcuagacuucuagaacuca

SEQ ID NO: 284387 - RNA, 19 nt, Artificial Sequence
  Description of Artificial Sequence: Synthetic oligonucleotide
  Antisense strand to SEQ ID NO: 284386
ugaguucuagaagucuagc

SEQ ID NO: 284388 - RNA, 19 nt, Artificial Sequence
  Description of Artificial Sequence: Synthetic oligonucleotide
  Sense strand starting at position 2043 of SEQ ID NO: 3656
cgauauuuaucccaccuag

SEQ ID NO: 284389 - RNA, 19 nt, Artificial Sequence
  Description of Artificial Sequence: Synthetic oligonucleotide
  Antisense strand to SEQ ID NO: 284388
cuaggugggauaaauaucg

SEQ ID NO: 284390 - RNA, 19 nt, Artificial Sequence
  Description of Artificial Sequence: Synthetic oligonucleotide
  Sense strand starting at position 2259 of SEQ ID NO: 3656
gcggcacaccggaguuauc

SEQ ID NO: 284391 - RNA, 19 nt, Artificial Sequence
  Description of Artificial Sequence: Synthetic oligonucleotide
  Antisense strand to SEQ ID NO: 284390
gauaacuccggugugccgc

SEQ ID NO: 284392 - RNA, 19 nt, Artificial Sequence
  Description of Artificial Sequence: Synthetic oligonucleotide
  Sense strand starting at position 2268 of SEQ ID NO: 3656
cggaguuaucgaucgccuc

SEQ ID NO: 284393 - RNA, 19 nt, Artificial Sequence
  Description of Artificial Sequence: Synthetic oligonucleotide
  Antisense strand to SEQ ID NO: 284392
gaggcgaucgauaacuccg

SEQ ID NO: 284394 - RNA, 19 nt, Artificial Sequence
  Description of Artificial Sequence: Synthetic oligonucleotide
  Sense strand starting at position 2371 of SEQ ID NO: 3656
aggcgagagacuugaaauu

SEQ ID NO: 284395 - RNA, 19 nt, Artificial Sequence
  Description of Artificial Sequence: Synthetic oligonucleotide
  Antisense strand to SEQ ID NO: 284394
aauuucaagucucucgccu

SEQ ID NO: 284396 - RNA, 19 nt, Artificial Sequence
  Description of Artificial Sequence: Synthetic oligonucleotide
  Sense strand starting at position 2396 of SEQ ID NO: 3656
gugaguuaauugcucagac

SEQ ID NO: 284397 - RNA, 19 nt, Artificial Sequence
  Description of Artificial Sequence: Synthetic oligonucleotide
  Antisense strand to SEQ ID NO: 284396
gucugagcaauuaacucac

SEQ ID NO: 284398 - RNA, 19 nt, Artificial Sequence
  Description of Artificial Sequence: Synthetic oligonucleotide
  Sense strand starting at position 2397 of SEQ ID NO: 3656
ugaguuaauugcucagacu

SEQ ID NO: 284399 - RNA, 19 nt, Artificial Sequence
  Description of Artificial Sequence: Synthetic oligonucleotide
  Antisense strand to SEQ ID NO: 284398
agucugagcaauuaacuca

SEQ ID NO: 284400 - RNA, 19 nt, Artificial Sequence
  Description of Artificial Sequence: Synthetic oligonucleotide
  Sense strand starting at position 2398 of SEQ ID NO: 3656
gaguuaauugcucagacuc

SEQ ID NO: 284401 - RNA, 19 nt, Artificial Sequence
  Description of Artificial Sequence: Synthetic oligonucleotide
  Antisense strand to SEQ ID NO: 284400
gagucugagcaauuaacuc

SEQ ID NO: 284402 - RNA, 19 nt, Artificial Sequence
  Description of Artificial Sequence: Synthetic oligonucleotide
  Sense strand starting at position 2462 of SEQ ID NO: 3656
aaguccagugcuuguugaa

SEQ ID NO: 284403 - RNA, 19 nt, Artificial Sequence
  Description of Artificial Sequence: Synthetic oligonucleotide
  Antisense strand to SEQ ID NO: 284402
uucaacaagcacuggacuu

SEQ ID NO: 284404 - RNA, 19 nt, Artificial Sequence
  Description of Artificial Sequence: Synthetic oligonucleotide
  Sense strand starting at position 2513 of SEQ ID NO: 3656
uaacguacuguuggguuua

SEQ ID NO: 284405 - RNA, 19 nt, Artificial Sequence
  Description of Artificial Sequence: Synthetic oligonucleotide
  Antisense strand to SEQ ID NO: 284404
uaaacccaacaguacguua

SEQ ID NO: 284406 - RNA, 19 nt, Artificial Sequence
  Description of Artificial Sequence: Synthetic oligonucleotide
  Sense strand starting at position 2518 of SEQ ID NO: 3656
uacuguuggguuuaagacu

SEQ ID NO: 284407 - RNA, 19 nt, Artificial Sequence
  Description of Artificial Sequence: Synthetic oligonucleotide
  Antisense strand to SEQ ID NO: 284406
agucuuaaacccaacagua

SEQ ID NO: 284408 - RNA, 19 nt, Artificial Sequence
  Description of Artificial Sequence: Synthetic oligonucleotide
  Sense strand starting at position 2876 of SEQ ID NO: 3656
aucucaagcuggucuagau

SEQ ID NO: 284409 - RNA, 19 nt, Artificial Sequence
  Description of Artificial Sequence: Synthetic oligonucleotide
  Antisense strand to SEQ ID NO: 284408
aucuagaccagcuugagau

SEQ ID NO: 284410 - RNA, 19 nt, Artificial Sequence
  Description of Artificial Sequence: Synthetic oligonucleotide
  Sense strand starting at position 3017 of SEQ ID NO: 3656
ucaggucuuaagcguacau

SEQ ID NO: 284411 - RNA, 19 nt, Artificial Sequence
  Description of Artificial Sequence: Synthetic oligonucleotide
  Antisense strand to SEQ ID NO: 284410
auguacgcuuaagaccuga

SEQ ID NO: 284412 - RNA, 19 nt, Artificial Sequence
  Description of Artificial Sequence: Synthetic oligonucleotide
  Sense strand starting at position 3019 of SEQ ID NO: 3656
aggucuuaagcguacauaa

SEQ ID NO: 284413 - RNA, 19 nt, Artificial Sequence
  Description of Artificial Sequence: Synthetic oligonucleotide
  Antisense strand to SEQ ID NO: 284412
uuauguacgcuuaagaccu

SEQ ID NO: 284414 - RNA, 19 nt, Artificial Sequence
  Description of Artificial Sequence: Synthetic oligonucleotide
  Sense strand starting at position 3021 of SEQ ID NO: 3656
gucuuaagcguacauaaca

SEQ ID NO: 284415 - RNA, 19 nt, Artificial Sequence
  Description of Artificial Sequence: Synthetic oligonucleotide
  Antisense strand to SEQ ID NO: 284414
uguuauguacgcuuaagac

SEQ ID NO: 284416 - RNA, 19 nt, Artificial Sequence
  Description of Artificial Sequence: Synthetic oligonucleotide
  Sense strand starting at position 3049 of SEQ ID NO: 3656
ggauauucguuauuaaacu

SEQ ID NO: 284417 - RNA, 19 nt, Artificial Sequence
  Description of Artificial Sequence: Synthetic oligonucleotide
  Antisense strand to SEQ ID NO: 284416
aguuuaauaacgaauaucc

SEQ ID NO: 284418 - RNA, 19 nt, Artificial Sequence
  Description of Artificial Sequence: Synthetic oligonucleotide
  Sense strand starting at position 3085 of SEQ ID NO: 3656
gcccauaugcauuguaauu

SEQ ID NO: 284419 - RNA, 19 nt, Artificial Sequence
  Description of Artificial Sequence: Synthetic oligonucleotide
  Antisense strand to SEQ ID NO: 284418
aauuacaaugcauaugggc

SEQ ID NO: 284420 - RNA, 19 nt, Artificial Sequence
  Description of Artificial Sequence: Synthetic oligonucleotide
  Sense strand starting at position 3127 of SEQ ID NO: 3656
ggaugugcauucuucuguu

SEQ ID NO: 284421 - RNA, 19 nt, Artificial Sequence
  Description of Artificial Sequence: Synthetic oligonucleotide
  Antisense strand to SEQ ID NO: 284420
aacagaagaaugcacaucc

SEQ ID NO: 284422 - RNA, 19 nt, Artificial Sequence
  Description of Artificial Sequence: Synthetic oligonucleotide
  Sense strand starting at position 3180 of SEQ ID NO: 3656
agggcuucuucccuagaga

SEQ ID NO: 284423 - RNA, 19 nt, Artificial Sequence
  Description of Artificial Sequence: Synthetic oligonucleotide
  Antisense strand to SEQ ID NO: 284422
ucucuagggaagaagcccu

SEQ ID NO: 284424 - RNA, 19 nt, Artificial Sequence
  Description of Artificial Sequence: Synthetic oligonucleotide
  Sense strand starting at position 3183 of SEQ ID NO: 3656
gcuucuucccuagagaaac

SEQ ID NO: 284425 - RNA, 19 nt, Artificial Sequence
  Description of Artificial Sequence: Synthetic oligonucleotide
  Antisense strand to SEQ ID NO: 284424
guuucucuagggaagaagc

SEQ ID NO: 284426 - RNA, 19 nt, Artificial Sequence
  Description of Artificial Sequence: Synthetic oligonucleotide
  Sense strand starting at position 3194 of SEQ ID NO: 3656
agagaaacgucaguaaaca

SEQ ID NO: 284427 - RNA, 19 nt, Artificial Sequence
  Description of Artificial Sequence: Synthetic oligonucleotide
  Antisense strand to SEQ ID NO: 284426
uguuuacugacguuucucu

SEQ ID NO: 284428 - RNA, 19 nt, Artificial Sequence
  Description of Artificial Sequence: Synthetic oligonucleotide
  Sense strand starting at position 3220 of SEQ ID NO: 3656
agucauuucuccuuacugu

SEQ ID NO: 284429 - RNA, 19 nt, Artificial Sequence
  Description of Artificial Sequence: Synthetic oligonucleotide
  Antisense strand to SEQ ID NO: 284428
acaguaaggagaaaugacu

SEQ ID NO: 284430 - RNA, 19 nt, Artificial Sequence
  Description of Artificial Sequence: Synthetic oligonucleotide
  Sense strand starting at position 3580 of SEQ ID NO: 3656
gugcacucuccacaacaga

SEQ ID NO: 284431 - RNA, 19 nt, Artificial Sequence
  Description of Artificial Sequence: Synthetic oligonucleotide
  Antisense strand to SEQ ID NO: 284430
ucuguuguggagagugcac

SEQ ID NO: 284432 - RNA, 19 nt, Artificial Sequence
  Description of Artificial Sequence: Synthetic oligonucleotide
  Sense strand starting at position 3598 of SEQ ID NO: 3656
acaggauugcauuaacucu

SEQ ID NO: 284433 - RNA, 19 nt, Artificial Sequence
  Description of Artificial Sequence: Synthetic oligonucleotide
  Antisense strand to SEQ ID NO: 284432
agaguuaaugcaauccugu

SEQ ID NO: 284434 - RNA, 19 nt, Artificial Sequence
  Description of Artificial Sequence: Synthetic oligonucleotide
  Sense strand starting at position 3712 of SEQ ID NO: 3656
gcucuagaagugggauguu

SEQ ID NO: 284435 - RNA, 19 nt, Artificial Sequence
  Description of Artificial Sequence: Synthetic oligonucleotide
  Antisense strand to SEQ ID NO: 284434
aacaucccacuucuagagc

SEQ ID NO: 284436 - RNA, 19 nt, Artificial Sequence
  Description of Artificial Sequence: Synthetic oligonucleotide
  Sense strand starting at position 53 of SEQ ID NO: 3657
ccacaacaugugggagauu

SEQ ID NO: 284437 - RNA, 19 nt, Artificial Sequence
  Description of Artificial Sequence: Synthetic oligonucleotide
  Antisense strand to SEQ ID NO: 284436
aaucucccacauguugugg

SEQ ID NO: 284438 - RNA, 19 nt, Artificial Sequence
  Description of Artificial Sequence: Synthetic oligonucleotide
  Sense strand starting at position 62 of SEQ ID NO: 3657
gugggagauuuggaaagca

SEQ ID NO: 284439 - RNA, 19 nt, Artificial Sequence
  Description of Artificial Sequence: Synthetic oligonucleotide
  Antisense strand to SEQ ID NO: 284438
ugcuuuccaaaucucccac

SEQ ID NO: 284440 - RNA, 19 nt, Artificial Sequence
  Description of Artificial Sequence: Synthetic oligonucleotide
  Sense strand starting at position 119 of SEQ ID NO: 3657
augcucaaagcugaaauau

SEQ ID NO: 284441 - RNA, 19 nt, Artificial Sequence
  Description of Artificial Sequence: Synthetic oligonucleotide
  Antisense strand to SEQ ID NO: 284440
auauuucagcuuugagcau

SEQ ID NO: 284442 - RNA, 19 nt, Artificial Sequence
  Description of Artificial Sequence: Synthetic oligonucleotide
  Sense strand starting at position 223 of SEQ ID NO: 3657
ucaagcuauguuugaguuu

SEQ ID NO: 284443 - RNA, 19 nt, Artificial Sequence
  Description of Artificial Sequence: Synthetic oligonucleotide
  Antisense strand to SEQ ID NO: 284442
aaacucaaacauagcuuga

SEQ ID NO: 284444 - RNA, 19 nt, Artificial Sequence
  Description of Artificial Sequence: Synthetic oligonucleotide
  Sense strand starting at position 361 of SEQ ID NO: 3657
ugaagucauuuacauagcu

SEQ ID NO: 284445 - RNA, 19 nt, Artificial Sequence
  Description of Artificial Sequence: Synthetic oligonucleotide
  Antisense strand to SEQ ID NO: 284444
agcuauguaaaugacuuca

SEQ ID NO: 284446 - RNA, 19 nt, Artificial Sequence
  Description of Artificial Sequence: Synthetic oligonucleotide
  Sense strand starting at position 888 of SEQ ID NO: 3657
auuaaagguugagaugaga

SEQ ID NO: 284447 - RNA, 19 nt, Artificial Sequence
  Description of Artificial Sequence: Synthetic oligonucleotide
  Antisense strand to SEQ ID NO: 284446
ucucaucucaaccuuuaau

SEQ ID NO: 284448 - RNA, 19 nt, Artificial Sequence
  Description of Artificial Sequence: Synthetic oligonucleotide
  Sense strand starting at position 1036 of SEQ ID NO: 3657
uguagaaauuaugcuuuac

SEQ ID NO: 284449 - RNA, 19 nt, Artificial Sequence
  Description of Artificial Sequence: Synthetic oligonucleotide
  Antisense strand to SEQ ID NO: 284448
guaaagcauaauuucuaca

SEQ ID NO: 284450 - RNA, 19 nt, Artificial Sequence
  Description of Artificial Sequence: Synthetic oligonucleotide
  Sense strand starting at position 1215 of SEQ ID NO: 3657
agguuuaaguuuccuaaga

SEQ ID NO: 284451 - RNA, 19 nt, Artificial Sequence
  Description of Artificial Sequence: Synthetic oligonucleotide
  Antisense strand to SEQ ID NO: 284450
ucuuaggaaacuuaaaccu

SEQ ID NO: 284452 - RNA, 19 nt, Artificial Sequence
  Description of Artificial Sequence: Synthetic oligonucleotide
  Sense strand starting at position 1216 of SEQ ID NO: 3657
gguuuaaguuuccuaagag

SEQ ID NO: 284453 - RNA, 19 nt, Artificial Sequence
  Description of Artificial Sequence: Synthetic oligonucleotide
  Antisense strand to SEQ ID NO: 284452
cucuuaggaaacuuaaacc

SEQ ID NO: 284454 - RNA, 19 nt, Artificial Sequence
  Description of Artificial Sequence: Synthetic oligonucleotide
  Sense strand starting at position 1231 of SEQ ID NO: 3657
agagaauugcacugagacc

SEQ ID NO: 284455 - RNA, 19 nt, Artificial Sequence
  Description of Artificial Sequence: Synthetic oligonucleotide
  Antisense strand to SEQ ID NO: 284454
ggucucagugcaauucucu

SEQ ID NO: 284456 - RNA, 19 nt, Artificial Sequence
  Description of Artificial Sequence: Synthetic oligonucleotide
  Sense strand starting at position 1250 of SEQ ID NO: 3657
uugaacuagugaucagauu

SEQ ID NO: 284457 - RNA, 19 nt, Artificial Sequence
  Description of Artificial Sequence: Synthetic oligonucleotide
  Antisense strand to SEQ ID NO: 284456
aaucugaucacuaguucaa

SEQ ID NO: 284458 - RNA, 19 nt, Artificial Sequence
  Description of Artificial Sequence: Synthetic oligonucleotide
  Sense strand starting at position 1293 of SEQ ID NO: 3657
guacuuucgaagugaauuc

SEQ ID NO: 284459 - RNA, 19 nt, Artificial Sequence
  Description of Artificial Sequence: Synthetic oligonucleotide
  Antisense strand to SEQ ID NO: 284458
gaauucacuucgaaaguac

SEQ ID NO: 284460 - RNA, 19 nt, Artificial Sequence
  Description of Artificial Sequence: Synthetic oligonucleotide
  Sense strand starting at position 1532 of SEQ ID NO: 3657
cagcaagugucucuguuga

SEQ ID NO: 284461 - RNA, 19 nt, Artificial Sequence
  Description of Artificial Sequence: Synthetic oligonucleotide
  Antisense strand to SEQ ID NO: 284460
ucaacagagacacuugcug

SEQ ID NO: 284462 - RNA, 19 nt, Artificial Sequence
  Description of Artificial Sequence: Synthetic oligonucleotide
  Sense strand starting at position 1534 of SEQ ID NO: 3657
gcaagugucucuguugaaa

SEQ ID NO: 284463 - RNA, 19 nt, Artificial Sequence
  Description of Artificial Sequence: Synthetic oligonucleotide
  Antisense strand to SEQ ID NO: 284462
uuucaacagagacacuugc

SEQ ID NO: 284464 - RNA, 19 nt, Artificial Sequence
  Description of Artificial Sequence: Synthetic oligonucleotide
  Sense strand starting at position 2404 of SEQ ID NO: 3657
acuccucacgacugaauua

SEQ ID NO: 284465 - RNA, 19 nt, Artificial Sequence
  Description of Artificial Sequence: Synthetic oligonucleotide
  Antisense strand to SEQ ID NO: 284464
uaauucagucgugaggagu

SEQ ID NO: 284466 - RNA, 19 nt, Artificial Sequence
  Description of Artificial Sequence: Synthetic oligonucleotide
  Sense strand starting at position 2535 of SEQ ID NO: 3657
ccgaguugccuuuagauga

SEQ ID NO: 284467 - RNA, 19 nt, Artificial Sequence
  Description of Artificial Sequence: Synthetic oligonucleotide
  Antisense strand to SEQ ID NO: 284466
ucaucuaaaggcaacucgg

SEQ ID NO: 284468 - RNA, 19 nt, Artificial Sequence
  Description of Artificial Sequence: Synthetic oligonucleotide
  Sense strand starting at position 2568 of SEQ ID NO: 3657
ucagaugccugacauuuaa

SEQ ID NO: 284469 - RNA, 19 nt, Artificial Sequence
  Description of Artificial Sequence: Synthetic oligonucleotide
  Antisense strand to SEQ ID NO: 284468
uuaaaugucaggcaucuga

SEQ ID NO: 284470 - RNA, 19 nt, Artificial Sequence
  Description of Artificial Sequence: Synthetic oligonucleotide
  Sense strand starting at position 2599 of SEQ ID NO: 3657
cuuucugugguuuguauaa

SEQ ID NO: 284471 - RNA, 19 nt, Artificial Sequence
  Description of Artificial Sequence: Synthetic oligonucleotide
  Antisense strand to SEQ ID NO: 284470
uuauacaaaccacagaaag

SEQ ID NO: 284472 - RNA, 19 nt, Artificial Sequence
  Description of Artificial Sequence: Synthetic oligonucleotide
  Sense strand starting at position 2980 of SEQ ID NO: 3657
gaguauuacugccucaagc

SEQ ID NO: 284473 - RNA, 19 nt, Artificial Sequence
  Description of Artificial Sequence: Synthetic oligonucleotide
  Antisense strand to SEQ ID NO: 284472
gcuugaggcaguaauacuc

SEQ ID NO: 284474 - RNA, 19 nt, Artificial Sequence
  Description of Artificial Sequence: Synthetic oligonucleotide
  Sense strand starting at position 2982 of SEQ ID NO: 3657
guauuacugccucaagcuu

SEQ ID NO: 284475 - RNA, 19 nt, Artificial Sequence
  Description of Artificial Sequence: Synthetic oligonucleotide
  Antisense strand to SEQ ID NO: 284474
aagcuugaggcaguaauac

SEQ ID NO: 284476 - RNA, 19 nt, Artificial Sequence
  Description of Artificial Sequence: Synthetic oligonucleotide
  Sense strand starting at position 2994 of SEQ ID NO: 3657
caagcuuagguuugcauaa

SEQ ID NO: 284477 - RNA, 19 nt, Artificial Sequence
  Description of Artificial Sequence: Synthetic oligonucleotide
  Antisense strand to SEQ ID NO: 284476
uuaugcaaaccuaagcuug

SEQ ID NO: 284478 - RNA, 19 nt, Artificial Sequence
  Description of Artificial Sequence: Synthetic oligonucleotide
  Sense strand starting at position 3034 of SEQ ID NO: 3657
ccaauauauugagcagaau

SEQ ID NO: 284479 - RNA, 19 nt, Artificial Sequence
  Description of Artificial Sequence: Synthetic oligonucleotide
  Antisense strand to SEQ ID NO: 284478
auucugcucaauauauugg

SEQ ID NO: 284480 - RNA, 19 nt, Artificial Sequence
  Description of Artificial Sequence: Synthetic oligonucleotide
  Sense strand starting at position 3059 of SEQ ID NO: 3657
uggguacacucuuucucaa

SEQ ID NO: 284481 - RNA, 19 nt, Artificial Sequence
  Description of Artificial Sequence: Synthetic oligonucleotide
  Antisense strand to SEQ ID NO: 284480
uugagaaagaguguaccca

SEQ ID NO: 284482 - RNA, 19 nt, Artificial Sequence
  Description of Artificial Sequence: Synthetic oligonucleotide
  Sense strand starting at position 3148 of SEQ ID NO: 3657
acuguuuacggauagggau

SEQ ID NO: 284483 - RNA, 19 nt, Artificial Sequence
  Description of Artificial Sequence: Synthetic oligonucleotide
  Antisense strand to SEQ ID NO: 284482
aucccuauccguaaacagu

SEQ ID NO: 284484 - RNA, 19 nt, Artificial Sequence
  Description of Artificial Sequence: Synthetic oligonucleotide
  Sense strand starting at position 3175 of SEQ ID NO: 3657
ucuauaggcucuuuaagau

SEQ ID NO: 284485 - RNA, 19 nt, Artificial Sequence
  Description of Artificial Sequence: Synthetic oligonucleotide
  Antisense strand to SEQ ID NO: 284484
aucuuaaagagccuauaga

SEQ ID NO: 284486 - RNA, 19 nt, Artificial Sequence
  Description of Artificial Sequence: Synthetic oligonucleotide
  Sense strand starting at position 3211 of SEQ ID NO: 3657
gcaagccgcauugaagaau

SEQ ID NO: 284487 - RNA, 19 nt, Artificial Sequence
  Description of Artificial Sequence: Synthetic oligonucleotide
  Antisense strand to SEQ ID NO: 284486
auucuucaaugcggcuugc

SEQ ID NO: 284488 - RNA, 19 nt, Artificial Sequence
  Description of Artificial Sequence: Synthetic oligonucleotide
  Sense strand starting at position 3217 of SEQ ID NO: 3657
cgcauugaagaauaaguaa

SEQ ID NO: 284489 - RNA, 19 nt, Artificial Sequence
  Description of Artificial Sequence: Synthetic oligonucleotide
  Antisense strand to SEQ ID NO: 284488
uuacuuauucuucaaugcg

SEQ ID NO: 284490 - RNA, 19 nt, Artificial Sequence
  Description of Artificial Sequence: Synthetic oligonucleotide
  Sense strand starting at position 3518 of SEQ ID NO: 3657
ucaccagucugggacagaa

SEQ ID NO: 284491 - RNA, 19 nt, Artificial Sequence
  Description of Artificial Sequence: Synthetic oligonucleotide
  Antisense strand to SEQ ID NO: 284490
uucugucccagacugguga

SEQ ID NO: 284492 - RNA, 19 nt, Artificial Sequence
  Description of Artificial Sequence: Synthetic oligonucleotide
  Sense strand starting at position 3589 of SEQ ID NO: 3657
agagcagauuaaucuuuaa

SEQ ID NO: 284493 - RNA, 19 nt, Artificial Sequence
  Description of Artificial Sequence: Synthetic oligonucleotide
  Antisense strand to SEQ ID NO: 284492
uuaaagauuaaucugcucu

SEQ ID NO: 284494 - RNA, 19 nt, Artificial Sequence
  Description of Artificial Sequence: Synthetic oligonucleotide
  Sense strand starting at position 3608 of SEQ ID NO: 3657
ccucucagauuuggaacua

SEQ ID NO: 284495 - RNA, 19 nt, Artificial Sequence
  Description of Artificial Sequence: Synthetic oligonucleotide
  Antisense strand to SEQ ID NO: 284494
uaguuccaaaucugagagg

SEQ ID NO: 284496 - RNA, 19 nt, Artificial Sequence
  Description of Artificial Sequence: Synthetic oligonucleotide
  Sense strand starting at position 3664 of SEQ ID NO: 3657
uuuauuaugguuugcagca

SEQ ID NO: 284497 - RNA, 19 nt, Artificial Sequence
  Description of Artificial Sequence: Synthetic oligonucleotide
  Antisense strand to SEQ ID NO: 284496
ugcugcaaaccauaauaaa

SEQ ID NO: 284498 - RNA, 19 nt, Artificial Sequence
  Description of Artificial Sequence: Synthetic oligonucleotide
  Sense strand starting at position 3665 of SEQ ID NO: 3657
uuauuaugguuugcagcaa

SEQ ID NO: 284499 - RNA, 19 nt, Artificial Sequence
  Description of Artificial Sequence: Synthetic oligonucleotide
  Antisense strand to SEQ ID NO: 284498
uugcugcaaaccauaauaa

SEQ ID NO: 284500 - RNA, 19 nt, Artificial Sequence
  Description of Artificial Sequence: Synthetic oligonucleotide
  Sense strand starting at position 3669 of SEQ ID NO: 3657
uaugguuugcagcaaucuu

SEQ ID NO: 284501 - RNA, 19 nt, Artificial Sequence
  Description of Artificial Sequence: Synthetic oligonucleotide
  Antisense strand to SEQ ID NO: 284500
aagauugcugcaaaccaua

SEQ ID NO: 284502 - RNA, 19 nt, Artificial Sequence
  Description of Artificial Sequence: Synthetic oligonucleotide
  Sense strand starting at position 3680 of SEQ ID NO: 3657
gcaaucuugcaauauaaug

SEQ ID NO: 284503 - RNA, 19 nt, Artificial Sequence
  Description of Artificial Sequence: Synthetic oligonucleotide
  Antisense strand to SEQ ID NO: 284502
cauuauauugcaagauugc

SEQ ID NO: 284504 - RNA, 19 nt, Artificial Sequence
  Description of Artificial Sequence: Synthetic oligonucleotide
  Sense strand starting at position 3788 of SEQ ID NO: 3657
augacugucucuucgcuaa

SEQ ID NO: 284505 - RNA, 19 nt, Artificial Sequence
  Description of Artificial Sequence: Synthetic oligonucleotide
  Antisense strand to SEQ ID NO: 284504
uuagcgaagagacagucau

SEQ ID NO: 284506 - RNA, 19 nt, Artificial Sequence
  Description of Artificial Sequence: Synthetic oligonucleotide
  Sense strand starting at position 3790 of SEQ ID NO: 3657
gacugucucuucgcuaaua

SEQ ID NO: 284507 - RNA, 19 nt, Artificial Sequence
  Description of Artificial Sequence: Synthetic oligonucleotide
  Antisense strand to SEQ ID NO: 284506
uauuagcgaagagacaguc

SEQ ID NO: 284508 - RNA, 19 nt, Artificial Sequence
  Description of Artificial Sequence: Synthetic oligonucleotide
  Sense strand starting at position 3792 of SEQ ID NO: 3657
cugucucuucgcuaauacu

SEQ ID NO: 284509 - RNA, 19 nt, Artificial Sequence
  Description of Artificial Sequence: Synthetic oligonucleotide
  Antisense strand to SEQ ID NO: 284508
aguauuagcgaagagacag

SEQ ID NO: 284510 - RNA, 19 nt, Artificial Sequence
  Description of Artificial Sequence: Synthetic oligonucleotide
  Sense strand starting at position 3924 of SEQ ID NO: 3657
ugacguaugggcugugaac

SEQ ID NO: 284511 - RNA, 19 nt, Artificial Sequence
  Description of Artificial Sequence: Synthetic oligonucleotide
  Antisense strand to SEQ ID NO: 284510
guucacagcccauacguca

SEQ ID NO: 284512 - RNA, 19 nt, Artificial Sequence
  Description of Artificial Sequence: Synthetic oligonucleotide
  Sense strand starting at position 3926 of SEQ ID NO: 3657
acguaugggcugugaacaa

SEQ ID NO: 284513 - RNA, 19 nt, Artificial Sequence
  Description of Artificial Sequence: Synthetic oligonucleotide
  Antisense strand to SEQ ID NO: 284512
uuguucacagcccauacgu

SEQ ID NO: 284514 - RNA, 19 nt, Artificial Sequence
  Description of Artificial Sequence: Synthetic oligonucleotide
  Sense strand starting at position 3978 of SEQ ID NO: 3657
agcugauacugacuugauc

SEQ ID NO: 284515 - RNA, 19 nt, Artificial Sequence
  Description of Artificial Sequence: Synthetic oligonucleotide
  Antisense strand to SEQ ID NO: 284514
gaucaagucaguaucagcu

SEQ ID NO: 284516 - RNA, 19 nt, Artificial Sequence
  Description of Artificial Sequence: Synthetic oligonucleotide
  Sense strand starting at position 127 of SEQ ID NO: 3658
ugcuuccugcaagaaagua

SEQ ID NO: 284517 - RNA, 19 nt, Artificial Sequence
  Description of Artificial Sequence: Synthetic oligonucleotide
  Antisense strand to SEQ ID NO: 284516
uacuuucuugcaggaagca

SEQ ID NO: 284518 - RNA, 19 nt, Artificial Sequence
  Description of Artificial Sequence: Synthetic oligonucleotide
  Sense strand starting at position 409 of SEQ ID NO: 3658
agaccuagccacuggauua

SEQ ID NO: 284519 - RNA, 19 nt, Artificial Sequence
  Description of Artificial Sequence: Synthetic oligonucleotide
  Antisense strand to SEQ ID NO: 284518
uaauccaguggcuaggucu

SEQ ID NO: 284520 - RNA, 19 nt, Artificial Sequence
  Description of Artificial Sequence: Synthetic oligonucleotide
  Sense strand starting at position 421 of SEQ ID NO: 3658
uggauuaacccaugcaaag

SEQ ID NO: 284521 - RNA, 19 nt, Artificial Sequence
  Description of Artificial Sequence: Synthetic oligonucleotide
  Antisense strand to SEQ ID NO: 284520
cuuugcauggguuaaucca

SEQ ID NO: 284522 - RNA, 19 nt, Artificial Sequence
  Description of Artificial Sequence: Synthetic oligonucleotide
  Sense strand starting at position 442 of SEQ ID NO: 3658
gagacagagucaccuauau

SEQ ID NO: 284523 - RNA, 19 nt, Artificial Sequence
  Description of Artificial Sequence: Synthetic oligonucleotide
  Antisense strand to SEQ ID NO: 284522
auauaggugacucugucuc

SEQ ID NO: 284524 - RNA, 19 nt, Artificial Sequence
  Description of Artificial Sequence: Synthetic oligonucleotide
  Sense strand starting at position 835 of SEQ ID NO: 3658
uugucaauauggucuaaac

SEQ ID NO: 284525 - RNA, 19 nt, Artificial Sequence
  Description of Artificial Sequence: Synthetic oligonucleotide
  Antisense strand to SEQ ID NO: 284524
guuuagaccauauugacaa

SEQ ID NO: 284526 - RNA, 19 nt, Artificial Sequence
  Description of Artificial Sequence: Synthetic oligonucleotide
  Sense strand starting at position 837 of SEQ ID NO: 3658
gucaauauggucuaaacua

SEQ ID NO: 284527 - RNA, 19 nt, Artificial Sequence
  Description of Artificial Sequence: Synthetic oligonucleotide
  Antisense strand to SEQ ID NO: 284526
uaguuuagaccauauugac

SEQ ID NO: 284528 - RNA, 19 nt, Artificial Sequence
  Description of Artificial Sequence: Synthetic oligonucleotide
  Sense strand starting at position 845 of SEQ ID NO: 3658
ggucuaaacuagcuuaaau

SEQ ID NO: 284529 - RNA, 19 nt, Artificial Sequence
  Description of Artificial Sequence: Synthetic oligonucleotide
  Antisense strand to SEQ ID NO: 284528
auuuaagcuaguuuagacc

SEQ ID NO: 284530 - RNA, 19 nt, Artificial Sequence
  Description of Artificial Sequence: Synthetic oligonucleotide
  Sense strand starting at position 923 of SEQ ID NO: 3658
uuaugugagcagcaggaua

SEQ ID NO: 284531 - RNA, 19 nt, Artificial Sequence
  Description of Artificial Sequence: Synthetic oligonucleotide
  Antisense strand to SEQ ID NO: 284530
uauccugcugcucacauaa

SEQ ID NO: 284532 - RNA, 19 nt, Artificial Sequence
  Description of Artificial Sequence: Synthetic oligonucleotide
  Sense strand starting at position 925 of SEQ ID NO: 3658
augugagcagcaggauaua

SEQ ID NO: 284533 - RNA, 19 nt, Artificial Sequence
  Description of Artificial Sequence: Synthetic oligonucleotide
  Antisense strand to SEQ ID NO: 284532
uauauccugcugcucacau

SEQ ID NO: 284534 - RNA, 19 nt, Artificial Sequence
  Description of Artificial Sequence: Synthetic oligonucleotide
  Sense strand starting at position 1706 of SEQ ID NO: 3658
aaagaugcauagcuguaaa

SEQ ID NO: 284535 - RNA, 19 nt, Artificial Sequence
  Description of Artificial Sequence: Synthetic oligonucleotide
  Antisense strand to SEQ ID NO: 284534
uuuacagcuaugcaucuuu

SEQ ID NO: 284536 - RNA, 19 nt, Artificial Sequence
  Description of Artificial Sequence: Synthetic oligonucleotide
  Sense strand starting at position 1716 of SEQ ID NO: 3658
agcuguaaacccuagaaua

SEQ ID NO: 284537 - RNA, 19 nt, Artificial Sequence
  Description of Artificial Sequence: Synthetic oligonucleotide
  Antisense strand to SEQ ID NO: 284536
uauucuaggguuuacagcu

SEQ ID NO: 284538 - RNA, 19 nt, Artificial Sequence
  Description of Artificial Sequence: Synthetic oligonucleotide
  Sense strand starting at position 2122 of SEQ ID NO: 3658
cagauuaugugagcagaga

SEQ ID NO: 284539 - RNA, 19 nt, Artificial Sequence
  Description of Artificial Sequence: Synthetic oligonucleotide
  Antisense strand to SEQ ID NO: 284538
ucucugcucacauaaucug

SEQ ID NO: 284540 - RNA, 19 nt, Artificial Sequence
  Description of Artificial Sequence: Synthetic oligonucleotide
  Sense strand starting at position 2141 of SEQ ID NO: 3658
uuuaaauagguggguagau

SEQ ID NO: 284541 - RNA, 19 nt, Artificial Sequence
  Description of Artificial Sequence: Synthetic oligonucleotide
  Antisense strand to SEQ ID NO: 284540
aucuacccaccuauuuaaa

SEQ ID NO: 284542 - RNA, 19 nt, Artificial Sequence
  Description of Artificial Sequence: Synthetic oligonucleotide
  Sense strand starting at position 2239 of SEQ ID NO: 3658
aauagcugggagugugaau

SEQ ID NO: 284543 - RNA, 19 nt, Artificial Sequence
  Description of Artificial Sequence: Synthetic oligonucleotide
  Antisense strand to SEQ ID NO: 284542
auucacacucccagcuauu

SEQ ID NO: 284544 - RNA, 19 nt, Artificial Sequence
  Description of Artificial Sequence: Synthetic oligonucleotide
  Sense strand starting at position 2287 of SEQ ID NO: 3658
ucugaauuagguuguauac

SEQ ID NO: 284545 - RNA, 19 nt, Artificial Sequence
  Description of Artificial Sequence: Synthetic oligonucleotide
  Antisense strand to SEQ ID NO: 284544
guauacaaccuaauucaga

SEQ ID NO: 284546 - RNA, 19 nt, Artificial Sequence
  Description of Artificial Sequence: Synthetic oligonucleotide
  Sense strand starting at position 2296 of SEQ ID NO: 3658
gguuguauacccgaaauuc

SEQ ID NO: 284547 - RNA, 19 nt, Artificial Sequence
  Description of Artificial Sequence: Synthetic oligonucleotide
  Antisense strand to SEQ ID NO: 284546
gaauuucggguauacaacc

SEQ ID NO: 284548 - RNA, 19 nt, Artificial Sequence
  Description of Artificial Sequence: Synthetic oligonucleotide
  Sense strand starting at position 2433 of SEQ ID NO: 3658
gauuucugggcucgcaaau

SEQ ID NO: 284549 - RNA, 19 nt, Artificial Sequence
  Description of Artificial Sequence: Synthetic oligonucleotide
  Antisense strand to SEQ ID NO: 284548
auuugcgagcccagaaauc

SEQ ID NO: 284550 - RNA, 19 nt, Artificial Sequence
  Description of Artificial Sequence: Synthetic oligonucleotide
  Sense strand starting at position 2444 of SEQ ID NO: 3658
ucgcaaaugcccuauggaa

SEQ ID NO: 284551 - RNA, 19 nt, Artificial Sequence
  Description of Artificial Sequence: Synthetic oligonucleotide
  Antisense strand to SEQ ID NO: 284550
uuccauagggcauuugcga

SEQ ID NO: 284552 - RNA, 19 nt, Artificial Sequence
  Description of Artificial Sequence: Synthetic oligonucleotide
  Sense strand starting at position 2446 of SEQ ID NO: 3658
gcaaaugcccuauggaaga

SEQ ID NO: 284553 - RNA, 19 nt, Artificial Sequence
  Description of Artificial Sequence: Synthetic oligonucleotide
  Antisense strand to SEQ ID NO: 284552
ucuuccauagggcauuugc

SEQ ID NO: 284554 - RNA, 19 nt, Artificial Sequence
  Description of Artificial Sequence: Synthetic oligonucleotide
  Sense strand starting at position 2516 of SEQ ID NO: 3658
auaagaacgucuuuggauu

SEQ ID NO: 284555 - RNA, 19 nt, Artificial Sequence
  Description of Artificial Sequence: Synthetic oligonucleotide
  Antisense strand to SEQ ID NO: 284554
aauccaaagacguucuuau

SEQ ID NO: 284556 - RNA, 19 nt, Artificial Sequence
  Description of Artificial Sequence: Synthetic oligonucleotide
  Sense strand starting at position 2546 of SEQ ID NO: 3658
agaguauaugccuggaaca

SEQ ID NO: 284557 - RNA, 19 nt, Artificial Sequence
  Description of Artificial Sequence: Synthetic oligonucleotide
  Antisense strand to SEQ ID NO: 284556
uguuccaggcauauacucu

SEQ ID NO: 284558 - RNA, 19 nt, Artificial Sequence
  Description of Artificial Sequence: Synthetic oligonucleotide
  Sense strand starting at position 2547 of SEQ ID NO: 3658
gaguauaugccuggaacac

SEQ ID NO: 284559 - RNA, 19 nt, Artificial Sequence
  Description of Artificial Sequence: Synthetic oligonucleotide
  Antisense strand to SEQ ID NO: 284558
guguuccaggcauauacuc

SEQ ID NO: 284560 - RNA, 19 nt, Artificial Sequence
  Description of Artificial Sequence: Synthetic oligonucleotide
  Sense strand starting at position 2548 of SEQ ID NO: 3658
aguauaugccuggaacaca

SEQ ID NO: 284561 - RNA, 19 nt, Artificial Sequence
  Description of Artificial Sequence: Synthetic oligonucleotide
  Antisense strand to SEQ ID NO: 284560
uguguuccaggcauauacu

SEQ ID NO: 284562 - RNA, 19 nt, Artificial Sequence
  Description of Artificial Sequence: Synthetic oligonucleotide
  Sense strand starting at position 2568 of SEQ ID NO: 3658
aaaguauccuguuuggaug

SEQ ID NO: 284563 - RNA, 19 nt, Artificial Sequence
  Description of Artificial Sequence: Synthetic oligonucleotide
  Antisense strand to SEQ ID NO: 284562
cauccaaacaggauacuuu

SEQ ID NO: 284564 - RNA, 19 nt, Artificial Sequence
  Description of Artificial Sequence: Synthetic oligonucleotide
  Sense strand starting at position 2658 of SEQ ID NO: 3658
ucagguguuagugaauauu

SEQ ID NO: 284565 - RNA, 19 nt, Artificial Sequence
  Description of Artificial Sequence: Synthetic oligonucleotide
  Antisense strand to SEQ ID NO: 284564
aauauucacuaacaccuga

SEQ ID NO: 284566 - RNA, 19 nt, Artificial Sequence
  Description of Artificial Sequence: Synthetic oligonucleotide
  Sense strand starting at position 2661 of SEQ ID NO: 3658
gguguuagugaauauuaua

SEQ ID NO: 284567 - RNA, 19 nt, Artificial Sequence
  Description of Artificial Sequence: Synthetic oligonucleotide
  Antisense strand to SEQ ID NO: 284566
uauaauauucacuaacacc

SEQ ID NO: 284568 - RNA, 19 nt, Artificial Sequence
  Description of Artificial Sequence: Synthetic oligonucleotide
  Sense strand starting at position 2722 of SEQ ID NO: 3658
agagaaagccuugguacuu

SEQ ID NO: 284569 - RNA, 19 nt, Artificial Sequence
  Description of Artificial Sequence: Synthetic oligonucleotide
  Antisense strand to SEQ ID NO: 284568
aaguaccaaggcuuucucu

SEQ ID NO: 284570 - RNA, 19 nt, Artificial Sequence
  Description of Artificial Sequence: Synthetic oligonucleotide
  Sense strand starting at position 2723 of SEQ ID NO: 3658
gagaaagccuugguacuua

SEQ ID NO: 284571 - RNA, 19 nt, Artificial Sequence
  Description of Artificial Sequence: Synthetic oligonucleotide
  Antisense strand to SEQ ID NO: 284570
uaaguaccaaggcuuucuc

SEQ ID NO: 284572 - RNA, 19 nt, Artificial Sequence
  Description of Artificial Sequence: Synthetic oligonucleotide
  Sense strand starting at position 2807 of SEQ ID NO: 3658
auugguauaacugggaacu

SEQ ID NO: 284573 - RNA, 19 nt, Artificial Sequence
  Description of Artificial Sequence: Synthetic oligonucleotide
  Antisense strand to SEQ ID NO: 284572
aguucccaguuauaccaau

SEQ ID NO: 284574 - RNA, 19 nt, Artificial Sequence
  Description of Artificial Sequence: Synthetic oligonucleotide
  Sense strand starting at position 2808 of SEQ ID NO: 3658
uugguauaacugggaacua

SEQ ID NO: 284575 - RNA, 19 nt, Artificial Sequence
  Description of Artificial Sequence: Synthetic oligonucleotide
  Antisense strand to SEQ ID NO: 284574
uaguucccaguuauaccaa

SEQ ID NO: 284576 - RNA, 19 nt, Artificial Sequence
  Description of Artificial Sequence: Synthetic oligonucleotide
  Sense strand starting at position 2844 of SEQ ID NO: 3658
ccagcucauccaggagaca

SEQ ID NO: 284577 - RNA, 19 nt, Artificial Sequence
  Description of Artificial Sequence: Synthetic oligonucleotide
  Antisense strand to SEQ ID NO: 284576
ugucuccuggaugagcugg

SEQ ID NO: 284578 - RNA, 19 nt, Artificial Sequence
  Description of Artificial Sequence: Synthetic oligonucleotide
  Sense strand starting at position 2899 of SEQ ID NO: 3658
cugaaauuguagcuaauua

SEQ ID NO: 284579 - RNA, 19 nt, Artificial Sequence
  Description of Artificial Sequence: Synthetic oligonucleotide
  Antisense strand to SEQ ID NO: 284578
uaauuagcuacaauuucag

SEQ ID NO: 284580 - RNA, 19 nt, Artificial Sequence
  Description of Artificial Sequence: Synthetic oligonucleotide
  Sense strand starting at position 2912 of SEQ ID NO: 3658
uaauuauugcuagaugugu

SEQ ID NO: 284581 - RNA, 19 nt, Artificial Sequence
  Description of Artificial Sequence: Synthetic oligonucleotide
  Antisense strand to SEQ ID NO: 284580
acacaucuagcaauaauua

SEQ ID NO: 284582 - RNA, 19 nt, Artificial Sequence
  Description of Artificial Sequence: Synthetic oligonucleotide
  Sense strand starting at position 2927 of SEQ ID NO: 3658
guguaaauguauucuacaa

SEQ ID NO: 284583 - RNA, 19 nt, Artificial Sequence
  Description of Artificial Sequence: Synthetic oligonucleotide
  Antisense strand to SEQ ID NO: 284582
uuguagaauacauuuacac

SEQ ID NO: 284584 - RNA, 19 nt, Artificial Sequence
  Description of Artificial Sequence: Synthetic oligonucleotide
  Sense strand starting at position 2973 of SEQ ID NO: 3658
cuugaaagcuuauugcaaa

SEQ ID NO: 284585 - RNA, 19 nt, Artificial Sequence
  Description of Artificial Sequence: Synthetic oligonucleotide
  Antisense strand to SEQ ID NO: 284584
uuugcaauaagcuuucaag

SEQ ID NO: 284586 - RNA, 19 nt, Artificial Sequence
  Description of Artificial Sequence: Synthetic oligonucleotide
  Sense strand starting at position 3184 of SEQ ID NO: 3658
agaaauauagccuaguuug

SEQ ID NO: 284587 - RNA, 19 nt, Artificial Sequence
  Description of Artificial Sequence: Synthetic oligonucleotide
  Antisense strand to SEQ ID NO: 284586
caaacuaggcuauauuucu

SEQ ID NO: 284588 - RNA, 19 nt, Artificial Sequence
  Description of Artificial Sequence: Synthetic oligonucleotide
  Sense strand starting at position 3416 of SEQ ID NO: 3658
ucacuuacccagugaucac

SEQ ID NO: 284589 - RNA, 19 nt, Artificial Sequence
  Description of Artificial Sequence: Synthetic oligonucleotide
  Antisense strand to SEQ ID NO: 284588
gugaucacuggguaaguga

SEQ ID NO: 284590 - RNA, 19 nt, Artificial Sequence
  Description of Artificial Sequence: Synthetic oligonucleotide
  Sense strand starting at position 3493 of SEQ ID NO: 3658
ccacaacaugugggagauu

SEQ ID NO: 284591 - RNA, 19 nt, Artificial Sequence
  Description of Artificial Sequence: Synthetic oligonucleotide
  Antisense strand to SEQ ID NO: 284590
aaucucccacauguugugg

SEQ ID NO: 284592 - RNA, 19 nt, Artificial Sequence
  Description of Artificial Sequence: Synthetic oligonucleotide
  Sense strand starting at position 3502 of SEQ ID NO: 3658
gugggagauuuggaaagca

SEQ ID NO: 284593 - RNA, 19 nt, Artificial Sequence
  Description of Artificial Sequence: Synthetic oligonucleotide
  Antisense strand to SEQ ID NO: 284592
ugcuuuccaaaucucccac

SEQ ID NO: 284594 - RNA, 19 nt, Artificial Sequence
  Description of Artificial Sequence: Synthetic oligonucleotide
  Sense strand starting at position 3559 of SEQ ID NO: 3658
augcucaaagcugaaauau

SEQ ID NO: 284595 - RNA, 19 nt, Artificial Sequence
  Description of Artificial Sequence: Synthetic oligonucleotide
  Antisense strand to SEQ ID NO: 284594
auauuucagcuuugagcau

SEQ ID NO: 284596 - RNA, 19 nt, Artificial Sequence
  Description of Artificial Sequence: Synthetic oligonucleotide
  Sense strand starting at position 126 of SEQ ID NO: 3659
cagugaagcuuugugagga

SEQ ID NO: 284597 - RNA, 19 nt, Artificial Sequence
  Description of Artificial Sequence: Synthetic oligonucleotide
  Antisense strand to SEQ ID NO: 284596
uccucacaaagcuucacug

SEQ ID NO: 284598 - RNA, 19 nt, Artificial Sequence
  Description of Artificial Sequence: Synthetic oligonucleotide
  Sense strand starting at position 1208 of SEQ ID NO: 3659
agcagcuaagagugagaaa

SEQ ID NO: 284599 - RNA, 19 nt, Artificial Sequence
  Description of Artificial Sequence: Synthetic oligonucleotide
  Antisense strand to SEQ ID NO: 284598
uuucucacucuuagcugcu

SEQ ID NO: 284600 - RNA, 19 nt, Artificial Sequence
  Description of Artificial Sequence: Synthetic oligonucleotide
  Sense strand starting at position 1366 of SEQ ID NO: 3659
gggagcuuaaguuaauggu

SEQ ID NO: 284601 - RNA, 19 nt, Artificial Sequence
  Description of Artificial Sequence: Synthetic oligonucleotide
  Antisense strand to SEQ ID NO: 284600
accauuaacuuaagcuccc

SEQ ID NO: 284602 - RNA, 19 nt, Artificial Sequence
  Description of Artificial Sequence: Synthetic oligonucleotide
  Sense strand starting at position 1372 of SEQ ID NO: 3659
uuaaguuaauggucacaca

SEQ ID NO: 284603 - RNA, 19 nt, Artificial Sequence
  Description of Artificial Sequence: Synthetic oligonucleotide
  Antisense strand to SEQ ID NO: 284602
ugugugaccauuaacuuaa

SEQ ID NO: 284604 - RNA, 19 nt, Artificial Sequence
  Description of Artificial Sequence: Synthetic oligonucleotide
  Sense strand starting at position 1410 of SEQ ID NO: 3659
gggagucuaagagguuauc

SEQ ID NO: 284605 - RNA, 19 nt, Artificial Sequence
  Description of Artificial Sequence: Synthetic oligonucleotide
  Antisense strand to SEQ ID NO: 284604
gauaaccucuuagacuccc

SEQ ID NO: 284606 - RNA, 19 nt, Artificial Sequence
  Description of Artificial Sequence: Synthetic oligonucleotide
  Sense strand starting at position 1413 of SEQ ID NO: 3659
agucuaagagguuaucucu

SEQ ID NO: 284607 - RNA, 19 nt, Artificial Sequence
  Description of Artificial Sequence: Synthetic oligonucleotide
  Antisense strand to SEQ ID NO: 284606
agagauaaccucuuagacu

SEQ ID NO: 284608 - RNA, 19 nt, Artificial Sequence
  Description of Artificial Sequence: Synthetic oligonucleotide
  Sense strand starting at position 1419 of SEQ ID NO: 3659
agagguuaucucuaccuac

SEQ ID NO: 284609 - RNA, 19 nt, Artificial Sequence
  Description of Artificial Sequence: Synthetic oligonucleotide
  Antisense strand to SEQ ID NO: 284608
guagguagagauaaccucu

SEQ ID NO: 284610 - RNA, 19 nt, Artificial Sequence
  Description of Artificial Sequence: Synthetic oligonucleotide
  Sense strand starting at position 1422 of SEQ ID NO: 3659
gguuaucucuaccuacaca

SEQ ID NO: 284611 - RNA, 19 nt, Artificial Sequence
  Description of Artificial Sequence: Synthetic oligonucleotide
  Antisense strand to SEQ ID NO: 284610
uguguagguagagauaacc

SEQ ID NO: 284612 - RNA, 19 nt, Artificial Sequence
  Description of Artificial Sequence: Synthetic oligonucleotide
  Sense strand starting at position 1592 of SEQ ID NO: 3659
acaauaucuguuggagauu

SEQ ID NO: 284613 - RNA, 19 nt, Artificial Sequence
  Description of Artificial Sequence: Synthetic oligonucleotide
  Antisense strand to SEQ ID NO: 284612
aaucuccaacagauauugu

SEQ ID NO: 284614 - RNA, 19 nt, Artificial Sequence
  Description of Artificial Sequence: Synthetic oligonucleotide
  Sense strand starting at position 1604 of SEQ ID NO: 3659
ggagauuacuaacuacugu

SEQ ID NO: 284615 - RNA, 19 nt, Artificial Sequence
  Description of Artificial Sequence: Synthetic oligonucleotide
  Antisense strand to SEQ ID NO: 284614
acaguaguuaguaaucucc

SEQ ID NO: 284616 - RNA, 19 nt, Artificial Sequence
  Description of Artificial Sequence: Synthetic oligonucleotide
  Sense strand starting at position 1722 of SEQ ID NO: 3659
ucaagugaauaucuggaca

SEQ ID NO: 284617 - RNA, 19 nt, Artificial Sequence
  Description of Artificial Sequence: Synthetic oligonucleotide
  Antisense strand to SEQ ID NO: 284616
uguccagauauucacuuga

SEQ ID NO: 284618 - RNA, 19 nt, Artificial Sequence
  Description of Artificial Sequence: Synthetic oligonucleotide
  Sense strand starting at position 1782 of SEQ ID NO: 3659
uaaagcuucguuuaugaau

SEQ ID NO: 284619 - RNA, 19 nt, Artificial Sequence
  Description of Artificial Sequence: Synthetic oligonucleotide
  Antisense strand to SEQ ID NO: 284618
auucauaaacgaagcuuua

SEQ ID NO: 284620 - RNA, 19 nt, Artificial Sequence
  Description of Artificial Sequence: Synthetic oligonucleotide
  Sense strand starting at position 2053 of SEQ ID NO: 3659
agaacuguucuguagcuca

SEQ ID NO: 284621 - RNA, 19 nt, Artificial Sequence
  Description of Artificial Sequence: Synthetic oligonucleotide
  Antisense strand to SEQ ID NO: 284620
ugagcuacagaacaguucu

SEQ ID NO: 284622 - RNA, 19 nt, Artificial Sequence
  Description of Artificial Sequence: Synthetic oligonucleotide
  Sense strand starting at position 2353 of SEQ ID NO: 3659
uagagacuuuggccuaaag

SEQ ID NO: 284623 - RNA, 19 nt, Artificial Sequence
  Description of Artificial Sequence: Synthetic oligonucleotide
  Antisense strand to SEQ ID NO: 284622
cuuuaggccaaagucucua

SEQ ID NO: 284624 - RNA, 19 nt, Artificial Sequence
  Description of Artificial Sequence: Synthetic oligonucleotide
  Sense strand starting at position 2444 of SEQ ID NO: 3659
ucaccuuggcaguaaagua

SEQ ID NO: 284625 - RNA, 19 nt, Artificial Sequence
  Description of Artificial Sequence: Synthetic oligonucleotide
  Antisense strand to SEQ ID NO: 284624
uacuuuacugccaagguga

SEQ ID NO: 284626 - RNA, 19 nt, Artificial Sequence
  Description of Artificial Sequence: Synthetic oligonucleotide
  Sense strand starting at position 2548 of SEQ ID NO: 3659
accuaaaugcaagguuaau

SEQ ID NO: 284627 - RNA, 19 nt, Artificial Sequence
  Description of Artificial Sequence: Synthetic oligonucleotide
  Antisense strand to SEQ ID NO: 284626
auuaaccuugcauuuaggu

SEQ ID NO: 284628 - RNA, 19 nt, Artificial Sequence
  Description of Artificial Sequence: Synthetic oligonucleotide
  Sense strand starting at position 2633 of SEQ ID NO: 3659
agguauacguguaugugua

SEQ ID NO: 284629 - RNA, 19 nt, Artificial Sequence
  Description of Artificial Sequence: Synthetic oligonucleotide
  Antisense strand to SEQ ID NO: 284628
uacacauacacguauaccu

SEQ ID NO: 284630 - RNA, 19 nt, Artificial Sequence
  Description of Artificial Sequence: Synthetic oligonucleotide
  Sense strand starting at position 2646 of SEQ ID NO: 3659
uguguauacuuaccuauga

SEQ ID NO: 284631 - RNA, 19 nt, Artificial Sequence
  Description of Artificial Sequence: Synthetic oligonucleotide
  Antisense strand to SEQ ID NO: 284630
ucauagguaaguauacaca

SEQ ID NO: 284632 - RNA, 19 nt, Artificial Sequence
  Description of Artificial Sequence: Synthetic oligonucleotide
  Sense strand starting at position 2764 of SEQ ID NO: 3659
gcaggaaacccuugaacaa

SEQ ID NO: 284633 - RNA, 19 nt, Artificial Sequence
  Description of Artificial Sequence: Synthetic oligonucleotide
  Antisense strand to SEQ ID NO: 284632
uuguucaaggguuuccugc

SEQ ID NO: 284634 - RNA, 19 nt, Artificial Sequence
  Description of Artificial Sequence: Synthetic oligonucleotide
  Sense strand starting at position 2798 of SEQ ID NO: 3659
cccaaagcucucuaacguu

SEQ ID NO: 284635 - RNA, 19 nt, Artificial Sequence
  Description of Artificial Sequence: Synthetic oligonucleotide
  Antisense strand to SEQ ID NO: 284634
aacguuagagagcuuuggg

SEQ ID NO: 284636 - RNA, 19 nt, Artificial Sequence
  Description of Artificial Sequence: Synthetic oligonucleotide
  Sense strand starting at position 2818 of SEQ ID NO: 3659
accauacaauggucggauu

SEQ ID NO: 284637 - RNA, 19 nt, Artificial Sequence
  Description of Artificial Sequence: Synthetic oligonucleotide
  Antisense strand to SEQ ID NO: 284636
aauccgaccauuguauggu

SEQ ID NO: 284638 - RNA, 19 nt, Artificial Sequence
  Description of Artificial Sequence: Synthetic oligonucleotide
  Sense strand starting at position 2872 of SEQ ID NO: 3659
aguaaucucuuacuguauc

SEQ ID NO: 284639 - RNA, 19 nt, Artificial Sequence
  Description of Artificial Sequence: Synthetic oligonucleotide
  Antisense strand to SEQ ID NO: 284638
gauacaguaagagauuacu

SEQ ID NO: 284640 - RNA, 19 nt, Artificial Sequence
  Description of Artificial Sequence: Synthetic oligonucleotide
  Sense strand starting at position 2910 of SEQ ID NO: 3659
augagauucguggguuaga

SEQ ID NO: 284641 - RNA, 19 nt, Artificial Sequence
  Description of Artificial Sequence: Synthetic oligonucleotide
  Antisense strand to SEQ ID NO: 284640
ucuaacccacgaaucucau

SEQ ID NO: 284642 - RNA, 19 nt, Artificial Sequence
  Description of Artificial Sequence: Synthetic oligonucleotide
  Sense strand starting at position 2911 of SEQ ID NO: 3659
ugagauucguggguuagag

SEQ ID NO: 284643 - RNA, 19 nt, Artificial Sequence
  Description of Artificial Sequence: Synthetic oligonucleotide
  Antisense strand to SEQ ID NO: 284642
cucuaacccacgaaucuca

SEQ ID NO: 284644 - RNA, 19 nt, Artificial Sequence
  Description of Artificial Sequence: Synthetic oligonucleotide
  Sense strand starting at position 2935 of SEQ ID NO: 3659
agacuuauguuacuuacag

SEQ ID NO: 284645 - RNA, 19 nt, Artificial Sequence
  Description of Artificial Sequence: Synthetic oligonucleotide
  Antisense strand to SEQ ID NO: 284644
cuguaaguaacauaagucu

SEQ ID NO: 284646 - RNA, 19 nt, Artificial Sequence
  Description of Artificial Sequence: Synthetic oligonucleotide
  Sense strand starting at position 2966 of SEQ ID NO: 3659
gcauaaucaccaggacauu

SEQ ID NO: 284647 - RNA, 19 nt, Artificial Sequence
  Description of Artificial Sequence: Synthetic oligonucleotide
  Antisense strand to SEQ ID NO: 284646
aauguccuggugauuaugc

SEQ ID NO: 284648 - RNA, 19 nt, Artificial Sequence
  Description of Artificial Sequence: Synthetic oligonucleotide
  Sense strand starting at position 2975 of SEQ ID NO: 3659
ccaggacauuuacaucagu

SEQ ID NO: 284649 - RNA, 19 nt, Artificial Sequence
  Description of Artificial Sequence: Synthetic oligonucleotide
  Antisense strand to SEQ ID NO: 284648
acugauguaaauguccugg

SEQ ID NO: 284650 - RNA, 19 nt, Artificial Sequence
  Description of Artificial Sequence: Synthetic oligonucleotide
  Sense strand starting at position 3059 of SEQ ID NO: 3659
gauuguguuacaggaaaga

SEQ ID NO: 284651 - RNA, 19 nt, Artificial Sequence
  Description of Artificial Sequence: Synthetic oligonucleotide
  Antisense strand to SEQ ID NO: 284650
ucuuuccuguaacacaauc

SEQ ID NO: 284652 - RNA, 19 nt, Artificial Sequence
  Description of Artificial Sequence: Synthetic oligonucleotide
  Sense strand starting at position 3076 of SEQ ID NO: 3659
gaacgcugagcuuagauga

SEQ ID NO: 284653 - RNA, 19 nt, Artificial Sequence
  Description of Artificial Sequence: Synthetic oligonucleotide
  Antisense strand to SEQ ID NO: 284652
ucaucuaagcucagcguuc

SEQ ID NO: 284654 - RNA, 19 nt, Artificial Sequence
  Description of Artificial Sequence: Synthetic oligonucleotide
  Sense strand starting at position 3083 of SEQ ID NO: 3659
gagcuuagaugaucuacca

SEQ ID NO: 284655 - RNA, 19 nt, Artificial Sequence
  Description of Artificial Sequence: Synthetic oligonucleotide
  Antisense strand to SEQ ID NO: 284654
ugguagaucaucuaagcuc

SEQ ID NO: 284656 - RNA, 19 nt, Artificial Sequence
  Description of Artificial Sequence: Synthetic oligonucleotide
  Sense strand starting at position 3174 of SEQ ID NO: 3659
caagguugcucaccagaac

SEQ ID NO: 284657 - RNA, 19 nt, Artificial Sequence
  Description of Artificial Sequence: Synthetic oligonucleotide
  Antisense strand to SEQ ID NO: 284656
guucuggugagcaaccuug

SEQ ID NO: 284658 - RNA, 19 nt, Artificial Sequence
  Description of Artificial Sequence: Synthetic oligonucleotide
  Sense strand starting at position 3213 of SEQ ID NO: 3659
aagaaugaucagggccuua

SEQ ID NO: 284659 - RNA, 19 nt, Artificial Sequence
  Description of Artificial Sequence: Synthetic oligonucleotide
  Antisense strand to SEQ ID NO: 284658
uaaggcccugaucauucuu

SEQ ID NO: 284660 - RNA, 19 nt, Artificial Sequence
  Description of Artificial Sequence: Synthetic oligonucleotide
  Sense strand starting at position 3395 of SEQ ID NO: 3659
ugcacauugcaagaacaua

SEQ ID NO: 284661 - RNA, 19 nt, Artificial Sequence
  Description of Artificial Sequence: Synthetic oligonucleotide
  Antisense strand to SEQ ID NO: 284660
uauguucuugcaaugugca

SEQ ID NO: 284662 - RNA, 19 nt, Artificial Sequence
  Description of Artificial Sequence: Synthetic oligonucleotide
  Sense strand starting at position 3414 of SEQ ID NO: 3659
auacguaaugcuuauaaag

SEQ ID NO: 284663 - RNA, 19 nt, Artificial Sequence
  Description of Artificial Sequence: Synthetic oligonucleotide
  Antisense strand to SEQ ID NO: 284662
cuuuauaagcauuacguau

SEQ ID NO: 284664 - RNA, 19 nt, Artificial Sequence
  Description of Artificial Sequence: Synthetic oligonucleotide
  Sense strand starting at position 3505 of SEQ ID NO: 3659
agaagcaucugcucacuga

SEQ ID NO: 284665 - RNA, 19 nt, Artificial Sequence
  Description of Artificial Sequence: Synthetic oligonucleotide
  Antisense strand to SEQ ID NO: 284664
ucagugagcagaugcuucu

SEQ ID NO: 284666 - RNA, 19 nt, Artificial Sequence
  Description of Artificial Sequence: Synthetic oligonucleotide
  Sense strand starting at position 3631 of SEQ ID NO: 3659
gcaaaucuaugauuaugca

SEQ ID NO: 284667 - RNA, 19 nt, Artificial Sequence
  Description of Artificial Sequence: Synthetic oligonucleotide
  Antisense strand to SEQ ID NO: 284666
ugcauaaucauagauuugc

SEQ ID NO: 284668 - RNA, 19 nt, Artificial Sequence
  Description of Artificial Sequence: Synthetic oligonucleotide
  Sense strand starting at position 3635 of SEQ ID NO: 3659
aucuaugauuaugcagaca

SEQ ID NO: 284669 - RNA, 19 nt, Artificial Sequence
  Description of Artificial Sequence: Synthetic oligonucleotide
  Antisense strand to SEQ ID NO: 284668
ugucugcauaaucauagau

SEQ ID NO: 284670 - RNA, 19 nt, Artificial Sequence
  Description of Artificial Sequence: Synthetic oligonucleotide
  Sense strand starting at position 3703 of SEQ ID NO: 3659
uccagaucugcucagacau

SEQ ID NO: 284671 - RNA, 19 nt, Artificial Sequence
  Description of Artificial Sequence: Synthetic oligonucleotide
  Antisense strand to SEQ ID NO: 284670
augucugagcagaucugga

SEQ ID NO: 284672 - RNA, 19 nt, Artificial Sequence
  Description of Artificial Sequence: Synthetic oligonucleotide
  Sense strand starting at position 3764 of SEQ ID NO: 3659
ugauuaauaucguucuagg

SEQ ID NO: 284673 - RNA, 19 nt, Artificial Sequence
  Description of Artificial Sequence: Synthetic oligonucleotide
  Antisense strand to SEQ ID NO: 284672
ccuagaacgauauuaauca

SEQ ID NO: 284674 - RNA, 19 nt, Artificial Sequence
  Description of Artificial Sequence: Synthetic oligonucleotide
  Sense strand starting at position 3802 of SEQ ID NO: 3659
ucuaaaugucugcaaauug

SEQ ID NO: 284675 - RNA, 19 nt, Artificial Sequence
  Description of Artificial Sequence: Synthetic oligonucleotide
  Antisense strand to SEQ ID NO: 284674
caauuugcagacauuuaga

SEQ ID NO: 284676 - RNA, 19 nt, Artificial Sequence
  Description of Artificial Sequence: Synthetic oligonucleotide
  Sense strand starting at position 17 of SEQ ID NO: 3660
uaggaaagcccucgauucu

SEQ ID NO: 284677 - RNA, 19 nt, Artificial Sequence
  Description of Artificial Sequence: Synthetic oligonucleotide
  Antisense strand to SEQ ID NO: 284676
agaaucgagggcuuuccua

SEQ ID NO: 284678 - RNA, 19 nt, Artificial Sequence
  Description of Artificial Sequence: Synthetic oligonucleotide
  Sense strand starting at position 18 of SEQ ID NO: 3660
aggaaagcccucgauucua

SEQ ID NO: 284679 - RNA, 19 nt, Artificial Sequence
  Description of Artificial Sequence: Synthetic oligonucleotide
  Antisense strand to SEQ ID NO: 284678
uagaaucgagggcuuuccu

SEQ ID NO: 284680 - RNA, 19 nt, Artificial Sequence
  Description of Artificial Sequence: Synthetic oligonucleotide
  Sense strand starting at position 152 of SEQ ID NO: 3660
cgccacgucagucaaauuu

SEQ ID NO: 284681 - RNA, 19 nt, Artificial Sequence
  Description of Artificial Sequence: Synthetic oligonucleotide
  Antisense strand to SEQ ID NO: 284680
aaauuugacugacguggcg

SEQ ID NO: 284682 - RNA, 19 nt, Artificial Sequence
  Description of Artificial Sequence: Synthetic oligonucleotide
  Sense strand starting at position 218 of SEQ ID NO: 3660
uugcaacuccuaugagaau

SEQ ID NO: 284683 - RNA, 19 nt, Artificial Sequence
  Description of Artificial Sequence: Synthetic oligonucleotide
  Antisense strand to SEQ ID NO: 284682
auucucauaggaguugcaa

SEQ ID NO: 284684 - RNA, 19 nt, Artificial Sequence
  Description of Artificial Sequence: Synthetic oligonucleotide
  Sense strand starting at position 219 of SEQ ID NO: 3660
ugcaacuccuaugagaauu

SEQ ID NO: 284685 - RNA, 19 nt, Artificial Sequence
  Description of Artificial Sequence: Synthetic oligonucleotide
  Antisense strand to SEQ ID NO: 284684
aauucucauaggaguugca

SEQ ID NO: 284686 - RNA, 19 nt, Artificial Sequence
  Description of Artificial Sequence: Synthetic oligonucleotide
  Sense strand starting at position 594 of SEQ ID NO: 3660
aaggaaucaucgcugugac

SEQ ID NO: 284687 - RNA, 19 nt, Artificial Sequence
  Description of Artificial Sequence: Synthetic oligonucleotide
  Antisense strand to SEQ ID NO: 284686
gucacagcgaugauuccuu

SEQ ID NO: 284688 - RNA, 19 nt, Artificial Sequence
  Description of Artificial Sequence: Synthetic oligonucleotide
  Sense strand starting at position 595 of SEQ ID NO: 3660
aggaaucaucgcugugacu

SEQ ID NO: 284689 - RNA, 19 nt, Artificial Sequence
  Description of Artificial Sequence: Synthetic oligonucleotide
  Antisense strand to SEQ ID NO: 284688
agucacagcgaugauuccu

SEQ ID NO: 284690 - RNA, 19 nt, Artificial Sequence
  Description of Artificial Sequence: Synthetic oligonucleotide
  Sense strand starting at position 597 of SEQ ID NO: 3660
gaaucaucgcugugacuuc

SEQ ID NO: 284691 - RNA, 19 nt, Artificial Sequence
  Description of Artificial Sequence: Synthetic oligonucleotide
  Antisense strand to SEQ ID NO: 284690
gaagucacagcgaugauuc

SEQ ID NO: 284692 - RNA, 19 nt, Artificial Sequence
  Description of Artificial Sequence: Synthetic oligonucleotide
  Sense strand starting at position 692 of SEQ ID NO: 3660
ugaaacaccuucuauagga

SEQ ID NO: 284693 - RNA, 19 nt, Artificial Sequence
  Description of Artificial Sequence: Synthetic oligonucleotide
  Antisense strand to SEQ ID NO: 284692
uccuauagaagguguuuca

SEQ ID NO: 284694 - RNA, 19 nt, Artificial Sequence
  Description of Artificial Sequence: Synthetic oligonucleotide
  Sense strand starting at position 769 of SEQ ID NO: 3660
acaauuuacuugggcaaau

SEQ ID NO: 284695 - RNA, 19 nt, Artificial Sequence
  Description of Artificial Sequence: Synthetic oligonucleotide
  Antisense strand to SEQ ID NO: 284694
auuugcccaaguaaauugu

SEQ ID NO: 284696 - RNA, 19 nt, Artificial Sequence
  Description of Artificial Sequence: Synthetic oligonucleotide
  Sense strand starting at position 840 of SEQ ID NO: 3660
guugaauugagcugguuuc

SEQ ID NO: 284697 - RNA, 19 nt, Artificial Sequence
  Description of Artificial Sequence: Synthetic oligonucleotide
  Antisense strand to SEQ ID NO: 284696
gaaaccagcucaauucaac

SEQ ID NO: 284698 - RNA, 19 nt, Artificial Sequence
  Description of Artificial Sequence: Synthetic oligonucleotide
  Sense strand starting at position 850 of SEQ ID NO: 3660
gcugguuuccaaggaacca

SEQ ID NO: 284699 - RNA, 19 nt, Artificial Sequence
  Description of Artificial Sequence: Synthetic oligonucleotide
  Antisense strand to SEQ ID NO: 284698
ugguuccuuggaaaccagc

SEQ ID NO: 284700 - RNA, 19 nt, Artificial Sequence
  Description of Artificial Sequence: Synthetic oligonucleotide
  Sense strand starting at position 939 of SEQ ID NO: 3660
guuguuaacccacagcuaa

SEQ ID NO: 284701 - RNA, 19 nt, Artificial Sequence
  Description of Artificial Sequence: Synthetic oligonucleotide
  Antisense strand to SEQ ID NO: 284700
uuagcuguggguuaacaac

SEQ ID NO: 284702 - RNA, 19 nt, Artificial Sequence
  Description of Artificial Sequence: Synthetic oligonucleotide
  Sense strand starting at position 956 of SEQ ID NO: 3660
aagaauaacgcucgacuuu

SEQ ID NO: 284703 - RNA, 19 nt, Artificial Sequence
  Description of Artificial Sequence: Synthetic oligonucleotide
  Antisense strand to SEQ ID NO: 284702
aaagucgagcguuauucuu

SEQ ID NO: 284704 - RNA, 19 nt, Artificial Sequence
  Description of Artificial Sequence: Synthetic oligonucleotide
  Sense strand starting at position 1216 of SEQ ID NO: 3660
cacguuuauccggacugga

SEQ ID NO: 284705 - RNA, 19 nt, Artificial Sequence
  Description of Artificial Sequence: Synthetic oligonucleotide
  Antisense strand to SEQ ID NO: 284704
uccaguccggauaaacgug

SEQ ID NO: 284706 - RNA, 19 nt, Artificial Sequence
  Description of Artificial Sequence: Synthetic oligonucleotide
  Sense strand starting at position 1265 of SEQ ID NO: 3660
guucgcgcuccuucugaau

SEQ ID NO: 284707 - RNA, 19 nt, Artificial Sequence
  Description of Artificial Sequence: Synthetic oligonucleotide
  Antisense strand to SEQ ID NO: 284706
auucagaaggagcgcgaac

SEQ ID NO: 284708 - RNA, 19 nt, Artificial Sequence
  Description of Artificial Sequence: Synthetic oligonucleotide
  Sense strand starting at position 1298 of SEQ ID NO: 3660
cggcagguucgagguaaau

SEQ ID NO: 284709 - RNA, 19 nt, Artificial Sequence
  Description of Artificial Sequence: Synthetic oligonucleotide
  Antisense strand to SEQ ID NO: 284708
auuuaccucgaaccugccg

SEQ ID NO: 284710 - RNA, 19 nt, Artificial Sequence
  Description of Artificial Sequence: Synthetic oligonucleotide
  Sense strand starting at position 2368 of SEQ ID NO: 3660
aggcguaagccuucagcca

SEQ ID NO: 284711 - RNA, 19 nt, Artificial Sequence
  Description of Artificial Sequence: Synthetic oligonucleotide
  Antisense strand to SEQ ID NO: 284710
uggcugaaggcuuacgccu

SEQ ID NO: 284712 - RNA, 19 nt, Artificial Sequence
  Description of Artificial Sequence: Synthetic oligonucleotide
  Sense strand starting at position 2448 of SEQ ID NO: 3660
ccgagaaacgaguaguuua

SEQ ID NO: 284713 - RNA, 19 nt, Artificial Sequence
  Description of Artificial Sequence: Synthetic oligonucleotide
  Antisense strand to SEQ ID NO: 284712
uaaacuacucguuucucgg

SEQ ID NO: 284714 - RNA, 19 nt, Artificial Sequence
  Description of Artificial Sequence: Synthetic oligonucleotide
  Sense strand starting at position 2524 of SEQ ID NO: 3660
ucgcccugaucccaauuua

SEQ ID NO: 284715 - RNA, 19 nt, Artificial Sequence
  Description of Artificial Sequence: Synthetic oligonucleotide
  Antisense strand to SEQ ID NO: 284714
uaaauugggaucagggcga

SEQ ID NO: 284716 - RNA, 19 nt, Artificial Sequence
  Description of Artificial Sequence: Synthetic oligonucleotide
  Sense strand starting at position 2551 of SEQ ID NO: 3660
ccucaucgaucuuaaggga

SEQ ID NO: 284717 - RNA, 19 nt, Artificial Sequence
  Description of Artificial Sequence: Synthetic oligonucleotide
  Antisense strand to SEQ ID NO: 284716
ucccuuaagaucgaugagg

SEQ ID NO: 284718 - RNA, 19 nt, Artificial Sequence
  Description of Artificial Sequence: Synthetic oligonucleotide
  Sense strand starting at position 2554 of SEQ ID NO: 3660
caucgaucuuaagggaaag

SEQ ID NO: 284719 - RNA, 19 nt, Artificial Sequence
  Description of Artificial Sequence: Synthetic oligonucleotide
  Antisense strand to SEQ ID NO: 284718
cuuucccuuaagaucgaug

SEQ ID NO: 284720 - RNA, 19 nt, Artificial Sequence
  Description of Artificial Sequence: Synthetic oligonucleotide
  Sense strand starting at position 2604 of SEQ ID NO: 3660
gauccaucucccgggaaug

SEQ ID NO: 284721 - RNA, 19 nt, Artificial Sequence
  Description of Artificial Sequence: Synthetic oligonucleotide
  Antisense strand to SEQ ID NO: 284720
cauucccgggagauggauc

SEQ ID NO: 284722 - RNA, 19 nt, Artificial Sequence
  Description of Artificial Sequence: Synthetic oligonucleotide
  Sense strand starting at position 2605 of SEQ ID NO: 3660
auccaucucccgggaauga

SEQ ID NO: 284723 - RNA, 19 nt, Artificial Sequence
  Description of Artificial Sequence: Synthetic oligonucleotide
  Antisense strand to SEQ ID NO: 284722
ucauucccgggagauggau

SEQ ID NO: 284724 - RNA, 19 nt, Artificial Sequence
  Description of Artificial Sequence: Synthetic oligonucleotide
  Sense strand starting at position 2669 of SEQ ID NO: 3660
ggucccuaaugggaauuaa

SEQ ID NO: 284725 - RNA, 19 nt, Artificial Sequence
  Description of Artificial Sequence: Synthetic oligonucleotide
  Antisense strand to SEQ ID NO: 284724
uuaauucccauuagggacc

SEQ ID NO: 284726 - RNA, 19 nt, Artificial Sequence
  Description of Artificial Sequence: Synthetic oligonucleotide
  Sense strand starting at position 2927 of SEQ ID NO: 3660
ggcccuugcucccuaggaa

SEQ ID NO: 284727 - RNA, 19 nt, Artificial Sequence
  Description of Artificial Sequence: Synthetic oligonucleotide
  Antisense strand to SEQ ID NO: 284726
uuccuagggagcaagggcc

SEQ ID NO: 284728 - RNA, 19 nt, Artificial Sequence
  Description of Artificial Sequence: Synthetic oligonucleotide
  Sense strand starting at position 2981 of SEQ ID NO: 3660
ucggguaaauccuucccau

SEQ ID NO: 284729 - RNA, 19 nt, Artificial Sequence
  Description of Artificial Sequence: Synthetic oligonucleotide
  Antisense strand to SEQ ID NO: 284728
augggaaggauuuacccga

SEQ ID NO: 284730 - RNA, 19 nt, Artificial Sequence
  Description of Artificial Sequence: Synthetic oligonucleotide
  Sense strand starting at position 3205 of SEQ ID NO: 3660
ggcugaccacacuaaugua

SEQ ID NO: 284731 - RNA, 19 nt, Artificial Sequence
  Description of Artificial Sequence: Synthetic oligonucleotide
  Antisense strand to SEQ ID NO: 284730
uacauuaguguggucagcc

SEQ ID NO: 284732 - RNA, 19 nt, Artificial Sequence
  Description of Artificial Sequence: Synthetic oligonucleotide
  Sense strand starting at position 3436 of SEQ ID NO: 3660
gccuuaacuuccguauaac

SEQ ID NO: 284733 - RNA, 19 nt, Artificial Sequence
  Description of Artificial Sequence: Synthetic oligonucleotide
  Antisense strand to SEQ ID NO: 284732
guuauacggaaguuaaggc

SEQ ID NO: 284734 - RNA, 19 nt, Artificial Sequence
  Description of Artificial Sequence: Synthetic oligonucleotide
  Sense strand starting at position 3439 of SEQ ID NO: 3660
uuaacuuccguauaacuga

SEQ ID NO: 284735 - RNA, 19 nt, Artificial Sequence
  Description of Artificial Sequence: Synthetic oligonucleotide
  Antisense strand to SEQ ID NO: 284734
ucaguuauacggaaguuaa

SEQ ID NO: 284736 - RNA, 19 nt, Artificial Sequence
  Description of Artificial Sequence: Synthetic oligonucleotide
  Sense strand starting at position 3446 of SEQ ID NO: 3660
ccguauaacugagaaauaa

SEQ ID NO: 284737 - RNA, 19 nt, Artificial Sequence
  Description of Artificial Sequence: Synthetic oligonucleotide
  Antisense strand to SEQ ID NO: 284736
uuauuucucaguuauacgg

SEQ ID NO: 284738 - RNA, 19 nt, Artificial Sequence
  Description of Artificial Sequence: Synthetic oligonucleotide
  Sense strand starting at position 3540 of SEQ ID NO: 3660
acaugauaaaggugguagu

SEQ ID NO: 284739 - RNA, 19 nt, Artificial Sequence
  Description of Artificial Sequence: Synthetic oligonucleotide
  Antisense strand to SEQ ID NO: 284738
acuaccaccuuuaucaugu

SEQ ID NO: 284740 - RNA, 19 nt, Artificial Sequence
  Description of Artificial Sequence: Synthetic oligonucleotide
  Sense strand starting at position 3541 of SEQ ID NO: 3660
caugauaaaggugguagua

SEQ ID NO: 284741 - RNA, 19 nt, Artificial Sequence
  Description of Artificial Sequence: Synthetic oligonucleotide
  Antisense strand to SEQ ID NO: 284740
uacuaccaccuuuaucaug

SEQ ID NO: 284742 - RNA, 19 nt, Artificial Sequence
  Description of Artificial Sequence: Synthetic oligonucleotide
  Sense strand starting at position 3550 of SEQ ID NO: 3660
ggugguaguagucauuauu

SEQ ID NO: 284743 - RNA, 19 nt, Artificial Sequence
  Description of Artificial Sequence: Synthetic oligonucleotide
  Antisense strand to SEQ ID NO: 284742
aauaaugacuacuaccacc

SEQ ID NO: 284744 - RNA, 19 nt, Artificial Sequence
  Description of Artificial Sequence: Synthetic oligonucleotide
  Sense strand starting at position 3553 of SEQ ID NO: 3660
gguaguagucauuauuagg

SEQ ID NO: 284745 - RNA, 19 nt, Artificial Sequence
  Description of Artificial Sequence: Synthetic oligonucleotide
  Antisense strand to SEQ ID NO: 284744
ccuaauaaugacuacuacc

SEQ ID NO: 284746 - RNA, 19 nt, Artificial Sequence
  Description of Artificial Sequence: Synthetic oligonucleotide
  Sense strand starting at position 3633 of SEQ ID NO: 3660
ggcagaugucucugauucu

SEQ ID NO: 284747 - RNA, 19 nt, Artificial Sequence
  Description of Artificial Sequence: Synthetic oligonucleotide
  Antisense strand to SEQ ID NO: 284746
agaaucagagacaucugcc

SEQ ID NO: 284748 - RNA, 19 nt, Artificial Sequence
  Description of Artificial Sequence: Synthetic oligonucleotide
  Sense strand starting at position 3707 of SEQ ID NO: 3660
cuccaaguauugcugugua

SEQ ID NO: 284749 - RNA, 19 nt, Artificial Sequence
  Description of Artificial Sequence: Synthetic oligonucleotide
  Antisense strand to SEQ ID NO: 284748
uacacagcaauacuuggag

SEQ ID NO: 284750 - RNA, 19 nt, Artificial Sequence
  Description of Artificial Sequence: Synthetic oligonucleotide
  Sense strand starting at position 3710 of SEQ ID NO: 3660
caaguauugcuguguacca

SEQ ID NO: 284751 - RNA, 19 nt, Artificial Sequence
  Description of Artificial Sequence: Synthetic oligonucleotide
  Antisense strand to SEQ ID NO: 284750
ugguacacagcaauacuug

SEQ ID NO: 284752 - RNA, 19 nt, Artificial Sequence
  Description of Artificial Sequence: Synthetic oligonucleotide
  Sense strand starting at position 3735 of SEQ ID NO: 3660
uugugaacauucucaugua

SEQ ID NO: 284753 - RNA, 19 nt, Artificial Sequence
  Description of Artificial Sequence: Synthetic oligonucleotide
  Antisense strand to SEQ ID NO: 284752
uacaugagaauguucacaa

SEQ ID NO: 284754 - RNA, 19 nt, Artificial Sequence
  Description of Artificial Sequence: Synthetic oligonucleotide
  Sense strand starting at position 3878 of SEQ ID NO: 3660
cccaaauggguuugaccua

SEQ ID NO: 284755 - RNA, 19 nt, Artificial Sequence
  Description of Artificial Sequence: Synthetic oligonucleotide
  Antisense strand to SEQ ID NO: 284754
uaggucaaacccauuuggg

SEQ ID NO: 284756 - RNA, 19 nt, Artificial Sequence
  Description of Artificial Sequence: Synthetic oligonucleotide
  Sense strand starting at position 272 of SEQ ID NO: 3661
ucagucuguucccuaauuu

SEQ ID NO: 284757 - RNA, 19 nt, Artificial Sequence
  Description of Artificial Sequence: Synthetic oligonucleotide
  Antisense strand to SEQ ID NO: 284756
aaauuagggaacagacuga

SEQ ID NO: 284758 - RNA, 19 nt, Artificial Sequence
  Description of Artificial Sequence: Synthetic oligonucleotide
  Sense strand starting at position 327 of SEQ ID NO: 3661
ccuagaggguagcuauaua

SEQ ID NO: 284759 - RNA, 19 nt, Artificial Sequence
  Description of Artificial Sequence: Synthetic oligonucleotide
  Antisense strand to SEQ ID NO: 284758
uauauagcuacccucuagg

SEQ ID NO: 284760 - RNA, 19 nt, Artificial Sequence
  Description of Artificial Sequence: Synthetic oligonucleotide
  Sense strand starting at position 353 of SEQ ID NO: 3661
ugccaucuggcauaugaaa

SEQ ID NO: 284761 - RNA, 19 nt, Artificial Sequence
  Description of Artificial Sequence: Synthetic oligonucleotide
  Antisense strand to SEQ ID NO: 284760
uuucauaugccagauggca

SEQ ID NO: 284762 - RNA, 19 nt, Artificial Sequence
  Description of Artificial Sequence: Synthetic oligonucleotide
  Sense strand starting at position 369 of SEQ ID NO: 3661
aaagccuuugaauagguua

SEQ ID NO: 284763 - RNA, 19 nt, Artificial Sequence
  Description of Artificial Sequence: Synthetic oligonucleotide
  Antisense strand to SEQ ID NO: 284762
uaaccuauucaaaggcuuu

SEQ ID NO: 284764 - RNA, 19 nt, Artificial Sequence
  Description of Artificial Sequence: Synthetic oligonucleotide
  Sense strand starting at position 522 of SEQ ID NO: 3661
cugcacucauuccuggaaa

SEQ ID NO: 284765 - RNA, 19 nt, Artificial Sequence
  Description of Artificial Sequence: Synthetic oligonucleotide
  Antisense strand to SEQ ID NO: 284764
uuuccaggaaugagugcag

SEQ ID NO: 284766 - RNA, 19 nt, Artificial Sequence
  Description of Artificial Sequence: Synthetic oligonucleotide
  Sense strand starting at position 539 of SEQ ID NO: 3661
aaagaugugcaauguuauu

SEQ ID NO: 284767 - RNA, 19 nt, Artificial Sequence
  Description of Artificial Sequence: Synthetic oligonucleotide
  Antisense strand to SEQ ID NO: 284766
aauaacauugcacaucuuu

SEQ ID NO: 284768 - RNA, 19 nt, Artificial Sequence
  Description of Artificial Sequence: Synthetic oligonucleotide
  Sense strand starting at position 544 of SEQ ID NO: 3661
ugugcaauguuauuuccuu

SEQ ID NO: 284769 - RNA, 19 nt, Artificial Sequence
  Description of Artificial Sequence: Synthetic oligonucleotide
  Antisense strand to SEQ ID NO: 284768
aaggaaauaacauugcaca

SEQ ID NO: 284770 - RNA, 19 nt, Artificial Sequence
  Description of Artificial Sequence: Synthetic oligonucleotide
  Sense strand starting at position 596 of SEQ ID NO: 3661
gauucuuaagguuggaaau

SEQ ID NO: 284771 - RNA, 19 nt, Artificial Sequence
  Description of Artificial Sequence: Synthetic oligonucleotide
  Antisense strand to SEQ ID NO: 284770
auuuccaaccuuaagaauc

SEQ ID NO: 284772 - RNA, 19 nt, Artificial Sequence
  Description of Artificial Sequence: Synthetic oligonucleotide
  Sense strand starting at position 597 of SEQ ID NO: 3661
auucuuaagguuggaaaua

SEQ ID NO: 284773 - RNA, 19 nt, Artificial Sequence
  Description of Artificial Sequence: Synthetic oligonucleotide
  Antisense strand to SEQ ID NO: 284772
uauuuccaaccuuaagaau

SEQ ID NO: 284774 - RNA, 19 nt, Artificial Sequence
  Description of Artificial Sequence: Synthetic oligonucleotide
  Sense strand starting at position 626 of SEQ ID NO: 3661
uugguaucugagggagacu

SEQ ID NO: 284775 - RNA, 19 nt, Artificial Sequence
  Description of Artificial Sequence: Synthetic oligonucleotide
  Antisense strand to SEQ ID NO: 284774
agucucccucagauaccaa

SEQ ID NO: 284776 - RNA, 19 nt, Artificial Sequence
  Description of Artificial Sequence: Synthetic oligonucleotide
  Sense strand starting at position 693 of SEQ ID NO: 3661
gcuuaaguccuuugcauaa

SEQ ID NO: 284777 - RNA, 19 nt, Artificial Sequence
  Description of Artificial Sequence: Synthetic oligonucleotide
  Antisense strand to SEQ ID NO: 284776
uuaugcaaaggacuuaagc

SEQ ID NO: 284778 - RNA, 19 nt, Artificial Sequence
  Description of Artificial Sequence: Synthetic oligonucleotide
  Sense strand starting at position 863 of SEQ ID NO: 3661
gaucuaugguuagcugaaa

SEQ ID NO: 284779 - RNA, 19 nt, Artificial Sequence
  Description of Artificial Sequence: Synthetic oligonucleotide
  Antisense strand to SEQ ID NO: 284778
uuucagcuaaccauagauc

SEQ ID NO: 284780 - RNA, 19 nt, Artificial Sequence
  Description of Artificial Sequence: Synthetic oligonucleotide
  Sense strand starting at position 931 of SEQ ID NO: 3661
agagucgcaccuuauaguu

SEQ ID NO: 284781 - RNA, 19 nt, Artificial Sequence
  Description of Artificial Sequence: Synthetic oligonucleotide
  Antisense strand to SEQ ID NO: 284780
aacuauaaggugcgacucu

SEQ ID NO: 284782 - RNA, 19 nt, Artificial Sequence
  Description of Artificial Sequence: Synthetic oligonucleotide
  Sense strand starting at position 966 of SEQ ID NO: 3661
acucuacaccuguguucua

SEQ ID NO: 284783 - RNA, 19 nt, Artificial Sequence
  Description of Artificial Sequence: Synthetic oligonucleotide
  Antisense strand to SEQ ID NO: 284782
uagaacacagguguagagu

SEQ ID NO: 284784 - RNA, 19 nt, Artificial Sequence
  Description of Artificial Sequence: Synthetic oligonucleotide
  Sense strand starting at position 1106 of SEQ ID NO: 3661
cugagaugcuucuuccuca

SEQ ID NO: 284785 - RNA, 19 nt, Artificial Sequence
  Description of Artificial Sequence: Synthetic oligonucleotide
  Antisense strand to SEQ ID NO: 284784
ugaggaagaagcaucucag

SEQ ID NO: 284786 - RNA, 19 nt, Artificial Sequence
  Description of Artificial Sequence: Synthetic oligonucleotide
  Sense strand starting at position 1107 of SEQ ID NO: 3661
ugagaugcuucuuccucaa

SEQ ID NO: 284787 - RNA, 19 nt, Artificial Sequence
  Description of Artificial Sequence: Synthetic oligonucleotide
  Antisense strand to SEQ ID NO: 284786
uugaggaagaagcaucuca

SEQ ID NO: 284788 - RNA, 19 nt, Artificial Sequence
  Description of Artificial Sequence: Synthetic oligonucleotide
  Sense strand starting at position 1158 of SEQ ID NO: 3661
uaacgaacuuugguaucuu

SEQ ID NO: 284789 - RNA, 19 nt, Artificial Sequence
  Description of Artificial Sequence: Synthetic oligonucleotide
  Antisense strand to SEQ ID NO: 284788
aagauaccaaaguucguua

SEQ ID NO: 284790 - RNA, 19 nt, Artificial Sequence
  Description of Artificial Sequence: Synthetic oligonucleotide
  Sense strand starting at position 1170 of SEQ ID NO: 3661
guaucuuguagugggaaga

SEQ ID NO: 284791 - RNA, 19 nt, Artificial Sequence
  Description of Artificial Sequence: Synthetic oligonucleotide
  Antisense strand to SEQ ID NO: 284790
ucuucccacuacaagauac

SEQ ID NO: 284792 - RNA, 19 nt, Artificial Sequence
  Description of Artificial Sequence: Synthetic oligonucleotide
  Sense strand starting at position 1185 of SEQ ID NO: 3661
aagaguucuggugguacag

SEQ ID NO: 284793 - RNA, 19 nt, Artificial Sequence
  Description of Artificial Sequence: Synthetic oligonucleotide
  Antisense strand to SEQ ID NO: 284792
cuguaccaccagaacucuu

SEQ ID NO: 284794 - RNA, 19 nt, Artificial Sequence
  Description of Artificial Sequence: Synthetic oligonucleotide
  Sense strand starting at position 1226 of SEQ ID NO: 3661
cuuucucugucaguuacau

SEQ ID NO: 284795 - RNA, 19 nt, Artificial Sequence
  Description of Artificial Sequence: Synthetic oligonucleotide
  Antisense strand to SEQ ID NO: 284794
auguaacugacagagaaag

SEQ ID NO: 284796 - RNA, 19 nt, Artificial Sequence
  Description of Artificial Sequence: Synthetic oligonucleotide
  Sense strand starting at position 1238 of SEQ ID NO: 3661
guuacaugcccugggaacu

SEQ ID NO: 284797 - RNA, 19 nt, Artificial Sequence
  Description of Artificial Sequence: Synthetic oligonucleotide
  Antisense strand to SEQ ID NO: 284796
aguucccagggcauguaac

SEQ ID NO: 284798 - RNA, 19 nt, Artificial Sequence
  Description of Artificial Sequence: Synthetic oligonucleotide
  Sense strand starting at position 1276 of SEQ ID NO: 3661
accugaaagugagaauaau

SEQ ID NO: 284799 - RNA, 19 nt, Artificial Sequence
  Description of Artificial Sequence: Synthetic oligonucleotide
  Antisense strand to SEQ ID NO: 284798
auuauucucacuuucaggu

SEQ ID NO: 284800 - RNA, 19 nt, Artificial Sequence
  Description of Artificial Sequence: Synthetic oligonucleotide
  Sense strand starting at position 1331 of SEQ ID NO: 3661
ugcaaauacuggcuuauua

SEQ ID NO: 284801 - RNA, 19 nt, Artificial Sequence
  Description of Artificial Sequence: Synthetic oligonucleotide
  Antisense strand to SEQ ID NO: 284800
uaauaagccaguauuugca

SEQ ID NO: 284802 - RNA, 19 nt, Artificial Sequence
  Description of Artificial Sequence: Synthetic oligonucleotide
  Sense strand starting at position 1397 of SEQ ID NO: 3661
caauuuagcugguacggaa

SEQ ID NO: 284803 - RNA, 19 nt, Artificial Sequence
  Description of Artificial Sequence: Synthetic oligonucleotide
  Antisense strand to SEQ ID NO: 284802
uuccguaccagcuaaauug

SEQ ID NO: 284804 - RNA, 19 nt, Artificial Sequence
  Description of Artificial Sequence: Synthetic oligonucleotide
  Sense strand starting at position 1409 of SEQ ID NO: 3661
uacggaaagucuucuggua

SEQ ID NO: 284805 - RNA, 19 nt, Artificial Sequence
  Description of Artificial Sequence: Synthetic oligonucleotide
  Antisense strand to SEQ ID NO: 284804
uaccagaagacuuuccgua

SEQ ID NO: 284806 - RNA, 19 nt, Artificial Sequence
  Description of Artificial Sequence: Synthetic oligonucleotide
  Sense strand starting at position 1490 of SEQ ID NO: 3661
gauuaaacacaggguuuau

SEQ ID NO: 284807 - RNA, 19 nt, Artificial Sequence
  Description of Artificial Sequence: Synthetic oligonucleotide
  Antisense strand to SEQ ID NO: 284806
auaaacccuguguuuaauc

SEQ ID NO: 284808 - RNA, 19 nt, Artificial Sequence
  Description of Artificial Sequence: Synthetic oligonucleotide
  Sense strand starting at position 1526 of SEQ ID NO: 3661
uuacgcgacguuucugaua

SEQ ID NO: 284809 - RNA, 19 nt, Artificial Sequence
  Description of Artificial Sequence: Synthetic oligonucleotide
  Antisense strand to SEQ ID NO: 284808
uaucagaaacgucgcguaa

SEQ ID NO: 284810 - RNA, 19 nt, Artificial Sequence
  Description of Artificial Sequence: Synthetic oligonucleotide
  Sense strand starting at position 2615 of SEQ ID NO: 3661
cugaguugagaagguaacu

SEQ ID NO: 284811 - RNA, 19 nt, Artificial Sequence
  Description of Artificial Sequence: Synthetic oligonucleotide
  Antisense strand to SEQ ID NO: 284810
aguuaccuucucaacucag

SEQ ID NO: 284812 - RNA, 19 nt, Artificial Sequence
  Description of Artificial Sequence: Synthetic oligonucleotide
  Sense strand starting at position 2920 of SEQ ID NO: 3661
guugcaucugggcgacaga

SEQ ID NO: 284813 - RNA, 19 nt, Artificial Sequence
  Description of Artificial Sequence: Synthetic oligonucleotide
  Antisense strand to SEQ ID NO: 284812
ucugucgcccagaugcaac

SEQ ID NO: 284814 - RNA, 19 nt, Artificial Sequence
  Description of Artificial Sequence: Synthetic oligonucleotide
  Sense strand starting at position 2975 of SEQ ID NO: 3661
auuggcaaacauuguuauu

SEQ ID NO: 284815 - RNA, 19 nt, Artificial Sequence
  Description of Artificial Sequence: Synthetic oligonucleotide
  Antisense strand to SEQ ID NO: 284814
aauaacaauguuugccaau

SEQ ID NO: 284816 - RNA, 19 nt, Artificial Sequence
  Description of Artificial Sequence: Synthetic oligonucleotide
  Sense strand starting at position 3344 of SEQ ID NO: 3661
gcguacauuggcgugguaa

SEQ ID NO: 284817 - RNA, 19 nt, Artificial Sequence
  Description of Artificial Sequence: Synthetic oligonucleotide
  Antisense strand to SEQ ID NO: 284816
uuaccacgccaauguacgc

SEQ ID NO: 284818 - RNA, 19 nt, Artificial Sequence
  Description of Artificial Sequence: Synthetic oligonucleotide
  Sense strand starting at position 3359 of SEQ ID NO: 3661
guaaguuguguuccucugu

SEQ ID NO: 284819 - RNA, 19 nt, Artificial Sequence
  Description of Artificial Sequence: Synthetic oligonucleotide
  Antisense strand to SEQ ID NO: 284818
acagaggaacacaacuuac

SEQ ID NO: 284820 - RNA, 19 nt, Artificial Sequence
  Description of Artificial Sequence: Synthetic oligonucleotide
  Sense strand starting at position 3364 of SEQ ID NO: 3661
uuguguuccucugugaaau

SEQ ID NO: 284821 - RNA, 19 nt, Artificial Sequence
  Description of Artificial Sequence: Synthetic oligonucleotide
  Antisense strand to SEQ ID NO: 284820
auuucacagaggaacacaa

SEQ ID NO: 284822 - RNA, 19 nt, Artificial Sequence
  Description of Artificial Sequence: Synthetic oligonucleotide
  Sense strand starting at position 3365 of SEQ ID NO: 3661
uguguuccucugugaaauc

SEQ ID NO: 284823 - RNA, 19 nt, Artificial Sequence
  Description of Artificial Sequence: Synthetic oligonucleotide
  Antisense strand to SEQ ID NO: 284822
gauuucacagaggaacaca

SEQ ID NO: 284824 - RNA, 19 nt, Artificial Sequence
  Description of Artificial Sequence: Synthetic oligonucleotide
  Sense strand starting at position 3752 of SEQ ID NO: 3661
uuaaauuggccauagcuuu

SEQ ID NO: 284825 - RNA, 19 nt, Artificial Sequence
  Description of Artificial Sequence: Synthetic oligonucleotide
  Antisense strand to SEQ ID NO: 284824
aaagcuauggccaauuuaa

SEQ ID NO: 284826 - RNA, 19 nt, Artificial Sequence
  Description of Artificial Sequence: Synthetic oligonucleotide
  Sense strand starting at position 3868 of SEQ ID NO: 3661
uccuacccuuguguagaua

SEQ ID NO: 284827 - RNA, 19 nt, Artificial Sequence
  Description of Artificial Sequence: Synthetic oligonucleotide
  Antisense strand to SEQ ID NO: 284826
uaucuacacaaggguagga

SEQ ID NO: 284828 - RNA, 19 nt, Artificial Sequence
  Description of Artificial Sequence: Synthetic oligonucleotide
  Sense strand starting at position 3869 of SEQ ID NO: 3661
ccuacccuuguguagauau

SEQ ID NO: 284829 - RNA, 19 nt, Artificial Sequence
  Description of Artificial Sequence: Synthetic oligonucleotide
  Antisense strand to SEQ ID NO: 284828
auaucuacacaaggguagg

SEQ ID NO: 284830 - RNA, 19 nt, Artificial Sequence
  Description of Artificial Sequence: Synthetic oligonucleotide
  Sense strand starting at position 3876 of SEQ ID NO: 3661
uuguguagauaucugagga

SEQ ID NO: 284831 - RNA, 19 nt, Artificial Sequence
  Description of Artificial Sequence: Synthetic oligonucleotide
  Antisense strand to SEQ ID NO: 284830
uccucagauaucuacacaa

SEQ ID NO: 284832 - RNA, 19 nt, Artificial Sequence
  Description of Artificial Sequence: Synthetic oligonucleotide
  Sense strand starting at position 3877 of SEQ ID NO: 3661
uguguagauaucugaggaa

SEQ ID NO: 284833 - RNA, 19 nt, Artificial Sequence
  Description of Artificial Sequence: Synthetic oligonucleotide
  Antisense strand to SEQ ID NO: 284832
uuccucagauaucuacaca

SEQ ID NO: 284834 - RNA, 19 nt, Artificial Sequence
  Description of Artificial Sequence: Synthetic oligonucleotide
  Sense strand starting at position 3956 of SEQ ID NO: 3661
auaucugaggguugaccua

SEQ ID NO: 284835 - RNA, 19 nt, Artificial Sequence
  Description of Artificial Sequence: Synthetic oligonucleotide
  Antisense strand to SEQ ID NO: 284834
uaggucaacccucagauau

SEQ ID NO: 284836 - RNA, 19 nt, Artificial Sequence
  Description of Artificial Sequence: Synthetic oligonucleotide
  Sense strand starting at position 227 of SEQ ID NO: 3662
gucaaaggcgaauaguguu

SEQ ID NO: 284837 - RNA, 19 nt, Artificial Sequence
  Description of Artificial Sequence: Synthetic oligonucleotide
  Antisense strand to SEQ ID NO: 284836
aacacuauucgccuuugac

SEQ ID NO: 284838 - RNA, 19 nt, Artificial Sequence
  Description of Artificial Sequence: Synthetic oligonucleotide
  Sense strand starting at position 321 of SEQ ID NO: 3662
ggacgugaucacugggaug

SEQ ID NO: 284839 - RNA, 19 nt, Artificial Sequence
  Description of Artificial Sequence: Synthetic oligonucleotide
  Antisense strand to SEQ ID NO: 284838
caucccagugaucacgucc

SEQ ID NO: 284840 - RNA, 19 nt, Artificial Sequence
  Description of Artificial Sequence: Synthetic oligonucleotide
  Sense strand starting at position 323 of SEQ ID NO: 3662
acgugaucacugggaugga

SEQ ID NO: 284841 - RNA, 19 nt, Artificial Sequence
  Description of Artificial Sequence: Synthetic oligonucleotide
  Antisense strand to SEQ ID NO: 284840
uccaucccagugaucacgu

SEQ ID NO: 284842 - RNA, 19 nt, Artificial Sequence
  Description of Artificial Sequence: Synthetic oligonucleotide
  Sense strand starting at position 989 of SEQ ID NO: 3662
ccacucuuacccgaagugu

SEQ ID NO: 284843 - RNA, 19 nt, Artificial Sequence
  Description of Artificial Sequence: Synthetic oligonucleotide
  Antisense strand to SEQ ID NO: 284842
acacuucggguaagagugg

SEQ ID NO: 284844 - RNA, 19 nt, Artificial Sequence
  Description of Artificial Sequence: Synthetic oligonucleotide
  Sense strand starting at position 1126 of SEQ ID NO: 3662
caaagagguuacguuuaaa

SEQ ID NO: 284845 - RNA, 19 nt, Artificial Sequence
  Description of Artificial Sequence: Synthetic oligonucleotide
  Antisense strand to SEQ ID NO: 284844
uuuaaacguaaccucuuug

SEQ ID NO: 284846 - RNA, 19 nt, Artificial Sequence
  Description of Artificial Sequence: Synthetic oligonucleotide
  Sense strand starting at position 1433 of SEQ ID NO: 3662
aguaguaaggaccgagaaa

SEQ ID NO: 284847 - RNA, 19 nt, Artificial Sequence
  Description of Artificial Sequence: Synthetic oligonucleotide
  Antisense strand to SEQ ID NO: 284846
uuucucgguccuuacuacu

SEQ ID NO: 284848 - RNA, 19 nt, Artificial Sequence
  Description of Artificial Sequence: Synthetic oligonucleotide
  Sense strand starting at position 1656 of SEQ ID NO: 3662
ucacguucugauuaggauc

SEQ ID NO: 284849 - RNA, 19 nt, Artificial Sequence
  Description of Artificial Sequence: Synthetic oligonucleotide
  Antisense strand to SEQ ID NO: 284848
gauccuaaucagaacguga

SEQ ID NO: 284850 - RNA, 19 nt, Artificial Sequence
  Description of Artificial Sequence: Synthetic oligonucleotide
  Sense strand starting at position 1668 of SEQ ID NO: 3662
uaggauccaugauagauuu

SEQ ID NO: 284851 - RNA, 19 nt, Artificial Sequence
  Description of Artificial Sequence: Synthetic oligonucleotide
  Antisense strand to SEQ ID NO: 284850
aaaucuaucauggauccua

SEQ ID NO: 284852 - RNA, 19 nt, Artificial Sequence
  Description of Artificial Sequence: Synthetic oligonucleotide
  Sense strand starting at position 1984 of SEQ ID NO: 3662
cucucugcgcggcuuuaua

SEQ ID NO: 284853 - RNA, 19 nt, Artificial Sequence
  Description of Artificial Sequence: Synthetic oligonucleotide
  Antisense strand to SEQ ID NO: 284852
uauaaagccgcgcagagag

SEQ ID NO: 284854 - RNA, 19 nt, Artificial Sequence
  Description of Artificial Sequence: Synthetic oligonucleotide
  Sense strand starting at position 2022 of SEQ ID NO: 3662
cuucuuucucaaugagagg

SEQ ID NO: 284855 - RNA, 19 nt, Artificial Sequence
  Description of Artificial Sequence: Synthetic oligonucleotide
  Antisense strand to SEQ ID NO: 284854
ccucucauugagaaagaag

SEQ ID NO: 284856 - RNA, 19 nt, Artificial Sequence
  Description of Artificial Sequence: Synthetic oligonucleotide
  Sense strand starting at position 2039 of SEQ ID NO: 3662
ggaggaaacugaucugccu

SEQ ID NO: 284857 - RNA, 19 nt, Artificial Sequence
  Description of Artificial Sequence: Synthetic oligonucleotide
  Antisense strand to SEQ ID NO: 284856
aggcagaucaguuuccucc

SEQ ID NO: 284858 - RNA, 19 nt, Artificial Sequence
  Description of Artificial Sequence: Synthetic oligonucleotide
  Sense strand starting at position 2134 of SEQ ID NO: 3662
gugcccauucgggaucuau

SEQ ID NO: 284859 - RNA, 19 nt, Artificial Sequence
  Description of Artificial Sequence: Synthetic oligonucleotide
  Antisense strand to SEQ ID NO: 284858
auagaucccgaaugggcac

SEQ ID NO: 284860 - RNA, 19 nt, Artificial Sequence
  Description of Artificial Sequence: Synthetic oligonucleotide
  Sense strand starting at position 2175 of SEQ ID NO: 3662
acaugaagaucccaaagau

SEQ ID NO: 284861 - RNA, 19 nt, Artificial Sequence
  Description of Artificial Sequence: Synthetic oligonucleotide
  Antisense strand to SEQ ID NO: 284860
aucuuugggaucuucaugu

SEQ ID NO: 284862 - RNA, 19 nt, Artificial Sequence
  Description of Artificial Sequence: Synthetic oligonucleotide
  Sense strand starting at position 2231 of SEQ ID NO: 3662
gguaucugugcauacugau

SEQ ID NO: 284863 - RNA, 19 nt, Artificial Sequence
  Description of Artificial Sequence: Synthetic oligonucleotide
  Antisense strand to SEQ ID NO: 284862
aucaguaugcacagauacc

SEQ ID NO: 284864 - RNA, 19 nt, Artificial Sequence
  Description of Artificial Sequence: Synthetic oligonucleotide
  Sense strand starting at position 2285 of SEQ ID NO: 3662
ggcuuaucuguagaagccu

SEQ ID NO: 284865 - RNA, 19 nt, Artificial Sequence
  Description of Artificial Sequence: Synthetic oligonucleotide
  Antisense strand to SEQ ID NO: 284864
aggcuucuacagauaagcc

SEQ ID NO: 284866 - RNA, 19 nt, Artificial Sequence
  Description of Artificial Sequence: Synthetic oligonucleotide
  Sense strand starting at position 2369 of SEQ ID NO: 3662
agcaaaucuuggguggaga

SEQ ID NO: 284867 - RNA, 19 nt, Artificial Sequence
  Description of Artificial Sequence: Synthetic oligonucleotide
  Antisense strand to SEQ ID NO: 284866
ucuccacccaagauuugcu

SEQ ID NO: 284868 - RNA, 19 nt, Artificial Sequence
  Description of Artificial Sequence: Synthetic oligonucleotide
  Sense strand starting at position 2370 of SEQ ID NO: 3662
gcaaaucuuggguggagaa

SEQ ID NO: 284869 - RNA, 19 nt, Artificial Sequence
  Description of Artificial Sequence: Synthetic oligonucleotide
  Antisense strand to SEQ ID NO: 284868
uucuccacccaagauuugc

SEQ ID NO: 284870 - RNA, 19 nt, Artificial Sequence
  Description of Artificial Sequence: Synthetic oligonucleotide
  Sense strand starting at position 2383 of SEQ ID NO: 3662
ggagaauaguugagugguu

SEQ ID NO: 284871 - RNA, 19 nt, Artificial Sequence
  Description of Artificial Sequence: Synthetic oligonucleotide
  Antisense strand to SEQ ID NO: 284870
aaccacucaacuauucucc

SEQ ID NO: 284872 - RNA, 19 nt, Artificial Sequence
  Description of Artificial Sequence: Synthetic oligonucleotide
  Sense strand starting at position 2385 of SEQ ID NO: 3662
agaauaguugagugguucu

SEQ ID NO: 284873 - RNA, 19 nt, Artificial Sequence
  Description of Artificial Sequence: Synthetic oligonucleotide
  Antisense strand to SEQ ID NO: 284872
agaaccacucaacuauucu

SEQ ID NO: 284874 - RNA, 19 nt, Artificial Sequence
  Description of Artificial Sequence: Synthetic oligonucleotide
  Sense strand starting at position 2388 of SEQ ID NO: 3662
auaguugagugguucuauu

SEQ ID NO: 284875 - RNA, 19 nt, Artificial Sequence
  Description of Artificial Sequence: Synthetic oligonucleotide
  Antisense strand to SEQ ID NO: 284874
aauagaaccacucaacuau

SEQ ID NO: 284876 - RNA, 19 nt, Artificial Sequence
  Description of Artificial Sequence: Synthetic oligonucleotide
  Sense strand starting at position 2420 of SEQ ID NO: 3662
guuuguaucagguacauag

SEQ ID NO: 284877 - RNA, 19 nt, Artificial Sequence
  Description of Artificial Sequence: Synthetic oligonucleotide
  Antisense strand to SEQ ID NO: 284876
cuauguaccugauacaaac

SEQ ID NO: 284878 - RNA, 19 nt, Artificial Sequence
  Description of Artificial Sequence: Synthetic oligonucleotide
  Sense strand starting at position 2613 of SEQ ID NO: 3662
gcccaugacugagugacaa

SEQ ID NO: 284879 - RNA, 19 nt, Artificial Sequence
  Description of Artificial Sequence: Synthetic oligonucleotide
  Antisense strand to SEQ ID NO: 284878
uugucacucagucaugggc

SEQ ID NO: 284880 - RNA, 19 nt, Artificial Sequence
  Description of Artificial Sequence: Synthetic oligonucleotide
  Sense strand starting at position 2764 of SEQ ID NO: 3662
cuccaucuucccggaauca

SEQ ID NO: 284881 - RNA, 19 nt, Artificial Sequence
  Description of Artificial Sequence: Synthetic oligonucleotide
  Antisense strand to SEQ ID NO: 284880
ugauuccgggaagauggag

SEQ ID NO: 284882 - RNA, 19 nt, Artificial Sequence
  Description of Artificial Sequence: Synthetic oligonucleotide
  Sense strand starting at position 2765 of SEQ ID NO: 3662
uccaucuucccggaaucaa

SEQ ID NO: 284883 - RNA, 19 nt, Artificial Sequence
  Description of Artificial Sequence: Synthetic oligonucleotide
  Antisense strand to SEQ ID NO: 284882
uugauuccgggaagaugga

SEQ ID NO: 284884 - RNA, 19 nt, Artificial Sequence
  Description of Artificial Sequence: Synthetic oligonucleotide
  Sense strand starting at position 2998 of SEQ ID NO: 3662
cuaaaugcucaggagguuu

SEQ ID NO: 284885 - RNA, 19 nt, Artificial Sequence
  Description of Artificial Sequence: Synthetic oligonucleotide
  Antisense strand to SEQ ID NO: 284884
aaaccuccugagcauuuag

SEQ ID NO: 284886 - RNA, 19 nt, Artificial Sequence
  Description of Artificial Sequence: Synthetic oligonucleotide
  Sense strand starting at position 3072 of SEQ ID NO: 3662
ggagacuccuaggcuugua

SEQ ID NO: 284887 - RNA, 19 nt, Artificial Sequence
  Description of Artificial Sequence: Synthetic oligonucleotide
  Antisense strand to SEQ ID NO: 284886
uacaagccuaggagucucc

SEQ ID NO: 284888 - RNA, 19 nt, Artificial Sequence
  Description of Artificial Sequence: Synthetic oligonucleotide
  Sense strand starting at position 3075 of SEQ ID NO: 3662
gacuccuaggcuuguaaau

SEQ ID NO: 284889 - RNA, 19 nt, Artificial Sequence
  Description of Artificial Sequence: Synthetic oligonucleotide
  Antisense strand to SEQ ID NO: 284888
auuuacaagccuaggaguc

SEQ ID NO: 284890 - RNA, 19 nt, Artificial Sequence
  Description of Artificial Sequence: Synthetic oligonucleotide
  Sense strand starting at position 3124 of SEQ ID NO: 3662
aaaguuuaacaugggaagu

SEQ ID NO: 284891 - RNA, 19 nt, Artificial Sequence
  Description of Artificial Sequence: Synthetic oligonucleotide
  Antisense strand to SEQ ID NO: 284890
acuucccauguuaaacuuu

SEQ ID NO: 284892 - RNA, 19 nt, Artificial Sequence
  Description of Artificial Sequence: Synthetic oligonucleotide
  Sense strand starting at position 3172 of SEQ ID NO: 3662
cacugauguaaguagugga

SEQ ID NO: 284893 - RNA, 19 nt, Artificial Sequence
  Description of Artificial Sequence: Synthetic oligonucleotide
  Antisense strand to SEQ ID NO: 284892
uccacuacuuacaucagug

SEQ ID NO: 284894 - RNA, 19 nt, Artificial Sequence
  Description of Artificial Sequence: Synthetic oligonucleotide
  Sense strand starting at position 3292 of SEQ ID NO: 3662
ugggucuguguuuacacaa

SEQ ID NO: 284895 - RNA, 19 nt, Artificial Sequence
  Description of Artificial Sequence: Synthetic oligonucleotide
  Antisense strand to SEQ ID NO: 284894
uuguguaaacacagaccca

SEQ ID NO: 284896 - RNA, 19 nt, Artificial Sequence
  Description of Artificial Sequence: Synthetic oligonucleotide
  Sense strand starting at position 3466 of SEQ ID NO: 3662
acugaagauucgccaagca

SEQ ID NO: 284897 - RNA, 19 nt, Artificial Sequence
  Description of Artificial Sequence: Synthetic oligonucleotide
  Antisense strand to SEQ ID NO: 284896
ugcuuggcgaaucuucagu

SEQ ID NO: 284898 - RNA, 19 nt, Artificial Sequence
  Description of Artificial Sequence: Synthetic oligonucleotide
  Sense strand starting at position 3601 of SEQ ID NO: 3662
uguuuacuuguuuaaagag

SEQ ID NO: 284899 - RNA, 19 nt, Artificial Sequence
  Description of Artificial Sequence: Synthetic oligonucleotide
  Antisense strand to SEQ ID NO: 284898
cucuuuaaacaaguaaaca

SEQ ID NO: 284900 - RNA, 19 nt, Artificial Sequence
  Description of Artificial Sequence: Synthetic oligonucleotide
  Sense strand starting at position 3617 of SEQ ID NO: 3662
gagcaaugggcauaguagu

SEQ ID NO: 284901 - RNA, 19 nt, Artificial Sequence
  Description of Artificial Sequence: Synthetic oligonucleotide
  Antisense strand to SEQ ID NO: 284900
acuacuaugcccauugcuc

SEQ ID NO: 284902 - RNA, 19 nt, Artificial Sequence
  Description of Artificial Sequence: Synthetic oligonucleotide
  Sense strand starting at position 3748 of SEQ ID NO: 3662
aggagucauaaugguaauu

SEQ ID NO: 284903 - RNA, 19 nt, Artificial Sequence
  Description of Artificial Sequence: Synthetic oligonucleotide
  Antisense strand to SEQ ID NO: 284902
aauuaccauuaugacuccu

SEQ ID NO: 284904 - RNA, 19 nt, Artificial Sequence
  Description of Artificial Sequence: Synthetic oligonucleotide
  Sense strand starting at position 3757 of SEQ ID NO: 3662
aaugguaauuaugaggaaa

SEQ ID NO: 284905 - RNA, 19 nt, Artificial Sequence
  Description of Artificial Sequence: Synthetic oligonucleotide
  Antisense strand to SEQ ID NO: 284904
uuuccucauaauuaccauu

SEQ ID NO: 284906 - RNA, 19 nt, Artificial Sequence
  Description of Artificial Sequence: Synthetic oligonucleotide
  Sense strand starting at position 3770 of SEQ ID NO: 3662
aggaaaugcaagugacguu

SEQ ID NO: 284907 - RNA, 19 nt, Artificial Sequence
  Description of Artificial Sequence: Synthetic oligonucleotide
  Antisense strand to SEQ ID NO: 284906
aacgucacuugcauuuccu

SEQ ID NO: 284908 - RNA, 19 nt, Artificial Sequence
  Description of Artificial Sequence: Synthetic oligonucleotide
  Sense strand starting at position 3796 of SEQ ID NO: 3662
ugguuucuggcacaauaaa

SEQ ID NO: 284909 - RNA, 19 nt, Artificial Sequence
  Description of Artificial Sequence: Synthetic oligonucleotide
  Antisense strand to SEQ ID NO: 284908
uuuauugugccagaaacca

SEQ ID NO: 284910 - RNA, 19 nt, Artificial Sequence
  Description of Artificial Sequence: Synthetic oligonucleotide
  Sense strand starting at position 3811 of SEQ ID NO: 3662
uaaagaguccuugaccugu

SEQ ID NO: 284911 - RNA, 19 nt, Artificial Sequence
  Description of Artificial Sequence: Synthetic oligonucleotide
  Antisense strand to SEQ ID NO: 284910
acaggucaaggacucuuua

SEQ ID NO: 284912 - RNA, 19 nt, Artificial Sequence
  Description of Artificial Sequence: Synthetic oligonucleotide
  Sense strand starting at position 3897 of SEQ ID NO: 3662
ggcuucauugguggacuca

SEQ ID NO: 284913 - RNA, 19 nt, Artificial Sequence
  Description of Artificial Sequence: Synthetic oligonucleotide
  Antisense strand to SEQ ID NO: 284912
ugaguccaccaaugaagcc

SEQ ID NO: 284914 - RNA, 19 nt, Artificial Sequence
  Description of Artificial Sequence: Synthetic oligonucleotide
  Sense strand starting at position 3921 of SEQ ID NO: 3662
uggagcuguguccauccua

SEQ ID NO: 284915 - RNA, 19 nt, Artificial Sequence
  Description of Artificial Sequence: Synthetic oligonucleotide
  Antisense strand to SEQ ID NO: 284914
uaggauggacacagcucca

SEQ ID NO: 284916 - RNA, 19 nt, Artificial Sequence
  Description of Artificial Sequence: Synthetic oligonucleotide
  Sense strand starting at position 270 of SEQ ID NO: 3663
guguauacugucuauauuc

SEQ ID NO: 284917 - RNA, 19 nt, Artificial Sequence
  Description of Artificial Sequence: Synthetic oligonucleotide
  Antisense strand to SEQ ID NO: 284916
gaauauagacaguauacac

SEQ ID NO: 284918 - RNA, 19 nt, Artificial Sequence
  Description of Artificial Sequence: Synthetic oligonucleotide
  Sense strand starting at position 364 of SEQ ID NO: 3663
cuggguaucuuauuauuac

SEQ ID NO: 284919 - RNA, 19 nt, Artificial Sequence
  Description of Artificial Sequence: Synthetic oligonucleotide
  Antisense strand to SEQ ID NO: 284918
guaauaauaagauacccag

SEQ ID NO: 284920 - RNA, 19 nt, Artificial Sequence
  Description of Artificial Sequence: Synthetic oligonucleotide
  Sense strand starting at position 388 of SEQ ID NO: 3663
ugacaaauauugcuauuga

SEQ ID NO: 284921 - RNA, 19 nt, Artificial Sequence
  Description of Artificial Sequence: Synthetic oligonucleotide
  Antisense strand to SEQ ID NO: 284920
ucaauagcaauauuuguca

SEQ ID NO: 284922 - RNA, 19 nt, Artificial Sequence
  Description of Artificial Sequence: Synthetic oligonucleotide
  Sense strand starting at position 399 of SEQ ID NO: 3663
gcuauugacagacaacguu

SEQ ID NO: 284923 - RNA, 19 nt, Artificial Sequence
  Description of Artificial Sequence: Synthetic oligonucleotide
  Antisense strand to SEQ ID NO: 284922
aacguugucugucaauagc

SEQ ID NO: 284924 - RNA, 19 nt, Artificial Sequence
  Description of Artificial Sequence: Synthetic oligonucleotide
  Sense strand starting at position 468 of SEQ ID NO: 3663
ccaguuuguaacuaguuga

SEQ ID NO: 284925 - RNA, 19 nt, Artificial Sequence
  Description of Artificial Sequence: Synthetic oligonucleotide
  Antisense strand to SEQ ID NO: 284924
ucaacuaguuacaaacugg

SEQ ID NO: 284926 - RNA, 19 nt, Artificial Sequence
  Description of Artificial Sequence: Synthetic oligonucleotide
  Sense strand starting at position 471 of SEQ ID NO: 3663
guuuguaacuaguugauau

SEQ ID NO: 284927 - RNA, 19 nt, Artificial Sequence
  Description of Artificial Sequence: Synthetic oligonucleotide
  Antisense strand to SEQ ID NO: 284926
auaucaacuaguuacaaac

SEQ ID NO: 284928 - RNA, 19 nt, Artificial Sequence
  Description of Artificial Sequence: Synthetic oligonucleotide
  Sense strand starting at position 478 of SEQ ID NO: 3663
acuaguugauauuccagaa

SEQ ID NO: 284929 - RNA, 19 nt, Artificial Sequence
  Description of Artificial Sequence: Synthetic oligonucleotide
  Antisense strand to SEQ ID NO: 284928
uucuggaauaucaacuagu

SEQ ID NO: 284930 - RNA, 19 nt, Artificial Sequence
  Description of Artificial Sequence: Synthetic oligonucleotide
  Sense strand starting at position 621 of SEQ ID NO: 3663
cugggauccgcauacuuga

SEQ ID NO: 284931 - RNA, 19 nt, Artificial Sequence
  Description of Artificial Sequence: Synthetic oligonucleotide
  Antisense strand to SEQ ID NO: 284930
ucaaguaugcggaucccag

SEQ ID NO: 284932 - RNA, 19 nt, Artificial Sequence
  Description of Artificial Sequence: Synthetic oligonucleotide
  Sense strand starting at position 629 of SEQ ID NO: 3663
cgcauacuugauuguagga

SEQ ID NO: 284933 - RNA, 19 nt, Artificial Sequence
  Description of Artificial Sequence: Synthetic oligonucleotide
  Antisense strand to SEQ ID NO: 284932
uccuacaaucaaguaugcg

SEQ ID NO: 284934 - RNA, 19 nt, Artificial Sequence
  Description of Artificial Sequence: Synthetic oligonucleotide
  Sense strand starting at position 1003 of SEQ ID NO: 3663
gccacaucuucccuggagu

SEQ ID NO: 284935 - RNA, 19 nt, Artificial Sequence
  Description of Artificial Sequence: Synthetic oligonucleotide
  Antisense strand to SEQ ID NO: 284934
acuccagggaagauguggc

SEQ ID NO: 284936 - RNA, 19 nt, Artificial Sequence
  Description of Artificial Sequence: Synthetic oligonucleotide
  Sense strand starting at position 1004 of SEQ ID NO: 3663
ccacaucuucccuggaguu

SEQ ID NO: 284937 - RNA, 19 nt, Artificial Sequence
  Description of Artificial Sequence: Synthetic oligonucleotide
  Antisense strand to SEQ ID NO: 284936
aacuccagggaagaugugg

SEQ ID NO: 284938 - RNA, 19 nt, Artificial Sequence
  Description of Artificial Sequence: Synthetic oligonucleotide
  Sense strand starting at position 1014 of SEQ ID NO: 3663
ccuggaguuuccucucuuu

SEQ ID NO: 284939 - RNA, 19 nt, Artificial Sequence
  Description of Artificial Sequence: Synthetic oligonucleotide
  Antisense strand to SEQ ID NO: 284938
aaagagaggaaacuccagg

SEQ ID NO: 284940 - RNA, 19 nt, Artificial Sequence
  Description of Artificial Sequence: Synthetic oligonucleotide
  Sense strand starting at position 1017 of SEQ ID NO: 3663
ggaguuuccucucuuucca

SEQ ID NO: 284941 - RNA, 19 nt, Artificial Sequence
  Description of Artificial Sequence: Synthetic oligonucleotide
  Antisense strand to SEQ ID NO: 284940
uggaaagagaggaaacucc

SEQ ID NO: 284942 - RNA, 19 nt, Artificial Sequence
  Description of Artificial Sequence: Synthetic oligonucleotide
  Sense strand starting at position 1019 of SEQ ID NO: 3663
aguuuccucucuuuccaga

SEQ ID NO: 284943 - RNA, 19 nt, Artificial Sequence
  Description of Artificial Sequence: Synthetic oligonucleotide
  Antisense strand to SEQ ID NO: 284942
ucuggaaagagaggaaacu

SEQ ID NO: 284944 - RNA, 19 nt, Artificial Sequence
  Description of Artificial Sequence: Synthetic oligonucleotide
  Sense strand starting at position 1024 of SEQ ID NO: 3663
ccucucuuuccagagagcu

SEQ ID NO: 284945 - RNA, 19 nt, Artificial Sequence
  Description of Artificial Sequence: Synthetic oligonucleotide
  Antisense strand to SEQ ID NO: 284944
agcucucuggaaagagagg

SEQ ID NO: 284946 - RNA, 19 nt, Artificial Sequence
  Description of Artificial Sequence: Synthetic oligonucleotide
  Sense strand starting at position 1756 of SEQ ID NO: 3663
gcggucucugcagauggaa

SEQ ID NO: 284947 - RNA, 19 nt, Artificial Sequence
  Description of Artificial Sequence: Synthetic oligonucleotide
  Antisense strand to SEQ ID NO: 284946
uuccaucugcagagaccgc

SEQ ID NO: 284948 - RNA, 19 nt, Artificial Sequence
  Description of Artificial Sequence: Synthetic oligonucleotide
  Sense strand starting at position 2219 of SEQ ID NO: 3663
uugucugaggauuagucuu

SEQ ID NO: 284949 - RNA, 19 nt, Artificial Sequence
  Description of Artificial Sequence: Synthetic oligonucleotide
  Antisense strand to SEQ ID NO: 284948
aagacuaauccucagacaa

SEQ ID NO: 284950 - RNA, 19 nt, Artificial Sequence
  Description of Artificial Sequence: Synthetic oligonucleotide
  Sense strand starting at position 2221 of SEQ ID NO: 3663
gucugaggauuagucuuua

SEQ ID NO: 284951 - RNA, 19 nt, Artificial Sequence
  Description of Artificial Sequence: Synthetic oligonucleotide
  Antisense strand to SEQ ID NO: 284950
uaaagacuaauccucagac

SEQ ID NO: 284952 - RNA, 19 nt, Artificial Sequence
  Description of Artificial Sequence: Synthetic oligonucleotide
  Sense strand starting at position 2225 of SEQ ID NO: 3663
gaggauuagucuuuagauu

SEQ ID NO: 284953 - RNA, 19 nt, Artificial Sequence
  Description of Artificial Sequence: Synthetic oligonucleotide
  Antisense strand to SEQ ID NO: 284952
aaucuaaagacuaauccuc

SEQ ID NO: 284954 - RNA, 19 nt, Artificial Sequence
  Description of Artificial Sequence: Synthetic oligonucleotide
  Sense strand starting at position 2354 of SEQ ID NO: 3663
uggcacaguugguuugaga

SEQ ID NO: 284955 - RNA, 19 nt, Artificial Sequence
  Description of Artificial Sequence: Synthetic oligonucleotide
  Antisense strand to SEQ ID NO: 284954
ucucaaaccaacugugcca

SEQ ID NO: 284956 - RNA, 19 nt, Artificial Sequence
  Description of Artificial Sequence: Synthetic oligonucleotide
  Sense strand starting at position 2361 of SEQ ID NO: 3663
guugguuugagaugguaga

SEQ ID NO: 284957 - RNA, 19 nt, Artificial Sequence
  Description of Artificial Sequence: Synthetic oligonucleotide
  Antisense strand to SEQ ID NO: 284956
ucuaccaucucaaaccaac

SEQ ID NO: 284958 - RNA, 19 nt, Artificial Sequence
  Description of Artificial Sequence: Synthetic oligonucleotide
  Sense strand starting at position 2362 of SEQ ID NO: 3663
uugguuugagaugguagaa

SEQ ID NO: 284959 - RNA, 19 nt, Artificial Sequence
  Description of Artificial Sequence: Synthetic oligonucleotide
  Antisense strand to SEQ ID NO: 284958
uucuaccaucucaaaccaa

SEQ ID NO: 284960 - RNA, 19 nt, Artificial Sequence
  Description of Artificial Sequence: Synthetic oligonucleotide
  Sense strand starting at position 2418 of SEQ ID NO: 3663
augagaauguggcuuugca

SEQ ID NO: 284961 - RNA, 19 nt, Artificial Sequence
  Description of Artificial Sequence: Synthetic oligonucleotide
  Antisense strand to SEQ ID NO: 284960
ugcaaagccacauucucau

SEQ ID NO: 284962 - RNA, 19 nt, Artificial Sequence
  Description of Artificial Sequence: Synthetic oligonucleotide
  Sense strand starting at position 2438 of SEQ ID NO: 3663
auguguguuggaggagguu

SEQ ID NO: 284963 - RNA, 19 nt, Artificial Sequence
  Description of Artificial Sequence: Synthetic oligonucleotide
  Antisense strand to SEQ ID NO: 284962
aaccuccuccaacacacau

SEQ ID NO: 284964 - RNA, 19 nt, Artificial Sequence
  Description of Artificial Sequence: Synthetic oligonucleotide
  Sense strand starting at position 2489 of SEQ ID NO: 3663
ccaguugucgcugccaguu

SEQ ID NO: 284965 - RNA, 19 nt, Artificial Sequence
  Description of Artificial Sequence: Synthetic oligonucleotide
  Antisense strand to SEQ ID NO: 284964
aacuggcagcgacaacugg

SEQ ID NO: 284966 - RNA, 19 nt, Artificial Sequence
  Description of Artificial Sequence: Synthetic oligonucleotide
  Sense strand starting at position 2526 of SEQ ID NO: 3663
cagucucaaggguguuaaa

SEQ ID NO: 284967 - RNA, 19 nt, Artificial Sequence
  Description of Artificial Sequence: Synthetic oligonucleotide
  Antisense strand to SEQ ID NO: 284966
uuuaacacccuugagacug

SEQ ID NO: 284968 - RNA, 19 nt, Artificial Sequence
  Description of Artificial Sequence: Synthetic oligonucleotide
  Sense strand starting at position 2578 of SEQ ID NO: 3663
aagauugucgaguguagau

SEQ ID NO: 284969 - RNA, 19 nt, Artificial Sequence
  Description of Artificial Sequence: Synthetic oligonucleotide
  Antisense strand to SEQ ID NO: 284968
aucuacacucgacaaucuu

SEQ ID NO: 284970 - RNA, 19 nt, Artificial Sequence
  Description of Artificial Sequence: Synthetic oligonucleotide
  Sense strand starting at position 2580 of SEQ ID NO: 3663
gauugucgaguguagauaa

SEQ ID NO: 284971 - RNA, 19 nt, Artificial Sequence
  Description of Artificial Sequence: Synthetic oligonucleotide
  Antisense strand to SEQ ID NO: 284970
uuaucuacacucgacaauc

SEQ ID NO: 284972 - RNA, 19 nt, Artificial Sequence
  Description of Artificial Sequence: Synthetic oligonucleotide
  Sense strand starting at position 2583 of SEQ ID NO: 3663
ugucgaguguagauaaguc

SEQ ID NO: 284973 - RNA, 19 nt, Artificial Sequence
  Description of Artificial Sequence: Synthetic oligonucleotide
  Antisense strand to SEQ ID NO: 284972
gacuuaucuacacucgaca

SEQ ID NO: 284974 - RNA, 19 nt, Artificial Sequence
  Description of Artificial Sequence: Synthetic oligonucleotide
  Sense strand starting at position 2592 of SEQ ID NO: 3663
uagauaaguccaggugcaa

SEQ ID NO: 284975 - RNA, 19 nt, Artificial Sequence
  Description of Artificial Sequence: Synthetic oligonucleotide
  Antisense strand to SEQ ID NO: 284974
uugcaccuggacuuaucua

SEQ ID NO: 284976 - RNA, 19 nt, Artificial Sequence
  Description of Artificial Sequence: Synthetic oligonucleotide
  Sense strand starting at position 3003 of SEQ ID NO: 3663
ugguucugugcuuauaaau

SEQ ID NO: 284977 - RNA, 19 nt, Artificial Sequence
  Description of Artificial Sequence: Synthetic oligonucleotide
  Antisense strand to SEQ ID NO: 284976
auuuauaagcacagaacca

SEQ ID NO: 284978 - RNA, 19 nt, Artificial Sequence
  Description of Artificial Sequence: Synthetic oligonucleotide
  Sense strand starting at position 3160 of SEQ ID NO: 3663
gggaaauguuacuauuugu

SEQ ID NO: 284979 - RNA, 19 nt, Artificial Sequence
  Description of Artificial Sequence: Synthetic oligonucleotide
  Antisense strand to SEQ ID NO: 284978
acaaauaguaacauuuccc

SEQ ID NO: 284980 - RNA, 19 nt, Artificial Sequence
  Description of Artificial Sequence: Synthetic oligonucleotide
  Sense strand starting at position 3298 of SEQ ID NO: 3663
uccgaauggugcccauuua

SEQ ID NO: 284981 - RNA, 19 nt, Artificial Sequence
  Description of Artificial Sequence: Synthetic oligonucleotide
  Antisense strand to SEQ ID NO: 284980
uaaaugggcaccauucgga

SEQ ID NO: 284982 - RNA, 19 nt, Artificial Sequence
  Description of Artificial Sequence: Synthetic oligonucleotide
  Sense strand starting at position 3485 of SEQ ID NO: 3663
ggcagaucagugugggaga

SEQ ID NO: 284983 - RNA, 19 nt, Artificial Sequence
  Description of Artificial Sequence: Synthetic oligonucleotide
  Antisense strand to SEQ ID NO: 284982
ucucccacacugaucugcc

SEQ ID NO: 284984 - RNA, 19 nt, Artificial Sequence
  Description of Artificial Sequence: Synthetic oligonucleotide
  Sense strand starting at position 3496 of SEQ ID NO: 3663
gugggagacuguguuaaac

SEQ ID NO: 284985 - RNA, 19 nt, Artificial Sequence
  Description of Artificial Sequence: Synthetic oligonucleotide
  Antisense strand to SEQ ID NO: 284984
guuuaacacagucucccac

SEQ ID NO: 284986 - RNA, 19 nt, Artificial Sequence
  Description of Artificial Sequence: Synthetic oligonucleotide
  Sense strand starting at position 3608 of SEQ ID NO: 3663
ggugaugucccucaccuca

SEQ ID NO: 284987 - RNA, 19 nt, Artificial Sequence
  Description of Artificial Sequence: Synthetic oligonucleotide
  Antisense strand to SEQ ID NO: 284986
ugaggugagggacaucacc

SEQ ID NO: 284988 - RNA, 19 nt, Artificial Sequence
  Description of Artificial Sequence: Synthetic oligonucleotide
  Sense strand starting at position 3907 of SEQ ID NO: 3663
cacauugggucaucugaau

SEQ ID NO: 284989 - RNA, 19 nt, Artificial Sequence
  Description of Artificial Sequence: Synthetic oligonucleotide
  Antisense strand to SEQ ID NO: 284988
auucagaugacccaaugug

SEQ ID NO: 284990 - RNA, 19 nt, Artificial Sequence
  Description of Artificial Sequence: Synthetic oligonucleotide
  Sense strand starting at position 3960 of SEQ ID NO: 3663
ggguauacaauguggguua

SEQ ID NO: 284991 - RNA, 19 nt, Artificial Sequence
  Description of Artificial Sequence: Synthetic oligonucleotide
  Antisense strand to SEQ ID NO: 284990
uaacccacauuguauaccc

SEQ ID NO: 284992 - RNA, 19 nt, Artificial Sequence
  Description of Artificial Sequence: Synthetic oligonucleotide
  Sense strand starting at position 3962 of SEQ ID NO: 3663
guauacaauguggguuaga

SEQ ID NO: 284993 - RNA, 19 nt, Artificial Sequence
  Description of Artificial Sequence: Synthetic oligonucleotide
  Antisense strand to SEQ ID NO: 284992
ucuaacccacauuguauac

SEQ ID NO: 284994 - RNA, 19 nt, Artificial Sequence
  Description of Artificial Sequence: Synthetic oligonucleotide
  Sense strand starting at position 3963 of SEQ ID NO: 3663
uauacaauguggguuagaa

SEQ ID NO: 284995 - RNA, 19 nt, Artificial Sequence
  Description of Artificial Sequence: Synthetic oligonucleotide
  Antisense strand to SEQ ID NO: 284994
uucuaacccacauuguaua

SEQ ID NO: 284996 - RNA, 19 nt, Artificial Sequence
  Description of Artificial Sequence: Synthetic oligonucleotide
  Sense strand starting at position 216 of SEQ ID NO: 3664
gcauaaggcuuccuaggga

SEQ ID NO: 284997 - RNA, 19 nt, Artificial Sequence
  Description of Artificial Sequence: Synthetic oligonucleotide
  Antisense strand to SEQ ID NO: 284996
ucccuaggaagccuuaugc

SEQ ID NO: 284998 - RNA, 19 nt, Artificial Sequence
  Description of Artificial Sequence: Synthetic oligonucleotide
  Sense strand starting at position 427 of SEQ ID NO: 3664
gggccuuucgcgagcagca

SEQ ID NO: 284999 - RNA, 19 nt, Artificial Sequence
  Description of Artificial Sequence: Synthetic oligonucleotide
  Antisense strand to SEQ ID NO: 284998
ugcugcucgcgaaaggccc

SEQ ID NO: 285000 - RNA, 19 nt, Artificial Sequence
  Description of Artificial Sequence: Synthetic oligonucleotide
  Sense strand starting at position 428 of SEQ ID NO: 3664
ggccuuucgcgagcagcaa

SEQ ID NO: 285001 - RNA, 19 nt, Artificial Sequence
  Description of Artificial Sequence: Synthetic oligonucleotide
  Antisense strand to SEQ ID NO: 285000
uugcugcucgcgaaaggcc

SEQ ID NO: 285002 - RNA, 19 nt, Artificial Sequence
  Description of Artificial Sequence: Synthetic oligonucleotide
  Sense strand starting at position 1850 of SEQ ID NO: 3664
uccgauuuaccucgaaccu

SEQ ID NO: 285003 - RNA, 19 nt, Artificial Sequence
  Description of Artificial Sequence: Synthetic oligonucleotide
  Antisense strand to SEQ ID NO: 285002
agguucgagguaaaucgga

SEQ ID NO: 285004 - RNA, 19 nt, Artificial Sequence
  Description of Artificial Sequence: Synthetic oligonucleotide
  Sense strand starting at position 1941 of SEQ ID NO: 3664
uccggauaaacguggguga

SEQ ID NO: 285005 - RNA, 19 nt, Artificial Sequence
  Description of Artificial Sequence: Synthetic oligonucleotide
  Antisense strand to SEQ ID NO: 285004
ucacccacguuuauccgga

SEQ ID NO: 285006 - RNA, 19 nt, Artificial Sequence
  Description of Artificial Sequence: Synthetic oligonucleotide
  Sense strand starting at position 2193 of SEQ ID NO: 3664
uggaaagucgagcguuauu

SEQ ID NO: 285007 - RNA, 19 nt, Artificial Sequence
  Description of Artificial Sequence: Synthetic oligonucleotide
  Antisense strand to SEQ ID NO: 285006
aauaacgcucgacuuucca

SEQ ID NO: 285008 - RNA, 19 nt, Artificial Sequence
  Description of Artificial Sequence: Synthetic oligonucleotide
  Sense strand starting at position 2196 of SEQ ID NO: 3664
aaagucgagcguuauucuu

SEQ ID NO: 285009 - RNA, 19 nt, Artificial Sequence
  Description of Artificial Sequence: Synthetic oligonucleotide
  Antisense strand to SEQ ID NO: 285008
aagaauaacgcucgacuuu

SEQ ID NO: 285010 - RNA, 19 nt, Artificial Sequence
  Description of Artificial Sequence: Synthetic oligonucleotide
  Sense strand starting at position 2208 of SEQ ID NO: 3664
uauucuuagcuguggguua

SEQ ID NO: 285011 - RNA, 19 nt, Artificial Sequence
  Description of Artificial Sequence: Synthetic oligonucleotide
  Antisense strand to SEQ ID NO: 285010
uaacccacagcuaagaaua

SEQ ID NO: 285012 - RNA, 19 nt, Artificial Sequence
  Description of Artificial Sequence: Synthetic oligonucleotide
  Sense strand starting at position 2296 of SEQ ID NO: 3664
cugacaugguuccuuggaa

SEQ ID NO: 285013 - RNA, 19 nt, Artificial Sequence
  Description of Artificial Sequence: Synthetic oligonucleotide
  Antisense strand to SEQ ID NO: 285012
uuccaaggaaccaugucag

SEQ ID NO: 285014 - RNA, 19 nt, Artificial Sequence
  Description of Artificial Sequence: Synthetic oligonucleotide
  Sense strand starting at position 2297 of SEQ ID NO: 3664
ugacaugguuccuuggaaa

SEQ ID NO: 285015 - RNA, 19 nt, Artificial Sequence
  Description of Artificial Sequence: Synthetic oligonucleotide
  Antisense strand to SEQ ID NO: 285014
uuuccaaggaaccauguca

SEQ ID NO: 285016 - RNA, 19 nt, Artificial Sequence
  Description of Artificial Sequence: Synthetic oligonucleotide
  Sense strand starting at position 2376 of SEQ ID NO: 3664
gggcgacauuugcccaagu

SEQ ID NO: 285017 - RNA, 19 nt, Artificial Sequence
  Description of Artificial Sequence: Synthetic oligonucleotide
  Antisense strand to SEQ ID NO: 285016
acuugggcaaaugucgccc

SEQ ID NO: 285018 - RNA, 19 nt, Artificial Sequence
  Description of Artificial Sequence: Synthetic oligonucleotide
  Sense strand starting at position 2377 of SEQ ID NO: 3664
ggcgacauuugcccaagua

SEQ ID NO: 285019 - RNA, 19 nt, Artificial Sequence
  Description of Artificial Sequence: Synthetic oligonucleotide
  Antisense strand to SEQ ID NO: 285018
uacuugggcaaaugucgcc

SEQ ID NO: 285020 - RNA, 19 nt, Artificial Sequence
  Description of Artificial Sequence: Synthetic oligonucleotide
  Sense strand starting at position 2418 of SEQ ID NO: 3664
acuugcuuugccugguuaa

SEQ ID NO: 285021 - RNA, 19 nt, Artificial Sequence
  Description of Artificial Sequence: Synthetic oligonucleotide
  Antisense strand to SEQ ID NO: 285020
uuaaccaggcaaagcaagu

SEQ ID NO: 285022 - RNA, 19 nt, Artificial Sequence
  Description of Artificial Sequence: Synthetic oligonucleotide
  Sense strand starting at position 2554 of SEQ ID NO: 3664
agaagucacagcgaugauu

SEQ ID NO: 285023 - RNA, 19 nt, Artificial Sequence
  Description of Artificial Sequence: Synthetic oligonucleotide
  Antisense strand to SEQ ID NO: 285022
aaucaucgcugugacuucu

SEQ ID NO: 285024 - RNA, 19 nt, Artificial Sequence
  Description of Artificial Sequence: Synthetic oligonucleotide
  Sense strand starting at position 2593 of SEQ ID NO: 3664
ggacuuauuuaaugggucu

SEQ ID NO: 285025 - RNA, 19 nt, Artificial Sequence
  Description of Artificial Sequence: Synthetic oligonucleotide
  Antisense strand to SEQ ID NO: 285024
agacccauuaaauaagucc

SEQ ID NO: 285026 - RNA, 19 nt, Artificial Sequence
  Description of Artificial Sequence: Synthetic oligonucleotide
  Sense strand starting at position 2654 of SEQ ID NO: 3664
agaaauuuaugugaaggac

SEQ ID NO: 285027 - RNA, 19 nt, Artificial Sequence
  Description of Artificial Sequence: Synthetic oligonucleotide
  Antisense strand to SEQ ID NO: 285026
guccuucacauaaauuucu

SEQ ID NO: 285028 - RNA, 19 nt, Artificial Sequence
  Description of Artificial Sequence: Synthetic oligonucleotide
  Sense strand starting at position 2698 of SEQ ID NO: 3664
gauuauuuguggcagguga

SEQ ID NO: 285029 - RNA, 19 nt, Artificial Sequence
  Description of Artificial Sequence: Synthetic oligonucleotide
  Antisense strand to SEQ ID NO: 285028
ucaccugccacaaauaauc

SEQ ID NO: 285030 - RNA, 19 nt, Artificial Sequence
  Description of Artificial Sequence: Synthetic oligonucleotide
  Sense strand starting at position 2880 of SEQ ID NO: 3664
gaagcaaaccugcagucau

SEQ ID NO: 285031 - RNA, 19 nt, Artificial Sequence
  Description of Artificial Sequence: Synthetic oligonucleotide
  Antisense strand to SEQ ID NO: 285030
augacugcagguuugcuuc

SEQ ID NO: 285032 - RNA, 19 nt, Artificial Sequence
  Description of Artificial Sequence: Synthetic oligonucleotide
  Sense strand starting at position 2891 of SEQ ID NO: 3664
gcagucauaguggaugaga

SEQ ID NO: 285033 - RNA, 19 nt, Artificial Sequence
  Description of Artificial Sequence: Synthetic oligonucleotide
  Antisense strand to SEQ ID NO: 285032
ucucauccacuaugacugc

SEQ ID NO: 285034 - RNA, 19 nt, Artificial Sequence
  Description of Artificial Sequence: Synthetic oligonucleotide
  Sense strand starting at position 2893 of SEQ ID NO: 3664
agucauaguggaugagauu

SEQ ID NO: 285035 - RNA, 19 nt, Artificial Sequence
  Description of Artificial Sequence: Synthetic oligonucleotide
  Antisense strand to SEQ ID NO: 285034
aaucucauccacuaugacu

SEQ ID NO: 285036 - RNA, 19 nt, Artificial Sequence
  Description of Artificial Sequence: Synthetic oligonucleotide
  Sense strand starting at position 2986 of SEQ ID NO: 3664
cugccugugaagggaaauu

SEQ ID NO: 285037 - RNA, 19 nt, Artificial Sequence
  Description of Artificial Sequence: Synthetic oligonucleotide
  Antisense strand to SEQ ID NO: 285036
aauuucccuucacaggcag

SEQ ID NO: 285038 - RNA, 19 nt, Artificial Sequence
  Description of Artificial Sequence: Synthetic oligonucleotide
  Sense strand starting at position 3009 of SEQ ID NO: 3664
ugacguggcgaugaugaua

SEQ ID NO: 285039 - RNA, 19 nt, Artificial Sequence
  Description of Artificial Sequence: Synthetic oligonucleotide
  Antisense strand to SEQ ID NO: 285038
uaucaucaucgccacguca

SEQ ID NO: 285040 - RNA, 19 nt, Artificial Sequence
  Description of Artificial Sequence: Synthetic oligonucleotide
  Sense strand starting at position 3020 of SEQ ID NO: 3664
ugaugauauaguugguaga

SEQ ID NO: 285041 - RNA, 19 nt, Artificial Sequence
  Description of Artificial Sequence: Synthetic oligonucleotide
  Antisense strand to SEQ ID NO: 285040
ucuaccaacuauaucauca

SEQ ID NO: 285042 - RNA, 19 nt, Artificial Sequence
  Description of Artificial Sequence: Synthetic oligonucleotide
  Sense strand starting at position 3021 of SEQ ID NO: 3664
gaugauauaguugguagau

SEQ ID NO: 285043 - RNA, 19 nt, Artificial Sequence
  Description of Artificial Sequence: Synthetic oligonucleotide
  Antisense strand to SEQ ID NO: 285042
aucuaccaacuauaucauc

SEQ ID NO: 285044 - RNA, 19 nt, Artificial Sequence
  Description of Artificial Sequence: Synthetic oligonucleotide
  Sense strand starting at position 3022 of SEQ ID NO: 3664
augauauaguugguagaua

SEQ ID NO: 285045 - RNA, 19 nt, Artificial Sequence
  Description of Artificial Sequence: Synthetic oligonucleotide
  Antisense strand to SEQ ID NO: 285044
uaucuaccaacuauaucau

SEQ ID NO: 285046 - RNA, 19 nt, Artificial Sequence
  Description of Artificial Sequence: Synthetic oligonucleotide
  Sense strand starting at position 3065 of SEQ ID NO: 3664
caggaauccugggaagacu

SEQ ID NO: 285047 - RNA, 19 nt, Artificial Sequence
  Description of Artificial Sequence: Synthetic oligonucleotide
  Antisense strand to SEQ ID NO: 285046
agucuucccaggauuccug

SEQ ID NO: 285048 - RNA, 19 nt, Artificial Sequence
  Description of Artificial Sequence: Synthetic oligonucleotide
  Sense strand starting at position 3098 of SEQ ID NO: 3664
ggacaugugaaguaagguu

SEQ ID NO: 285049 - RNA, 19 nt, Artificial Sequence
  Description of Artificial Sequence: Synthetic oligonucleotide
  Antisense strand to SEQ ID NO: 285048
aaccuuacuucacaugucc

SEQ ID NO: 285050 - RNA, 19 nt, Artificial Sequence
  Description of Artificial Sequence: Synthetic oligonucleotide
  Sense strand starting at position 3166 of SEQ ID NO: 3664
uggagaugcauaggucuaa

SEQ ID NO: 285051 - RNA, 19 nt, Artificial Sequence
  Description of Artificial Sequence: Synthetic oligonucleotide
  Antisense strand to SEQ ID NO: 285050
uuagaccuaugcaucucca

SEQ ID NO: 285052 - RNA, 19 nt, Artificial Sequence
  Description of Artificial Sequence: Synthetic oligonucleotide
  Sense strand starting at position 3170 of SEQ ID NO: 3664
gaugcauaggucuaagauu

SEQ ID NO: 285053 - RNA, 19 nt, Artificial Sequence
  Description of Artificial Sequence: Synthetic oligonucleotide
  Antisense strand to SEQ ID NO: 285052
aaucuuagaccuaugcauc

SEQ ID NO: 285054 - RNA, 19 nt, Artificial Sequence
  Description of Artificial Sequence: Synthetic oligonucleotide
  Sense strand starting at position 3198 of SEQ ID NO: 3664
ugucauuucuaggaggaca

SEQ ID NO: 285055 - RNA, 19 nt, Artificial Sequence
  Description of Artificial Sequence: Synthetic oligonucleotide
  Antisense strand to SEQ ID NO: 285054
uguccuccuagaaaugaca

SEQ ID NO: 285056 - RNA, 19 nt, Artificial Sequence
  Description of Artificial Sequence: Synthetic oligonucleotide
  Sense strand starting at position 3347 of SEQ ID NO: 3664
aggagagauuggucagcuu

SEQ ID NO: 285057 - RNA, 19 nt, Artificial Sequence
  Description of Artificial Sequence: Synthetic oligonucleotide
  Antisense strand to SEQ ID NO: 285056
aagcugaccaaucucuccu

SEQ ID NO: 285058 - RNA, 19 nt, Artificial Sequence
  Description of Artificial Sequence: Synthetic oligonucleotide
  Sense strand starting at position 3613 of SEQ ID NO: 3664
ggcagaguuugagaggaaa

SEQ ID NO: 285059 - RNA, 19 nt, Artificial Sequence
  Description of Artificial Sequence: Synthetic oligonucleotide
  Antisense strand to SEQ ID NO: 285058
uuuccucucaaacucugcc

SEQ ID NO: 285060 - RNA, 19 nt, Artificial Sequence
  Description of Artificial Sequence: Synthetic oligonucleotide
  Sense strand starting at position 3649 of SEQ ID NO: 3664
accuuucuuccaugagaga

SEQ ID NO: 285061 - RNA, 19 nt, Artificial Sequence
  Description of Artificial Sequence: Synthetic oligonucleotide
  Antisense strand to SEQ ID NO: 285060
ucucucauggaagaaaggu

SEQ ID NO: 285062 - RNA, 19 nt, Artificial Sequence
  Description of Artificial Sequence: Synthetic oligonucleotide
  Sense strand starting at position 3687 of SEQ ID NO: 3664
augugauugugagcuuugu

SEQ ID NO: 285063 - RNA, 19 nt, Artificial Sequence
  Description of Artificial Sequence: Synthetic oligonucleotide
  Antisense strand to SEQ ID NO: 285062
acaaagcucacaaucacau

SEQ ID NO: 285064 - RNA, 19 nt, Artificial Sequence
  Description of Artificial Sequence: Synthetic oligonucleotide
  Sense strand starting at position 3722 of SEQ ID NO: 3664
ccaggcucagauggauaaa

SEQ ID NO: 285065 - RNA, 19 nt, Artificial Sequence
  Description of Artificial Sequence: Synthetic oligonucleotide
  Antisense strand to SEQ ID NO: 285064
uuuauccaucugagccugg

SEQ ID NO: 285066 - RNA, 19 nt, Artificial Sequence
  Description of Artificial Sequence: Synthetic oligonucleotide
  Sense strand starting at position 3739 of SEQ ID NO: 3664
aaaugauggugagaaauug

SEQ ID NO: 285067 - RNA, 19 nt, Artificial Sequence
  Description of Artificial Sequence: Synthetic oligonucleotide
  Antisense strand to SEQ ID NO: 285066
caauuucucaccaucauuu

SEQ ID NO: 285068 - RNA, 19 nt, Artificial Sequence
  Description of Artificial Sequence: Synthetic oligonucleotide
  Sense strand starting at position 3808 of SEQ ID NO: 3664
cucagaauuuaugguuuga

SEQ ID NO: 285069 - RNA, 19 nt, Artificial Sequence
  Description of Artificial Sequence: Synthetic oligonucleotide
  Antisense strand to SEQ ID NO: 285068
ucaaaccauaaauucugag

SEQ ID NO: 285070 - RNA, 19 nt, Artificial Sequence
  Description of Artificial Sequence: Synthetic oligonucleotide
  Sense strand starting at position 3828 of SEQ ID NO: 3664
ggguauuggccacacagua

SEQ ID NO: 285071 - RNA, 19 nt, Artificial Sequence
  Description of Artificial Sequence: Synthetic oligonucleotide
  Antisense strand to SEQ ID NO: 285070
uacuguguggccaauaccc

SEQ ID NO: 285072 - RNA, 19 nt, Artificial Sequence
  Description of Artificial Sequence: Synthetic oligonucleotide
  Sense strand starting at position 3841 of SEQ ID NO: 3664
acaguaugcuaugcuguua

SEQ ID NO: 285073 - RNA, 19 nt, Artificial Sequence
  Description of Artificial Sequence: Synthetic oligonucleotide
  Antisense strand to SEQ ID NO: 285072
uaacagcauagcauacugu

SEQ ID NO: 285074 - RNA, 19 nt, Artificial Sequence
  Description of Artificial Sequence: Synthetic oligonucleotide
  Sense strand starting at position 3864 of SEQ ID NO: 3664
cagucugaguuggugaguu

SEQ ID NO: 285075 - RNA, 19 nt, Artificial Sequence
  Description of Artificial Sequence: Synthetic oligonucleotide
  Antisense strand to SEQ ID NO: 285074
aacucaccaacucagacug

SEQ ID NO: 285076 - RNA, 19 nt, Artificial Sequence
  Description of Artificial Sequence: Synthetic oligonucleotide
  Sense strand starting at position 107 of SEQ ID NO: 3665
gggaaaguucacgguguca

SEQ ID NO: 285077 - RNA, 19 nt, Artificial Sequence
  Description of Artificial Sequence: Synthetic oligonucleotide
  Antisense strand to SEQ ID NO: 285076
ugacaccgugaacuuuccc

SEQ ID NO: 285078 - RNA, 19 nt, Artificial Sequence
  Description of Artificial Sequence: Synthetic oligonucleotide
  Sense strand starting at position 582 of SEQ ID NO: 3665
gcaggauguuuguucaaug

SEQ ID NO: 285079 - RNA, 19 nt, Artificial Sequence
  Description of Artificial Sequence: Synthetic oligonucleotide
  Antisense strand to SEQ ID NO: 285078
cauugaacaaacauccugc

SEQ ID NO: 285080 - RNA, 19 nt, Artificial Sequence
  Description of Artificial Sequence: Synthetic oligonucleotide
  Sense strand starting at position 894 of SEQ ID NO: 3665
cggccaguucaauggauuu

SEQ ID NO: 285081 - RNA, 19 nt, Artificial Sequence
  Description of Artificial Sequence: Synthetic oligonucleotide
  Antisense strand to SEQ ID NO: 285080
aaauccauugaacuggccg

SEQ ID NO: 285082 - RNA, 19 nt, Artificial Sequence
  Description of Artificial Sequence: Synthetic oligonucleotide
  Sense strand starting at position 944 of SEQ ID NO: 3665
cgaacuuuggaguggacau

SEQ ID NO: 285083 - RNA, 19 nt, Artificial Sequence
  Description of Artificial Sequence: Synthetic oligonucleotide
  Antisense strand to SEQ ID NO: 285082
auguccacuccaaaguucg

SEQ ID NO: 285084 - RNA, 19 nt, Artificial Sequence
  Description of Artificial Sequence: Synthetic oligonucleotide
  Sense strand starting at position 2164 of SEQ ID NO: 3665
uuuaguggccuccagaaga

SEQ ID NO: 285085 - RNA, 19 nt, Artificial Sequence
  Description of Artificial Sequence: Synthetic oligonucleotide
  Antisense strand to SEQ ID NO: 285084
ucuucuggaggccacuaaa

SEQ ID NO: 285086 - RNA, 19 nt, Artificial Sequence
  Description of Artificial Sequence: Synthetic oligonucleotide
  Sense strand starting at position 2412 of SEQ ID NO: 3665
caaggaaagucugucuguu

SEQ ID NO: 285087 - RNA, 19 nt, Artificial Sequence
  Description of Artificial Sequence: Synthetic oligonucleotide
  Antisense strand to SEQ ID NO: 285086
aacagacagacuuuccuug

SEQ ID NO: 285088 - RNA, 19 nt, Artificial Sequence
  Description of Artificial Sequence: Synthetic oligonucleotide
  Sense strand starting at position 2439 of SEQ ID NO: 3665
uauccuugucuugaaggau

SEQ ID NO: 285089 - RNA, 19 nt, Artificial Sequence
  Description of Artificial Sequence: Synthetic oligonucleotide
  Antisense strand to SEQ ID NO: 285088
auccuucaagacaaggaua

SEQ ID NO: 285090 - RNA, 19 nt, Artificial Sequence
  Description of Artificial Sequence: Synthetic oligonucleotide
  Sense strand starting at position 2442 of SEQ ID NO: 3665
ccuugucuugaaggaugaa

SEQ ID NO: 285091 - RNA, 19 nt, Artificial Sequence
  Description of Artificial Sequence: Synthetic oligonucleotide
  Antisense strand to SEQ ID NO: 285090
uucauccuucaagacaagg

SEQ ID NO: 285092 - RNA, 19 nt, Artificial Sequence
  Description of Artificial Sequence: Synthetic oligonucleotide
  Sense strand starting at position 2497 of SEQ ID NO: 3665
auggacaucugggauccaa

SEQ ID NO: 285093 - RNA, 19 nt, Artificial Sequence
  Description of Artificial Sequence: Synthetic oligonucleotide
  Antisense strand to SEQ ID NO: 285092
uuggaucccagauguccau

SEQ ID NO: 285094 - RNA, 19 nt, Artificial Sequence
  Description of Artificial Sequence: Synthetic oligonucleotide
  Sense strand starting at position 2544 of SEQ ID NO: 3665
guauccagcuuguuggaau

SEQ ID NO: 285095 - RNA, 19 nt, Artificial Sequence
  Description of Artificial Sequence: Synthetic oligonucleotide
  Antisense strand to SEQ ID NO: 285094
auuccaacaagcuggauac

SEQ ID NO: 285096 - RNA, 19 nt, Artificial Sequence
  Description of Artificial Sequence: Synthetic oligonucleotide
  Sense strand starting at position 2561 of SEQ ID NO: 3665
aucuaagaucugcgaaggu

SEQ ID NO: 285097 - RNA, 19 nt, Artificial Sequence
  Description of Artificial Sequence: Synthetic oligonucleotide
  Antisense strand to SEQ ID NO: 285096
accuucgcagaucuuagau

SEQ ID NO: 285098 - RNA, 19 nt, Artificial Sequence
  Description of Artificial Sequence: Synthetic oligonucleotide
  Sense strand starting at position 2565 of SEQ ID NO: 3665
aagaucugcgaagguauua

SEQ ID NO: 285099 - RNA, 19 nt, Artificial Sequence
  Description of Artificial Sequence: Synthetic oligonucleotide
  Antisense strand to SEQ ID NO: 285098
uaauaccuucgcagaucuu

SEQ ID NO: 285100 - RNA, 19 nt, Artificial Sequence
  Description of Artificial Sequence: Synthetic oligonucleotide
  Sense strand starting at position 2638 of SEQ ID NO: 3665
guuaaauuauacgucagau

SEQ ID NO: 285101 - RNA, 19 nt, Artificial Sequence
  Description of Artificial Sequence: Synthetic oligonucleotide
  Antisense strand to SEQ ID NO: 285100
aucugacguauaauuuaac

SEQ ID NO: 285102 - RNA, 19 nt, Artificial Sequence
  Description of Artificial Sequence: Synthetic oligonucleotide
  Sense strand starting at position 2640 of SEQ ID NO: 3665
uaaauuauacgucagaugu

SEQ ID NO: 285103 - RNA, 19 nt, Artificial Sequence
  Description of Artificial Sequence: Synthetic oligonucleotide
  Antisense strand to SEQ ID NO: 285102
acaucugacguauaauuua

SEQ ID NO: 285104 - RNA, 19 nt, Artificial Sequence
  Description of Artificial Sequence: Synthetic oligonucleotide
  Sense strand starting at position 2648 of SEQ ID NO: 3665
acgucagaugugcauauau

SEQ ID NO: 285105 - RNA, 19 nt, Artificial Sequence
  Description of Artificial Sequence: Synthetic oligonucleotide
  Antisense strand to SEQ ID NO: 285104
auauaugcacaucugacgu

SEQ ID NO: 285106 - RNA, 19 nt, Artificial Sequence
  Description of Artificial Sequence: Synthetic oligonucleotide
  Sense strand starting at position 2650 of SEQ ID NO: 3665
gucagaugugcauauauga

SEQ ID NO: 285107 - RNA, 19 nt, Artificial Sequence
  Description of Artificial Sequence: Synthetic oligonucleotide
  Antisense strand to SEQ ID NO: 285106
ucauauaugcacaucugac

SEQ ID NO: 285108 - RNA, 19 nt, Artificial Sequence
  Description of Artificial Sequence: Synthetic oligonucleotide
  Sense strand starting at position 2678 of SEQ ID NO: 3665
acgagugugcaugaaauaa

SEQ ID NO: 285109 - RNA, 19 nt, Artificial Sequence
  Description of Artificial Sequence: Synthetic oligonucleotide
  Antisense strand to SEQ ID NO: 285108
uuauuucaugcacacucgu

SEQ ID NO: 285110 - RNA, 19 nt, Artificial Sequence
  Description of Artificial Sequence: Synthetic oligonucleotide
  Sense strand starting at position 2784 of SEQ ID NO: 3665
cacacuguguggucuaaau

SEQ ID NO: 285111 - RNA, 19 nt, Artificial Sequence
  Description of Artificial Sequence: Synthetic oligonucleotide
  Antisense strand to SEQ ID NO: 285110
auuuagaccacacagugug

SEQ ID NO: 285112 - RNA, 19 nt, Artificial Sequence
  Description of Artificial Sequence: Synthetic oligonucleotide
  Sense strand starting at position 2786 of SEQ ID NO: 3665
cacuguguggucuaaauuc

SEQ ID NO: 285113 - RNA, 19 nt, Artificial Sequence
  Description of Artificial Sequence: Synthetic oligonucleotide
  Antisense strand to SEQ ID NO: 285112
gaauuuagaccacacagug

SEQ ID NO: 285114 - RNA, 19 nt, Artificial Sequence
  Description of Artificial Sequence: Synthetic oligonucleotide
  Sense strand starting at position 2880 of SEQ ID NO: 3665
guggcaauaguauguauga

SEQ ID NO: 285115 - RNA, 19 nt, Artificial Sequence
  Description of Artificial Sequence: Synthetic oligonucleotide
  Antisense strand to SEQ ID NO: 285114
ucauacauacuauugccac

SEQ ID NO: 285116 - RNA, 19 nt, Artificial Sequence
  Description of Artificial Sequence: Synthetic oligonucleotide
  Sense strand starting at position 2882 of SEQ ID NO: 3665
ggcaauaguauguaugagu

SEQ ID NO: 285117 - RNA, 19 nt, Artificial Sequence
  Description of Artificial Sequence: Synthetic oligonucleotide
  Antisense strand to SEQ ID NO: 285116
acucauacauacuauugcc

SEQ ID NO: 285118 - RNA, 19 nt, Artificial Sequence
  Description of Artificial Sequence: Synthetic oligonucleotide
  Sense strand starting at position 2897 of SEQ ID NO: 3665
gaguucuucggagggauua

SEQ ID NO: 285119 - RNA, 19 nt, Artificial Sequence
  Description of Artificial Sequence: Synthetic oligonucleotide
  Antisense strand to SEQ ID NO: 285118
uaaucccuccgaagaacuc

SEQ ID NO: 285120 - RNA, 19 nt, Artificial Sequence
  Description of Artificial Sequence: Synthetic oligonucleotide
  Sense strand starting at position 2898 of SEQ ID NO: 3665
aguucuucggagggauuaa

SEQ ID NO: 285121 - RNA, 19 nt, Artificial Sequence
  Description of Artificial Sequence: Synthetic oligonucleotide
  Antisense strand to SEQ ID NO: 285120
uuaaucccuccgaagaacu

SEQ ID NO: 285122 - RNA, 19 nt, Artificial Sequence
  Description of Artificial Sequence: Synthetic oligonucleotide
  Sense strand starting at position 2899 of SEQ ID NO: 3665
guucuucggagggauuaaa

SEQ ID NO: 285123 - RNA, 19 nt, Artificial Sequence
  Description of Artificial Sequence: Synthetic oligonucleotide
  Antisense strand to SEQ ID NO: 285122
uuuaaucccuccgaagaac

SEQ ID NO: 285124 - RNA, 19 nt, Artificial Sequence
  Description of Artificial Sequence: Synthetic oligonucleotide
  Sense strand starting at position 3126 of SEQ ID NO: 3665
acuccauaguccuuagcua

SEQ ID NO: 285125 - RNA, 19 nt, Artificial Sequence
  Description of Artificial Sequence: Synthetic oligonucleotide
  Antisense strand to SEQ ID NO: 285124
uagcuaaggacuauggagu

SEQ ID NO: 285126 - RNA, 19 nt, Artificial Sequence
  Description of Artificial Sequence: Synthetic oligonucleotide
  Sense strand starting at position 3271 of SEQ ID NO: 3665
uugagaaguuauucuggua

SEQ ID NO: 285127 - RNA, 19 nt, Artificial Sequence
  Description of Artificial Sequence: Synthetic oligonucleotide
  Antisense strand to SEQ ID NO: 285126
uaccagaauaacuucucaa

SEQ ID NO: 285128 - RNA, 19 nt, Artificial Sequence
  Description of Artificial Sequence: Synthetic oligonucleotide
  Sense strand starting at position 3389 of SEQ ID NO: 3665
ugggaagaaucuuaacaac

SEQ ID NO: 285129 - RNA, 19 nt, Artificial Sequence
  Description of Artificial Sequence: Synthetic oligonucleotide
  Antisense strand to SEQ ID NO: 285128
guuguuaagauucuuccca

SEQ ID NO: 285130 - RNA, 19 nt, Artificial Sequence
  Description of Artificial Sequence: Synthetic oligonucleotide
  Sense strand starting at position 3460 of SEQ ID NO: 3665
aggccugggcuuuaugaaa

SEQ ID NO: 285131 - RNA, 19 nt, Artificial Sequence
  Description of Artificial Sequence: Synthetic oligonucleotide
  Antisense strand to SEQ ID NO: 285130
uuucauaaagcccaggccu

SEQ ID NO: 285132 - RNA, 19 nt, Artificial Sequence
  Description of Artificial Sequence: Synthetic oligonucleotide
  Sense strand starting at position 3516 of SEQ ID NO: 3665
aaagaaguuccugguugag

SEQ ID NO: 285133 - RNA, 19 nt, Artificial Sequence
  Description of Artificial Sequence: Synthetic oligonucleotide
  Antisense strand to SEQ ID NO: 285132
cucaaccaggaacuucuuu

SEQ ID NO: 285134 - RNA, 19 nt, Artificial Sequence
  Description of Artificial Sequence: Synthetic oligonucleotide
  Sense strand starting at position 3518 of SEQ ID NO: 3665
agaaguuccugguugagua

SEQ ID NO: 285135 - RNA, 19 nt, Artificial Sequence
  Description of Artificial Sequence: Synthetic oligonucleotide
  Antisense strand to SEQ ID NO: 285134
uacucaaccaggaacuucu

SEQ ID NO: 285136 - RNA, 19 nt, Artificial Sequence
  Description of Artificial Sequence: Synthetic oligonucleotide
  Sense strand starting at position 3649 of SEQ ID NO: 3665
auggaacacagacguauaa

SEQ ID NO: 285137 - RNA, 19 nt, Artificial Sequence
  Description of Artificial Sequence: Synthetic oligonucleotide
  Antisense strand to SEQ ID NO: 285136
uuauacgucuguguuccau

SEQ ID NO: 285138 - RNA, 19 nt, Artificial Sequence
  Description of Artificial Sequence: Synthetic oligonucleotide
  Sense strand starting at position 3746 of SEQ ID NO: 3665
ugagacuuguaauugcuca

SEQ ID NO: 285139 - RNA, 19 nt, Artificial Sequence
  Description of Artificial Sequence: Synthetic oligonucleotide
  Antisense strand to SEQ ID NO: 285138
ugagcaauuacaagucuca

SEQ ID NO: 285140 - RNA, 19 nt, Artificial Sequence
  Description of Artificial Sequence: Synthetic oligonucleotide
  Sense strand starting at position 3765 of SEQ ID NO: 3665
ugugguaauacaugugacu

SEQ ID NO: 285141 - RNA, 19 nt, Artificial Sequence
  Description of Artificial Sequence: Synthetic oligonucleotide
  Antisense strand to SEQ ID NO: 285140
agucacauguauuaccaca

SEQ ID NO: 285142 - RNA, 19 nt, Artificial Sequence
  Description of Artificial Sequence: Synthetic oligonucleotide
  Sense strand starting at position 3840 of SEQ ID NO: 3665
ggacacuggcauugaaagu

SEQ ID NO: 285143 - RNA, 19 nt, Artificial Sequence
  Description of Artificial Sequence: Synthetic oligonucleotide
  Antisense strand to SEQ ID NO: 285142
acuuucaaugccagugucc

SEQ ID NO: 285144 - RNA, 19 nt, Artificial Sequence
  Description of Artificial Sequence: Synthetic oligonucleotide
  Sense strand starting at position 3942 of SEQ ID NO: 3665
cuagaucucugaucucuga

SEQ ID NO: 285145 - RNA, 19 nt, Artificial Sequence
  Description of Artificial Sequence: Synthetic oligonucleotide
  Antisense strand to SEQ ID NO: 285144
ucagagaucagagaucuag

SEQ ID NO: 285146 - RNA, 19 nt, Artificial Sequence
  Description of Artificial Sequence: Synthetic oligonucleotide
  Sense strand starting at position 3952 of SEQ ID NO: 3665
gaucucugagcugguguaa

SEQ ID NO: 285147 - RNA, 19 nt, Artificial Sequence
  Description of Artificial Sequence: Synthetic oligonucleotide
  Antisense strand to SEQ ID NO: 285146
uuacaccagcucagagauc

SEQ ID NO: 285148 - RNA, 19 nt, Artificial Sequence
  Description of Artificial Sequence: Synthetic oligonucleotide
  Sense strand starting at position 3963 of SEQ ID NO: 3665
ugguguaauacuuagucuu

SEQ ID NO: 285149 - RNA, 19 nt, Artificial Sequence
  Description of Artificial Sequence: Synthetic oligonucleotide
  Antisense strand to SEQ ID NO: 285148
aagacuaaguauuacacca

SEQ ID NO: 285150 - RNA, 19 nt, Artificial Sequence
  Description of Artificial Sequence: Synthetic oligonucleotide
  Sense strand starting at position 3965 of SEQ ID NO: 3665
guguaauacuuagucuuug

SEQ ID NO: 285151 - RNA, 19 nt, Artificial Sequence
  Description of Artificial Sequence: Synthetic oligonucleotide
  Antisense strand to SEQ ID NO: 285150
caaagacuaaguauuacac

SEQ ID NO: 285152 - RNA, 19 nt, Artificial Sequence
  Description of Artificial Sequence: Synthetic oligonucleotide
  Sense strand starting at position 3966 of SEQ ID NO: 3665
uguaauacuuagucuuugu

SEQ ID NO: 285153 - RNA, 19 nt, Artificial Sequence
  Description of Artificial Sequence: Synthetic oligonucleotide
  Antisense strand to SEQ ID NO: 285152
acaaagacuaaguauuaca

SEQ ID NO: 285154 - RNA, 19 nt, Artificial Sequence
  Description of Artificial Sequence: Synthetic oligonucleotide
  Sense strand starting at position 3983 of SEQ ID NO: 3665
gucuguguugaucauggca

SEQ ID NO: 285155 - RNA, 19 nt, Artificial Sequence
  Description of Artificial Sequence: Synthetic oligonucleotide
  Antisense strand to SEQ ID NO: 285154
ugccaugaucaacacagac

SEQ ID NO: 285156 - RNA, 19 nt, Artificial Sequence
  Description of Artificial Sequence: Synthetic oligonucleotide
  Sense strand starting at position 12 of SEQ ID NO: 3666
uugaaagaguuguccuaac

SEQ ID NO: 285157 - RNA, 19 nt, Artificial Sequence
  Description of Artificial Sequence: Synthetic oligonucleotide
  Antisense strand to SEQ ID NO: 285156
guuaggacaacucuuucaa

SEQ ID NO: 285158 - RNA, 19 nt, Artificial Sequence
  Description of Artificial Sequence: Synthetic oligonucleotide
  Sense strand starting at position 91 of SEQ ID NO: 3666
aggcaaauccaagguuauu

SEQ ID NO: 285159 - RNA, 19 nt, Artificial Sequence
  Description of Artificial Sequence: Synthetic oligonucleotide
  Antisense strand to SEQ ID NO: 285158
aauaaccuuggauuugccu

SEQ ID NO: 285160 - RNA, 19 nt, Artificial Sequence
  Description of Artificial Sequence: Synthetic oligonucleotide
  Sense strand starting at position 190 of SEQ ID NO: 3666
aagaaugucugacuuagua

SEQ ID NO: 285161 - RNA, 19 nt, Artificial Sequence
  Description of Artificial Sequence: Synthetic oligonucleotide
  Antisense strand to SEQ ID NO: 285160
uacuaagucagacauucuu

SEQ ID NO: 285162 - RNA, 19 nt, Artificial Sequence
  Description of Artificial Sequence: Synthetic oligonucleotide
  Sense strand starting at position 202 of SEQ ID NO: 3666
cuuaguagcaguggaaacu

SEQ ID NO: 285163 - RNA, 19 nt, Artificial Sequence
  Description of Artificial Sequence: Synthetic oligonucleotide
  Antisense strand to SEQ ID NO: 285162
aguuuccacugcuacuaag

SEQ ID NO: 285164 - RNA, 19 nt, Artificial Sequence
  Description of Artificial Sequence: Synthetic oligonucleotide
  Sense strand starting at position 269 of SEQ ID NO: 3666
aguugugugaugcauaaag

SEQ ID NO: 285165 - RNA, 19 nt, Artificial Sequence
  Description of Artificial Sequence: Synthetic oligonucleotide
  Antisense strand to SEQ ID NO: 285164
cuuuaugcaucacacaacu

SEQ ID NO: 285166 - RNA, 19 nt, Artificial Sequence
  Description of Artificial Sequence: Synthetic oligonucleotide
  Sense strand starting at position 271 of SEQ ID NO: 3666
uugugugaugcauaaagug

SEQ ID NO: 285167 - RNA, 19 nt, Artificial Sequence
  Description of Artificial Sequence: Synthetic oligonucleotide
  Antisense strand to SEQ ID NO: 285166
cacuuuaugcaucacacaa

SEQ ID NO: 285168 - RNA, 19 nt, Artificial Sequence
  Description of Artificial Sequence: Synthetic oligonucleotide
  Sense strand starting at position 276 of SEQ ID NO: 3666
ugaugcauaaagugauguu

SEQ ID NO: 285169 - RNA, 19 nt, Artificial Sequence
  Description of Artificial Sequence: Synthetic oligonucleotide
  Antisense strand to SEQ ID NO: 285168
aacaucacuuuaugcauca

SEQ ID NO: 285170 - RNA, 19 nt, Artificial Sequence
  Description of Artificial Sequence: Synthetic oligonucleotide
  Sense strand starting at position 321 of SEQ ID NO: 3666
cucuguguacuggucguua

SEQ ID NO: 285171 - RNA, 19 nt, Artificial Sequence
  Description of Artificial Sequence: Synthetic oligonucleotide
  Antisense strand to SEQ ID NO: 285170
uaacgaccaguacacagag

SEQ ID NO: 285172 - RNA, 19 nt, Artificial Sequence
  Description of Artificial Sequence: Synthetic oligonucleotide
  Sense strand starting at position 391 of SEQ ID NO: 3666
augacuacugccugaagau

SEQ ID NO: 285173 - RNA, 19 nt, Artificial Sequence
  Description of Artificial Sequence: Synthetic oligonucleotide
  Antisense strand to SEQ ID NO: 285172
aucuucaggcaguagucau

SEQ ID NO: 285174 - RNA, 19 nt, Artificial Sequence
  Description of Artificial Sequence: Synthetic oligonucleotide
  Sense strand starting at position 424 of SEQ ID NO: 3666
uagggaaugguauguguag

SEQ ID NO: 285175 - RNA, 19 nt, Artificial Sequence
  Description of Artificial Sequence: Synthetic oligonucleotide
  Antisense strand to SEQ ID NO: 285174
cuacacauaccauucccua

SEQ ID NO: 285176 - RNA, 19 nt, Artificial Sequence
  Description of Artificial Sequence: Synthetic oligonucleotide
  Sense strand starting at position 426 of SEQ ID NO: 3666
gggaaugguauguguagga

SEQ ID NO: 285177 - RNA, 19 nt, Artificial Sequence
  Description of Artificial Sequence: Synthetic oligonucleotide
  Antisense strand to SEQ ID NO: 285176
uccuacacauaccauuccc

SEQ ID NO: 285178 - RNA, 19 nt, Artificial Sequence
  Description of Artificial Sequence: Synthetic oligonucleotide
  Sense strand starting at position 823 of SEQ ID NO: 3666
aggaaaucugacuggcagu

SEQ ID NO: 285179 - RNA, 19 nt, Artificial Sequence
  Description of Artificial Sequence: Synthetic oligonucleotide
  Antisense strand to SEQ ID NO: 285178
acugccagucagauuuccu

SEQ ID NO: 285180 - RNA, 19 nt, Artificial Sequence
  Description of Artificial Sequence: Synthetic oligonucleotide
  Sense strand starting at position 824 of SEQ ID NO: 3666
ggaaaucugacuggcagua

SEQ ID NO: 285181 - RNA, 19 nt, Artificial Sequence
  Description of Artificial Sequence: Synthetic oligonucleotide
  Antisense strand to SEQ ID NO: 285180
uacugccagucagauuucc

SEQ ID NO: 285182 - RNA, 19 nt, Artificial Sequence
  Description of Artificial Sequence: Synthetic oligonucleotide
  Sense strand starting at position 894 of SEQ ID NO: 3666
cuuacugacucagucagau

SEQ ID NO: 285183 - RNA, 19 nt, Artificial Sequence
  Description of Artificial Sequence: Synthetic oligonucleotide
  Antisense strand to SEQ ID NO: 285182
aucugacugagucaguaag

SEQ ID NO: 285184 - RNA, 19 nt, Artificial Sequence
  Description of Artificial Sequence: Synthetic oligonucleotide
  Sense strand starting at position 982 of SEQ ID NO: 3666
gagccaucacuuuauguug

SEQ ID NO: 285185 - RNA, 19 nt, Artificial Sequence
  Description of Artificial Sequence: Synthetic oligonucleotide
  Antisense strand to SEQ ID NO: 285184
caacauaaagugauggcuc

SEQ ID NO: 285186 - RNA, 19 nt, Artificial Sequence
  Description of Artificial Sequence: Synthetic oligonucleotide
  Sense strand starting at position 988 of SEQ ID NO: 3666
ucacuuuauguuggugaag

SEQ ID NO: 285187 - RNA, 19 nt, Artificial Sequence
  Description of Artificial Sequence: Synthetic oligonucleotide
  Antisense strand to SEQ ID NO: 285186
cuucaccaacauaaaguga

SEQ ID NO: 285188 - RNA, 19 nt, Artificial Sequence
  Description of Artificial Sequence: Synthetic oligonucleotide
  Sense strand starting at position 991 of SEQ ID NO: 3666
cuuuauguuggugaaggga

SEQ ID NO: 285189 - RNA, 19 nt, Artificial Sequence
  Description of Artificial Sequence: Synthetic oligonucleotide
  Antisense strand to SEQ ID NO: 285188
ucccuucaccaacauaaag

SEQ ID NO: 285190 - RNA, 19 nt, Artificial Sequence
  Description of Artificial Sequence: Synthetic oligonucleotide
  Sense strand starting at position 1038 of SEQ ID NO: 3666
gaguuuggauuccuacuca

SEQ ID NO: 285191 - RNA, 19 nt, Artificial Sequence
  Description of Artificial Sequence: Synthetic oligonucleotide
  Antisense strand to SEQ ID NO: 285190
ugaguaggaauccaaacuc

SEQ ID NO: 285192 - RNA, 19 nt, Artificial Sequence
  Description of Artificial Sequence: Synthetic oligonucleotide
  Sense strand starting at position 1266 of SEQ ID NO: 3666
gagggcuucccugaaaguu

SEQ ID NO: 285193 - RNA, 19 nt, Artificial Sequence
  Description of Artificial Sequence: Synthetic oligonucleotide
  Antisense strand to SEQ ID NO: 285192
aacuuucagggaagcccuc

SEQ ID NO: 285194 - RNA, 19 nt, Artificial Sequence
  Description of Artificial Sequence: Synthetic oligonucleotide
  Sense strand starting at position 2257 of SEQ ID NO: 3666
acgggaagcuucccugaaa

SEQ ID NO: 285195 - RNA, 19 nt, Artificial Sequence
  Description of Artificial Sequence: Synthetic oligonucleotide
  Antisense strand to SEQ ID NO: 285194
uuucagggaagcuucccgu

SEQ ID NO: 285196 - RNA, 19 nt, Artificial Sequence
  Description of Artificial Sequence: Synthetic oligonucleotide
  Sense strand starting at position 2258 of SEQ ID NO: 3666
cgggaagcuucccugaaag

SEQ ID NO: 285197 - RNA, 19 nt, Artificial Sequence
  Description of Artificial Sequence: Synthetic oligonucleotide
  Antisense strand to SEQ ID NO: 285196
cuuucagggaagcuucccg

SEQ ID NO: 285198 - RNA, 19 nt, Artificial Sequence
  Description of Artificial Sequence: Synthetic oligonucleotide
  Sense strand starting at position 2260 of SEQ ID NO: 3666
ggaagcuucccugaaagca

SEQ ID NO: 285199 - RNA, 19 nt, Artificial Sequence
  Description of Artificial Sequence: Synthetic oligonucleotide
  Antisense strand to SEQ ID NO: 285198
ugcuuucagggaagcuucc

SEQ ID NO: 285200 - RNA, 19 nt, Artificial Sequence
  Description of Artificial Sequence: Synthetic oligonucleotide
  Sense strand starting at position 2314 of SEQ ID NO: 3666
gauguuuguggagaguuua

SEQ ID NO: 285201 - RNA, 19 nt, Artificial Sequence
  Description of Artificial Sequence: Synthetic oligonucleotide
  Antisense strand to SEQ ID NO: 285200
uaaacucuccacaaacauc

SEQ ID NO: 285202 - RNA, 19 nt, Artificial Sequence
  Description of Artificial Sequence: Synthetic oligonucleotide
  Sense strand starting at position 2326 of SEQ ID NO: 3666
gaguuuauugugcaaggca

SEQ ID NO: 285203 - RNA, 19 nt, Artificial Sequence
  Description of Artificial Sequence: Synthetic oligonucleotide
  Antisense strand to SEQ ID NO: 285202
ugccuugcacaauaaacuc

SEQ ID NO: 285204 - RNA, 19 nt, Artificial Sequence
  Description of Artificial Sequence: Synthetic oligonucleotide
  Sense strand starting at position 2622 of SEQ ID NO: 3666
uuaugaugcuaauugauuc

SEQ ID NO: 285205 - RNA, 19 nt, Artificial Sequence
  Description of Artificial Sequence: Synthetic oligonucleotide
  Antisense strand to SEQ ID NO: 285204
gaaucaauuagcaucauaa

SEQ ID NO: 285206 - RNA, 19 nt, Artificial Sequence
  Description of Artificial Sequence: Synthetic oligonucleotide
  Sense strand starting at position 2629 of SEQ ID NO: 3666
gcuaauugauuccuuacag

SEQ ID NO: 285207 - RNA, 19 nt, Artificial Sequence
  Description of Artificial Sequence: Synthetic oligonucleotide
  Antisense strand to SEQ ID NO: 285206
cuguaaggaaucaauuagc

SEQ ID NO: 285208 - RNA, 19 nt, Artificial Sequence
  Description of Artificial Sequence: Synthetic oligonucleotide
  Sense strand starting at position 2706 of SEQ ID NO: 3666
uugaaauaggcauaagcau

SEQ ID NO: 285209 - RNA, 19 nt, Artificial Sequence
  Description of Artificial Sequence: Synthetic oligonucleotide
  Antisense strand to SEQ ID NO: 285208
augcuuaugccuauuucaa

SEQ ID NO: 285210 - RNA, 19 nt, Artificial Sequence
  Description of Artificial Sequence: Synthetic oligonucleotide
  Sense strand starting at position 2851 of SEQ ID NO: 3666
auuuauuguuuggacauca

SEQ ID NO: 285211 - RNA, 19 nt, Artificial Sequence
  Description of Artificial Sequence: Synthetic oligonucleotide
  Antisense strand to SEQ ID NO: 285210
ugauguccaaacaauaaau

SEQ ID NO: 285212 - RNA, 19 nt, Artificial Sequence
  Description of Artificial Sequence: Synthetic oligonucleotide
  Sense strand starting at position 2948 of SEQ ID NO: 3666
auugauuucugauagacuc

SEQ ID NO: 285213 - RNA, 19 nt, Artificial Sequence
  Description of Artificial Sequence: Synthetic oligonucleotide
  Antisense strand to SEQ ID NO: 285212
gagucuaucagaaaucaau

SEQ ID NO: 285214 - RNA, 19 nt, Artificial Sequence
  Description of Artificial Sequence: Synthetic oligonucleotide
  Sense strand starting at position 2975 of SEQ ID NO: 3666
gcguuaagggucuauaacu

SEQ ID NO: 285215 - RNA, 19 nt, Artificial Sequence
  Description of Artificial Sequence: Synthetic oligonucleotide
  Antisense strand to SEQ ID NO: 285214
aguuauagacccuuaacgc

SEQ ID NO: 285216 - RNA, 19 nt, Artificial Sequence
  Description of Artificial Sequence: Synthetic oligonucleotide
  Sense strand starting at position 2983 of SEQ ID NO: 3666
ggucuauaacugugggaag

SEQ ID NO: 285217 - RNA, 19 nt, Artificial Sequence
  Description of Artificial Sequence: Synthetic oligonucleotide
  Antisense strand to SEQ ID NO: 285216
cuucccacaguuauagacc

SEQ ID NO: 285218 - RNA, 19 nt, Artificial Sequence
  Description of Artificial Sequence: Synthetic oligonucleotide
  Sense strand starting at position 2985 of SEQ ID NO: 3666
ucuauaacugugggaagua

SEQ ID NO: 285219 - RNA, 19 nt, Artificial Sequence
  Description of Artificial Sequence: Synthetic oligonucleotide
  Antisense strand to SEQ ID NO: 285218
uacuucccacaguuauaga

SEQ ID NO: 285220 - RNA, 19 nt, Artificial Sequence
  Description of Artificial Sequence: Synthetic oligonucleotide
  Sense strand starting at position 2995 of SEQ ID NO: 3666
ugggaaguagguuguuacu

SEQ ID NO: 285221 - RNA, 19 nt, Artificial Sequence
  Description of Artificial Sequence: Synthetic oligonucleotide
  Antisense strand to SEQ ID NO: 285220
aguaacaaccuacuuccca

SEQ ID NO: 285222 - RNA, 19 nt, Artificial Sequence
  Description of Artificial Sequence: Synthetic oligonucleotide
  Sense strand starting at position 3358 of SEQ ID NO: 3666
gcugucucugugcuccaaa

SEQ ID NO: 285223 - RNA, 19 nt, Artificial Sequence
  Description of Artificial Sequence: Synthetic oligonucleotide
  Antisense strand to SEQ ID NO: 285222
uuuggagcacagagacagc

SEQ ID NO: 285224 - RNA, 19 nt, Artificial Sequence
  Description of Artificial Sequence: Synthetic oligonucleotide
  Sense strand starting at position 3466 of SEQ ID NO: 3666
gggccucaggcuuaaauua

SEQ ID NO: 285225 - RNA, 19 nt, Artificial Sequence
  Description of Artificial Sequence: Synthetic oligonucleotide
  Antisense strand to SEQ ID NO: 285224
uaauuuaagccugaggccc

SEQ ID NO: 285226 - RNA, 19 nt, Artificial Sequence
  Description of Artificial Sequence: Synthetic oligonucleotide
  Sense strand starting at position 3574 of SEQ ID NO: 3666
aaacguguccuugcaguuu

SEQ ID NO: 285227 - RNA, 19 nt, Artificial Sequence
  Description of Artificial Sequence: Synthetic oligonucleotide
  Antisense strand to SEQ ID NO: 285226
aaacugcaaggacacguuu

SEQ ID NO: 285228 - RNA, 19 nt, Artificial Sequence
  Description of Artificial Sequence: Synthetic oligonucleotide
  Sense strand starting at position 3711 of SEQ ID NO: 3666
acccgucuuggguaacuau

SEQ ID NO: 285229 - RNA, 19 nt, Artificial Sequence
  Description of Artificial Sequence: Synthetic oligonucleotide
  Antisense strand to SEQ ID NO: 285228
auaguuacccaagacgggu

SEQ ID NO: 285230 - RNA, 19 nt, Artificial Sequence
  Description of Artificial Sequence: Synthetic oligonucleotide
  Sense strand starting at position 3896 of SEQ ID NO: 3666
caacuagcacagugaugua

SEQ ID NO: 285231 - RNA, 19 nt, Artificial Sequence
  Description of Artificial Sequence: Synthetic oligonucleotide
  Antisense strand to SEQ ID NO: 285230
uacaucacugugcuaguug

SEQ ID NO: 285232 - RNA, 19 nt, Artificial Sequence
  Description of Artificial Sequence: Synthetic oligonucleotide
  Sense strand starting at position 3969 of SEQ ID NO: 3666
uuuacugugccagaguuga

SEQ ID NO: 285233 - RNA, 19 nt, Artificial Sequence
  Description of Artificial Sequence: Synthetic oligonucleotide
  Antisense strand to SEQ ID NO: 285232
ucaacucuggcacaguaaa

SEQ ID NO: 285234 - RNA, 19 nt, Artificial Sequence
  Description of Artificial Sequence: Synthetic oligonucleotide
  Sense strand starting at position 3980 of SEQ ID NO: 3666
agaguugaguacucaggau

SEQ ID NO: 285235 - RNA, 19 nt, Artificial Sequence
  Description of Artificial Sequence: Synthetic oligonucleotide
  Antisense strand to SEQ ID NO: 285234
auccugaguacucaacucu

SEQ ID NO: 285236 - RNA, 19 nt, Artificial Sequence
  Description of Artificial Sequence: Synthetic oligonucleotide
  Sense strand starting at position 384 of SEQ ID NO: 3667
ugaggcucucaccacaaau

SEQ ID NO: 285237 - RNA, 19 nt, Artificial Sequence
  Description of Artificial Sequence: Synthetic oligonucleotide
  Antisense strand to SEQ ID NO: 285236
auuuguggugagagccuca

SEQ ID NO: 285238 - RNA, 19 nt, Artificial Sequence
  Description of Artificial Sequence: Synthetic oligonucleotide
  Sense strand starting at position 707 of SEQ ID NO: 3667
ccagcaguccaugaacaga

SEQ ID NO: 285239 - RNA, 19 nt, Artificial Sequence
  Description of Artificial Sequence: Synthetic oligonucleotide
  Antisense strand to SEQ ID NO: 285238
ucuguucauggacugcugg

SEQ ID NO: 285240 - RNA, 19 nt, Artificial Sequence
  Description of Artificial Sequence: Synthetic oligonucleotide
  Sense strand starting at position 752 of SEQ ID NO: 3667
cacggugagagcuagaaga

SEQ ID NO: 285241 - RNA, 19 nt, Artificial Sequence
  Description of Artificial Sequence: Synthetic oligonucleotide
  Antisense strand to SEQ ID NO: 285240
ucuucuagcucucaccgug

SEQ ID NO: 285242 - RNA, 19 nt, Artificial Sequence
  Description of Artificial Sequence: Synthetic oligonucleotide
  Sense strand starting at position 1050 of SEQ ID NO: 3667
gaaucaguguccucaccag

SEQ ID NO: 285243 - RNA, 19 nt, Artificial Sequence
  Description of Artificial Sequence: Synthetic oligonucleotide
  Antisense strand to SEQ ID NO: 285242
cuggugaggacacugauuc

SEQ ID NO: 285244 - RNA, 19 nt, Artificial Sequence
  Description of Artificial Sequence: Synthetic oligonucleotide
  Sense strand starting at position 1307 of SEQ ID NO: 3667
acccuuaguaguuaguaga

SEQ ID NO: 285245 - RNA, 19 nt, Artificial Sequence
  Description of Artificial Sequence: Synthetic oligonucleotide
  Antisense strand to SEQ ID NO: 285244
ucuacuaacuacuaagggu

SEQ ID NO: 285246 - RNA, 19 nt, Artificial Sequence
  Description of Artificial Sequence: Synthetic oligonucleotide
  Sense strand starting at position 1318 of SEQ ID NO: 3667
uuaguagaugcucacuaga

SEQ ID NO: 285247 - RNA, 19 nt, Artificial Sequence
  Description of Artificial Sequence: Synthetic oligonucleotide
  Antisense strand to SEQ ID NO: 285246
ucuagugagcaucuacuaa

SEQ ID NO: 285248 - RNA, 19 nt, Artificial Sequence
  Description of Artificial Sequence: Synthetic oligonucleotide
  Sense strand starting at position 1321 of SEQ ID NO: 3667
guagaugcucacuagauaa

SEQ ID NO: 285249 - RNA, 19 nt, Artificial Sequence
  Description of Artificial Sequence: Synthetic oligonucleotide
  Antisense strand to SEQ ID NO: 285248
uuaucuagugagcaucuac

SEQ ID NO: 285250 - RNA, 19 nt, Artificial Sequence
  Description of Artificial Sequence: Synthetic oligonucleotide
  Sense strand starting at position 1430 of SEQ ID NO: 3667
cagagaaguuacucaggcu

SEQ ID NO: 285251 - RNA, 19 nt, Artificial Sequence
  Description of Artificial Sequence: Synthetic oligonucleotide
  Antisense strand to SEQ ID NO: 285250
agccugaguaacuucucug

SEQ ID NO: 285252 - RNA, 19 nt, Artificial Sequence
  Description of Artificial Sequence: Synthetic oligonucleotide
  Sense strand starting at position 1450 of SEQ ID NO: 3667
cgcugaauaaccugguaga

SEQ ID NO: 285253 - RNA, 19 nt, Artificial Sequence
  Description of Artificial Sequence: Synthetic oligonucleotide
  Antisense strand to SEQ ID NO: 285252
ucuaccagguuauucagcg

SEQ ID NO: 285254 - RNA, 19 nt, Artificial Sequence
  Description of Artificial Sequence: Synthetic oligonucleotide
  Sense strand starting at position 1451 of SEQ ID NO: 3667
gcugaauaaccugguagag

SEQ ID NO: 285255 - RNA, 19 nt, Artificial Sequence
  Description of Artificial Sequence: Synthetic oligonucleotide
  Antisense strand to SEQ ID NO: 285254
cucuaccagguuauucagc

SEQ ID NO: 285256 - RNA, 19 nt, Artificial Sequence
  Description of Artificial Sequence: Synthetic oligonucleotide
  Sense strand starting at position 1520 of SEQ ID NO: 3667
gcuguuacugaugaauaua

SEQ ID NO: 285257 - RNA, 19 nt, Artificial Sequence
  Description of Artificial Sequence: Synthetic oligonucleotide
  Antisense strand to SEQ ID NO: 285256
uauauucaucaguaacagc

SEQ ID NO: 285258 - RNA, 19 nt, Artificial Sequence
  Description of Artificial Sequence: Synthetic oligonucleotide
  Sense strand starting at position 1687 of SEQ ID NO: 3667
cggcccaaauuaucgagau

SEQ ID NO: 285259 - RNA, 19 nt, Artificial Sequence
  Description of Artificial Sequence: Synthetic oligonucleotide
  Antisense strand to SEQ ID NO: 285258
aucucgauaauuugggccg

SEQ ID NO: 285260 - RNA, 19 nt, Artificial Sequence
  Description of Artificial Sequence: Synthetic oligonucleotide
  Sense strand starting at position 1691 of SEQ ID NO: 3667
ccaaauuaucgagaugcuc

SEQ ID NO: 285261 - RNA, 19 nt, Artificial Sequence
  Description of Artificial Sequence: Synthetic oligonucleotide
  Antisense strand to SEQ ID NO: 285260
gagcaucucgauaauuugg

SEQ ID NO: 285262 - RNA, 19 nt, Artificial Sequence
  Description of Artificial Sequence: Synthetic oligonucleotide
  Sense strand starting at position 2041 of SEQ ID NO: 3667
ggccaaucagaguauccga

SEQ ID NO: 285263 - RNA, 19 nt, Artificial Sequence
  Description of Artificial Sequence: Synthetic oligonucleotide
  Antisense strand to SEQ ID NO: 285262
ucggauacucugauuggcc

SEQ ID NO: 285264 - RNA, 19 nt, Artificial Sequence
  Description of Artificial Sequence: Synthetic oligonucleotide
  Sense strand starting at position 2118 of SEQ ID NO: 3667
cucucauuggcuugaacaa

SEQ ID NO: 285265 - RNA, 19 nt, Artificial Sequence
  Description of Artificial Sequence: Synthetic oligonucleotide
  Antisense strand to SEQ ID NO: 285264
uuguucaagccaaugagag

SEQ ID NO: 285266 - RNA, 19 nt, Artificial Sequence
  Description of Artificial Sequence: Synthetic oligonucleotide
  Sense strand starting at position 2295 of SEQ ID NO: 3667
gggcuucgacaguacagau

SEQ ID NO: 285267 - RNA, 19 nt, Artificial Sequence
  Description of Artificial Sequence: Synthetic oligonucleotide
  Antisense strand to SEQ ID NO: 285266
aucuguacugucgaagccc

SEQ ID NO: 285268 - RNA, 19 nt, Artificial Sequence
  Description of Artificial Sequence: Synthetic oligonucleotide
  Sense strand starting at position 2482 of SEQ ID NO: 3667
auguguuaggcauaauaau

SEQ ID NO: 285269 - RNA, 19 nt, Artificial Sequence
  Description of Artificial Sequence: Synthetic oligonucleotide
  Antisense strand to SEQ ID NO: 285268
auuauuaugccuaacacau

SEQ ID NO: 285270 - RNA, 19 nt, Artificial Sequence
  Description of Artificial Sequence: Synthetic oligonucleotide
  Sense strand starting at position 2529 of SEQ ID NO: 3667
gagagaucucuuugccgga

SEQ ID NO: 285271 - RNA, 19 nt, Artificial Sequence
  Description of Artificial Sequence: Synthetic oligonucleotide
  Antisense strand to SEQ ID NO: 285270
uccggcaaagagaucucuc

SEQ ID NO: 285272 - RNA, 19 nt, Artificial Sequence
  Description of Artificial Sequence: Synthetic oligonucleotide
  Sense strand starting at position 2531 of SEQ ID NO: 3667
gagaucucuuugccggaga

SEQ ID NO: 285273 - RNA, 19 nt, Artificial Sequence
  Description of Artificial Sequence: Synthetic oligonucleotide
  Antisense strand to SEQ ID NO: 285272
ucuccggcaaagagaucuc

SEQ ID NO: 285274 - RNA, 19 nt, Artificial Sequence
  Description of Artificial Sequence: Synthetic oligonucleotide
  Sense strand starting at position 2533 of SEQ ID NO: 3667
gaucucuuugccggagaac

SEQ ID NO: 285275 - RNA, 19 nt, Artificial Sequence
  Description of Artificial Sequence: Synthetic oligonucleotide
  Antisense strand to SEQ ID NO: 285274
guucuccggcaaagagauc

SEQ ID NO: 285276 - RNA, 19 nt, Artificial Sequence
  Description of Artificial Sequence: Synthetic oligonucleotide
  Sense strand starting at position 2696 of SEQ ID NO: 3667
uagaaacacccgugucuga

SEQ ID NO: 285277 - RNA, 19 nt, Artificial Sequence
  Description of Artificial Sequence: Synthetic oligonucleotide
  Antisense strand to SEQ ID NO: 285276
ucagacacggguguuucua

SEQ ID NO: 285278 - RNA, 19 nt, Artificial Sequence
  Description of Artificial Sequence: Synthetic oligonucleotide
  Sense strand starting at position 2709 of SEQ ID NO: 3667
gucugauaccuucgaagau

SEQ ID NO: 285279 - RNA, 19 nt, Artificial Sequence
  Description of Artificial Sequence: Synthetic oligonucleotide
  Antisense strand to SEQ ID NO: 285278
aucuucgaagguaucagac

SEQ ID NO: 285280 - RNA, 19 nt, Artificial Sequence
  Description of Artificial Sequence: Synthetic oligonucleotide
  Sense strand starting at position 2719 of SEQ ID NO: 3667
uucgaagauucugauuuaa

SEQ ID NO: 285281 - RNA, 19 nt, Artificial Sequence
  Description of Artificial Sequence: Synthetic oligonucleotide
  Antisense strand to SEQ ID NO: 285280
uuaaaucagaaucuucgaa

SEQ ID NO: 285282 - RNA, 19 nt, Artificial Sequence
  Description of Artificial Sequence: Synthetic oligonucleotide
  Sense strand starting at position 2762 of SEQ ID NO: 3667
auggcacuuguauaaauua

SEQ ID NO: 285283 - RNA, 19 nt, Artificial Sequence
  Description of Artificial Sequence: Synthetic oligonucleotide
  Antisense strand to SEQ ID NO: 285282
uaauuuauacaagugccau

SEQ ID NO: 285284 - RNA, 19 nt, Artificial Sequence
  Description of Artificial Sequence: Synthetic oligonucleotide
  Sense strand starting at position 2771 of SEQ ID NO: 3667
guauaaauuaugcagguga

SEQ ID NO: 285285 - RNA, 19 nt, Artificial Sequence
  Description of Artificial Sequence: Synthetic oligonucleotide
  Antisense strand to SEQ ID NO: 285284
ucaccugcauaauuuauac

SEQ ID NO: 285286 - RNA, 19 nt, Artificial Sequence
  Description of Artificial Sequence: Synthetic oligonucleotide
  Sense strand starting at position 2773 of SEQ ID NO: 3667
auaaauuaugcaggugaag

SEQ ID NO: 285287 - RNA, 19 nt, Artificial Sequence
  Description of Artificial Sequence: Synthetic oligonucleotide
  Antisense strand to SEQ ID NO: 285286
cuucaccugcauaauuuau

SEQ ID NO: 285288 - RNA, 19 nt, Artificial Sequence
  Description of Artificial Sequence: Synthetic oligonucleotide
  Sense strand starting at position 2811 of SEQ ID NO: 3667
acucaaugauuuggaugau

SEQ ID NO: 285289 - RNA, 19 nt, Artificial Sequence
  Description of Artificial Sequence: Synthetic oligonucleotide
  Antisense strand to SEQ ID NO: 285288
aucauccaaaucauugagu

SEQ ID NO: 285290 - RNA, 19 nt, Artificial Sequence
  Description of Artificial Sequence: Synthetic oligonucleotide
  Sense strand starting at position 2820 of SEQ ID NO: 3667
uuuggaugauagguacuau

SEQ ID NO: 285291 - RNA, 19 nt, Artificial Sequence
  Description of Artificial Sequence: Synthetic oligonucleotide
  Antisense strand to SEQ ID NO: 285290
auaguaccuaucauccaaa

SEQ ID NO: 285292 - RNA, 19 nt, Artificial Sequence
  Description of Artificial Sequence: Synthetic oligonucleotide
  Sense strand starting at position 2824 of SEQ ID NO: 3667
gaugauagguacuauuuag

SEQ ID NO: 285293 - RNA, 19 nt, Artificial Sequence
  Description of Artificial Sequence: Synthetic oligonucleotide
  Antisense strand to SEQ ID NO: 285292
cuaaauaguaccuaucauc

SEQ ID NO: 285294 - RNA, 19 nt, Artificial Sequence
  Description of Artificial Sequence: Synthetic oligonucleotide
  Sense strand starting at position 2846 of SEQ ID NO: 3667
cuagaacuguuagucugau

SEQ ID NO: 285295 - RNA, 19 nt, Artificial Sequence
  Description of Artificial Sequence: Synthetic oligonucleotide
  Antisense strand to SEQ ID NO: 285294
aucagacuaacaguucuag

SEQ ID NO: 285296 - RNA, 19 nt, Artificial Sequence
  Description of Artificial Sequence: Synthetic oligonucleotide
  Sense strand starting at position 2904 of SEQ ID NO: 3667
ggagcuaagcgucauuaug

SEQ ID NO: 285297 - RNA, 19 nt, Artificial Sequence
  Description of Artificial Sequence: Synthetic oligonucleotide
  Antisense strand to SEQ ID NO: 285296
cauaaugacgcuuagcucc

SEQ ID NO: 285298 - RNA, 19 nt, Artificial Sequence
  Description of Artificial Sequence: Synthetic oligonucleotide
  Sense strand starting at position 2951 of SEQ ID NO: 3667
aaauuugcagucuguaagu

SEQ ID NO: 285299 - RNA, 19 nt, Artificial Sequence
  Description of Artificial Sequence: Synthetic oligonucleotide
  Antisense strand to SEQ ID NO: 285298
acuuacagacugcaaauuu

SEQ ID NO: 285300 - RNA, 19 nt, Artificial Sequence
  Description of Artificial Sequence: Synthetic oligonucleotide
  Sense strand starting at position 3028 of SEQ ID NO: 3667
gacgcuaaugcgcucagua

SEQ ID NO: 285301 - RNA, 19 nt, Artificial Sequence
  Description of Artificial Sequence: Synthetic oligonucleotide
  Antisense strand to SEQ ID NO: 285300
uacugagcgcauuagcguc

SEQ ID NO: 285302 - RNA, 19 nt, Artificial Sequence
  Description of Artificial Sequence: Synthetic oligonucleotide
  Sense strand starting at position 3029 of SEQ ID NO: 3667
acgcuaaugcgcucaguaa

SEQ ID NO: 285303 - RNA, 19 nt, Artificial Sequence
  Description of Artificial Sequence: Synthetic oligonucleotide
  Antisense strand to SEQ ID NO: 285302
uuacugagcgcauuagcgu

SEQ ID NO: 285304 - RNA, 19 nt, Artificial Sequence
  Description of Artificial Sequence: Synthetic oligonucleotide
  Sense strand starting at position 3176 of SEQ ID NO: 3667
acucacaccugaguuugaa

SEQ ID NO: 285305 - RNA, 19 nt, Artificial Sequence
  Description of Artificial Sequence: Synthetic oligonucleotide
  Antisense strand to SEQ ID NO: 285304
uucaaacucaggugugagu

SEQ ID NO: 285306 - RNA, 19 nt, Artificial Sequence
  Description of Artificial Sequence: Synthetic oligonucleotide
  Sense strand starting at position 3186 of SEQ ID NO: 3667
gaguuugaacugcagcuaa

SEQ ID NO: 285307 - RNA, 19 nt, Artificial Sequence
  Description of Artificial Sequence: Synthetic oligonucleotide
  Antisense strand to SEQ ID NO: 285306
uuagcugcaguucaaacuc

SEQ ID NO: 285308 - RNA, 19 nt, Artificial Sequence
  Description of Artificial Sequence: Synthetic oligonucleotide
  Sense strand starting at position 3275 of SEQ ID NO: 3667
cccaaugaucuuugcuaug

SEQ ID NO: 285309 - RNA, 19 nt, Artificial Sequence
  Description of Artificial Sequence: Synthetic oligonucleotide
  Antisense strand to SEQ ID NO: 285308
cauagcaaagaucauuggg

SEQ ID NO: 285310 - RNA, 19 nt, Artificial Sequence
  Description of Artificial Sequence: Synthetic oligonucleotide
  Sense strand starting at position 3532 of SEQ ID NO: 3667
caaggagugcuuuaagguc

SEQ ID NO: 285311 - RNA, 19 nt, Artificial Sequence
  Description of Artificial Sequence: Synthetic oligonucleotide
  Antisense strand to SEQ ID NO: 285310
gaccuuaaagcacuccuug

SEQ ID NO: 285312 - RNA, 19 nt, Artificial Sequence
  Description of Artificial Sequence: Synthetic oligonucleotide
  Sense strand starting at position 3586 of SEQ ID NO: 3667
ugauguaaagcuugaggua

SEQ ID NO: 285313 - RNA, 19 nt, Artificial Sequence
  Description of Artificial Sequence: Synthetic oligonucleotide
  Antisense strand to SEQ ID NO: 285312
uaccucaagcuuuacauca

SEQ ID NO: 285314 - RNA, 19 nt, Artificial Sequence
  Description of Artificial Sequence: Synthetic oligonucleotide
  Sense strand starting at position 3587 of SEQ ID NO: 3667
gauguaaagcuugagguag

SEQ ID NO: 285315 - RNA, 19 nt, Artificial Sequence
  Description of Artificial Sequence: Synthetic oligonucleotide
  Antisense strand to SEQ ID NO: 285314
cuaccucaagcuuuacauc

SEQ ID NO: 285316 - RNA, 19 nt, Artificial Sequence
  Description of Artificial Sequence: Synthetic oligonucleotide
  Sense strand starting at position 678 of SEQ ID NO: 3668
acugaagaauguccuagua

SEQ ID NO: 285317 - RNA, 19 nt, Artificial Sequence
  Description of Artificial Sequence: Synthetic oligonucleotide
  Antisense strand to SEQ ID NO: 285316
uacuaggacauucuucagu

SEQ ID NO: 285318 - RNA, 19 nt, Artificial Sequence
  Description of Artificial Sequence: Synthetic oligonucleotide
  Sense strand starting at position 765 of SEQ ID NO: 3668
ucacuuuacuucuuuggga

SEQ ID NO: 285319 - RNA, 19 nt, Artificial Sequence
  Description of Artificial Sequence: Synthetic oligonucleotide
  Antisense strand to SEQ ID NO: 285318
ucccaaagaaguaaaguga

SEQ ID NO: 285320 - RNA, 19 nt, Artificial Sequence
  Description of Artificial Sequence: Synthetic oligonucleotide
  Sense strand starting at position 767 of SEQ ID NO: 3668
acuuuacuucuuugggacu

SEQ ID NO: 285321 - RNA, 19 nt, Artificial Sequence
  Description of Artificial Sequence: Synthetic oligonucleotide
  Antisense strand to SEQ ID NO: 285320
agucccaaagaaguaaagu

SEQ ID NO: 285322 - RNA, 19 nt, Artificial Sequence
  Description of Artificial Sequence: Synthetic oligonucleotide
  Sense strand starting at position 808 of SEQ ID NO: 3668
gcaccucaguuauuaauga

SEQ ID NO: 285323 - RNA, 19 nt, Artificial Sequence
  Description of Artificial Sequence: Synthetic oligonucleotide
  Antisense strand to SEQ ID NO: 285322
ucauuaauaacugaggugc

SEQ ID NO: 285324 - RNA, 19 nt, Artificial Sequence
  Description of Artificial Sequence: Synthetic oligonucleotide
  Sense strand starting at position 1321 of SEQ ID NO: 3668
agaguccuuccauguucua

SEQ ID NO: 285325 - RNA, 19 nt, Artificial Sequence
  Description of Artificial Sequence: Synthetic oligonucleotide
  Antisense strand to SEQ ID NO: 285324
uagaacauggaaggacucu

SEQ ID NO: 285326 - RNA, 19 nt, Artificial Sequence
  Description of Artificial Sequence: Synthetic oligonucleotide
  Sense strand starting at position 1332 of SEQ ID NO: 3668
auguucuagucuuugguua

SEQ ID NO: 285327 - RNA, 19 nt, Artificial Sequence
  Description of Artificial Sequence: Synthetic oligonucleotide
  Antisense strand to SEQ ID NO: 285326
uaaccaaagacuagaacau

SEQ ID NO: 285328 - RNA, 19 nt, Artificial Sequence
  Description of Artificial Sequence: Synthetic oligonucleotide
  Sense strand starting at position 1333 of SEQ ID NO: 3668
uguucuagucuuugguuaa

SEQ ID NO: 285329 - RNA, 19 nt, Artificial Sequence
  Description of Artificial Sequence: Synthetic oligonucleotide
  Antisense strand to SEQ ID NO: 285328
uuaaccaaagacuagaaca

SEQ ID NO: 285330 - RNA, 19 nt, Artificial Sequence
  Description of Artificial Sequence: Synthetic oligonucleotide
  Sense strand starting at position 1336 of SEQ ID NO: 3668
ucuagucuuugguuaagaa

SEQ ID NO: 285331 - RNA, 19 nt, Artificial Sequence
  Description of Artificial Sequence: Synthetic oligonucleotide
  Antisense strand to SEQ ID NO: 285330
uucuuaaccaaagacuaga

SEQ ID NO: 285332 - RNA, 19 nt, Artificial Sequence
  Description of Artificial Sequence: Synthetic oligonucleotide
  Sense strand starting at position 1337 of SEQ ID NO: 3668
cuagucuuugguuaagaau

SEQ ID NO: 285333 - RNA, 19 nt, Artificial Sequence
  Description of Artificial Sequence: Synthetic oligonucleotide
  Antisense strand to SEQ ID NO: 285332
auucuuaaccaaagacuag

SEQ ID NO: 285334 - RNA, 19 nt, Artificial Sequence
  Description of Artificial Sequence: Synthetic oligonucleotide
  Sense strand starting at position 1343 of SEQ ID NO: 3668
uuugguuaagaaugcuuga

SEQ ID NO: 285335 - RNA, 19 nt, Artificial Sequence
  Description of Artificial Sequence: Synthetic oligonucleotide
  Antisense strand to SEQ ID NO: 285334
ucaagcauucuuaaccaaa

SEQ ID NO: 285336 - RNA, 19 nt, Artificial Sequence
  Description of Artificial Sequence: Synthetic oligonucleotide
  Sense strand starting at position 1346 of SEQ ID NO: 3668
gguuaagaaugcuugagag

SEQ ID NO: 285337 - RNA, 19 nt, Artificial Sequence
  Description of Artificial Sequence: Synthetic oligonucleotide
  Antisense strand to SEQ ID NO: 285336
cucucaagcauucuuaacc

SEQ ID NO: 285338 - RNA, 19 nt, Artificial Sequence
  Description of Artificial Sequence: Synthetic oligonucleotide
  Sense strand starting at position 1418 of SEQ ID NO: 3668
ucacuagugcugugugaga

SEQ ID NO: 285339 - RNA, 19 nt, Artificial Sequence
  Description of Artificial Sequence: Synthetic oligonucleotide
  Antisense strand to SEQ ID NO: 285338
ucucacacagcacuaguga

SEQ ID NO: 285340 - RNA, 19 nt, Artificial Sequence
  Description of Artificial Sequence: Synthetic oligonucleotide
  Sense strand starting at position 1420 of SEQ ID NO: 3668
acuagugcugugugagaga

SEQ ID NO: 285341 - RNA, 19 nt, Artificial Sequence
  Description of Artificial Sequence: Synthetic oligonucleotide
  Antisense strand to SEQ ID NO: 285340
ucucucacacagcacuagu

SEQ ID NO: 285342 - RNA, 19 nt, Artificial Sequence
  Description of Artificial Sequence: Synthetic oligonucleotide
  Sense strand starting at position 1677 of SEQ ID NO: 3668
guucuccucucacucagau

SEQ ID NO: 285343 - RNA, 19 nt, Artificial Sequence
  Description of Artificial Sequence: Synthetic oligonucleotide
  Antisense strand to SEQ ID NO: 285342
aucugagugagaggagaac

SEQ ID NO: 285344 - RNA, 19 nt, Artificial Sequence
  Description of Artificial Sequence: Synthetic oligonucleotide
  Sense strand starting at position 1723 of SEQ ID NO: 3668
aguccagcuuucccagaga

SEQ ID NO: 285345 - RNA, 19 nt, Artificial Sequence
  Description of Artificial Sequence: Synthetic oligonucleotide
  Antisense strand to SEQ ID NO: 285344
ucucugggaaagcuggacu

SEQ ID NO: 285346 - RNA, 19 nt, Artificial Sequence
  Description of Artificial Sequence: Synthetic oligonucleotide
  Sense strand starting at position 1726 of SEQ ID NO: 3668
ccagcuuucccagagaugu

SEQ ID NO: 285347 - RNA, 19 nt, Artificial Sequence
  Description of Artificial Sequence: Synthetic oligonucleotide
  Antisense strand to SEQ ID NO: 285346
acaucucugggaaagcugg

SEQ ID NO: 285348 - RNA, 19 nt, Artificial Sequence
  Description of Artificial Sequence: Synthetic oligonucleotide
  Sense strand starting at position 1736 of SEQ ID NO: 3668
cagagaugucagcaucucu

SEQ ID NO: 285349 - RNA, 19 nt, Artificial Sequence
  Description of Artificial Sequence: Synthetic oligonucleotide
  Antisense strand to SEQ ID NO: 285348
agagaugcugacaucucug

SEQ ID NO: 285350 - RNA, 19 nt, Artificial Sequence
  Description of Artificial Sequence: Synthetic oligonucleotide
  Sense strand starting at position 2199 of SEQ ID NO: 3668
ggagaagaauuauaaguca

SEQ ID NO: 285351 - RNA, 19 nt, Artificial Sequence
  Description of Artificial Sequence: Synthetic oligonucleotide
  Antisense strand to SEQ ID NO: 285350
ugacuuauaauucuucucc

SEQ ID NO: 285352 - RNA, 19 nt, Artificial Sequence
  Description of Artificial Sequence: Synthetic oligonucleotide
  Sense strand starting at position 2208 of SEQ ID NO: 3668
uuauaagucaggcaacgua

SEQ ID NO: 285353 - RNA, 19 nt, Artificial Sequence
  Description of Artificial Sequence: Synthetic oligonucleotide
  Antisense strand to SEQ ID NO: 285352
uacguugccugacuuauaa

SEQ ID NO: 285354 - RNA, 19 nt, Artificial Sequence
  Description of Artificial Sequence: Synthetic oligonucleotide
  Sense strand starting at position 2422 of SEQ ID NO: 3668
gggcgaggcuagguugaaa

SEQ ID NO: 285355 - RNA, 19 nt, Artificial Sequence
  Description of Artificial Sequence: Synthetic oligonucleotide
  Antisense strand to SEQ ID NO: 285354
uuucaaccuagccucgccc

SEQ ID NO: 285356 - RNA, 19 nt, Artificial Sequence
  Description of Artificial Sequence: Synthetic oligonucleotide
  Sense strand starting at position 2548 of SEQ ID NO: 3668
aagagaagcucuguuuguu

SEQ ID NO: 285357 - RNA, 19 nt, Artificial Sequence
  Description of Artificial Sequence: Synthetic oligonucleotide
  Antisense strand to SEQ ID NO: 285356
aacaaacagagcuucucuu

SEQ ID NO: 285358 - RNA, 19 nt, Artificial Sequence
  Description of Artificial Sequence: Synthetic oligonucleotide
  Sense strand starting at position 2552 of SEQ ID NO: 3668
gaagcucuguuuguuccaa

SEQ ID NO: 285359 - RNA, 19 nt, Artificial Sequence
  Description of Artificial Sequence: Synthetic oligonucleotide
  Antisense strand to SEQ ID NO: 285358
uuggaacaaacagagcuuc

SEQ ID NO: 285360 - RNA, 19 nt, Artificial Sequence
  Description of Artificial Sequence: Synthetic oligonucleotide
  Sense strand starting at position 2554 of SEQ ID NO: 3668
agcucuguuuguuccaaga

SEQ ID NO: 285361 - RNA, 19 nt, Artificial Sequence
  Description of Artificial Sequence: Synthetic oligonucleotide
  Antisense strand to SEQ ID NO: 285360
ucuuggaacaaacagagcu

SEQ ID NO: 285362 - RNA, 19 nt, Artificial Sequence
  Description of Artificial Sequence: Synthetic oligonucleotide
  Sense strand starting at position 2567 of SEQ ID NO: 3668
ccaagagcgcaucaucuuu

SEQ ID NO: 285363 - RNA, 19 nt, Artificial Sequence
  Description of Artificial Sequence: Synthetic oligonucleotide
  Antisense strand to SEQ ID NO: 285362
aaagaugaugcgcucuugg

SEQ ID NO: 285364 - RNA, 19 nt, Artificial Sequence
  Description of Artificial Sequence: Synthetic oligonucleotide
  Sense strand starting at position 2640 of SEQ ID NO: 3668
aggcaagguggcuaacauu

SEQ ID NO: 285365 - RNA, 19 nt, Artificial Sequence
  Description of Artificial Sequence: Synthetic oligonucleotide
  Antisense strand to SEQ ID NO: 285364
aauguuagccaccuugccu

SEQ ID NO: 285366 - RNA, 19 nt, Artificial Sequence
  Description of Artificial Sequence: Synthetic oligonucleotide
  Sense strand starting at position 2941 of SEQ ID NO: 3668
accaguuuguauuccuaag

SEQ ID NO: 285367 - RNA, 19 nt, Artificial Sequence
  Description of Artificial Sequence: Synthetic oligonucleotide
  Antisense strand to SEQ ID NO: 285366
cuuaggaauacaaacuggu

SEQ ID NO: 285368 - RNA, 19 nt, Artificial Sequence
  Description of Artificial Sequence: Synthetic oligonucleotide
  Sense strand starting at position 2943 of SEQ ID NO: 3668
caguuuguauuccuaaggu

SEQ ID NO: 285369 - RNA, 19 nt, Artificial Sequence
  Description of Artificial Sequence: Synthetic oligonucleotide
  Antisense strand to SEQ ID NO: 285368
accuuaggaauacaaacug

SEQ ID NO: 285370 - RNA, 19 nt, Artificial Sequence
  Description of Artificial Sequence: Synthetic oligonucleotide
  Sense strand starting at position 2986 of SEQ ID NO: 3668
gaguauaagcuuugaaguu

SEQ ID NO: 285371 - RNA, 19 nt, Artificial Sequence
  Description of Artificial Sequence: Synthetic oligonucleotide
  Antisense strand to SEQ ID NO: 285370
aacuucaaagcuuauacuc

SEQ ID NO: 285372 - RNA, 19 nt, Artificial Sequence
  Description of Artificial Sequence: Synthetic oligonucleotide
  Sense strand starting at position 2993 of SEQ ID NO: 3668
agcuuugaaguuggauuau

SEQ ID NO: 285373 - RNA, 19 nt, Artificial Sequence
  Description of Artificial Sequence: Synthetic oligonucleotide
  Antisense strand to SEQ ID NO: 285372
auaauccaacuucaaagcu

SEQ ID NO: 285374 - RNA, 19 nt, Artificial Sequence
  Description of Artificial Sequence: Synthetic oligonucleotide
  Sense strand starting at position 3036 of SEQ ID NO: 3668
gcuuucuagcccuagaauu

SEQ ID NO: 285375 - RNA, 19 nt, Artificial Sequence
  Description of Artificial Sequence: Synthetic oligonucleotide
  Antisense strand to SEQ ID NO: 285374
aauucuagggcuagaaagc

SEQ ID NO: 285376 - RNA, 19 nt, Artificial Sequence
  Description of Artificial Sequence: Synthetic oligonucleotide
  Sense strand starting at position 3126 of SEQ ID NO: 3668
auugauggaguuugaggau

SEQ ID NO: 285377 - RNA, 19 nt, Artificial Sequence
  Description of Artificial Sequence: Synthetic oligonucleotide
  Antisense strand to SEQ ID NO: 285376
auccucaaacuccaucaau

SEQ ID NO: 285378 - RNA, 19 nt, Artificial Sequence
  Description of Artificial Sequence: Synthetic oligonucleotide
  Sense strand starting at position 3205 of SEQ ID NO: 3668
auuauuagucucuagcaca

SEQ ID NO: 285379 - RNA, 19 nt, Artificial Sequence
  Description of Artificial Sequence: Synthetic oligonucleotide
  Antisense strand to SEQ ID NO: 285378
ugugcuagagacuaauaau

SEQ ID NO: 285380 - RNA, 19 nt, Artificial Sequence
  Description of Artificial Sequence: Synthetic oligonucleotide
  Sense strand starting at position 3306 of SEQ ID NO: 3668
uugagugcuggucaaauca

SEQ ID NO: 285381 - RNA, 19 nt, Artificial Sequence
  Description of Artificial Sequence: Synthetic oligonucleotide
  Antisense strand to SEQ ID NO: 285380
ugauuugaccagcacucaa

SEQ ID NO: 285382 - RNA, 19 nt, Artificial Sequence
  Description of Artificial Sequence: Synthetic oligonucleotide
  Sense strand starting at position 3493 of SEQ ID NO: 3668
ugagauuaaggcugaaauu

SEQ ID NO: 285383 - RNA, 19 nt, Artificial Sequence
  Description of Artificial Sequence: Synthetic oligonucleotide
  Antisense strand to SEQ ID NO: 285382
aauuucagccuuaaucuca

SEQ ID NO: 285384 - RNA, 19 nt, Artificial Sequence
  Description of Artificial Sequence: Synthetic oligonucleotide
  Sense strand starting at position 3503 of SEQ ID NO: 3668
gcugaaauucuagaucuuu

SEQ ID NO: 285385 - RNA, 19 nt, Artificial Sequence
  Description of Artificial Sequence: Synthetic oligonucleotide
  Antisense strand to SEQ ID NO: 285384
aaagaucuagaauuucagc

SEQ ID NO: 285386 - RNA, 19 nt, Artificial Sequence
  Description of Artificial Sequence: Synthetic oligonucleotide
  Sense strand starting at position 3530 of SEQ ID NO: 3668
gugauuaggcguuaacuuu

SEQ ID NO: 285387 - RNA, 19 nt, Artificial Sequence
  Description of Artificial Sequence: Synthetic oligonucleotide
  Antisense strand to SEQ ID NO: 285386
aaaguuaacgccuaaucac

SEQ ID NO: 285388 - RNA, 19 nt, Artificial Sequence
  Description of Artificial Sequence: Synthetic oligonucleotide
  Sense strand starting at position 3697 of SEQ ID NO: 3668
cugauaaagaggugugcuu

SEQ ID NO: 285389 - RNA, 19 nt, Artificial Sequence
  Description of Artificial Sequence: Synthetic oligonucleotide
  Antisense strand to SEQ ID NO: 285388
aagcacaccucuuuaucag

SEQ ID NO: 285390 - RNA, 19 nt, Artificial Sequence
  Description of Artificial Sequence: Synthetic oligonucleotide
  Sense strand starting at position 3704 of SEQ ID NO: 3668
agaggugugcuuugacagu

SEQ ID NO: 285391 - RNA, 19 nt, Artificial Sequence
  Description of Artificial Sequence: Synthetic oligonucleotide
  Antisense strand to SEQ ID NO: 285390
acugucaaagcacaccucu

SEQ ID NO: 285392 - RNA, 19 nt, Artificial Sequence
  Description of Artificial Sequence: Synthetic oligonucleotide
  Sense strand starting at position 3933 of SEQ ID NO: 3668
gaccucucuccagguuaga

SEQ ID NO: 285393 - RNA, 19 nt, Artificial Sequence
  Description of Artificial Sequence: Synthetic oligonucleotide
  Antisense strand to SEQ ID NO: 285392
ucuaaccuggagagagguc

SEQ ID NO: 285394 - RNA, 19 nt, Artificial Sequence
  Description of Artificial Sequence: Synthetic oligonucleotide
  Sense strand starting at position 3944 of SEQ ID NO: 3668
agguuagagaacugguaga

SEQ ID NO: 285395 - RNA, 19 nt, Artificial Sequence
  Description of Artificial Sequence: Synthetic oligonucleotide
  Antisense strand to SEQ ID NO: 285394
ucuaccaguucucuaaccu

SEQ ID NO: 285396 - RNA, 19 nt, Artificial Sequence
  Description of Artificial Sequence: Synthetic oligonucleotide
  Sense strand starting at position 39 of SEQ ID NO: 3669
gccugagucccuggaacau

SEQ ID NO: 285397 - RNA, 19 nt, Artificial Sequence
  Description of Artificial Sequence: Synthetic oligonucleotide
  Antisense strand to SEQ ID NO: 285396
auguuccagggacucaggc

SEQ ID NO: 285398 - RNA, 19 nt, Artificial Sequence
  Description of Artificial Sequence: Synthetic oligonucleotide
  Sense strand starting at position 114 of SEQ ID NO: 3669
aggugcaugccugagguua

SEQ ID NO: 285399 - RNA, 19 nt, Artificial Sequence
  Description of Artificial Sequence: Synthetic oligonucleotide
  Antisense strand to SEQ ID NO: 285398
uaaccucaggcaugcaccu

SEQ ID NO: 285400 - RNA, 19 nt, Artificial Sequence
  Description of Artificial Sequence: Synthetic oligonucleotide
  Sense strand starting at position 116 of SEQ ID NO: 3669
gugcaugccugagguuaga

SEQ ID NO: 285401 - RNA, 19 nt, Artificial Sequence
  Description of Artificial Sequence: Synthetic oligonucleotide
  Antisense strand to SEQ ID NO: 285400
ucuaaccucaggcaugcac

SEQ ID NO: 285402 - RNA, 19 nt, Artificial Sequence
  Description of Artificial Sequence: Synthetic oligonucleotide
  Sense strand starting at position 122 of SEQ ID NO: 3669
gccugagguuagagucgaa

SEQ ID NO: 285403 - RNA, 19 nt, Artificial Sequence
  Description of Artificial Sequence: Synthetic oligonucleotide
  Antisense strand to SEQ ID NO: 285402
uucgacucuaaccucaggc

SEQ ID NO: 285404 - RNA, 19 nt, Artificial Sequence
  Description of Artificial Sequence: Synthetic oligonucleotide
  Sense strand starting at position 125 of SEQ ID NO: 3669
ugagguuagagucgaauac

SEQ ID NO: 285405 - RNA, 19 nt, Artificial Sequence
  Description of Artificial Sequence: Synthetic oligonucleotide
  Antisense strand to SEQ ID NO: 285404
guauucgacucuaaccuca

SEQ ID NO: 285406 - RNA, 19 nt, Artificial Sequence
  Description of Artificial Sequence: Synthetic oligonucleotide
  Sense strand starting at position 126 of SEQ ID NO: 3669
gagguuagagucgaauacu

SEQ ID NO: 285407 - RNA, 19 nt, Artificial Sequence
  Description of Artificial Sequence: Synthetic oligonucleotide
  Antisense strand to SEQ ID NO: 285406
aguauucgacucuaaccuc

SEQ ID NO: 285408 - RNA, 19 nt, Artificial Sequence
  Description of Artificial Sequence: Synthetic oligonucleotide
  Sense strand starting at position 135 of SEQ ID NO: 3669
gucgaauacucugccuucu

SEQ ID NO: 285409 - RNA, 19 nt, Artificial Sequence
  Description of Artificial Sequence: Synthetic oligonucleotide
  Antisense strand to SEQ ID NO: 285408
agaaggcagaguauucgac

SEQ ID NO: 285410 - RNA, 19 nt, Artificial Sequence
  Description of Artificial Sequence: Synthetic oligonucleotide
  Sense strand starting at position 376 of SEQ ID NO: 3669
caguguugggcggaccaga

SEQ ID NO: 285411 - RNA, 19 nt, Artificial Sequence
  Description of Artificial Sequence: Synthetic oligonucleotide
  Antisense strand to SEQ ID NO: 285410
ucugguccgcccaacacug

SEQ ID NO: 285412 - RNA, 19 nt, Artificial Sequence
  Description of Artificial Sequence: Synthetic oligonucleotide
  Sense strand starting at position 452 of SEQ ID NO: 3669
cugucauacugggaggcau

SEQ ID NO: 285413 - RNA, 19 nt, Artificial Sequence
  Description of Artificial Sequence: Synthetic oligonucleotide
  Antisense strand to SEQ ID NO: 285412
augccucccaguaugacag

SEQ ID NO: 285414 - RNA, 19 nt, Artificial Sequence
  Description of Artificial Sequence: Synthetic oligonucleotide
  Sense strand starting at position 480 of SEQ ID NO: 3669
cggucagagcccuggaaua

SEQ ID NO: 285415 - RNA, 19 nt, Artificial Sequence
  Description of Artificial Sequence: Synthetic oligonucleotide
  Antisense strand to SEQ ID NO: 285414
uauuccagggcucugaccg

SEQ ID NO: 285416 - RNA, 19 nt, Artificial Sequence
  Description of Artificial Sequence: Synthetic oligonucleotide
  Sense strand starting at position 766 of SEQ ID NO: 3669
uugcauaugucggguguca

SEQ ID NO: 285417 - RNA, 19 nt, Artificial Sequence
  Description of Artificial Sequence: Synthetic oligonucleotide
  Antisense strand to SEQ ID NO: 285416
ugacacccgacauaugcaa

SEQ ID NO: 285418 - RNA, 19 nt, Artificial Sequence
  Description of Artificial Sequence: Synthetic oligonucleotide
  Sense strand starting at position 768 of SEQ ID NO: 3669
gcauaugucgggugucaca

SEQ ID NO: 285419 - RNA, 19 nt, Artificial Sequence
  Description of Artificial Sequence: Synthetic oligonucleotide
  Antisense strand to SEQ ID NO: 285418
ugugacacccgacauaugc

SEQ ID NO: 285420 - RNA, 19 nt, Artificial Sequence
  Description of Artificial Sequence: Synthetic oligonucleotide
  Sense strand starting at position 784 of SEQ ID NO: 3669
acaugugugccguccauac

SEQ ID NO: 285421 - RNA, 19 nt, Artificial Sequence
  Description of Artificial Sequence: Synthetic oligonucleotide
  Antisense strand to SEQ ID NO: 285420
guauggacggcacacaugu

SEQ ID NO: 285422 - RNA, 19 nt, Artificial Sequence
  Description of Artificial Sequence: Synthetic oligonucleotide
  Sense strand starting at position 851 of SEQ ID NO: 3669
ugcuccauccuguacacau

SEQ ID NO: 285423 - RNA, 19 nt, Artificial Sequence
  Description of Artificial Sequence: Synthetic oligonucleotide
  Antisense strand to SEQ ID NO: 285422
auguguacaggauggagca

SEQ ID NO: 285424 - RNA, 19 nt, Artificial Sequence
  Description of Artificial Sequence: Synthetic oligonucleotide
  Sense strand starting at position 1170 of SEQ ID NO: 3669
gugccaggauccugcagau

SEQ ID NO: 285425 - RNA, 19 nt, Artificial Sequence
  Description of Artificial Sequence: Synthetic oligonucleotide
  Antisense strand to SEQ ID NO: 285424
aucugcaggauccuggcac

SEQ ID NO: 285426 - RNA, 19 nt, Artificial Sequence
  Description of Artificial Sequence: Synthetic oligonucleotide
  Sense strand starting at position 1250 of SEQ ID NO: 3669
gggaggcuucccggaguga

SEQ ID NO: 285427 - RNA, 19 nt, Artificial Sequence
  Description of Artificial Sequence: Synthetic oligonucleotide
  Antisense strand to SEQ ID NO: 285426
ucacuccgggaagccuccc

SEQ ID NO: 285428 - RNA, 19 nt, Artificial Sequence
  Description of Artificial Sequence: Synthetic oligonucleotide
  Sense strand starting at position 1378 of SEQ ID NO: 3669
cgcagauucgcgucccuca

SEQ ID NO: 285429 - RNA, 19 nt, Artificial Sequence
  Description of Artificial Sequence: Synthetic oligonucleotide
  Antisense strand to SEQ ID NO: 285428
ugagggacgcgaaucugcg

SEQ ID NO: 285430 - RNA, 19 nt, Artificial Sequence
  Description of Artificial Sequence: Synthetic oligonucleotide
  Sense strand starting at position 2475 of SEQ ID NO: 3669
gugugguucguguucccga

SEQ ID NO: 285431 - RNA, 19 nt, Artificial Sequence
  Description of Artificial Sequence: Synthetic oligonucleotide
  Antisense strand to SEQ ID NO: 285430
ucgggaacacgaaccacac

SEQ ID NO: 285432 - RNA, 19 nt, Artificial Sequence
  Description of Artificial Sequence: Synthetic oligonucleotide
  Sense strand starting at position 2505 of SEQ ID NO: 3669
ucgcgaacucaaugucauc

SEQ ID NO: 285433 - RNA, 19 nt, Artificial Sequence
  Description of Artificial Sequence: Synthetic oligonucleotide
  Antisense strand to SEQ ID NO: 285432
gaugacauugaguucgcga

SEQ ID NO: 285434 - RNA, 19 nt, Artificial Sequence
  Description of Artificial Sequence: Synthetic oligonucleotide
  Sense strand starting at position 2678 of SEQ ID NO: 3669
uggccauuuagaugcgaau

SEQ ID NO: 285435 - RNA, 19 nt, Artificial Sequence
  Description of Artificial Sequence: Synthetic oligonucleotide
  Antisense strand to SEQ ID NO: 285434
auucgcaucuaaauggcca

SEQ ID NO: 285436 - RNA, 19 nt, Artificial Sequence
  Description of Artificial Sequence: Synthetic oligonucleotide
  Sense strand starting at position 2680 of SEQ ID NO: 3669
gccauuuagaugcgaauua

SEQ ID NO: 285437 - RNA, 19 nt, Artificial Sequence
  Description of Artificial Sequence: Synthetic oligonucleotide
  Antisense strand to SEQ ID NO: 285436
uaauucgcaucuaaauggc

SEQ ID NO: 285438 - RNA, 19 nt, Artificial Sequence
  Description of Artificial Sequence: Synthetic oligonucleotide
  Sense strand starting at position 2681 of SEQ ID NO: 3669
ccauuuagaugcgaauuaa

SEQ ID NO: 285439 - RNA, 19 nt, Artificial Sequence
  Description of Artificial Sequence: Synthetic oligonucleotide
  Antisense strand to SEQ ID NO: 285438
uuaauucgcaucuaaaugg

SEQ ID NO: 285440 - RNA, 19 nt, Artificial Sequence
  Description of Artificial Sequence: Synthetic oligonucleotide
  Sense strand starting at position 2749 of SEQ ID NO: 3669
gugugucuuccugggagga

SEQ ID NO: 285441 - RNA, 19 nt, Artificial Sequence
  Description of Artificial Sequence: Synthetic oligonucleotide
  Antisense strand to SEQ ID NO: 285440
uccucccaggaagacacac

SEQ ID NO: 285442 - RNA, 19 nt, Artificial Sequence
  Description of Artificial Sequence: Synthetic oligonucleotide
  Sense strand starting at position 2751 of SEQ ID NO: 3669
gugucuuccugggaggagu

SEQ ID NO: 285443 - RNA, 19 nt, Artificial Sequence
  Description of Artificial Sequence: Synthetic oligonucleotide
  Antisense strand to SEQ ID NO: 285442
acuccucccaggaagacac

SEQ ID NO: 285444 - RNA, 19 nt, Artificial Sequence
  Description of Artificial Sequence: Synthetic oligonucleotide
  Sense strand starting at position 2811 of SEQ ID NO: 3669
agaaguuccucugggcagu

SEQ ID NO: 285445 - RNA, 19 nt, Artificial Sequence
  Description of Artificial Sequence: Synthetic oligonucleotide
  Antisense strand to SEQ ID NO: 285444
acugcccagaggaacuucu

SEQ ID NO: 285446 - RNA, 19 nt, Artificial Sequence
  Description of Artificial Sequence: Synthetic oligonucleotide
  Sense strand starting at position 3024 of SEQ ID NO: 3669
ugagcucacagcgguuaaa

SEQ ID NO: 285447 - RNA, 19 nt, Artificial Sequence
  Description of Artificial Sequence: Synthetic oligonucleotide
  Antisense strand to SEQ ID NO: 285446
uuuaaccgcugugagcuca

SEQ ID NO: 285448 - RNA, 19 nt, Artificial Sequence
  Description of Artificial Sequence: Synthetic oligonucleotide
  Sense strand starting at position 3027 of SEQ ID NO: 3669
gcucacagcgguuaaauuu

SEQ ID NO: 285449 - RNA, 19 nt, Artificial Sequence
  Description of Artificial Sequence: Synthetic oligonucleotide
  Antisense strand to SEQ ID NO: 285448
aaauuuaaccgcugugagc

SEQ ID NO: 285450 - RNA, 19 nt, Artificial Sequence
  Description of Artificial Sequence: Synthetic oligonucleotide
  Sense strand starting at position 3080 of SEQ ID NO: 3669
cgcuguugucaucaaguaa

SEQ ID NO: 285451 - RNA, 19 nt, Artificial Sequence
  Description of Artificial Sequence: Synthetic oligonucleotide
  Antisense strand to SEQ ID NO: 285450
uuacuugaugacaacagcg

SEQ ID NO: 285452 - RNA, 19 nt, Artificial Sequence
  Description of Artificial Sequence: Synthetic oligonucleotide
  Sense strand starting at position 3103 of SEQ ID NO: 3669
ucaaauuccuagggacaag

SEQ ID NO: 285453 - RNA, 19 nt, Artificial Sequence
  Description of Artificial Sequence: Synthetic oligonucleotide
  Antisense strand to SEQ ID NO: 285452
cuugucccuaggaauuuga

SEQ ID NO: 285454 - RNA, 19 nt, Artificial Sequence
  Description of Artificial Sequence: Synthetic oligonucleotide
  Sense strand starting at position 3228 of SEQ ID NO: 3669
gcgucagcccugaguagug

SEQ ID NO: 285455 - RNA, 19 nt, Artificial Sequence
  Description of Artificial Sequence: Synthetic oligonucleotide
  Antisense strand to SEQ ID NO: 285454
cacuacucagggcugacgc

SEQ ID NO: 285456 - RNA, 19 nt, Artificial Sequence
  Description of Artificial Sequence: Synthetic oligonucleotide
  Sense strand starting at position 3238 of SEQ ID NO: 3669
ugaguaguguuuccugugu

SEQ ID NO: 285457 - RNA, 19 nt, Artificial Sequence
  Description of Artificial Sequence: Synthetic oligonucleotide
  Antisense strand to SEQ ID NO: 285456
acacaggaaacacuacuca

SEQ ID NO: 285458 - RNA, 19 nt, Artificial Sequence
  Description of Artificial Sequence: Synthetic oligonucleotide
  Sense strand starting at position 3243 of SEQ ID NO: 3669
aguguuuccugugucugga

SEQ ID NO: 285459 - RNA, 19 nt, Artificial Sequence
  Description of Artificial Sequence: Synthetic oligonucleotide
  Antisense strand to SEQ ID NO: 285458
uccagacacaggaaacacu

SEQ ID NO: 285460 - RNA, 19 nt, Artificial Sequence
  Description of Artificial Sequence: Synthetic oligonucleotide
  Sense strand starting at position 3263 of SEQ ID NO: 3669
ucagucuccucguugugua

SEQ ID NO: 285461 - RNA, 19 nt, Artificial Sequence
  Description of Artificial Sequence: Synthetic oligonucleotide
  Antisense strand to SEQ ID NO: 285460
uacacaacgaggagacuga

SEQ ID NO: 285462 - RNA, 19 nt, Artificial Sequence
  Description of Artificial Sequence: Synthetic oligonucleotide
  Sense strand starting at position 3264 of SEQ ID NO: 3669
cagucuccucguuguguaa

SEQ ID NO: 285463 - RNA, 19 nt, Artificial Sequence
  Description of Artificial Sequence: Synthetic oligonucleotide
  Antisense strand to SEQ ID NO: 285462
uuacacaacgaggagacug

SEQ ID NO: 285464 - RNA, 19 nt, Artificial Sequence
  Description of Artificial Sequence: Synthetic oligonucleotide
  Sense strand starting at position 3277 of SEQ ID NO: 3669
guguaacccucugugucua

SEQ ID NO: 285465 - RNA, 19 nt, Artificial Sequence
  Description of Artificial Sequence: Synthetic oligonucleotide
  Antisense strand to SEQ ID NO: 285464
uagacacagaggguuacac

SEQ ID NO: 285466 - RNA, 19 nt, Artificial Sequence
  Description of Artificial Sequence: Synthetic oligonucleotide
  Sense strand starting at position 3332 of SEQ ID NO: 3669
gagagugugcguucacguu

SEQ ID NO: 285467 - RNA, 19 nt, Artificial Sequence
  Description of Artificial Sequence: Synthetic oligonucleotide
  Antisense strand to SEQ ID NO: 285466
aacgugaacgcacacucuc

SEQ ID NO: 285468 - RNA, 19 nt, Artificial Sequence
  Description of Artificial Sequence: Synthetic oligonucleotide
  Sense strand starting at position 3359 of SEQ ID NO: 3669
agagcacugaggcaucauu

SEQ ID NO: 285469 - RNA, 19 nt, Artificial Sequence
  Description of Artificial Sequence: Synthetic oligonucleotide
  Antisense strand to SEQ ID NO: 285468
aaugaugccucagugcucu

SEQ ID NO: 285470 - RNA, 19 nt, Artificial Sequence
  Description of Artificial Sequence: Synthetic oligonucleotide
  Sense strand starting at position 3484 of SEQ ID NO: 3669
gucacucagagguguggau

SEQ ID NO: 285471 - RNA, 19 nt, Artificial Sequence
  Description of Artificial Sequence: Synthetic oligonucleotide
  Antisense strand to SEQ ID NO: 285470
auccacaccucugagugac

SEQ ID NO: 285472 - RNA, 19 nt, Artificial Sequence
  Description of Artificial Sequence: Synthetic oligonucleotide
  Sense strand starting at position 3656 of SEQ ID NO: 3669
cauguuccuggcuggaaga

SEQ ID NO: 285473 - RNA, 19 nt, Artificial Sequence
  Description of Artificial Sequence: Synthetic oligonucleotide
  Antisense strand to SEQ ID NO: 285472
ucuuccagccaggaacaug

SEQ ID NO: 285474 - RNA, 19 nt, Artificial Sequence
  Description of Artificial Sequence: Synthetic oligonucleotide
  Sense strand starting at position 3825 of SEQ ID NO: 3669
gccaguucugcacacagga

SEQ ID NO: 285475 - RNA, 19 nt, Artificial Sequence
  Description of Artificial Sequence: Synthetic oligonucleotide
  Antisense strand to SEQ ID NO: 285474
uccugugugcagaacuggc

SEQ ID NO: 285476 - RNA, 19 nt, Artificial Sequence
  Description of Artificial Sequence: Synthetic oligonucleotide
  Sense strand starting at position 57 of SEQ ID NO: 3670
uccgcuuuagccuaggaaa

SEQ ID NO: 285477 - RNA, 19 nt, Artificial Sequence
  Description of Artificial Sequence: Synthetic oligonucleotide
  Antisense strand to SEQ ID NO: 285476
uuuccuaggcuaaagcgga

SEQ ID NO: 285478 - RNA, 19 nt, Artificial Sequence
  Description of Artificial Sequence: Synthetic oligonucleotide
  Sense strand starting at position 288 of SEQ ID NO: 3670
ugagucacucugcaaacga

SEQ ID NO: 285479 - RNA, 19 nt, Artificial Sequence
  Description of Artificial Sequence: Synthetic oligonucleotide
  Antisense strand to SEQ ID NO: 285478
ucguuugcagagugacuca

SEQ ID NO: 285480 - RNA, 19 nt, Artificial Sequence
  Description of Artificial Sequence: Synthetic oligonucleotide
  Sense strand starting at position 389 of SEQ ID NO: 3670
cucaucauacaguaagguu

SEQ ID NO: 285481 - RNA, 19 nt, Artificial Sequence
  Description of Artificial Sequence: Synthetic oligonucleotide
  Antisense strand to SEQ ID NO: 285480
aaccuuacuguaugaugag

SEQ ID NO: 285482 - RNA, 19 nt, Artificial Sequence
  Description of Artificial Sequence: Synthetic oligonucleotide
  Sense strand starting at position 403 of SEQ ID NO: 3670
agguuuauuccaggaggga

SEQ ID NO: 285483 - RNA, 19 nt, Artificial Sequence
  Description of Artificial Sequence: Synthetic oligonucleotide
  Antisense strand to SEQ ID NO: 285482
ucccuccuggaauaaaccu

SEQ ID NO: 285484 - RNA, 19 nt, Artificial Sequence
  Description of Artificial Sequence: Synthetic oligonucleotide
  Sense strand starting at position 435 of SEQ ID NO: 3670
ucugcauuccagcacagaa

SEQ ID NO: 285485 - RNA, 19 nt, Artificial Sequence
  Description of Artificial Sequence: Synthetic oligonucleotide
  Antisense strand to SEQ ID NO: 285484
uucugugcuggaaugcaga

SEQ ID NO: 285486 - RNA, 19 nt, Artificial Sequence
  Description of Artificial Sequence: Synthetic oligonucleotide
  Sense strand starting at position 487 of SEQ ID NO: 3670
ucuagucuuccagagucaa

SEQ ID NO: 285487 - RNA, 19 nt, Artificial Sequence
  Description of Artificial Sequence: Synthetic oligonucleotide
  Antisense strand to SEQ ID NO: 285486
uugacucuggaagacuaga

SEQ ID NO: 285488 - RNA, 19 nt, Artificial Sequence
  Description of Artificial Sequence: Synthetic oligonucleotide
  Sense strand starting at position 652 of SEQ ID NO: 3670
agcauucuacggugcauuu

SEQ ID NO: 285489 - RNA, 19 nt, Artificial Sequence
  Description of Artificial Sequence: Synthetic oligonucleotide
  Antisense strand to SEQ ID NO: 285488
aaaugcaccguagaaugcu

SEQ ID NO: 285490 - RNA, 19 nt, Artificial Sequence
  Description of Artificial Sequence: Synthetic oligonucleotide
  Sense strand starting at position 724 of SEQ ID NO: 3670
cggugcuauuaaucuggau

SEQ ID NO: 285491 - RNA, 19 nt, Artificial Sequence
  Description of Artificial Sequence: Synthetic oligonucleotide
  Antisense strand to SEQ ID NO: 285490
auccagauuaauagcaccg

SEQ ID NO: 285492 - RNA, 19 nt, Artificial Sequence
  Description of Artificial Sequence: Synthetic oligonucleotide
  Sense strand starting at position 742 of SEQ ID NO: 3670
uuucaaaggucguuauagg

SEQ ID NO: 285493 - RNA, 19 nt, Artificial Sequence
  Description of Artificial Sequence: Synthetic oligonucleotide
  Antisense strand to SEQ ID NO: 285492
ccuauaacgaccuuugaaa

SEQ ID NO: 285494 - RNA, 19 nt, Artificial Sequence
  Description of Artificial Sequence: Synthetic oligonucleotide
  Sense strand starting at position 743 of SEQ ID NO: 3670
uucaaaggucguuauagga

SEQ ID NO: 285495 - RNA, 19 nt, Artificial Sequence
  Description of Artificial Sequence: Synthetic oligonucleotide
  Antisense strand to SEQ ID NO: 285494
uccuauaacgaccuuugaa

SEQ ID NO: 285496 - RNA, 19 nt, Artificial Sequence
  Description of Artificial Sequence: Synthetic oligonucleotide
  Sense strand starting at position 817 of SEQ ID NO: 3670
uuggcucuggcgcaauaau

SEQ ID NO: 285497 - RNA, 19 nt, Artificial Sequence
  Description of Artificial Sequence: Synthetic oligonucleotide
  Antisense strand to SEQ ID NO: 285496
auuauugcgccagagccaa

SEQ ID NO: 285498 - RNA, 19 nt, Artificial Sequence
  Description of Artificial Sequence: Synthetic oligonucleotide
  Sense strand starting at position 877 of SEQ ID NO: 3670
gcaaguauggaaugcucaa

SEQ ID NO: 285499 - RNA, 19 nt, Artificial Sequence
  Description of Artificial Sequence: Synthetic oligonucleotide
  Antisense strand to SEQ ID NO: 285498
uugagcauuccauacuugc

SEQ ID NO: 285500 - RNA, 19 nt, Artificial Sequence
  Description of Artificial Sequence: Synthetic oligonucleotide
  Sense strand starting at position 919 of SEQ ID NO: 3670
uuagcuguguguuccaaga

SEQ ID NO: 285501 - RNA, 19 nt, Artificial Sequence
  Description of Artificial Sequence: Synthetic oligonucleotide
  Antisense strand to SEQ ID NO: 285500
ucuuggaacacacagcuaa

SEQ ID NO: 285502 - RNA, 19 nt, Artificial Sequence
  Description of Artificial Sequence: Synthetic oligonucleotide
  Sense strand starting at position 1154 of SEQ ID NO: 3670
cucccagugcugcaagaaa

SEQ ID NO: 285503 - RNA, 19 nt, Artificial Sequence
  Description of Artificial Sequence: Synthetic oligonucleotide
  Antisense strand to SEQ ID NO: 285502
uuucuugcagcacugggag

SEQ ID NO: 285504 - RNA, 19 nt, Artificial Sequence
  Description of Artificial Sequence: Synthetic oligonucleotide
  Sense strand starting at position 1240 of SEQ ID NO: 3670
cuuggaacucggugacaga

SEQ ID NO: 285505 - RNA, 19 nt, Artificial Sequence
  Description of Artificial Sequence: Synthetic oligonucleotide
  Antisense strand to SEQ ID NO: 285504
ucugucaccgaguuccaag

SEQ ID NO: 285506 - RNA, 19 nt, Artificial Sequence
  Description of Artificial Sequence: Synthetic oligonucleotide
  Sense strand starting at position 1251 of SEQ ID NO: 3670
gugacagaaucguuugguc

SEQ ID NO: 285507 - RNA, 19 nt, Artificial Sequence
  Description of Artificial Sequence: Synthetic oligonucleotide
  Antisense strand to SEQ ID NO: 285506
gaccaaacgauucugucac

SEQ ID NO: 285508 - RNA, 19 nt, Artificial Sequence
  Description of Artificial Sequence: Synthetic oligonucleotide
  Sense strand starting at position 1253 of SEQ ID NO: 3670
gacagaaucguuuggucuc

SEQ ID NO: 285509 - RNA, 19 nt, Artificial Sequence
  Description of Artificial Sequence: Synthetic oligonucleotide
  Antisense strand to SEQ ID NO: 285508
gagaccaaacgauucuguc

SEQ ID NO: 285510 - RNA, 19 nt, Artificial Sequence
  Description of Artificial Sequence: Synthetic oligonucleotide
  Sense strand starting at position 1413 of SEQ ID NO: 3670
gcaagcucuccacguugau

SEQ ID NO: 285511 - RNA, 19 nt, Artificial Sequence
  Description of Artificial Sequence: Synthetic oligonucleotide
  Antisense strand to SEQ ID NO: 285510
aucaacguggagagcuugc

SEQ ID NO: 285512 - RNA, 19 nt, Artificial Sequence
  Description of Artificial Sequence: Synthetic oligonucleotide
  Sense strand starting at position 2776 of SEQ ID NO: 3670
ggugguuaucgggaccguu

SEQ ID NO: 285513 - RNA, 19 nt, Artificial Sequence
  Description of Artificial Sequence: Synthetic oligonucleotide
  Antisense strand to SEQ ID NO: 285512
aacggucccgauaaccacc

SEQ ID NO: 285514 - RNA, 19 nt, Artificial Sequence
  Description of Artificial Sequence: Synthetic oligonucleotide
  Sense strand starting at position 2820 of SEQ ID NO: 3670
gccggugccaucgcuuaga

SEQ ID NO: 285515 - RNA, 19 nt, Artificial Sequence
  Description of Artificial Sequence: Synthetic oligonucleotide
  Antisense strand to SEQ ID NO: 285514
ucuaagcgauggcaccggc

SEQ ID NO: 285516 - RNA, 19 nt, Artificial Sequence
  Description of Artificial Sequence: Synthetic oligonucleotide
  Sense strand starting at position 3007 of SEQ ID NO: 3670
aauguucgugaugaccaaa

SEQ ID NO: 285517 - RNA, 19 nt, Artificial Sequence
  Description of Artificial Sequence: Synthetic oligonucleotide
  Antisense strand to SEQ ID NO: 285516
uuuggucaucacgaacauu

SEQ ID NO: 285518 - RNA, 19 nt, Artificial Sequence
  Description of Artificial Sequence: Synthetic oligonucleotide
  Sense strand starting at position 3036 of SEQ ID NO: 3670
gggcccaguuguccaacaa

SEQ ID NO: 285519 - RNA, 19 nt, Artificial Sequence
  Description of Artificial Sequence: Synthetic oligonucleotide
  Antisense strand to SEQ ID NO: 285518
uuguuggacaacugggccc

SEQ ID NO: 285520 - RNA, 19 nt, Artificial Sequence
  Description of Artificial Sequence: Synthetic oligonucleotide
  Sense strand starting at position 3037 of SEQ ID NO: 3670
ggcccaguuguccaacaau

SEQ ID NO: 285521 - RNA, 19 nt, Artificial Sequence
  Description of Artificial Sequence: Synthetic oligonucleotide
  Antisense strand to SEQ ID NO: 285520
auuguuggacaacugggcc

SEQ ID NO: 285522 - RNA, 19 nt, Artificial Sequence
  Description of Artificial Sequence: Synthetic oligonucleotide
  Sense strand starting at position 3040 of SEQ ID NO: 3670
ccaguuguccaacaauuga

SEQ ID NO: 285523 - RNA, 19 nt, Artificial Sequence
  Description of Artificial Sequence: Synthetic oligonucleotide
  Antisense strand to SEQ ID NO: 285522
ucaauuguuggacaacugg

SEQ ID NO: 285524 - RNA, 19 nt, Artificial Sequence
  Description of Artificial Sequence: Synthetic oligonucleotide
  Sense strand starting at position 3105 of SEQ ID NO: 3670
guaugcagacugugucaaa

SEQ ID NO: 285525 - RNA, 19 nt, Artificial Sequence
  Description of Artificial Sequence: Synthetic oligonucleotide
  Antisense strand to SEQ ID NO: 285524
uuugacacagucugcauac

SEQ ID NO: 285526 - RNA, 19 nt, Artificial Sequence
  Description of Artificial Sequence: Synthetic oligonucleotide
  Sense strand starting at position 3139 of SEQ ID NO: 3670
aguacaugagaagguauau

SEQ ID NO: 285527 - RNA, 19 nt, Artificial Sequence
  Description of Artificial Sequence: Synthetic oligonucleotide
  Antisense strand to SEQ ID NO: 285526
auauaccuucucauguacu

SEQ ID NO: 285528 - RNA, 19 nt, Artificial Sequence
  Description of Artificial Sequence: Synthetic oligonucleotide
  Sense strand starting at position 3351 of SEQ ID NO: 3670
uaagaauguuaagaacugu

SEQ ID NO: 285529 - RNA, 19 nt, Artificial Sequence
  Description of Artificial Sequence: Synthetic oligonucleotide
  Antisense strand to SEQ ID NO: 285528
acaguucuuaacauucuua

SEQ ID NO: 285530 - RNA, 19 nt, Artificial Sequence
  Description of Artificial Sequence: Synthetic oligonucleotide
  Sense strand starting at position 3362 of SEQ ID NO: 3670
agaacugucucccuggcau

SEQ ID NO: 285531 - RNA, 19 nt, Artificial Sequence
  Description of Artificial Sequence: Synthetic oligonucleotide
  Antisense strand to SEQ ID NO: 285530
augccagggagacaguucu

SEQ ID NO: 285532 - RNA, 19 nt, Artificial Sequence
  Description of Artificial Sequence: Synthetic oligonucleotide
  Sense strand starting at position 3580 of SEQ ID NO: 3670
uccagagaguccuuuaagu

SEQ ID NO: 285533 - RNA, 19 nt, Artificial Sequence
  Description of Artificial Sequence: Synthetic oligonucleotide
  Antisense strand to SEQ ID NO: 285532
acuuaaaggacucucugga

SEQ ID NO: 285534 - RNA, 19 nt, Artificial Sequence
  Description of Artificial Sequence: Synthetic oligonucleotide
  Sense strand starting at position 3582 of SEQ ID NO: 3670
cagagaguccuuuaagucu

SEQ ID NO: 285535 - RNA, 19 nt, Artificial Sequence
  Description of Artificial Sequence: Synthetic oligonucleotide
  Antisense strand to SEQ ID NO: 285534
agacuuaaaggacucucug

SEQ ID NO: 285536 - RNA, 19 nt, Artificial Sequence
  Description of Artificial Sequence: Synthetic oligonucleotide
  Sense strand starting at position 3588 of SEQ ID NO: 3670
guccuuuaagucuguguau

SEQ ID NO: 285537 - RNA, 19 nt, Artificial Sequence
  Description of Artificial Sequence: Synthetic oligonucleotide
  Antisense strand to SEQ ID NO: 285536
auacacagacuuaaaggac

SEQ ID NO: 285538 - RNA, 19 nt, Artificial Sequence
  Description of Artificial Sequence: Synthetic oligonucleotide
  Sense strand starting at position 3589 of SEQ ID NO: 3670
uccuuuaagucuguguauu

SEQ ID NO: 285539 - RNA, 19 nt, Artificial Sequence
  Description of Artificial Sequence: Synthetic oligonucleotide
  Antisense strand to SEQ ID NO: 285538
aauacacagacuuaaagga

SEQ ID NO: 285540 - RNA, 19 nt, Artificial Sequence
  Description of Artificial Sequence: Synthetic oligonucleotide
  Sense strand starting at position 3590 of SEQ ID NO: 3670
ccuuuaagucuguguauug

SEQ ID NO: 285541 - RNA, 19 nt, Artificial Sequence
  Description of Artificial Sequence: Synthetic oligonucleotide
  Antisense strand to SEQ ID NO: 285540
caauacacagacuuaaagg

SEQ ID NO: 285542 - RNA, 19 nt, Artificial Sequence
  Description of Artificial Sequence: Synthetic oligonucleotide
  Sense strand starting at position 3591 of SEQ ID NO: 3670
cuuuaagucuguguauuga

SEQ ID NO: 285543 - RNA, 19 nt, Artificial Sequence
  Description of Artificial Sequence: Synthetic oligonucleotide
  Antisense strand to SEQ ID NO: 285542
ucaauacacagacuuaaag

SEQ ID NO: 285544 - RNA, 19 nt, Artificial Sequence
  Description of Artificial Sequence: Synthetic oligonucleotide
  Sense strand starting at position 3667 of SEQ ID NO: 3670
ccacuuaugcauuggagca

SEQ ID NO: 285545 - RNA, 19 nt, Artificial Sequence
  Description of Artificial Sequence: Synthetic oligonucleotide
  Antisense strand to SEQ ID NO: 285544
ugcuccaaugcauaagugg

SEQ ID NO: 285546 - RNA, 19 nt, Artificial Sequence
  Description of Artificial Sequence: Synthetic oligonucleotide
  Sense strand starting at position 3960 of SEQ ID NO: 3670
uuugacugguuguauauuu

SEQ ID NO: 285547 - RNA, 19 nt, Artificial Sequence
  Description of Artificial Sequence: Synthetic oligonucleotide
  Antisense strand to SEQ ID NO: 285546
aaauauacaaccagucaaa

SEQ ID NO: 285548 - RNA, 19 nt, Artificial Sequence
  Description of Artificial Sequence: Synthetic oligonucleotide
  Sense strand starting at position 3967 of SEQ ID NO: 3670
gguuguauauuuguaugua

SEQ ID NO: 285549 - RNA, 19 nt, Artificial Sequence
  Description of Artificial Sequence: Synthetic oligonucleotide
  Antisense strand to SEQ ID NO: 285548
uacauacaaauauacaacc

SEQ ID NO: 285550 - RNA, 19 nt, Artificial Sequence
  Description of Artificial Sequence: Synthetic oligonucleotide
  Sense strand starting at position 3968 of SEQ ID NO: 3670
guuguauauuuguauguag

SEQ ID NO: 285551 - RNA, 19 nt, Artificial Sequence
  Description of Artificial Sequence: Synthetic oligonucleotide
  Antisense strand to SEQ ID NO: 285550
cuacauacaaauauacaac

SEQ ID NO: 285552 - RNA, 19 nt, Artificial Sequence
  Description of Artificial Sequence: Synthetic oligonucleotide
  Sense strand starting at position 3970 of SEQ ID NO: 3670
uguauauuuguauguagcu

SEQ ID NO: 285553 - RNA, 19 nt, Artificial Sequence
  Description of Artificial Sequence: Synthetic oligonucleotide
  Antisense strand to SEQ ID NO: 285552
agcuacauacaaauauaca

SEQ ID NO: 285554 - RNA, 19 nt, Artificial Sequence
  Description of Artificial Sequence: Synthetic oligonucleotide
  Sense strand starting at position 3979 of SEQ ID NO: 3670
guauguagcuugguggaau

SEQ ID NO: 285555 - RNA, 19 nt, Artificial Sequence
  Description of Artificial Sequence: Synthetic oligonucleotide
  Antisense strand to SEQ ID NO: 285554
auuccaccaagcuacauac

SEQ ID NO: 285556 - RNA, 19 nt, Artificial Sequence
  Description of Artificial Sequence: Synthetic oligonucleotide
  Sense strand starting at position 9 of SEQ ID NO: 3671
cuuagucauucccuguaag

SEQ ID NO: 285557 - RNA, 19 nt, Artificial Sequence
  Description of Artificial Sequence: Synthetic oligonucleotide
  Antisense strand to SEQ ID NO: 285556
cuuacagggaaugacuaag

SEQ ID NO: 285558 - RNA, 19 nt, Artificial Sequence
  Description of Artificial Sequence: Synthetic oligonucleotide
  Sense strand starting at position 12 of SEQ ID NO: 3671
agucauucccuguaagccu

SEQ ID NO: 285559 - RNA, 19 nt, Artificial Sequence
  Description of Artificial Sequence: Synthetic oligonucleotide
  Antisense strand to SEQ ID NO: 285558
aggcuuacagggaaugacu

SEQ ID NO: 285560 - RNA, 19 nt, Artificial Sequence
  Description of Artificial Sequence: Synthetic oligonucleotide
  Sense strand starting at position 109 of SEQ ID NO: 3671
uuaugagaccacuggcaga

SEQ ID NO: 285561 - RNA, 19 nt, Artificial Sequence
  Description of Artificial Sequence: Synthetic oligonucleotide
  Antisense strand to SEQ ID NO: 285560
ucugccaguggucucauaa

SEQ ID NO: 285562 - RNA, 19 nt, Artificial Sequence
  Description of Artificial Sequence: Synthetic oligonucleotide
  Sense strand starting at position 145 of SEQ ID NO: 3671
gcccaauuccucgcuguca

SEQ ID NO: 285563 - RNA, 19 nt, Artificial Sequence
  Description of Artificial Sequence: Synthetic oligonucleotide
  Antisense strand to SEQ ID NO: 285562
ugacagcgaggaauugggc

SEQ ID NO: 285564 - RNA, 19 nt, Artificial Sequence
  Description of Artificial Sequence: Synthetic oligonucleotide
  Sense strand starting at position 238 of SEQ ID NO: 3671
acagucaagugcucauaaa

SEQ ID NO: 285565 - RNA, 19 nt, Artificial Sequence
  Description of Artificial Sequence: Synthetic oligonucleotide
  Antisense strand to SEQ ID NO: 285564
uuuaugagcacuugacugu

SEQ ID NO: 285566 - RNA, 19 nt, Artificial Sequence
  Description of Artificial Sequence: Synthetic oligonucleotide
  Sense strand starting at position 260 of SEQ ID NO: 3671
ugcuacuaugguuaucauu

SEQ ID NO: 285567 - RNA, 19 nt, Artificial Sequence
  Description of Artificial Sequence: Synthetic oligonucleotide
  Antisense strand to SEQ ID NO: 285566
aaugauaaccauaguagca

SEQ ID NO: 285568 - RNA, 19 nt, Artificial Sequence
  Description of Artificial Sequence: Synthetic oligonucleotide
  Sense strand starting at position 278 of SEQ ID NO: 3671
uaauaauccugacugguga

SEQ ID NO: 285569 - RNA, 19 nt, Artificial Sequence
  Description of Artificial Sequence: Synthetic oligonucleotide
  Antisense strand to SEQ ID NO: 285568
ucaccagucaggauuauua

SEQ ID NO: 285570 - RNA, 19 nt, Artificial Sequence
  Description of Artificial Sequence: Synthetic oligonucleotide
  Sense strand starting at position 439 of SEQ ID NO: 3671
gcuacuuaccuuugaggua

SEQ ID NO: 285571 - RNA, 19 nt, Artificial Sequence
  Description of Artificial Sequence: Synthetic oligonucleotide
  Antisense strand to SEQ ID NO: 285570
uaccucaaagguaaguagc

SEQ ID NO: 285572 - RNA, 19 nt, Artificial Sequence
  Description of Artificial Sequence: Synthetic oligonucleotide
  Sense strand starting at position 455 of SEQ ID NO: 3671
guagacacucaggguauua

SEQ ID NO: 285573 - RNA, 19 nt, Artificial Sequence
  Description of Artificial Sequence: Synthetic oligonucleotide
  Antisense strand to SEQ ID NO: 285572
uaauacccugagugucuac

SEQ ID NO: 285574 - RNA, 19 nt, Artificial Sequence
  Description of Artificial Sequence: Synthetic oligonucleotide
  Sense strand starting at position 555 of SEQ ID NO: 3671
aaagccaaccuuugugaga

SEQ ID NO: 285575 - RNA, 19 nt, Artificial Sequence
  Description of Artificial Sequence: Synthetic oligonucleotide
  Antisense strand to SEQ ID NO: 285574
ucucacaaagguuggcuuu

SEQ ID NO: 285576 - RNA, 19 nt, Artificial Sequence
  Description of Artificial Sequence: Synthetic oligonucleotide
  Sense strand starting at position 562 of SEQ ID NO: 3671
accuuugugagagguaaua

SEQ ID NO: 285577 - RNA, 19 nt, Artificial Sequence
  Description of Artificial Sequence: Synthetic oligonucleotide
  Antisense strand to SEQ ID NO: 285576
uauuaccucucacaaaggu

SEQ ID NO: 285578 - RNA, 19 nt, Artificial Sequence
  Description of Artificial Sequence: Synthetic oligonucleotide
  Sense strand starting at position 615 of SEQ ID NO: 3671
uuuaguacucuauggucaa

SEQ ID NO: 285579 - RNA, 19 nt, Artificial Sequence
  Description of Artificial Sequence: Synthetic oligonucleotide
  Antisense strand to SEQ ID NO: 285578
uugaccauagaguacuaaa

SEQ ID NO: 285580 - RNA, 19 nt, Artificial Sequence
  Description of Artificial Sequence: Synthetic oligonucleotide
  Sense strand starting at position 618 of SEQ ID NO: 3671
aguacucuauggucaaagu

SEQ ID NO: 285581 - RNA, 19 nt, Artificial Sequence
  Description of Artificial Sequence: Synthetic oligonucleotide
  Antisense strand to SEQ ID NO: 285580
acuuugaccauagaguacu

SEQ ID NO: 285582 - RNA, 19 nt, Artificial Sequence
  Description of Artificial Sequence: Synthetic oligonucleotide
  Sense strand starting at position 619 of SEQ ID NO: 3671
guacucuauggucaaaguu

SEQ ID NO: 285583 - RNA, 19 nt, Artificial Sequence
  Description of Artificial Sequence: Synthetic oligonucleotide
  Antisense strand to SEQ ID NO: 285582
aacuuugaccauagaguac

SEQ ID NO: 285584 - RNA, 19 nt, Artificial Sequence
  Description of Artificial Sequence: Synthetic oligonucleotide
  Sense strand starting at position 969 of SEQ ID NO: 3671
uguaaucuugagggagucu

SEQ ID NO: 285585 - RNA, 19 nt, Artificial Sequence
  Description of Artificial Sequence: Synthetic oligonucleotide
  Antisense strand to SEQ ID NO: 285584
agacucccucaagauuaca

SEQ ID NO: 285586 - RNA, 19 nt, Artificial Sequence
  Description of Artificial Sequence: Synthetic oligonucleotide
  Sense strand starting at position 970 of SEQ ID NO: 3671
guaaucuugagggagucuu

SEQ ID NO: 285587 - RNA, 19 nt, Artificial Sequence
  Description of Artificial Sequence: Synthetic oligonucleotide
  Antisense strand to SEQ ID NO: 285586
aagacucccucaagauuac

SEQ ID NO: 285588 - RNA, 19 nt, Artificial Sequence
  Description of Artificial Sequence: Synthetic oligonucleotide
  Sense strand starting at position 978 of SEQ ID NO: 3671
gagggagucuuacugcuuu

SEQ ID NO: 285589 - RNA, 19 nt, Artificial Sequence
  Description of Artificial Sequence: Synthetic oligonucleotide
  Antisense strand to SEQ ID NO: 285588
aaagcaguaagacucccuc

SEQ ID NO: 285590 - RNA, 19 nt, Artificial Sequence
  Description of Artificial Sequence: Synthetic oligonucleotide
  Sense strand starting at position 1055 of SEQ ID NO: 3671
acaauauuaugugcuguaa

SEQ ID NO: 285591 - RNA, 19 nt, Artificial Sequence
  Description of Artificial Sequence: Synthetic oligonucleotide
  Antisense strand to SEQ ID NO: 285590
uuacagcacauaauauugu

SEQ ID NO: 285592 - RNA, 19 nt, Artificial Sequence
  Description of Artificial Sequence: Synthetic oligonucleotide
  Sense strand starting at position 1210 of SEQ ID NO: 3671
acuguaaacuucucaugua

SEQ ID NO: 285593 - RNA, 19 nt, Artificial Sequence
  Description of Artificial Sequence: Synthetic oligonucleotide
  Antisense strand to SEQ ID NO: 285592
uacaugagaaguuuacagu

SEQ ID NO: 285594 - RNA, 19 nt, Artificial Sequence
  Description of Artificial Sequence: Synthetic oligonucleotide
  Sense strand starting at position 1300 of SEQ ID NO: 3671
acugaagcucaaugagguu

SEQ ID NO: 285595 - RNA, 19 nt, Artificial Sequence
  Description of Artificial Sequence: Synthetic oligonucleotide
  Antisense strand to SEQ ID NO: 285594
aaccucauugagcuucagu

SEQ ID NO: 285596 - RNA, 19 nt, Artificial Sequence
  Description of Artificial Sequence: Synthetic oligonucleotide
  Sense strand starting at position 1378 of SEQ ID NO: 3671
caacuuaaaucguuagaga

SEQ ID NO: 285597 - RNA, 19 nt, Artificial Sequence
  Description of Artificial Sequence: Synthetic oligonucleotide
  Antisense strand to SEQ ID NO: 285596
ucucuaacgauuuaaguug

SEQ ID NO: 285598 - RNA, 19 nt, Artificial Sequence
  Description of Artificial Sequence: Synthetic oligonucleotide
  Sense strand starting at position 1469 of SEQ ID NO: 3671
caguuucucuagcugaaag

SEQ ID NO: 285599 - RNA, 19 nt, Artificial Sequence
  Description of Artificial Sequence: Synthetic oligonucleotide
  Antisense strand to SEQ ID NO: 285598
cuuucagcuagagaaacug

SEQ ID NO: 285600 - RNA, 19 nt, Artificial Sequence
  Description of Artificial Sequence: Synthetic oligonucleotide
  Sense strand starting at position 1523 of SEQ ID NO: 3671
guccuaagugauggaagac

SEQ ID NO: 285601 - RNA, 19 nt, Artificial Sequence
  Description of Artificial Sequence: Synthetic oligonucleotide
  Antisense strand to SEQ ID NO: 285600
gucuuccaucacuuaggac

SEQ ID NO: 285602 - RNA, 19 nt, Artificial Sequence
  Description of Artificial Sequence: Synthetic oligonucleotide
  Sense strand starting at position 1657 of SEQ ID NO: 3671
cuagcaucgcguucagagu

SEQ ID NO: 285603 - RNA, 19 nt, Artificial Sequence
  Description of Artificial Sequence: Synthetic oligonucleotide
  Antisense strand to SEQ ID NO: 285602
acucugaacgcgaugcuag

SEQ ID NO: 285604 - RNA, 19 nt, Artificial Sequence
  Description of Artificial Sequence: Synthetic oligonucleotide
  Sense strand starting at position 1772 of SEQ ID NO: 3671
ggaggaguuacccguccau

SEQ ID NO: 285605 - RNA, 19 nt, Artificial Sequence
  Description of Artificial Sequence: Synthetic oligonucleotide
  Antisense strand to SEQ ID NO: 285604
auggacggguaacuccucc

SEQ ID NO: 285606 - RNA, 19 nt, Artificial Sequence
  Description of Artificial Sequence: Synthetic oligonucleotide
  Sense strand starting at position 2010 of SEQ ID NO: 3671
ccggauucuaccggaagca

SEQ ID NO: 285607 - RNA, 19 nt, Artificial Sequence
  Description of Artificial Sequence: Synthetic oligonucleotide
  Antisense strand to SEQ ID NO: 285606
ugcuuccgguagaauccgg

SEQ ID NO: 285608 - RNA, 19 nt, Artificial Sequence
  Description of Artificial Sequence: Synthetic oligonucleotide
  Sense strand starting at position 2330 of SEQ ID NO: 3671
accuuucuuccucguauuu

SEQ ID NO: 285609 - RNA, 19 nt, Artificial Sequence
  Description of Artificial Sequence: Synthetic oligonucleotide
  Antisense strand to SEQ ID NO: 285608
aaauacgaggaagaaaggu

SEQ ID NO: 285610 - RNA, 19 nt, Artificial Sequence
  Description of Artificial Sequence: Synthetic oligonucleotide
  Sense strand starting at position 2339 of SEQ ID NO: 3671
ccucguauuucuccuagag

SEQ ID NO: 285611 - RNA, 19 nt, Artificial Sequence
  Description of Artificial Sequence: Synthetic oligonucleotide
  Antisense strand to SEQ ID NO: 285610
cucuaggagaaauacgagg

SEQ ID NO: 285612 - RNA, 19 nt, Artificial Sequence
  Description of Artificial Sequence: Synthetic oligonucleotide
  Sense strand starting at position 2382 of SEQ ID NO: 3671
cuggcucugccagauacua

SEQ ID NO: 285613 - RNA, 19 nt, Artificial Sequence
  Description of Artificial Sequence: Synthetic oligonucleotide
  Antisense strand to SEQ ID NO: 285612
uaguaucuggcagagccag

SEQ ID NO: 285614 - RNA, 19 nt, Artificial Sequence
  Description of Artificial Sequence: Synthetic oligonucleotide
  Sense strand starting at position 2470 of SEQ ID NO: 3671
gguuguauuaaaugaguga

SEQ ID NO: 285615 - RNA, 19 nt, Artificial Sequence
  Description of Artificial Sequence: Synthetic oligonucleotide
  Antisense strand to SEQ ID NO: 285614
ucacucauuuaauacaacc

SEQ ID NO: 285616 - RNA, 19 nt, Artificial Sequence
  Description of Artificial Sequence: Synthetic oligonucleotide
  Sense strand starting at position 2471 of SEQ ID NO: 3671
guuguauuaaaugagugaa

SEQ ID NO: 285617 - RNA, 19 nt, Artificial Sequence
  Description of Artificial Sequence: Synthetic oligonucleotide
  Antisense strand to SEQ ID NO: 285616
uucacucauuuaauacaac

SEQ ID NO: 285618 - RNA, 19 nt, Artificial Sequence
  Description of Artificial Sequence: Synthetic oligonucleotide
  Sense strand starting at position 2724 of SEQ ID NO: 3671
gcccaucuucccuaagaag

SEQ ID NO: 285619 - RNA, 19 nt, Artificial Sequence
  Description of Artificial Sequence: Synthetic oligonucleotide
  Antisense strand to SEQ ID NO: 285618
cuucuuagggaagaugggc

SEQ ID NO: 285620 - RNA, 19 nt, Artificial Sequence
  Description of Artificial Sequence: Synthetic oligonucleotide
  Sense strand starting at position 2853 of SEQ ID NO: 3671
ccaucucaacuguagguua

SEQ ID NO: 285621 - RNA, 19 nt, Artificial Sequence
  Description of Artificial Sequence: Synthetic oligonucleotide
  Antisense strand to SEQ ID NO: 285620
uaaccuacaguugagaugg

SEQ ID NO: 285622 - RNA, 19 nt, Artificial Sequence
  Description of Artificial Sequence: Synthetic oligonucleotide
  Sense strand starting at position 2855 of SEQ ID NO: 3671
aucucaacuguagguuaua

SEQ ID NO: 285623 - RNA, 19 nt, Artificial Sequence
  Description of Artificial Sequence: Synthetic oligonucleotide
  Antisense strand to SEQ ID NO: 285622
uauaaccuacaguugagau

SEQ ID NO: 285624 - RNA, 19 nt, Artificial Sequence
  Description of Artificial Sequence: Synthetic oligonucleotide
  Sense strand starting at position 2856 of SEQ ID NO: 3671
ucucaacuguagguuauaa

SEQ ID NO: 285625 - RNA, 19 nt, Artificial Sequence
  Description of Artificial Sequence: Synthetic oligonucleotide
  Antisense strand to SEQ ID NO: 285624
uuauaaccuacaguugaga

SEQ ID NO: 285626 - RNA, 19 nt, Artificial Sequence
  Description of Artificial Sequence: Synthetic oligonucleotide
  Sense strand starting at position 2881 of SEQ ID NO: 3671
ucuucuagagaagguucua

SEQ ID NO: 285627 - RNA, 19 nt, Artificial Sequence
  Description of Artificial Sequence: Synthetic oligonucleotide
  Antisense strand to SEQ ID NO: 285626
uagaaccuucucuagaaga

SEQ ID NO: 285628 - RNA, 19 nt, Artificial Sequence
  Description of Artificial Sequence: Synthetic oligonucleotide
  Sense strand starting at position 2893 of SEQ ID NO: 3671
gguucuaucccauauccag

SEQ ID NO: 285629 - RNA, 19 nt, Artificial Sequence
  Description of Artificial Sequence: Synthetic oligonucleotide
  Antisense strand to SEQ ID NO: 285628
cuggauaugggauagaacc

SEQ ID NO: 285630 - RNA, 19 nt, Artificial Sequence
  Description of Artificial Sequence: Synthetic oligonucleotide
  Sense strand starting at position 2980 of SEQ ID NO: 3671
agcauuagaucgccuauuu

SEQ ID NO: 285631 - RNA, 19 nt, Artificial Sequence
  Description of Artificial Sequence: Synthetic oligonucleotide
  Antisense strand to SEQ ID NO: 285630
aaauaggcgaucuaaugcu

SEQ ID NO: 285632 - RNA, 19 nt, Artificial Sequence
  Description of Artificial Sequence: Synthetic oligonucleotide
  Sense strand starting at position 3155 of SEQ ID NO: 3671
uucuuucugucagugauuu

SEQ ID NO: 285633 - RNA, 19 nt, Artificial Sequence
  Description of Artificial Sequence: Synthetic oligonucleotide
  Antisense strand to SEQ ID NO: 285632
aaaucacugacagaaagaa

SEQ ID NO: 285634 - RNA, 19 nt, Artificial Sequence
  Description of Artificial Sequence: Synthetic oligonucleotide
  Sense strand starting at position 3362 of SEQ ID NO: 3671
uggacuuagcaagagcaau

SEQ ID NO: 285635 - RNA, 19 nt, Artificial Sequence
  Description of Artificial Sequence: Synthetic oligonucleotide
  Antisense strand to SEQ ID NO: 285634
auugcucuugcuaagucca

SEQ ID NO: 285636 - RNA, 19 nt, Artificial Sequence
  Description of Artificial Sequence: Synthetic oligonucleotide
  Sense strand starting at position 47 of SEQ ID NO: 3672
ccaggagcuuacccuuuaa

SEQ ID NO: 285637 - RNA, 19 nt, Artificial Sequence
  Description of Artificial Sequence: Synthetic oligonucleotide
  Antisense strand to SEQ ID NO: 285636
uuaaaggguaagcuccugg

SEQ ID NO: 285638 - RNA, 19 nt, Artificial Sequence
  Description of Artificial Sequence: Synthetic oligonucleotide
  Sense strand starting at position 131 of SEQ ID NO: 3672
caugaagugcuacagaauc

SEQ ID NO: 285639 - RNA, 19 nt, Artificial Sequence
  Description of Artificial Sequence: Synthetic oligonucleotide
  Antisense strand to SEQ ID NO: 285638
gauucuguagcacuucaug

SEQ ID NO: 285640 - RNA, 19 nt, Artificial Sequence
  Description of Artificial Sequence: Synthetic oligonucleotide
  Sense strand starting at position 201 of SEQ ID NO: 3672
ggaaauggccuuuaagcca

SEQ ID NO: 285641 - RNA, 19 nt, Artificial Sequence
  Description of Artificial Sequence: Synthetic oligonucleotide
  Antisense strand to SEQ ID NO: 285640
uggcuuaaaggccauuucc

SEQ ID NO: 285642 - RNA, 19 nt, Artificial Sequence
  Description of Artificial Sequence: Synthetic oligonucleotide
  Sense strand starting at position 580 of SEQ ID NO: 3672
gggucaaauuaacacauuu

SEQ ID NO: 285643 - RNA, 19 nt, Artificial Sequence
  Description of Artificial Sequence: Synthetic oligonucleotide
  Antisense strand to SEQ ID NO: 285642
aaauguguuaauuugaccc

SEQ ID NO: 285644 - RNA, 19 nt, Artificial Sequence
  Description of Artificial Sequence: Synthetic oligonucleotide
  Sense strand starting at position 770 of SEQ ID NO: 3672
uguggugaagcucauccaa

SEQ ID NO: 285645 - RNA, 19 nt, Artificial Sequence
  Description of Artificial Sequence: Synthetic oligonucleotide
  Antisense strand to SEQ ID NO: 285644
uuggaugagcuucaccaca

SEQ ID NO: 285646 - RNA, 19 nt, Artificial Sequence
  Description of Artificial Sequence: Synthetic oligonucleotide
  Sense strand starting at position 772 of SEQ ID NO: 3672
uggugaagcucauccaaca

SEQ ID NO: 285647 - RNA, 19 nt, Artificial Sequence
  Description of Artificial Sequence: Synthetic oligonucleotide
  Antisense strand to SEQ ID NO: 285646
uguuggaugagcuucacca

SEQ ID NO: 285648 - RNA, 19 nt, Artificial Sequence
  Description of Artificial Sequence: Synthetic oligonucleotide
  Sense strand starting at position 967 of SEQ ID NO: 3672
uaagauacuugauugguga

SEQ ID NO: 285649 - RNA, 19 nt, Artificial Sequence
  Description of Artificial Sequence: Synthetic oligonucleotide
  Antisense strand to SEQ ID NO: 285648
ucaccaaucaaguaucuua

SEQ ID NO: 285650 - RNA, 19 nt, Artificial Sequence
  Description of Artificial Sequence: Synthetic oligonucleotide
  Sense strand starting at position 969 of SEQ ID NO: 3672
agauacuugauuggugaca

SEQ ID NO: 285651 - RNA, 19 nt, Artificial Sequence
  Description of Artificial Sequence: Synthetic oligonucleotide
  Antisense strand to SEQ ID NO: 285650
ugucaccaaucaaguaucu

SEQ ID NO: 285652 - RNA, 19 nt, Artificial Sequence
  Description of Artificial Sequence: Synthetic oligonucleotide
  Sense strand starting at position 1057 of SEQ ID NO: 3672
ccacgaccugacugaauaa

SEQ ID NO: 285653 - RNA, 19 nt, Artificial Sequence
  Description of Artificial Sequence: Synthetic oligonucleotide
  Antisense strand to SEQ ID NO: 285652
uuauucagucaggucgugg

SEQ ID NO: 285654 - RNA, 19 nt, Artificial Sequence
  Description of Artificial Sequence: Synthetic oligonucleotide
  Sense strand starting at position 1077 of SEQ ID NO: 3672
agcuaaacaucucugcaga

SEQ ID NO: 285655 - RNA, 19 nt, Artificial Sequence
  Description of Artificial Sequence: Synthetic oligonucleotide
  Antisense strand to SEQ ID NO: 285654
ucugcagagauguuuagcu

SEQ ID NO: 285656 - RNA, 19 nt, Artificial Sequence
  Description of Artificial Sequence: Synthetic oligonucleotide
  Sense strand starting at position 1229 of SEQ ID NO: 3672
accuccuucgacugaaauu

SEQ ID NO: 285657 - RNA, 19 nt, Artificial Sequence
  Description of Artificial Sequence: Synthetic oligonucleotide
  Antisense strand to SEQ ID NO: 285656
aauuucagucgaaggaggu

SEQ ID NO: 285658 - RNA, 19 nt, Artificial Sequence
  Description of Artificial Sequence: Synthetic oligonucleotide
  Sense strand starting at position 1336 of SEQ ID NO: 3672
uccauuuauugauaaggag

SEQ ID NO: 285659 - RNA, 19 nt, Artificial Sequence
  Description of Artificial Sequence: Synthetic oligonucleotide
  Antisense strand to SEQ ID NO: 285658
cuccuuaucaauaaaugga

SEQ ID NO: 285660 - RNA, 19 nt, Artificial Sequence
  Description of Artificial Sequence: Synthetic oligonucleotide
  Sense strand starting at position 1521 of SEQ ID NO: 3672
gggucuaaacucggguaaa

SEQ ID NO: 285661 - RNA, 19 nt, Artificial Sequence
  Description of Artificial Sequence: Synthetic oligonucleotide
  Antisense strand to SEQ ID NO: 285660
uuuacccgaguuuagaccc

SEQ ID NO: 285662 - RNA, 19 nt, Artificial Sequence
  Description of Artificial Sequence: Synthetic oligonucleotide
  Sense strand starting at position 1656 of SEQ ID NO: 3672
ccacguuucgaagugcuca

SEQ ID NO: 285663 - RNA, 19 nt, Artificial Sequence
  Description of Artificial Sequence: Synthetic oligonucleotide
  Antisense strand to SEQ ID NO: 285662
ugagcacuucgaaacgugg

SEQ ID NO: 285664 - RNA, 19 nt, Artificial Sequence
  Description of Artificial Sequence: Synthetic oligonucleotide
  Sense strand starting at position 2071 of SEQ ID NO: 3672
uguaguucuguggcuucga

SEQ ID NO: 285665 - RNA, 19 nt, Artificial Sequence
  Description of Artificial Sequence: Synthetic oligonucleotide
  Antisense strand to SEQ ID NO: 285664
ucgaagccacagaacuaca

SEQ ID NO: 285666 - RNA, 19 nt, Artificial Sequence
  Description of Artificial Sequence: Synthetic oligonucleotide
  Sense strand starting at position 2174 of SEQ ID NO: 3672
cggcacuucgcucugugaa

SEQ ID NO: 285667 - RNA, 19 nt, Artificial Sequence
  Description of Artificial Sequence: Synthetic oligonucleotide
  Antisense strand to SEQ ID NO: 285666
uucacagagcgaagugccg

SEQ ID NO: 285668 - RNA, 19 nt, Artificial Sequence
  Description of Artificial Sequence: Synthetic oligonucleotide
  Sense strand starting at position 2206 of SEQ ID NO: 3672
cgggaauaucaguauggug

SEQ ID NO: 285669 - RNA, 19 nt, Artificial Sequence
  Description of Artificial Sequence: Synthetic oligonucleotide
  Antisense strand to SEQ ID NO: 285668
caccauacugauauucccg

SEQ ID NO: 285670 - RNA, 19 nt, Artificial Sequence
  Description of Artificial Sequence: Synthetic oligonucleotide
  Sense strand starting at position 2208 of SEQ ID NO: 3672
ggaauaucaguauggugac

SEQ ID NO: 285671 - RNA, 19 nt, Artificial Sequence
  Description of Artificial Sequence: Synthetic oligonucleotide
  Antisense strand to SEQ ID NO: 285670
gucaccauacugauauucc

SEQ ID NO: 285672 - RNA, 19 nt, Artificial Sequence
  Description of Artificial Sequence: Synthetic oligonucleotide
  Sense strand starting at position 2214 of SEQ ID NO: 3672
ucaguauggugacuccuua

SEQ ID NO: 285673 - RNA, 19 nt, Artificial Sequence
  Description of Artificial Sequence: Synthetic oligonucleotide
  Antisense strand to SEQ ID NO: 285672
uaaggagucaccauacuga

SEQ ID NO: 285674 - RNA, 19 nt, Artificial Sequence
  Description of Artificial Sequence: Synthetic oligonucleotide
  Sense strand starting at position 2262 of SEQ ID NO: 3672
aggugaagcccagggauau

SEQ ID NO: 285675 - RNA, 19 nt, Artificial Sequence
  Description of Artificial Sequence: Synthetic oligonucleotide
  Antisense strand to SEQ ID NO: 285674
auaucccugggcuucaccu

SEQ ID NO: 285676 - RNA, 19 nt, Artificial Sequence
  Description of Artificial Sequence: Synthetic oligonucleotide
  Sense strand starting at position 2263 of SEQ ID NO: 3672
ggugaagcccagggauauu

SEQ ID NO: 285677 - RNA, 19 nt, Artificial Sequence
  Description of Artificial Sequence: Synthetic oligonucleotide
  Antisense strand to SEQ ID NO: 285676
aauaucccugggcuucacc

SEQ ID NO: 285678 - RNA, 19 nt, Artificial Sequence
  Description of Artificial Sequence: Synthetic oligonucleotide
  Sense strand starting at position 2275 of SEQ ID NO: 3672
ggauauuucuguucgccca

SEQ ID NO: 285679 - RNA, 19 nt, Artificial Sequence
  Description of Artificial Sequence: Synthetic oligonucleotide
  Antisense strand to SEQ ID NO: 285678
ugggcgaacagaaauaucc

SEQ ID NO: 285680 - RNA, 19 nt, Artificial Sequence
  Description of Artificial Sequence: Synthetic oligonucleotide
  Sense strand starting at position 2276 of SEQ ID NO: 3672
gauauuucuguucgcccau

SEQ ID NO: 285681 - RNA, 19 nt, Artificial Sequence
  Description of Artificial Sequence: Synthetic oligonucleotide
  Antisense strand to SEQ ID NO: 285680
augggcgaacagaaauauc

SEQ ID NO: 285682 - RNA, 19 nt, Artificial Sequence
  Description of Artificial Sequence: Synthetic oligonucleotide
  Sense strand starting at position 2299 of SEQ ID NO: 3672
ccgagaaaggaguguuaga

SEQ ID NO: 285683 - RNA, 19 nt, Artificial Sequence
  Description of Artificial Sequence: Synthetic oligonucleotide
  Antisense strand to SEQ ID NO: 285682
ucuaacacuccuuucucgg

SEQ ID NO: 285684 - RNA, 19 nt, Artificial Sequence
  Description of Artificial Sequence: Synthetic oligonucleotide
  Sense strand starting at position 2510 of SEQ ID NO: 3672
ggacauucuucugcaccua

SEQ ID NO: 285685 - RNA, 19 nt, Artificial Sequence
  Description of Artificial Sequence: Synthetic oligonucleotide
  Antisense strand to SEQ ID NO: 285684
uaggugcagaagaaugucc

SEQ ID NO: 285686 - RNA, 19 nt, Artificial Sequence
  Description of Artificial Sequence: Synthetic oligonucleotide
  Sense strand starting at position 2570 of SEQ ID NO: 3672
gagacugguucugcacaua

SEQ ID NO: 285687 - RNA, 19 nt, Artificial Sequence
  Description of Artificial Sequence: Synthetic oligonucleotide
  Antisense strand to SEQ ID NO: 285686
uaugugcagaaccagucuc

SEQ ID NO: 285688 - RNA, 19 nt, Artificial Sequence
  Description of Artificial Sequence: Synthetic oligonucleotide
  Sense strand starting at position 2573 of SEQ ID NO: 3672
acugguucugcacauauga

SEQ ID NO: 285689 - RNA, 19 nt, Artificial Sequence
  Description of Artificial Sequence: Synthetic oligonucleotide
  Antisense strand to SEQ ID NO: 285688
ucauaugugcagaaccagu

SEQ ID NO: 285690 - RNA, 19 nt, Artificial Sequence
  Description of Artificial Sequence: Synthetic oligonucleotide
  Sense strand starting at position 2575 of SEQ ID NO: 3672
ugguucugcacauaugagu

SEQ ID NO: 285691 - RNA, 19 nt, Artificial Sequence
  Description of Artificial Sequence: Synthetic oligonucleotide
  Antisense strand to SEQ ID NO: 285690
acucauaugugcagaacca

SEQ ID NO: 285692 - RNA, 19 nt, Artificial Sequence
  Description of Artificial Sequence: Synthetic oligonucleotide
  Sense strand starting at position 2612 of SEQ ID NO: 3672
gcaauccuucgugacuaac

SEQ ID NO: 285693 - RNA, 19 nt, Artificial Sequence
  Description of Artificial Sequence: Synthetic oligonucleotide
  Antisense strand to SEQ ID NO: 285692
guuagucacgaaggauugc

SEQ ID NO: 285694 - RNA, 19 nt, Artificial Sequence
  Description of Artificial Sequence: Synthetic oligonucleotide
  Sense strand starting at position 2680 of SEQ ID NO: 3672
uuucuugcuguugagaaua

SEQ ID NO: 285695 - RNA, 19 nt, Artificial Sequence
  Description of Artificial Sequence: Synthetic oligonucleotide
  Antisense strand to SEQ ID NO: 285694
uauucucaacagcaagaaa

SEQ ID NO: 285696 - RNA, 19 nt, Artificial Sequence
  Description of Artificial Sequence: Synthetic oligonucleotide
  Sense strand starting at position 2685 of SEQ ID NO: 3672
ugcuguugagaauaguuaa

SEQ ID NO: 285697 - RNA, 19 nt, Artificial Sequence
  Description of Artificial Sequence: Synthetic oligonucleotide
  Antisense strand to SEQ ID NO: 285696
uuaacuauucucaacagca

SEQ ID NO: 285698 - RNA, 19 nt, Artificial Sequence
  Description of Artificial Sequence: Synthetic oligonucleotide
  Sense strand starting at position 3067 of SEQ ID NO: 3672
aaagguucuggcuaacaug

SEQ ID NO: 285699 - RNA, 19 nt, Artificial Sequence
  Description of Artificial Sequence: Synthetic oligonucleotide
  Antisense strand to SEQ ID NO: 285698
cauguuagccagaaccuuu

SEQ ID NO: 285700 - RNA, 19 nt, Artificial Sequence
  Description of Artificial Sequence: Synthetic oligonucleotide
  Sense strand starting at position 3133 of SEQ ID NO: 3672
aggcuacucuaggcaaaua

SEQ ID NO: 285701 - RNA, 19 nt, Artificial Sequence
  Description of Artificial Sequence: Synthetic oligonucleotide
  Antisense strand to SEQ ID NO: 285700
uauuugccuagaguagccu

SEQ ID NO: 285702 - RNA, 19 nt, Artificial Sequence
  Description of Artificial Sequence: Synthetic oligonucleotide
  Sense strand starting at position 3149 of SEQ ID NO: 3672
auaugucaccuuuaaugua

SEQ ID NO: 285703 - RNA, 19 nt, Artificial Sequence
  Description of Artificial Sequence: Synthetic oligonucleotide
  Antisense strand to SEQ ID NO: 285702
uacauuaaaggugacauau

SEQ ID NO: 285704 - RNA, 19 nt, Artificial Sequence
  Description of Artificial Sequence: Synthetic oligonucleotide
  Sense strand starting at position 3161 of SEQ ID NO: 3672
uaauguaucuccuuaggag

SEQ ID NO: 285705 - RNA, 19 nt, Artificial Sequence
  Description of Artificial Sequence: Synthetic oligonucleotide
  Antisense strand to SEQ ID NO: 285704
cuccuaaggagauacauua

SEQ ID NO: 285706 - RNA, 19 nt, Artificial Sequence
  Description of Artificial Sequence: Synthetic oligonucleotide
  Sense strand starting at position 3466 of SEQ ID NO: 3672
agaacuuccguccaucauu

SEQ ID NO: 285707 - RNA, 19 nt, Artificial Sequence
  Description of Artificial Sequence: Synthetic oligonucleotide
  Antisense strand to SEQ ID NO: 285706
aaugauggacggaaguucu

SEQ ID NO: 285708 - RNA, 19 nt, Artificial Sequence
  Description of Artificial Sequence: Synthetic oligonucleotide
  Sense strand starting at position 3600 of SEQ ID NO: 3672
uguagaugguccucaacaa

SEQ ID NO: 285709 - RNA, 19 nt, Artificial Sequence
  Description of Artificial Sequence: Synthetic oligonucleotide
  Antisense strand to SEQ ID NO: 285708
uuguugaggaccaucuaca

SEQ ID NO: 285710 - RNA, 19 nt, Artificial Sequence
  Description of Artificial Sequence: Synthetic oligonucleotide
  Sense strand starting at position 3925 of SEQ ID NO: 3672
cagagacuguugcucauaa

SEQ ID NO: 285711 - RNA, 19 nt, Artificial Sequence
  Description of Artificial Sequence: Synthetic oligonucleotide
  Antisense strand to SEQ ID NO: 285710
uuaugagcaacagucucug

SEQ ID NO: 285712 - RNA, 19 nt, Artificial Sequence
  Description of Artificial Sequence: Synthetic oligonucleotide
  Sense strand starting at position 3926 of SEQ ID NO: 3672
agagacuguugcucauaac

SEQ ID NO: 285713 - RNA, 19 nt, Artificial Sequence
  Description of Artificial Sequence: Synthetic oligonucleotide
  Antisense strand to SEQ ID NO: 285712
guuaugagcaacagucucu

SEQ ID NO: 285714 - RNA, 19 nt, Artificial Sequence
  Description of Artificial Sequence: Synthetic oligonucleotide
  Sense strand starting at position 3927 of SEQ ID NO: 3672
gagacuguugcucauaaca

SEQ ID NO: 285715 - RNA, 19 nt, Artificial Sequence
  Description of Artificial Sequence: Synthetic oligonucleotide
  Antisense strand to SEQ ID NO: 285714
uguuaugagcaacagucuc

SEQ ID NO: 285716 - RNA, 19 nt, Artificial Sequence
  Description of Artificial Sequence: Synthetic oligonucleotide
  Sense strand starting at position 130 of SEQ ID NO: 3673
gugagaaauccucaauguc

SEQ ID NO: 285717 - RNA, 19 nt, Artificial Sequence
  Description of Artificial Sequence: Synthetic oligonucleotide
  Antisense strand to SEQ ID NO: 285716
gacauugaggauuucucac

SEQ ID NO: 285718 - RNA, 19 nt, Artificial Sequence
  Description of Artificial Sequence: Synthetic oligonucleotide
  Sense strand starting at position 133 of SEQ ID NO: 3673
agaaauccucaaugucgau

SEQ ID NO: 285719 - RNA, 19 nt, Artificial Sequence
  Description of Artificial Sequence: Synthetic oligonucleotide
  Antisense strand to SEQ ID NO: 285718
aucgacauugaggauuucu

SEQ ID NO: 285720 - RNA, 19 nt, Artificial Sequence
  Description of Artificial Sequence: Synthetic oligonucleotide
  Sense strand starting at position 137 of SEQ ID NO: 3673
auccucaaugucgaugaua

SEQ ID NO: 285721 - RNA, 19 nt, Artificial Sequence
  Description of Artificial Sequence: Synthetic oligonucleotide
  Antisense strand to SEQ ID NO: 285720
uaucaucgacauugaggau

SEQ ID NO: 285722 - RNA, 19 nt, Artificial Sequence
  Description of Artificial Sequence: Synthetic oligonucleotide
  Sense strand starting at position 229 of SEQ ID NO: 3673
gugcuuaaagcucagugaa

SEQ ID NO: 285723 - RNA, 19 nt, Artificial Sequence
  Description of Artificial Sequence: Synthetic oligonucleotide
  Antisense strand to SEQ ID NO: 285722
uucacugagcuuuaagcac

SEQ ID NO: 285724 - RNA, 19 nt, Artificial Sequence
  Description of Artificial Sequence: Synthetic oligonucleotide
  Sense strand starting at position 231 of SEQ ID NO: 3673
gcuuaaagcucagugaaga

SEQ ID NO: 285725 - RNA, 19 nt, Artificial Sequence
  Description of Artificial Sequence: Synthetic oligonucleotide
  Antisense strand to SEQ ID NO: 285724
ucuucacugagcuuuaagc

SEQ ID NO: 285726 - RNA, 19 nt, Artificial Sequence
  Description of Artificial Sequence: Synthetic oligonucleotide
  Sense strand starting at position 232 of SEQ ID NO: 3673
cuuaaagcucagugaagac

SEQ ID NO: 285727 - RNA, 19 nt, Artificial Sequence
  Description of Artificial Sequence: Synthetic oligonucleotide
  Antisense strand to SEQ ID NO: 285726
gucuucacugagcuuuaag

SEQ ID NO: 285728 - RNA, 19 nt, Artificial Sequence
  Description of Artificial Sequence: Synthetic oligonucleotide
  Sense strand starting at position 242 of SEQ ID NO: 3673
agugaagacuuacuguaga

SEQ ID NO: 285729 - RNA, 19 nt, Artificial Sequence
  Description of Artificial Sequence: Synthetic oligonucleotide
  Antisense strand to SEQ ID NO: 285728
ucuacaguaagucuucacu

SEQ ID NO: 285730 - RNA, 19 nt, Artificial Sequence
  Description of Artificial Sequence: Synthetic oligonucleotide
  Sense strand starting at position 259 of SEQ ID NO: 3673
gaugguauguccuccuaaa

SEQ ID NO: 285731 - RNA, 19 nt, Artificial Sequence
  Description of Artificial Sequence: Synthetic oligonucleotide
  Antisense strand to SEQ ID NO: 285730
uuuaggaggacauaccauc

SEQ ID NO: 285732 - RNA, 19 nt, Artificial Sequence
  Description of Artificial Sequence: Synthetic oligonucleotide
  Sense strand starting at position 527 of SEQ ID NO: 3673
gcuucuugaguaugaugaa

SEQ ID NO: 285733 - RNA, 19 nt, Artificial Sequence
  Description of Artificial Sequence: Synthetic oligonucleotide
  Antisense strand to SEQ ID NO: 285732
uucaucauacucaagaagc

SEQ ID NO: 285734 - RNA, 19 nt, Artificial Sequence
  Description of Artificial Sequence: Synthetic oligonucleotide
  Sense strand starting at position 534 of SEQ ID NO: 3673
gaguaugaugaauggcagu

SEQ ID NO: 285735 - RNA, 19 nt, Artificial Sequence
  Description of Artificial Sequence: Synthetic oligonucleotide
  Antisense strand to SEQ ID NO: 285734
acugccauucaucauacuc

SEQ ID NO: 285736 - RNA, 19 nt, Artificial Sequence
  Description of Artificial Sequence: Synthetic oligonucleotide
  Sense strand starting at position 540 of SEQ ID NO: 3673
gaugaauggcaguaguuag

SEQ ID NO: 285737 - RNA, 19 nt, Artificial Sequence
  Description of Artificial Sequence: Synthetic oligonucleotide
  Antisense strand to SEQ ID NO: 285736
cuaacuacugccauucauc

SEQ ID NO: 285738 - RNA, 19 nt, Artificial Sequence
  Description of Artificial Sequence: Synthetic oligonucleotide
  Sense strand starting at position 548 of SEQ ID NO: 3673
gcaguaguuagcgcuauga

SEQ ID NO: 285739 - RNA, 19 nt, Artificial Sequence
  Description of Artificial Sequence: Synthetic oligonucleotide
  Antisense strand to SEQ ID NO: 285738
ucauagcgcuaacuacugc

SEQ ID NO: 285740 - RNA, 19 nt, Artificial Sequence
  Description of Artificial Sequence: Synthetic oligonucleotide
  Sense strand starting at position 915 of SEQ ID NO: 3673
aacagauggccagggugau

SEQ ID NO: 285741 - RNA, 19 nt, Artificial Sequence
  Description of Artificial Sequence: Synthetic oligonucleotide
  Antisense strand to SEQ ID NO: 285740
aucacccuggccaucuguu

SEQ ID NO: 285742 - RNA, 19 nt, Artificial Sequence
  Description of Artificial Sequence: Synthetic oligonucleotide
  Sense strand starting at position 916 of SEQ ID NO: 3673
acagauggccagggugaua

SEQ ID NO: 285743 - RNA, 19 nt, Artificial Sequence
  Description of Artificial Sequence: Synthetic oligonucleotide
  Antisense strand to SEQ ID NO: 285742
uaucacccuggccaucugu

SEQ ID NO: 285744 - RNA, 19 nt, Artificial Sequence
  Description of Artificial Sequence: Synthetic oligonucleotide
  Sense strand starting at position 1123 of SEQ ID NO: 3673
gauggaggaucugagaaua

SEQ ID NO: 285745 - RNA, 19 nt, Artificial Sequence
  Description of Artificial Sequence: Synthetic oligonucleotide
  Antisense strand to SEQ ID NO: 285744
uauucucagauccuccauc

SEQ ID NO: 285746 - RNA, 19 nt, Artificial Sequence
  Description of Artificial Sequence: Synthetic oligonucleotide
  Sense strand starting at position 1147 of SEQ ID NO: 3673
cgcauguuuggguagggaa

SEQ ID NO: 285747 - RNA, 19 nt, Artificial Sequence
  Description of Artificial Sequence: Synthetic oligonucleotide
  Antisense strand to SEQ ID NO: 285746
uucccuacccaaacaugcg

SEQ ID NO: 285748 - RNA, 19 nt, Artificial Sequence
  Description of Artificial Sequence: Synthetic oligonucleotide
  Sense strand starting at position 1259 of SEQ ID NO: 3673
aauguauucggaggguaga

SEQ ID NO: 285749 - RNA, 19 nt, Artificial Sequence
  Description of Artificial Sequence: Synthetic oligonucleotide
  Antisense strand to SEQ ID NO: 285748
ucuacccuccgaauacauu

SEQ ID NO: 285750 - RNA, 19 nt, Artificial Sequence
  Description of Artificial Sequence: Synthetic oligonucleotide
  Sense strand starting at position 1288 of SEQ ID NO: 3673
uuuguuaaauugccaauga

SEQ ID NO: 285751 - RNA, 19 nt, Artificial Sequence
  Description of Artificial Sequence: Synthetic oligonucleotide
  Antisense strand to SEQ ID NO: 285750
ucauuggcaauuuaacaaa

SEQ ID NO: 285752 - RNA, 19 nt, Artificial Sequence
  Description of Artificial Sequence: Synthetic oligonucleotide
  Sense strand starting at position 1292 of SEQ ID NO: 3673
uuaaauugccaaugaauga

SEQ ID NO: 285753 - RNA, 19 nt, Artificial Sequence
  Description of Artificial Sequence: Synthetic oligonucleotide
  Antisense strand to SEQ ID NO: 285752
ucauucauuggcaauuuaa

SEQ ID NO: 285754 - RNA, 19 nt, Artificial Sequence
  Description of Artificial Sequence: Synthetic oligonucleotide
  Sense strand starting at position 1817 of SEQ ID NO: 3673
gggcuggcucgggagagau

SEQ ID NO: 285755 - RNA, 19 nt, Artificial Sequence
  Description of Artificial Sequence: Synthetic oligonucleotide
  Antisense strand to SEQ ID NO: 285754
aucucucccgagccagccc

SEQ ID NO: 285756 - RNA, 19 nt, Artificial Sequence
  Description of Artificial Sequence: Synthetic oligonucleotide
  Sense strand starting at position 2173 of SEQ ID NO: 3673
ucucuaagucuucggauaa

SEQ ID NO: 285757 - RNA, 19 nt, Artificial Sequence
  Description of Artificial Sequence: Synthetic oligonucleotide
  Antisense strand to SEQ ID NO: 285756
uuauccgaagacuuagaga

SEQ ID NO: 285758 - RNA, 19 nt, Artificial Sequence
  Description of Artificial Sequence: Synthetic oligonucleotide
  Sense strand starting at position 2542 of SEQ ID NO: 3673
gugucaccagucuagagau

SEQ ID NO: 285759 - RNA, 19 nt, Artificial Sequence
  Description of Artificial Sequence: Synthetic oligonucleotide
  Antisense strand to SEQ ID NO: 285758
aucucuagacuggugacac

SEQ ID NO: 285760 - RNA, 19 nt, Artificial Sequence
  Description of Artificial Sequence: Synthetic oligonucleotide
  Sense strand starting at position 2638 of SEQ ID NO: 3673
uuuagugguuucuuaagau

SEQ ID NO: 285761 - RNA, 19 nt, Artificial Sequence
  Description of Artificial Sequence: Synthetic oligonucleotide
  Antisense strand to SEQ ID NO: 285760
aucuuaagaaaccacuaaa

SEQ ID NO: 285762 - RNA, 19 nt, Artificial Sequence
  Description of Artificial Sequence: Synthetic oligonucleotide
  Sense strand starting at position 2644 of SEQ ID NO: 3673
gguuucuuaagaugaguac

SEQ ID NO: 285763 - RNA, 19 nt, Artificial Sequence
  Description of Artificial Sequence: Synthetic oligonucleotide
  Antisense strand to SEQ ID NO: 285762
guacucaucuuaagaaacc

SEQ ID NO: 285764 - RNA, 19 nt, Artificial Sequence
  Description of Artificial Sequence: Synthetic oligonucleotide
  Sense strand starting at position 2645 of SEQ ID NO: 3673
guuucuuaagaugaguaca

SEQ ID NO: 285765 - RNA, 19 nt, Artificial Sequence
  Description of Artificial Sequence: Synthetic oligonucleotide
  Antisense strand to SEQ ID NO: 285764
uguacucaucuuaagaaac

SEQ ID NO: 285766 - RNA, 19 nt, Artificial Sequence
  Description of Artificial Sequence: Synthetic oligonucleotide
  Sense strand starting at position 2853 of SEQ ID NO: 3673
aggaucuucucuuuaaagu

SEQ ID NO: 285767 - RNA, 19 nt, Artificial Sequence
  Description of Artificial Sequence: Synthetic oligonucleotide
  Antisense strand to SEQ ID NO: 285766
acuuuaaagagaagauccu

SEQ ID NO: 285768 - RNA, 19 nt, Artificial Sequence
  Description of Artificial Sequence: Synthetic oligonucleotide
  Sense strand starting at position 2854 of SEQ ID NO: 3673
ggaucuucucuuuaaaguu

SEQ ID NO: 285769 - RNA, 19 nt, Artificial Sequence
  Description of Artificial Sequence: Synthetic oligonucleotide
  Antisense strand to SEQ ID NO: 285768
aacuuuaaagagaagaucc

SEQ ID NO: 285770 - RNA, 19 nt, Artificial Sequence
  Description of Artificial Sequence: Synthetic oligonucleotide
  Sense strand starting at position 2884 of SEQ ID NO: 3673
ugacgaugguaccuugaau

SEQ ID NO: 285771 - RNA, 19 nt, Artificial Sequence
  Description of Artificial Sequence: Synthetic oligonucleotide
  Antisense strand to SEQ ID NO: 285770
auucaagguaccaucguca

SEQ ID NO: 285772 - RNA, 19 nt, Artificial Sequence
  Description of Artificial Sequence: Synthetic oligonucleotide
  Sense strand starting at position 2895 of SEQ ID NO: 3673
ccuugaauuuaaggaaauu

SEQ ID NO: 285773 - RNA, 19 nt, Artificial Sequence
  Description of Artificial Sequence: Synthetic oligonucleotide
  Antisense strand to SEQ ID NO: 285772
aauuuccuuaaauucaagg

SEQ ID NO: 285774 - RNA, 19 nt, Artificial Sequence
  Description of Artificial Sequence: Synthetic oligonucleotide
  Sense strand starting at position 2920 of SEQ ID NO: 3673
aacgaaggagcuugauguu

SEQ ID NO: 285775 - RNA, 19 nt, Artificial Sequence
  Description of Artificial Sequence: Synthetic oligonucleotide
  Antisense strand to SEQ ID NO: 285774
aacaucaagcuccuucguu

SEQ ID NO: 285776 - RNA, 19 nt, Artificial Sequence
  Description of Artificial Sequence: Synthetic oligonucleotide
  Sense strand starting at position 2943 of SEQ ID NO: 3673
guugaaagggcccacuuaa

SEQ ID NO: 285777 - RNA, 19 nt, Artificial Sequence
  Description of Artificial Sequence: Synthetic oligonucleotide
  Antisense strand to SEQ ID NO: 285776
uuaagugggcccuuucaac

SEQ ID NO: 285778 - RNA, 19 nt, Artificial Sequence
  Description of Artificial Sequence: Synthetic oligonucleotide
  Sense strand starting at position 3093 of SEQ ID NO: 3673
cagggacucugaucucaug

SEQ ID NO: 285779 - RNA, 19 nt, Artificial Sequence
  Description of Artificial Sequence: Synthetic oligonucleotide
  Antisense strand to SEQ ID NO: 285778
caugagaucagagucccug

SEQ ID NO: 285780 - RNA, 19 nt, Artificial Sequence
  Description of Artificial Sequence: Synthetic oligonucleotide
  Sense strand starting at position 3110 of SEQ ID NO: 3673
ugaggaaucuuugcauccu

SEQ ID NO: 285781 - RNA, 19 nt, Artificial Sequence
  Description of Artificial Sequence: Synthetic oligonucleotide
  Antisense strand to SEQ ID NO: 285780
aggaugcaaagauuccuca

SEQ ID NO: 285782 - RNA, 19 nt, Artificial Sequence
  Description of Artificial Sequence: Synthetic oligonucleotide
  Sense strand starting at position 3126 of SEQ ID NO: 3673
ccuguaucaggguagaugu

SEQ ID NO: 285783 - RNA, 19 nt, Artificial Sequence
  Description of Artificial Sequence: Synthetic oligonucleotide
  Antisense strand to SEQ ID NO: 285782
acaucuacccugauacagg

SEQ ID NO: 285784 - RNA, 19 nt, Artificial Sequence
  Description of Artificial Sequence: Synthetic oligonucleotide
  Sense strand starting at position 3254 of SEQ ID NO: 3673
guagauuucugccugucau

SEQ ID NO: 285785 - RNA, 19 nt, Artificial Sequence
  Description of Artificial Sequence: Synthetic oligonucleotide
  Antisense strand to SEQ ID NO: 285784
augacaggcagaaaucuac

SEQ ID NO: 285786 - RNA, 19 nt, Artificial Sequence
  Description of Artificial Sequence: Synthetic oligonucleotide
  Sense strand starting at position 3348 of SEQ ID NO: 3673
auuaccuuggccuaaugau

SEQ ID NO: 285787 - RNA, 19 nt, Artificial Sequence
  Description of Artificial Sequence: Synthetic oligonucleotide
  Antisense strand to SEQ ID NO: 285786
aucauuaggccaagguaau

SEQ ID NO: 285788 - RNA, 19 nt, Artificial Sequence
  Description of Artificial Sequence: Synthetic oligonucleotide
  Sense strand starting at position 3861 of SEQ ID NO: 3673
uugggaucauuguucugau

SEQ ID NO: 285789 - RNA, 19 nt, Artificial Sequence
  Description of Artificial Sequence: Synthetic oligonucleotide
  Antisense strand to SEQ ID NO: 285788
aucagaacaaugaucccaa

SEQ ID NO: 285790 - RNA, 19 nt, Artificial Sequence
  Description of Artificial Sequence: Synthetic oligonucleotide
  Sense strand starting at position 3862 of SEQ ID NO: 3673
ugggaucauuguucugauc

SEQ ID NO: 285791 - RNA, 19 nt, Artificial Sequence
  Description of Artificial Sequence: Synthetic oligonucleotide
  Antisense strand to SEQ ID NO: 285790
gaucagaacaaugauccca

SEQ ID NO: 285792 - RNA, 19 nt, Artificial Sequence
  Description of Artificial Sequence: Synthetic oligonucleotide
  Sense strand starting at position 3891 of SEQ ID NO: 3673
gcaaucacacucugaagau

SEQ ID NO: 285793 - RNA, 19 nt, Artificial Sequence
  Description of Artificial Sequence: Synthetic oligonucleotide
  Antisense strand to SEQ ID NO: 285792
aucuucagagugugauugc

SEQ ID NO: 285794 - RNA, 19 nt, Artificial Sequence
  Description of Artificial Sequence: Synthetic oligonucleotide
  Sense strand starting at position 3973 of SEQ ID NO: 3673
gguaccauccauuagaggu

SEQ ID NO: 285795 - RNA, 19 nt, Artificial Sequence
  Description of Artificial Sequence: Synthetic oligonucleotide
  Antisense strand to SEQ ID NO: 285794
accucuaauggaugguacc

SEQ ID NO: 285796 - RNA, 19 nt, Artificial Sequence
  Description of Artificial Sequence: Synthetic oligonucleotide
  Sense strand starting at position 29 of SEQ ID NO: 3674
aucaccauccuguauugua

SEQ ID NO: 285797 - RNA, 19 nt, Artificial Sequence
  Description of Artificial Sequence: Synthetic oligonucleotide
  Antisense strand to SEQ ID NO: 285796
uacaauacaggauggugau

SEQ ID NO: 285798 - RNA, 19 nt, Artificial Sequence
  Description of Artificial Sequence: Synthetic oligonucleotide
  Sense strand starting at position 37 of SEQ ID NO: 3674
ccuguauuguaaguauaua

SEQ ID NO: 285799 - RNA, 19 nt, Artificial Sequence
  Description of Artificial Sequence: Synthetic oligonucleotide
  Antisense strand to SEQ ID NO: 285798
uauauacuuacaauacagg

SEQ ID NO: 285800 - RNA, 19 nt, Artificial Sequence
  Description of Artificial Sequence: Synthetic oligonucleotide
  Sense strand starting at position 178 of SEQ ID NO: 3674
guuuaaauugacugaaacu

SEQ ID NO: 285801 - RNA, 19 nt, Artificial Sequence
  Description of Artificial Sequence: Synthetic oligonucleotide
  Antisense strand to SEQ ID NO: 285800
aguuucagucaauuuaaac

SEQ ID NO: 285802 - RNA, 19 nt, Artificial Sequence
  Description of Artificial Sequence: Synthetic oligonucleotide
  Sense strand starting at position 216 of SEQ ID NO: 3674
uuacacuagccauauaugu

SEQ ID NO: 285803 - RNA, 19 nt, Artificial Sequence
  Description of Artificial Sequence: Synthetic oligonucleotide
  Antisense strand to SEQ ID NO: 285802
acauauauggcuaguguaa

SEQ ID NO: 285804 - RNA, 19 nt, Artificial Sequence
  Description of Artificial Sequence: Synthetic oligonucleotide
  Sense strand starting at position 540 of SEQ ID NO: 3674
auucuaaaguagucuguga

SEQ ID NO: 285805 - RNA, 19 nt, Artificial Sequence
  Description of Artificial Sequence: Synthetic oligonucleotide
  Antisense strand to SEQ ID NO: 285804
ucacagacuacuuuagaau

SEQ ID NO: 285806 - RNA, 19 nt, Artificial Sequence
  Description of Artificial Sequence: Synthetic oligonucleotide
  Sense strand starting at position 542 of SEQ ID NO: 3674
ucuaaaguagucugugaau

SEQ ID NO: 285807 - RNA, 19 nt, Artificial Sequence
  Description of Artificial Sequence: Synthetic oligonucleotide
  Antisense strand to SEQ ID NO: 285806
auucacagacuacuuuaga

SEQ ID NO: 285808 - RNA, 19 nt, Artificial Sequence
  Description of Artificial Sequence: Synthetic oligonucleotide
  Sense strand starting at position 544 of SEQ ID NO: 3674
uaaaguagucugugaauua

SEQ ID NO: 285809 - RNA, 19 nt, Artificial Sequence
  Description of Artificial Sequence: Synthetic oligonucleotide
  Antisense strand to SEQ ID NO: 285808
uaauucacagacuacuuua

SEQ ID NO: 285810 - RNA, 19 nt, Artificial Sequence
  Description of Artificial Sequence: Synthetic oligonucleotide
  Sense strand starting at position 721 of SEQ ID NO: 3674
cuaugugguccacacacuu

SEQ ID NO: 285811 - RNA, 19 nt, Artificial Sequence
  Description of Artificial Sequence: Synthetic oligonucleotide
  Antisense strand to SEQ ID NO: 285810
aaguguguggaccacauag

SEQ ID NO: 285812 - RNA, 19 nt, Artificial Sequence
  Description of Artificial Sequence: Synthetic oligonucleotide
  Sense strand starting at position 931 of SEQ ID NO: 3674
ccuuauugucagggaugug

SEQ ID NO: 285813 - RNA, 19 nt, Artificial Sequence
  Description of Artificial Sequence: Synthetic oligonucleotide
  Antisense strand to SEQ ID NO: 285812
cacaucccugacaauaagg

SEQ ID NO: 285814 - RNA, 19 nt, Artificial Sequence
  Description of Artificial Sequence: Synthetic oligonucleotide
  Sense strand starting at position 932 of SEQ ID NO: 3674
cuuauugucagggauguga

SEQ ID NO: 285815 - RNA, 19 nt, Artificial Sequence
  Description of Artificial Sequence: Synthetic oligonucleotide
  Antisense strand to SEQ ID NO: 285814
ucacaucccugacaauaag

SEQ ID NO: 285816 - RNA, 19 nt, Artificial Sequence
  Description of Artificial Sequence: Synthetic oligonucleotide
  Sense strand starting at position 934 of SEQ ID NO: 3674
uauugucagggaugugaaa

SEQ ID NO: 285817 - RNA, 19 nt, Artificial Sequence
  Description of Artificial Sequence: Synthetic oligonucleotide
  Antisense strand to SEQ ID NO: 285816
uuucacaucccugacaaua

SEQ ID NO: 285818 - RNA, 19 nt, Artificial Sequence
  Description of Artificial Sequence: Synthetic oligonucleotide
  Sense strand starting at position 980 of SEQ ID NO: 3674
cagggauugcuguaaugca

SEQ ID NO: 285819 - RNA, 19 nt, Artificial Sequence
  Description of Artificial Sequence: Synthetic oligonucleotide
  Antisense strand to SEQ ID NO: 285818
ugcauuacagcaaucccug

SEQ ID NO: 285820 - RNA, 19 nt, Artificial Sequence
  Description of Artificial Sequence: Synthetic oligonucleotide
  Sense strand starting at position 1049 of SEQ ID NO: 3674
gaacaaguagaaugguauu

SEQ ID NO: 285821 - RNA, 19 nt, Artificial Sequence
  Description of Artificial Sequence: Synthetic oligonucleotide
  Antisense strand to SEQ ID NO: 285820
aauaccauucuacuuguuc

SEQ ID NO: 285822 - RNA, 19 nt, Artificial Sequence
  Description of Artificial Sequence: Synthetic oligonucleotide
  Sense strand starting at position 1063 of SEQ ID NO: 3674
guauuagaugcacagacau

SEQ ID NO: 285823 - RNA, 19 nt, Artificial Sequence
  Description of Artificial Sequence: Synthetic oligonucleotide
  Antisense strand to SEQ ID NO: 285822
augucugugcaucuaauac

SEQ ID NO: 285824 - RNA, 19 nt, Artificial Sequence
  Description of Artificial Sequence: Synthetic oligonucleotide
  Sense strand starting at position 1073 of SEQ ID NO: 3674
cacagacaucuugggaguu

SEQ ID NO: 285825 - RNA, 19 nt, Artificial Sequence
  Description of Artificial Sequence: Synthetic oligonucleotide
  Antisense strand to SEQ ID NO: 285824
aacucccaagaugucugug

SEQ ID NO: 285826 - RNA, 19 nt, Artificial Sequence
  Description of Artificial Sequence: Synthetic oligonucleotide
  Sense strand starting at position 1086 of SEQ ID NO: 3674
ggaguuggugcagaaacau

SEQ ID NO: 285827 - RNA, 19 nt, Artificial Sequence
  Description of Artificial Sequence: Synthetic oligonucleotide
  Antisense strand to SEQ ID NO: 285826
auguuucugcaccaacucc

SEQ ID NO: 285828 - RNA, 19 nt, Artificial Sequence
  Description of Artificial Sequence: Synthetic oligonucleotide
  Sense strand starting at position 1095 of SEQ ID NO: 3674
gcagaaacaucaguagaca

SEQ ID NO: 285829 - RNA, 19 nt, Artificial Sequence
  Description of Artificial Sequence: Synthetic oligonucleotide
  Antisense strand to SEQ ID NO: 285828
ugucuacugauguuucugc

SEQ ID NO: 285830 - RNA, 19 nt, Artificial Sequence
  Description of Artificial Sequence: Synthetic oligonucleotide
  Sense strand starting at position 1270 of SEQ ID NO: 3674
cauaaucaacgguaugagu

SEQ ID NO: 285831 - RNA, 19 nt, Artificial Sequence
  Description of Artificial Sequence: Synthetic oligonucleotide
  Antisense strand to SEQ ID NO: 285830
acucauaccguugauuaug

SEQ ID NO: 285832 - RNA, 19 nt, Artificial Sequence
  Description of Artificial Sequence: Synthetic oligonucleotide
  Sense strand starting at position 1272 of SEQ ID NO: 3674
uaaucaacgguaugaguaa

SEQ ID NO: 285833 - RNA, 19 nt, Artificial Sequence
  Description of Artificial Sequence: Synthetic oligonucleotide
  Antisense strand to SEQ ID NO: 285832
uuacucauaccguugauua

SEQ ID NO: 285834 - RNA, 19 nt, Artificial Sequence
  Description of Artificial Sequence: Synthetic oligonucleotide
  Sense strand starting at position 1279 of SEQ ID NO: 3674
cgguaugaguaauuccaac

SEQ ID NO: 285835 - RNA, 19 nt, Artificial Sequence
  Description of Artificial Sequence: Synthetic oligonucleotide
  Antisense strand to SEQ ID NO: 285834
guuggaauuacucauaccg

SEQ ID NO: 285836 - RNA, 19 nt, Artificial Sequence
  Description of Artificial Sequence: Synthetic oligonucleotide
  Sense strand starting at position 1337 of SEQ ID NO: 3674
ggccucacuuggguaagaa

SEQ ID NO: 285837 - RNA, 19 nt, Artificial Sequence
  Description of Artificial Sequence: Synthetic oligonucleotide
  Antisense strand to SEQ ID NO: 285836
uucuuacccaagugaggcc

SEQ ID NO: 285838 - RNA, 19 nt, Artificial Sequence
  Description of Artificial Sequence: Synthetic oligonucleotide
  Sense strand starting at position 1338 of SEQ ID NO: 3674
gccucacuuggguaagaaa

SEQ ID NO: 285839 - RNA, 19 nt, Artificial Sequence
  Description of Artificial Sequence: Synthetic oligonucleotide
  Antisense strand to SEQ ID NO: 285838
uuucuuacccaagugaggc

SEQ ID NO: 285840 - RNA, 19 nt, Artificial Sequence
  Description of Artificial Sequence: Synthetic oligonucleotide
  Sense strand starting at position 1395 of SEQ ID NO: 3674
cuuacuuugccacagaaag

SEQ ID NO: 285841 - RNA, 19 nt, Artificial Sequence
  Description of Artificial Sequence: Synthetic oligonucleotide
  Antisense strand to SEQ ID NO: 285840
cuuucuguggcaaaguaag

SEQ ID NO: 285842 - RNA, 19 nt, Artificial Sequence
  Description of Artificial Sequence: Synthetic oligonucleotide
  Sense strand starting at position 1620 of SEQ ID NO: 3674
gugaccgacaugugaauua

SEQ ID NO: 285843 - RNA, 19 nt, Artificial Sequence
  Description of Artificial Sequence: Synthetic oligonucleotide
  Antisense strand to SEQ ID NO: 285842
uaauucacaugucggucac

SEQ ID NO: 285844 - RNA, 19 nt, Artificial Sequence
  Description of Artificial Sequence: Synthetic oligonucleotide
  Sense strand starting at position 1773 of SEQ ID NO: 3674
gggagcuuccgacaauggu

SEQ ID NO: 285845 - RNA, 19 nt, Artificial Sequence
  Description of Artificial Sequence: Synthetic oligonucleotide
  Antisense strand to SEQ ID NO: 285844
accauugucggaagcuccc

SEQ ID NO: 285846 - RNA, 19 nt, Artificial Sequence
  Description of Artificial Sequence: Synthetic oligonucleotide
  Sense strand starting at position 2022 of SEQ ID NO: 3674
ggaacugagcucuaugguu

SEQ ID NO: 285847 - RNA, 19 nt, Artificial Sequence
  Description of Artificial Sequence: Synthetic oligonucleotide
  Antisense strand to SEQ ID NO: 285846
aaccauagagcucaguucc

SEQ ID NO: 285848 - RNA, 19 nt, Artificial Sequence
  Description of Artificial Sequence: Synthetic oligonucleotide
  Sense strand starting at position 2062 of SEQ ID NO: 3674
cugagaaauguuugcaauu

SEQ ID NO: 285849 - RNA, 19 nt, Artificial Sequence
  Description of Artificial Sequence: Synthetic oligonucleotide
  Antisense strand to SEQ ID NO: 285848
aauugcaaacauuucucag

SEQ ID NO: 285850 - RNA, 19 nt, Artificial Sequence
  Description of Artificial Sequence: Synthetic oligonucleotide
  Sense strand starting at position 2063 of SEQ ID NO: 3674
ugagaaauguuugcaauug

SEQ ID NO: 285851 - RNA, 19 nt, Artificial Sequence
  Description of Artificial Sequence: Synthetic oligonucleotide
  Antisense strand to SEQ ID NO: 285850
caauugcaaacauuucuca

SEQ ID NO: 285852 - RNA, 19 nt, Artificial Sequence
  Description of Artificial Sequence: Synthetic oligonucleotide
  Sense strand starting at position 2146 of SEQ ID NO: 3674
gaagcauguccggauuauu

SEQ ID NO: 285853 - RNA, 19 nt, Artificial Sequence
  Description of Artificial Sequence: Synthetic oligonucleotide
  Antisense strand to SEQ ID NO: 285852
aauaauccggacaugcuuc

SEQ ID NO: 285854 - RNA, 19 nt, Artificial Sequence
  Description of Artificial Sequence: Synthetic oligonucleotide
  Sense strand starting at position 2216 of SEQ ID NO: 3674
cagcacuuggcuuggagaa

SEQ ID NO: 285855 - RNA, 19 nt, Artificial Sequence
  Description of Artificial Sequence: Synthetic oligonucleotide
  Antisense strand to SEQ ID NO: 285854
uucuccaagccaagugcug

SEQ ID NO: 285856 - RNA, 19 nt, Artificial Sequence
  Description of Artificial Sequence: Synthetic oligonucleotide
  Sense strand starting at position 2557 of SEQ ID NO: 3674
augguucugcucgcgacua

SEQ ID NO: 285857 - RNA, 19 nt, Artificial Sequence
  Description of Artificial Sequence: Synthetic oligonucleotide
  Antisense strand to SEQ ID NO: 285856
uagucgcgagcagaaccau

SEQ ID NO: 285858 - RNA, 19 nt, Artificial Sequence
  Description of Artificial Sequence: Synthetic oligonucleotide
  Sense strand starting at position 2591 of SEQ ID NO: 3674
guguuuccugaggaaaguc

SEQ ID NO: 285859 - RNA, 19 nt, Artificial Sequence
  Description of Artificial Sequence: Synthetic oligonucleotide
  Antisense strand to SEQ ID NO: 285858
gacuuuccucaggaaacac

SEQ ID NO: 285860 - RNA, 19 nt, Artificial Sequence
  Description of Artificial Sequence: Synthetic oligonucleotide
  Sense strand starting at position 2636 of SEQ ID NO: 3674
aacagucaccuuggaguuu

SEQ ID NO: 285861 - RNA, 19 nt, Artificial Sequence
  Description of Artificial Sequence: Synthetic oligonucleotide
  Antisense strand to SEQ ID NO: 285860
aaacuccaaggugacuguu

SEQ ID NO: 285862 - RNA, 19 nt, Artificial Sequence
  Description of Artificial Sequence: Synthetic oligonucleotide
  Sense strand starting at position 2879 of SEQ ID NO: 3674
gggaggguguguucuggaa

SEQ ID NO: 285863 - RNA, 19 nt, Artificial Sequence
  Description of Artificial Sequence: Synthetic oligonucleotide
  Antisense strand to SEQ ID NO: 285862
uuccagaacacacccuccc

SEQ ID NO: 285864 - RNA, 19 nt, Artificial Sequence
  Description of Artificial Sequence: Synthetic oligonucleotide
  Sense strand starting at position 2883 of SEQ ID NO: 3674
ggguguguucuggaacuag

SEQ ID NO: 285865 - RNA, 19 nt, Artificial Sequence
  Description of Artificial Sequence: Synthetic oligonucleotide
  Antisense strand to SEQ ID NO: 285864
cuaguuccagaacacaccc

SEQ ID NO: 285866 - RNA, 19 nt, Artificial Sequence
  Description of Artificial Sequence: Synthetic oligonucleotide
  Sense strand starting at position 3092 of SEQ ID NO: 3674
ucagaaguccgguaacaag

SEQ ID NO: 285867 - RNA, 19 nt, Artificial Sequence
  Description of Artificial Sequence: Synthetic oligonucleotide
  Antisense strand to SEQ ID NO: 285866
cuuguuaccggacuucuga

SEQ ID NO: 285868 - RNA, 19 nt, Artificial Sequence
  Description of Artificial Sequence: Synthetic oligonucleotide
  Sense strand starting at position 3397 of SEQ ID NO: 3674
augguaggcacugaguauu

SEQ ID NO: 285869 - RNA, 19 nt, Artificial Sequence
  Description of Artificial Sequence: Synthetic oligonucleotide
  Antisense strand to SEQ ID NO: 285868
aauacucagugccuaccau

SEQ ID NO: 285870 - RNA, 19 nt, Artificial Sequence
  Description of Artificial Sequence: Synthetic oligonucleotide
  Sense strand starting at position 3657 of SEQ ID NO: 3674
gacagagucucucuuggaa

SEQ ID NO: 285871 - RNA, 19 nt, Artificial Sequence
  Description of Artificial Sequence: Synthetic oligonucleotide
  Antisense strand to SEQ ID NO: 285870
uuccaagagagacucuguc

SEQ ID NO: 285872 - RNA, 19 nt, Artificial Sequence
  Description of Artificial Sequence: Synthetic oligonucleotide
  Sense strand starting at position 3798 of SEQ ID NO: 3674
aaggcugaaacgugaggau

SEQ ID NO: 285873 - RNA, 19 nt, Artificial Sequence
  Description of Artificial Sequence: Synthetic oligonucleotide
  Antisense strand to SEQ ID NO: 285872
auccucacguuucagccuu

SEQ ID NO: 285874 - RNA, 19 nt, Artificial Sequence
  Description of Artificial Sequence: Synthetic oligonucleotide
  Sense strand starting at position 3935 of SEQ ID NO: 3674
aacucaucucagggaaguu

SEQ ID NO: 285875 - RNA, 19 nt, Artificial Sequence
  Description of Artificial Sequence: Synthetic oligonucleotide
  Antisense strand to SEQ ID NO: 285874
aacuucccugagaugaguu

SEQ ID NO: 285876 - RNA, 19 nt, Artificial Sequence
  Description of Artificial Sequence: Synthetic oligonucleotide
  Sense strand starting at position 176 of SEQ ID NO: 3675
agcgguguaauccuguguu

SEQ ID NO: 285877 - RNA, 19 nt, Artificial Sequence
  Description of Artificial Sequence: Synthetic oligonucleotide
  Antisense strand to SEQ ID NO: 285876
aacacaggauuacaccgcu

SEQ ID NO: 285878 - RNA, 19 nt, Artificial Sequence
  Description of Artificial Sequence: Synthetic oligonucleotide
  Sense strand starting at position 541 of SEQ ID NO: 3675
uguugcauuuauuaaggaa

SEQ ID NO: 285879 - RNA, 19 nt, Artificial Sequence
  Description of Artificial Sequence: Synthetic oligonucleotide
  Antisense strand to SEQ ID NO: 285878
uuccuuaauaaaugcaaca

SEQ ID NO: 285880 - RNA, 19 nt, Artificial Sequence
  Description of Artificial Sequence: Synthetic oligonucleotide
  Sense strand starting at position 544 of SEQ ID NO: 3675
ugcauuuauuaaggaaaug

SEQ ID NO: 285881 - RNA, 19 nt, Artificial Sequence
  Description of Artificial Sequence: Synthetic oligonucleotide
  Antisense strand to SEQ ID NO: 285880
cauuuccuuaauaaaugca

SEQ ID NO: 285882 - RNA, 19 nt, Artificial Sequence
  Description of Artificial Sequence: Synthetic oligonucleotide
  Sense strand starting at position 895 of SEQ ID NO: 3675
gcacguuacaaucaaaggu

SEQ ID NO: 285883 - RNA, 19 nt, Artificial Sequence
  Description of Artificial Sequence: Synthetic oligonucleotide
  Antisense strand to SEQ ID NO: 285882
accuuugauuguaacgugc

SEQ ID NO: 285884 - RNA, 19 nt, Artificial Sequence
  Description of Artificial Sequence: Synthetic oligonucleotide
  Sense strand starting at position 1301 of SEQ ID NO: 3675
ggccgaagucgagagaaau

SEQ ID NO: 285885 - RNA, 19 nt, Artificial Sequence
  Description of Artificial Sequence: Synthetic oligonucleotide
  Antisense strand to SEQ ID NO: 285884
auuucucucgacuucggcc

SEQ ID NO: 285886 - RNA, 19 nt, Artificial Sequence
  Description of Artificial Sequence: Synthetic oligonucleotide
  Sense strand starting at position 1320 of SEQ ID NO: 3675
aauugacuccgacagguuu

SEQ ID NO: 285887 - RNA, 19 nt, Artificial Sequence
  Description of Artificial Sequence: Synthetic oligonucleotide
  Antisense strand to SEQ ID NO: 285886
aaaccugucggagucaauu

SEQ ID NO: 285888 - RNA, 19 nt, Artificial Sequence
  Description of Artificial Sequence: Synthetic oligonucleotide
  Sense strand starting at position 1475 of SEQ ID NO: 3675
gguccuucacgaggaaguu

SEQ ID NO: 285889 - RNA, 19 nt, Artificial Sequence
  Description of Artificial Sequence: Synthetic oligonucleotide
  Antisense strand to SEQ ID NO: 285888
aacuuccucgugaaggacc

SEQ ID NO: 285890 - RNA, 19 nt, Artificial Sequence
  Description of Artificial Sequence: Synthetic oligonucleotide
  Sense strand starting at position 1481 of SEQ ID NO: 3675
ucacgaggaaguugaucau

SEQ ID NO: 285891 - RNA, 19 nt, Artificial Sequence
  Description of Artificial Sequence: Synthetic oligonucleotide
  Antisense strand to SEQ ID NO: 285890
augaucaacuuccucguga

SEQ ID NO: 285892 - RNA, 19 nt, Artificial Sequence
  Description of Artificial Sequence: Synthetic oligonucleotide
  Sense strand starting at position 1505 of SEQ ID NO: 3675
cggacuugaugagcagauu

SEQ ID NO: 285893 - RNA, 19 nt, Artificial Sequence
  Description of Artificial Sequence: Synthetic oligonucleotide
  Antisense strand to SEQ ID NO: 285892
aaucugcucaucaaguccg

SEQ ID NO: 285894 - RNA, 19 nt, Artificial Sequence
  Description of Artificial Sequence: Synthetic oligonucleotide
  Sense strand starting at position 1874 of SEQ ID NO: 3675
ccucgcucugcuuucgaaa

SEQ ID NO: 285895 - RNA, 19 nt, Artificial Sequence
  Description of Artificial Sequence: Synthetic oligonucleotide
  Antisense strand to SEQ ID NO: 285894
uuucgaaagcagagcgagg

SEQ ID NO: 285896 - RNA, 19 nt, Artificial Sequence
  Description of Artificial Sequence: Synthetic oligonucleotide
  Sense strand starting at position 1906 of SEQ ID NO: 3675
gggaguuucccaggagccu

SEQ ID NO: 285897 - RNA, 19 nt, Artificial Sequence
  Description of Artificial Sequence: Synthetic oligonucleotide
  Antisense strand to SEQ ID NO: 285896
aggcuccugggaaacuccc

SEQ ID NO: 285898 - RNA, 19 nt, Artificial Sequence
  Description of Artificial Sequence: Synthetic oligonucleotide
  Sense strand starting at position 2236 of SEQ ID NO: 3675
acucuucuagcuugaugga

SEQ ID NO: 285899 - RNA, 19 nt, Artificial Sequence
  Description of Artificial Sequence: Synthetic oligonucleotide
  Antisense strand to SEQ ID NO: 285898
uccaucaagcuagaagagu

SEQ ID NO: 285900 - RNA, 19 nt, Artificial Sequence
  Description of Artificial Sequence: Synthetic oligonucleotide
  Sense strand starting at position 2237 of SEQ ID NO: 3675
cucuucuagcuugauggau

SEQ ID NO: 285901 - RNA, 19 nt, Artificial Sequence
  Description of Artificial Sequence: Synthetic oligonucleotide
  Antisense strand to SEQ ID NO: 285900
auccaucaagcuagaagag

SEQ ID NO: 285902 - RNA, 19 nt, Artificial Sequence
  Description of Artificial Sequence: Synthetic oligonucleotide
  Sense strand starting at position 2241 of SEQ ID NO: 3675
ucuagcuugauggaugauu

SEQ ID NO: 285903 - RNA, 19 nt, Artificial Sequence
  Description of Artificial Sequence: Synthetic oligonucleotide
  Antisense strand to SEQ ID NO: 285902
aaucauccaucaagcuaga

SEQ ID NO: 285904 - RNA, 19 nt, Artificial Sequence
  Description of Artificial Sequence: Synthetic oligonucleotide
  Sense strand starting at position 2243 of SEQ ID NO: 3675
uagcuugauggaugauuaa

SEQ ID NO: 285905 - RNA, 19 nt, Artificial Sequence
  Description of Artificial Sequence: Synthetic oligonucleotide
  Antisense strand to SEQ ID NO: 285904
uuaaucauccaucaagcua

SEQ ID NO: 285906 - RNA, 19 nt, Artificial Sequence
  Description of Artificial Sequence: Synthetic oligonucleotide
  Sense strand starting at position 2365 of SEQ ID NO: 3675
auggaaaguggcgaugaau

SEQ ID NO: 285907 - RNA, 19 nt, Artificial Sequence
  Description of Artificial Sequence: Synthetic oligonucleotide
  Antisense strand to SEQ ID NO: 285906
auucaucgccacuuuccau

SEQ ID NO: 285908 - RNA, 19 nt, Artificial Sequence
  Description of Artificial Sequence: Synthetic oligonucleotide
  Sense strand starting at position 2475 of SEQ ID NO: 3675
gugaucugagaauguuucu

SEQ ID NO: 285909 - RNA, 19 nt, Artificial Sequence
  Description of Artificial Sequence: Synthetic oligonucleotide
  Antisense strand to SEQ ID NO: 285908
agaaacauucucagaucac

SEQ ID NO: 285910 - RNA, 19 nt, Artificial Sequence
  Description of Artificial Sequence: Synthetic oligonucleotide
  Sense strand starting at position 2478 of SEQ ID NO: 3675
aucugagaauguuucuuac

SEQ ID NO: 285911 - RNA, 19 nt, Artificial Sequence
  Description of Artificial Sequence: Synthetic oligonucleotide
  Antisense strand to SEQ ID NO: 285910
guaagaaacauucucagau

SEQ ID NO: 285912 - RNA, 19 nt, Artificial Sequence
  Description of Artificial Sequence: Synthetic oligonucleotide
  Sense strand starting at position 2731 of SEQ ID NO: 3675
agggucaccucucugguaa

SEQ ID NO: 285913 - RNA, 19 nt, Artificial Sequence
  Description of Artificial Sequence: Synthetic oligonucleotide
  Antisense strand to SEQ ID NO: 285912
uuaccagagaggugacccu

SEQ ID NO: 285914 - RNA, 19 nt, Artificial Sequence
  Description of Artificial Sequence: Synthetic oligonucleotide
  Sense strand starting at position 2732 of SEQ ID NO: 3675
gggucaccucucugguaaa

SEQ ID NO: 285915 - RNA, 19 nt, Artificial Sequence
  Description of Artificial Sequence: Synthetic oligonucleotide
  Antisense strand to SEQ ID NO: 285914
uuuaccagagaggugaccc

SEQ ID NO: 285916 - RNA, 19 nt, Artificial Sequence
  Description of Artificial Sequence: Synthetic oligonucleotide
  Sense strand starting at position 2840 of SEQ ID NO: 3675
ucaguuguugaagggaauu

SEQ ID NO: 285917 - RNA, 19 nt, Artificial Sequence
  Description of Artificial Sequence: Synthetic oligonucleotide
  Antisense strand to SEQ ID NO: 285916
aauucccuucaacaacuga

SEQ ID NO: 285918 - RNA, 19 nt, Artificial Sequence
  Description of Artificial Sequence: Synthetic oligonucleotide
  Sense strand starting at position 2846 of SEQ ID NO: 3675
guugaagggaauugcucau

SEQ ID NO: 285919 - RNA, 19 nt, Artificial Sequence
  Description of Artificial Sequence: Synthetic oligonucleotide
  Antisense strand to SEQ ID NO: 285918
augagcaauucccuucaac

SEQ ID NO: 285920 - RNA, 19 nt, Artificial Sequence
  Description of Artificial Sequence: Synthetic oligonucleotide
  Sense strand starting at position 2852 of SEQ ID NO: 3675
gggaauugcucaucaacau

SEQ ID NO: 285921 - RNA, 19 nt, Artificial Sequence
  Description of Artificial Sequence: Synthetic oligonucleotide
  Antisense strand to SEQ ID NO: 285920
auguugaugagcaauuccc

SEQ ID NO: 285922 - RNA, 19 nt, Artificial Sequence
  Description of Artificial Sequence: Synthetic oligonucleotide
  Sense strand starting at position 2853 of SEQ ID NO: 3675
ggaauugcucaucaacauc

SEQ ID NO: 285923 - RNA, 19 nt, Artificial Sequence
  Description of Artificial Sequence: Synthetic oligonucleotide
  Antisense strand to SEQ ID NO: 285922
gauguugaugagcaauucc

SEQ ID NO: 285924 - RNA, 19 nt, Artificial Sequence
  Description of Artificial Sequence: Synthetic oligonucleotide
  Sense strand starting at position 2878 of SEQ ID NO: 3675
cuagaacgcuggccaaaua

SEQ ID NO: 285925 - RNA, 19 nt, Artificial Sequence
  Description of Artificial Sequence: Synthetic oligonucleotide
  Antisense strand to SEQ ID NO: 285924
uauuuggccagcguucuag

SEQ ID NO: 285926 - RNA, 19 nt, Artificial Sequence
  Description of Artificial Sequence: Synthetic oligonucleotide
  Sense strand starting at position 2914 of SEQ ID NO: 3675
uuuccauaagcugauguau

SEQ ID NO: 285927 - RNA, 19 nt, Artificial Sequence
  Description of Artificial Sequence: Synthetic oligonucleotide
  Antisense strand to SEQ ID NO: 285926
auacaucagcuuauggaaa

SEQ ID NO: 285928 - RNA, 19 nt, Artificial Sequence
  Description of Artificial Sequence: Synthetic oligonucleotide
  Sense strand starting at position 3035 of SEQ ID NO: 3675
cugucagauuaaguuucuu

SEQ ID NO: 285929 - RNA, 19 nt, Artificial Sequence
  Description of Artificial Sequence: Synthetic oligonucleotide
  Antisense strand to SEQ ID NO: 285928
aagaaacuuaaucugacag

SEQ ID NO: 285930 - RNA, 19 nt, Artificial Sequence
  Description of Artificial Sequence: Synthetic oligonucleotide
  Sense strand starting at position 3047 of SEQ ID NO: 3675
guuucuuaacucugaaaga

SEQ ID NO: 285931 - RNA, 19 nt, Artificial Sequence
  Description of Artificial Sequence: Synthetic oligonucleotide
  Antisense strand to SEQ ID NO: 285930
ucuuucagaguuaagaaac

SEQ ID NO: 285932 - RNA, 19 nt, Artificial Sequence
  Description of Artificial Sequence: Synthetic oligonucleotide
  Sense strand starting at position 3250 of SEQ ID NO: 3675
gauaauggguacgcuaauu

SEQ ID NO: 285933 - RNA, 19 nt, Artificial Sequence
  Description of Artificial Sequence: Synthetic oligonucleotide
  Antisense strand to SEQ ID NO: 285932
aauuagcguacccauuauc

SEQ ID NO: 285934 - RNA, 19 nt, Artificial Sequence
  Description of Artificial Sequence: Synthetic oligonucleotide
  Sense strand starting at position 3261 of SEQ ID NO: 3675
cgcuaauuacucugauuug

SEQ ID NO: 285935 - RNA, 19 nt, Artificial Sequence
  Description of Artificial Sequence: Synthetic oligonucleotide
  Antisense strand to SEQ ID NO: 285934
caaaucagaguaauuagcg

SEQ ID NO: 285936 - RNA, 19 nt, Artificial Sequence
  Description of Artificial Sequence: Synthetic oligonucleotide
  Sense strand starting at position 3275 of SEQ ID NO: 3675
auuugaucauuccacaugu

SEQ ID NO: 285937 - RNA, 19 nt, Artificial Sequence
  Description of Artificial Sequence: Synthetic oligonucleotide
  Antisense strand to SEQ ID NO: 285936
acauguggaaugaucaaau

SEQ ID NO: 285938 - RNA, 19 nt, Artificial Sequence
  Description of Artificial Sequence: Synthetic oligonucleotide
  Sense strand starting at position 3277 of SEQ ID NO: 3675
uugaucauuccacauguau

SEQ ID NO: 285939 - RNA, 19 nt, Artificial Sequence
  Description of Artificial Sequence: Synthetic oligonucleotide
  Antisense strand to SEQ ID NO: 285938
auacauguggaaugaucaa

SEQ ID NO: 285940 - RNA, 19 nt, Artificial Sequence
  Description of Artificial Sequence: Synthetic oligonucleotide
  Sense strand starting at position 3288 of SEQ ID NO: 3675
acauguauauguguaucaa

SEQ ID NO: 285941 - RNA, 19 nt, Artificial Sequence
  Description of Artificial Sequence: Synthetic oligonucleotide
  Antisense strand to SEQ ID NO: 285940
uugauacacauauacaugu

SEQ ID NO: 285942 - RNA, 19 nt, Artificial Sequence
  Description of Artificial Sequence: Synthetic oligonucleotide
  Sense strand starting at position 3472 of SEQ ID NO: 3675
cagaguguuccuuaaaugu

SEQ ID NO: 285943 - RNA, 19 nt, Artificial Sequence
  Description of Artificial Sequence: Synthetic oligonucleotide
  Antisense strand to SEQ ID NO: 285942
acauuuaaggaacacucug

SEQ ID NO: 285944 - RNA, 19 nt, Artificial Sequence
  Description of Artificial Sequence: Synthetic oligonucleotide
  Sense strand starting at position 3568 of SEQ ID NO: 3675
guauaucagcugcaauaag

SEQ ID NO: 285945 - RNA, 19 nt, Artificial Sequence
  Description of Artificial Sequence: Synthetic oligonucleotide
  Antisense strand to SEQ ID NO: 285944
cuuauugcagcugauauac

SEQ ID NO: 285946 - RNA, 19 nt, Artificial Sequence
  Description of Artificial Sequence: Synthetic oligonucleotide
  Sense strand starting at position 3680 of SEQ ID NO: 3675
uguucuaguuucccauaau

SEQ ID NO: 285947 - RNA, 19 nt, Artificial Sequence
  Description of Artificial Sequence: Synthetic oligonucleotide
  Antisense strand to SEQ ID NO: 285946
auuaugggaaacuagaaca

SEQ ID NO: 285948 - RNA, 19 nt, Artificial Sequence
  Description of Artificial Sequence: Synthetic oligonucleotide
  Sense strand starting at position 3727 of SEQ ID NO: 3675
ucggcaauuucuucuuuga

SEQ ID NO: 285949 - RNA, 19 nt, Artificial Sequence
  Description of Artificial Sequence: Synthetic oligonucleotide
  Antisense strand to SEQ ID NO: 285948
ucaaagaagaaauugccga

SEQ ID NO: 285950 - RNA, 19 nt, Artificial Sequence
  Description of Artificial Sequence: Synthetic oligonucleotide
  Sense strand starting at position 3818 of SEQ ID NO: 3675
guggguaguccucaagaau

SEQ ID NO: 285951 - RNA, 19 nt, Artificial Sequence
  Description of Artificial Sequence: Synthetic oligonucleotide
  Antisense strand to SEQ ID NO: 285950
auucuugaggacuacccac

SEQ ID NO: 285952 - RNA, 19 nt, Artificial Sequence
  Description of Artificial Sequence: Synthetic oligonucleotide
  Sense strand starting at position 3843 of SEQ ID NO: 3675
acguaauguauacauggaa

SEQ ID NO: 285953 - RNA, 19 nt, Artificial Sequence
  Description of Artificial Sequence: Synthetic oligonucleotide
  Antisense strand to SEQ ID NO: 285952
uuccauguauacauuacgu

SEQ ID NO: 285954 - RNA, 19 nt, Artificial Sequence
  Description of Artificial Sequence: Synthetic oligonucleotide
  Sense strand starting at position 3899 of SEQ ID NO: 3675
ugagaugaaugguagagaa

SEQ ID NO: 285955 - RNA, 19 nt, Artificial Sequence
  Description of Artificial Sequence: Synthetic oligonucleotide
  Antisense strand to SEQ ID NO: 285954
uucucuaccauucaucuca

SEQ ID NO: 285956 - RNA, 19 nt, Artificial Sequence
  Description of Artificial Sequence: Synthetic oligonucleotide
  Sense strand starting at position 29 of SEQ ID NO: 3676
ggcagaucacuugauguga

SEQ ID NO: 285957 - RNA, 19 nt, Artificial Sequence
  Description of Artificial Sequence: Synthetic oligonucleotide
  Antisense strand to SEQ ID NO: 285956
ucacaucaagugaucugcc

SEQ ID NO: 285958 - RNA, 19 nt, Artificial Sequence
  Description of Artificial Sequence: Synthetic oligonucleotide
  Sense strand starting at position 334 of SEQ ID NO: 3676
cccgaucaccaaugucuau

SEQ ID NO: 285959 - RNA, 19 nt, Artificial Sequence
  Description of Artificial Sequence: Synthetic oligonucleotide
  Antisense strand to SEQ ID NO: 285958
auagacauuggugaucggg

SEQ ID NO: 285960 - RNA, 19 nt, Artificial Sequence
  Description of Artificial Sequence: Synthetic oligonucleotide
  Sense strand starting at position 353 of SEQ ID NO: 3676
uguguuauuccacaaguau

SEQ ID NO: 285961 - RNA, 19 nt, Artificial Sequence
  Description of Artificial Sequence: Synthetic oligonucleotide
  Antisense strand to SEQ ID NO: 285960
auacuuguggaauaacaca

SEQ ID NO: 285962 - RNA, 19 nt, Artificial Sequence
  Description of Artificial Sequence: Synthetic oligonucleotide
  Sense strand starting at position 364 of SEQ ID NO: 3676
acaaguauuucgcuuuguc

SEQ ID NO: 285963 - RNA, 19 nt, Artificial Sequence
  Description of Artificial Sequence: Synthetic oligonucleotide
  Antisense strand to SEQ ID NO: 285962
gacaaagcgaaauacuugu

SEQ ID NO: 285964 - RNA, 19 nt, Artificial Sequence
  Description of Artificial Sequence: Synthetic oligonucleotide
  Sense strand starting at position 367 of SEQ ID NO: 3676
aguauuucgcuuugucaau

SEQ ID NO: 285965 - RNA, 19 nt, Artificial Sequence
  Description of Artificial Sequence: Synthetic oligonucleotide
  Antisense strand to SEQ ID NO: 285964
auugacaaagcgaaauacu

SEQ ID NO: 285966 - RNA, 19 nt, Artificial Sequence
  Description of Artificial Sequence: Synthetic oligonucleotide
  Sense strand starting at position 368 of SEQ ID NO: 3676
guauuucgcuuugucaauc

SEQ ID NO: 285967 - RNA, 19 nt, Artificial Sequence
  Description of Artificial Sequence: Synthetic oligonucleotide
  Antisense strand to SEQ ID NO: 285966
gauugacaaagcgaaauac

SEQ ID NO: 285968 - RNA, 19 nt, Artificial Sequence
  Description of Artificial Sequence: Synthetic oligonucleotide
  Sense strand starting at position 533 of SEQ ID NO: 3676
ggguucaaccuaugagugu

SEQ ID NO: 285969 - RNA, 19 nt, Artificial Sequence
  Description of Artificial Sequence: Synthetic oligonucleotide
  Antisense strand to SEQ ID NO: 285968
acacucauagguugaaccc

SEQ ID NO: 285970 - RNA, 19 nt, Artificial Sequence
  Description of Artificial Sequence: Synthetic oligonucleotide
  Sense strand starting at position 537 of SEQ ID NO: 3676
ucaaccuaugaguguuaaa

SEQ ID NO: 285971 - RNA, 19 nt, Artificial Sequence
  Description of Artificial Sequence: Synthetic oligonucleotide
  Antisense strand to SEQ ID NO: 285970
uuuaacacucauagguuga

SEQ ID NO: 285972 - RNA, 19 nt, Artificial Sequence
  Description of Artificial Sequence: Synthetic oligonucleotide
  Sense strand starting at position 546 of SEQ ID NO: 3676
gaguguuaaagugaaagca

SEQ ID NO: 285973 - RNA, 19 nt, Artificial Sequence
  Description of Artificial Sequence: Synthetic oligonucleotide
  Antisense strand to SEQ ID NO: 285972
ugcuuucacuuuaacacuc

SEQ ID NO: 285974 - RNA, 19 nt, Artificial Sequence
  Description of Artificial Sequence: Synthetic oligonucleotide
  Sense strand starting at position 559 of SEQ ID NO: 3676
aaagcauguugguuacaca

SEQ ID NO: 285975 - RNA, 19 nt, Artificial Sequence
  Description of Artificial Sequence: Synthetic oligonucleotide
  Antisense strand to SEQ ID NO: 285974
uguguaaccaacaugcuuu

SEQ ID NO: 285976 - RNA, 19 nt, Artificial Sequence
  Description of Artificial Sequence: Synthetic oligonucleotide
  Sense strand starting at position 560 of SEQ ID NO: 3676
aagcauguugguuacacau

SEQ ID NO: 285977 - RNA, 19 nt, Artificial Sequence
  Description of Artificial Sequence: Synthetic oligonucleotide
  Antisense strand to SEQ ID NO: 285976
auguguaaccaacaugcuu

SEQ ID NO: 285978 - RNA, 19 nt, Artificial Sequence
  Description of Artificial Sequence: Synthetic oligonucleotide
  Sense strand starting at position 642 of SEQ ID NO: 3676
cugagaccuacucgagaga

SEQ ID NO: 285979 - RNA, 19 nt, Artificial Sequence
  Description of Artificial Sequence: Synthetic oligonucleotide
  Antisense strand to SEQ ID NO: 285978
ucucucgaguaggucucag

SEQ ID NO: 285980 - RNA, 19 nt, Artificial Sequence
  Description of Artificial Sequence: Synthetic oligonucleotide
  Sense strand starting at position 932 of SEQ ID NO: 3676
ucggaaucauggucuaaga

SEQ ID NO: 285981 - RNA, 19 nt, Artificial Sequence
  Description of Artificial Sequence: Synthetic oligonucleotide
  Antisense strand to SEQ ID NO: 285980
ucuuagaccaugauuccga

SEQ ID NO: 285982 - RNA, 19 nt, Artificial Sequence
  Description of Artificial Sequence: Synthetic oligonucleotide
  Sense strand starting at position 1576 of SEQ ID NO: 3676
uggacuacuugucccaaga

SEQ ID NO: 285983 - RNA, 19 nt, Artificial Sequence
  Description of Artificial Sequence: Synthetic oligonucleotide
  Antisense strand to SEQ ID NO: 285982
ucuugggacaaguagucca

SEQ ID NO: 285984 - RNA, 19 nt, Artificial Sequence
  Description of Artificial Sequence: Synthetic oligonucleotide
  Sense strand starting at position 1606 of SEQ ID NO: 3676
cucccagauucccuaguua

SEQ ID NO: 285985 - RNA, 19 nt, Artificial Sequence
  Description of Artificial Sequence: Synthetic oligonucleotide
  Antisense strand to SEQ ID NO: 285984
uaacuagggaaucugggag

SEQ ID NO: 285986 - RNA, 19 nt, Artificial Sequence
  Description of Artificial Sequence: Synthetic oligonucleotide
  Sense strand starting at position 1639 of SEQ ID NO: 3676
ugaagucgguguuuggaga

SEQ ID NO: 285987 - RNA, 19 nt, Artificial Sequence
  Description of Artificial Sequence: Synthetic oligonucleotide
  Antisense strand to SEQ ID NO: 285986
ucuccaaacaccgacuuca

SEQ ID NO: 285988 - RNA, 19 nt, Artificial Sequence
  Description of Artificial Sequence: Synthetic oligonucleotide
  Sense strand starting at position 1640 of SEQ ID NO: 3676
gaagucgguguuuggagaa

SEQ ID NO: 285989 - RNA, 19 nt, Artificial Sequence
  Description of Artificial Sequence: Synthetic oligonucleotide
  Antisense strand to SEQ ID NO: 285988
uucuccaaacaccgacuuc

SEQ ID NO: 285990 - RNA, 19 nt, Artificial Sequence
  Description of Artificial Sequence: Synthetic oligonucleotide
  Sense strand starting at position 1682 of SEQ ID NO: 3676
guaggaugaagcggaauaa

SEQ ID NO: 285991 - RNA, 19 nt, Artificial Sequence
  Description of Artificial Sequence: Synthetic oligonucleotide
  Antisense strand to SEQ ID NO: 285990
uuauuccgcuucauccuac

SEQ ID NO: 285992 - RNA, 19 nt, Artificial Sequence
  Description of Artificial Sequence: Synthetic oligonucleotide
  Sense strand starting at position 1985 of SEQ ID NO: 3676
ggaagagucugggucuugu

SEQ ID NO: 285993 - RNA, 19 nt, Artificial Sequence
  Description of Artificial Sequence: Synthetic oligonucleotide
  Antisense strand to SEQ ID NO: 285992
acaagacccagacucuucc

SEQ ID NO: 285994 - RNA, 19 nt, Artificial Sequence
  Description of Artificial Sequence: Synthetic oligonucleotide
  Sense strand starting at position 2024 of SEQ ID NO: 3676
acgcuuuaauauguugaaa

SEQ ID NO: 285995 - RNA, 19 nt, Artificial Sequence
  Description of Artificial Sequence: Synthetic oligonucleotide
  Antisense strand to SEQ ID NO: 285994
uuucaacauauuaaagcgu

SEQ ID NO: 285996 - RNA, 19 nt, Artificial Sequence
  Description of Artificial Sequence: Synthetic oligonucleotide
  Sense strand starting at position 2144 of SEQ ID NO: 3676
uuggaucugagaggaaguu

SEQ ID NO: 285997 - RNA, 19 nt, Artificial Sequence
  Description of Artificial Sequence: Synthetic oligonucleotide
  Antisense strand to SEQ ID NO: 285996
aacuuccucucagauccaa

SEQ ID NO: 285998 - RNA, 19 nt, Artificial Sequence
  Description of Artificial Sequence: Synthetic oligonucleotide
  Sense strand starting at position 2425 of SEQ ID NO: 3676
aaagguaaauguguguuau

SEQ ID NO: 285999 - RNA, 19 nt, Artificial Sequence
  Description of Artificial Sequence: Synthetic oligonucleotide
  Antisense strand to SEQ ID NO: 285998
auaacacacauuuaccuuu

SEQ ID NO: 286000 - RNA, 19 nt, Artificial Sequence
  Description of Artificial Sequence: Synthetic oligonucleotide
  Sense strand starting at position 2593 of SEQ ID NO: 3676
uuuggcauuucugaagaau

SEQ ID NO: 286001 - RNA, 19 nt, Artificial Sequence
  Description of Artificial Sequence: Synthetic oligonucleotide
  Antisense strand to SEQ ID NO: 286000
auucuucagaaaugccaaa

SEQ ID NO: 286002 - RNA, 19 nt, Artificial Sequence
  Description of Artificial Sequence: Synthetic oligonucleotide
  Sense strand starting at position 2930 of SEQ ID NO: 3676
cccugccuccuggaacauu

SEQ ID NO: 286003 - RNA, 19 nt, Artificial Sequence
  Description of Artificial Sequence: Synthetic oligonucleotide
  Antisense strand to SEQ ID NO: 286002
aauguuccaggaggcaggg

SEQ ID NO: 286004 - RNA, 19 nt, Artificial Sequence
  Description of Artificial Sequence: Synthetic oligonucleotide
  Sense strand starting at position 3002 of SEQ ID NO: 3676
uuguacauauugucucuaa

SEQ ID NO: 286005 - RNA, 19 nt, Artificial Sequence
  Description of Artificial Sequence: Synthetic oligonucleotide
  Antisense strand to SEQ ID NO: 286004
uuagagacaauauguacaa

SEQ ID NO: 286006 - RNA, 19 nt, Artificial Sequence
  Description of Artificial Sequence: Synthetic oligonucleotide
  Sense strand starting at position 3003 of SEQ ID NO: 3676
uguacauauugucucuaau

SEQ ID NO: 286007 - RNA, 19 nt, Artificial Sequence
  Description of Artificial Sequence: Synthetic oligonucleotide
  Antisense strand to SEQ ID NO: 286006
auuagagacaauauguaca

SEQ ID NO: 286008 - RNA, 19 nt, Artificial Sequence
  Description of Artificial Sequence: Synthetic oligonucleotide
  Sense strand starting at position 3067 of SEQ ID NO: 3676
ccaccauucugaucggaua

SEQ ID NO: 286009 - RNA, 19 nt, Artificial Sequence
  Description of Artificial Sequence: Synthetic oligonucleotide
  Antisense strand to SEQ ID NO: 286008
uauccgaucagaauggugg

SEQ ID NO: 286010 - RNA, 19 nt, Artificial Sequence
  Description of Artificial Sequence: Synthetic oligonucleotide
  Sense strand starting at position 3088 of SEQ ID NO: 3676
ucuuguaauggucacuaau

SEQ ID NO: 286011 - RNA, 19 nt, Artificial Sequence
  Description of Artificial Sequence: Synthetic oligonucleotide
  Antisense strand to SEQ ID NO: 286010
auuagugaccauuacaaga

SEQ ID NO: 286012 - RNA, 19 nt, Artificial Sequence
  Description of Artificial Sequence: Synthetic oligonucleotide
  Sense strand starting at position 3090 of SEQ ID NO: 3676
uuguaauggucacuaauga

SEQ ID NO: 286013 - RNA, 19 nt, Artificial Sequence
  Description of Artificial Sequence: Synthetic oligonucleotide
  Antisense strand to SEQ ID NO: 286012
ucauuagugaccauuacaa

SEQ ID NO: 286014 - RNA, 19 nt, Artificial Sequence
  Description of Artificial Sequence: Synthetic oligonucleotide
  Sense strand starting at position 3091 of SEQ ID NO: 3676
uguaauggucacuaaugac

SEQ ID NO: 286015 - RNA, 19 nt, Artificial Sequence
  Description of Artificial Sequence: Synthetic oligonucleotide
  Antisense strand to SEQ ID NO: 286014
gucauuagugaccauuaca

SEQ ID NO: 286016 - RNA, 19 nt, Artificial Sequence
  Description of Artificial Sequence: Synthetic oligonucleotide
  Sense strand starting at position 3147 of SEQ ID NO: 3676
uugaucugucagcaguauu

SEQ ID NO: 286017 - RNA, 19 nt, Artificial Sequence
  Description of Artificial Sequence: Synthetic oligonucleotide
  Antisense strand to SEQ ID NO: 286016
aauacugcugacagaucaa

SEQ ID NO: 286018 - RNA, 19 nt, Artificial Sequence
  Description of Artificial Sequence: Synthetic oligonucleotide
  Sense strand starting at position 3285 of SEQ ID NO: 3676
gaccucuaaccauggagua

SEQ ID NO: 286019 - RNA, 19 nt, Artificial Sequence
  Description of Artificial Sequence: Synthetic oligonucleotide
  Antisense strand to SEQ ID NO: 286018
uacuccaugguuagagguc

SEQ ID NO: 286020 - RNA, 19 nt, Artificial Sequence
  Description of Artificial Sequence: Synthetic oligonucleotide
  Sense strand starting at position 3286 of SEQ ID NO: 3676
accucuaaccauggaguau

SEQ ID NO: 286021 - RNA, 19 nt, Artificial Sequence
  Description of Artificial Sequence: Synthetic oligonucleotide
  Antisense strand to SEQ ID NO: 286020
auacuccaugguuagaggu

SEQ ID NO: 286022 - RNA, 19 nt, Artificial Sequence
  Description of Artificial Sequence: Synthetic oligonucleotide
  Sense strand starting at position 3382 of SEQ ID NO: 3676
guaucaucauaugcaaaug

SEQ ID NO: 286023 - RNA, 19 nt, Artificial Sequence
  Description of Artificial Sequence: Synthetic oligonucleotide
  Antisense strand to SEQ ID NO: 286022
cauuugcauaugaugauac

SEQ ID NO: 286024 - RNA, 19 nt, Artificial Sequence
  Description of Artificial Sequence: Synthetic oligonucleotide
  Sense strand starting at position 3414 of SEQ ID NO: 3676
ucugucagaccagauaugu

SEQ ID NO: 286025 - RNA, 19 nt, Artificial Sequence
  Description of Artificial Sequence: Synthetic oligonucleotide
  Antisense strand to SEQ ID NO: 286024
acauaucuggucugacaga

SEQ ID NO: 286026 - RNA, 19 nt, Artificial Sequence
  Description of Artificial Sequence: Synthetic oligonucleotide
  Sense strand starting at position 3517 of SEQ ID NO: 3676
ugaaauugcucuucccaug

SEQ ID NO: 286027 - RNA, 19 nt, Artificial Sequence
  Description of Artificial Sequence: Synthetic oligonucleotide
  Antisense strand to SEQ ID NO: 286026
caugggaagagcaauuuca

SEQ ID NO: 286028 - RNA, 19 nt, Artificial Sequence
  Description of Artificial Sequence: Synthetic oligonucleotide
  Sense strand starting at position 3583 of SEQ ID NO: 3676
uuaugauuauccuugacug

SEQ ID NO: 286029 - RNA, 19 nt, Artificial Sequence
  Description of Artificial Sequence: Synthetic oligonucleotide
  Antisense strand to SEQ ID NO: 286028
cagucaaggauaaucauaa

SEQ ID NO: 286030 - RNA, 19 nt, Artificial Sequence
  Description of Artificial Sequence: Synthetic oligonucleotide
  Sense strand starting at position 3585 of SEQ ID NO: 3676
augauuauccuugacuguu

SEQ ID NO: 286031 - RNA, 19 nt, Artificial Sequence
  Description of Artificial Sequence: Synthetic oligonucleotide
  Antisense strand to SEQ ID NO: 286030
aacagucaaggauaaucau

SEQ ID NO: 286032 - RNA, 19 nt, Artificial Sequence
  Description of Artificial Sequence: Synthetic oligonucleotide
  Sense strand starting at position 3619 of SEQ ID NO: 3676
ucuuaucuaccuuggcaga

SEQ ID NO: 286033 - RNA, 19 nt, Artificial Sequence
  Description of Artificial Sequence: Synthetic oligonucleotide
  Antisense strand to SEQ ID NO: 286032
ucugccaagguagauaaga

SEQ ID NO: 286034 - RNA, 19 nt, Artificial Sequence
  Description of Artificial Sequence: Synthetic oligonucleotide
  Sense strand starting at position 3620 of SEQ ID NO: 3676
cuuaucuaccuuggcagau

SEQ ID NO: 286035 - RNA, 19 nt, Artificial Sequence
  Description of Artificial Sequence: Synthetic oligonucleotide
  Antisense strand to SEQ ID NO: 286034
aucugccaagguagauaag

SEQ ID NO: 286036 - RNA, 19 nt, Artificial Sequence
  Description of Artificial Sequence: Synthetic oligonucleotide
  Sense strand starting at position 330 of SEQ ID NO: 3678
ugugaugugcuccagacuu

SEQ ID NO: 286037 - RNA, 19 nt, Artificial Sequence
  Description of Artificial Sequence: Synthetic oligonucleotide
  Antisense strand to SEQ ID NO: 286036
aagucuggagcacaucaca

SEQ ID NO: 286038 - RNA, 19 nt, Artificial Sequence
  Description of Artificial Sequence: Synthetic oligonucleotide
  Sense strand starting at position 332 of SEQ ID NO: 3678
ugaugugcuccagacuuau

SEQ ID NO: 286039 - RNA, 19 nt, Artificial Sequence
  Description of Artificial Sequence: Synthetic oligonucleotide
  Antisense strand to SEQ ID NO: 286038
auaagucuggagcacauca

SEQ ID NO: 286040 - RNA, 19 nt, Artificial Sequence
  Description of Artificial Sequence: Synthetic oligonucleotide
  Sense strand starting at position 409 of SEQ ID NO: 3678
gagguuaggcaugguucua

SEQ ID NO: 286041 - RNA, 19 nt, Artificial Sequence
  Description of Artificial Sequence: Synthetic oligonucleotide
  Antisense strand to SEQ ID NO: 286040
uagaaccaugccuaaccuc

SEQ ID NO: 286042 - RNA, 19 nt, Artificial Sequence
  Description of Artificial Sequence: Synthetic oligonucleotide
  Sense strand starting at position 421 of SEQ ID NO: 3678
gguucuaaaucuuuacaug

SEQ ID NO: 286043 - RNA, 19 nt, Artificial Sequence
  Description of Artificial Sequence: Synthetic oligonucleotide
  Antisense strand to SEQ ID NO: 286042
cauguaaagauuuagaacc

SEQ ID NO: 286044 - RNA, 19 nt, Artificial Sequence
  Description of Artificial Sequence: Synthetic oligonucleotide
  Sense strand starting at position 422 of SEQ ID NO: 3678
guucuaaaucuuuacaugu

SEQ ID NO: 286045 - RNA, 19 nt, Artificial Sequence
  Description of Artificial Sequence: Synthetic oligonucleotide
  Antisense strand to SEQ ID NO: 286044
acauguaaagauuuagaac

SEQ ID NO: 286046 - RNA, 19 nt, Artificial Sequence
  Description of Artificial Sequence: Synthetic oligonucleotide
  Sense strand starting at position 466 of SEQ ID NO: 3678
ggacaauacuugguugucu

SEQ ID NO: 286047 - RNA, 19 nt, Artificial Sequence
  Description of Artificial Sequence: Synthetic oligonucleotide
  Antisense strand to SEQ ID NO: 286046
agacaaccaaguauugucc

SEQ ID NO: 286048 - RNA, 19 nt, Artificial Sequence
  Description of Artificial Sequence: Synthetic oligonucleotide
  Sense strand starting at position 531 of SEQ ID NO: 3678
ggcagaucacuugauguga

SEQ ID NO: 286049 - RNA, 19 nt, Artificial Sequence
  Description of Artificial Sequence: Synthetic oligonucleotide
  Antisense strand to SEQ ID NO: 286048
ucacaucaagugaucugcc

SEQ ID NO: 286050 - RNA, 19 nt, Artificial Sequence
  Description of Artificial Sequence: Synthetic oligonucleotide
  Sense strand starting at position 836 of SEQ ID NO: 3678
cccgaucaccaaugucuau

SEQ ID NO: 286051 - RNA, 19 nt, Artificial Sequence
  Description of Artificial Sequence: Synthetic oligonucleotide
  Antisense strand to SEQ ID NO: 286050
auagacauuggugaucggg

SEQ ID NO: 286052 - RNA, 19 nt, Artificial Sequence
  Description of Artificial Sequence: Synthetic oligonucleotide
  Sense strand starting at position 855 of SEQ ID NO: 3678
uguguuauuccacaaguau

SEQ ID NO: 286053 - RNA, 19 nt, Artificial Sequence
  Description of Artificial Sequence: Synthetic oligonucleotide
  Antisense strand to SEQ ID NO: 286052
auacuuguggaauaacaca

SEQ ID NO: 286054 - RNA, 19 nt, Artificial Sequence
  Description of Artificial Sequence: Synthetic oligonucleotide
  Sense strand starting at position 866 of SEQ ID NO: 3678
acaaguauuucgcuuuguc

SEQ ID NO: 286055 - RNA, 19 nt, Artificial Sequence
  Description of Artificial Sequence: Synthetic oligonucleotide
  Antisense strand to SEQ ID NO: 286054
gacaaagcgaaauacuugu

SEQ ID NO: 286056 - RNA, 19 nt, Artificial Sequence
  Description of Artificial Sequence: Synthetic oligonucleotide
  Sense strand starting at position 869 of SEQ ID NO: 3678
aguauuucgcuuugucaau

SEQ ID NO: 286057 - RNA, 19 nt, Artificial Sequence
  Description of Artificial Sequence: Synthetic oligonucleotide
  Antisense strand to SEQ ID NO: 286056
auugacaaagcgaaauacu

SEQ ID NO: 286058 - RNA, 19 nt, Artificial Sequence
  Description of Artificial Sequence: Synthetic oligonucleotide
  Sense strand starting at position 870 of SEQ ID NO: 3678
guauuucgcuuugucaauc

SEQ ID NO: 286059 - RNA, 19 nt, Artificial Sequence
  Description of Artificial Sequence: Synthetic oligonucleotide
  Antisense strand to SEQ ID NO: 286058
gauugacaaagcgaaauac

SEQ ID NO: 286060 - RNA, 19 nt, Artificial Sequence
  Description of Artificial Sequence: Synthetic oligonucleotide
  Sense strand starting at position 1035 of SEQ ID NO: 3678
ggguucaaccuaugagugu

SEQ ID NO: 286061 - RNA, 19 nt, Artificial Sequence
  Description of Artificial Sequence: Synthetic oligonucleotide
  Antisense strand to SEQ ID NO: 286060
acacucauagguugaaccc

SEQ ID NO: 286062 - RNA, 19 nt, Artificial Sequence
  Description of Artificial Sequence: Synthetic oligonucleotide
  Sense strand starting at position 1039 of SEQ ID NO: 3678
ucaaccuaugaguguuaaa

SEQ ID NO: 286063 - RNA, 19 nt, Artificial Sequence
  Description of Artificial Sequence: Synthetic oligonucleotide
  Antisense strand to SEQ ID NO: 286062
uuuaacacucauagguuga

SEQ ID NO: 286064 - RNA, 19 nt, Artificial Sequence
  Description of Artificial Sequence: Synthetic oligonucleotide
  Sense strand starting at position 1048 of SEQ ID NO: 3678
gaguguuaaagugaaagca

SEQ ID NO: 286065 - RNA, 19 nt, Artificial Sequence
  Description of Artificial Sequence: Synthetic oligonucleotide
  Antisense strand to SEQ ID NO: 286064
ugcuuucacuuuaacacuc

SEQ ID NO: 286066 - RNA, 19 nt, Artificial Sequence
  Description of Artificial Sequence: Synthetic oligonucleotide
  Sense strand starting at position 1061 of SEQ ID NO: 3678
aaagcauguugguuacaca

SEQ ID NO: 286067 - RNA, 19 nt, Artificial Sequence
  Description of Artificial Sequence: Synthetic oligonucleotide
  Antisense strand to SEQ ID NO: 286066
uguguaaccaacaugcuuu

SEQ ID NO: 286068 - RNA, 19 nt, Artificial Sequence
  Description of Artificial Sequence: Synthetic oligonucleotide
  Sense strand starting at position 1062 of SEQ ID NO: 3678
aagcauguugguuacacau

SEQ ID NO: 286069 - RNA, 19 nt, Artificial Sequence
  Description of Artificial Sequence: Synthetic oligonucleotide
  Antisense strand to SEQ ID NO: 286068
auguguaaccaacaugcuu

SEQ ID NO: 286070 - RNA, 19 nt, Artificial Sequence
  Description of Artificial Sequence: Synthetic oligonucleotide
  Sense strand starting at position 1144 of SEQ ID NO: 3678
cugagaccuacucgagaga

SEQ ID NO: 286071 - RNA, 19 nt, Artificial Sequence
  Description of Artificial Sequence: Synthetic oligonucleotide
  Antisense strand to SEQ ID NO: 286070
ucucucgaguaggucucag

SEQ ID NO: 286072 - RNA, 19 nt, Artificial Sequence
  Description of Artificial Sequence: Synthetic oligonucleotide
  Sense strand starting at position 1434 of SEQ ID NO: 3678
ucggaaucauggucuaaga

SEQ ID NO: 286073 - RNA, 19 nt, Artificial Sequence
  Description of Artificial Sequence: Synthetic oligonucleotide
  Antisense strand to SEQ ID NO: 286072
ucuuagaccaugauuccga

SEQ ID NO: 286074 - RNA, 19 nt, Artificial Sequence
  Description of Artificial Sequence: Synthetic oligonucleotide
  Sense strand starting at position 2078 of SEQ ID NO: 3678
uggacuacuugucccaaga

SEQ ID NO: 286075 - RNA, 19 nt, Artificial Sequence
  Description of Artificial Sequence: Synthetic oligonucleotide
  Antisense strand to SEQ ID NO: 286074
ucuugggacaaguagucca

SEQ ID NO: 286076 - RNA, 19 nt, Artificial Sequence
  Description of Artificial Sequence: Synthetic oligonucleotide
  Sense strand starting at position 2108 of SEQ ID NO: 3678
cucccagauucccuaguua

SEQ ID NO: 286077 - RNA, 19 nt, Artificial Sequence
  Description of Artificial Sequence: Synthetic oligonucleotide
  Antisense strand to SEQ ID NO: 286076
uaacuagggaaucugggag

SEQ ID NO: 286078 - RNA, 19 nt, Artificial Sequence
  Description of Artificial Sequence: Synthetic oligonucleotide
  Sense strand starting at position 2142 of SEQ ID NO: 3678
gaagucgguguuuggagaa

SEQ ID NO: 286079 - RNA, 19 nt, Artificial Sequence
  Description of Artificial Sequence: Synthetic oligonucleotide
  Antisense strand to SEQ ID NO: 286078
uucuccaaacaccgacuuc

SEQ ID NO: 286080 - RNA, 19 nt, Artificial Sequence
  Description of Artificial Sequence: Synthetic oligonucleotide
  Sense strand starting at position 2184 of SEQ ID NO: 3678
guaggaugaagcggaauaa

SEQ ID NO: 286081 - RNA, 19 nt, Artificial Sequence
  Description of Artificial Sequence: Synthetic oligonucleotide
  Antisense strand to SEQ ID NO: 286080
uuauuccgcuucauccuac

SEQ ID NO: 286082 - RNA, 19 nt, Artificial Sequence
  Description of Artificial Sequence: Synthetic oligonucleotide
  Sense strand starting at position 2487 of SEQ ID NO: 3678
ggaagagucugggucuugu

SEQ ID NO: 286083 - RNA, 19 nt, Artificial Sequence
  Description of Artificial Sequence: Synthetic oligonucleotide
  Antisense strand to SEQ ID NO: 286082
acaagacccagacucuucc

SEQ ID NO: 286084 - RNA, 19 nt, Artificial Sequence
  Description of Artificial Sequence: Synthetic oligonucleotide
  Sense strand starting at position 2526 of SEQ ID NO: 3678
acgcuuuaauauguugaaa

SEQ ID NO: 286085 - RNA, 19 nt, Artificial Sequence
  Description of Artificial Sequence: Synthetic oligonucleotide
  Antisense strand to SEQ ID NO: 286084
uuucaacauauuaaagcgu

SEQ ID NO: 286086 - RNA, 19 nt, Artificial Sequence
  Description of Artificial Sequence: Synthetic oligonucleotide
  Sense strand starting at position 2646 of SEQ ID NO: 3678
uuggaucugagaggaaguu

SEQ ID NO: 286087 - RNA, 19 nt, Artificial Sequence
  Description of Artificial Sequence: Synthetic oligonucleotide
  Antisense strand to SEQ ID NO: 286086
aacuuccucucagauccaa

SEQ ID NO: 286088 - RNA, 19 nt, Artificial Sequence
  Description of Artificial Sequence: Synthetic oligonucleotide
  Sense strand starting at position 2927 of SEQ ID NO: 3678
aaagguaaauguguguuau

SEQ ID NO: 286089 - RNA, 19 nt, Artificial Sequence
  Description of Artificial Sequence: Synthetic oligonucleotide
  Antisense strand to SEQ ID NO: 286088
auaacacacauuuaccuuu

SEQ ID NO: 286090 - RNA, 19 nt, Artificial Sequence
  Description of Artificial Sequence: Synthetic oligonucleotide
  Sense strand starting at position 3095 of SEQ ID NO: 3678
uuuggcauuucugaagaau

SEQ ID NO: 286091 - RNA, 19 nt, Artificial Sequence
  Description of Artificial Sequence: Synthetic oligonucleotide
  Antisense strand to SEQ ID NO: 286090
auucuucagaaaugccaaa

SEQ ID NO: 286092 - RNA, 19 nt, Artificial Sequence
  Description of Artificial Sequence: Synthetic oligonucleotide
  Sense strand starting at position 3432 of SEQ ID NO: 3678
cccugccuccuggaacauu

SEQ ID NO: 286093 - RNA, 19 nt, Artificial Sequence
  Description of Artificial Sequence: Synthetic oligonucleotide
  Antisense strand to SEQ ID NO: 286092
aauguuccaggaggcaggg

SEQ ID NO: 286094 - RNA, 19 nt, Artificial Sequence
  Description of Artificial Sequence: Synthetic oligonucleotide
  Sense strand starting at position 3504 of SEQ ID NO: 3678
uuguacauauugucucuaa

SEQ ID NO: 286095 - RNA, 19 nt, Artificial Sequence
  Description of Artificial Sequence: Synthetic oligonucleotide
  Antisense strand to SEQ ID NO: 286094
uuagagacaauauguacaa

SEQ ID NO: 286096 - RNA, 19 nt, Artificial Sequence
  Description of Artificial Sequence: Synthetic oligonucleotide
  Sense strand starting at position 3505 of SEQ ID NO: 3678
uguacauauugucucuaau

SEQ ID NO: 286097 - RNA, 19 nt, Artificial Sequence
  Description of Artificial Sequence: Synthetic oligonucleotide
  Antisense strand to SEQ ID NO: 286096
auuagagacaauauguaca

SEQ ID NO: 286098 - RNA, 19 nt, Artificial Sequence
  Description of Artificial Sequence: Synthetic oligonucleotide
  Sense strand starting at position 3569 of SEQ ID NO: 3678
ccaccauucugaucggaua

SEQ ID NO: 286099 - RNA, 19 nt, Artificial Sequence
  Description of Artificial Sequence: Synthetic oligonucleotide
  Antisense strand to SEQ ID NO: 286098
uauccgaucagaauggugg

SEQ ID NO: 286100 - RNA, 19 nt, Artificial Sequence
  Description of Artificial Sequence: Synthetic oligonucleotide
  Sense strand starting at position 3590 of SEQ ID NO: 3678
ucuuguaauggucacuaau

SEQ ID NO: 286101 - RNA, 19 nt, Artificial Sequence
  Description of Artificial Sequence: Synthetic oligonucleotide
  Antisense strand to SEQ ID NO: 286100
auuagugaccauuacaaga

SEQ ID NO: 286102 - RNA, 19 nt, Artificial Sequence
  Description of Artificial Sequence: Synthetic oligonucleotide
  Sense strand starting at position 3592 of SEQ ID NO: 3678
uuguaauggucacuaauga

SEQ ID NO: 286103 - RNA, 19 nt, Artificial Sequence
  Description of Artificial Sequence: Synthetic oligonucleotide
  Antisense strand to SEQ ID NO: 286102
ucauuagugaccauuacaa

SEQ ID NO: 286104 - RNA, 19 nt, Artificial Sequence
  Description of Artificial Sequence: Synthetic oligonucleotide
  Sense strand starting at position 3593 of SEQ ID NO: 3678
uguaauggucacuaaugac

SEQ ID NO: 286105 - RNA, 19 nt, Artificial Sequence
  Description of Artificial Sequence: Synthetic oligonucleotide
  Antisense strand to SEQ ID NO: 286104
gucauuagugaccauuaca

SEQ ID NO: 286106 - RNA, 19 nt, Artificial Sequence
  Description of Artificial Sequence: Synthetic oligonucleotide
  Sense strand starting at position 3649 of SEQ ID NO: 3678
uugaucugucagcaguauu

SEQ ID NO: 286107 - RNA, 19 nt, Artificial Sequence
  Description of Artificial Sequence: Synthetic oligonucleotide
  Antisense strand to SEQ ID NO: 286106
aauacugcugacagaucaa

SEQ ID NO: 286108 - RNA, 19 nt, Artificial Sequence
  Description of Artificial Sequence: Synthetic oligonucleotide
  Sense strand starting at position 3787 of SEQ ID NO: 3678
gaccucuaaccauggagua

SEQ ID NO: 286109 - RNA, 19 nt, Artificial Sequence
  Description of Artificial Sequence: Synthetic oligonucleotide
  Antisense strand to SEQ ID NO: 286108
uacuccaugguuagagguc

SEQ ID NO: 286110 - RNA, 19 nt, Artificial Sequence
  Description of Artificial Sequence: Synthetic oligonucleotide
  Sense strand starting at position 3788 of SEQ ID NO: 3678
accucuaaccauggaguau

SEQ ID NO: 286111 - RNA, 19 nt, Artificial Sequence
  Description of Artificial Sequence: Synthetic oligonucleotide
  Antisense strand to SEQ ID NO: 286110
auacuccaugguuagaggu

SEQ ID NO: 286112 - RNA, 19 nt, Artificial Sequence
  Description of Artificial Sequence: Synthetic oligonucleotide
  Sense strand starting at position 3884 of SEQ ID NO: 3678
guaucaucauaugcaaaug

SEQ ID NO: 286113 - RNA, 19 nt, Artificial Sequence
  Description of Artificial Sequence: Synthetic oligonucleotide
  Antisense strand to SEQ ID NO: 286112
cauuugcauaugaugauac

SEQ ID NO: 286114 - RNA, 19 nt, Artificial Sequence
  Description of Artificial Sequence: Synthetic oligonucleotide
  Sense strand starting at position 3916 of SEQ ID NO: 3678
ucugucagaccagauaugu

SEQ ID NO: 286115 - RNA, 19 nt, Artificial Sequence
  Description of Artificial Sequence: Synthetic oligonucleotide
  Antisense strand to SEQ ID NO: 286114
acauaucuggucugacaga

SEQ ID NO: 286116 - RNA, 19 nt, Artificial Sequence
  Description of Artificial Sequence: Synthetic oligonucleotide
  Sense strand starting at position 96 of SEQ ID NO: 3677
caaguaucaguauaggagu

SEQ ID NO: 286117 - RNA, 19 nt, Artificial Sequence
  Description of Artificial Sequence: Synthetic oligonucleotide
  Antisense strand to SEQ ID NO: 286116
acuccuauacugauacuug

SEQ ID NO: 286118 - RNA, 19 nt, Artificial Sequence
  Description of Artificial Sequence: Synthetic oligonucleotide
  Sense strand starting at position 98 of SEQ ID NO: 3677
aguaucaguauaggaguua

SEQ ID NO: 286119 - RNA, 19 nt, Artificial Sequence
  Description of Artificial Sequence: Synthetic oligonucleotide
  Antisense strand to SEQ ID NO: 286118
uaacuccuauacugauacu

SEQ ID NO: 286120 - RNA, 19 nt, Artificial Sequence
  Description of Artificial Sequence: Synthetic oligonucleotide
  Sense strand starting at position 603 of SEQ ID NO: 3677
ugugaugugcuccagacuu

SEQ ID NO: 286121 - RNA, 19 nt, Artificial Sequence
  Description of Artificial Sequence: Synthetic oligonucleotide
  Antisense strand to SEQ ID NO: 286120
aagucuggagcacaucaca

SEQ ID NO: 286122 - RNA, 19 nt, Artificial Sequence
  Description of Artificial Sequence: Synthetic oligonucleotide
  Sense strand starting at position 605 of SEQ ID NO: 3677
ugaugugcuccagacuuau

SEQ ID NO: 286123 - RNA, 19 nt, Artificial Sequence
  Description of Artificial Sequence: Synthetic oligonucleotide
  Antisense strand to SEQ ID NO: 286122
auaagucuggagcacauca

SEQ ID NO: 286124 - RNA, 19 nt, Artificial Sequence
  Description of Artificial Sequence: Synthetic oligonucleotide
  Sense strand starting at position 682 of SEQ ID NO: 3677
gagguuaggcaugguucua

SEQ ID NO: 286125 - RNA, 19 nt, Artificial Sequence
  Description of Artificial Sequence: Synthetic oligonucleotide
  Antisense strand to SEQ ID NO: 286124
uagaaccaugccuaaccuc

SEQ ID NO: 286126 - RNA, 19 nt, Artificial Sequence
  Description of Artificial Sequence: Synthetic oligonucleotide
  Sense strand starting at position 694 of SEQ ID NO: 3677
gguucuaaaucuuuacaug

SEQ ID NO: 286127 - RNA, 19 nt, Artificial Sequence
  Description of Artificial Sequence: Synthetic oligonucleotide
  Antisense strand to SEQ ID NO: 286126
cauguaaagauuuagaacc

SEQ ID NO: 286128 - RNA, 19 nt, Artificial Sequence
  Description of Artificial Sequence: Synthetic oligonucleotide
  Sense strand starting at position 695 of SEQ ID NO: 3677
guucuaaaucuuuacaugu

SEQ ID NO: 286129 - RNA, 19 nt, Artificial Sequence
  Description of Artificial Sequence: Synthetic oligonucleotide
  Antisense strand to SEQ ID NO: 286128
acauguaaagauuuagaac

SEQ ID NO: 286130 - RNA, 19 nt, Artificial Sequence
  Description of Artificial Sequence: Synthetic oligonucleotide
  Sense strand starting at position 739 of SEQ ID NO: 3677
ggacaauacuugguugucu

SEQ ID NO: 286131 - RNA, 19 nt, Artificial Sequence
  Description of Artificial Sequence: Synthetic oligonucleotide
  Antisense strand to SEQ ID NO: 286130
agacaaccaaguauugucc

SEQ ID NO: 286132 - RNA, 19 nt, Artificial Sequence
  Description of Artificial Sequence: Synthetic oligonucleotide
  Sense strand starting at position 804 of SEQ ID NO: 3677
ggcagaucacuugauguga

SEQ ID NO: 286133 - RNA, 19 nt, Artificial Sequence
  Description of Artificial Sequence: Synthetic oligonucleotide
  Antisense strand to SEQ ID NO: 286132
ucacaucaagugaucugcc

SEQ ID NO: 286134 - RNA, 19 nt, Artificial Sequence
  Description of Artificial Sequence: Synthetic oligonucleotide
  Sense strand starting at position 1109 of SEQ ID NO: 3677
cccgaucaccaaugucuau

SEQ ID NO: 286135 - RNA, 19 nt, Artificial Sequence
  Description of Artificial Sequence: Synthetic oligonucleotide
  Antisense strand to SEQ ID NO: 286134
auagacauuggugaucggg

SEQ ID NO: 286136 - RNA, 19 nt, Artificial Sequence
  Description of Artificial Sequence: Synthetic oligonucleotide
  Sense strand starting at position 1128 of SEQ ID NO: 3677
uguguuauuccacaaguau

SEQ ID NO: 286137 - RNA, 19 nt, Artificial Sequence
  Description of Artificial Sequence: Synthetic oligonucleotide
  Antisense strand to SEQ ID NO: 286136
auacuuguggaauaacaca

SEQ ID NO: 286138 - RNA, 19 nt, Artificial Sequence
  Description of Artificial Sequence: Synthetic oligonucleotide
  Sense strand starting at position 1139 of SEQ ID NO: 3677
acaaguauuucgcuuuguc

SEQ ID NO: 286139 - RNA, 19 nt, Artificial Sequence
  Description of Artificial Sequence: Synthetic oligonucleotide
  Antisense strand to SEQ ID NO: 286138
gacaaagcgaaauacuugu

SEQ ID NO: 286140 - RNA, 19 nt, Artificial Sequence
  Description of Artificial Sequence: Synthetic oligonucleotide
  Sense strand starting at position 1142 of SEQ ID NO: 3677
aguauuucgcuuugucaau

SEQ ID NO: 286141 - RNA, 19 nt, Artificial Sequence
  Description of Artificial Sequence: Synthetic oligonucleotide
  Antisense strand to SEQ ID NO: 286140
auugacaaagcgaaauacu

SEQ ID NO: 286142 - RNA, 19 nt, Artificial Sequence
  Description of Artificial Sequence: Synthetic oligonucleotide
  Sense strand starting at position 1143 of SEQ ID NO: 3677
guauuucgcuuugucaauc

SEQ ID NO: 286143 - RNA, 19 nt, Artificial Sequence
  Description of Artificial Sequence: Synthetic oligonucleotide
  Antisense strand to SEQ ID NO: 286142
gauugacaaagcgaaauac

SEQ ID NO: 286144 - RNA, 19 nt, Artificial Sequence
  Description of Artificial Sequence: Synthetic oligonucleotide
  Sense strand starting at position 1308 of SEQ ID NO: 3677
ggguucaaccuaugagugu

SEQ ID NO: 286145 - RNA, 19 nt, Artificial Sequence
  Description of Artificial Sequence: Synthetic oligonucleotide
  Antisense strand to SEQ ID NO: 286144
acacucauagguugaaccc

SEQ ID NO: 286146 - RNA, 19 nt, Artificial Sequence
  Description of Artificial Sequence: Synthetic oligonucleotide
  Sense strand starting at position 1312 of SEQ ID NO: 3677
ucaaccuaugaguguuaaa

SEQ ID NO: 286147 - RNA, 19 nt, Artificial Sequence
  Description of Artificial Sequence: Synthetic oligonucleotide
  Antisense strand to SEQ ID NO: 286146
uuuaacacucauagguuga

SEQ ID NO: 286148 - RNA, 19 nt, Artificial Sequence
  Description of Artificial Sequence: Synthetic oligonucleotide
  Sense strand starting at position 1321 of SEQ ID NO: 3677
gaguguuaaagugaaagca

SEQ ID NO: 286149 - RNA, 19 nt, Artificial Sequence
  Description of Artificial Sequence: Synthetic oligonucleotide
  Antisense strand to SEQ ID NO: 286148
ugcuuucacuuuaacacuc

SEQ ID NO: 286150 - RNA, 19 nt, Artificial Sequence
  Description of Artificial Sequence: Synthetic oligonucleotide
  Sense strand starting at position 1334 of SEQ ID NO: 3677
aaagcauguugguuacaca

SEQ ID NO: 286151 - RNA, 19 nt, Artificial Sequence
  Description of Artificial Sequence: Synthetic oligonucleotide
  Antisense strand to SEQ ID NO: 286150
uguguaaccaacaugcuuu

SEQ ID NO: 286152 - RNA, 19 nt, Artificial Sequence
  Description of Artificial Sequence: Synthetic oligonucleotide
  Sense strand starting at position 1335 of SEQ ID NO: 3677
aagcauguugguuacacau

SEQ ID NO: 286153 - RNA, 19 nt, Artificial Sequence
  Description of Artificial Sequence: Synthetic oligonucleotide
  Antisense strand to SEQ ID NO: 286152
auguguaaccaacaugcuu

SEQ ID NO: 286154 - RNA, 19 nt, Artificial Sequence
  Description of Artificial Sequence: Synthetic oligonucleotide
  Sense strand starting at position 1417 of SEQ ID NO: 3677
cugagaccuacucgagaga

SEQ ID NO: 286155 - RNA, 19 nt, Artificial Sequence
  Description of Artificial Sequence: Synthetic oligonucleotide
  Antisense strand to SEQ ID NO: 286154
ucucucgaguaggucucag

SEQ ID NO: 286156 - RNA, 19 nt, Artificial Sequence
  Description of Artificial Sequence: Synthetic oligonucleotide
  Sense strand starting at position 1707 of SEQ ID NO: 3677
ucggaaucauggucuaaga

SEQ ID NO: 286157 - RNA, 19 nt, Artificial Sequence
  Description of Artificial Sequence: Synthetic oligonucleotide
  Antisense strand to SEQ ID NO: 286156
ucuuagaccaugauuccga

SEQ ID NO: 286158 - RNA, 19 nt, Artificial Sequence
  Description of Artificial Sequence: Synthetic oligonucleotide
  Sense strand starting at position 2351 of SEQ ID NO: 3677
uggacuacuugucccaaga

SEQ ID NO: 286159 - RNA, 19 nt, Artificial Sequence
  Description of Artificial Sequence: Synthetic oligonucleotide
  Antisense strand to SEQ ID NO: 286158
ucuugggacaaguagucca

SEQ ID NO: 286160 - RNA, 19 nt, Artificial Sequence
  Description of Artificial Sequence: Synthetic oligonucleotide
  Sense strand starting at position 2381 of SEQ ID NO: 3677
cucccagauucccuaguua

SEQ ID NO: 286161 - RNA, 19 nt, Artificial Sequence
  Description of Artificial Sequence: Synthetic oligonucleotide
  Antisense strand to SEQ ID NO: 286160
uaacuagggaaucugggag

SEQ ID NO: 286162 - RNA, 19 nt, Artificial Sequence
  Description of Artificial Sequence: Synthetic oligonucleotide
  Sense strand starting at position 2414 of SEQ ID NO: 3677
ugaagucgguguuuggaga

SEQ ID NO: 286163 - RNA, 19 nt, Artificial Sequence
  Description of Artificial Sequence: Synthetic oligonucleotide
  Antisense strand to SEQ ID NO: 286162
ucuccaaacaccgacuuca

SEQ ID NO: 286164 - RNA, 19 nt, Artificial Sequence
  Description of Artificial Sequence: Synthetic oligonucleotide
  Sense strand starting at position 2415 of SEQ ID NO: 3677
gaagucgguguuuggagaa

SEQ ID NO: 286165 - RNA, 19 nt, Artificial Sequence
  Description of Artificial Sequence: Synthetic oligonucleotide
  Antisense strand to SEQ ID NO: 286164
uucuccaaacaccgacuuc

SEQ ID NO: 286166 - RNA, 19 nt, Artificial Sequence
  Description of Artificial Sequence: Synthetic oligonucleotide
  Sense strand starting at position 2457 of SEQ ID NO: 3677
guaggaugaagcggaauaa

SEQ ID NO: 286167 - RNA, 19 nt, Artificial Sequence
  Description of Artificial Sequence: Synthetic oligonucleotide
  Antisense strand to SEQ ID NO: 286166
uuauuccgcuucauccuac

SEQ ID NO: 286168 - RNA, 19 nt, Artificial Sequence
  Description of Artificial Sequence: Synthetic oligonucleotide
  Sense strand starting at position 2760 of SEQ ID NO: 3677
ggaagagucugggucuugu

SEQ ID NO: 286169 - RNA, 19 nt, Artificial Sequence
  Description of Artificial Sequence: Synthetic oligonucleotide
  Antisense strand to SEQ ID NO: 286168
acaagacccagacucuucc

SEQ ID NO: 286170 - RNA, 19 nt, Artificial Sequence
  Description of Artificial Sequence: Synthetic oligonucleotide
  Sense strand starting at position 2799 of SEQ ID NO: 3677
acgcuuuaauauguugaaa

SEQ ID NO: 286171 - RNA, 19 nt, Artificial Sequence
  Description of Artificial Sequence: Synthetic oligonucleotide
  Antisense strand to SEQ ID NO: 286170
uuucaacauauuaaagcgu

SEQ ID NO: 286172 - RNA, 19 nt, Artificial Sequence
  Description of Artificial Sequence: Synthetic oligonucleotide
  Sense strand starting at position 2919 of SEQ ID NO: 3677
uuggaucugagaggaaguu

SEQ ID NO: 286173 - RNA, 19 nt, Artificial Sequence
  Description of Artificial Sequence: Synthetic oligonucleotide
  Antisense strand to SEQ ID NO: 286172
aacuuccucucagauccaa

SEQ ID NO: 286174 - RNA, 19 nt, Artificial Sequence
  Description of Artificial Sequence: Synthetic oligonucleotide
  Sense strand starting at position 3200 of SEQ ID NO: 3677
aaagguaaauguguguuau

SEQ ID NO: 286175 - RNA, 19 nt, Artificial Sequence
  Description of Artificial Sequence: Synthetic oligonucleotide
  Antisense strand to SEQ ID NO: 286174
auaacacacauuuaccuuu

SEQ ID NO: 286176 - RNA, 19 nt, Artificial Sequence
  Description of Artificial Sequence: Synthetic oligonucleotide
  Sense strand starting at position 3202 of SEQ ID NO: 3677
agguaaauguguguuauua

SEQ ID NO: 286177 - RNA, 19 nt, Artificial Sequence
  Description of Artificial Sequence: Synthetic oligonucleotide
  Antisense strand to SEQ ID NO: 286176
uaauaacacacauuuaccu

SEQ ID NO: 286178 - RNA, 19 nt, Artificial Sequence
  Description of Artificial Sequence: Synthetic oligonucleotide
  Sense strand starting at position 3368 of SEQ ID NO: 3677
uuuggcauuucugaagaau

SEQ ID NO: 286179 - RNA, 19 nt, Artificial Sequence
  Description of Artificial Sequence: Synthetic oligonucleotide
  Antisense strand to SEQ ID NO: 286178
auucuucagaaaugccaaa

SEQ ID NO: 286180 - RNA, 19 nt, Artificial Sequence
  Description of Artificial Sequence: Synthetic oligonucleotide
  Sense strand starting at position 3705 of SEQ ID NO: 3677
cccugccuccuggaacauu

SEQ ID NO: 286181 - RNA, 19 nt, Artificial Sequence
  Description of Artificial Sequence: Synthetic oligonucleotide
  Antisense strand to SEQ ID NO: 286180
aauguuccaggaggcaggg

SEQ ID NO: 286182 - RNA, 19 nt, Artificial Sequence
  Description of Artificial Sequence: Synthetic oligonucleotide
  Sense strand starting at position 3777 of SEQ ID NO: 3677
uuguacauauugucucuaa

SEQ ID NO: 286183 - RNA, 19 nt, Artificial Sequence
  Description of Artificial Sequence: Synthetic oligonucleotide
  Antisense strand to SEQ ID NO: 286182
uuagagacaauauguacaa

SEQ ID NO: 286184 - RNA, 19 nt, Artificial Sequence
  Description of Artificial Sequence: Synthetic oligonucleotide
  Sense strand starting at position 3778 of SEQ ID NO: 3677
uguacauauugucucuaau

SEQ ID NO: 286185 - RNA, 19 nt, Artificial Sequence
  Description of Artificial Sequence: Synthetic oligonucleotide
  Antisense strand to SEQ ID NO: 286184
auuagagacaauauguaca

SEQ ID NO: 286186 - RNA, 19 nt, Artificial Sequence
  Description of Artificial Sequence: Synthetic oligonucleotide
  Sense strand starting at position 3842 of SEQ ID NO: 3677
ccaccauucugaucggaua

SEQ ID NO: 286187 - RNA, 19 nt, Artificial Sequence
  Description of Artificial Sequence: Synthetic oligonucleotide
  Antisense strand to SEQ ID NO: 286186
uauccgaucagaauggugg

SEQ ID NO: 286188 - RNA, 19 nt, Artificial Sequence
  Description of Artificial Sequence: Synthetic oligonucleotide
  Sense strand starting at position 3863 of SEQ ID NO: 3677
ucuuguaauggucacuaau

SEQ ID NO: 286189 - RNA, 19 nt, Artificial Sequence
  Description of Artificial Sequence: Synthetic oligonucleotide
  Antisense strand to SEQ ID NO: 286188
auuagugaccauuacaaga

SEQ ID NO: 286190 - RNA, 19 nt, Artificial Sequence
  Description of Artificial Sequence: Synthetic oligonucleotide
  Sense strand starting at position 3865 of SEQ ID NO: 3677
uuguaauggucacuaauga

SEQ ID NO: 286191 - RNA, 19 nt, Artificial Sequence
  Description of Artificial Sequence: Synthetic oligonucleotide
  Antisense strand to SEQ ID NO: 286190
ucauuagugaccauuacaa

SEQ ID NO: 286192 - RNA, 19 nt, Artificial Sequence
  Description of Artificial Sequence: Synthetic oligonucleotide
  Sense strand starting at position 3866 of SEQ ID NO: 3677
uguaauggucacuaaugac

SEQ ID NO: 286193 - RNA, 19 nt, Artificial Sequence
  Description of Artificial Sequence: Synthetic oligonucleotide
  Antisense strand to SEQ ID NO: 286192
gucauuagugaccauuaca

SEQ ID NO: 286194 - RNA, 19 nt, Artificial Sequence
  Description of Artificial Sequence: Synthetic oligonucleotide
  Sense strand starting at position 3922 of SEQ ID NO: 3677
uugaucugucagcaguauu

SEQ ID NO: 286195 - RNA, 19 nt, Artificial Sequence
  Description of Artificial Sequence: Synthetic oligonucleotide
  Antisense strand to SEQ ID NO: 286194
aauacugcugacagaucaa

SEQ ID NO: 286196 - RNA, 19 nt, Artificial Sequence
  Description of Artificial Sequence: Synthetic oligonucleotide
  Sense strand starting at position 211 of SEQ ID NO: 3679
uguaacagguuucuuaguu

SEQ ID NO: 286197 - RNA, 19 nt, Artificial Sequence
  Description of Artificial Sequence: Synthetic oligonucleotide
  Antisense strand to SEQ ID NO: 286196
aacuaagaaaccuguuaca

SEQ ID NO: 286198 - RNA, 19 nt, Artificial Sequence
  Description of Artificial Sequence: Synthetic oligonucleotide
  Sense strand starting at position 212 of SEQ ID NO: 3679
guaacagguuucuuaguuu

SEQ ID NO: 286199 - RNA, 19 nt, Artificial Sequence
  Description of Artificial Sequence: Synthetic oligonucleotide
  Antisense strand to SEQ ID NO: 286198
aaacuaagaaaccuguuac

SEQ ID NO: 286200 - RNA, 19 nt, Artificial Sequence
  Description of Artificial Sequence: Synthetic oligonucleotide
  Sense strand starting at position 215 of SEQ ID NO: 3679
acagguuucuuaguuugau

SEQ ID NO: 286201 - RNA, 19 nt, Artificial Sequence
  Description of Artificial Sequence: Synthetic oligonucleotide
  Antisense strand to SEQ ID NO: 286200
aucaaacuaagaaaccugu

SEQ ID NO: 286202 - RNA, 19 nt, Artificial Sequence
  Description of Artificial Sequence: Synthetic oligonucleotide
  Sense strand starting at position 216 of SEQ ID NO: 3679
cagguuucuuaguuugauc

SEQ ID NO: 286203 - RNA, 19 nt, Artificial Sequence
  Description of Artificial Sequence: Synthetic oligonucleotide
  Antisense strand to SEQ ID NO: 286202
gaucaaacuaagaaaccug

SEQ ID NO: 286204 - RNA, 19 nt, Artificial Sequence
  Description of Artificial Sequence: Synthetic oligonucleotide
  Sense strand starting at position 218 of SEQ ID NO: 3679
gguuucuuaguuugaucau

SEQ ID NO: 286205 - RNA, 19 nt, Artificial Sequence
  Description of Artificial Sequence: Synthetic oligonucleotide
  Antisense strand to SEQ ID NO: 286204
augaucaaacuaagaaacc

SEQ ID NO: 286206 - RNA, 19 nt, Artificial Sequence
  Description of Artificial Sequence: Synthetic oligonucleotide
  Sense strand starting at position 221 of SEQ ID NO: 3679
uucuuaguuugaucaucua

SEQ ID NO: 286207 - RNA, 19 nt, Artificial Sequence
  Description of Artificial Sequence: Synthetic oligonucleotide
  Antisense strand to SEQ ID NO: 286206
uagaugaucaaacuaagaa

SEQ ID NO: 286208 - RNA, 19 nt, Artificial Sequence
  Description of Artificial Sequence: Synthetic oligonucleotide
  Sense strand starting at position 224 of SEQ ID NO: 3679
uuaguuugaucaucuaugu

SEQ ID NO: 286209 - RNA, 19 nt, Artificial Sequence
  Description of Artificial Sequence: Synthetic oligonucleotide
  Antisense strand to SEQ ID NO: 286208
acauagaugaucaaacuaa

SEQ ID NO: 286210 - RNA, 19 nt, Artificial Sequence
  Description of Artificial Sequence: Synthetic oligonucleotide
  Sense strand starting at position 229 of SEQ ID NO: 3679
uugaucaucuauguaagca

SEQ ID NO: 286211 - RNA, 19 nt, Artificial Sequence
  Description of Artificial Sequence: Synthetic oligonucleotide
  Antisense strand to SEQ ID NO: 286210
ugcuuacauagaugaucaa

SEQ ID NO: 286212 - RNA, 19 nt, Artificial Sequence
  Description of Artificial Sequence: Synthetic oligonucleotide
  Sense strand starting at position 322 of SEQ ID NO: 3679
cagacuucuuguuucgacu

SEQ ID NO: 286213 - RNA, 19 nt, Artificial Sequence
  Description of Artificial Sequence: Synthetic oligonucleotide
  Antisense strand to SEQ ID NO: 286212
agucgaaacaagaagucug

SEQ ID NO: 286214 - RNA, 19 nt, Artificial Sequence
  Description of Artificial Sequence: Synthetic oligonucleotide
  Sense strand starting at position 334 of SEQ ID NO: 3679
uucgacucuuaauuaaaga

SEQ ID NO: 286215 - RNA, 19 nt, Artificial Sequence
  Description of Artificial Sequence: Synthetic oligonucleotide
  Antisense strand to SEQ ID NO: 286214
ucuuuaauuaagagucgaa

SEQ ID NO: 286216 - RNA, 19 nt, Artificial Sequence
  Description of Artificial Sequence: Synthetic oligonucleotide
  Sense strand starting at position 427 of SEQ ID NO: 3679
uggucucuacagugaucca

SEQ ID NO: 286217 - RNA, 19 nt, Artificial Sequence
  Description of Artificial Sequence: Synthetic oligonucleotide
  Antisense strand to SEQ ID NO: 286216
uggaucacuguagagacca

SEQ ID NO: 286218 - RNA, 19 nt, Artificial Sequence
  Description of Artificial Sequence: Synthetic oligonucleotide
  Sense strand starting at position 626 of SEQ ID NO: 3679
acagauaccugagcgauaa

SEQ ID NO: 286219 - RNA, 19 nt, Artificial Sequence
  Description of Artificial Sequence: Synthetic oligonucleotide
  Antisense strand to SEQ ID NO: 286218
uuaucgcucagguaucugu

SEQ ID NO: 286220 - RNA, 19 nt, Artificial Sequence
  Description of Artificial Sequence: Synthetic oligonucleotide
  Sense strand starting at position 627 of SEQ ID NO: 3679
cagauaccugagcgauaaa

SEQ ID NO: 286221 - RNA, 19 nt, Artificial Sequence
  Description of Artificial Sequence: Synthetic oligonucleotide
  Antisense strand to SEQ ID NO: 286220
uuuaucgcucagguaucug

SEQ ID NO: 286222 - RNA, 19 nt, Artificial Sequence
  Description of Artificial Sequence: Synthetic oligonucleotide
  Sense strand starting at position 824 of SEQ ID NO: 3679
aaacguuguggucaaauua

SEQ ID NO: 286223 - RNA, 19 nt, Artificial Sequence
  Description of Artificial Sequence: Synthetic oligonucleotide
  Antisense strand to SEQ ID NO: 286222
uaauuugaccacaacguuu

SEQ ID NO: 286224 - RNA, 19 nt, Artificial Sequence
  Description of Artificial Sequence: Synthetic oligonucleotide
  Sense strand starting at position 911 of SEQ ID NO: 3679
auaaaugcauccuucggaa

SEQ ID NO: 286225 - RNA, 19 nt, Artificial Sequence
  Description of Artificial Sequence: Synthetic oligonucleotide
  Antisense strand to SEQ ID NO: 286224
uuccgaaggaugcauuuau

SEQ ID NO: 286226 - RNA, 19 nt, Artificial Sequence
  Description of Artificial Sequence: Synthetic oligonucleotide
  Sense strand starting at position 1077 of SEQ ID NO: 3679
cagcucuuugccguaucua

SEQ ID NO: 286227 - RNA, 19 nt, Artificial Sequence
  Description of Artificial Sequence: Synthetic oligonucleotide
  Antisense strand to SEQ ID NO: 286226
uagauacggcaaagagcug

SEQ ID NO: 286228 - RNA, 19 nt, Artificial Sequence
  Description of Artificial Sequence: Synthetic oligonucleotide
  Sense strand starting at position 1087 of SEQ ID NO: 3679
ccguaucuauaacuaagua

SEQ ID NO: 286229 - RNA, 19 nt, Artificial Sequence
  Description of Artificial Sequence: Synthetic oligonucleotide
  Antisense strand to SEQ ID NO: 286228
uacuuaguuauagauacgg

SEQ ID NO: 286230 - RNA, 19 nt, Artificial Sequence
  Description of Artificial Sequence: Synthetic oligonucleotide
  Sense strand starting at position 1109 of SEQ ID NO: 3679
gcaaauaagguccgaaaug

SEQ ID NO: 286231 - RNA, 19 nt, Artificial Sequence
  Description of Artificial Sequence: Synthetic oligonucleotide
  Antisense strand to SEQ ID NO: 286230
cauuucggaccuuauuugc

SEQ ID NO: 286232 - RNA, 19 nt, Artificial Sequence
  Description of Artificial Sequence: Synthetic oligonucleotide
  Sense strand starting at position 1274 of SEQ ID NO: 3679
gcggcaagucaucaucaac

SEQ ID NO: 286233 - RNA, 19 nt, Artificial Sequence
  Description of Artificial Sequence: Synthetic oligonucleotide
  Antisense strand to SEQ ID NO: 286232
guugaugaugacuugccgc

SEQ ID NO: 286234 - RNA, 19 nt, Artificial Sequence
  Description of Artificial Sequence: Synthetic oligonucleotide
  Sense strand starting at position 1792 of SEQ ID NO: 3679
gcggguaaucggcuguauc

SEQ ID NO: 286235 - RNA, 19 nt, Artificial Sequence
  Description of Artificial Sequence: Synthetic oligonucleotide
  Antisense strand to SEQ ID NO: 286234
gauacagccgauuacccgc

SEQ ID NO: 286236 - RNA, 19 nt, Artificial Sequence
  Description of Artificial Sequence: Synthetic oligonucleotide
  Sense strand starting at position 2622 of SEQ ID NO: 3679
aggugcuaauuauuaagua

SEQ ID NO: 286237 - RNA, 19 nt, Artificial Sequence
  Description of Artificial Sequence: Synthetic oligonucleotide
  Antisense strand to SEQ ID NO: 286236
uacuuaauaauuagcaccu

SEQ ID NO: 286238 - RNA, 19 nt, Artificial Sequence
  Description of Artificial Sequence: Synthetic oligonucleotide
  Sense strand starting at position 2669 of SEQ ID NO: 3679
gcuuacaguucaguggaga

SEQ ID NO: 286239 - RNA, 19 nt, Artificial Sequence
  Description of Artificial Sequence: Synthetic oligonucleotide
  Antisense strand to SEQ ID NO: 286238
ucuccacugaacuguaagc

SEQ ID NO: 286240 - RNA, 19 nt, Artificial Sequence
  Description of Artificial Sequence: Synthetic oligonucleotide
  Sense strand starting at position 2782 of SEQ ID NO: 3679
gcuuuaagaagucgggaau

SEQ ID NO: 286241 - RNA, 19 nt, Artificial Sequence
  Description of Artificial Sequence: Synthetic oligonucleotide
  Antisense strand to SEQ ID NO: 286240
auucccgacuucuuaaagc

SEQ ID NO: 286242 - RNA, 19 nt, Artificial Sequence
  Description of Artificial Sequence: Synthetic oligonucleotide
  Sense strand starting at position 2794 of SEQ ID NO: 3679
cgggaauccuggaacggaa

SEQ ID NO: 286243 - RNA, 19 nt, Artificial Sequence
  Description of Artificial Sequence: Synthetic oligonucleotide
  Antisense strand to SEQ ID NO: 286242
uuccguuccaggauucccg

SEQ ID NO: 286244 - RNA, 19 nt, Artificial Sequence
  Description of Artificial Sequence: Synthetic oligonucleotide
  Sense strand starting at position 2880 of SEQ ID NO: 3679
ggaacucgugccgaaugau

SEQ ID NO: 286245 - RNA, 19 nt, Artificial Sequence
  Description of Artificial Sequence: Synthetic oligonucleotide
  Antisense strand to SEQ ID NO: 286244
aucauucggcacgaguucc

SEQ ID NO: 286246 - RNA, 19 nt, Artificial Sequence
  Description of Artificial Sequence: Synthetic oligonucleotide
  Sense strand starting at position 2892 of SEQ ID NO: 3679
gaaugaucccgcuguggac

SEQ ID NO: 286247 - RNA, 19 nt, Artificial Sequence
  Description of Artificial Sequence: Synthetic oligonucleotide
  Antisense strand to SEQ ID NO: 286246
guccacagcgggaucauuc

SEQ ID NO: 286248 - RNA, 19 nt, Artificial Sequence
  Description of Artificial Sequence: Synthetic oligonucleotide
  Sense strand starting at position 2913 of SEQ ID NO: 3679
ggaauuuaaucugagcuuc

SEQ ID NO: 286249 - RNA, 19 nt, Artificial Sequence
  Description of Artificial Sequence: Synthetic oligonucleotide
  Antisense strand to SEQ ID NO: 286248
gaagcucagauuaaauucc

SEQ ID NO: 286250 - RNA, 19 nt, Artificial Sequence
  Description of Artificial Sequence: Synthetic oligonucleotide
  Sense strand starting at position 2977 of SEQ ID NO: 3679
ugguccaggcacugugaaa

SEQ ID NO: 286251 - RNA, 19 nt, Artificial Sequence
  Description of Artificial Sequence: Synthetic oligonucleotide
  Antisense strand to SEQ ID NO: 286250
uuucacagugccuggacca

SEQ ID NO: 286252 - RNA, 19 nt, Artificial Sequence
  Description of Artificial Sequence: Synthetic oligonucleotide
  Sense strand starting at position 3134 of SEQ ID NO: 3679
gugacugucuccuuggaaa

SEQ ID NO: 286253 - RNA, 19 nt, Artificial Sequence
  Description of Artificial Sequence: Synthetic oligonucleotide
  Antisense strand to SEQ ID NO: 286252
uuuccaaggagacagucac

SEQ ID NO: 286254 - RNA, 19 nt, Artificial Sequence
  Description of Artificial Sequence: Synthetic oligonucleotide
  Sense strand starting at position 3163 of SEQ ID NO: 3679
acuugaaguuucuuccaga

SEQ ID NO: 286255 - RNA, 19 nt, Artificial Sequence
  Description of Artificial Sequence: Synthetic oligonucleotide
  Antisense strand to SEQ ID NO: 286254
ucuggaagaaacuucaagu

SEQ ID NO: 286256 - RNA, 19 nt, Artificial Sequence
  Description of Artificial Sequence: Synthetic oligonucleotide
  Sense strand starting at position 3164 of SEQ ID NO: 3679
cuugaaguuucuuccagau

SEQ ID NO: 286257 - RNA, 19 nt, Artificial Sequence
  Description of Artificial Sequence: Synthetic oligonucleotide
  Antisense strand to SEQ ID NO: 286256
aucuggaagaaacuucaag

SEQ ID NO: 286258 - RNA, 19 nt, Artificial Sequence
  Description of Artificial Sequence: Synthetic oligonucleotide
  Sense strand starting at position 3353 of SEQ ID NO: 3679
gugaaccuaucacuugaga

SEQ ID NO: 286259 - RNA, 19 nt, Artificial Sequence
  Description of Artificial Sequence: Synthetic oligonucleotide
  Antisense strand to SEQ ID NO: 286258
ucucaagugauagguucac

SEQ ID NO: 286260 - RNA, 19 nt, Artificial Sequence
  Description of Artificial Sequence: Synthetic oligonucleotide
  Sense strand starting at position 3398 of SEQ ID NO: 3679
uuuccaguccuuuguugaa

SEQ ID NO: 286261 - RNA, 19 nt, Artificial Sequence
  Description of Artificial Sequence: Synthetic oligonucleotide
  Antisense strand to SEQ ID NO: 286260
uucaacaaaggacuggaaa

SEQ ID NO: 286262 - RNA, 19 nt, Artificial Sequence
  Description of Artificial Sequence: Synthetic oligonucleotide
  Sense strand starting at position 3400 of SEQ ID NO: 3679
uccaguccuuuguugaaua

SEQ ID NO: 286263 - RNA, 19 nt, Artificial Sequence
  Description of Artificial Sequence: Synthetic oligonucleotide
  Antisense strand to SEQ ID NO: 286262
uauucaacaaaggacugga

SEQ ID NO: 286264 - RNA, 19 nt, Artificial Sequence
  Description of Artificial Sequence: Synthetic oligonucleotide
  Sense strand starting at position 3535 of SEQ ID NO: 3679
ucaggaaguucccucuguu

SEQ ID NO: 286265 - RNA, 19 nt, Artificial Sequence
  Description of Artificial Sequence: Synthetic oligonucleotide
  Antisense strand to SEQ ID NO: 286264
aacagagggaacuuccuga

SEQ ID NO: 286266 - RNA, 19 nt, Artificial Sequence
  Description of Artificial Sequence: Synthetic oligonucleotide
  Sense strand starting at position 3538 of SEQ ID NO: 3679
ggaaguucccucuguuucu

SEQ ID NO: 286267 - RNA, 19 nt, Artificial Sequence
  Description of Artificial Sequence: Synthetic oligonucleotide
  Antisense strand to SEQ ID NO: 286266
agaaacagagggaacuucc

SEQ ID NO: 286268 - RNA, 19 nt, Artificial Sequence
  Description of Artificial Sequence: Synthetic oligonucleotide
  Sense strand starting at position 3553 of SEQ ID NO: 3679
uucuauuucugagagguuu

SEQ ID NO: 286269 - RNA, 19 nt, Artificial Sequence
  Description of Artificial Sequence: Synthetic oligonucleotide
  Antisense strand to SEQ ID NO: 286268
aaaccucucagaaauagaa

SEQ ID NO: 286270 - RNA, 19 nt, Artificial Sequence
  Description of Artificial Sequence: Synthetic oligonucleotide
  Sense strand starting at position 3907 of SEQ ID NO: 3679
gauguuggaguaugucaaa

SEQ ID NO: 286271 - RNA, 19 nt, Artificial Sequence
  Description of Artificial Sequence: Synthetic oligonucleotide
  Antisense strand to SEQ ID NO: 286270
uuugacauacuccaacauc

SEQ ID NO: 286272 - RNA, 19 nt, Artificial Sequence
  Description of Artificial Sequence: Synthetic oligonucleotide
  Sense strand starting at position 3916 of SEQ ID NO: 3679
guaugucaaaugcauuguu

SEQ ID NO: 286273 - RNA, 19 nt, Artificial Sequence
  Description of Artificial Sequence: Synthetic oligonucleotide
  Antisense strand to SEQ ID NO: 286272
aacaaugcauuugacauac

SEQ ID NO: 286274 - RNA, 19 nt, Artificial Sequence
  Description of Artificial Sequence: Synthetic oligonucleotide
  Sense strand starting at position 3973 of SEQ ID NO: 3679
gcuguuaaugugcuguuaa

SEQ ID NO: 286275 - RNA, 19 nt, Artificial Sequence
  Description of Artificial Sequence: Synthetic oligonucleotide
  Antisense strand to SEQ ID NO: 286274
uuaacagcacauuaacagc

SEQ ID NO: 286276 - RNA, 19 nt, Artificial Sequence
  Description of Artificial Sequence: Synthetic oligonucleotide
  Sense strand starting at position 27 of SEQ ID NO: 3680
auauauaauuugggagaag

SEQ ID NO: 286277 - RNA, 19 nt, Artificial Sequence
  Description of Artificial Sequence: Synthetic oligonucleotide
  Antisense strand to SEQ ID NO: 286276
cuucucccaaauuauauau

SEQ ID NO: 286278 - RNA, 19 nt, Artificial Sequence
  Description of Artificial Sequence: Synthetic oligonucleotide
  Sense strand starting at position 242 of SEQ ID NO: 3680
uguacuuaaacguauggca

SEQ ID NO: 286279 - RNA, 19 nt, Artificial Sequence
  Description of Artificial Sequence: Synthetic oligonucleotide
  Antisense strand to SEQ ID NO: 286278
ugccauacguuuaaguaca

SEQ ID NO: 286280 - RNA, 19 nt, Artificial Sequence
  Description of Artificial Sequence: Synthetic oligonucleotide
  Sense strand starting at position 264 of SEQ ID NO: 3680
uuuggugcuuuauuuagua

SEQ ID NO: 286281 - RNA, 19 nt, Artificial Sequence
  Description of Artificial Sequence: Synthetic oligonucleotide
  Antisense strand to SEQ ID NO: 286280
uacuaaauaaagcaccaaa

SEQ ID NO: 286282 - RNA, 19 nt, Artificial Sequence
  Description of Artificial Sequence: Synthetic oligonucleotide
  Sense strand starting at position 610 of SEQ ID NO: 3680
ggcuguaaaggguacucua

SEQ ID NO: 286283 - RNA, 19 nt, Artificial Sequence
  Description of Artificial Sequence: Synthetic oligonucleotide
  Antisense strand to SEQ ID NO: 286282
uagaguacccuuuacagcc

SEQ ID NO: 286284 - RNA, 19 nt, Artificial Sequence
  Description of Artificial Sequence: Synthetic oligonucleotide
  Sense strand starting at position 613 of SEQ ID NO: 3680
uguaaaggguacucuacua

SEQ ID NO: 286285 - RNA, 19 nt, Artificial Sequence
  Description of Artificial Sequence: Synthetic oligonucleotide
  Antisense strand to SEQ ID NO: 286284
uaguagaguacccuuuaca

SEQ ID NO: 286286 - RNA, 19 nt, Artificial Sequence
  Description of Artificial Sequence: Synthetic oligonucleotide
  Sense strand starting at position 712 of SEQ ID NO: 3680
aaagauggauuuggauaaa

SEQ ID NO: 286287 - RNA, 19 nt, Artificial Sequence
  Description of Artificial Sequence: Synthetic oligonucleotide
  Antisense strand to SEQ ID NO: 286286
uuuauccaaauccaucuuu

SEQ ID NO: 286288 - RNA, 19 nt, Artificial Sequence
  Description of Artificial Sequence: Synthetic oligonucleotide
  Sense strand starting at position 877 of SEQ ID NO: 3680
ggguuagguggccagagua

SEQ ID NO: 286289 - RNA, 19 nt, Artificial Sequence
  Description of Artificial Sequence: Synthetic oligonucleotide
  Antisense strand to SEQ ID NO: 286288
uacucuggccaccuaaccc

SEQ ID NO: 286290 - RNA, 19 nt, Artificial Sequence
  Description of Artificial Sequence: Synthetic oligonucleotide
  Sense strand starting at position 928 of SEQ ID NO: 3680
agauuauaaacguggguua

SEQ ID NO: 286291 - RNA, 19 nt, Artificial Sequence
  Description of Artificial Sequence: Synthetic oligonucleotide
  Antisense strand to SEQ ID NO: 286290
uaacccacguuuauaaucu

SEQ ID NO: 286292 - RNA, 19 nt, Artificial Sequence
  Description of Artificial Sequence: Synthetic oligonucleotide
  Sense strand starting at position 929 of SEQ ID NO: 3680
gauuauaaacguggguuaa

SEQ ID NO: 286293 - RNA, 19 nt, Artificial Sequence
  Description of Artificial Sequence: Synthetic oligonucleotide
  Antisense strand to SEQ ID NO: 286292
uuaacccacguuuauaauc

SEQ ID NO: 286294 - RNA, 19 nt, Artificial Sequence
  Description of Artificial Sequence: Synthetic oligonucleotide
  Sense strand starting at position 930 of SEQ ID NO: 3680
auuauaaacguggguuaag

SEQ ID NO: 286295 - RNA, 19 nt, Artificial Sequence
  Description of Artificial Sequence: Synthetic oligonucleotide
  Antisense strand to SEQ ID NO: 286294
cuuaacccacguuuauaau

SEQ ID NO: 286296 - RNA, 19 nt, Artificial Sequence
  Description of Artificial Sequence: Synthetic oligonucleotide
  Sense strand starting at position 942 of SEQ ID NO: 3680
gguuaaguaccacaucaua

SEQ ID NO: 286297 - RNA, 19 nt, Artificial Sequence
  Description of Artificial Sequence: Synthetic oligonucleotide
  Antisense strand to SEQ ID NO: 286296
uaugaugugguacuuaacc

SEQ ID NO: 286298 - RNA, 19 nt, Artificial Sequence
  Description of Artificial Sequence: Synthetic oligonucleotide
  Sense strand starting at position 996 of SEQ ID NO: 3680
uuauuuaaaugccaagaga

SEQ ID NO: 286299 - RNA, 19 nt, Artificial Sequence
  Description of Artificial Sequence: Synthetic oligonucleotide
  Antisense strand to SEQ ID NO: 286298
ucucuuggcauuuaaauaa

SEQ ID NO: 286300 - RNA, 19 nt, Artificial Sequence
  Description of Artificial Sequence: Synthetic oligonucleotide
  Sense strand starting at position 1016 of SEQ ID NO: 3680
guaggauuacuucggauag

SEQ ID NO: 286301 - RNA, 19 nt, Artificial Sequence
  Description of Artificial Sequence: Synthetic oligonucleotide
  Antisense strand to SEQ ID NO: 286300
cuauccgaaguaauccuac

SEQ ID NO: 286302 - RNA, 19 nt, Artificial Sequence
  Description of Artificial Sequence: Synthetic oligonucleotide
  Sense strand starting at position 1020 of SEQ ID NO: 3680
gauuacuucggauagcuga

SEQ ID NO: 286303 - RNA, 19 nt, Artificial Sequence
  Description of Artificial Sequence: Synthetic oligonucleotide
  Antisense strand to SEQ ID NO: 286302
ucagcuauccgaaguaauc

SEQ ID NO: 286304 - RNA, 19 nt, Artificial Sequence
  Description of Artificial Sequence: Synthetic oligonucleotide
  Sense strand starting at position 1082 of SEQ ID NO: 3680
acgagaugugucgaggaaa

SEQ ID NO: 286305 - RNA, 19 nt, Artificial Sequence
  Description of Artificial Sequence: Synthetic oligonucleotide
  Antisense strand to SEQ ID NO: 286304
uuuccucgacacaucucgu

SEQ ID NO: 286306 - RNA, 19 nt, Artificial Sequence
  Description of Artificial Sequence: Synthetic oligonucleotide
  Sense strand starting at position 1175 of SEQ ID NO: 3680
aagcaagugguuugaacua

SEQ ID NO: 286307 - RNA, 19 nt, Artificial Sequence
  Description of Artificial Sequence: Synthetic oligonucleotide
  Antisense strand to SEQ ID NO: 286306
uaguucaaaccacuugcuu

SEQ ID NO: 286308 - RNA, 19 nt, Artificial Sequence
  Description of Artificial Sequence: Synthetic oligonucleotide
  Sense strand starting at position 1244 of SEQ ID NO: 3680
gcgucagauugaccaugga

SEQ ID NO: 286309 - RNA, 19 nt, Artificial Sequence
  Description of Artificial Sequence: Synthetic oligonucleotide
  Antisense strand to SEQ ID NO: 286308
uccauggucaaucugacgc

SEQ ID NO: 286310 - RNA, 19 nt, Artificial Sequence
  Description of Artificial Sequence: Synthetic oligonucleotide
  Sense strand starting at position 1315 of SEQ ID NO: 3680
uggucagcgcaauaaauca

SEQ ID NO: 286311 - RNA, 19 nt, Artificial Sequence
  Description of Artificial Sequence: Synthetic oligonucleotide
  Antisense strand to SEQ ID NO: 286310
ugauuuauugcgcugacca

SEQ ID NO: 286312 - RNA, 19 nt, Artificial Sequence
  Description of Artificial Sequence: Synthetic oligonucleotide
  Sense strand starting at position 1554 of SEQ ID NO: 3680
gggucugagaaaggauucu

SEQ ID NO: 286313 - RNA, 19 nt, Artificial Sequence
  Description of Artificial Sequence: Synthetic oligonucleotide
  Antisense strand to SEQ ID NO: 286312
agaauccuuucucagaccc

SEQ ID NO: 286314 - RNA, 19 nt, Artificial Sequence
  Description of Artificial Sequence: Synthetic oligonucleotide
  Sense strand starting at position 1563 of SEQ ID NO: 3680
aaaggauucugguuccaag

SEQ ID NO: 286315 - RNA, 19 nt, Artificial Sequence
  Description of Artificial Sequence: Synthetic oligonucleotide
  Antisense strand to SEQ ID NO: 286314
cuuggaaccagaauccuuu

SEQ ID NO: 286316 - RNA, 19 nt, Artificial Sequence
  Description of Artificial Sequence: Synthetic oligonucleotide
  Sense strand starting at position 2737 of SEQ ID NO: 3680
aggccuuggacaugauacu

SEQ ID NO: 286317 - RNA, 19 nt, Artificial Sequence
  Description of Artificial Sequence: Synthetic oligonucleotide
  Antisense strand to SEQ ID NO: 286316
aguaucauguccaaggccu

SEQ ID NO: 286318 - RNA, 19 nt, Artificial Sequence
  Description of Artificial Sequence: Synthetic oligonucleotide
  Sense strand starting at position 2866 of SEQ ID NO: 3680
gguuguuagauguaacuau

SEQ ID NO: 286319 - RNA, 19 nt, Artificial Sequence
  Description of Artificial Sequence: Synthetic oligonucleotide
  Antisense strand to SEQ ID NO: 286318
auaguuacaucuaacaacc

SEQ ID NO: 286320 - RNA, 19 nt, Artificial Sequence
  Description of Artificial Sequence: Synthetic oligonucleotide
  Sense strand starting at position 2937 of SEQ ID NO: 3680
ccugaagaguuguccuaaa

SEQ ID NO: 286321 - RNA, 19 nt, Artificial Sequence
  Description of Artificial Sequence: Synthetic oligonucleotide
  Antisense strand to SEQ ID NO: 286320
uuuaggacaacucuucagg

SEQ ID NO: 286322 - RNA, 19 nt, Artificial Sequence
  Description of Artificial Sequence: Synthetic oligonucleotide
  Sense strand starting at position 3001 of SEQ ID NO: 3680
ccuuuauugagguggcaau

SEQ ID NO: 286323 - RNA, 19 nt, Artificial Sequence
  Description of Artificial Sequence: Synthetic oligonucleotide
  Antisense strand to SEQ ID NO: 286322
auugccaccucaauaaagg

SEQ ID NO: 286324 - RNA, 19 nt, Artificial Sequence
  Description of Artificial Sequence: Synthetic oligonucleotide
  Sense strand starting at position 3002 of SEQ ID NO: 3680
cuuuauugagguggcaauu

SEQ ID NO: 286325 - RNA, 19 nt, Artificial Sequence
  Description of Artificial Sequence: Synthetic oligonucleotide
  Antisense strand to SEQ ID NO: 286324
aauugccaccucaauaaag

SEQ ID NO: 286326 - RNA, 19 nt, Artificial Sequence
  Description of Artificial Sequence: Synthetic oligonucleotide
  Sense strand starting at position 3012 of SEQ ID NO: 3680
guggcaauuccugacaagu

SEQ ID NO: 286327 - RNA, 19 nt, Artificial Sequence
  Description of Artificial Sequence: Synthetic oligonucleotide
  Antisense strand to SEQ ID NO: 286326
acuugucaggaauugccac

SEQ ID NO: 286328 - RNA, 19 nt, Artificial Sequence
  Description of Artificial Sequence: Synthetic oligonucleotide
  Sense strand starting at position 3076 of SEQ ID NO: 3680
uggauauaguggguuugga

SEQ ID NO: 286329 - RNA, 19 nt, Artificial Sequence
  Description of Artificial Sequence: Synthetic oligonucleotide
  Antisense strand to SEQ ID NO: 286328
uccaaacccacuauaucca

SEQ ID NO: 286330 - RNA, 19 nt, Artificial Sequence
  Description of Artificial Sequence: Synthetic oligonucleotide
  Sense strand starting at position 3145 of SEQ ID NO: 3680
uguguuugucaucugccau

SEQ ID NO: 286331 - RNA, 19 nt, Artificial Sequence
  Description of Artificial Sequence: Synthetic oligonucleotide
  Antisense strand to SEQ ID NO: 286330
auggcagaugacaaacaca

SEQ ID NO: 286332 - RNA, 19 nt, Artificial Sequence
  Description of Artificial Sequence: Synthetic oligonucleotide
  Sense strand starting at position 3151 of SEQ ID NO: 3680
ugucaucugccauauugau

SEQ ID NO: 286333 - RNA, 19 nt, Artificial Sequence
  Description of Artificial Sequence: Synthetic oligonucleotide
  Antisense strand to SEQ ID NO: 286332
aucaauauggcagaugaca

SEQ ID NO: 286334 - RNA, 19 nt, Artificial Sequence
  Description of Artificial Sequence: Synthetic oligonucleotide
  Sense strand starting at position 3290 of SEQ ID NO: 3680
gcgucuugcaagccaugaa

SEQ ID NO: 286335 - RNA, 19 nt, Artificial Sequence
  Description of Artificial Sequence: Synthetic oligonucleotide
  Antisense strand to SEQ ID NO: 286334
uucauggcuugcaagacgc

SEQ ID NO: 286336 - RNA, 19 nt, Artificial Sequence
  Description of Artificial Sequence: Synthetic oligonucleotide
  Sense strand starting at position 3382 of SEQ ID NO: 3680
aguacucacuugucuuaaa

SEQ ID NO: 286337 - RNA, 19 nt, Artificial Sequence
  Description of Artificial Sequence: Synthetic oligonucleotide
  Antisense strand to SEQ ID NO: 286336
uuuaagacaagugaguacu

SEQ ID NO: 286338 - RNA, 19 nt, Artificial Sequence
  Description of Artificial Sequence: Synthetic oligonucleotide
  Sense strand starting at position 3383 of SEQ ID NO: 3680
guacucacuugucuuaaag

SEQ ID NO: 286339 - RNA, 19 nt, Artificial Sequence
  Description of Artificial Sequence: Synthetic oligonucleotide
  Antisense strand to SEQ ID NO: 286338
cuuuaagacaagugaguac

SEQ ID NO: 286340 - RNA, 19 nt, Artificial Sequence
  Description of Artificial Sequence: Synthetic oligonucleotide
  Sense strand starting at position 3394 of SEQ ID NO: 3680
ucuuaaagauguuugauga

SEQ ID NO: 286341 - RNA, 19 nt, Artificial Sequence
  Description of Artificial Sequence: Synthetic oligonucleotide
  Antisense strand to SEQ ID NO: 286340
ucaucaaacaucuuuaaga

SEQ ID NO: 286342 - RNA, 19 nt, Artificial Sequence
  Description of Artificial Sequence: Synthetic oligonucleotide
  Sense strand starting at position 3395 of SEQ ID NO: 3680
cuuaaagauguuugaugaa

SEQ ID NO: 286343 - RNA, 19 nt, Artificial Sequence
  Description of Artificial Sequence: Synthetic oligonucleotide
  Antisense strand to SEQ ID NO: 286342
uucaucaaacaucuuuaag

SEQ ID NO: 286344 - RNA, 19 nt, Artificial Sequence
  Description of Artificial Sequence: Synthetic oligonucleotide
  Sense strand starting at position 3560 of SEQ ID NO: 3680
gccagcugucugcuugaca

SEQ ID NO: 286345 - RNA, 19 nt, Artificial Sequence
  Description of Artificial Sequence: Synthetic oligonucleotide
  Antisense strand to SEQ ID NO: 286344
ugucaagcagacagcuggc

SEQ ID NO: 286346 - RNA, 19 nt, Artificial Sequence
  Description of Artificial Sequence: Synthetic oligonucleotide
  Sense strand starting at position 3719 of SEQ ID NO: 3680
ggaggcauucuugacuucu

SEQ ID NO: 286347 - RNA, 19 nt, Artificial Sequence
  Description of Artificial Sequence: Synthetic oligonucleotide
  Antisense strand to SEQ ID NO: 286346
agaagucaagaaugccucc

SEQ ID NO: 286348 - RNA, 19 nt, Artificial Sequence
  Description of Artificial Sequence: Synthetic oligonucleotide
  Sense strand starting at position 3861 of SEQ ID NO: 3680
ccuguauuaucaucuguaa

SEQ ID NO: 286349 - RNA, 19 nt, Artificial Sequence
  Description of Artificial Sequence: Synthetic oligonucleotide
  Antisense strand to SEQ ID NO: 286348
uuacagaugauaauacagg

SEQ ID NO: 286350 - RNA, 19 nt, Artificial Sequence
  Description of Artificial Sequence: Synthetic oligonucleotide
  Sense strand starting at position 3899 of SEQ ID NO: 3680
agccuauuggauuguuaug

SEQ ID NO: 286351 - RNA, 19 nt, Artificial Sequence
  Description of Artificial Sequence: Synthetic oligonucleotide
  Antisense strand to SEQ ID NO: 286350
cauaacaauccaauaggcu

SEQ ID NO: 286352 - RNA, 19 nt, Artificial Sequence
  Description of Artificial Sequence: Synthetic oligonucleotide
  Sense strand starting at position 3954 of SEQ ID NO: 3680
cagaguaaauggccaguaa

SEQ ID NO: 286353 - RNA, 19 nt, Artificial Sequence
  Description of Artificial Sequence: Synthetic oligonucleotide
  Antisense strand to SEQ ID NO: 286352
uuacuggccauuuacucug

SEQ ID NO: 286354 - RNA, 19 nt, Artificial Sequence
  Description of Artificial Sequence: Synthetic oligonucleotide
  Sense strand starting at position 3958 of SEQ ID NO: 3680
guaaauggccaguaagcau

SEQ ID NO: 286355 - RNA, 19 nt, Artificial Sequence
  Description of Artificial Sequence: Synthetic oligonucleotide
  Antisense strand to SEQ ID NO: 286354
augcuuacuggccauuuac

SEQ ID NO: 286356 - RNA, 19 nt, Artificial Sequence
  Description of Artificial Sequence: Synthetic oligonucleotide
  Sense strand starting at position 49 of SEQ ID NO: 3682
aggauuugugagcgcucga

SEQ ID NO: 286357 - RNA, 19 nt, Artificial Sequence
  Description of Artificial Sequence: Synthetic oligonucleotide
  Antisense strand to SEQ ID NO: 286356
ucgagcgcucacaaauccu

SEQ ID NO: 286358 - RNA, 19 nt, Artificial Sequence
  Description of Artificial Sequence: Synthetic oligonucleotide
  Sense strand starting at position 59 of SEQ ID NO: 3682
agcgcucgauuuccuaauu

SEQ ID NO: 286359 - RNA, 19 nt, Artificial Sequence
  Description of Artificial Sequence: Synthetic oligonucleotide
  Antisense strand to SEQ ID NO: 286358
aauuaggaaaucgagcgcu

SEQ ID NO: 286360 - RNA, 19 nt, Artificial Sequence
  Description of Artificial Sequence: Synthetic oligonucleotide
  Sense strand starting at position 60 of SEQ ID NO: 3682
gcgcucgauuuccuaauua

SEQ ID NO: 286361 - RNA, 19 nt, Artificial Sequence
  Description of Artificial Sequence: Synthetic oligonucleotide
  Antisense strand to SEQ ID NO: 286360
uaauuaggaaaucgagcgc

SEQ ID NO: 286362 - RNA, 19 nt, Artificial Sequence
  Description of Artificial Sequence: Synthetic oligonucleotide
  Sense strand starting at position 95 of SEQ ID NO: 3682
auccauucgcaauaagaga

SEQ ID NO: 286363 - RNA, 19 nt, Artificial Sequence
  Description of Artificial Sequence: Synthetic oligonucleotide
  Antisense strand to SEQ ID NO: 286362
ucucuuauugcgaauggau

SEQ ID NO: 286364 - RNA, 19 nt, Artificial Sequence
  Description of Artificial Sequence: Synthetic oligonucleotide
  Sense strand starting at position 289 of SEQ ID NO: 3682
uacagauauuagcuaggca

SEQ ID NO: 286365 - RNA, 19 nt, Artificial Sequence
  Description of Artificial Sequence: Synthetic oligonucleotide
  Antisense strand to SEQ ID NO: 286364
ugccuagcuaauaucugua

SEQ ID NO: 286366 - RNA, 19 nt, Artificial Sequence
  Description of Artificial Sequence: Synthetic oligonucleotide
  Sense strand starting at position 523 of SEQ ID NO: 3682
cuucucuagagucgggaaa

SEQ ID NO: 286367 - RNA, 19 nt, Artificial Sequence
  Description of Artificial Sequence: Synthetic oligonucleotide
  Antisense strand to SEQ ID NO: 286366
uuucccgacucuagagaag

SEQ ID NO: 286368 - RNA, 19 nt, Artificial Sequence
  Description of Artificial Sequence: Synthetic oligonucleotide
  Sense strand starting at position 576 of SEQ ID NO: 3682
caggaaaugccauguaaua

SEQ ID NO: 286369 - RNA, 19 nt, Artificial Sequence
  Description of Artificial Sequence: Synthetic oligonucleotide
  Antisense strand to SEQ ID NO: 286368
uauuacauggcauuuccug

SEQ ID NO: 286370 - RNA, 19 nt, Artificial Sequence
  Description of Artificial Sequence: Synthetic oligonucleotide
  Sense strand starting at position 671 of SEQ ID NO: 3682
ucagaucgucaacgucaaa

SEQ ID NO: 286371 - RNA, 19 nt, Artificial Sequence
  Description of Artificial Sequence: Synthetic oligonucleotide
  Antisense strand to SEQ ID NO: 286370
uuugacguugacgaucuga

SEQ ID NO: 286372 - RNA, 19 nt, Artificial Sequence
  Description of Artificial Sequence: Synthetic oligonucleotide
  Sense strand starting at position 674 of SEQ ID NO: 3682
gaucgucaacgucaaauga

SEQ ID NO: 286373 - RNA, 19 nt, Artificial Sequence
  Description of Artificial Sequence: Synthetic oligonucleotide
  Antisense strand to SEQ ID NO: 286372
ucauuugacguugacgauc

SEQ ID NO: 286374 - RNA, 19 nt, Artificial Sequence
  Description of Artificial Sequence: Synthetic oligonucleotide
  Sense strand starting at position 678 of SEQ ID NO: 3682
gucaacgucaaaugaauga

SEQ ID NO: 286375 - RNA, 19 nt, Artificial Sequence
  Description of Artificial Sequence: Synthetic oligonucleotide
  Antisense strand to SEQ ID NO: 286374
ucauucauuugacguugac

SEQ ID NO: 286376 - RNA, 19 nt, Artificial Sequence
  Description of Artificial Sequence: Synthetic oligonucleotide
  Sense strand starting at position 704 of SEQ ID NO: 3682
uuuggaaacucaccaaguu

SEQ ID NO: 286377 - RNA, 19 nt, Artificial Sequence
  Description of Artificial Sequence: Synthetic oligonucleotide
  Antisense strand to SEQ ID NO: 286376
aacuuggugaguuuccaaa

SEQ ID NO: 286378 - RNA, 19 nt, Artificial Sequence
  Description of Artificial Sequence: Synthetic oligonucleotide
  Sense strand starting at position 1214 of SEQ ID NO: 3682
ccgggcgaaccauaugaaa

SEQ ID NO: 286379 - RNA, 19 nt, Artificial Sequence
  Description of Artificial Sequence: Synthetic oligonucleotide
  Antisense strand to SEQ ID NO: 286378
uuucauaugguucgcccgg

SEQ ID NO: 286380 - RNA, 19 nt, Artificial Sequence
  Description of Artificial Sequence: Synthetic oligonucleotide
  Sense strand starting at position 1216 of SEQ ID NO: 3682
gggcgaaccauaugaaacu

SEQ ID NO: 286381 - RNA, 19 nt, Artificial Sequence
  Description of Artificial Sequence: Synthetic oligonucleotide
  Antisense strand to SEQ ID NO: 286380
aguuucauaugguucgccc

SEQ ID NO: 286382 - RNA, 19 nt, Artificial Sequence
  Description of Artificial Sequence: Synthetic oligonucleotide
  Sense strand starting at position 1425 of SEQ ID NO: 3682
gugugaacagcugaggaaa

SEQ ID NO: 286383 - RNA, 19 nt, Artificial Sequence
  Description of Artificial Sequence: Synthetic oligonucleotide
  Antisense strand to SEQ ID NO: 286382
uuuccucagcuguucacac

SEQ ID NO: 286384 - RNA, 19 nt, Artificial Sequence
  Description of Artificial Sequence: Synthetic oligonucleotide
  Sense strand starting at position 2212 of SEQ ID NO: 3682
ccgggaaccguuuaggauu

SEQ ID NO: 286385 - RNA, 19 nt, Artificial Sequence
  Description of Artificial Sequence: Synthetic oligonucleotide
  Antisense strand to SEQ ID NO: 286384
aauccuaaacgguucccgg

SEQ ID NO: 286386 - RNA, 19 nt, Artificial Sequence
  Description of Artificial Sequence: Synthetic oligonucleotide
  Sense strand starting at position 2538 of SEQ ID NO: 3682
cgaccaggcuucuuacaga

SEQ ID NO: 286387 - RNA, 19 nt, Artificial Sequence
  Description of Artificial Sequence: Synthetic oligonucleotide
  Antisense strand to SEQ ID NO: 286386
ucuguaagaagccuggucg

SEQ ID NO: 286388 - RNA, 19 nt, Artificial Sequence
  Description of Artificial Sequence: Synthetic oligonucleotide
  Sense strand starting at position 2600 of SEQ ID NO: 3682
cuguuaaugcggugaggag

SEQ ID NO: 286389 - RNA, 19 nt, Artificial Sequence
  Description of Artificial Sequence: Synthetic oligonucleotide
  Antisense strand to SEQ ID NO: 286388
cuccucaccgcauuaacag

SEQ ID NO: 286390 - RNA, 19 nt, Artificial Sequence
  Description of Artificial Sequence: Synthetic oligonucleotide
  Sense strand starting at position 2601 of SEQ ID NO: 3682
uguuaaugcggugaggaga

SEQ ID NO: 286391 - RNA, 19 nt, Artificial Sequence
  Description of Artificial Sequence: Synthetic oligonucleotide
  Antisense strand to SEQ ID NO: 286390
ucuccucaccgcauuaaca

SEQ ID NO: 286392 - RNA, 19 nt, Artificial Sequence
  Description of Artificial Sequence: Synthetic oligonucleotide
  Sense strand starting at position 2614 of SEQ ID NO: 3682
aggagagcguucguugaga

SEQ ID NO: 286393 - RNA, 19 nt, Artificial Sequence
  Description of Artificial Sequence: Synthetic oligonucleotide
  Antisense strand to SEQ ID NO: 286392
ucucaacgaacgcucuccu

SEQ ID NO: 286394 - RNA, 19 nt, Artificial Sequence
  Description of Artificial Sequence: Synthetic oligonucleotide
  Sense strand starting at position 2617 of SEQ ID NO: 3682
agagcguucguugagauga

SEQ ID NO: 286395 - RNA, 19 nt, Artificial Sequence
  Description of Artificial Sequence: Synthetic oligonucleotide
  Antisense strand to SEQ ID NO: 286394
ucaucucaacgaacgcucu

SEQ ID NO: 286396 - RNA, 19 nt, Artificial Sequence
  Description of Artificial Sequence: Synthetic oligonucleotide
  Sense strand starting at position 2622 of SEQ ID NO: 3682
guucguugagaugacucau

SEQ ID NO: 286397 - RNA, 19 nt, Artificial Sequence
  Description of Artificial Sequence: Synthetic oligonucleotide
  Antisense strand to SEQ ID NO: 286396
augagucaucucaacgaac

SEQ ID NO: 286398 - RNA, 19 nt, Artificial Sequence
  Description of Artificial Sequence: Synthetic oligonucleotide
  Sense strand starting at position 2999 of SEQ ID NO: 3682
cuacucauugggcgucaaa

SEQ ID NO: 286399 - RNA, 19 nt, Artificial Sequence
  Description of Artificial Sequence: Synthetic oligonucleotide
  Antisense strand to SEQ ID NO: 286398
uuugacgcccaaugaguag

SEQ ID NO: 286400 - RNA, 19 nt, Artificial Sequence
  Description of Artificial Sequence: Synthetic oligonucleotide
  Sense strand starting at position 3002 of SEQ ID NO: 3682
cucauugggcgucaaauau

SEQ ID NO: 286401 - RNA, 19 nt, Artificial Sequence
  Description of Artificial Sequence: Synthetic oligonucleotide
  Antisense strand to SEQ ID NO: 286400
auauuugacgcccaaugag

SEQ ID NO: 286402 - RNA, 19 nt, Artificial Sequence
  Description of Artificial Sequence: Synthetic oligonucleotide
  Sense strand starting at position 3008 of SEQ ID NO: 3682
gggcgucaaauaugcugaa

SEQ ID NO: 286403 - RNA, 19 nt, Artificial Sequence
  Description of Artificial Sequence: Synthetic oligonucleotide
  Antisense strand to SEQ ID NO: 286402
uucagcauauuugacgccc

SEQ ID NO: 286404 - RNA, 19 nt, Artificial Sequence
  Description of Artificial Sequence: Synthetic oligonucleotide
  Sense strand starting at position 3048 of SEQ ID NO: 3682
gguguagagacuggaacuu

SEQ ID NO: 286405 - RNA, 19 nt, Artificial Sequence
  Description of Artificial Sequence: Synthetic oligonucleotide
  Antisense strand to SEQ ID NO: 286404
aaguuccagucucuacacc

SEQ ID NO: 286406 - RNA, 19 nt, Artificial Sequence
  Description of Artificial Sequence: Synthetic oligonucleotide
  Sense strand starting at position 3060 of SEQ ID NO: 3682
ggaacuuagcaauagcuuu

SEQ ID NO: 286407 - RNA, 19 nt, Artificial Sequence
  Description of Artificial Sequence: Synthetic oligonucleotide
  Antisense strand to SEQ ID NO: 286406
aaagcuauugcuaaguucc

SEQ ID NO: 286408 - RNA, 19 nt, Artificial Sequence
  Description of Artificial Sequence: Synthetic oligonucleotide
  Sense strand starting at position 3090 of SEQ ID NO: 3682
cuauguggcuuucugauuu

SEQ ID NO: 286409 - RNA, 19 nt, Artificial Sequence
  Description of Artificial Sequence: Synthetic oligonucleotide
  Antisense strand to SEQ ID NO: 286408
aaaucagaaagccacauag

SEQ ID NO: 286410 - RNA, 19 nt, Artificial Sequence
  Description of Artificial Sequence: Synthetic oligonucleotide
  Sense strand starting at position 3094 of SEQ ID NO: 3682
guggcuuucugauuugcca

SEQ ID NO: 286411 - RNA, 19 nt, Artificial Sequence
  Description of Artificial Sequence: Synthetic oligonucleotide
  Antisense strand to SEQ ID NO: 286410
uggcaaaucagaaagccac

SEQ ID NO: 286412 - RNA, 19 nt, Artificial Sequence
  Description of Artificial Sequence: Synthetic oligonucleotide
  Sense strand starting at position 3316 of SEQ ID NO: 3682
aggucuguuucucucauuu

SEQ ID NO: 286413 - RNA, 19 nt, Artificial Sequence
  Description of Artificial Sequence: Synthetic oligonucleotide
  Antisense strand to SEQ ID NO: 286412
aaaugagagaaacagaccu

SEQ ID NO: 286414 - RNA, 19 nt, Artificial Sequence
  Description of Artificial Sequence: Synthetic oligonucleotide
  Sense strand starting at position 3342 of SEQ ID NO: 3682
guacuacggacuuguaaau

SEQ ID NO: 286415 - RNA, 19 nt, Artificial Sequence
  Description of Artificial Sequence: Synthetic oligonucleotide
  Antisense strand to SEQ ID NO: 286414
auuuacaaguccguaguac

SEQ ID NO: 286416 - RNA, 19 nt, Artificial Sequence
  Description of Artificial Sequence: Synthetic oligonucleotide
  Sense strand starting at position 3363 of SEQ ID NO: 3682
uaguauucucguguugcag

SEQ ID NO: 286417 - RNA, 19 nt, Artificial Sequence
  Description of Artificial Sequence: Synthetic oligonucleotide
  Antisense strand to SEQ ID NO: 286416
cugcaacacgagaauacua

SEQ ID NO: 286418 - RNA, 19 nt, Artificial Sequence
  Description of Artificial Sequence: Synthetic oligonucleotide
  Sense strand starting at position 3381 of SEQ ID NO: 3682
ggaauaagugcccaucaca

SEQ ID NO: 286419 - RNA, 19 nt, Artificial Sequence
  Description of Artificial Sequence: Synthetic oligonucleotide
  Antisense strand to SEQ ID NO: 286418
ugugaugggcacuuauucc

SEQ ID NO: 286420 - RNA, 19 nt, Artificial Sequence
  Description of Artificial Sequence: Synthetic oligonucleotide
  Sense strand starting at position 3528 of SEQ ID NO: 3682
auuacuuuauggcugauaa

SEQ ID NO: 286421 - RNA, 19 nt, Artificial Sequence
  Description of Artificial Sequence: Synthetic oligonucleotide
  Antisense strand to SEQ ID NO: 286420
uuaucagccauaaaguaau

SEQ ID NO: 286422 - RNA, 19 nt, Artificial Sequence
  Description of Artificial Sequence: Synthetic oligonucleotide
  Sense strand starting at position 3529 of SEQ ID NO: 3682
uuacuuuauggcugauaaa

SEQ ID NO: 286423 - RNA, 19 nt, Artificial Sequence
  Description of Artificial Sequence: Synthetic oligonucleotide
  Antisense strand to SEQ ID NO: 286422
uuuaucagccauaaaguaa

SEQ ID NO: 286424 - RNA, 19 nt, Artificial Sequence
  Description of Artificial Sequence: Synthetic oligonucleotide
  Sense strand starting at position 3610 of SEQ ID NO: 3682
ucccauaaucagcgucuaa

SEQ ID NO: 286425 - RNA, 19 nt, Artificial Sequence
  Description of Artificial Sequence: Synthetic oligonucleotide
  Antisense strand to SEQ ID NO: 286424
uuagacgcugauuauggga

SEQ ID NO: 286426 - RNA, 19 nt, Artificial Sequence
  Description of Artificial Sequence: Synthetic oligonucleotide
  Sense strand starting at position 3674 of SEQ ID NO: 3682
cuguuaaacucacuguaac

SEQ ID NO: 286427 - RNA, 19 nt, Artificial Sequence
  Description of Artificial Sequence: Synthetic oligonucleotide
  Antisense strand to SEQ ID NO: 286426
guuacagugaguuuaacag

SEQ ID NO: 286428 - RNA, 19 nt, Artificial Sequence
  Description of Artificial Sequence: Synthetic oligonucleotide
  Sense strand starting at position 3675 of SEQ ID NO: 3682
uguuaaacucacuguaacu

SEQ ID NO: 286429 - RNA, 19 nt, Artificial Sequence
  Description of Artificial Sequence: Synthetic oligonucleotide
  Antisense strand to SEQ ID NO: 286428
aguuacagugaguuuaaca

SEQ ID NO: 286430 - RNA, 19 nt, Artificial Sequence
  Description of Artificial Sequence: Synthetic oligonucleotide
  Sense strand starting at position 3757 of SEQ ID NO: 3682
guagaagacgccgaaagau

SEQ ID NO: 286431 - RNA, 19 nt, Artificial Sequence
  Description of Artificial Sequence: Synthetic oligonucleotide
  Antisense strand to SEQ ID NO: 286430
aucuuucggcgucuucuac

SEQ ID NO: 286432 - RNA, 19 nt, Artificial Sequence
  Description of Artificial Sequence: Synthetic oligonucleotide
  Sense strand starting at position 3772 of SEQ ID NO: 3682
agaugcguacguguuguua

SEQ ID NO: 286433 - RNA, 19 nt, Artificial Sequence
  Description of Artificial Sequence: Synthetic oligonucleotide
  Antisense strand to SEQ ID NO: 286432
uaacaacacguacgcaucu

SEQ ID NO: 286434 - RNA, 19 nt, Artificial Sequence
  Description of Artificial Sequence: Synthetic oligonucleotide
  Sense strand starting at position 3824 of SEQ ID NO: 3682
cgcuaaaccugagucaucu

SEQ ID NO: 286435 - RNA, 19 nt, Artificial Sequence
  Description of Artificial Sequence: Synthetic oligonucleotide
  Antisense strand to SEQ ID NO: 286434
agaugacucagguuuagcg

SEQ ID NO: 286436 - RNA, 19 nt, Artificial Sequence
  Description of Artificial Sequence: Synthetic oligonucleotide
  Sense strand starting at position 69 of SEQ ID NO: 3681
gcaacugucaacggauacu

SEQ ID NO: 286437 - RNA, 19 nt, Artificial Sequence
  Description of Artificial Sequence: Synthetic oligonucleotide
  Antisense strand to SEQ ID NO: 286436
aguauccguugacaguugc

SEQ ID NO: 286438 - RNA, 19 nt, Artificial Sequence
  Description of Artificial Sequence: Synthetic oligonucleotide
  Sense strand starting at position 217 of SEQ ID NO: 3681
aggauuugugagcgcucga

SEQ ID NO: 286439 - RNA, 19 nt, Artificial Sequence
  Description of Artificial Sequence: Synthetic oligonucleotide
  Antisense strand to SEQ ID NO: 286438
ucgagcgcucacaaauccu

SEQ ID NO: 286440 - RNA, 19 nt, Artificial Sequence
  Description of Artificial Sequence: Synthetic oligonucleotide
  Sense strand starting at position 227 of SEQ ID NO: 3681
agcgcucgauuuccuaauu

SEQ ID NO: 286441 - RNA, 19 nt, Artificial Sequence
  Description of Artificial Sequence: Synthetic oligonucleotide
  Antisense strand to SEQ ID NO: 286440
aauuaggaaaucgagcgcu

SEQ ID NO: 286442 - RNA, 19 nt, Artificial Sequence
  Description of Artificial Sequence: Synthetic oligonucleotide
  Sense strand starting at position 228 of SEQ ID NO: 3681
gcgcucgauuuccuaauua

SEQ ID NO: 286443 - RNA, 19 nt, Artificial Sequence
  Description of Artificial Sequence: Synthetic oligonucleotide
  Antisense strand to SEQ ID NO: 286442
uaauuaggaaaucgagcgc

SEQ ID NO: 286444 - RNA, 19 nt, Artificial Sequence
  Description of Artificial Sequence: Synthetic oligonucleotide
  Sense strand starting at position 263 of SEQ ID NO: 3681
auccauucgcaauaagaga

SEQ ID NO: 286445 - RNA, 19 nt, Artificial Sequence
  Description of Artificial Sequence: Synthetic oligonucleotide
  Antisense strand to SEQ ID NO: 286444
ucucuuauugcgaauggau

SEQ ID NO: 286446 - RNA, 19 nt, Artificial Sequence
  Description of Artificial Sequence: Synthetic oligonucleotide
  Sense strand starting at position 457 of SEQ ID NO: 3681
uacagauauuagcuaggca

SEQ ID NO: 286447 - RNA, 19 nt, Artificial Sequence
  Description of Artificial Sequence: Synthetic oligonucleotide
  Antisense strand to SEQ ID NO: 286446
ugccuagcuaauaucugua

SEQ ID NO: 286448 - RNA, 19 nt, Artificial Sequence
  Description of Artificial Sequence: Synthetic oligonucleotide
  Sense strand starting at position 691 of SEQ ID NO: 3681
cuucucuagagucgggaaa

SEQ ID NO: 286449 - RNA, 19 nt, Artificial Sequence
  Description of Artificial Sequence: Synthetic oligonucleotide
  Antisense strand to SEQ ID NO: 286448
uuucccgacucuagagaag

SEQ ID NO: 286450 - RNA, 19 nt, Artificial Sequence
  Description of Artificial Sequence: Synthetic oligonucleotide
  Sense strand starting at position 744 of SEQ ID NO: 3681
caggaaaugccauguaaua

SEQ ID NO: 286451 - RNA, 19 nt, Artificial Sequence
  Description of Artificial Sequence: Synthetic oligonucleotide
  Antisense strand to SEQ ID NO: 286450
uauuacauggcauuuccug

SEQ ID NO: 286452 - RNA, 19 nt, Artificial Sequence
  Description of Artificial Sequence: Synthetic oligonucleotide
  Sense strand starting at position 839 of SEQ ID NO: 3681
ucagaucgucaacgucaaa

SEQ ID NO: 286453 - RNA, 19 nt, Artificial Sequence
  Description of Artificial Sequence: Synthetic oligonucleotide
  Antisense strand to SEQ ID NO: 286452
uuugacguugacgaucuga

SEQ ID NO: 286454 - RNA, 19 nt, Artificial Sequence
  Description of Artificial Sequence: Synthetic oligonucleotide
  Sense strand starting at position 842 of SEQ ID NO: 3681
gaucgucaacgucaaauga

SEQ ID NO: 286455 - RNA, 19 nt, Artificial Sequence
  Description of Artificial Sequence: Synthetic oligonucleotide
  Antisense strand to SEQ ID NO: 286454
ucauuugacguugacgauc

SEQ ID NO: 286456 - RNA, 19 nt, Artificial Sequence
  Description of Artificial Sequence: Synthetic oligonucleotide
  Sense strand starting at position 846 of SEQ ID NO: 3681
gucaacgucaaaugaauga

SEQ ID NO: 286457 - RNA, 19 nt, Artificial Sequence
  Description of Artificial Sequence: Synthetic oligonucleotide
  Antisense strand to SEQ ID NO: 286456
ucauucauuugacguugac

SEQ ID NO: 286458 - RNA, 19 nt, Artificial Sequence
  Description of Artificial Sequence: Synthetic oligonucleotide
  Sense strand starting at position 872 of SEQ ID NO: 3681
uuuggaaacucaccaaguu

SEQ ID NO: 286459 - RNA, 19 nt, Artificial Sequence
  Description of Artificial Sequence: Synthetic oligonucleotide
  Antisense strand to SEQ ID NO: 286458
aacuuggugaguuuccaaa

SEQ ID NO: 286460 - RNA, 19 nt, Artificial Sequence
  Description of Artificial Sequence: Synthetic oligonucleotide
  Sense strand starting at position 1382 of SEQ ID NO: 3681
ccgggcgaaccauaugaaa

SEQ ID NO: 286461 - RNA, 19 nt, Artificial Sequence
  Description of Artificial Sequence: Synthetic oligonucleotide
  Antisense strand to SEQ ID NO: 286460
uuucauaugguucgcccgg

SEQ ID NO: 286462 - RNA, 19 nt, Artificial Sequence
  Description of Artificial Sequence: Synthetic oligonucleotide
  Sense strand starting at position 1384 of SEQ ID NO: 3681
gggcgaaccauaugaaacu

SEQ ID NO: 286463 - RNA, 19 nt, Artificial Sequence
  Description of Artificial Sequence: Synthetic oligonucleotide
  Antisense strand to SEQ ID NO: 286462
aguuucauaugguucgccc

SEQ ID NO: 286464 - RNA, 19 nt, Artificial Sequence
  Description of Artificial Sequence: Synthetic oligonucleotide
  Sense strand starting at position 1593 of SEQ ID NO: 3681
gugugaacagcugaggaaa

SEQ ID NO: 286465 - RNA, 19 nt, Artificial Sequence
  Description of Artificial Sequence: Synthetic oligonucleotide
  Antisense strand to SEQ ID NO: 286464
uuuccucagcuguucacac

SEQ ID NO: 286466 - RNA, 19 nt, Artificial Sequence
  Description of Artificial Sequence: Synthetic oligonucleotide
  Sense strand starting at position 2380 of SEQ ID NO: 3681
ccgggaaccguuuaggauu

SEQ ID NO: 286467 - RNA, 19 nt, Artificial Sequence
  Description of Artificial Sequence: Synthetic oligonucleotide
  Antisense strand to SEQ ID NO: 286466
aauccuaaacgguucccgg

SEQ ID NO: 286468 - RNA, 19 nt, Artificial Sequence
  Description of Artificial Sequence: Synthetic oligonucleotide
  Sense strand starting at position 2706 of SEQ ID NO: 3681
cgaccaggcuucuuacaga

SEQ ID NO: 286469 - RNA, 19 nt, Artificial Sequence
  Description of Artificial Sequence: Synthetic oligonucleotide
  Antisense strand to SEQ ID NO: 286468
ucuguaagaagccuggucg

SEQ ID NO: 286470 - RNA, 19 nt, Artificial Sequence
  Description of Artificial Sequence: Synthetic oligonucleotide
  Sense strand starting at position 2768 of SEQ ID NO: 3681
cuguuaaugcggugaggag

SEQ ID NO: 286471 - RNA, 19 nt, Artificial Sequence
  Description of Artificial Sequence: Synthetic oligonucleotide
  Antisense strand to SEQ ID NO: 286470
cuccucaccgcauuaacag

SEQ ID NO: 286472 - RNA, 19 nt, Artificial Sequence
  Description of Artificial Sequence: Synthetic oligonucleotide
  Sense strand starting at position 2769 of SEQ ID NO: 3681
uguuaaugcggugaggaga

SEQ ID NO: 286473 - RNA, 19 nt, Artificial Sequence
  Description of Artificial Sequence: Synthetic oligonucleotide
  Antisense strand to SEQ ID NO: 286472
ucuccucaccgcauuaaca

SEQ ID NO: 286474 - RNA, 19 nt, Artificial Sequence
  Description of Artificial Sequence: Synthetic oligonucleotide
  Sense strand starting at position 2782 of SEQ ID NO: 3681
aggagagcguucguugaga

SEQ ID NO: 286475 - RNA, 19 nt, Artificial Sequence
  Description of Artificial Sequence: Synthetic oligonucleotide
  Antisense strand to SEQ ID NO: 286474
ucucaacgaacgcucuccu

SEQ ID NO: 286476 - RNA, 19 nt, Artificial Sequence
  Description of Artificial Sequence: Synthetic oligonucleotide
  Sense strand starting at position 2785 of SEQ ID NO: 3681
agagcguucguugagauga

SEQ ID NO: 286477 - RNA, 19 nt, Artificial Sequence
  Description of Artificial Sequence: Synthetic oligonucleotide
  Antisense strand to SEQ ID NO: 286476
ucaucucaacgaacgcucu

SEQ ID NO: 286478 - RNA, 19 nt, Artificial Sequence
  Description of Artificial Sequence: Synthetic oligonucleotide
  Sense strand starting at position 2790 of SEQ ID NO: 3681
guucguugagaugacucau

SEQ ID NO: 286479 - RNA, 19 nt, Artificial Sequence
  Description of Artificial Sequence: Synthetic oligonucleotide
  Antisense strand to SEQ ID NO: 286478
augagucaucucaacgaac

SEQ ID NO: 286480 - RNA, 19 nt, Artificial Sequence
  Description of Artificial Sequence: Synthetic oligonucleotide
  Sense strand starting at position 3167 of SEQ ID NO: 3681
cuacucauugggcgucaaa

SEQ ID NO: 286481 - RNA, 19 nt, Artificial Sequence
  Description of Artificial Sequence: Synthetic oligonucleotide
  Antisense strand to SEQ ID NO: 286480
uuugacgcccaaugaguag

SEQ ID NO: 286482 - RNA, 19 nt, Artificial Sequence
  Description of Artificial Sequence: Synthetic oligonucleotide
  Sense strand starting at position 3170 of SEQ ID NO: 3681
cucauugggcgucaaauau

SEQ ID NO: 286483 - RNA, 19 nt, Artificial Sequence
  Description of Artificial Sequence: Synthetic oligonucleotide
  Antisense strand to SEQ ID NO: 286482
auauuugacgcccaaugag

SEQ ID NO: 286484 - RNA, 19 nt, Artificial Sequence
  Description of Artificial Sequence: Synthetic oligonucleotide
  Sense strand starting at position 3176 of SEQ ID NO: 3681
gggcgucaaauaugcugaa

SEQ ID NO: 286485 - RNA, 19 nt, Artificial Sequence
  Description of Artificial Sequence: Synthetic oligonucleotide
  Antisense strand to SEQ ID NO: 286484
uucagcauauuugacgccc

SEQ ID NO: 286486 - RNA, 19 nt, Artificial Sequence
  Description of Artificial Sequence: Synthetic oligonucleotide
  Sense strand starting at position 3216 of SEQ ID NO: 3681
gguguagagacuggaacuu

SEQ ID NO: 286487 - RNA, 19 nt, Artificial Sequence
  Description of Artificial Sequence: Synthetic oligonucleotide
  Antisense strand to SEQ ID NO: 286486
aaguuccagucucuacacc

SEQ ID NO: 286488 - RNA, 19 nt, Artificial Sequence
  Description of Artificial Sequence: Synthetic oligonucleotide
  Sense strand starting at position 3228 of SEQ ID NO: 3681
ggaacuuagcaauagcuuu

SEQ ID NO: 286489 - RNA, 19 nt, Artificial Sequence
  Description of Artificial Sequence: Synthetic oligonucleotide
  Antisense strand to SEQ ID NO: 286488
aaagcuauugcuaaguucc

SEQ ID NO: 286490 - RNA, 19 nt, Artificial Sequence
  Description of Artificial Sequence: Synthetic oligonucleotide
  Sense strand starting at position 3258 of SEQ ID NO: 3681
cuauguggcuuucugauuu

SEQ ID NO: 286491 - RNA, 19 nt, Artificial Sequence
  Description of Artificial Sequence: Synthetic oligonucleotide
  Antisense strand to SEQ ID NO: 286490
aaaucagaaagccacauag

SEQ ID NO: 286492 - RNA, 19 nt, Artificial Sequence
  Description of Artificial Sequence: Synthetic oligonucleotide
  Sense strand starting at position 3262 of SEQ ID NO: 3681
guggcuuucugauuugcca

SEQ ID NO: 286493 - RNA, 19 nt, Artificial Sequence
  Description of Artificial Sequence: Synthetic oligonucleotide
  Antisense strand to SEQ ID NO: 286492
uggcaaaucagaaagccac

SEQ ID NO: 286494 - RNA, 19 nt, Artificial Sequence
  Description of Artificial Sequence: Synthetic oligonucleotide
  Sense strand starting at position 3484 of SEQ ID NO: 3681
aggucuguuucucucauuu

SEQ ID NO: 286495 - RNA, 19 nt, Artificial Sequence
  Description of Artificial Sequence: Synthetic oligonucleotide
  Antisense strand to SEQ ID NO: 286494
aaaugagagaaacagaccu

SEQ ID NO: 286496 - RNA, 19 nt, Artificial Sequence
  Description of Artificial Sequence: Synthetic oligonucleotide
  Sense strand starting at position 3510 of SEQ ID NO: 3681
guacuacggacuuguaaau

SEQ ID NO: 286497 - RNA, 19 nt, Artificial Sequence
  Description of Artificial Sequence: Synthetic oligonucleotide
  Antisense strand to SEQ ID NO: 286496
auuuacaaguccguaguac

SEQ ID NO: 286498 - RNA, 19 nt, Artificial Sequence
  Description of Artificial Sequence: Synthetic oligonucleotide
  Sense strand starting at position 3531 of SEQ ID NO: 3681
uaguauucucguguugcag

SEQ ID NO: 286499 - RNA, 19 nt, Artificial Sequence
  Description of Artificial Sequence: Synthetic oligonucleotide
  Antisense strand to SEQ ID NO: 286498
cugcaacacgagaauacua

SEQ ID NO: 286500 - RNA, 19 nt, Artificial Sequence
  Description of Artificial Sequence: Synthetic oligonucleotide
  Sense strand starting at position 3549 of SEQ ID NO: 3681
ggaauaagugcccaucaca

SEQ ID NO: 286501 - RNA, 19 nt, Artificial Sequence
  Description of Artificial Sequence: Synthetic oligonucleotide
  Antisense strand to SEQ ID NO: 286500
ugugaugggcacuuauucc

SEQ ID NO: 286502 - RNA, 19 nt, Artificial Sequence
  Description of Artificial Sequence: Synthetic oligonucleotide
  Sense strand starting at position 3696 of SEQ ID NO: 3681
auuacuuuauggcugauaa

SEQ ID NO: 286503 - RNA, 19 nt, Artificial Sequence
  Description of Artificial Sequence: Synthetic oligonucleotide
  Antisense strand to SEQ ID NO: 286502
uuaucagccauaaaguaau

SEQ ID NO: 286504 - RNA, 19 nt, Artificial Sequence
  Description of Artificial Sequence: Synthetic oligonucleotide
  Sense strand starting at position 3697 of SEQ ID NO: 3681
uuacuuuauggcugauaaa

SEQ ID NO: 286505 - RNA, 19 nt, Artificial Sequence
  Description of Artificial Sequence: Synthetic oligonucleotide
  Antisense strand to SEQ ID NO: 286504
uuuaucagccauaaaguaa

SEQ ID NO: 286506 - RNA, 19 nt, Artificial Sequence
  Description of Artificial Sequence: Synthetic oligonucleotide
  Sense strand starting at position 3778 of SEQ ID NO: 3681
ucccauaaucagcgucuaa

SEQ ID NO: 286507 - RNA, 19 nt, Artificial Sequence
  Description of Artificial Sequence: Synthetic oligonucleotide
  Antisense strand to SEQ ID NO: 286506
uuagacgcugauuauggga

SEQ ID NO: 286508 - RNA, 19 nt, Artificial Sequence
  Description of Artificial Sequence: Synthetic oligonucleotide
  Sense strand starting at position 3842 of SEQ ID NO: 3681
cuguuaaacucacuguaac

SEQ ID NO: 286509 - RNA, 19 nt, Artificial Sequence
  Description of Artificial Sequence: Synthetic oligonucleotide
  Antisense strand to SEQ ID NO: 286508
guuacagugaguuuaacag

SEQ ID NO: 286510 - RNA, 19 nt, Artificial Sequence
  Description of Artificial Sequence: Synthetic oligonucleotide
  Sense strand starting at position 3843 of SEQ ID NO: 3681
uguuaaacucacuguaacu

SEQ ID NO: 286511 - RNA, 19 nt, Artificial Sequence
  Description of Artificial Sequence: Synthetic oligonucleotide
  Antisense strand to SEQ ID NO: 286510
aguuacagugaguuuaaca

SEQ ID NO: 286512 - RNA, 19 nt, Artificial Sequence
  Description of Artificial Sequence: Synthetic oligonucleotide
  Sense strand starting at position 3925 of SEQ ID NO: 3681
guagaagacgccgaaagau

SEQ ID NO: 286513 - RNA, 19 nt, Artificial Sequence
  Description of Artificial Sequence: Synthetic oligonucleotide
  Antisense strand to SEQ ID NO: 286512
aucuuucggcgucuucuac

SEQ ID NO: 286514 - RNA, 19 nt, Artificial Sequence
  Description of Artificial Sequence: Synthetic oligonucleotide
  Sense strand starting at position 3940 of SEQ ID NO: 3681
agaugcguacguguuguua

SEQ ID NO: 286515 - RNA, 19 nt, Artificial Sequence
  Description of Artificial Sequence: Synthetic oligonucleotide
  Antisense strand to SEQ ID NO: 286514
uaacaacacguacgcaucu

SEQ ID NO: 286516 - RNA, 19 nt, Artificial Sequence
  Description of Artificial Sequence: Synthetic oligonucleotide
  Sense strand starting at position 75 of SEQ ID NO: 3683
uaauuauggcugcagagga

SEQ ID NO: 286517 - RNA, 19 nt, Artificial Sequence
  Description of Artificial Sequence: Synthetic oligonucleotide
  Antisense strand to SEQ ID NO: 286516
uccucugcagccauaauua

SEQ ID NO: 286518 - RNA, 19 nt, Artificial Sequence
  Description of Artificial Sequence: Synthetic oligonucleotide
  Sense strand starting at position 386 of SEQ ID NO: 3683
cagagacagugaguugaau

SEQ ID NO: 286519 - RNA, 19 nt, Artificial Sequence
  Description of Artificial Sequence: Synthetic oligonucleotide
  Antisense strand to SEQ ID NO: 286518
auucaacucacugucucug

SEQ ID NO: 286520 - RNA, 19 nt, Artificial Sequence
  Description of Artificial Sequence: Synthetic oligonucleotide
  Sense strand starting at position 388 of SEQ ID NO: 3683
gagacagugaguugaauua

SEQ ID NO: 286521 - RNA, 19 nt, Artificial Sequence
  Description of Artificial Sequence: Synthetic oligonucleotide
  Antisense strand to SEQ ID NO: 286520
uaauucaacucacugucuc

SEQ ID NO: 286522 - RNA, 19 nt, Artificial Sequence
  Description of Artificial Sequence: Synthetic oligonucleotide
  Sense strand starting at position 398 of SEQ ID NO: 3683
guugaauuacaguaauccu

SEQ ID NO: 286523 - RNA, 19 nt, Artificial Sequence
  Description of Artificial Sequence: Synthetic oligonucleotide
  Antisense strand to SEQ ID NO: 286522
aggauuacuguaauucaac

SEQ ID NO: 286524 - RNA, 19 nt, Artificial Sequence
  Description of Artificial Sequence: Synthetic oligonucleotide
  Sense strand starting at position 405 of SEQ ID NO: 3683
uacaguaauccuggugaga

SEQ ID NO: 286525 - RNA, 19 nt, Artificial Sequence
  Description of Artificial Sequence: Synthetic oligonucleotide
  Antisense strand to SEQ ID NO: 286524
ucucaccaggauuacugua

SEQ ID NO: 286526 - RNA, 19 nt, Artificial Sequence
  Description of Artificial Sequence: Synthetic oligonucleotide
  Sense strand starting at position 484 of SEQ ID NO: 3683
aucagcuuuggguaacuaa

SEQ ID NO: 286527 - RNA, 19 nt, Artificial Sequence
  Description of Artificial Sequence: Synthetic oligonucleotide
  Antisense strand to SEQ ID NO: 286526
uuaguuacccaaagcugau

SEQ ID NO: 286528 - RNA, 19 nt, Artificial Sequence
  Description of Artificial Sequence: Synthetic oligonucleotide
  Sense strand starting at position 493 of SEQ ID NO: 3683
ggguaacuaagccaaugua

SEQ ID NO: 286529 - RNA, 19 nt, Artificial Sequence
  Description of Artificial Sequence: Synthetic oligonucleotide
  Antisense strand to SEQ ID NO: 286528
uacauuggcuuaguuaccc

SEQ ID NO: 286530 - RNA, 19 nt, Artificial Sequence
  Description of Artificial Sequence: Synthetic oligonucleotide
  Sense strand starting at position 505 of SEQ ID NO: 3683
caauguaacguggagcaaa

SEQ ID NO: 286531 - RNA, 19 nt, Artificial Sequence
  Description of Artificial Sequence: Synthetic oligonucleotide
  Antisense strand to SEQ ID NO: 286530
uuugcuccacguuacauug

SEQ ID NO: 286532 - RNA, 19 nt, Artificial Sequence
  Description of Artificial Sequence: Synthetic oligonucleotide
  Sense strand starting at position 599 of SEQ ID NO: 3683
guguuagaaguccagcaag

SEQ ID NO: 286533 - RNA, 19 nt, Artificial Sequence
  Description of Artificial Sequence: Synthetic oligonucleotide
  Antisense strand to SEQ ID NO: 286532
cuugcuggacuucuaacac

SEQ ID NO: 286534 - RNA, 19 nt, Artificial Sequence
  Description of Artificial Sequence: Synthetic oligonucleotide
  Sense strand starting at position 692 of SEQ ID NO: 3683
cuauuuaccuggcugugau

SEQ ID NO: 286535 - RNA, 19 nt, Artificial Sequence
  Description of Artificial Sequence: Synthetic oligonucleotide
  Antisense strand to SEQ ID NO: 286534
aucacagccagguaaauag

SEQ ID NO: 286536 - RNA, 19 nt, Artificial Sequence
  Description of Artificial Sequence: Synthetic oligonucleotide
  Sense strand starting at position 693 of SEQ ID NO: 3683
uauuuaccuggcugugauu

SEQ ID NO: 286537 - RNA, 19 nt, Artificial Sequence
  Description of Artificial Sequence: Synthetic oligonucleotide
  Antisense strand to SEQ ID NO: 286536
aaucacagccagguaaaua

SEQ ID NO: 286538 - RNA, 19 nt, Artificial Sequence
  Description of Artificial Sequence: Synthetic oligonucleotide
  Sense strand starting at position 716 of SEQ ID NO: 3683
ugugaaauucaucagggug

SEQ ID NO: 286539 - RNA, 19 nt, Artificial Sequence
  Description of Artificial Sequence: Synthetic oligonucleotide
  Antisense strand to SEQ ID NO: 286538
cacccugaugaauuucaca

SEQ ID NO: 286540 - RNA, 19 nt, Artificial Sequence
  Description of Artificial Sequence: Synthetic oligonucleotide
  Sense strand starting at position 731 of SEQ ID NO: 3683
ggugcacauccagaauaug

SEQ ID NO: 286541 - RNA, 19 nt, Artificial Sequence
  Description of Artificial Sequence: Synthetic oligonucleotide
  Antisense strand to SEQ ID NO: 286540
cauauucuggaugugcacc

SEQ ID NO: 286542 - RNA, 19 nt, Artificial Sequence
  Description of Artificial Sequence: Synthetic oligonucleotide
  Sense strand starting at position 739 of SEQ ID NO: 3683
uccagaauauguguaaucu

SEQ ID NO: 286543 - RNA, 19 nt, Artificial Sequence
  Description of Artificial Sequence: Synthetic oligonucleotide
  Antisense strand to SEQ ID NO: 286542
agauuacacauauucugga

SEQ ID NO: 286544 - RNA, 19 nt, Artificial Sequence
  Description of Artificial Sequence: Synthetic oligonucleotide
  Sense strand starting at position 740 of SEQ ID NO: 3683
ccagaauauguguaaucug

SEQ ID NO: 286545 - RNA, 19 nt, Artificial Sequence
  Description of Artificial Sequence: Synthetic oligonucleotide
  Antisense strand to SEQ ID NO: 286544
cagauuacacauauucugg

SEQ ID NO: 286546 - RNA, 19 nt, Artificial Sequence
  Description of Artificial Sequence: Synthetic oligonucleotide
  Sense strand starting at position 812 of SEQ ID NO: 3683
agagauguugcugaaguua

SEQ ID NO: 286547 - RNA, 19 nt, Artificial Sequence
  Description of Artificial Sequence: Synthetic oligonucleotide
  Antisense strand to SEQ ID NO: 286546
uaacuucagcaacaucucu

SEQ ID NO: 286548 - RNA, 19 nt, Artificial Sequence
  Description of Artificial Sequence: Synthetic oligonucleotide
  Sense strand starting at position 823 of SEQ ID NO: 3683
ugaaguuacuaguugagaa

SEQ ID NO: 286549 - RNA, 19 nt, Artificial Sequence
  Description of Artificial Sequence: Synthetic oligonucleotide
  Antisense strand to SEQ ID NO: 286548
uucucaacuaguaacuuca

SEQ ID NO: 286550 - RNA, 19 nt, Artificial Sequence
  Description of Artificial Sequence: Synthetic oligonucleotide
  Sense strand starting at position 924 of SEQ ID NO: 3683
cugaguucucuccaagacg

SEQ ID NO: 286551 - RNA, 19 nt, Artificial Sequence
  Description of Artificial Sequence: Synthetic oligonucleotide
  Antisense strand to SEQ ID NO: 286550
cgucuuggagagaacucag

SEQ ID NO: 286552 - RNA, 19 nt, Artificial Sequence
  Description of Artificial Sequence: Synthetic oligonucleotide
  Sense strand starting at position 984 of SEQ ID NO: 3683
aaggcuaaguccuugacau

SEQ ID NO: 286553 - RNA, 19 nt, Artificial Sequence
  Description of Artificial Sequence: Synthetic oligonucleotide
  Antisense strand to SEQ ID NO: 286552
augucaaggacuuagccuu

SEQ ID NO: 286554 - RNA, 19 nt, Artificial Sequence
  Description of Artificial Sequence: Synthetic oligonucleotide
  Sense strand starting at position 985 of SEQ ID NO: 3683
aggcuaaguccuugacaua

SEQ ID NO: 286555 - RNA, 19 nt, Artificial Sequence
  Description of Artificial Sequence: Synthetic oligonucleotide
  Antisense strand to SEQ ID NO: 286554
uaugucaaggacuuagccu

SEQ ID NO: 286556 - RNA, 19 nt, Artificial Sequence
  Description of Artificial Sequence: Synthetic oligonucleotide
  Sense strand starting at position 986 of SEQ ID NO: 3683
ggcuaaguccuugacauau

SEQ ID NO: 286557 - RNA, 19 nt, Artificial Sequence
  Description of Artificial Sequence: Synthetic oligonucleotide
  Antisense strand to SEQ ID NO: 286556
auaugucaaggacuuagcc

SEQ ID NO: 286558 - RNA, 19 nt, Artificial Sequence
  Description of Artificial Sequence: Synthetic oligonucleotide
  Sense strand starting at position 1122 of SEQ ID NO: 3683
auuaauaacuguuucugga

SEQ ID NO: 286559 - RNA, 19 nt, Artificial Sequence
  Description of Artificial Sequence: Synthetic oligonucleotide
  Antisense strand to SEQ ID NO: 286558
uccagaaacaguuauuaau

SEQ ID NO: 286560 - RNA, 19 nt, Artificial Sequence
  Description of Artificial Sequence: Synthetic oligonucleotide
  Sense strand starting at position 1277 of SEQ ID NO: 3683
acagguuugcuccacaaau

SEQ ID NO: 286561 - RNA, 19 nt, Artificial Sequence
  Description of Artificial Sequence: Synthetic oligonucleotide
  Antisense strand to SEQ ID NO: 286560
auuuguggagcaaaccugu

SEQ ID NO: 286562 - RNA, 19 nt, Artificial Sequence
  Description of Artificial Sequence: Synthetic oligonucleotide
  Sense strand starting at position 1396 of SEQ ID NO: 3683
gguaaauggugaccucaag

SEQ ID NO: 286563 - RNA, 19 nt, Artificial Sequence
  Description of Artificial Sequence: Synthetic oligonucleotide
  Antisense strand to SEQ ID NO: 286562
cuugaggucaccauuuacc

SEQ ID NO: 286564 - RNA, 19 nt, Artificial Sequence
  Description of Artificial Sequence: Synthetic oligonucleotide
  Sense strand starting at position 1406 of SEQ ID NO: 3683
gaccucaagcuuuggagaa

SEQ ID NO: 286565 - RNA, 19 nt, Artificial Sequence
  Description of Artificial Sequence: Synthetic oligonucleotide
  Antisense strand to SEQ ID NO: 286564
uucuccaaagcuugagguc

SEQ ID NO: 286566 - RNA, 19 nt, Artificial Sequence
  Description of Artificial Sequence: Synthetic oligonucleotide
  Sense strand starting at position 2143 of SEQ ID NO: 3683
uguaguuacacaugaggau

SEQ ID NO: 286567 - RNA, 19 nt, Artificial Sequence
  Description of Artificial Sequence: Synthetic oligonucleotide
  Antisense strand to SEQ ID NO: 286566
auccucauguguaacuaca

SEQ ID NO: 286568 - RNA, 19 nt, Artificial Sequence
  Description of Artificial Sequence: Synthetic oligonucleotide
  Sense strand starting at position 2243 of SEQ ID NO: 3683
uugcuuucucuugacauag

SEQ ID NO: 286569 - RNA, 19 nt, Artificial Sequence
  Description of Artificial Sequence: Synthetic oligonucleotide
  Antisense strand to SEQ ID NO: 286568
cuaugucaagagaaagcaa

SEQ ID NO: 286570 - RNA, 19 nt, Artificial Sequence
  Description of Artificial Sequence: Synthetic oligonucleotide
  Sense strand starting at position 2440 of SEQ ID NO: 3683
agccuaauuuaugcaaggu

SEQ ID NO: 286571 - RNA, 19 nt, Artificial Sequence
  Description of Artificial Sequence: Synthetic oligonucleotide
  Antisense strand to SEQ ID NO: 286570
accuugcauaaauuaggcu

SEQ ID NO: 286572 - RNA, 19 nt, Artificial Sequence
  Description of Artificial Sequence: Synthetic oligonucleotide
  Sense strand starting at position 2549 of SEQ ID NO: 3683
cuaagaugcuuccuaauug

SEQ ID NO: 286573 - RNA, 19 nt, Artificial Sequence
  Description of Artificial Sequence: Synthetic oligonucleotide
  Antisense strand to SEQ ID NO: 286572
caauuaggaagcaucuuag

SEQ ID NO: 286574 - RNA, 19 nt, Artificial Sequence
  Description of Artificial Sequence: Synthetic oligonucleotide
  Sense strand starting at position 2556 of SEQ ID NO: 3683
gcuuccuaauuggugagaa

SEQ ID NO: 286575 - RNA, 19 nt, Artificial Sequence
  Description of Artificial Sequence: Synthetic oligonucleotide
  Antisense strand to SEQ ID NO: 286574
uucucaccaauuaggaagc

SEQ ID NO: 286576 - RNA, 19 nt, Artificial Sequence
  Description of Artificial Sequence: Synthetic oligonucleotide
  Sense strand starting at position 2569 of SEQ ID NO: 3683
ugagaauuacugcgacaca

SEQ ID NO: 286577 - RNA, 19 nt, Artificial Sequence
  Description of Artificial Sequence: Synthetic oligonucleotide
  Antisense strand to SEQ ID NO: 286576
ugugucgcaguaauucuca

SEQ ID NO: 286578 - RNA, 19 nt, Artificial Sequence
  Description of Artificial Sequence: Synthetic oligonucleotide
  Sense strand starting at position 2687 of SEQ ID NO: 3683
uggucuugugcuuucguga

SEQ ID NO: 286579 - RNA, 19 nt, Artificial Sequence
  Description of Artificial Sequence: Synthetic oligonucleotide
  Antisense strand to SEQ ID NO: 286578
ucacgaaagcacaagacca

SEQ ID NO: 286580 - RNA, 19 nt, Artificial Sequence
  Description of Artificial Sequence: Synthetic oligonucleotide
  Sense strand starting at position 2782 of SEQ ID NO: 3683
gcgacuuuauuucucugga

SEQ ID NO: 286581 - RNA, 19 nt, Artificial Sequence
  Description of Artificial Sequence: Synthetic oligonucleotide
  Antisense strand to SEQ ID NO: 286580
uccagagaaauaaagucgc

SEQ ID NO: 286582 - RNA, 19 nt, Artificial Sequence
  Description of Artificial Sequence: Synthetic oligonucleotide
  Sense strand starting at position 3116 of SEQ ID NO: 3683
cauggucuugcacaauuga

SEQ ID NO: 286583 - RNA, 19 nt, Artificial Sequence
  Description of Artificial Sequence: Synthetic oligonucleotide
  Antisense strand to SEQ ID NO: 286582
ucaauugugcaagaccaug

SEQ ID NO: 286584 - RNA, 19 nt, Artificial Sequence
  Description of Artificial Sequence: Synthetic oligonucleotide
  Sense strand starting at position 3431 of SEQ ID NO: 3683
gcuggaaauaucuggagau

SEQ ID NO: 286585 - RNA, 19 nt, Artificial Sequence
  Description of Artificial Sequence: Synthetic oligonucleotide
  Antisense strand to SEQ ID NO: 286584
aucuccagauauuuccagc

SEQ ID NO: 286586 - RNA, 19 nt, Artificial Sequence
  Description of Artificial Sequence: Synthetic oligonucleotide
  Sense strand starting at position 3541 of SEQ ID NO: 3683
ucaaccugccuggaaguau

SEQ ID NO: 286587 - RNA, 19 nt, Artificial Sequence
  Description of Artificial Sequence: Synthetic oligonucleotide
  Antisense strand to SEQ ID NO: 286586
auacuuccaggcagguuga

SEQ ID NO: 286588 - RNA, 19 nt, Artificial Sequence
  Description of Artificial Sequence: Synthetic oligonucleotide
  Sense strand starting at position 3756 of SEQ ID NO: 3683
agcagaaucuaguuuaaau

SEQ ID NO: 286589 - RNA, 19 nt, Artificial Sequence
  Description of Artificial Sequence: Synthetic oligonucleotide
  Antisense strand to SEQ ID NO: 286588
auuuaaacuagauucugcu

SEQ ID NO: 286590 - RNA, 19 nt, Artificial Sequence
  Description of Artificial Sequence: Synthetic oligonucleotide
  Sense strand starting at position 3830 of SEQ ID NO: 3683
gaauuauauccuugagagu

SEQ ID NO: 286591 - RNA, 19 nt, Artificial Sequence
  Description of Artificial Sequence: Synthetic oligonucleotide
  Antisense strand to SEQ ID NO: 286590
acucucaaggauauaauuc

SEQ ID NO: 286592 - RNA, 19 nt, Artificial Sequence
  Description of Artificial Sequence: Synthetic oligonucleotide
  Sense strand starting at position 3876 of SEQ ID NO: 3683
agggauuaucaugaguguu

SEQ ID NO: 286593 - RNA, 19 nt, Artificial Sequence
  Description of Artificial Sequence: Synthetic oligonucleotide
  Antisense strand to SEQ ID NO: 286592
aacacucaugauaaucccu

SEQ ID NO: 286594 - RNA, 19 nt, Artificial Sequence
  Description of Artificial Sequence: Synthetic oligonucleotide
  Sense strand starting at position 3879 of SEQ ID NO: 3683
gauuaucaugaguguugga

SEQ ID NO: 286595 - RNA, 19 nt, Artificial Sequence
  Description of Artificial Sequence: Synthetic oligonucleotide
  Antisense strand to SEQ ID NO: 286594
uccaacacucaugauaauc

SEQ ID NO: 286596 - RNA, 19 nt, Artificial Sequence
  Description of Artificial Sequence: Synthetic oligonucleotide
  Sense strand starting at position 154 of SEQ ID NO: 3685
ccaaauccuccugggcuua

SEQ ID NO: 286597 - RNA, 19 nt, Artificial Sequence
  Description of Artificial Sequence: Synthetic oligonucleotide
  Antisense strand to SEQ ID NO: 286596
uaagcccaggaggauuugg

SEQ ID NO: 286598 - RNA, 19 nt, Artificial Sequence
  Description of Artificial Sequence: Synthetic oligonucleotide
  Sense strand starting at position 164 of SEQ ID NO: 3685
cugggcuuagcucaaagau

SEQ ID NO: 286599 - RNA, 19 nt, Artificial Sequence
  Description of Artificial Sequence: Synthetic oligonucleotide
  Antisense strand to SEQ ID NO: 286598
aucuuugagcuaagcccag

SEQ ID NO: 286600 - RNA, 19 nt, Artificial Sequence
  Description of Artificial Sequence: Synthetic oligonucleotide
  Sense strand starting at position 282 of SEQ ID NO: 3685
uuauuuauguguucguaug

SEQ ID NO: 286601 - RNA, 19 nt, Artificial Sequence
  Description of Artificial Sequence: Synthetic oligonucleotide
  Antisense strand to SEQ ID NO: 286600
cauacgaacacauaaauaa

SEQ ID NO: 286602 - RNA, 19 nt, Artificial Sequence
  Description of Artificial Sequence: Synthetic oligonucleotide
  Sense strand starting at position 283 of SEQ ID NO: 3685
uauuuauguguucguaugu

SEQ ID NO: 286603 - RNA, 19 nt, Artificial Sequence
  Description of Artificial Sequence: Synthetic oligonucleotide
  Antisense strand to SEQ ID NO: 286602
acauacgaacacauaaaua

SEQ ID NO: 286604 - RNA, 19 nt, Artificial Sequence
  Description of Artificial Sequence: Synthetic oligonucleotide
  Sense strand starting at position 284 of SEQ ID NO: 3685
auuuauguguucguaugua

SEQ ID NO: 286605 - RNA, 19 nt, Artificial Sequence
  Description of Artificial Sequence: Synthetic oligonucleotide
  Antisense strand to SEQ ID NO: 286604
uacauacgaacacauaaau

SEQ ID NO: 286606 - RNA, 19 nt, Artificial Sequence
  Description of Artificial Sequence: Synthetic oligonucleotide
  Sense strand starting at position 288 of SEQ ID NO: 3685
auguguucguauguauauu

SEQ ID NO: 286607 - RNA, 19 nt, Artificial Sequence
  Description of Artificial Sequence: Synthetic oligonucleotide
  Antisense strand to SEQ ID NO: 286606
aauauacauacgaacacau

SEQ ID NO: 286608 - RNA, 19 nt, Artificial Sequence
  Description of Artificial Sequence: Synthetic oligonucleotide
  Sense strand starting at position 289 of SEQ ID NO: 3685
uguguucguauguauauuu

SEQ ID NO: 286609 - RNA, 19 nt, Artificial Sequence
  Description of Artificial Sequence: Synthetic oligonucleotide
  Antisense strand to SEQ ID NO: 286608
aaauauacauacgaacaca

SEQ ID NO: 286610 - RNA, 19 nt, Artificial Sequence
  Description of Artificial Sequence: Synthetic oligonucleotide
  Sense strand starting at position 300 of SEQ ID NO: 3685
guauauuucuguucuccca

SEQ ID NO: 286611 - RNA, 19 nt, Artificial Sequence
  Description of Artificial Sequence: Synthetic oligonucleotide
  Antisense strand to SEQ ID NO: 286610
ugggagaacagaaauauac

SEQ ID NO: 286612 - RNA, 19 nt, Artificial Sequence
  Description of Artificial Sequence: Synthetic oligonucleotide
  Sense strand starting at position 324 of SEQ ID NO: 3685
auggaacuuucuugucuua

SEQ ID NO: 286613 - RNA, 19 nt, Artificial Sequence
  Description of Artificial Sequence: Synthetic oligonucleotide
  Antisense strand to SEQ ID NO: 286612
uaagacaagaaaguuccau

SEQ ID NO: 286614 - RNA, 19 nt, Artificial Sequence
  Description of Artificial Sequence: Synthetic oligonucleotide
  Sense strand starting at position 326 of SEQ ID NO: 3685
ggaacuuucuugucuuauu

SEQ ID NO: 286615 - RNA, 19 nt, Artificial Sequence
  Description of Artificial Sequence: Synthetic oligonucleotide
  Antisense strand to SEQ ID NO: 286614
aauaagacaagaaaguucc

SEQ ID NO: 286616 - RNA, 19 nt, Artificial Sequence
  Description of Artificial Sequence: Synthetic oligonucleotide
  Sense strand starting at position 348 of SEQ ID NO: 3685
ugagguauccuauggucga

SEQ ID NO: 286617 - RNA, 19 nt, Artificial Sequence
  Description of Artificial Sequence: Synthetic oligonucleotide
  Antisense strand to SEQ ID NO: 286616
ucgaccauaggauaccuca

SEQ ID NO: 286618 - RNA, 19 nt, Artificial Sequence
  Description of Artificial Sequence: Synthetic oligonucleotide
  Sense strand starting at position 349 of SEQ ID NO: 3685
gagguauccuauggucgaa

SEQ ID NO: 286619 - RNA, 19 nt, Artificial Sequence
  Description of Artificial Sequence: Synthetic oligonucleotide
  Antisense strand to SEQ ID NO: 286618
uucgaccauaggauaccuc

SEQ ID NO: 286620 - RNA, 19 nt, Artificial Sequence
  Description of Artificial Sequence: Synthetic oligonucleotide
  Sense strand starting at position 368 of SEQ ID NO: 3685
aagagcuuggcagauagua

SEQ ID NO: 286621 - RNA, 19 nt, Artificial Sequence
  Description of Artificial Sequence: Synthetic oligonucleotide
  Antisense strand to SEQ ID NO: 286620
uacuaucugccaagcucuu

SEQ ID NO: 286622 - RNA, 19 nt, Artificial Sequence
  Description of Artificial Sequence: Synthetic oligonucleotide
  Sense strand starting at position 520 of SEQ ID NO: 3685
cgucucuguaaagaauuga

SEQ ID NO: 286623 - RNA, 19 nt, Artificial Sequence
  Description of Artificial Sequence: Synthetic oligonucleotide
  Antisense strand to SEQ ID NO: 286622
ucaauucuuuacagagacg

SEQ ID NO: 286624 - RNA, 19 nt, Artificial Sequence
  Description of Artificial Sequence: Synthetic oligonucleotide
  Sense strand starting at position 586 of SEQ ID NO: 3685
gcagaauccuuacucauag

SEQ ID NO: 286625 - RNA, 19 nt, Artificial Sequence
  Description of Artificial Sequence: Synthetic oligonucleotide
  Antisense strand to SEQ ID NO: 286624
cuaugaguaaggauucugc

SEQ ID NO: 286626 - RNA, 19 nt, Artificial Sequence
  Description of Artificial Sequence: Synthetic oligonucleotide
  Sense strand starting at position 739 of SEQ ID NO: 3685
uccugaaauagguguaaag

SEQ ID NO: 286627 - RNA, 19 nt, Artificial Sequence
  Description of Artificial Sequence: Synthetic oligonucleotide
  Antisense strand to SEQ ID NO: 286626
cuuuacaccuauuucagga

SEQ ID NO: 286628 - RNA, 19 nt, Artificial Sequence
  Description of Artificial Sequence: Synthetic oligonucleotide
  Sense strand starting at position 1021 of SEQ ID NO: 3685
ugugcaaucuguccugcau

SEQ ID NO: 286629 - RNA, 19 nt, Artificial Sequence
  Description of Artificial Sequence: Synthetic oligonucleotide
  Antisense strand to SEQ ID NO: 286628
augcaggacagauugcaca

SEQ ID NO: 286630 - RNA, 19 nt, Artificial Sequence
  Description of Artificial Sequence: Synthetic oligonucleotide
  Sense strand starting at position 1022 of SEQ ID NO: 3685
gugcaaucuguccugcauc

SEQ ID NO: 286631 - RNA, 19 nt, Artificial Sequence
  Description of Artificial Sequence: Synthetic oligonucleotide
  Antisense strand to SEQ ID NO: 286630
gaugcaggacagauugcac

SEQ ID NO: 286632 - RNA, 19 nt, Artificial Sequence
  Description of Artificial Sequence: Synthetic oligonucleotide
  Sense strand starting at position 1127 of SEQ ID NO: 3685
acuguucccucagucuuua

SEQ ID NO: 286633 - RNA, 19 nt, Artificial Sequence
  Description of Artificial Sequence: Synthetic oligonucleotide
  Antisense strand to SEQ ID NO: 286632
uaaagacugagggaacagu

SEQ ID NO: 286634 - RNA, 19 nt, Artificial Sequence
  Description of Artificial Sequence: Synthetic oligonucleotide
  Sense strand starting at position 1291 of SEQ ID NO: 3685
aagcgaagugaggauaagu

SEQ ID NO: 286635 - RNA, 19 nt, Artificial Sequence
  Description of Artificial Sequence: Synthetic oligonucleotide
  Antisense strand to SEQ ID NO: 286634
acuuauccucacuucgcuu

SEQ ID NO: 286636 - RNA, 19 nt, Artificial Sequence
  Description of Artificial Sequence: Synthetic oligonucleotide
  Sense strand starting at position 1472 of SEQ ID NO: 3685
gggaaucugugugcggaga

SEQ ID NO: 286637 - RNA, 19 nt, Artificial Sequence
  Description of Artificial Sequence: Synthetic oligonucleotide
  Antisense strand to SEQ ID NO: 286636
ucuccgcacacagauuccc

SEQ ID NO: 286638 - RNA, 19 nt, Artificial Sequence
  Description of Artificial Sequence: Synthetic oligonucleotide
  Sense strand starting at position 1594 of SEQ ID NO: 3685
guuccagcuuaguuugaga

SEQ ID NO: 286639 - RNA, 19 nt, Artificial Sequence
  Description of Artificial Sequence: Synthetic oligonucleotide
  Antisense strand to SEQ ID NO: 286638
ucucaaacuaagcuggaac

SEQ ID NO: 286640 - RNA, 19 nt, Artificial Sequence
  Description of Artificial Sequence: Synthetic oligonucleotide
  Sense strand starting at position 1596 of SEQ ID NO: 3685
uccagcuuaguuugagaaa

SEQ ID NO: 286641 - RNA, 19 nt, Artificial Sequence
  Description of Artificial Sequence: Synthetic oligonucleotide
  Antisense strand to SEQ ID NO: 286640
uuucucaaacuaagcugga

SEQ ID NO: 286642 - RNA, 19 nt, Artificial Sequence
  Description of Artificial Sequence: Synthetic oligonucleotide
  Sense strand starting at position 1597 of SEQ ID NO: 3685
ccagcuuaguuugagaaag

SEQ ID NO: 286643 - RNA, 19 nt, Artificial Sequence
  Description of Artificial Sequence: Synthetic oligonucleotide
  Antisense strand to SEQ ID NO: 286642
cuuucucaaacuaagcugg

SEQ ID NO: 286644 - RNA, 19 nt, Artificial Sequence
  Description of Artificial Sequence: Synthetic oligonucleotide
  Sense strand starting at position 1599 of SEQ ID NO: 3685
agcuuaguuugagaaaguu

SEQ ID NO: 286645 - RNA, 19 nt, Artificial Sequence
  Description of Artificial Sequence: Synthetic oligonucleotide
  Antisense strand to SEQ ID NO: 286644
aacuuucucaaacuaagcu

SEQ ID NO: 286646 - RNA, 19 nt, Artificial Sequence
  Description of Artificial Sequence: Synthetic oligonucleotide
  Sense strand starting at position 1605 of SEQ ID NO: 3685
guuugagaaaguugggaaa

SEQ ID NO: 286647 - RNA, 19 nt, Artificial Sequence
  Description of Artificial Sequence: Synthetic oligonucleotide
  Antisense strand to SEQ ID NO: 286646
uuucccaacuuucucaaac

SEQ ID NO: 286648 - RNA, 19 nt, Artificial Sequence
  Description of Artificial Sequence: Synthetic oligonucleotide
  Sense strand starting at position 2158 of SEQ ID NO: 3685
uccacuagcuucugaguca

SEQ ID NO: 286649 - RNA, 19 nt, Artificial Sequence
  Description of Artificial Sequence: Synthetic oligonucleotide
  Antisense strand to SEQ ID NO: 286648
ugacucagaagcuagugga

SEQ ID NO: 286650 - RNA, 19 nt, Artificial Sequence
  Description of Artificial Sequence: Synthetic oligonucleotide
  Sense strand starting at position 2208 of SEQ ID NO: 3685
gaaagagccucuuuguucu

SEQ ID NO: 286651 - RNA, 19 nt, Artificial Sequence
  Description of Artificial Sequence: Synthetic oligonucleotide
  Antisense strand to SEQ ID NO: 286650
agaacaaagaggcucuuuc

SEQ ID NO: 286652 - RNA, 19 nt, Artificial Sequence
  Description of Artificial Sequence: Synthetic oligonucleotide
  Sense strand starting at position 2402 of SEQ ID NO: 3685
guagcuauucgcccucuca

SEQ ID NO: 286653 - RNA, 19 nt, Artificial Sequence
  Description of Artificial Sequence: Synthetic oligonucleotide
  Antisense strand to SEQ ID NO: 286652
ugagagggcgaauagcuac

SEQ ID NO: 286654 - RNA, 19 nt, Artificial Sequence
  Description of Artificial Sequence: Synthetic oligonucleotide
  Sense strand starting at position 2404 of SEQ ID NO: 3685
agcuauucgcccucucagu

SEQ ID NO: 286655 - RNA, 19 nt, Artificial Sequence
  Description of Artificial Sequence: Synthetic oligonucleotide
  Antisense strand to SEQ ID NO: 286654
acugagagggcgaauagcu

SEQ ID NO: 286656 - RNA, 19 nt, Artificial Sequence
  Description of Artificial Sequence: Synthetic oligonucleotide
  Sense strand starting at position 2903 of SEQ ID NO: 3685
ggcagauaauccuaaccag

SEQ ID NO: 286657 - RNA, 19 nt, Artificial Sequence
  Description of Artificial Sequence: Synthetic oligonucleotide
  Antisense strand to SEQ ID NO: 286656
cugguuaggauuaucugcc

SEQ ID NO: 286658 - RNA, 19 nt, Artificial Sequence
  Description of Artificial Sequence: Synthetic oligonucleotide
  Sense strand starting at position 2934 of SEQ ID NO: 3685
gcagcauggauccgaugaa

SEQ ID NO: 286659 - RNA, 19 nt, Artificial Sequence
  Description of Artificial Sequence: Synthetic oligonucleotide
  Antisense strand to SEQ ID NO: 286658
uucaucggauccaugcugc

SEQ ID NO: 286660 - RNA, 19 nt, Artificial Sequence
  Description of Artificial Sequence: Synthetic oligonucleotide
  Sense strand starting at position 2935 of SEQ ID NO: 3685
cagcauggauccgaugaaa

SEQ ID NO: 286661 - RNA, 19 nt, Artificial Sequence
  Description of Artificial Sequence: Synthetic oligonucleotide
  Antisense strand to SEQ ID NO: 286660
uuucaucggauccaugcug

SEQ ID NO: 286662 - RNA, 19 nt, Artificial Sequence
  Description of Artificial Sequence: Synthetic oligonucleotide
  Sense strand starting at position 3212 of SEQ ID NO: 3685
uccggugguuucgggagaa

SEQ ID NO: 286663 - RNA, 19 nt, Artificial Sequence
  Description of Artificial Sequence: Synthetic oligonucleotide
  Antisense strand to SEQ ID NO: 286662
uucucccgaaaccaccgga

SEQ ID NO: 286664 - RNA, 19 nt, Artificial Sequence
  Description of Artificial Sequence: Synthetic oligonucleotide
  Sense strand starting at position 3214 of SEQ ID NO: 3685
cggugguuucgggagaaca

SEQ ID NO: 286665 - RNA, 19 nt, Artificial Sequence
  Description of Artificial Sequence: Synthetic oligonucleotide
  Antisense strand to SEQ ID NO: 286664
uguucucccgaaaccaccg

SEQ ID NO: 286666 - RNA, 19 nt, Artificial Sequence
  Description of Artificial Sequence: Synthetic oligonucleotide
  Sense strand starting at position 3216 of SEQ ID NO: 3685
gugguuucgggagaacaug

SEQ ID NO: 286667 - RNA, 19 nt, Artificial Sequence
  Description of Artificial Sequence: Synthetic oligonucleotide
  Antisense strand to SEQ ID NO: 286666
cauguucucccgaaaccac

SEQ ID NO: 286668 - RNA, 19 nt, Artificial Sequence
  Description of Artificial Sequence: Synthetic oligonucleotide
  Sense strand starting at position 3246 of SEQ ID NO: 3685
gcgacuuugccugcucagu

SEQ ID NO: 286669 - RNA, 19 nt, Artificial Sequence
  Description of Artificial Sequence: Synthetic oligonucleotide
  Antisense strand to SEQ ID NO: 286668
acugagcaggcaaagucgc

SEQ ID NO: 286670 - RNA, 19 nt, Artificial Sequence
  Description of Artificial Sequence: Synthetic oligonucleotide
  Sense strand starting at position 3851 of SEQ ID NO: 3685
gcuuaaacacgucgugaaa

SEQ ID NO: 286671 - RNA, 19 nt, Artificial Sequence
  Description of Artificial Sequence: Synthetic oligonucleotide
  Antisense strand to SEQ ID NO: 286670
uuucacgacguguuuaagc

SEQ ID NO: 286672 - RNA, 19 nt, Artificial Sequence
  Description of Artificial Sequence: Synthetic oligonucleotide
  Sense strand starting at position 3959 of SEQ ID NO: 3685
ggaauacuguaauuaucuc

SEQ ID NO: 286673 - RNA, 19 nt, Artificial Sequence
  Description of Artificial Sequence: Synthetic oligonucleotide
  Antisense strand to SEQ ID NO: 286672
gagauaauuacaguauucc

SEQ ID NO: 286674 - RNA, 19 nt, Artificial Sequence
  Description of Artificial Sequence: Synthetic oligonucleotide
  Sense strand starting at position 122 of SEQ ID NO: 3684
gggaaucugugugcggaga

SEQ ID NO: 286675 - RNA, 19 nt, Artificial Sequence
  Description of Artificial Sequence: Synthetic oligonucleotide
  Antisense strand to SEQ ID NO: 286674
ucuccgcacacagauuccc

SEQ ID NO: 286676 - RNA, 19 nt, Artificial Sequence
  Description of Artificial Sequence: Synthetic oligonucleotide
  Sense strand starting at position 244 of SEQ ID NO: 3684
guuccagcuuaguuugaga

SEQ ID NO: 286677 - RNA, 19 nt, Artificial Sequence
  Description of Artificial Sequence: Synthetic oligonucleotide
  Antisense strand to SEQ ID NO: 286676
ucucaaacuaagcuggaac

SEQ ID NO: 286678 - RNA, 19 nt, Artificial Sequence
  Description of Artificial Sequence: Synthetic oligonucleotide
  Sense strand starting at position 246 of SEQ ID NO: 3684
uccagcuuaguuugagaaa

SEQ ID NO: 286679 - RNA, 19 nt, Artificial Sequence
  Description of Artificial Sequence: Synthetic oligonucleotide
  Antisense strand to SEQ ID NO: 286678
uuucucaaacuaagcugga

SEQ ID NO: 286680 - RNA, 19 nt, Artificial Sequence
  Description of Artificial Sequence: Synthetic oligonucleotide
  Sense strand starting at position 247 of SEQ ID NO: 3684
ccagcuuaguuugagaaag

SEQ ID NO: 286681 - RNA, 19 nt, Artificial Sequence
  Description of Artificial Sequence: Synthetic oligonucleotide
  Antisense strand to SEQ ID NO: 286680
cuuucucaaacuaagcugg

SEQ ID NO: 286682 - RNA, 19 nt, Artificial Sequence
  Description of Artificial Sequence: Synthetic oligonucleotide
  Sense strand starting at position 249 of SEQ ID NO: 3684
agcuuaguuugagaaaguu

SEQ ID NO: 286683 - RNA, 19 nt, Artificial Sequence
  Description of Artificial Sequence: Synthetic oligonucleotide
  Antisense strand to SEQ ID NO: 286682
aacuuucucaaacuaagcu

SEQ ID NO: 286684 - RNA, 19 nt, Artificial Sequence
  Description of Artificial Sequence: Synthetic oligonucleotide
  Sense strand starting at position 255 of SEQ ID NO: 3684
guuugagaaaguugggaaa

SEQ ID NO: 286685 - RNA, 19 nt, Artificial Sequence
  Description of Artificial Sequence: Synthetic oligonucleotide
  Antisense strand to SEQ ID NO: 286684
uuucccaacuuucucaaac

SEQ ID NO: 286686 - RNA, 19 nt, Artificial Sequence
  Description of Artificial Sequence: Synthetic oligonucleotide
  Sense strand starting at position 808 of SEQ ID NO: 3684
uccacuagcuucugaguca

SEQ ID NO: 286687 - RNA, 19 nt, Artificial Sequence
  Description of Artificial Sequence: Synthetic oligonucleotide
  Antisense strand to SEQ ID NO: 286686
ugacucagaagcuagugga

SEQ ID NO: 286688 - RNA, 19 nt, Artificial Sequence
  Description of Artificial Sequence: Synthetic oligonucleotide
  Sense strand starting at position 858 of SEQ ID NO: 3684
gaaagagccucuuuguucu

SEQ ID NO: 286689 - RNA, 19 nt, Artificial Sequence
  Description of Artificial Sequence: Synthetic oligonucleotide
  Antisense strand to SEQ ID NO: 286688
agaacaaagaggcucuuuc

SEQ ID NO: 286690 - RNA, 19 nt, Artificial Sequence
  Description of Artificial Sequence: Synthetic oligonucleotide
  Sense strand starting at position 1052 of SEQ ID NO: 3684
guagcuauucgcccucuca

SEQ ID NO: 286691 - RNA, 19 nt, Artificial Sequence
  Description of Artificial Sequence: Synthetic oligonucleotide
  Antisense strand to SEQ ID NO: 286690
ugagagggcgaauagcuac

SEQ ID NO: 286692 - RNA, 19 nt, Artificial Sequence
  Description of Artificial Sequence: Synthetic oligonucleotide
  Sense strand starting at position 1054 of SEQ ID NO: 3684
agcuauucgcccucucagu

SEQ ID NO: 286693 - RNA, 19 nt, Artificial Sequence
  Description of Artificial Sequence: Synthetic oligonucleotide
  Antisense strand to SEQ ID NO: 286692
acugagagggcgaauagcu

SEQ ID NO: 286694 - RNA, 19 nt, Artificial Sequence
  Description of Artificial Sequence: Synthetic oligonucleotide
  Sense strand starting at position 1553 of SEQ ID NO: 3684
ggcagauaauccuaaccag

SEQ ID NO: 286695 - RNA, 19 nt, Artificial Sequence
  Description of Artificial Sequence: Synthetic oligonucleotide
  Antisense strand to SEQ ID NO: 286694
cugguuaggauuaucugcc

SEQ ID NO: 286696 - RNA, 19 nt, Artificial Sequence
  Description of Artificial Sequence: Synthetic oligonucleotide
  Sense strand starting at position 1584 of SEQ ID NO: 3684
gcagcauggauccgaugaa

SEQ ID NO: 286697 - RNA, 19 nt, Artificial Sequence
  Description of Artificial Sequence: Synthetic oligonucleotide
  Antisense strand to SEQ ID NO: 286696
uucaucggauccaugcugc

SEQ ID NO: 286698 - RNA, 19 nt, Artificial Sequence
  Description of Artificial Sequence: Synthetic oligonucleotide
  Sense strand starting at position 1585 of SEQ ID NO: 3684
cagcauggauccgaugaaa

SEQ ID NO: 286699 - RNA, 19 nt, Artificial Sequence
  Description of Artificial Sequence: Synthetic oligonucleotide
  Antisense strand to SEQ ID NO: 286698
uuucaucggauccaugcug

SEQ ID NO: 286700 - RNA, 19 nt, Artificial Sequence
  Description of Artificial Sequence: Synthetic oligonucleotide
  Sense strand starting at position 1862 of SEQ ID NO: 3684
uccggugguuucgggagaa

SEQ ID NO: 286701 - RNA, 19 nt, Artificial Sequence
  Description of Artificial Sequence: Synthetic oligonucleotide
  Antisense strand to SEQ ID NO: 286700
uucucccgaaaccaccgga

SEQ ID NO: 286702 - RNA, 19 nt, Artificial Sequence
  Description of Artificial Sequence: Synthetic oligonucleotide
  Sense strand starting at position 1864 of SEQ ID NO: 3684
cggugguuucgggagaaca

SEQ ID NO: 286703 - RNA, 19 nt, Artificial Sequence
  Description of Artificial Sequence: Synthetic oligonucleotide
  Antisense strand to SEQ ID NO: 286702
uguucucccgaaaccaccg

SEQ ID NO: 286704 - RNA, 19 nt, Artificial Sequence
  Description of Artificial Sequence: Synthetic oligonucleotide
  Sense strand starting at position 1866 of SEQ ID NO: 3684
gugguuucgggagaacaug

SEQ ID NO: 286705 - RNA, 19 nt, Artificial Sequence
  Description of Artificial Sequence: Synthetic oligonucleotide
  Antisense strand to SEQ ID NO: 286704
cauguucucccgaaaccac

SEQ ID NO: 286706 - RNA, 19 nt, Artificial Sequence
  Description of Artificial Sequence: Synthetic oligonucleotide
  Sense strand starting at position 1896 of SEQ ID NO: 3684
gcgacuuugccugcucagu

SEQ ID NO: 286707 - RNA, 19 nt, Artificial Sequence
  Description of Artificial Sequence: Synthetic oligonucleotide
  Antisense strand to SEQ ID NO: 286706
acugagcaggcaaagucgc

SEQ ID NO: 286708 - RNA, 19 nt, Artificial Sequence
  Description of Artificial Sequence: Synthetic oligonucleotide
  Sense strand starting at position 2501 of SEQ ID NO: 3684
gcuuaaacacgucgugaaa

SEQ ID NO: 286709 - RNA, 19 nt, Artificial Sequence
  Description of Artificial Sequence: Synthetic oligonucleotide
  Antisense strand to SEQ ID NO: 286708
uuucacgacguguuuaagc

SEQ ID NO: 286710 - RNA, 19 nt, Artificial Sequence
  Description of Artificial Sequence: Synthetic oligonucleotide
  Sense strand starting at position 2609 of SEQ ID NO: 3684
ggaauacuguaauuaucuc

SEQ ID NO: 286711 - RNA, 19 nt, Artificial Sequence
  Description of Artificial Sequence: Synthetic oligonucleotide
  Antisense strand to SEQ ID NO: 286710
gagauaauuacaguauucc

SEQ ID NO: 286712 - RNA, 19 nt, Artificial Sequence
  Description of Artificial Sequence: Synthetic oligonucleotide
  Sense strand starting at position 2634 of SEQ ID NO: 3684
ucaaguugcuaugaggauu

SEQ ID NO: 286713 - RNA, 19 nt, Artificial Sequence
  Description of Artificial Sequence: Synthetic oligonucleotide
  Antisense strand to SEQ ID NO: 286712
aauccucauagcaacuuga

SEQ ID NO: 286714 - RNA, 19 nt, Artificial Sequence
  Description of Artificial Sequence: Synthetic oligonucleotide
  Sense strand starting at position 2640 of SEQ ID NO: 3684
ugcuaugaggauuaccuau

SEQ ID NO: 286715 - RNA, 19 nt, Artificial Sequence
  Description of Artificial Sequence: Synthetic oligonucleotide
  Antisense strand to SEQ ID NO: 286714
auagguaauccucauagca

SEQ ID NO: 286716 - RNA, 19 nt, Artificial Sequence
  Description of Artificial Sequence: Synthetic oligonucleotide
  Sense strand starting at position 33 of SEQ ID NO: 3686
gcuuccaacuucucaguga

SEQ ID NO: 286717 - RNA, 19 nt, Artificial Sequence
  Description of Artificial Sequence: Synthetic oligonucleotide
  Antisense strand to SEQ ID NO: 286716
ucacugagaaguuggaagc

SEQ ID NO: 286718 - RNA, 19 nt, Artificial Sequence
  Description of Artificial Sequence: Synthetic oligonucleotide
  Sense strand starting at position 431 of SEQ ID NO: 3686
gaaccuuaauaguugcaga

SEQ ID NO: 286719 - RNA, 19 nt, Artificial Sequence
  Description of Artificial Sequence: Synthetic oligonucleotide
  Antisense strand to SEQ ID NO: 286718
ucugcaacuauuaagguuc

SEQ ID NO: 286720 - RNA, 19 nt, Artificial Sequence
  Description of Artificial Sequence: Synthetic oligonucleotide
  Sense strand starting at position 699 of SEQ ID NO: 3686
gucucaauauggucucaau

SEQ ID NO: 286721 - RNA, 19 nt, Artificial Sequence
  Description of Artificial Sequence: Synthetic oligonucleotide
  Antisense strand to SEQ ID NO: 286720
auugagaccauauugagac

SEQ ID NO: 286722 - RNA, 19 nt, Artificial Sequence
  Description of Artificial Sequence: Synthetic oligonucleotide
  Sense strand starting at position 804 of SEQ ID NO: 3686
uuagaaauauuguugccaa

SEQ ID NO: 286723 - RNA, 19 nt, Artificial Sequence
  Description of Artificial Sequence: Synthetic oligonucleotide
  Antisense strand to SEQ ID NO: 286722
uuggcaacaauauuucuaa

SEQ ID NO: 286724 - RNA, 19 nt, Artificial Sequence
  Description of Artificial Sequence: Synthetic oligonucleotide
  Sense strand starting at position 859 of SEQ ID NO: 3686
acuugaauguagccaggaa

SEQ ID NO: 286725 - RNA, 19 nt, Artificial Sequence
  Description of Artificial Sequence: Synthetic oligonucleotide
  Antisense strand to SEQ ID NO: 286724
uuccuggcuacauucaagu

SEQ ID NO: 286726 - RNA, 19 nt, Artificial Sequence
  Description of Artificial Sequence: Synthetic oligonucleotide
  Sense strand starting at position 946 of SEQ ID NO: 3686
uauuauaaguggucagaua

SEQ ID NO: 286727 - RNA, 19 nt, Artificial Sequence
  Description of Artificial Sequence: Synthetic oligonucleotide
  Antisense strand to SEQ ID NO: 286726
uaucugaccacuuauaaua

SEQ ID NO: 286728 - RNA, 19 nt, Artificial Sequence
  Description of Artificial Sequence: Synthetic oligonucleotide
  Sense strand starting at position 1143 of SEQ ID NO: 3686
acugauugguuauuacaag

SEQ ID NO: 286729 - RNA, 19 nt, Artificial Sequence
  Description of Artificial Sequence: Synthetic oligonucleotide
  Antisense strand to SEQ ID NO: 286728
cuuguaauaaccaaucagu

SEQ ID NO: 286730 - RNA, 19 nt, Artificial Sequence
  Description of Artificial Sequence: Synthetic oligonucleotide
  Sense strand starting at position 1161 of SEQ ID NO: 3686
ggacaaagguuagugacuu

SEQ ID NO: 286731 - RNA, 19 nt, Artificial Sequence
  Description of Artificial Sequence: Synthetic oligonucleotide
  Antisense strand to SEQ ID NO: 286730
aagucacuaaccuuugucc

SEQ ID NO: 286732 - RNA, 19 nt, Artificial Sequence
  Description of Artificial Sequence: Synthetic oligonucleotide
  Sense strand starting at position 1165 of SEQ ID NO: 3686
aaagguuagugacuuaaau

SEQ ID NO: 286733 - RNA, 19 nt, Artificial Sequence
  Description of Artificial Sequence: Synthetic oligonucleotide
  Antisense strand to SEQ ID NO: 286732
auuuaagucacuaaccuuu

SEQ ID NO: 286734 - RNA, 19 nt, Artificial Sequence
  Description of Artificial Sequence: Synthetic oligonucleotide
  Sense strand starting at position 1305 of SEQ ID NO: 3686
agaagaggcuuacugcaaa

SEQ ID NO: 286735 - RNA, 19 nt, Artificial Sequence
  Description of Artificial Sequence: Synthetic oligonucleotide
  Antisense strand to SEQ ID NO: 286734
uuugcaguaagccucuucu

SEQ ID NO: 286736 - RNA, 19 nt, Artificial Sequence
  Description of Artificial Sequence: Synthetic oligonucleotide
  Sense strand starting at position 1471 of SEQ ID NO: 3686
cuguuagaucuauauuguu

SEQ ID NO: 286737 - RNA, 19 nt, Artificial Sequence
  Description of Artificial Sequence: Synthetic oligonucleotide
  Antisense strand to SEQ ID NO: 286736
aacaauauagaucuaacag

SEQ ID NO: 286738 - RNA, 19 nt, Artificial Sequence
  Description of Artificial Sequence: Synthetic oligonucleotide
  Sense strand starting at position 1486 of SEQ ID NO: 3686
uguuuacaaugugcaagau

SEQ ID NO: 286739 - RNA, 19 nt, Artificial Sequence
  Description of Artificial Sequence: Synthetic oligonucleotide
  Antisense strand to SEQ ID NO: 286738
aucuugcacauuguaaaca

SEQ ID NO: 286740 - RNA, 19 nt, Artificial Sequence
  Description of Artificial Sequence: Synthetic oligonucleotide
  Sense strand starting at position 1487 of SEQ ID NO: 3686
guuuacaaugugcaagauu

SEQ ID NO: 286741 - RNA, 19 nt, Artificial Sequence
  Description of Artificial Sequence: Synthetic oligonucleotide
  Antisense strand to SEQ ID NO: 286740
aaucuugcacauuguaaac

SEQ ID NO: 286742 - RNA, 19 nt, Artificial Sequence
  Description of Artificial Sequence: Synthetic oligonucleotide
  Sense strand starting at position 1544 of SEQ ID NO: 3686
accgaaugccagugaaaca

SEQ ID NO: 286743 - RNA, 19 nt, Artificial Sequence
  Description of Artificial Sequence: Synthetic oligonucleotide
  Antisense strand to SEQ ID NO: 286742
uguuucacuggcauucggu

SEQ ID NO: 286744 - RNA, 19 nt, Artificial Sequence
  Description of Artificial Sequence: Synthetic oligonucleotide
  Sense strand starting at position 1695 of SEQ ID NO: 3686
agaaauauauuagugguca

SEQ ID NO: 286745 - RNA, 19 nt, Artificial Sequence
  Description of Artificial Sequence: Synthetic oligonucleotide
  Antisense strand to SEQ ID NO: 286744
ugaccacuaauauauuucu

SEQ ID NO: 286746 - RNA, 19 nt, Artificial Sequence
  Description of Artificial Sequence: Synthetic oligonucleotide
  Sense strand starting at position 1699 of SEQ ID NO: 3686
auauauuaguggucacaua

SEQ ID NO: 286747 - RNA, 19 nt, Artificial Sequence
  Description of Artificial Sequence: Synthetic oligonucleotide
  Antisense strand to SEQ ID NO: 286746
uaugugaccacuaauauau

SEQ ID NO: 286748 - RNA, 19 nt, Artificial Sequence
  Description of Artificial Sequence: Synthetic oligonucleotide
  Sense strand starting at position 1952 of SEQ ID NO: 3686
gucuucuggguguggaaca

SEQ ID NO: 286749 - RNA, 19 nt, Artificial Sequence
  Description of Artificial Sequence: Synthetic oligonucleotide
  Antisense strand to SEQ ID NO: 286748
uguuccacacccagaagac

SEQ ID NO: 286750 - RNA, 19 nt, Artificial Sequence
  Description of Artificial Sequence: Synthetic oligonucleotide
  Sense strand starting at position 1988 of SEQ ID NO: 3686
cuguaacuaggcuacuaau

SEQ ID NO: 286751 - RNA, 19 nt, Artificial Sequence
  Description of Artificial Sequence: Synthetic oligonucleotide
  Antisense strand to SEQ ID NO: 286750
auuaguagccuaguuacag

SEQ ID NO: 286752 - RNA, 19 nt, Artificial Sequence
  Description of Artificial Sequence: Synthetic oligonucleotide
  Sense strand starting at position 2024 of SEQ ID NO: 3686
uuccuucuaucuguugauu

SEQ ID NO: 286753 - RNA, 19 nt, Artificial Sequence
  Description of Artificial Sequence: Synthetic oligonucleotide
  Antisense strand to SEQ ID NO: 286752
aaucaacagauagaaggaa

SEQ ID NO: 286754 - RNA, 19 nt, Artificial Sequence
  Description of Artificial Sequence: Synthetic oligonucleotide
  Sense strand starting at position 2027 of SEQ ID NO: 3686
cuucuaucuguugauuguu

SEQ ID NO: 286755 - RNA, 19 nt, Artificial Sequence
  Description of Artificial Sequence: Synthetic oligonucleotide
  Antisense strand to SEQ ID NO: 286754
aacaaucaacagauagaag

SEQ ID NO: 286756 - RNA, 19 nt, Artificial Sequence
  Description of Artificial Sequence: Synthetic oligonucleotide
  Sense strand starting at position 2118 of SEQ ID NO: 3686
ggaaauaaggguuguucuu

SEQ ID NO: 286757 - RNA, 19 nt, Artificial Sequence
  Description of Artificial Sequence: Synthetic oligonucleotide
  Antisense strand to SEQ ID NO: 286756
aagaacaacccuuauuucc

SEQ ID NO: 286758 - RNA, 19 nt, Artificial Sequence
  Description of Artificial Sequence: Synthetic oligonucleotide
  Sense strand starting at position 2203 of SEQ ID NO: 3686
uuuaacagauggucgaauu

SEQ ID NO: 286759 - RNA, 19 nt, Artificial Sequence
  Description of Artificial Sequence: Synthetic oligonucleotide
  Antisense strand to SEQ ID NO: 286758
aauucgaccaucuguuaaa

SEQ ID NO: 286760 - RNA, 19 nt, Artificial Sequence
  Description of Artificial Sequence: Synthetic oligonucleotide
  Sense strand starting at position 2204 of SEQ ID NO: 3686
uuaacagauggucgaauua

SEQ ID NO: 286761 - RNA, 19 nt, Artificial Sequence
  Description of Artificial Sequence: Synthetic oligonucleotide
  Antisense strand to SEQ ID NO: 286760
uaauucgaccaucuguuaa

SEQ ID NO: 286762 - RNA, 19 nt, Artificial Sequence
  Description of Artificial Sequence: Synthetic oligonucleotide
  Sense strand starting at position 2757 of SEQ ID NO: 3686
ggugcaaucauuggucaca

SEQ ID NO: 286763 - RNA, 19 nt, Artificial Sequence
  Description of Artificial Sequence: Synthetic oligonucleotide
  Antisense strand to SEQ ID NO: 286762
ugugaccaaugauugcacc

SEQ ID NO: 286764 - RNA, 19 nt, Artificial Sequence
  Description of Artificial Sequence: Synthetic oligonucleotide
  Sense strand starting at position 2758 of SEQ ID NO: 3686
gugcaaucauuggucacau

SEQ ID NO: 286765 - RNA, 19 nt, Artificial Sequence
  Description of Artificial Sequence: Synthetic oligonucleotide
  Antisense strand to SEQ ID NO: 286764
augugaccaaugauugcac

SEQ ID NO: 286766 - RNA, 19 nt, Artificial Sequence
  Description of Artificial Sequence: Synthetic oligonucleotide
  Sense strand starting at position 2759 of SEQ ID NO: 3686
ugcaaucauuggucacaug

SEQ ID NO: 286767 - RNA, 19 nt, Artificial Sequence
  Description of Artificial Sequence: Synthetic oligonucleotide
  Antisense strand to SEQ ID NO: 286766
caugugaccaaugauugca

SEQ ID NO: 286768 - RNA, 19 nt, Artificial Sequence
  Description of Artificial Sequence: Synthetic oligonucleotide
  Sense strand starting at position 3124 of SEQ ID NO: 3686
cuuauaucugccuaagcag

SEQ ID NO: 286769 - RNA, 19 nt, Artificial Sequence
  Description of Artificial Sequence: Synthetic oligonucleotide
  Antisense strand to SEQ ID NO: 286768
cugcuuaggcagauauaag

SEQ ID NO: 286770 - RNA, 19 nt, Artificial Sequence
  Description of Artificial Sequence: Synthetic oligonucleotide
  Sense strand starting at position 3127 of SEQ ID NO: 3686
auaucugccuaagcagaaa

SEQ ID NO: 286771 - RNA, 19 nt, Artificial Sequence
  Description of Artificial Sequence: Synthetic oligonucleotide
  Antisense strand to SEQ ID NO: 286770
uuucugcuuaggcagauau

SEQ ID NO: 286772 - RNA, 19 nt, Artificial Sequence
  Description of Artificial Sequence: Synthetic oligonucleotide
  Sense strand starting at position 3203 of SEQ ID NO: 3686
auacguagccuauguacaa

SEQ ID NO: 286773 - RNA, 19 nt, Artificial Sequence
  Description of Artificial Sequence: Synthetic oligonucleotide
  Antisense strand to SEQ ID NO: 286772
uuguacauaggcuacguau

SEQ ID NO: 286774 - RNA, 19 nt, Artificial Sequence
  Description of Artificial Sequence: Synthetic oligonucleotide
  Sense strand starting at position 3310 of SEQ ID NO: 3686
ucagaaguggcuugauauu

SEQ ID NO: 286775 - RNA, 19 nt, Artificial Sequence
  Description of Artificial Sequence: Synthetic oligonucleotide
  Antisense strand to SEQ ID NO: 286774
aauaucaagccacuucuga

SEQ ID NO: 286776 - RNA, 19 nt, Artificial Sequence
  Description of Artificial Sequence: Synthetic oligonucleotide
  Sense strand starting at position 3425 of SEQ ID NO: 3686
aaggaaguggcuugaauau

SEQ ID NO: 286777 - RNA, 19 nt, Artificial Sequence
  Description of Artificial Sequence: Synthetic oligonucleotide
  Antisense strand to SEQ ID NO: 286776
auauucaagccacuuccuu

SEQ ID NO: 286778 - RNA, 19 nt, Artificial Sequence
  Description of Artificial Sequence: Synthetic oligonucleotide
  Sense strand starting at position 3518 of SEQ ID NO: 3686
ccaguauucucagcucgag

SEQ ID NO: 286779 - RNA, 19 nt, Artificial Sequence
  Description of Artificial Sequence: Synthetic oligonucleotide
  Antisense strand to SEQ ID NO: 286778
cucgagcugagaauacugg

SEQ ID NO: 286780 - RNA, 19 nt, Artificial Sequence
  Description of Artificial Sequence: Synthetic oligonucleotide
  Sense strand starting at position 3522 of SEQ ID NO: 3686
uauucucagcucgaguuaa

SEQ ID NO: 286781 - RNA, 19 nt, Artificial Sequence
  Description of Artificial Sequence: Synthetic oligonucleotide
  Antisense strand to SEQ ID NO: 286780
uuaacucgagcugagaaua

SEQ ID NO: 286782 - RNA, 19 nt, Artificial Sequence
  Description of Artificial Sequence: Synthetic oligonucleotide
  Sense strand starting at position 3571 of SEQ ID NO: 3686
ccugcauaaugugauauuu

SEQ ID NO: 286783 - RNA, 19 nt, Artificial Sequence
  Description of Artificial Sequence: Synthetic oligonucleotide
  Antisense strand to SEQ ID NO: 286782
aaauaucacauuaugcagg

SEQ ID NO: 286784 - RNA, 19 nt, Artificial Sequence
  Description of Artificial Sequence: Synthetic oligonucleotide
  Sense strand starting at position 3573 of SEQ ID NO: 3686
ugcauaaugugauauuuga

SEQ ID NO: 286785 - RNA, 19 nt, Artificial Sequence
  Description of Artificial Sequence: Synthetic oligonucleotide
  Antisense strand to SEQ ID NO: 286784
ucaaauaucacauuaugca

SEQ ID NO: 286786 - RNA, 19 nt, Artificial Sequence
  Description of Artificial Sequence: Synthetic oligonucleotide
  Sense strand starting at position 3607 of SEQ ID NO: 3686
gccauaucauggccugaaa

SEQ ID NO: 286787 - RNA, 19 nt, Artificial Sequence
  Description of Artificial Sequence: Synthetic oligonucleotide
  Antisense strand to SEQ ID NO: 286786
uuucaggccaugauauggc

SEQ ID NO: 286788 - RNA, 19 nt, Artificial Sequence
  Description of Artificial Sequence: Synthetic oligonucleotide
  Sense strand starting at position 3825 of SEQ ID NO: 3686
ucaaguuacucggcacuua

SEQ ID NO: 286789 - RNA, 19 nt, Artificial Sequence
  Description of Artificial Sequence: Synthetic oligonucleotide
  Antisense strand to SEQ ID NO: 286788
uaagugccgaguaacuuga

SEQ ID NO: 286790 - RNA, 19 nt, Artificial Sequence
  Description of Artificial Sequence: Synthetic oligonucleotide
  Sense strand starting at position 3826 of SEQ ID NO: 3686
caaguuacucggcacuuaa

SEQ ID NO: 286791 - RNA, 19 nt, Artificial Sequence
  Description of Artificial Sequence: Synthetic oligonucleotide
  Antisense strand to SEQ ID NO: 286790
uuaagugccgaguaacuug

SEQ ID NO: 286792 - RNA, 19 nt, Artificial Sequence
  Description of Artificial Sequence: Synthetic oligonucleotide
  Sense strand starting at position 3907 of SEQ ID NO: 3686
gggcaagaauguguaauaa

SEQ ID NO: 286793 - RNA, 19 nt, Artificial Sequence
  Description of Artificial Sequence: Synthetic oligonucleotide
  Antisense strand to SEQ ID NO: 286792
uuauuacacauucuugccc

SEQ ID NO: 286794 - RNA, 19 nt, Artificial Sequence
  Description of Artificial Sequence: Synthetic oligonucleotide
  Sense strand starting at position 3911 of SEQ ID NO: 3686
aagaauguguaauaagaca

SEQ ID NO: 286795 - RNA, 19 nt, Artificial Sequence
  Description of Artificial Sequence: Synthetic oligonucleotide
  Antisense strand to SEQ ID NO: 286794
ugucuuauuacacauucuu

SEQ ID NO: 286796 - RNA, 19 nt, Artificial Sequence
  Description of Artificial Sequence: Synthetic oligonucleotide
  Sense strand starting at position 191 of SEQ ID NO: 3688
accucaguuucccucaagu

SEQ ID NO: 286797 - RNA, 19 nt, Artificial Sequence
  Description of Artificial Sequence: Synthetic oligonucleotide
  Antisense strand to SEQ ID NO: 286796
acuugagggaaacugaggu

SEQ ID NO: 286798 - RNA, 19 nt, Artificial Sequence
  Description of Artificial Sequence: Synthetic oligonucleotide
  Sense strand starting at position 193 of SEQ ID NO: 3688
cucaguuucccucaaguau

SEQ ID NO: 286799 - RNA, 19 nt, Artificial Sequence
  Description of Artificial Sequence: Synthetic oligonucleotide
  Antisense strand to SEQ ID NO: 286798
auacuugagggaaacugag

SEQ ID NO: 286800 - RNA, 19 nt, Artificial Sequence
  Description of Artificial Sequence: Synthetic oligonucleotide
  Sense strand starting at position 240 of SEQ ID NO: 3688
uugaguuacuccucaucuu

SEQ ID NO: 286801 - RNA, 19 nt, Artificial Sequence
  Description of Artificial Sequence: Synthetic oligonucleotide
  Antisense strand to SEQ ID NO: 286800
aagaugaggaguaacucaa

SEQ ID NO: 286802 - RNA, 19 nt, Artificial Sequence
  Description of Artificial Sequence: Synthetic oligonucleotide
  Sense strand starting at position 304 of SEQ ID NO: 3688
ugaggaguccgucaacauc

SEQ ID NO: 286803 - RNA, 19 nt, Artificial Sequence
  Description of Artificial Sequence: Synthetic oligonucleotide
  Antisense strand to SEQ ID NO: 286802
gauguugacggacuccuca

SEQ ID NO: 286804 - RNA, 19 nt, Artificial Sequence
  Description of Artificial Sequence: Synthetic oligonucleotide
  Sense strand starting at position 307 of SEQ ID NO: 3688
ggaguccgucaacaucaaa

SEQ ID NO: 286805 - RNA, 19 nt, Artificial Sequence
  Description of Artificial Sequence: Synthetic oligonucleotide
  Antisense strand to SEQ ID NO: 286804
uuugauguugacggacucc

SEQ ID NO: 286806 - RNA, 19 nt, Artificial Sequence
  Description of Artificial Sequence: Synthetic oligonucleotide
  Sense strand starting at position 438 of SEQ ID NO: 3688
ccuacaaggcuaugaagau

SEQ ID NO: 286807 - RNA, 19 nt, Artificial Sequence
  Description of Artificial Sequence: Synthetic oligonucleotide
  Antisense strand to SEQ ID NO: 286806
aucuucauagccuuguagg

SEQ ID NO: 286808 - RNA, 19 nt, Artificial Sequence
  Description of Artificial Sequence: Synthetic oligonucleotide
  Sense strand starting at position 439 of SEQ ID NO: 3688
cuacaaggcuaugaagauu

SEQ ID NO: 286809 - RNA, 19 nt, Artificial Sequence
  Description of Artificial Sequence: Synthetic oligonucleotide
  Antisense strand to SEQ ID NO: 286808
aaucuucauagccuuguag

SEQ ID NO: 286810 - RNA, 19 nt, Artificial Sequence
  Description of Artificial Sequence: Synthetic oligonucleotide
  Sense strand starting at position 538 of SEQ ID NO: 3688
cgaaguagcaaguacuuau

SEQ ID NO: 286811 - RNA, 19 nt, Artificial Sequence
  Description of Artificial Sequence: Synthetic oligonucleotide
  Antisense strand to SEQ ID NO: 286810
auaaguacuugcuacuucg

SEQ ID NO: 286812 - RNA, 19 nt, Artificial Sequence
  Description of Artificial Sequence: Synthetic oligonucleotide
  Sense strand starting at position 541 of SEQ ID NO: 3688
aguagcaaguacuuaugaa

SEQ ID NO: 286813 - RNA, 19 nt, Artificial Sequence
  Description of Artificial Sequence: Synthetic oligonucleotide
  Antisense strand to SEQ ID NO: 286812
uucauaaguacuugcuacu

SEQ ID NO: 286814 - RNA, 19 nt, Artificial Sequence
  Description of Artificial Sequence: Synthetic oligonucleotide
  Sense strand starting at position 545 of SEQ ID NO: 3688
gcaaguacuuaugaaugua

SEQ ID NO: 286815 - RNA, 19 nt, Artificial Sequence
  Description of Artificial Sequence: Synthetic oligonucleotide
  Antisense strand to SEQ ID NO: 286814
uacauucauaaguacuugc

SEQ ID NO: 286816 - RNA, 19 nt, Artificial Sequence
  Description of Artificial Sequence: Synthetic oligonucleotide
  Sense strand starting at position 548 of SEQ ID NO: 3688
aguacuuaugaauguaucu

SEQ ID NO: 286817 - RNA, 19 nt, Artificial Sequence
  Description of Artificial Sequence: Synthetic oligonucleotide
  Antisense strand to SEQ ID NO: 286816
agauacauucauaaguacu

SEQ ID NO: 286818 - RNA, 19 nt, Artificial Sequence
  Description of Artificial Sequence: Synthetic oligonucleotide
  Sense strand starting at position 652 of SEQ ID NO: 3688
cgugacuaauaauaacaua

SEQ ID NO: 286819 - RNA, 19 nt, Artificial Sequence
  Description of Artificial Sequence: Synthetic oligonucleotide
  Antisense strand to SEQ ID NO: 286818
uauguuauuauuagucacg

SEQ ID NO: 286820 - RNA, 19 nt, Artificial Sequence
  Description of Artificial Sequence: Synthetic oligonucleotide
  Sense strand starting at position 725 of SEQ ID NO: 3688
auagucaugccucgcugaa

SEQ ID NO: 286821 - RNA, 19 nt, Artificial Sequence
  Description of Artificial Sequence: Synthetic oligonucleotide
  Antisense strand to SEQ ID NO: 286820
uucagcgaggcaugacuau

SEQ ID NO: 286822 - RNA, 19 nt, Artificial Sequence
  Description of Artificial Sequence: Synthetic oligonucleotide
  Sense strand starting at position 727 of SEQ ID NO: 3688
agucaugccucgcugaaca

SEQ ID NO: 286823 - RNA, 19 nt, Artificial Sequence
  Description of Artificial Sequence: Synthetic oligonucleotide
  Antisense strand to SEQ ID NO: 286822
uguucagcgaggcaugacu

SEQ ID NO: 286824 - RNA, 19 nt, Artificial Sequence
  Description of Artificial Sequence: Synthetic oligonucleotide
  Sense strand starting at position 749 of SEQ ID NO: 3688
ggaacaggaucugagaaau

SEQ ID NO: 286825 - RNA, 19 nt, Artificial Sequence
  Description of Artificial Sequence: Synthetic oligonucleotide
  Antisense strand to SEQ ID NO: 286824
auuucucagauccuguucc

SEQ ID NO: 286826 - RNA, 19 nt, Artificial Sequence
  Description of Artificial Sequence: Synthetic oligonucleotide
  Sense strand starting at position 778 of SEQ ID NO: 3688
gcaauucugucguugugca

SEQ ID NO: 286827 - RNA, 19 nt, Artificial Sequence
  Description of Artificial Sequence: Synthetic oligonucleotide
  Antisense strand to SEQ ID NO: 286826
ugcacaacgacagaauugc

SEQ ID NO: 286828 - RNA, 19 nt, Artificial Sequence
  Description of Artificial Sequence: Synthetic oligonucleotide
  Sense strand starting at position 779 of SEQ ID NO: 3688
caauucugucguugugcaa

SEQ ID NO: 286829 - RNA, 19 nt, Artificial Sequence
  Description of Artificial Sequence: Synthetic oligonucleotide
  Antisense strand to SEQ ID NO: 286828
uugcacaacgacagaauug

SEQ ID NO: 286830 - RNA, 19 nt, Artificial Sequence
  Description of Artificial Sequence: Synthetic oligonucleotide
  Sense strand starting at position 800 of SEQ ID NO: 3688
cucacaguauacuuacaga

SEQ ID NO: 286831 - RNA, 19 nt, Artificial Sequence
  Description of Artificial Sequence: Synthetic oligonucleotide
  Antisense strand to SEQ ID NO: 286830
ucuguaaguauacugugag

SEQ ID NO: 286832 - RNA, 19 nt, Artificial Sequence
  Description of Artificial Sequence: Synthetic oligonucleotide
  Sense strand starting at position 845 of SEQ ID NO: 3688
accuauauguaggcuauau

SEQ ID NO: 286833 - RNA, 19 nt, Artificial Sequence
  Description of Artificial Sequence: Synthetic oligonucleotide
  Antisense strand to SEQ ID NO: 286832
auauagccuacauauaggu

SEQ ID NO: 286834 - RNA, 19 nt, Artificial Sequence
  Description of Artificial Sequence: Synthetic oligonucleotide
  Sense strand starting at position 849 of SEQ ID NO: 3688
auauguaggcuauauggua

SEQ ID NO: 286835 - RNA, 19 nt, Artificial Sequence
  Description of Artificial Sequence: Synthetic oligonucleotide
  Antisense strand to SEQ ID NO: 286834
uaccauauagccuacauau

SEQ ID NO: 286836 - RNA, 19 nt, Artificial Sequence
  Description of Artificial Sequence: Synthetic oligonucleotide
  Sense strand starting at position 856 of SEQ ID NO: 3688
ggcuauaugguauaaucaa

SEQ ID NO: 286837 - RNA, 19 nt, Artificial Sequence
  Description of Artificial Sequence: Synthetic oligonucleotide
  Antisense strand to SEQ ID NO: 286836
uugauuauaccauauagcc

SEQ ID NO: 286838 - RNA, 19 nt, Artificial Sequence
  Description of Artificial Sequence: Synthetic oligonucleotide
  Sense strand starting at position 870 of SEQ ID NO: 3688
aucaauugcuccuaggcua

SEQ ID NO: 286839 - RNA, 19 nt, Artificial Sequence
  Description of Artificial Sequence: Synthetic oligonucleotide
  Antisense strand to SEQ ID NO: 286838
uagccuaggagcaauugau

SEQ ID NO: 286840 - RNA, 19 nt, Artificial Sequence
  Description of Artificial Sequence: Synthetic oligonucleotide
  Sense strand starting at position 932 of SEQ ID NO: 3688
guauuuguguaguguuuau

SEQ ID NO: 286841 - RNA, 19 nt, Artificial Sequence
  Description of Artificial Sequence: Synthetic oligonucleotide
  Antisense strand to SEQ ID NO: 286840
auaaacacuacacaaauac

SEQ ID NO: 286842 - RNA, 19 nt, Artificial Sequence
  Description of Artificial Sequence: Synthetic oligonucleotide
  Sense strand starting at position 936 of SEQ ID NO: 3688
uuguguaguguuuaucuaa

SEQ ID NO: 286843 - RNA, 19 nt, Artificial Sequence
  Description of Artificial Sequence: Synthetic oligonucleotide
  Antisense strand to SEQ ID NO: 286842
uuagauaaacacuacacaa

SEQ ID NO: 286844 - RNA, 19 nt, Artificial Sequence
  Description of Artificial Sequence: Synthetic oligonucleotide
  Sense strand starting at position 939 of SEQ ID NO: 3688
uguaguguuuaucuaaaca

SEQ ID NO: 286845 - RNA, 19 nt, Artificial Sequence
  Description of Artificial Sequence: Synthetic oligonucleotide
  Antisense strand to SEQ ID NO: 286844
uguuuagauaaacacuaca

SEQ ID NO: 286846 - RNA, 19 nt, Artificial Sequence
  Description of Artificial Sequence: Synthetic oligonucleotide
  Sense strand starting at position 1447 of SEQ ID NO: 3688
gcggucuguccuugaccua

SEQ ID NO: 286847 - RNA, 19 nt, Artificial Sequence
  Description of Artificial Sequence: Synthetic oligonucleotide
  Antisense strand to SEQ ID NO: 286846
uaggucaaggacagaccgc

SEQ ID NO: 286848 - RNA, 19 nt, Artificial Sequence
  Description of Artificial Sequence: Synthetic oligonucleotide
  Sense strand starting at position 1448 of SEQ ID NO: 3688
cggucuguccuugaccuaa

SEQ ID NO: 286849 - RNA, 19 nt, Artificial Sequence
  Description of Artificial Sequence: Synthetic oligonucleotide
  Antisense strand to SEQ ID NO: 286848
uuaggucaaggacagaccg

SEQ ID NO: 286850 - RNA, 19 nt, Artificial Sequence
  Description of Artificial Sequence: Synthetic oligonucleotide
  Sense strand starting at position 1461 of SEQ ID NO: 3688
accuaaacgucguuaugag

SEQ ID NO: 286851 - RNA, 19 nt, Artificial Sequence
  Description of Artificial Sequence: Synthetic oligonucleotide
  Antisense strand to SEQ ID NO: 286850
cucauaacgacguuuaggu

SEQ ID NO: 286852 - RNA, 19 nt, Artificial Sequence
  Description of Artificial Sequence: Synthetic oligonucleotide
  Sense strand starting at position 1581 of SEQ ID NO: 3688
ugugucucaugguaaaucu

SEQ ID NO: 286853 - RNA, 19 nt, Artificial Sequence
  Description of Artificial Sequence: Synthetic oligonucleotide
  Antisense strand to SEQ ID NO: 286852
agauuuaccaugagacaca

SEQ ID NO: 286854 - RNA, 19 nt, Artificial Sequence
  Description of Artificial Sequence: Synthetic oligonucleotide
  Sense strand starting at position 1592 of SEQ ID NO: 3688
guaaaucugccacgaguuc

SEQ ID NO: 286855 - RNA, 19 nt, Artificial Sequence
  Description of Artificial Sequence: Synthetic oligonucleotide
  Antisense strand to SEQ ID NO: 286854
gaacucguggcagauuuac

SEQ ID NO: 286856 - RNA, 19 nt, Artificial Sequence
  Description of Artificial Sequence: Synthetic oligonucleotide
  Sense strand starting at position 1649 of SEQ ID NO: 3688
cuucuuuaggaaugucaac

SEQ ID NO: 286857 - RNA, 19 nt, Artificial Sequence
  Description of Artificial Sequence: Synthetic oligonucleotide
  Antisense strand to SEQ ID NO: 286856
guugacauuccuaaagaag

SEQ ID NO: 286858 - RNA, 19 nt, Artificial Sequence
  Description of Artificial Sequence: Synthetic oligonucleotide
  Sense strand starting at position 1838 of SEQ ID NO: 3688
gggagcaguccacaucaca

SEQ ID NO: 286859 - RNA, 19 nt, Artificial Sequence
  Description of Artificial Sequence: Synthetic oligonucleotide
  Antisense strand to SEQ ID NO: 286858
ugugauguggacugcuccc

SEQ ID NO: 286860 - RNA, 19 nt, Artificial Sequence
  Description of Artificial Sequence: Synthetic oligonucleotide
  Sense strand starting at position 1877 of SEQ ID NO: 3688
gcaggacuuuaccagaacu

SEQ ID NO: 286861 - RNA, 19 nt, Artificial Sequence
  Description of Artificial Sequence: Synthetic oligonucleotide
  Antisense strand to SEQ ID NO: 286860
aguucugguaaaguccugc

SEQ ID NO: 286862 - RNA, 19 nt, Artificial Sequence
  Description of Artificial Sequence: Synthetic oligonucleotide
  Sense strand starting at position 2262 of SEQ ID NO: 3688
ugccuaacuuccgagaauc

SEQ ID NO: 286863 - RNA, 19 nt, Artificial Sequence
  Description of Artificial Sequence: Synthetic oligonucleotide
  Antisense strand to SEQ ID NO: 286862
gauucucggaaguuaggca

SEQ ID NO: 286864 - RNA, 19 nt, Artificial Sequence
  Description of Artificial Sequence: Synthetic oligonucleotide
  Sense strand starting at position 2855 of SEQ ID NO: 3688
cgaagucauuuccgaaguc

SEQ ID NO: 286865 - RNA, 19 nt, Artificial Sequence
  Description of Artificial Sequence: Synthetic oligonucleotide
  Antisense strand to SEQ ID NO: 286864
gacuucggaaaugacuucg

SEQ ID NO: 286866 - RNA, 19 nt, Artificial Sequence
  Description of Artificial Sequence: Synthetic oligonucleotide
  Sense strand starting at position 3365 of SEQ ID NO: 3688
cccaguuuggcgugacuca

SEQ ID NO: 286867 - RNA, 19 nt, Artificial Sequence
  Description of Artificial Sequence: Synthetic oligonucleotide
  Antisense strand to SEQ ID NO: 286866
ugagucacgccaaacuggg

SEQ ID NO: 286868 - RNA, 19 nt, Artificial Sequence
  Description of Artificial Sequence: Synthetic oligonucleotide
  Sense strand starting at position 3519 of SEQ ID NO: 3688
ucucuuaccggcugggauu

SEQ ID NO: 286869 - RNA, 19 nt, Artificial Sequence
  Description of Artificial Sequence: Synthetic oligonucleotide
  Antisense strand to SEQ ID NO: 286868
aaucccagccgguaagaga

SEQ ID NO: 286870 - RNA, 19 nt, Artificial Sequence
  Description of Artificial Sequence: Synthetic oligonucleotide
  Sense strand starting at position 3632 of SEQ ID NO: 3688
uccguaugucguuagagca

SEQ ID NO: 286871 - RNA, 19 nt, Artificial Sequence
  Description of Artificial Sequence: Synthetic oligonucleotide
  Antisense strand to SEQ ID NO: 286870
ugcucuaacgacauacgga

SEQ ID NO: 286872 - RNA, 19 nt, Artificial Sequence
  Description of Artificial Sequence: Synthetic oligonucleotide
  Sense strand starting at position 3640 of SEQ ID NO: 3688
ucguuagagcacugggaaa

SEQ ID NO: 286873 - RNA, 19 nt, Artificial Sequence
  Description of Artificial Sequence: Synthetic oligonucleotide
  Antisense strand to SEQ ID NO: 286872
uuucccagugcucuaacga

SEQ ID NO: 286874 - RNA, 19 nt, Artificial Sequence
  Description of Artificial Sequence: Synthetic oligonucleotide
  Sense strand starting at position 3978 of SEQ ID NO: 3688
ugaauuaacuagggaucug

SEQ ID NO: 286875 - RNA, 19 nt, Artificial Sequence
  Description of Artificial Sequence: Synthetic oligonucleotide
  Antisense strand to SEQ ID NO: 286874
cagaucccuaguuaauuca

SEQ ID NO: 286876 - RNA, 19 nt, Artificial Sequence
  Description of Artificial Sequence: Synthetic oligonucleotide
  Sense strand starting at position 40 of SEQ ID NO: 3687
cggucuguccuugaccuaa

SEQ ID NO: 286877 - RNA, 19 nt, Artificial Sequence
  Description of Artificial Sequence: Synthetic oligonucleotide
  Antisense strand to SEQ ID NO: 286876
uuaggucaaggacagaccg

SEQ ID NO: 286878 - RNA, 19 nt, Artificial Sequence
  Description of Artificial Sequence: Synthetic oligonucleotide
  Sense strand starting at position 241 of SEQ ID NO: 3687
cuucuuuaggaaugucaac

SEQ ID NO: 286879 - RNA, 19 nt, Artificial Sequence
  Description of Artificial Sequence: Synthetic oligonucleotide
  Antisense strand to SEQ ID NO: 286878
guugacauuccuaaagaag

SEQ ID NO: 286880 - RNA, 19 nt, Artificial Sequence
  Description of Artificial Sequence: Synthetic oligonucleotide
  Sense strand starting at position 430 of SEQ ID NO: 3687
gggagcaguccacaucaca

SEQ ID NO: 286881 - RNA, 19 nt, Artificial Sequence
  Description of Artificial Sequence: Synthetic oligonucleotide
  Antisense strand to SEQ ID NO: 286880
ugugauguggacugcuccc

SEQ ID NO: 286882 - RNA, 19 nt, Artificial Sequence
  Description of Artificial Sequence: Synthetic oligonucleotide
  Sense strand starting at position 2232 of SEQ ID NO: 3687
ucguuagagcacugggaaa

SEQ ID NO: 286883 - RNA, 19 nt, Artificial Sequence
  Description of Artificial Sequence: Synthetic oligonucleotide
  Antisense strand to SEQ ID NO: 286882
uuucccagugcucuaacga

SEQ ID NO: 286884 - RNA, 19 nt, Artificial Sequence
  Description of Artificial Sequence: Synthetic oligonucleotide
  Sense strand starting at position 2646 of SEQ ID NO: 3687
uggacucuuacaugguaag

SEQ ID NO: 286885 - RNA, 19 nt, Artificial Sequence
  Description of Artificial Sequence: Synthetic oligonucleotide
  Antisense strand to SEQ ID NO: 286884
cuuaccauguaagagucca

SEQ ID NO: 286886 - RNA, 19 nt, Artificial Sequence
  Description of Artificial Sequence: Synthetic oligonucleotide
  Sense strand starting at position 2647 of SEQ ID NO: 3687
ggacucuuacaugguaaga

SEQ ID NO: 286887 - RNA, 19 nt, Artificial Sequence
  Description of Artificial Sequence: Synthetic oligonucleotide
  Antisense strand to SEQ ID NO: 286886
ucuuaccauguaagagucc

SEQ ID NO: 286888 - RNA, 19 nt, Artificial Sequence
  Description of Artificial Sequence: Synthetic oligonucleotide
  Sense strand starting at position 2778 of SEQ ID NO: 3687
gucaacauuucggaugauu

SEQ ID NO: 286889 - RNA, 19 nt, Artificial Sequence
  Description of Artificial Sequence: Synthetic oligonucleotide
  Antisense strand to SEQ ID NO: 286888
aaucauccgaaauguugac

SEQ ID NO: 286890 - RNA, 19 nt, Artificial Sequence
  Description of Artificial Sequence: Synthetic oligonucleotide
  Sense strand starting at position 2796 of SEQ ID NO: 3687
ucaggcuuucugggaguca

SEQ ID NO: 286891 - RNA, 19 nt, Artificial Sequence
  Description of Artificial Sequence: Synthetic oligonucleotide
  Antisense strand to SEQ ID NO: 286890
ugacucccagaaagccuga

SEQ ID NO: 286892 - RNA, 19 nt, Artificial Sequence
  Description of Artificial Sequence: Synthetic oligonucleotide
  Sense strand starting at position 2823 of SEQ ID NO: 3687
cauagucauugguuugaua

SEQ ID NO: 286893 - RNA, 19 nt, Artificial Sequence
  Description of Artificial Sequence: Synthetic oligonucleotide
  Antisense strand to SEQ ID NO: 286892
uaucaaaccaaugacuaug

SEQ ID NO: 286894 - RNA, 19 nt, Artificial Sequence
  Description of Artificial Sequence: Synthetic oligonucleotide
  Sense strand starting at position 2825 of SEQ ID NO: 3687
uagucauugguuugauaug

SEQ ID NO: 286895 - RNA, 19 nt, Artificial Sequence
  Description of Artificial Sequence: Synthetic oligonucleotide
  Antisense strand to SEQ ID NO: 286894
cauaucaaaccaaugacua

SEQ ID NO: 286896 - RNA, 19 nt, Artificial Sequence
  Description of Artificial Sequence: Synthetic oligonucleotide
  Sense strand starting at position 2830 of SEQ ID NO: 3687
auugguuugauaugcagga

SEQ ID NO: 286897 - RNA, 19 nt, Artificial Sequence
  Description of Artificial Sequence: Synthetic oligonucleotide
  Antisense strand to SEQ ID NO: 286896
uccugcauaucaaaccaau

SEQ ID NO: 286898 - RNA, 19 nt, Artificial Sequence
  Description of Artificial Sequence: Synthetic oligonucleotide
  Sense strand starting at position 2831 of SEQ ID NO: 3687
uugguuugauaugcaggaa

SEQ ID NO: 286899 - RNA, 19 nt, Artificial Sequence
  Description of Artificial Sequence: Synthetic oligonucleotide
  Antisense strand to SEQ ID NO: 286898
uuccugcauaucaaaccaa

SEQ ID NO: 286900 - RNA, 19 nt, Artificial Sequence
  Description of Artificial Sequence: Synthetic oligonucleotide
  Sense strand starting at position 2832 of SEQ ID NO: 3687
ugguuugauaugcaggaau

SEQ ID NO: 286901 - RNA, 19 nt, Artificial Sequence
  Description of Artificial Sequence: Synthetic oligonucleotide
  Antisense strand to SEQ ID NO: 286900
auuccugcauaucaaacca

SEQ ID NO: 286902 - RNA, 19 nt, Artificial Sequence
  Description of Artificial Sequence: Synthetic oligonucleotide
  Sense strand starting at position 2834 of SEQ ID NO: 3687
guuugauaugcaggaauaa

SEQ ID NO: 286903 - RNA, 19 nt, Artificial Sequence
  Description of Artificial Sequence: Synthetic oligonucleotide
  Antisense strand to SEQ ID NO: 286902
uuauuccugcauaucaaac

SEQ ID NO: 286904 - RNA, 19 nt, Artificial Sequence
  Description of Artificial Sequence: Synthetic oligonucleotide
  Sense strand starting at position 2892 of SEQ ID NO: 3687
uaaagagaguaguugcaga

SEQ ID NO: 286905 - RNA, 19 nt, Artificial Sequence
  Description of Artificial Sequence: Synthetic oligonucleotide
  Antisense strand to SEQ ID NO: 286904
ucugcaacuacucucuuua

SEQ ID NO: 286906 - RNA, 19 nt, Artificial Sequence
  Description of Artificial Sequence: Synthetic oligonucleotide
  Sense strand starting at position 2897 of SEQ ID NO: 3687
agaguaguugcagaacauc

SEQ ID NO: 286907 - RNA, 19 nt, Artificial Sequence
  Description of Artificial Sequence: Synthetic oligonucleotide
  Antisense strand to SEQ ID NO: 286906
gauguucugcaacuacucu

SEQ ID NO: 286908 - RNA, 19 nt, Artificial Sequence
  Description of Artificial Sequence: Synthetic oligonucleotide
  Sense strand starting at position 2905 of SEQ ID NO: 3687
ugcagaacaucuuuguaag

SEQ ID NO: 286909 - RNA, 19 nt, Artificial Sequence
  Description of Artificial Sequence: Synthetic oligonucleotide
  Antisense strand to SEQ ID NO: 286908
cuuacaaagauguucugca

SEQ ID NO: 286910 - RNA, 19 nt, Artificial Sequence
  Description of Artificial Sequence: Synthetic oligonucleotide
  Sense strand starting at position 2906 of SEQ ID NO: 3687
gcagaacaucuuuguaaga

SEQ ID NO: 286911 - RNA, 19 nt, Artificial Sequence
  Description of Artificial Sequence: Synthetic oligonucleotide
  Antisense strand to SEQ ID NO: 286910
ucuuacaaagauguucugc

SEQ ID NO: 286912 - RNA, 19 nt, Artificial Sequence
  Description of Artificial Sequence: Synthetic oligonucleotide
  Sense strand starting at position 3063 of SEQ ID NO: 3687
gcuacuuguggcuacugau

SEQ ID NO: 286913 - RNA, 19 nt, Artificial Sequence
  Description of Artificial Sequence: Synthetic oligonucleotide
  Antisense strand to SEQ ID NO: 286912
aucaguagccacaaguagc

SEQ ID NO: 286914 - RNA, 19 nt, Artificial Sequence
  Description of Artificial Sequence: Synthetic oligonucleotide
  Sense strand starting at position 3069 of SEQ ID NO: 3687
uguggcuacugauugaaca

SEQ ID NO: 286915 - RNA, 19 nt, Artificial Sequence
  Description of Artificial Sequence: Synthetic oligonucleotide
  Antisense strand to SEQ ID NO: 286914
uguucaaucaguagccaca

SEQ ID NO: 286916 - RNA, 19 nt, Artificial Sequence
  Description of Artificial Sequence: Synthetic oligonucleotide
  Sense strand starting at position 3079 of SEQ ID NO: 3687
gauugaacacucggaaugu

SEQ ID NO: 286917 - RNA, 19 nt, Artificial Sequence
  Description of Artificial Sequence: Synthetic oligonucleotide
  Antisense strand to SEQ ID NO: 286916
acauuccgaguguucaauc

SEQ ID NO: 286918 - RNA, 19 nt, Artificial Sequence
  Description of Artificial Sequence: Synthetic oligonucleotide
  Sense strand starting at position 3083 of SEQ ID NO: 3687
gaacacucggaauguaugu

SEQ ID NO: 286919 - RNA, 19 nt, Artificial Sequence
  Description of Artificial Sequence: Synthetic oligonucleotide
  Antisense strand to SEQ ID NO: 286918
acauacauuccgaguguuc

SEQ ID NO: 286920 - RNA, 19 nt, Artificial Sequence
  Description of Artificial Sequence: Synthetic oligonucleotide
  Sense strand starting at position 3099 of SEQ ID NO: 3687
uguagcuaggcugaaauua

SEQ ID NO: 286921 - RNA, 19 nt, Artificial Sequence
  Description of Artificial Sequence: Synthetic oligonucleotide
  Antisense strand to SEQ ID NO: 286920
uaauuucagccuagcuaca

SEQ ID NO: 286922 - RNA, 19 nt, Artificial Sequence
  Description of Artificial Sequence: Synthetic oligonucleotide
  Sense strand starting at position 3110 of SEQ ID NO: 3687
ugaaauuagaugugcugua

SEQ ID NO: 286923 - RNA, 19 nt, Artificial Sequence
  Description of Artificial Sequence: Synthetic oligonucleotide
  Antisense strand to SEQ ID NO: 286922
uacagcacaucuaauuuca

SEQ ID NO: 286924 - RNA, 19 nt, Artificial Sequence
  Description of Artificial Sequence: Synthetic oligonucleotide
  Sense strand starting at position 3111 of SEQ ID NO: 3687
gaaauuagaugugcuguaa

SEQ ID NO: 286925 - RNA, 19 nt, Artificial Sequence
  Description of Artificial Sequence: Synthetic oligonucleotide
  Antisense strand to SEQ ID NO: 286924
uuacagcacaucuaauuuc

SEQ ID NO: 286926 - RNA, 19 nt, Artificial Sequence
  Description of Artificial Sequence: Synthetic oligonucleotide
  Sense strand starting at position 3186 of SEQ ID NO: 3687
agcuuuccuguugacugaa

SEQ ID NO: 286927 - RNA, 19 nt, Artificial Sequence
  Description of Artificial Sequence: Synthetic oligonucleotide
  Antisense strand to SEQ ID NO: 286926
uucagucaacaggaaagcu

SEQ ID NO: 286928 - RNA, 19 nt, Artificial Sequence
  Description of Artificial Sequence: Synthetic oligonucleotide
  Sense strand starting at position 3334 of SEQ ID NO: 3687
agugcuagucuagauuaau

SEQ ID NO: 286929 - RNA, 19 nt, Artificial Sequence
  Description of Artificial Sequence: Synthetic oligonucleotide
  Antisense strand to SEQ ID NO: 286928
auuaaucuagacuagcacu

SEQ ID NO: 286930 - RNA, 19 nt, Artificial Sequence
  Description of Artificial Sequence: Synthetic oligonucleotide
  Sense strand starting at position 3337 of SEQ ID NO: 3687
gcuagucuagauuaauaau

SEQ ID NO: 286931 - RNA, 19 nt, Artificial Sequence
  Description of Artificial Sequence: Synthetic oligonucleotide
  Antisense strand to SEQ ID NO: 286930
auuauuaaucuagacuagc

SEQ ID NO: 286932 - RNA, 19 nt, Artificial Sequence
  Description of Artificial Sequence: Synthetic oligonucleotide
  Sense strand starting at position 3357 of SEQ ID NO: 3687
aagaaaguuugauugccau

SEQ ID NO: 286933 - RNA, 19 nt, Artificial Sequence
  Description of Artificial Sequence: Synthetic oligonucleotide
  Antisense strand to SEQ ID NO: 286932
auggcaaucaaacuuucuu

SEQ ID NO: 286934 - RNA, 19 nt, Artificial Sequence
  Description of Artificial Sequence: Synthetic oligonucleotide
  Sense strand starting at position 3387 of SEQ ID NO: 3687
ggcaaauucuuagcuccaa

SEQ ID NO: 286935 - RNA, 19 nt, Artificial Sequence
  Description of Artificial Sequence: Synthetic oligonucleotide
  Antisense strand to SEQ ID NO: 286934
uuggagcuaagaauuugcc

SEQ ID NO: 286936 - RNA, 19 nt, Artificial Sequence
  Description of Artificial Sequence: Synthetic oligonucleotide
  Sense strand starting at position 3413 of SEQ ID NO: 3687
auauuacuguggcuuaauu

SEQ ID NO: 286937 - RNA, 19 nt, Artificial Sequence
  Description of Artificial Sequence: Synthetic oligonucleotide
  Antisense strand to SEQ ID NO: 286936
aauuaagccacaguaauau

SEQ ID NO: 286938 - RNA, 19 nt, Artificial Sequence
  Description of Artificial Sequence: Synthetic oligonucleotide
  Sense strand starting at position 3505 of SEQ ID NO: 3687
ugaaacuguucuguauuau

SEQ ID NO: 286939 - RNA, 19 nt, Artificial Sequence
  Description of Artificial Sequence: Synthetic oligonucleotide
  Antisense strand to SEQ ID NO: 286938
auaauacagaacaguuuca

SEQ ID NO: 286940 - RNA, 19 nt, Artificial Sequence
  Description of Artificial Sequence: Synthetic oligonucleotide
  Sense strand starting at position 3516 of SEQ ID NO: 3687
uguauuauccuguaauggu

SEQ ID NO: 286941 - RNA, 19 nt, Artificial Sequence
  Description of Artificial Sequence: Synthetic oligonucleotide
  Antisense strand to SEQ ID NO: 286940
accauuacaggauaauaca

SEQ ID NO: 286942 - RNA, 19 nt, Artificial Sequence
  Description of Artificial Sequence: Synthetic oligonucleotide
  Sense strand starting at position 3601 of SEQ ID NO: 3687
guagacuauugacuuuagu

SEQ ID NO: 286943 - RNA, 19 nt, Artificial Sequence
  Description of Artificial Sequence: Synthetic oligonucleotide
  Antisense strand to SEQ ID NO: 286942
acuaaagucaauagucuac

SEQ ID NO: 286944 - RNA, 19 nt, Artificial Sequence
  Description of Artificial Sequence: Synthetic oligonucleotide
  Sense strand starting at position 3829 of SEQ ID NO: 3687
cuggcaauguuacuugauu

SEQ ID NO: 286945 - RNA, 19 nt, Artificial Sequence
  Description of Artificial Sequence: Synthetic oligonucleotide
  Antisense strand to SEQ ID NO: 286944
aaucaaguaacauugccag

SEQ ID NO: 286946 - RNA, 19 nt, Artificial Sequence
  Description of Artificial Sequence: Synthetic oligonucleotide
  Sense strand starting at position 3835 of SEQ ID NO: 3687
auguuacuugauuggguua

SEQ ID NO: 286947 - RNA, 19 nt, Artificial Sequence
  Description of Artificial Sequence: Synthetic oligonucleotide
  Antisense strand to SEQ ID NO: 286946
uaacccaaucaaguaacau

SEQ ID NO: 286948 - RNA, 19 nt, Artificial Sequence
  Description of Artificial Sequence: Synthetic oligonucleotide
  Sense strand starting at position 3836 of SEQ ID NO: 3687
uguuacuugauuggguuaa

SEQ ID NO: 286949 - RNA, 19 nt, Artificial Sequence
  Description of Artificial Sequence: Synthetic oligonucleotide
  Antisense strand to SEQ ID NO: 286948
uuaacccaaucaaguaaca

SEQ ID NO: 286950 - RNA, 19 nt, Artificial Sequence
  Description of Artificial Sequence: Synthetic oligonucleotide
  Sense strand starting at position 3838 of SEQ ID NO: 3687
uuacuugauuggguuaauu

SEQ ID NO: 286951 - RNA, 19 nt, Artificial Sequence
  Description of Artificial Sequence: Synthetic oligonucleotide
  Antisense strand to SEQ ID NO: 286950
aauuaacccaaucaaguaa

SEQ ID NO: 286952 - RNA, 19 nt, Artificial Sequence
  Description of Artificial Sequence: Synthetic oligonucleotide
  Sense strand starting at position 3846 of SEQ ID NO: 3687
uuggguuaauuaucaacaa

SEQ ID NO: 286953 - RNA, 19 nt, Artificial Sequence
  Description of Artificial Sequence: Synthetic oligonucleotide
  Antisense strand to SEQ ID NO: 286952
uuguugauaauuaacccaa

SEQ ID NO: 286954 - RNA, 19 nt, Artificial Sequence
  Description of Artificial Sequence: Synthetic oligonucleotide
  Sense strand starting at position 3901 of SEQ ID NO: 3687
cuggcuuuauuugugcaaa

SEQ ID NO: 286955 - RNA, 19 nt, Artificial Sequence
  Description of Artificial Sequence: Synthetic oligonucleotide
  Antisense strand to SEQ ID NO: 286954
uuugcacaaauaaagccag

SEQ ID NO: 286956 - RNA, 19 nt, Artificial Sequence
  Description of Artificial Sequence: Synthetic oligonucleotide
  Sense strand starting at position 664 of SEQ ID NO: 3689
gagggauuggcuuguccau

SEQ ID NO: 286957 - RNA, 19 nt, Artificial Sequence
  Description of Artificial Sequence: Synthetic oligonucleotide
  Antisense strand to SEQ ID NO: 286956
auggacaagccaaucccuc

SEQ ID NO: 286958 - RNA, 19 nt, Artificial Sequence
  Description of Artificial Sequence: Synthetic oligonucleotide
  Sense strand starting at position 688 of SEQ ID NO: 3689
ucaucagaccggugaccau

SEQ ID NO: 286959 - RNA, 19 nt, Artificial Sequence
  Description of Artificial Sequence: Synthetic oligonucleotide
  Antisense strand to SEQ ID NO: 286958
auggucaccggucugauga

SEQ ID NO: 286960 - RNA, 19 nt, Artificial Sequence
  Description of Artificial Sequence: Synthetic oligonucleotide
  Sense strand starting at position 724 of SEQ ID NO: 3689
agcugugagcuucagggaa

SEQ ID NO: 286961 - RNA, 19 nt, Artificial Sequence
  Description of Artificial Sequence: Synthetic oligonucleotide
  Antisense strand to SEQ ID NO: 286960
uucccugaagcucacagcu

SEQ ID NO: 286962 - RNA, 19 nt, Artificial Sequence
  Description of Artificial Sequence: Synthetic oligonucleotide
  Sense strand starting at position 736 of SEQ ID NO: 3689
cagggaacccugcaugagu

SEQ ID NO: 286963 - RNA, 19 nt, Artificial Sequence
  Description of Artificial Sequence: Synthetic oligonucleotide
  Antisense strand to SEQ ID NO: 286962
acucaugcaggguucccug

SEQ ID NO: 286964 - RNA, 19 nt, Artificial Sequence
  Description of Artificial Sequence: Synthetic oligonucleotide
  Sense strand starting at position 780 of SEQ ID NO: 3689
aguggaaguuucuggauga

SEQ ID NO: 286965 - RNA, 19 nt, Artificial Sequence
  Description of Artificial Sequence: Synthetic oligonucleotide
  Antisense strand to SEQ ID NO: 286964
ucauccagaaacuuccacu

SEQ ID NO: 286966 - RNA, 19 nt, Artificial Sequence
  Description of Artificial Sequence: Synthetic oligonucleotide
  Sense strand starting at position 781 of SEQ ID NO: 3689
guggaaguuucuggaugac

SEQ ID NO: 286967 - RNA, 19 nt, Artificial Sequence
  Description of Artificial Sequence: Synthetic oligonucleotide
  Antisense strand to SEQ ID NO: 286966
gucauccagaaacuuccac

SEQ ID NO: 286968 - RNA, 19 nt, Artificial Sequence
  Description of Artificial Sequence: Synthetic oligonucleotide
  Sense strand starting at position 795 of SEQ ID NO: 3689
augacagaauguucuauag

SEQ ID NO: 286969 - RNA, 19 nt, Artificial Sequence
  Description of Artificial Sequence: Synthetic oligonucleotide
  Antisense strand to SEQ ID NO: 286968
cuauagaacauucugucau

SEQ ID NO: 286970 - RNA, 19 nt, Artificial Sequence
  Description of Artificial Sequence: Synthetic oligonucleotide
  Sense strand starting at position 1016 of SEQ ID NO: 3689
ugggaacagugaugugcuu

SEQ ID NO: 286971 - RNA, 19 nt, Artificial Sequence
  Description of Artificial Sequence: Synthetic oligonucleotide
  Antisense strand to SEQ ID NO: 286970
aagcacaucacuguuccca

SEQ ID NO: 286972 - RNA, 19 nt, Artificial Sequence
  Description of Artificial Sequence: Synthetic oligonucleotide
  Sense strand starting at position 1058 of SEQ ID NO: 3689
acggguuauuacuuuccca

SEQ ID NO: 286973 - RNA, 19 nt, Artificial Sequence
  Description of Artificial Sequence: Synthetic oligonucleotide
  Antisense strand to SEQ ID NO: 286972
ugggaaaguaauaacccgu

SEQ ID NO: 286974 - RNA, 19 nt, Artificial Sequence
  Description of Artificial Sequence: Synthetic oligonucleotide
  Sense strand starting at position 1062 of SEQ ID NO: 3689
guuauuacuuucccagcuu

SEQ ID NO: 286975 - RNA, 19 nt, Artificial Sequence
  Description of Artificial Sequence: Synthetic oligonucleotide
  Antisense strand to SEQ ID NO: 286974
aagcugggaaaguaauaac

SEQ ID NO: 286976 - RNA, 19 nt, Artificial Sequence
  Description of Artificial Sequence: Synthetic oligonucleotide
  Sense strand starting at position 1292 of SEQ ID NO: 3689
ugccuugccaguuggagaa

SEQ ID NO: 286977 - RNA, 19 nt, Artificial Sequence
  Description of Artificial Sequence: Synthetic oligonucleotide
  Antisense strand to SEQ ID NO: 286976
uucuccaacuggcaaggca

SEQ ID NO: 286978 - RNA, 19 nt, Artificial Sequence
  Description of Artificial Sequence: Synthetic oligonucleotide
  Sense strand starting at position 1363 of SEQ ID NO: 3689
cugugaggcucacuuguga

SEQ ID NO: 286979 - RNA, 19 nt, Artificial Sequence
  Description of Artificial Sequence: Synthetic oligonucleotide
  Antisense strand to SEQ ID NO: 286978
ucacaagugagccucacag

SEQ ID NO: 286980 - RNA, 19 nt, Artificial Sequence
  Description of Artificial Sequence: Synthetic oligonucleotide
  Sense strand starting at position 1583 of SEQ ID NO: 3689
ccaaacucuccaugaggca

SEQ ID NO: 286981 - RNA, 19 nt, Artificial Sequence
  Description of Artificial Sequence: Synthetic oligonucleotide
  Antisense strand to SEQ ID NO: 286980
ugccucauggagaguuugg

SEQ ID NO: 286982 - RNA, 19 nt, Artificial Sequence
  Description of Artificial Sequence: Synthetic oligonucleotide
  Sense strand starting at position 2101 of SEQ ID NO: 3689
agauuugucuccgagaaau

SEQ ID NO: 286983 - RNA, 19 nt, Artificial Sequence
  Description of Artificial Sequence: Synthetic oligonucleotide
  Antisense strand to SEQ ID NO: 286982
auuucucggagacaaaucu

SEQ ID NO: 286984 - RNA, 19 nt, Artificial Sequence
  Description of Artificial Sequence: Synthetic oligonucleotide
  Sense strand starting at position 2379 of SEQ ID NO: 3689
gcuuguggcuaucauguaa

SEQ ID NO: 286985 - RNA, 19 nt, Artificial Sequence
  Description of Artificial Sequence: Synthetic oligonucleotide
  Antisense strand to SEQ ID NO: 286984
uuacaugauagccacaagc

SEQ ID NO: 286986 - RNA, 19 nt, Artificial Sequence
  Description of Artificial Sequence: Synthetic oligonucleotide
  Sense strand starting at position 2462 of SEQ ID NO: 3689
aacuuuauagaacguguau

SEQ ID NO: 286987 - RNA, 19 nt, Artificial Sequence
  Description of Artificial Sequence: Synthetic oligonucleotide
  Antisense strand to SEQ ID NO: 286986
auacacguucuauaaaguu

SEQ ID NO: 286988 - RNA, 19 nt, Artificial Sequence
  Description of Artificial Sequence: Synthetic oligonucleotide
  Sense strand starting at position 2471 of SEQ ID NO: 3689
gaacguguaucauugcaga

SEQ ID NO: 286989 - RNA, 19 nt, Artificial Sequence
  Description of Artificial Sequence: Synthetic oligonucleotide
  Antisense strand to SEQ ID NO: 286988
ucugcaaugauacacguuc

SEQ ID NO: 286990 - RNA, 19 nt, Artificial Sequence
  Description of Artificial Sequence: Synthetic oligonucleotide
  Sense strand starting at position 2474 of SEQ ID NO: 3689
cguguaucauugcagauug

SEQ ID NO: 286991 - RNA, 19 nt, Artificial Sequence
  Description of Artificial Sequence: Synthetic oligonucleotide
  Antisense strand to SEQ ID NO: 286990
caaucugcaaugauacacg

SEQ ID NO: 286992 - RNA, 19 nt, Artificial Sequence
  Description of Artificial Sequence: Synthetic oligonucleotide
  Sense strand starting at position 2497 of SEQ ID NO: 3689
guggguguauucucuuaaa

SEQ ID NO: 286993 - RNA, 19 nt, Artificial Sequence
  Description of Artificial Sequence: Synthetic oligonucleotide
  Antisense strand to SEQ ID NO: 286992
uuuaagagaauacacccac

SEQ ID NO: 286994 - RNA, 19 nt, Artificial Sequence
  Description of Artificial Sequence: Synthetic oligonucleotide
  Sense strand starting at position 2500 of SEQ ID NO: 3689
gguguauucucuuaaacuu

SEQ ID NO: 286995 - RNA, 19 nt, Artificial Sequence
  Description of Artificial Sequence: Synthetic oligonucleotide
  Antisense strand to SEQ ID NO: 286994
aaguuuaagagaauacacc

SEQ ID NO: 286996 - RNA, 19 nt, Artificial Sequence
  Description of Artificial Sequence: Synthetic oligonucleotide
  Sense strand starting at position 2587 of SEQ ID NO: 3689
auucuaaagucuuaaguca

SEQ ID NO: 286997 - RNA, 19 nt, Artificial Sequence
  Description of Artificial Sequence: Synthetic oligonucleotide
  Antisense strand to SEQ ID NO: 286996
ugacuuaagacuuuagaau

SEQ ID NO: 286998 - RNA, 19 nt, Artificial Sequence
  Description of Artificial Sequence: Synthetic oligonucleotide
  Sense strand starting at position 2606 of SEQ ID NO: 3689
ccacguccuauaggaagaa

SEQ ID NO: 286999 - RNA, 19 nt, Artificial Sequence
  Description of Artificial Sequence: Synthetic oligonucleotide
  Antisense strand to SEQ ID NO: 286998
uucuuccuauaggacgugg

SEQ ID NO: 287000 - RNA, 19 nt, Artificial Sequence
  Description of Artificial Sequence: Synthetic oligonucleotide
  Sense strand starting at position 2808 of SEQ ID NO: 3689
gcuucugagcuuuacauaa

SEQ ID NO: 287001 - RNA, 19 nt, Artificial Sequence
  Description of Artificial Sequence: Synthetic oligonucleotide
  Antisense strand to SEQ ID NO: 287000
uuauguaaagcucagaagc

SEQ ID NO: 287002 - RNA, 19 nt, Artificial Sequence
  Description of Artificial Sequence: Synthetic oligonucleotide
  Sense strand starting at position 2868 of SEQ ID NO: 3689
uguuuaauuucugagauuc

SEQ ID NO: 287003 - RNA, 19 nt, Artificial Sequence
  Description of Artificial Sequence: Synthetic oligonucleotide
  Antisense strand to SEQ ID NO: 287002
gaaucucagaaauuaaaca

SEQ ID NO: 287004 - RNA, 19 nt, Artificial Sequence
  Description of Artificial Sequence: Synthetic oligonucleotide
  Sense strand starting at position 2977 of SEQ ID NO: 3689
gccagcugaucccugcaaa

SEQ ID NO: 287005 - RNA, 19 nt, Artificial Sequence
  Description of Artificial Sequence: Synthetic oligonucleotide
  Antisense strand to SEQ ID NO: 287004
uuugcagggaucagcuggc

SEQ ID NO: 287006 - RNA, 19 nt, Artificial Sequence
  Description of Artificial Sequence: Synthetic oligonucleotide
  Sense strand starting at position 3156 of SEQ ID NO: 3689
uggcaagcgccuugucaua

SEQ ID NO: 287007 - RNA, 19 nt, Artificial Sequence
  Description of Artificial Sequence: Synthetic oligonucleotide
  Antisense strand to SEQ ID NO: 287006
uaugacaaggcgcuugcca

SEQ ID NO: 287008 - RNA, 19 nt, Artificial Sequence
  Description of Artificial Sequence: Synthetic oligonucleotide
  Sense strand starting at position 3158 of SEQ ID NO: 3689
gcaagcgccuugucauagu

SEQ ID NO: 287009 - RNA, 19 nt, Artificial Sequence
  Description of Artificial Sequence: Synthetic oligonucleotide
  Antisense strand to SEQ ID NO: 287008
acuaugacaaggcgcuugc

SEQ ID NO: 287010 - RNA, 19 nt, Artificial Sequence
  Description of Artificial Sequence: Synthetic oligonucleotide
  Sense strand starting at position 3241 of SEQ ID NO: 3689
gugugacugcaagauagaa

SEQ ID NO: 287011 - RNA, 19 nt, Artificial Sequence
  Description of Artificial Sequence: Synthetic oligonucleotide
  Antisense strand to SEQ ID NO: 287010
uucuaucuugcagucacac

SEQ ID NO: 287012 - RNA, 19 nt, Artificial Sequence
  Description of Artificial Sequence: Synthetic oligonucleotide
  Sense strand starting at position 3360 of SEQ ID NO: 3689
ccaucagugcugggaugau

SEQ ID NO: 287013 - RNA, 19 nt, Artificial Sequence
  Description of Artificial Sequence: Synthetic oligonucleotide
  Antisense strand to SEQ ID NO: 287012
aucaucccagcacugaugg

SEQ ID NO: 287014 - RNA, 19 nt, Artificial Sequence
  Description of Artificial Sequence: Synthetic oligonucleotide
  Sense strand starting at position 3465 of SEQ ID NO: 3689
gacagauggagucgucaca

SEQ ID NO: 287015 - RNA, 19 nt, Artificial Sequence
  Description of Artificial Sequence: Synthetic oligonucleotide
  Antisense strand to SEQ ID NO: 287014
ugugacgacuccaucuguc

SEQ ID NO: 287016 - RNA, 19 nt, Artificial Sequence
  Description of Artificial Sequence: Synthetic oligonucleotide
  Sense strand starting at position 3807 of SEQ ID NO: 3689
caguguuuccuggcugcuu

SEQ ID NO: 287017 - RNA, 19 nt, Artificial Sequence
  Description of Artificial Sequence: Synthetic oligonucleotide
  Antisense strand to SEQ ID NO: 287016
aagcagccaggaaacacug

SEQ ID NO: 287018 - RNA, 19 nt, Artificial Sequence
  Description of Artificial Sequence: Synthetic oligonucleotide
  Sense strand starting at position 3894 of SEQ ID NO: 3689
acaccuggcucugaguuua

SEQ ID NO: 287019 - RNA, 19 nt, Artificial Sequence
  Description of Artificial Sequence: Synthetic oligonucleotide
  Antisense strand to SEQ ID NO: 287018
uaaacucagagccaggugu

SEQ ID NO: 287020 - RNA, 19 nt, Artificial Sequence
  Description of Artificial Sequence: Synthetic oligonucleotide
  Sense strand starting at position 3899 of SEQ ID NO: 3689
uggcucugaguuuagggaa

SEQ ID NO: 287021 - RNA, 19 nt, Artificial Sequence
  Description of Artificial Sequence: Synthetic oligonucleotide
  Antisense strand to SEQ ID NO: 287020
uucccuaaacucagagcca

SEQ ID NO: 287022 - RNA, 19 nt, Artificial Sequence
  Description of Artificial Sequence: Synthetic oligonucleotide
  Sense strand starting at position 70 of SEQ ID NO: 3690
uguggcuccucccugauuu

SEQ ID NO: 287023 - RNA, 19 nt, Artificial Sequence
  Description of Artificial Sequence: Synthetic oligonucleotide
  Antisense strand to SEQ ID NO: 287022
aaaucagggaggagccaca

SEQ ID NO: 287024 - RNA, 19 nt, Artificial Sequence
  Description of Artificial Sequence: Synthetic oligonucleotide
  Sense strand starting at position 90 of SEQ ID NO: 3690
ccaggaaugucccaccagu

SEQ ID NO: 287025 - RNA, 19 nt, Artificial Sequence
  Description of Artificial Sequence: Synthetic oligonucleotide
  Antisense strand to SEQ ID NO: 287024
acuggugggacauuccugg

SEQ ID NO: 287026 - RNA, 19 nt, Artificial Sequence
  Description of Artificial Sequence: Synthetic oligonucleotide
  Sense strand starting at position 341 of SEQ ID NO: 3690
gagcaucucucaggacaca

SEQ ID NO: 287027 - RNA, 19 nt, Artificial Sequence
  Description of Artificial Sequence: Synthetic oligonucleotide
  Antisense strand to SEQ ID NO: 287026
uguguccugagagaugcuc

SEQ ID NO: 287028 - RNA, 19 nt, Artificial Sequence
  Description of Artificial Sequence: Synthetic oligonucleotide
  Sense strand starting at position 529 of SEQ ID NO: 3690
agugacuaaucuuggguga

SEQ ID NO: 287029 - RNA, 19 nt, Artificial Sequence
  Description of Artificial Sequence: Synthetic oligonucleotide
  Antisense strand to SEQ ID NO: 287028
ucacccaagauuagucacu

SEQ ID NO: 287030 - RNA, 19 nt, Artificial Sequence
  Description of Artificial Sequence: Synthetic oligonucleotide
  Sense strand starting at position 531 of SEQ ID NO: 3690
ugacuaaucuugggugaca

SEQ ID NO: 287031 - RNA, 19 nt, Artificial Sequence
  Description of Artificial Sequence: Synthetic oligonucleotide
  Antisense strand to SEQ ID NO: 287030
ugucacccaagauuaguca

SEQ ID NO: 287032 - RNA, 19 nt, Artificial Sequence
  Description of Artificial Sequence: Synthetic oligonucleotide
  Sense strand starting at position 532 of SEQ ID NO: 3690
gacuaaucuugggugacau

SEQ ID NO: 287033 - RNA, 19 nt, Artificial Sequence
  Description of Artificial Sequence: Synthetic oligonucleotide
  Antisense strand to SEQ ID NO: 287032
augucacccaagauuaguc

SEQ ID NO: 287034 - RNA, 19 nt, Artificial Sequence
  Description of Artificial Sequence: Synthetic oligonucleotide
  Sense strand starting at position 533 of SEQ ID NO: 3690
acuaaucuugggugacaua

SEQ ID NO: 287035 - RNA, 19 nt, Artificial Sequence
  Description of Artificial Sequence: Synthetic oligonucleotide
  Antisense strand to SEQ ID NO: 287034
uaugucacccaagauuagu

SEQ ID NO: 287036 - RNA, 19 nt, Artificial Sequence
  Description of Artificial Sequence: Synthetic oligonucleotide
  Sense strand starting at position 665 of SEQ ID NO: 3690
acuugauguccuuguccca

SEQ ID NO: 287037 - RNA, 19 nt, Artificial Sequence
  Description of Artificial Sequence: Synthetic oligonucleotide
  Antisense strand to SEQ ID NO: 287036
ugggacaaggacaucaagu

SEQ ID NO: 287038 - RNA, 19 nt, Artificial Sequence
  Description of Artificial Sequence: Synthetic oligonucleotide
  Sense strand starting at position 692 of SEQ ID NO: 3690
ucacauaauccuggagguu

SEQ ID NO: 287039 - RNA, 19 nt, Artificial Sequence
  Description of Artificial Sequence: Synthetic oligonucleotide
  Antisense strand to SEQ ID NO: 287038
aaccuccaggauuauguga

SEQ ID NO: 287040 - RNA, 19 nt, Artificial Sequence
  Description of Artificial Sequence: Synthetic oligonucleotide
  Sense strand starting at position 695 of SEQ ID NO: 3690
cauaauccuggagguuauu

SEQ ID NO: 287041 - RNA, 19 nt, Artificial Sequence
  Description of Artificial Sequence: Synthetic oligonucleotide
  Antisense strand to SEQ ID NO: 287040
aauaaccuccaggauuaug

SEQ ID NO: 287042 - RNA, 19 nt, Artificial Sequence
  Description of Artificial Sequence: Synthetic oligonucleotide
  Sense strand starting at position 704 of SEQ ID NO: 3690
ggagguuauuaacuccauu

SEQ ID NO: 287043 - RNA, 19 nt, Artificial Sequence
  Description of Artificial Sequence: Synthetic oligonucleotide
  Antisense strand to SEQ ID NO: 287042
aauggaguuaauaaccucc

SEQ ID NO: 287044 - RNA, 19 nt, Artificial Sequence
  Description of Artificial Sequence: Synthetic oligonucleotide
  Sense strand starting at position 834 of SEQ ID NO: 3690
ccugacuuggugugaguga

SEQ ID NO: 287045 - RNA, 19 nt, Artificial Sequence
  Description of Artificial Sequence: Synthetic oligonucleotide
  Antisense strand to SEQ ID NO: 287044
ucacucacaccaagucagg

SEQ ID NO: 287046 - RNA, 19 nt, Artificial Sequence
  Description of Artificial Sequence: Synthetic oligonucleotide
  Sense strand starting at position 862 of SEQ ID NO: 3690
ggcucaugauauguggaca

SEQ ID NO: 287047 - RNA, 19 nt, Artificial Sequence
  Description of Artificial Sequence: Synthetic oligonucleotide
  Antisense strand to SEQ ID NO: 287046
uguccacauaucaugagcc

SEQ ID NO: 287048 - RNA, 19 nt, Artificial Sequence
  Description of Artificial Sequence: Synthetic oligonucleotide
  Sense strand starting at position 992 of SEQ ID NO: 3690
auauguguucuuugaggag

SEQ ID NO: 287049 - RNA, 19 nt, Artificial Sequence
  Description of Artificial Sequence: Synthetic oligonucleotide
  Antisense strand to SEQ ID NO: 287048
cuccucaaagaacacauau

SEQ ID NO: 287050 - RNA, 19 nt, Artificial Sequence
  Description of Artificial Sequence: Synthetic oligonucleotide
  Sense strand starting at position 1079 of SEQ ID NO: 3690
ggcgccugguuguaauacu

SEQ ID NO: 287051 - RNA, 19 nt, Artificial Sequence
  Description of Artificial Sequence: Synthetic oligonucleotide
  Antisense strand to SEQ ID NO: 287050
aguauuacaaccaggcgcc

SEQ ID NO: 287052 - RNA, 19 nt, Artificial Sequence
  Description of Artificial Sequence: Synthetic oligonucleotide
  Sense strand starting at position 1420 of SEQ ID NO: 3690
cuaugaacucacuguguga

SEQ ID NO: 287053 - RNA, 19 nt, Artificial Sequence
  Description of Artificial Sequence: Synthetic oligonucleotide
  Antisense strand to SEQ ID NO: 287052
ucacacagugaguucauag

SEQ ID NO: 287054 - RNA, 19 nt, Artificial Sequence
  Description of Artificial Sequence: Synthetic oligonucleotide
  Sense strand starting at position 1431 of SEQ ID NO: 3690
cugugugaucuccggcaaa

SEQ ID NO: 287055 - RNA, 19 nt, Artificial Sequence
  Description of Artificial Sequence: Synthetic oligonucleotide
  Antisense strand to SEQ ID NO: 287054
uuugccggagaucacacag

SEQ ID NO: 287056 - RNA, 19 nt, Artificial Sequence
  Description of Artificial Sequence: Synthetic oligonucleotide
  Sense strand starting at position 1434 of SEQ ID NO: 3690
ugugaucuccggcaaauca

SEQ ID NO: 287057 - RNA, 19 nt, Artificial Sequence
  Description of Artificial Sequence: Synthetic oligonucleotide
  Antisense strand to SEQ ID NO: 287056
ugauuugccggagaucaca

SEQ ID NO: 287058 - RNA, 19 nt, Artificial Sequence
  Description of Artificial Sequence: Synthetic oligonucleotide
  Sense strand starting at position 2950 of SEQ ID NO: 3690
gcaggugucugccagggaa

SEQ ID NO: 287059 - RNA, 19 nt, Artificial Sequence
  Description of Artificial Sequence: Synthetic oligonucleotide
  Antisense strand to SEQ ID NO: 287058
uucccuggcagacaccugc

SEQ ID NO: 287060 - RNA, 19 nt, Artificial Sequence
  Description of Artificial Sequence: Synthetic oligonucleotide
  Sense strand starting at position 2995 of SEQ ID NO: 3690
cugguuucucccugggaga

SEQ ID NO: 287061 - RNA, 19 nt, Artificial Sequence
  Description of Artificial Sequence: Synthetic oligonucleotide
  Antisense strand to SEQ ID NO: 287060
ucucccagggagaaaccag

SEQ ID NO: 287062 - RNA, 19 nt, Artificial Sequence
  Description of Artificial Sequence: Synthetic oligonucleotide
  Sense strand starting at position 2997 of SEQ ID NO: 3690
gguuucucccugggagagu

SEQ ID NO: 287063 - RNA, 19 nt, Artificial Sequence
  Description of Artificial Sequence: Synthetic oligonucleotide
  Antisense strand to SEQ ID NO: 287062
acucucccagggagaaacc

SEQ ID NO: 287064 - RNA, 19 nt, Artificial Sequence
  Description of Artificial Sequence: Synthetic oligonucleotide
  Sense strand starting at position 2998 of SEQ ID NO: 3690
guuucucccugggagagua

SEQ ID NO: 287065 - RNA, 19 nt, Artificial Sequence
  Description of Artificial Sequence: Synthetic oligonucleotide
  Antisense strand to SEQ ID NO: 287064
uacucucccagggagaaac

SEQ ID NO: 287066 - RNA, 19 nt, Artificial Sequence
  Description of Artificial Sequence: Synthetic oligonucleotide
  Sense strand starting at position 3141 of SEQ ID NO: 3690
ccagcuuugacacggauga

SEQ ID NO: 287067 - RNA, 19 nt, Artificial Sequence
  Description of Artificial Sequence: Synthetic oligonucleotide
  Antisense strand to SEQ ID NO: 287066
ucauccgugucaaagcugg

SEQ ID NO: 287068 - RNA, 19 nt, Artificial Sequence
  Description of Artificial Sequence: Synthetic oligonucleotide
  Sense strand starting at position 3248 of SEQ ID NO: 3690
guggaugaucaaggcgaga

SEQ ID NO: 287069 - RNA, 19 nt, Artificial Sequence
  Description of Artificial Sequence: Synthetic oligonucleotide
  Antisense strand to SEQ ID NO: 287068
ucucgccuugaucauccac

SEQ ID NO: 287070 - RNA, 19 nt, Artificial Sequence
  Description of Artificial Sequence: Synthetic oligonucleotide
  Sense strand starting at position 3250 of SEQ ID NO: 3690
ggaugaucaaggcgagaag

SEQ ID NO: 287071 - RNA, 19 nt, Artificial Sequence
  Description of Artificial Sequence: Synthetic oligonucleotide
  Antisense strand to SEQ ID NO: 287070
cuucucgccuugaucaucc

SEQ ID NO: 287072 - RNA, 19 nt, Artificial Sequence
  Description of Artificial Sequence: Synthetic oligonucleotide
  Sense strand starting at position 3324 of SEQ ID NO: 3690
agugucuaucugcaucaga

SEQ ID NO: 287073 - RNA, 19 nt, Artificial Sequence
  Description of Artificial Sequence: Synthetic oligonucleotide
  Antisense strand to SEQ ID NO: 287072
ucugaugcagauagacacu

SEQ ID NO: 287074 - RNA, 19 nt, Artificial Sequence
  Description of Artificial Sequence: Synthetic oligonucleotide
  Sense strand starting at position 3327 of SEQ ID NO: 3690
gucuaucugcaucagauga

SEQ ID NO: 287075 - RNA, 19 nt, Artificial Sequence
  Description of Artificial Sequence: Synthetic oligonucleotide
  Antisense strand to SEQ ID NO: 287074
ucaucugaugcagauagac

SEQ ID NO: 287076 - RNA, 19 nt, Artificial Sequence
  Description of Artificial Sequence: Synthetic oligonucleotide
  Sense strand starting at position 3548 of SEQ ID NO: 3690
gugugauacccucguucuu

SEQ ID NO: 287077 - RNA, 19 nt, Artificial Sequence
  Description of Artificial Sequence: Synthetic oligonucleotide
  Antisense strand to SEQ ID NO: 287076
aagaacgaggguaucacac

SEQ ID NO: 287078 - RNA, 19 nt, Artificial Sequence
  Description of Artificial Sequence: Synthetic oligonucleotide
  Sense strand starting at position 3717 of SEQ ID NO: 3690
ccaugugugcuguguguau

SEQ ID NO: 287079 - RNA, 19 nt, Artificial Sequence
  Description of Artificial Sequence: Synthetic oligonucleotide
  Antisense strand to SEQ ID NO: 287078
auacacacagcacacaugg

SEQ ID NO: 287080 - RNA, 19 nt, Artificial Sequence
  Description of Artificial Sequence: Synthetic oligonucleotide
  Sense strand starting at position 3854 of SEQ ID NO: 3690
ccacgacuaacuugggaga

SEQ ID NO: 287081 - RNA, 19 nt, Artificial Sequence
  Description of Artificial Sequence: Synthetic oligonucleotide
  Antisense strand to SEQ ID NO: 287080
ucucccaaguuagucgugg

SEQ ID NO: 287082 - RNA, 19 nt, Artificial Sequence
  Description of Artificial Sequence: Synthetic oligonucleotide
  Sense strand starting at position 3856 of SEQ ID NO: 3690
acgacuaacuugggagaaa

SEQ ID NO: 287083 - RNA, 19 nt, Artificial Sequence
  Description of Artificial Sequence: Synthetic oligonucleotide
  Antisense strand to SEQ ID NO: 287082
uuucucccaaguuagucgu

SEQ ID NO: 287084 - RNA, 19 nt, Artificial Sequence
  Description of Artificial Sequence: Synthetic oligonucleotide
  Sense strand starting at position 3857 of SEQ ID NO: 3690
cgacuaacuugggagaaag

SEQ ID NO: 287085 - RNA, 19 nt, Artificial Sequence
  Description of Artificial Sequence: Synthetic oligonucleotide
  Antisense strand to SEQ ID NO: 287084
cuuucucccaaguuagucg

SEQ ID NO: 287086 - RNA, 19 nt, Artificial Sequence
  Description of Artificial Sequence: Synthetic oligonucleotide
  Sense strand starting at position 3893 of SEQ ID NO: 3690
gcuuguacaugggugauaa

SEQ ID NO: 287087 - RNA, 19 nt, Artificial Sequence
  Description of Artificial Sequence: Synthetic oligonucleotide
  Antisense strand to SEQ ID NO: 287086
uuaucacccauguacaagc

SEQ ID NO: 287088 - RNA, 19 nt, Artificial Sequence
  Description of Artificial Sequence: Synthetic oligonucleotide
  Sense strand starting at position 3894 of SEQ ID NO: 3690
cuuguacaugggugauaaa

SEQ ID NO: 287089 - RNA, 19 nt, Artificial Sequence
  Description of Artificial Sequence: Synthetic oligonucleotide
  Antisense strand to SEQ ID NO: 287088
uuuaucacccauguacaag

SEQ ID NO: 287090 - RNA, 19 nt, Artificial Sequence
  Description of Artificial Sequence: Synthetic oligonucleotide
  Sense strand starting at position 3897 of SEQ ID NO: 3690
guacaugggugauaaagag

SEQ ID NO: 287091 - RNA, 19 nt, Artificial Sequence
  Description of Artificial Sequence: Synthetic oligonucleotide
  Antisense strand to SEQ ID NO: 287090
cucuuuaucacccauguac

SEQ ID NO: 287092 - RNA, 19 nt, Artificial Sequence
  Description of Artificial Sequence: Synthetic oligonucleotide
  Sense strand starting at position 312 of SEQ ID NO: 3691
uguugaucaugacuacacu

SEQ ID NO: 287093 - RNA, 19 nt, Artificial Sequence
  Description of Artificial Sequence: Synthetic oligonucleotide
  Antisense strand to SEQ ID NO: 287092
aguguagucaugaucaaca

SEQ ID NO: 287094 - RNA, 19 nt, Artificial Sequence
  Description of Artificial Sequence: Synthetic oligonucleotide
  Sense strand starting at position 520 of SEQ ID NO: 3691
guguuagaggguuggagaa

SEQ ID NO: 287095 - RNA, 19 nt, Artificial Sequence
  Description of Artificial Sequence: Synthetic oligonucleotide
  Antisense strand to SEQ ID NO: 287094
uucuccaacccucuaacac

SEQ ID NO: 287096 - RNA, 19 nt, Artificial Sequence
  Description of Artificial Sequence: Synthetic oligonucleotide
  Sense strand starting at position 639 of SEQ ID NO: 3691
auccgaguuucaucgguga

SEQ ID NO: 287097 - RNA, 19 nt, Artificial Sequence
  Description of Artificial Sequence: Synthetic oligonucleotide
  Antisense strand to SEQ ID NO: 287096
ucaccgaugaaacucggau

SEQ ID NO: 287098 - RNA, 19 nt, Artificial Sequence
  Description of Artificial Sequence: Synthetic oligonucleotide
  Sense strand starting at position 641 of SEQ ID NO: 3691
ccgaguuucaucggugagu

SEQ ID NO: 287099 - RNA, 19 nt, Artificial Sequence
  Description of Artificial Sequence: Synthetic oligonucleotide
  Antisense strand to SEQ ID NO: 287098
acucaccgaugaaacucgg

SEQ ID NO: 287100 - RNA, 19 nt, Artificial Sequence
  Description of Artificial Sequence: Synthetic oligonucleotide
  Sense strand starting at position 642 of SEQ ID NO: 3691
cgaguuucaucggugaguc

SEQ ID NO: 287101 - RNA, 19 nt, Artificial Sequence
  Description of Artificial Sequence: Synthetic oligonucleotide
  Antisense strand to SEQ ID NO: 287100
gacucaccgaugaaacucg

SEQ ID NO: 287102 - RNA, 19 nt, Artificial Sequence
  Description of Artificial Sequence: Synthetic oligonucleotide
  Sense strand starting at position 643 of SEQ ID NO: 3691
gaguuucaucggugagucu

SEQ ID NO: 287103 - RNA, 19 nt, Artificial Sequence
  Description of Artificial Sequence: Synthetic oligonucleotide
  Antisense strand to SEQ ID NO: 287102
agacucaccgaugaaacuc

SEQ ID NO: 287104 - RNA, 19 nt, Artificial Sequence
  Description of Artificial Sequence: Synthetic oligonucleotide
  Sense strand starting at position 644 of SEQ ID NO: 3691
aguuucaucggugagucuu

SEQ ID NO: 287105 - RNA, 19 nt, Artificial Sequence
  Description of Artificial Sequence: Synthetic oligonucleotide
  Antisense strand to SEQ ID NO: 287104
aagacucaccgaugaaacu

SEQ ID NO: 287106 - RNA, 19 nt, Artificial Sequence
  Description of Artificial Sequence: Synthetic oligonucleotide
  Sense strand starting at position 650 of SEQ ID NO: 3691
aucggugagucuuugcuua

SEQ ID NO: 287107 - RNA, 19 nt, Artificial Sequence
  Description of Artificial Sequence: Synthetic oligonucleotide
  Antisense strand to SEQ ID NO: 287106
uaagcaaagacucaccgau

SEQ ID NO: 287108 - RNA, 19 nt, Artificial Sequence
  Description of Artificial Sequence: Synthetic oligonucleotide
  Sense strand starting at position 657 of SEQ ID NO: 3691
agucuuugcuuaguuugua

SEQ ID NO: 287109 - RNA, 19 nt, Artificial Sequence
  Description of Artificial Sequence: Synthetic oligonucleotide
  Antisense strand to SEQ ID NO: 287108
uacaaacuaagcaaagacu

SEQ ID NO: 287110 - RNA, 19 nt, Artificial Sequence
  Description of Artificial Sequence: Synthetic oligonucleotide
  Sense strand starting at position 756 of SEQ ID NO: 3691
cagggagucuagcuagauu

SEQ ID NO: 287111 - RNA, 19 nt, Artificial Sequence
  Description of Artificial Sequence: Synthetic oligonucleotide
  Antisense strand to SEQ ID NO: 287110
aaucuagcuagacucccug

SEQ ID NO: 287112 - RNA, 19 nt, Artificial Sequence
  Description of Artificial Sequence: Synthetic oligonucleotide
  Sense strand starting at position 759 of SEQ ID NO: 3691
ggagucuagcuagauucca

SEQ ID NO: 287113 - RNA, 19 nt, Artificial Sequence
  Description of Artificial Sequence: Synthetic oligonucleotide
  Antisense strand to SEQ ID NO: 287112
uggaaucuagcuagacucc

SEQ ID NO: 287114 - RNA, 19 nt, Artificial Sequence
  Description of Artificial Sequence: Synthetic oligonucleotide
  Sense strand starting at position 767 of SEQ ID NO: 3691
gcuagauuccaaugagguu

SEQ ID NO: 287115 - RNA, 19 nt, Artificial Sequence
  Description of Artificial Sequence: Synthetic oligonucleotide
  Antisense strand to SEQ ID NO: 287114
aaccucauuggaaucuagc

SEQ ID NO: 287116 - RNA, 19 nt, Artificial Sequence
  Description of Artificial Sequence: Synthetic oligonucleotide
  Sense strand starting at position 793 of SEQ ID NO: 3691
cugacuaaccuuugguguu

SEQ ID NO: 287117 - RNA, 19 nt, Artificial Sequence
  Description of Artificial Sequence: Synthetic oligonucleotide
  Antisense strand to SEQ ID NO: 287116
aacaccaaagguuagucag

SEQ ID NO: 287118 - RNA, 19 nt, Artificial Sequence
  Description of Artificial Sequence: Synthetic oligonucleotide
  Sense strand starting at position 795 of SEQ ID NO: 3691
gacuaaccuuugguguuau

SEQ ID NO: 287119 - RNA, 19 nt, Artificial Sequence
  Description of Artificial Sequence: Synthetic oligonucleotide
  Antisense strand to SEQ ID NO: 287118
auaacaccaaagguuaguc

SEQ ID NO: 287120 - RNA, 19 nt, Artificial Sequence
  Description of Artificial Sequence: Synthetic oligonucleotide
  Sense strand starting at position 814 of SEQ ID NO: 3691
cacacuuagccagguugaa

SEQ ID NO: 287121 - RNA, 19 nt, Artificial Sequence
  Description of Artificial Sequence: Synthetic oligonucleotide
  Antisense strand to SEQ ID NO: 287120
uucaaccuggcuaagugug

SEQ ID NO: 287122 - RNA, 19 nt, Artificial Sequence
  Description of Artificial Sequence: Synthetic oligonucleotide
  Sense strand starting at position 843 of SEQ ID NO: 3691
uaucgugacugugucuaau

SEQ ID NO: 287123 - RNA, 19 nt, Artificial Sequence
  Description of Artificial Sequence: Synthetic oligonucleotide
  Antisense strand to SEQ ID NO: 287122
auuagacacagucacgaua

SEQ ID NO: 287124 - RNA, 19 nt, Artificial Sequence
  Description of Artificial Sequence: Synthetic oligonucleotide
  Sense strand starting at position 853 of SEQ ID NO: 3691
gugucuaauggcgaauaaa

SEQ ID NO: 287125 - RNA, 19 nt, Artificial Sequence
  Description of Artificial Sequence: Synthetic oligonucleotide
  Antisense strand to SEQ ID NO: 287124
uuuauucgccauuagacac

SEQ ID NO: 287126 - RNA, 19 nt, Artificial Sequence
  Description of Artificial Sequence: Synthetic oligonucleotide
  Sense strand starting at position 856 of SEQ ID NO: 3691
ucuaauggcgaauaaauca

SEQ ID NO: 287127 - RNA, 19 nt, Artificial Sequence
  Description of Artificial Sequence: Synthetic oligonucleotide
  Antisense strand to SEQ ID NO: 287126
ugauuuauucgccauuaga

SEQ ID NO: 287128 - RNA, 19 nt, Artificial Sequence
  Description of Artificial Sequence: Synthetic oligonucleotide
  Sense strand starting at position 1100 of SEQ ID NO: 3691
ggcaauuccuacuaagaga

SEQ ID NO: 287129 - RNA, 19 nt, Artificial Sequence
  Description of Artificial Sequence: Synthetic oligonucleotide
  Antisense strand to SEQ ID NO: 287128
ucucuuaguaggaauugcc

SEQ ID NO: 287130 - RNA, 19 nt, Artificial Sequence
  Description of Artificial Sequence: Synthetic oligonucleotide
  Sense strand starting at position 1148 of SEQ ID NO: 3691
aucuuagcggucuagaauu

SEQ ID NO: 287131 - RNA, 19 nt, Artificial Sequence
  Description of Artificial Sequence: Synthetic oligonucleotide
  Antisense strand to SEQ ID NO: 287130
aauucuagaccgcuaagau

SEQ ID NO: 287132 - RNA, 19 nt, Artificial Sequence
  Description of Artificial Sequence: Synthetic oligonucleotide
  Sense strand starting at position 1150 of SEQ ID NO: 3691
cuuagcggucuagaauuaa

SEQ ID NO: 287133 - RNA, 19 nt, Artificial Sequence
  Description of Artificial Sequence: Synthetic oligonucleotide
  Antisense strand to SEQ ID NO: 287132
uuaauucuagaccgcuaag

SEQ ID NO: 287134 - RNA, 19 nt, Artificial Sequence
  Description of Artificial Sequence: Synthetic oligonucleotide
  Sense strand starting at position 1154 of SEQ ID NO: 3691
gcggucuagaauuaagcau

SEQ ID NO: 287135 - RNA, 19 nt, Artificial Sequence
  Description of Artificial Sequence: Synthetic oligonucleotide
  Antisense strand to SEQ ID NO: 287134
augcuuaauucuagaccgc

SEQ ID NO: 287136 - RNA, 19 nt, Artificial Sequence
  Description of Artificial Sequence: Synthetic oligonucleotide
  Sense strand starting at position 1165 of SEQ ID NO: 3691
uuaagcauacucugagguu

SEQ ID NO: 287137 - RNA, 19 nt, Artificial Sequence
  Description of Artificial Sequence: Synthetic oligonucleotide
  Antisense strand to SEQ ID NO: 287136
aaccucagaguaugcuuaa

SEQ ID NO: 287138 - RNA, 19 nt, Artificial Sequence
  Description of Artificial Sequence: Synthetic oligonucleotide
  Sense strand starting at position 1230 of SEQ ID NO: 3691
agggcagugccacaaucau

SEQ ID NO: 287139 - RNA, 19 nt, Artificial Sequence
  Description of Artificial Sequence: Synthetic oligonucleotide
  Antisense strand to SEQ ID NO: 287138
augauuguggcacugcccu

SEQ ID NO: 287140 - RNA, 19 nt, Artificial Sequence
  Description of Artificial Sequence: Synthetic oligonucleotide
  Sense strand starting at position 1383 of SEQ ID NO: 3691
gacuguauugcucaaguug

SEQ ID NO: 287141 - RNA, 19 nt, Artificial Sequence
  Description of Artificial Sequence: Synthetic oligonucleotide
  Antisense strand to SEQ ID NO: 287140
caacuugagcaauacaguc

SEQ ID NO: 287142 - RNA, 19 nt, Artificial Sequence
  Description of Artificial Sequence: Synthetic oligonucleotide
  Sense strand starting at position 1549 of SEQ ID NO: 3691
ggacauacugucugcagga

SEQ ID NO: 287143 - RNA, 19 nt, Artificial Sequence
  Description of Artificial Sequence: Synthetic oligonucleotide
  Antisense strand to SEQ ID NO: 287142
uccugcagacaguaugucc

SEQ ID NO: 287144 - RNA, 19 nt, Artificial Sequence
  Description of Artificial Sequence: Synthetic oligonucleotide
  Sense strand starting at position 1550 of SEQ ID NO: 3691
gacauacugucugcaggaa

SEQ ID NO: 287145 - RNA, 19 nt, Artificial Sequence
  Description of Artificial Sequence: Synthetic oligonucleotide
  Antisense strand to SEQ ID NO: 287144
uuccugcagacaguauguc

SEQ ID NO: 287146 - RNA, 19 nt, Artificial Sequence
  Description of Artificial Sequence: Synthetic oligonucleotide
  Sense strand starting at position 1551 of SEQ ID NO: 3691
acauacugucugcaggaaa

SEQ ID NO: 287147 - RNA, 19 nt, Artificial Sequence
  Description of Artificial Sequence: Synthetic oligonucleotide
  Antisense strand to SEQ ID NO: 287146
uuuccugcagacaguaugu

SEQ ID NO: 287148 - RNA, 19 nt, Artificial Sequence
  Description of Artificial Sequence: Synthetic oligonucleotide
  Sense strand starting at position 1632 of SEQ ID NO: 3691
ggucacauaccuugugauu

SEQ ID NO: 287149 - RNA, 19 nt, Artificial Sequence
  Description of Artificial Sequence: Synthetic oligonucleotide
  Antisense strand to SEQ ID NO: 287148
aaucacaagguaugugacc

SEQ ID NO: 287150 - RNA, 19 nt, Artificial Sequence
  Description of Artificial Sequence: Synthetic oligonucleotide
  Sense strand starting at position 1634 of SEQ ID NO: 3691
ucacauaccuugugauuug

SEQ ID NO: 287151 - RNA, 19 nt, Artificial Sequence
  Description of Artificial Sequence: Synthetic oligonucleotide
  Antisense strand to SEQ ID NO: 287150
caaaucacaagguauguga

SEQ ID NO: 287152 - RNA, 19 nt, Artificial Sequence
  Description of Artificial Sequence: Synthetic oligonucleotide
  Sense strand starting at position 2128 of SEQ ID NO: 3691
ugauuaaacucagcaggca

SEQ ID NO: 287153 - RNA, 19 nt, Artificial Sequence
  Description of Artificial Sequence: Synthetic oligonucleotide
  Antisense strand to SEQ ID NO: 287152
ugccugcugaguuuaauca

SEQ ID NO: 287154 - RNA, 19 nt, Artificial Sequence
  Description of Artificial Sequence: Synthetic oligonucleotide
  Sense strand starting at position 2204 of SEQ ID NO: 3691
ucaagaugaaccugguguu

SEQ ID NO: 287155 - RNA, 19 nt, Artificial Sequence
  Description of Artificial Sequence: Synthetic oligonucleotide
  Antisense strand to SEQ ID NO: 287154
aacaccagguucaucuuga

SEQ ID NO: 287156 - RNA, 19 nt, Artificial Sequence
  Description of Artificial Sequence: Synthetic oligonucleotide
  Sense strand starting at position 2205 of SEQ ID NO: 3691
caagaugaaccugguguua

SEQ ID NO: 287157 - RNA, 19 nt, Artificial Sequence
  Description of Artificial Sequence: Synthetic oligonucleotide
  Antisense strand to SEQ ID NO: 287156
uaacaccagguucaucuug

SEQ ID NO: 287158 - RNA, 19 nt, Artificial Sequence
  Description of Artificial Sequence: Synthetic oligonucleotide
  Sense strand starting at position 2218 of SEQ ID NO: 3691
guguuaugcaagccaagcu

SEQ ID NO: 287159 - RNA, 19 nt, Artificial Sequence
  Description of Artificial Sequence: Synthetic oligonucleotide
  Antisense strand to SEQ ID NO: 287158
agcuuggcuugcauaacac

SEQ ID NO: 287160 - RNA, 19 nt, Artificial Sequence
  Description of Artificial Sequence: Synthetic oligonucleotide
  Sense strand starting at position 2257 of SEQ ID NO: 3691
cccgguccuacugauugau

SEQ ID NO: 287161 - RNA, 19 nt, Artificial Sequence
  Description of Artificial Sequence: Synthetic oligonucleotide
  Antisense strand to SEQ ID NO: 287160
aucaaucaguaggaccggg

SEQ ID NO: 287162 - RNA, 19 nt, Artificial Sequence
  Description of Artificial Sequence: Synthetic oligonucleotide
  Sense strand starting at position 2824 of SEQ ID NO: 3691
ugucaucccucgcuuacaa

SEQ ID NO: 287163 - RNA, 19 nt, Artificial Sequence
  Description of Artificial Sequence: Synthetic oligonucleotide
  Antisense strand to SEQ ID NO: 287162
uuguaagcgagggaugaca

SEQ ID NO: 287164 - RNA, 19 nt, Artificial Sequence
  Description of Artificial Sequence: Synthetic oligonucleotide
  Sense strand starting at position 3368 of SEQ ID NO: 3691
ucacucuugcuugggaauu

SEQ ID NO: 287165 - RNA, 19 nt, Artificial Sequence
  Description of Artificial Sequence: Synthetic oligonucleotide
  Antisense strand to SEQ ID NO: 287164
aauucccaagcaagaguga

SEQ ID NO: 287166 - RNA, 19 nt, Artificial Sequence
  Description of Artificial Sequence: Synthetic oligonucleotide
  Sense strand starting at position 3381 of SEQ ID NO: 3691
ggaauuauucuacagucuc

SEQ ID NO: 287167 - RNA, 19 nt, Artificial Sequence
  Description of Artificial Sequence: Synthetic oligonucleotide
  Antisense strand to SEQ ID NO: 287166
gagacuguagaauaauucc

SEQ ID NO: 287168 - RNA, 19 nt, Artificial Sequence
  Description of Artificial Sequence: Synthetic oligonucleotide
  Sense strand starting at position 3556 of SEQ ID NO: 3691
gggacugacuugggaauga

SEQ ID NO: 287169 - RNA, 19 nt, Artificial Sequence
  Description of Artificial Sequence: Synthetic oligonucleotide
  Antisense strand to SEQ ID NO: 287168
ucauucccaagucaguccc

SEQ ID NO: 287170 - RNA, 19 nt, Artificial Sequence
  Description of Artificial Sequence: Synthetic oligonucleotide
  Sense strand starting at position 3646 of SEQ ID NO: 3691
ccauuuaagucuggacaau

SEQ ID NO: 287171 - RNA, 19 nt, Artificial Sequence
  Description of Artificial Sequence: Synthetic oligonucleotide
  Antisense strand to SEQ ID NO: 287170
auuguccagacuuaaaugg

SEQ ID NO: 287172 - RNA, 19 nt, Artificial Sequence
  Description of Artificial Sequence: Synthetic oligonucleotide
  Sense strand starting at position 199 of SEQ ID NO: 3692
accaacuuuggauguuaaa

SEQ ID NO: 287173 - RNA, 19 nt, Artificial Sequence
  Description of Artificial Sequence: Synthetic oligonucleotide
  Antisense strand to SEQ ID NO: 287172
uuuaacauccaaaguuggu

SEQ ID NO: 287174 - RNA, 19 nt, Artificial Sequence
  Description of Artificial Sequence: Synthetic oligonucleotide
  Sense strand starting at position 330 of SEQ ID NO: 3692
uacauuguaggagguauua

SEQ ID NO: 287175 - RNA, 19 nt, Artificial Sequence
  Description of Artificial Sequence: Synthetic oligonucleotide
  Antisense strand to SEQ ID NO: 287174
uaauaccuccuacaaugua

SEQ ID NO: 287176 - RNA, 19 nt, Artificial Sequence
  Description of Artificial Sequence: Synthetic oligonucleotide
  Sense strand starting at position 494 of SEQ ID NO: 3692
agggaaaccgcauauccuu

SEQ ID NO: 287177 - RNA, 19 nt, Artificial Sequence
  Description of Artificial Sequence: Synthetic oligonucleotide
  Antisense strand to SEQ ID NO: 287176
aaggauaugcgguuucccu

SEQ ID NO: 287178 - RNA, 19 nt, Artificial Sequence
  Description of Artificial Sequence: Synthetic oligonucleotide
  Sense strand starting at position 599 of SEQ ID NO: 3692
ugcuauacuccuggacauu

SEQ ID NO: 287179 - RNA, 19 nt, Artificial Sequence
  Description of Artificial Sequence: Synthetic oligonucleotide
  Antisense strand to SEQ ID NO: 287178
aauguccaggaguauagca

SEQ ID NO: 287180 - RNA, 19 nt, Artificial Sequence
  Description of Artificial Sequence: Synthetic oligonucleotide
  Sense strand starting at position 600 of SEQ ID NO: 3692
gcuauacuccuggacauua

SEQ ID NO: 287181 - RNA, 19 nt, Artificial Sequence
  Description of Artificial Sequence: Synthetic oligonucleotide
  Antisense strand to SEQ ID NO: 287180
uaauguccaggaguauagc

SEQ ID NO: 287182 - RNA, 19 nt, Artificial Sequence
  Description of Artificial Sequence: Synthetic oligonucleotide
  Sense strand starting at position 691 of SEQ ID NO: 3692
acucuaugugaaugaagug

SEQ ID NO: 287183 - RNA, 19 nt, Artificial Sequence
  Description of Artificial Sequence: Synthetic oligonucleotide
  Antisense strand to SEQ ID NO: 287182
cacuucauucacauagagu

SEQ ID NO: 287184 - RNA, 19 nt, Artificial Sequence
  Description of Artificial Sequence: Synthetic oligonucleotide
  Sense strand starting at position 696 of SEQ ID NO: 3692
augugaaugaagugguuaa

SEQ ID NO: 287185 - RNA, 19 nt, Artificial Sequence
  Description of Artificial Sequence: Synthetic oligonucleotide
  Antisense strand to SEQ ID NO: 287184
uuaaccacuucauucacau

SEQ ID NO: 287186 - RNA, 19 nt, Artificial Sequence
  Description of Artificial Sequence: Synthetic oligonucleotide
  Sense strand starting at position 697 of SEQ ID NO: 3692
ugugaaugaagugguuaaa

SEQ ID NO: 287187 - RNA, 19 nt, Artificial Sequence
  Description of Artificial Sequence: Synthetic oligonucleotide
  Antisense strand to SEQ ID NO: 287186
uuuaaccacuucauucaca

SEQ ID NO: 287188 - RNA, 19 nt, Artificial Sequence
  Description of Artificial Sequence: Synthetic oligonucleotide
  Sense strand starting at position 800 of SEQ ID NO: 3692
cuagaagaaucugcuaauu

SEQ ID NO: 287189 - RNA, 19 nt, Artificial Sequence
  Description of Artificial Sequence: Synthetic oligonucleotide
  Antisense strand to SEQ ID NO: 287188
aauuagcagauucuucuag

SEQ ID NO: 287190 - RNA, 19 nt, Artificial Sequence
  Description of Artificial Sequence: Synthetic oligonucleotide
  Sense strand starting at position 833 of SEQ ID NO: 3692
cugguaauauucuuaaagu

SEQ ID NO: 287191 - RNA, 19 nt, Artificial Sequence
  Description of Artificial Sequence: Synthetic oligonucleotide
  Antisense strand to SEQ ID NO: 287190
acuuuaagaauauuaccag

SEQ ID NO: 287192 - RNA, 19 nt, Artificial Sequence
  Description of Artificial Sequence: Synthetic oligonucleotide
  Sense strand starting at position 890 of SEQ ID NO: 3692
agcagcuggguuuaucaau

SEQ ID NO: 287193 - RNA, 19 nt, Artificial Sequence
  Description of Artificial Sequence: Synthetic oligonucleotide
  Antisense strand to SEQ ID NO: 287192
auugauaaacccagcugcu

SEQ ID NO: 287194 - RNA, 19 nt, Artificial Sequence
  Description of Artificial Sequence: Synthetic oligonucleotide
  Sense strand starting at position 921 of SEQ ID NO: 3692
cuguuugcaaucugagaag

SEQ ID NO: 287195 - RNA, 19 nt, Artificial Sequence
  Description of Artificial Sequence: Synthetic oligonucleotide
  Antisense strand to SEQ ID NO: 287194
cuucucagauugcaaacag

SEQ ID NO: 287196 - RNA, 19 nt, Artificial Sequence
  Description of Artificial Sequence: Synthetic oligonucleotide
  Sense strand starting at position 966 of SEQ ID NO: 3692
gcuccuaaccgaggaaacu

SEQ ID NO: 287197 - RNA, 19 nt, Artificial Sequence
  Description of Artificial Sequence: Synthetic oligonucleotide
  Antisense strand to SEQ ID NO: 287196
aguuuccucgguuaggagc

SEQ ID NO: 287198 - RNA, 19 nt, Artificial Sequence
  Description of Artificial Sequence: Synthetic oligonucleotide
  Sense strand starting at position 1015 of SEQ ID NO: 3692
acaguuauaugguuauuac

SEQ ID NO: 287199 - RNA, 19 nt, Artificial Sequence
  Description of Artificial Sequence: Synthetic oligonucleotide
  Antisense strand to SEQ ID NO: 287198
guaauaaccauauaacugu

SEQ ID NO: 287200 - RNA, 19 nt, Artificial Sequence
  Description of Artificial Sequence: Synthetic oligonucleotide
  Sense strand starting at position 1018 of SEQ ID NO: 3692
guuauaugguuauuacuag

SEQ ID NO: 287201 - RNA, 19 nt, Artificial Sequence
  Description of Artificial Sequence: Synthetic oligonucleotide
  Antisense strand to SEQ ID NO: 287200
cuaguaauaaccauauaac

SEQ ID NO: 287202 - RNA, 19 nt, Artificial Sequence
  Description of Artificial Sequence: Synthetic oligonucleotide
  Sense strand starting at position 1024 of SEQ ID NO: 3692
ugguuauuacuagauucug

SEQ ID NO: 287203 - RNA, 19 nt, Artificial Sequence
  Description of Artificial Sequence: Synthetic oligonucleotide
  Antisense strand to SEQ ID NO: 287202
cagaaucuaguaauaacca

SEQ ID NO: 287204 - RNA, 19 nt, Artificial Sequence
  Description of Artificial Sequence: Synthetic oligonucleotide
  Sense strand starting at position 1086 of SEQ ID NO: 3692
augagauagucccuuggaa

SEQ ID NO: 287205 - RNA, 19 nt, Artificial Sequence
  Description of Artificial Sequence: Synthetic oligonucleotide
  Antisense strand to SEQ ID NO: 287204
uuccaagggacuaucucau

SEQ ID NO: 287206 - RNA, 19 nt, Artificial Sequence
  Description of Artificial Sequence: Synthetic oligonucleotide
  Sense strand starting at position 1270 of SEQ ID NO: 3692
uugaauccuguacaagagu

SEQ ID NO: 287207 - RNA, 19 nt, Artificial Sequence
  Description of Artificial Sequence: Synthetic oligonucleotide
  Antisense strand to SEQ ID NO: 287206
acucuuguacaggauucaa

SEQ ID NO: 287208 - RNA, 19 nt, Artificial Sequence
  Description of Artificial Sequence: Synthetic oligonucleotide
  Sense strand starting at position 1314 of SEQ ID NO: 3692
auguguauuucucugugua

SEQ ID NO: 287209 - RNA, 19 nt, Artificial Sequence
  Description of Artificial Sequence: Synthetic oligonucleotide
  Antisense strand to SEQ ID NO: 287208
uacacagagaaauacacau

SEQ ID NO: 287210 - RNA, 19 nt, Artificial Sequence
  Description of Artificial Sequence: Synthetic oligonucleotide
  Sense strand starting at position 1315 of SEQ ID NO: 3692
uguguauuucucuguguaa

SEQ ID NO: 287211 - RNA, 19 nt, Artificial Sequence
  Description of Artificial Sequence: Synthetic oligonucleotide
  Antisense strand to SEQ ID NO: 287210
uuacacagagaaauacaca

SEQ ID NO: 287212 - RNA, 19 nt, Artificial Sequence
  Description of Artificial Sequence: Synthetic oligonucleotide
  Sense strand starting at position 1316 of SEQ ID NO: 3692
guguauuucucuguguaaa

SEQ ID NO: 287213 - RNA, 19 nt, Artificial Sequence
  Description of Artificial Sequence: Synthetic oligonucleotide
  Antisense strand to SEQ ID NO: 287212
uuuacacagagaaauacac

SEQ ID NO: 287214 - RNA, 19 nt, Artificial Sequence
  Description of Artificial Sequence: Synthetic oligonucleotide
  Sense strand starting at position 1317 of SEQ ID NO: 3692
uguauuucucuguguaaag

SEQ ID NO: 287215 - RNA, 19 nt, Artificial Sequence
  Description of Artificial Sequence: Synthetic oligonucleotide
  Antisense strand to SEQ ID NO: 287214
cuuuacacagagaaauaca

SEQ ID NO: 287216 - RNA, 19 nt, Artificial Sequence
  Description of Artificial Sequence: Synthetic oligonucleotide
  Sense strand starting at position 1346 of SEQ ID NO: 3692
aauggcaugucucuuugaa

SEQ ID NO: 287217 - RNA, 19 nt, Artificial Sequence
  Description of Artificial Sequence: Synthetic oligonucleotide
  Antisense strand to SEQ ID NO: 287216
uucaaagagacaugccauu

SEQ ID NO: 287218 - RNA, 19 nt, Artificial Sequence
  Description of Artificial Sequence: Synthetic oligonucleotide
  Sense strand starting at position 1385 of SEQ ID NO: 3692
ggugaacagaacugugauu

SEQ ID NO: 287219 - RNA, 19 nt, Artificial Sequence
  Description of Artificial Sequence: Synthetic oligonucleotide
  Antisense strand to SEQ ID NO: 287218
aaucacaguucuguucacc

SEQ ID NO: 287220 - RNA, 19 nt, Artificial Sequence
  Description of Artificial Sequence: Synthetic oligonucleotide
  Sense strand starting at position 1390 of SEQ ID NO: 3692
acagaacugugauuaguau

SEQ ID NO: 287221 - RNA, 19 nt, Artificial Sequence
  Description of Artificial Sequence: Synthetic oligonucleotide
  Antisense strand to SEQ ID NO: 287220
auacuaaucacaguucugu

SEQ ID NO: 287222 - RNA, 19 nt, Artificial Sequence
  Description of Artificial Sequence: Synthetic oligonucleotide
  Sense strand starting at position 2279 of SEQ ID NO: 3692
uguggagagucacuuuaaa

SEQ ID NO: 287223 - RNA, 19 nt, Artificial Sequence
  Description of Artificial Sequence: Synthetic oligonucleotide
  Antisense strand to SEQ ID NO: 287222
uuuaaagugacucuccaca

SEQ ID NO: 287224 - RNA, 19 nt, Artificial Sequence
  Description of Artificial Sequence: Synthetic oligonucleotide
  Sense strand starting at position 2290 of SEQ ID NO: 3692
acuuuaaacugcuccagga

SEQ ID NO: 287225 - RNA, 19 nt, Artificial Sequence
  Description of Artificial Sequence: Synthetic oligonucleotide
  Antisense strand to SEQ ID NO: 287224
uccuggagcaguuuaaagu

SEQ ID NO: 287226 - RNA, 19 nt, Artificial Sequence
  Description of Artificial Sequence: Synthetic oligonucleotide
  Sense strand starting at position 3049 of SEQ ID NO: 3692
ucucuuggcuaagugagaa

SEQ ID NO: 287227 - RNA, 19 nt, Artificial Sequence
  Description of Artificial Sequence: Synthetic oligonucleotide
  Antisense strand to SEQ ID NO: 287226
uucucacuuagccaagaga

SEQ ID NO: 287228 - RNA, 19 nt, Artificial Sequence
  Description of Artificial Sequence: Synthetic oligonucleotide
  Sense strand starting at position 3370 of SEQ ID NO: 3692
cgcuuuccggauuauaaag

SEQ ID NO: 287229 - RNA, 19 nt, Artificial Sequence
  Description of Artificial Sequence: Synthetic oligonucleotide
  Antisense strand to SEQ ID NO: 287228
cuuuauaauccggaaagcg

SEQ ID NO: 287230 - RNA, 19 nt, Artificial Sequence
  Description of Artificial Sequence: Synthetic oligonucleotide
  Sense strand starting at position 3454 of SEQ ID NO: 3692
guagaagacuuagccauau

SEQ ID NO: 287231 - RNA, 19 nt, Artificial Sequence
  Description of Artificial Sequence: Synthetic oligonucleotide
  Antisense strand to SEQ ID NO: 287230
auauggcuaagucuucuac

SEQ ID NO: 287232 - RNA, 19 nt, Artificial Sequence
  Description of Artificial Sequence: Synthetic oligonucleotide
  Sense strand starting at position 3480 of SEQ ID NO: 3692
ggccacauuugugucugau

SEQ ID NO: 287233 - RNA, 19 nt, Artificial Sequence
  Description of Artificial Sequence: Synthetic oligonucleotide
  Antisense strand to SEQ ID NO: 287232
aucagacacaaauguggcc

SEQ ID NO: 287234 - RNA, 19 nt, Artificial Sequence
  Description of Artificial Sequence: Synthetic oligonucleotide
  Sense strand starting at position 3520 of SEQ ID NO: 3692
cccuuaccagaugguaauu

SEQ ID NO: 287235 - RNA, 19 nt, Artificial Sequence
  Description of Artificial Sequence: Synthetic oligonucleotide
  Antisense strand to SEQ ID NO: 287234
aauuaccaucugguaaggg

SEQ ID NO: 287236 - RNA, 19 nt, Artificial Sequence
  Description of Artificial Sequence: Synthetic oligonucleotide
  Sense strand starting at position 3522 of SEQ ID NO: 3692
cuuaccagaugguaauuua

SEQ ID NO: 287237 - RNA, 19 nt, Artificial Sequence
  Description of Artificial Sequence: Synthetic oligonucleotide
  Antisense strand to SEQ ID NO: 287236
uaaauuaccaucugguaag

SEQ ID NO: 287238 - RNA, 19 nt, Artificial Sequence
  Description of Artificial Sequence: Synthetic oligonucleotide
  Sense strand starting at position 3533 of SEQ ID NO: 3692
guaauuuaggccuggaguu

SEQ ID NO: 287239 - RNA, 19 nt, Artificial Sequence
  Description of Artificial Sequence: Synthetic oligonucleotide
  Antisense strand to SEQ ID NO: 287238
aacuccaggccuaaauuac

SEQ ID NO: 287240 - RNA, 19 nt, Artificial Sequence
  Description of Artificial Sequence: Synthetic oligonucleotide
  Sense strand starting at position 3614 of SEQ ID NO: 3692
uaagacaacugcuugguua

SEQ ID NO: 287241 - RNA, 19 nt, Artificial Sequence
  Description of Artificial Sequence: Synthetic oligonucleotide
  Antisense strand to SEQ ID NO: 287240
uaaccaagcaguugucuua

SEQ ID NO: 287242 - RNA, 19 nt, Artificial Sequence
  Description of Artificial Sequence: Synthetic oligonucleotide
  Sense strand starting at position 3616 of SEQ ID NO: 3692
agacaacugcuugguuaga

SEQ ID NO: 287243 - RNA, 19 nt, Artificial Sequence
  Description of Artificial Sequence: Synthetic oligonucleotide
  Antisense strand to SEQ ID NO: 287242
ucuaaccaagcaguugucu

SEQ ID NO: 287244 - RNA, 19 nt, Artificial Sequence
  Description of Artificial Sequence: Synthetic oligonucleotide
  Sense strand starting at position 3617 of SEQ ID NO: 3692
gacaacugcuugguuagaa

SEQ ID NO: 287245 - RNA, 19 nt, Artificial Sequence
  Description of Artificial Sequence: Synthetic oligonucleotide
  Antisense strand to SEQ ID NO: 287244
uucuaaccaagcaguuguc

SEQ ID NO: 287246 - RNA, 19 nt, Artificial Sequence
  Description of Artificial Sequence: Synthetic oligonucleotide
  Sense strand starting at position 3649 of SEQ ID NO: 3692
ggcuauagcccagggauga

SEQ ID NO: 287247 - RNA, 19 nt, Artificial Sequence
  Description of Artificial Sequence: Synthetic oligonucleotide
  Antisense strand to SEQ ID NO: 287246
ucaucccugggcuauagcc

SEQ ID NO: 287248 - RNA, 19 nt, Artificial Sequence
  Description of Artificial Sequence: Synthetic oligonucleotide
  Sense strand starting at position 3739 of SEQ ID NO: 3692
gagugacuccugugauaga

SEQ ID NO: 287249 - RNA, 19 nt, Artificial Sequence
  Description of Artificial Sequence: Synthetic oligonucleotide
  Antisense strand to SEQ ID NO: 287248
ucuaucacaggagucacuc

SEQ ID NO: 287250 - RNA, 19 nt, Artificial Sequence
  Description of Artificial Sequence: Synthetic oligonucleotide
  Sense strand starting at position 3893 of SEQ ID NO: 3692
cuuacugaccaguaguaau

SEQ ID NO: 287251 - RNA, 19 nt, Artificial Sequence
  Description of Artificial Sequence: Synthetic oligonucleotide
  Antisense strand to SEQ ID NO: 287250
auuacuacuggucaguaag

SEQ ID NO: 287252 - RNA, 19 nt, Artificial Sequence
  Description of Artificial Sequence: Synthetic oligonucleotide
  Sense strand starting at position 50 of SEQ ID NO: 3693
accgcucauacacgugaua

SEQ ID NO: 287253 - RNA, 19 nt, Artificial Sequence
  Description of Artificial Sequence: Synthetic oligonucleotide
  Antisense strand to SEQ ID NO: 287252
uaucacguguaugagcggu

SEQ ID NO: 287254 - RNA, 19 nt, Artificial Sequence
  Description of Artificial Sequence: Synthetic oligonucleotide
  Sense strand starting at position 52 of SEQ ID NO: 3693
cgcucauacacgugauaga

SEQ ID NO: 287255 - RNA, 19 nt, Artificial Sequence
  Description of Artificial Sequence: Synthetic oligonucleotide
  Antisense strand to SEQ ID NO: 287254
ucuaucacguguaugagcg

SEQ ID NO: 287256 - RNA, 19 nt, Artificial Sequence
  Description of Artificial Sequence: Synthetic oligonucleotide
  Sense strand starting at position 448 of SEQ ID NO: 3693
ccgguaaaugcgcugugaa

SEQ ID NO: 287257 - RNA, 19 nt, Artificial Sequence
  Description of Artificial Sequence: Synthetic oligonucleotide
  Antisense strand to SEQ ID NO: 287256
uucacagcgcauuuaccgg

SEQ ID NO: 287258 - RNA, 19 nt, Artificial Sequence
  Description of Artificial Sequence: Synthetic oligonucleotide
  Sense strand starting at position 449 of SEQ ID NO: 3693
cgguaaaugcgcugugaau

SEQ ID NO: 287259 - RNA, 19 nt, Artificial Sequence
  Description of Artificial Sequence: Synthetic oligonucleotide
  Antisense strand to SEQ ID NO: 287258
auucacagcgcauuuaccg

SEQ ID NO: 287260 - RNA, 19 nt, Artificial Sequence
  Description of Artificial Sequence: Synthetic oligonucleotide
  Sense strand starting at position 607 of SEQ ID NO: 3693
ggagguauuuaucagaaua

SEQ ID NO: 287261 - RNA, 19 nt, Artificial Sequence
  Description of Artificial Sequence: Synthetic oligonucleotide
  Antisense strand to SEQ ID NO: 287260
uauucugauaaauaccucc

SEQ ID NO: 287262 - RNA, 19 nt, Artificial Sequence
  Description of Artificial Sequence: Synthetic oligonucleotide
  Sense strand starting at position 609 of SEQ ID NO: 3693
agguauuuaucagaauaac

SEQ ID NO: 287263 - RNA, 19 nt, Artificial Sequence
  Description of Artificial Sequence: Synthetic oligonucleotide
  Antisense strand to SEQ ID NO: 287262
guuauucugauaaauaccu

SEQ ID NO: 287264 - RNA, 19 nt, Artificial Sequence
  Description of Artificial Sequence: Synthetic oligonucleotide
  Sense strand starting at position 643 of SEQ ID NO: 3693
gggcgcuacaaucguuauu

SEQ ID NO: 287265 - RNA, 19 nt, Artificial Sequence
  Description of Artificial Sequence: Synthetic oligonucleotide
  Antisense strand to SEQ ID NO: 287264
aauaacgauuguagcgccc

SEQ ID NO: 287266 - RNA, 19 nt, Artificial Sequence
  Description of Artificial Sequence: Synthetic oligonucleotide
  Sense strand starting at position 644 of SEQ ID NO: 3693
ggcgcuacaaucguuauua

SEQ ID NO: 287267 - RNA, 19 nt, Artificial Sequence
  Description of Artificial Sequence: Synthetic oligonucleotide
  Antisense strand to SEQ ID NO: 287266
uaauaacgauuguagcgcc

SEQ ID NO: 287268 - RNA, 19 nt, Artificial Sequence
  Description of Artificial Sequence: Synthetic oligonucleotide
  Sense strand starting at position 645 of SEQ ID NO: 3693
gcgcuacaaucguuauuau

SEQ ID NO: 287269 - RNA, 19 nt, Artificial Sequence
  Description of Artificial Sequence: Synthetic oligonucleotide
  Antisense strand to SEQ ID NO: 287268
auaauaacgauuguagcgc

SEQ ID NO: 287270 - RNA, 19 nt, Artificial Sequence
  Description of Artificial Sequence: Synthetic oligonucleotide
  Sense strand starting at position 646 of SEQ ID NO: 3693
cgcuacaaucguuauuauu

SEQ ID NO: 287271 - RNA, 19 nt, Artificial Sequence
  Description of Artificial Sequence: Synthetic oligonucleotide
  Antisense strand to SEQ ID NO: 287270
aauaauaacgauuguagcg

SEQ ID NO: 287272 - RNA, 19 nt, Artificial Sequence
  Description of Artificial Sequence: Synthetic oligonucleotide
  Sense strand starting at position 664 of SEQ ID NO: 3693
uuuggagcguucuuaucuu

SEQ ID NO: 287273 - RNA, 19 nt, Artificial Sequence
  Description of Artificial Sequence: Synthetic oligonucleotide
  Antisense strand to SEQ ID NO: 287272
aagauaagaacgcuccaaa

SEQ ID NO: 287274 - RNA, 19 nt, Artificial Sequence
  Description of Artificial Sequence: Synthetic oligonucleotide
  Sense strand starting at position 742 of SEQ ID NO: 3693
uuugaauucuuagugcaag

SEQ ID NO: 287275 - RNA, 19 nt, Artificial Sequence
  Description of Artificial Sequence: Synthetic oligonucleotide
  Antisense strand to SEQ ID NO: 287274
cuugcacuaagaauucaaa

SEQ ID NO: 287276 - RNA, 19 nt, Artificial Sequence
  Description of Artificial Sequence: Synthetic oligonucleotide
  Sense strand starting at position 784 of SEQ ID NO: 3693
uuaacaucgcuccagaaag

SEQ ID NO: 287277 - RNA, 19 nt, Artificial Sequence
  Description of Artificial Sequence: Synthetic oligonucleotide
  Antisense strand to SEQ ID NO: 287276
cuuucuggagcgauguuaa

SEQ ID NO: 287278 - RNA, 19 nt, Artificial Sequence
  Description of Artificial Sequence: Synthetic oligonucleotide
  Sense strand starting at position 786 of SEQ ID NO: 3693
aacaucgcuccagaaaguu

SEQ ID NO: 287279 - RNA, 19 nt, Artificial Sequence
  Description of Artificial Sequence: Synthetic oligonucleotide
  Antisense strand to SEQ ID NO: 287278
aacuuucuggagcgauguu

SEQ ID NO: 287280 - RNA, 19 nt, Artificial Sequence
  Description of Artificial Sequence: Synthetic oligonucleotide
  Sense strand starting at position 1113 of SEQ ID NO: 3693
cgaggcuuccgccugcauu

SEQ ID NO: 287281 - RNA, 19 nt, Artificial Sequence
  Description of Artificial Sequence: Synthetic oligonucleotide
  Antisense strand to SEQ ID NO: 287280
aaugcaggcggaagccucg

SEQ ID NO: 287282 - RNA, 19 nt, Artificial Sequence
  Description of Artificial Sequence: Synthetic oligonucleotide
  Sense strand starting at position 1134 of SEQ ID NO: 3693
ccgacuucgcgguccgaga

SEQ ID NO: 287283 - RNA, 19 nt, Artificial Sequence
  Description of Artificial Sequence: Synthetic oligonucleotide
  Antisense strand to SEQ ID NO: 287282
ucucggaccgcgaagucgg

SEQ ID NO: 287284 - RNA, 19 nt, Artificial Sequence
  Description of Artificial Sequence: Synthetic oligonucleotide
  Sense strand starting at position 1255 of SEQ ID NO: 3693
gucugaaacuuggcugacu

SEQ ID NO: 287285 - RNA, 19 nt, Artificial Sequence
  Description of Artificial Sequence: Synthetic oligonucleotide
  Antisense strand to SEQ ID NO: 287284
agucagccaaguuucagac

SEQ ID NO: 287286 - RNA, 19 nt, Artificial Sequence
  Description of Artificial Sequence: Synthetic oligonucleotide
  Sense strand starting at position 1275 of SEQ ID NO: 3693
gggcucuguccauggagca

SEQ ID NO: 287287 - RNA, 19 nt, Artificial Sequence
  Description of Artificial Sequence: Synthetic oligonucleotide
  Antisense strand to SEQ ID NO: 287286
ugcuccauggacagagccc

SEQ ID NO: 287288 - RNA, 19 nt, Artificial Sequence
  Description of Artificial Sequence: Synthetic oligonucleotide
  Sense strand starting at position 1276 of SEQ ID NO: 3693
ggcucuguccauggagcaa

SEQ ID NO: 287289 - RNA, 19 nt, Artificial Sequence
  Description of Artificial Sequence: Synthetic oligonucleotide
  Antisense strand to SEQ ID NO: 287288
uugcuccauggacagagcc

SEQ ID NO: 287290 - RNA, 19 nt, Artificial Sequence
  Description of Artificial Sequence: Synthetic oligonucleotide
  Sense strand starting at position 1334 of SEQ ID NO: 3693
uuugcaguguucuccuagu

SEQ ID NO: 287291 - RNA, 19 nt, Artificial Sequence
  Description of Artificial Sequence: Synthetic oligonucleotide
  Antisense strand to SEQ ID NO: 287290
acuaggagaacacugcaaa

SEQ ID NO: 287292 - RNA, 19 nt, Artificial Sequence
  Description of Artificial Sequence: Synthetic oligonucleotide
  Sense strand starting at position 1336 of SEQ ID NO: 3693
ugcaguguucuccuagucu

SEQ ID NO: 287293 - RNA, 19 nt, Artificial Sequence
  Description of Artificial Sequence: Synthetic oligonucleotide
  Antisense strand to SEQ ID NO: 287292
agacuaggagaacacugca

SEQ ID NO: 287294 - RNA, 19 nt, Artificial Sequence
  Description of Artificial Sequence: Synthetic oligonucleotide
  Sense strand starting at position 1430 of SEQ ID NO: 3693
gugcggagaugguuguuau

SEQ ID NO: 287295 - RNA, 19 nt, Artificial Sequence
  Description of Artificial Sequence: Synthetic oligonucleotide
  Antisense strand to SEQ ID NO: 287294
auaacaaccaucuccgcac

SEQ ID NO: 287296 - RNA, 19 nt, Artificial Sequence
  Description of Artificial Sequence: Synthetic oligonucleotide
  Sense strand starting at position 1431 of SEQ ID NO: 3693
ugcggagaugguuguuaug

SEQ ID NO: 287297 - RNA, 19 nt, Artificial Sequence
  Description of Artificial Sequence: Synthetic oligonucleotide
  Antisense strand to SEQ ID NO: 287296
cauaacaaccaucuccgca

SEQ ID NO: 287298 - RNA, 19 nt, Artificial Sequence
  Description of Artificial Sequence: Synthetic oligonucleotide
  Sense strand starting at position 1433 of SEQ ID NO: 3693
cggagaugguuguuaugau

SEQ ID NO: 287299 - RNA, 19 nt, Artificial Sequence
  Description of Artificial Sequence: Synthetic oligonucleotide
  Antisense strand to SEQ ID NO: 287298
aucauaacaaccaucuccg

SEQ ID NO: 287300 - RNA, 19 nt, Artificial Sequence
  Description of Artificial Sequence: Synthetic oligonucleotide
  Sense strand starting at position 1434 of SEQ ID NO: 3693
ggagaugguuguuaugaug

SEQ ID NO: 287301 - RNA, 19 nt, Artificial Sequence
  Description of Artificial Sequence: Synthetic oligonucleotide
  Antisense strand to SEQ ID NO: 287300
caucauaacaaccaucucc

SEQ ID NO: 287302 - RNA, 19 nt, Artificial Sequence
  Description of Artificial Sequence: Synthetic oligonucleotide
  Sense strand starting at position 1884 of SEQ ID NO: 3693
auuauuaguugcguugagu

SEQ ID NO: 287303 - RNA, 19 nt, Artificial Sequence
  Description of Artificial Sequence: Synthetic oligonucleotide
  Antisense strand to SEQ ID NO: 287302
acucaacgcaacuaauaau

SEQ ID NO: 287304 - RNA, 19 nt, Artificial Sequence
  Description of Artificial Sequence: Synthetic oligonucleotide
  Sense strand starting at position 1885 of SEQ ID NO: 3693
uuauuaguugcguugaguc

SEQ ID NO: 287305 - RNA, 19 nt, Artificial Sequence
  Description of Artificial Sequence: Synthetic oligonucleotide
  Antisense strand to SEQ ID NO: 287304
gacucaacgcaacuaauaa

SEQ ID NO: 287306 - RNA, 19 nt, Artificial Sequence
  Description of Artificial Sequence: Synthetic oligonucleotide
  Sense strand starting at position 1887 of SEQ ID NO: 3693
auuaguugcguugagucau

SEQ ID NO: 287307 - RNA, 19 nt, Artificial Sequence
  Description of Artificial Sequence: Synthetic oligonucleotide
  Antisense strand to SEQ ID NO: 287306
augacucaacgcaacuaau

SEQ ID NO: 287308 - RNA, 19 nt, Artificial Sequence
  Description of Artificial Sequence: Synthetic oligonucleotide
  Sense strand starting at position 1893 of SEQ ID NO: 3693
ugcguugagucaucaggca

SEQ ID NO: 287309 - RNA, 19 nt, Artificial Sequence
  Description of Artificial Sequence: Synthetic oligonucleotide
  Antisense strand to SEQ ID NO: 287308
ugccugaugacucaacgca

SEQ ID NO: 287310 - RNA, 19 nt, Artificial Sequence
  Description of Artificial Sequence: Synthetic oligonucleotide
  Sense strand starting at position 1898 of SEQ ID NO: 3693
ugagucaucaggcaaagug

SEQ ID NO: 287311 - RNA, 19 nt, Artificial Sequence
  Description of Artificial Sequence: Synthetic oligonucleotide
  Antisense strand to SEQ ID NO: 287310
cacuuugccugaugacuca

SEQ ID NO: 287312 - RNA, 19 nt, Artificial Sequence
  Description of Artificial Sequence: Synthetic oligonucleotide
  Sense strand starting at position 1927 of SEQ ID NO: 3693
gguuguccucgguuuccga

SEQ ID NO: 287313 - RNA, 19 nt, Artificial Sequence
  Description of Artificial Sequence: Synthetic oligonucleotide
  Antisense strand to SEQ ID NO: 287312
ucggaaaccgaggacaacc

SEQ ID NO: 287314 - RNA, 19 nt, Artificial Sequence
  Description of Artificial Sequence: Synthetic oligonucleotide
  Sense strand starting at position 2022 of SEQ ID NO: 3693
ucuggauuauuucgggaug

SEQ ID NO: 287315 - RNA, 19 nt, Artificial Sequence
  Description of Artificial Sequence: Synthetic oligonucleotide
  Antisense strand to SEQ ID NO: 287314
caucccgaaauaauccaga

SEQ ID NO: 287316 - RNA, 19 nt, Artificial Sequence
  Description of Artificial Sequence: Synthetic oligonucleotide
  Sense strand starting at position 2074 of SEQ ID NO: 3693
acugguccaccgcaagaaa

SEQ ID NO: 287317 - RNA, 19 nt, Artificial Sequence
  Description of Artificial Sequence: Synthetic oligonucleotide
  Antisense strand to SEQ ID NO: 287316
uuucuugcgguggaccagu

SEQ ID NO: 287318 - RNA, 19 nt, Artificial Sequence
  Description of Artificial Sequence: Synthetic oligonucleotide
  Sense strand starting at position 2611 of SEQ ID NO: 3693
cgcggaguacuuucgacuu

SEQ ID NO: 287319 - RNA, 19 nt, Artificial Sequence
  Description of Artificial Sequence: Synthetic oligonucleotide
  Antisense strand to SEQ ID NO: 287318
aagucgaaaguacuccgcg

SEQ ID NO: 287320 - RNA, 19 nt, Artificial Sequence
  Description of Artificial Sequence: Synthetic oligonucleotide
  Sense strand starting at position 2618 of SEQ ID NO: 3693
uacuuucgacuuuggagau

SEQ ID NO: 287321 - RNA, 19 nt, Artificial Sequence
  Description of Artificial Sequence: Synthetic oligonucleotide
  Antisense strand to SEQ ID NO: 287320
aucuccaaagucgaaagua

SEQ ID NO: 287322 - RNA, 19 nt, Artificial Sequence
  Description of Artificial Sequence: Synthetic oligonucleotide
  Sense strand starting at position 2821 of SEQ ID NO: 3693
gcgaguccggaacaauagu

SEQ ID NO: 287323 - RNA, 19 nt, Artificial Sequence
  Description of Artificial Sequence: Synthetic oligonucleotide
  Antisense strand to SEQ ID NO: 287322
acuauuguuccggacucgc

SEQ ID NO: 287324 - RNA, 19 nt, Artificial Sequence
  Description of Artificial Sequence: Synthetic oligonucleotide
  Sense strand starting at position 3521 of SEQ ID NO: 3693
cguugacucucccuccuaa

SEQ ID NO: 287325 - RNA, 19 nt, Artificial Sequence
  Description of Artificial Sequence: Synthetic oligonucleotide
  Antisense strand to SEQ ID NO: 287324
uuaggagggagagucaacg

SEQ ID NO: 287326 - RNA, 19 nt, Artificial Sequence
  Description of Artificial Sequence: Synthetic oligonucleotide
  Sense strand starting at position 3597 of SEQ ID NO: 3693
uuaagaagcguugacugua

SEQ ID NO: 287327 - RNA, 19 nt, Artificial Sequence
  Description of Artificial Sequence: Synthetic oligonucleotide
  Antisense strand to SEQ ID NO: 287326
uacagucaacgcuucuuaa

SEQ ID NO: 287328 - RNA, 19 nt, Artificial Sequence
  Description of Artificial Sequence: Synthetic oligonucleotide
  Sense strand starting at position 3664 of SEQ ID NO: 3693
gggagcaguucuguaaauc

SEQ ID NO: 287329 - RNA, 19 nt, Artificial Sequence
  Description of Artificial Sequence: Synthetic oligonucleotide
  Antisense strand to SEQ ID NO: 287328
gauuuacagaacugcuccc

SEQ ID NO: 287330 - RNA, 19 nt, Artificial Sequence
  Description of Artificial Sequence: Synthetic oligonucleotide
  Sense strand starting at position 3665 of SEQ ID NO: 3693
ggagcaguucuguaaaucc

SEQ ID NO: 287331 - RNA, 19 nt, Artificial Sequence
  Description of Artificial Sequence: Synthetic oligonucleotide
  Antisense strand to SEQ ID NO: 287330
ggauuuacagaacugcucc

SEQ ID NO: 287332 - RNA, 19 nt, Artificial Sequence
  Description of Artificial Sequence: Synthetic oligonucleotide
  Sense strand starting at position 129 of SEQ ID NO: 3694
gagaaugacugcccugcua

SEQ ID NO: 287333 - RNA, 19 nt, Artificial Sequence
  Description of Artificial Sequence: Synthetic oligonucleotide
  Antisense strand to SEQ ID NO: 287332
uagcagggcagucauucuc

SEQ ID NO: 287334 - RNA, 19 nt, Artificial Sequence
  Description of Artificial Sequence: Synthetic oligonucleotide
  Sense strand starting at position 158 of SEQ ID NO: 3694
cuuguagaaaucgacugua

SEQ ID NO: 287335 - RNA, 19 nt, Artificial Sequence
  Description of Artificial Sequence: Synthetic oligonucleotide
  Antisense strand to SEQ ID NO: 287334
uacagucgauuucuacaag

SEQ ID NO: 287336 - RNA, 19 nt, Artificial Sequence
  Description of Artificial Sequence: Synthetic oligonucleotide
  Sense strand starting at position 161 of SEQ ID NO: 3694
guagaaaucgacuguaaac

SEQ ID NO: 287337 - RNA, 19 nt, Artificial Sequence
  Description of Artificial Sequence: Synthetic oligonucleotide
  Antisense strand to SEQ ID NO: 287336
guuuacagucgauuucuac

SEQ ID NO: 287338 - RNA, 19 nt, Artificial Sequence
  Description of Artificial Sequence: Synthetic oligonucleotide
  Sense strand starting at position 1063 of SEQ ID NO: 3694
gaccuuggccuccgggaaa

SEQ ID NO: 287339 - RNA, 19 nt, Artificial Sequence
  Description of Artificial Sequence: Synthetic oligonucleotide
  Antisense strand to SEQ ID NO: 287338
uuucccggaggccaagguc

SEQ ID NO: 287340 - RNA, 19 nt, Artificial Sequence
  Description of Artificial Sequence: Synthetic oligonucleotide
  Sense strand starting at position 1610 of SEQ ID NO: 3694
cccuuauuauuggcuggga

SEQ ID NO: 287341 - RNA, 19 nt, Artificial Sequence
  Description of Artificial Sequence: Synthetic oligonucleotide
  Antisense strand to SEQ ID NO: 287340
ucccagccaauaauaaggg

SEQ ID NO: 287342 - RNA, 19 nt, Artificial Sequence
  Description of Artificial Sequence: Synthetic oligonucleotide
  Sense strand starting at position 1625 of SEQ ID NO: 3694
gggaccuguuccuuuccaa

SEQ ID NO: 287343 - RNA, 19 nt, Artificial Sequence
  Description of Artificial Sequence: Synthetic oligonucleotide
  Antisense strand to SEQ ID NO: 287342
uuggaaaggaacagguccc

SEQ ID NO: 287344 - RNA, 19 nt, Artificial Sequence
  Description of Artificial Sequence: Synthetic oligonucleotide
  Sense strand starting at position 1943 of SEQ ID NO: 3694
ggguuuguugguuaccuaa

SEQ ID NO: 287345 - RNA, 19 nt, Artificial Sequence
  Description of Artificial Sequence: Synthetic oligonucleotide
  Antisense strand to SEQ ID NO: 287344
uuagguaaccaacaaaccc

SEQ ID NO: 287346 - RNA, 19 nt, Artificial Sequence
  Description of Artificial Sequence: Synthetic oligonucleotide
  Sense strand starting at position 2067 of SEQ ID NO: 3694
gaguguagaugugugaaag

SEQ ID NO: 287347 - RNA, 19 nt, Artificial Sequence
  Description of Artificial Sequence: Synthetic oligonucleotide
  Antisense strand to SEQ ID NO: 287346
cuuucacacaucuacacuc

SEQ ID NO: 287348 - RNA, 19 nt, Artificial Sequence
  Description of Artificial Sequence: Synthetic oligonucleotide
  Sense strand starting at position 2078 of SEQ ID NO: 3694
ugugaaaguuauuuguuuc

SEQ ID NO: 287349 - RNA, 19 nt, Artificial Sequence
  Description of Artificial Sequence: Synthetic oligonucleotide
  Antisense strand to SEQ ID NO: 287348
gaaacaaauaacuuucaca

SEQ ID NO: 287350 - RNA, 19 nt, Artificial Sequence
  Description of Artificial Sequence: Synthetic oligonucleotide
  Sense strand starting at position 2112 of SEQ ID NO: 3694
gagagcaaucaucauugua

SEQ ID NO: 287351 - RNA, 19 nt, Artificial Sequence
  Description of Artificial Sequence: Synthetic oligonucleotide
  Antisense strand to SEQ ID NO: 287350
uacaaugaugauugcucuc

SEQ ID NO: 287352 - RNA, 19 nt, Artificial Sequence
  Description of Artificial Sequence: Synthetic oligonucleotide
  Sense strand starting at position 2127 of SEQ ID NO: 3694
uguagcuuugagugaagag

SEQ ID NO: 287353 - RNA, 19 nt, Artificial Sequence
  Description of Artificial Sequence: Synthetic oligonucleotide
  Antisense strand to SEQ ID NO: 287352
cucuucacucaaagcuaca

SEQ ID NO: 287354 - RNA, 19 nt, Artificial Sequence
  Description of Artificial Sequence: Synthetic oligonucleotide
  Sense strand starting at position 2128 of SEQ ID NO: 3694
guagcuuugagugaagagu

SEQ ID NO: 287355 - RNA, 19 nt, Artificial Sequence
  Description of Artificial Sequence: Synthetic oligonucleotide
  Antisense strand to SEQ ID NO: 287354
acucuucacucaaagcuac

SEQ ID NO: 287356 - RNA, 19 nt, Artificial Sequence
  Description of Artificial Sequence: Synthetic oligonucleotide
  Sense strand starting at position 2154 of SEQ ID NO: 3694
ggugaacuguuguuauuuc

SEQ ID NO: 287357 - RNA, 19 nt, Artificial Sequence
  Description of Artificial Sequence: Synthetic oligonucleotide
  Antisense strand to SEQ ID NO: 287356
gaaauaacaacaguucacc

SEQ ID NO: 287358 - RNA, 19 nt, Artificial Sequence
  Description of Artificial Sequence: Synthetic oligonucleotide
  Sense strand starting at position 2162 of SEQ ID NO: 3694
guuguuauuucugucaaca

SEQ ID NO: 287359 - RNA, 19 nt, Artificial Sequence
  Description of Artificial Sequence: Synthetic oligonucleotide
  Antisense strand to SEQ ID NO: 287358
uguugacagaaauaacaac

SEQ ID NO: 287360 - RNA, 19 nt, Artificial Sequence
  Description of Artificial Sequence: Synthetic oligonucleotide
  Sense strand starting at position 2218 of SEQ ID NO: 3694
guauaauauaagggagggu

SEQ ID NO: 287361 - RNA, 19 nt, Artificial Sequence
  Description of Artificial Sequence: Synthetic oligonucleotide
  Antisense strand to SEQ ID NO: 287360
acccucccuuauauuauac

SEQ ID NO: 287362 - RNA, 19 nt, Artificial Sequence
  Description of Artificial Sequence: Synthetic oligonucleotide
  Sense strand starting at position 2254 of SEQ ID NO: 3694
ucccguuggauaugacaga

SEQ ID NO: 287363 - RNA, 19 nt, Artificial Sequence
  Description of Artificial Sequence: Synthetic oligonucleotide
  Antisense strand to SEQ ID NO: 287362
ucugucauauccaacggga

SEQ ID NO: 287364 - RNA, 19 nt, Artificial Sequence
  Description of Artificial Sequence: Synthetic oligonucleotide
  Sense strand starting at position 2271 of SEQ ID NO: 3694
gaaagacaucugcaguguu

SEQ ID NO: 287365 - RNA, 19 nt, Artificial Sequence
  Description of Artificial Sequence: Synthetic oligonucleotide
  Antisense strand to SEQ ID NO: 287364
aacacugcagaugucuuuc

SEQ ID NO: 287366 - RNA, 19 nt, Artificial Sequence
  Description of Artificial Sequence: Synthetic oligonucleotide
  Sense strand starting at position 2421 of SEQ ID NO: 3694
accaguucuuaauuguaag

SEQ ID NO: 287367 - RNA, 19 nt, Artificial Sequence
  Description of Artificial Sequence: Synthetic oligonucleotide
  Antisense strand to SEQ ID NO: 287366
cuuacaauuaagaacuggu

SEQ ID NO: 287368 - RNA, 19 nt, Artificial Sequence
  Description of Artificial Sequence: Synthetic oligonucleotide
  Sense strand starting at position 2517 of SEQ ID NO: 3694
auuuguuagugucugcgga

SEQ ID NO: 287369 - RNA, 19 nt, Artificial Sequence
  Description of Artificial Sequence: Synthetic oligonucleotide
  Antisense strand to SEQ ID NO: 287368
uccgcagacacuaacaaau

SEQ ID NO: 287370 - RNA, 19 nt, Artificial Sequence
  Description of Artificial Sequence: Synthetic oligonucleotide
  Sense strand starting at position 2573 of SEQ ID NO: 3694
gcaaucuaagaauguuucu

SEQ ID NO: 287371 - RNA, 19 nt, Artificial Sequence
  Description of Artificial Sequence: Synthetic oligonucleotide
  Antisense strand to SEQ ID NO: 287370
agaaacauucuuagauugc

SEQ ID NO: 287372 - RNA, 19 nt, Artificial Sequence
  Description of Artificial Sequence: Synthetic oligonucleotide
  Sense strand starting at position 2731 of SEQ ID NO: 3694
aagaguauuucugaaucag

SEQ ID NO: 287373 - RNA, 19 nt, Artificial Sequence
  Description of Artificial Sequence: Synthetic oligonucleotide
  Antisense strand to SEQ ID NO: 287372
cugauucagaaauacucuu

SEQ ID NO: 287374 - RNA, 19 nt, Artificial Sequence
  Description of Artificial Sequence: Synthetic oligonucleotide
  Sense strand starting at position 2740 of SEQ ID NO: 3694
ucugaaucagauuauuguu

SEQ ID NO: 287375 - RNA, 19 nt, Artificial Sequence
  Description of Artificial Sequence: Synthetic oligonucleotide
  Antisense strand to SEQ ID NO: 287374
aacaauaaucugauucaga

SEQ ID NO: 287376 - RNA, 19 nt, Artificial Sequence
  Description of Artificial Sequence: Synthetic oligonucleotide
  Sense strand starting at position 2745 of SEQ ID NO: 3694
aucagauuauuguuagagu

SEQ ID NO: 287377 - RNA, 19 nt, Artificial Sequence
  Description of Artificial Sequence: Synthetic oligonucleotide
  Antisense strand to SEQ ID NO: 287376
acucuaacaauaaucugau

SEQ ID NO: 287378 - RNA, 19 nt, Artificial Sequence
  Description of Artificial Sequence: Synthetic oligonucleotide
  Sense strand starting at position 2794 of SEQ ID NO: 3694
ggaauuaaaguuugcaaac

SEQ ID NO: 287379 - RNA, 19 nt, Artificial Sequence
  Description of Artificial Sequence: Synthetic oligonucleotide
  Antisense strand to SEQ ID NO: 287378
guuugcaaacuuuaauucc

SEQ ID NO: 287380 - RNA, 19 nt, Artificial Sequence
  Description of Artificial Sequence: Synthetic oligonucleotide
  Sense strand starting at position 2942 of SEQ ID NO: 3694
cccuuaguucgucucguuu

SEQ ID NO: 287381 - RNA, 19 nt, Artificial Sequence
  Description of Artificial Sequence: Synthetic oligonucleotide
  Antisense strand to SEQ ID NO: 287380
aaacgagacgaacuaaggg

SEQ ID NO: 287382 - RNA, 19 nt, Artificial Sequence
  Description of Artificial Sequence: Synthetic oligonucleotide
  Sense strand starting at position 3051 of SEQ ID NO: 3694
gcacauuccaagugaagga

SEQ ID NO: 287383 - RNA, 19 nt, Artificial Sequence
  Description of Artificial Sequence: Synthetic oligonucleotide
  Antisense strand to SEQ ID NO: 287382
uccuucacuuggaaugugc

SEQ ID NO: 287384 - RNA, 19 nt, Artificial Sequence
  Description of Artificial Sequence: Synthetic oligonucleotide
  Sense strand starting at position 3064 of SEQ ID NO: 3694
gaaggacgucucgcgcauu

SEQ ID NO: 287385 - RNA, 19 nt, Artificial Sequence
  Description of Artificial Sequence: Synthetic oligonucleotide
  Antisense strand to SEQ ID NO: 287384
aaugcgcgagacguccuuc

SEQ ID NO: 287386 - RNA, 19 nt, Artificial Sequence
  Description of Artificial Sequence: Synthetic oligonucleotide
  Sense strand starting at position 3078 of SEQ ID NO: 3694
gcauucuucccagagcuac

SEQ ID NO: 287387 - RNA, 19 nt, Artificial Sequence
  Description of Artificial Sequence: Synthetic oligonucleotide
  Antisense strand to SEQ ID NO: 287386
guagcucugggaagaaugc

SEQ ID NO: 287388 - RNA, 19 nt, Artificial Sequence
  Description of Artificial Sequence: Synthetic oligonucleotide
  Sense strand starting at position 3232 of SEQ ID NO: 3694
ucugcuuucccagaggauc

SEQ ID NO: 287389 - RNA, 19 nt, Artificial Sequence
  Description of Artificial Sequence: Synthetic oligonucleotide
  Antisense strand to SEQ ID NO: 287388
gauccucugggaaagcaga

SEQ ID NO: 287390 - RNA, 19 nt, Artificial Sequence
  Description of Artificial Sequence: Synthetic oligonucleotide
  Sense strand starting at position 3280 of SEQ ID NO: 3694
gcuggacuccuaugaucac

SEQ ID NO: 287391 - RNA, 19 nt, Artificial Sequence
  Description of Artificial Sequence: Synthetic oligonucleotide
  Antisense strand to SEQ ID NO: 287390
gugaucauaggaguccagc

SEQ ID NO: 287392 - RNA, 19 nt, Artificial Sequence
  Description of Artificial Sequence: Synthetic oligonucleotide
  Sense strand starting at position 3403 of SEQ ID NO: 3694
guaucaggaaguugagauc

SEQ ID NO: 287393 - RNA, 19 nt, Artificial Sequence
  Description of Artificial Sequence: Synthetic oligonucleotide
  Antisense strand to SEQ ID NO: 287392
gaucucaacuuccugauac

SEQ ID NO: 287394 - RNA, 19 nt, Artificial Sequence
  Description of Artificial Sequence: Synthetic oligonucleotide
  Sense strand starting at position 3476 of SEQ ID NO: 3694
agcucagagccucagcaau

SEQ ID NO: 287395 - RNA, 19 nt, Artificial Sequence
  Description of Artificial Sequence: Synthetic oligonucleotide
  Antisense strand to SEQ ID NO: 287394
auugcugaggcucugagcu

SEQ ID NO: 287396 - RNA, 19 nt, Artificial Sequence
  Description of Artificial Sequence: Synthetic oligonucleotide
  Sense strand starting at position 3594 of SEQ ID NO: 3694
gggaacuuagggugucuca

SEQ ID NO: 287397 - RNA, 19 nt, Artificial Sequence
  Description of Artificial Sequence: Synthetic oligonucleotide
  Antisense strand to SEQ ID NO: 287396
ugagacacccuaaguuccc

SEQ ID NO: 287398 - RNA, 19 nt, Artificial Sequence
  Description of Artificial Sequence: Synthetic oligonucleotide
  Sense strand starting at position 3797 of SEQ ID NO: 3694
aagugauuugucuguuuau

SEQ ID NO: 287399 - RNA, 19 nt, Artificial Sequence
  Description of Artificial Sequence: Synthetic oligonucleotide
  Antisense strand to SEQ ID NO: 287398
auaaacagacaaaucacuu

SEQ ID NO: 287400 - RNA, 19 nt, Artificial Sequence
  Description of Artificial Sequence: Synthetic oligonucleotide
  Sense strand starting at position 3798 of SEQ ID NO: 3694
agugauuugucuguuuaua

SEQ ID NO: 287401 - RNA, 19 nt, Artificial Sequence
  Description of Artificial Sequence: Synthetic oligonucleotide
  Antisense strand to SEQ ID NO: 287400
uauaaacagacaaaucacu

SEQ ID NO: 287402 - RNA, 19 nt, Artificial Sequence
  Description of Artificial Sequence: Synthetic oligonucleotide
  Sense strand starting at position 3800 of SEQ ID NO: 3694
ugauuugucuguuuauagc

SEQ ID NO: 287403 - RNA, 19 nt, Artificial Sequence
  Description of Artificial Sequence: Synthetic oligonucleotide
  Antisense strand to SEQ ID NO: 287402
gcuauaaacagacaaauca

SEQ ID NO: 287404 - RNA, 19 nt, Artificial Sequence
  Description of Artificial Sequence: Synthetic oligonucleotide
  Sense strand starting at position 3831 of SEQ ID NO: 3694
gacaguuaugcgccgugaa

SEQ ID NO: 287405 - RNA, 19 nt, Artificial Sequence
  Description of Artificial Sequence: Synthetic oligonucleotide
  Antisense strand to SEQ ID NO: 287404
uucacggcgcauaacuguc

SEQ ID NO: 287406 - RNA, 19 nt, Artificial Sequence
  Description of Artificial Sequence: Synthetic oligonucleotide
  Sense strand starting at position 3833 of SEQ ID NO: 3694
caguuaugcgccgugaacu

SEQ ID NO: 287407 - RNA, 19 nt, Artificial Sequence
  Description of Artificial Sequence: Synthetic oligonucleotide
  Antisense strand to SEQ ID NO: 287406
aguucacggcgcauaacug

SEQ ID NO: 287408 - RNA, 19 nt, Artificial Sequence
  Description of Artificial Sequence: Synthetic oligonucleotide
  Sense strand starting at position 3850 of SEQ ID NO: 3694
cucuuugggccucaaucaa

SEQ ID NO: 287409 - RNA, 19 nt, Artificial Sequence
  Description of Artificial Sequence: Synthetic oligonucleotide
  Antisense strand to SEQ ID NO: 287408
uugauugaggcccaaagag

SEQ ID NO: 287410 - RNA, 19 nt, Artificial Sequence
  Description of Artificial Sequence: Synthetic oligonucleotide
  Sense strand starting at position 3937 of SEQ ID NO: 3694
ugaggacagagcuauuguu

SEQ ID NO: 287411 - RNA, 19 nt, Artificial Sequence
  Description of Artificial Sequence: Synthetic oligonucleotide
  Antisense strand to SEQ ID NO: 287410
aacaauagcucuguccuca

SEQ ID NO: 287412 - RNA, 19 nt, Artificial Sequence
  Description of Artificial Sequence: Synthetic oligonucleotide
  Sense strand starting at position 2 of SEQ ID NO: 3695
ucgauuucgccgcagaauu

SEQ ID NO: 287413 - RNA, 19 nt, Artificial Sequence
  Description of Artificial Sequence: Synthetic oligonucleotide
  Antisense strand to SEQ ID NO: 287412
aauucugcggcgaaaucga

SEQ ID NO: 287414 - RNA, 19 nt, Artificial Sequence
  Description of Artificial Sequence: Synthetic oligonucleotide
  Sense strand starting at position 15 of SEQ ID NO: 3695
agaauuaccugcucaaaga

SEQ ID NO: 287415 - RNA, 19 nt, Artificial Sequence
  Description of Artificial Sequence: Synthetic oligonucleotide
  Antisense strand to SEQ ID NO: 287414
ucuuugagcagguaauucu

SEQ ID NO: 287416 - RNA, 19 nt, Artificial Sequence
  Description of Artificial Sequence: Synthetic oligonucleotide
  Sense strand starting at position 72 of SEQ ID NO: 3695
ccgucgucugcgggaagua

SEQ ID NO: 287417 - RNA, 19 nt, Artificial Sequence
  Description of Artificial Sequence: Synthetic oligonucleotide
  Antisense strand to SEQ ID NO: 287416
uacuucccgcagacgacgg

SEQ ID NO: 287418 - RNA, 19 nt, Artificial Sequence
  Description of Artificial Sequence: Synthetic oligonucleotide
  Sense strand starting at position 73 of SEQ ID NO: 3695
cgucgucugcgggaaguaa

SEQ ID NO: 287419 - RNA, 19 nt, Artificial Sequence
  Description of Artificial Sequence: Synthetic oligonucleotide
  Antisense strand to SEQ ID NO: 287418
uuacuucccgcagacgacg

SEQ ID NO: 287420 - RNA, 19 nt, Artificial Sequence
  Description of Artificial Sequence: Synthetic oligonucleotide
  Sense strand starting at position 74 of SEQ ID NO: 3695
gucgucugcgggaaguaaa

SEQ ID NO: 287421 - RNA, 19 nt, Artificial Sequence
  Description of Artificial Sequence: Synthetic oligonucleotide
  Antisense strand to SEQ ID NO: 287420
uuuacuucccgcagacgac

SEQ ID NO: 287422 - RNA, 19 nt, Artificial Sequence
  Description of Artificial Sequence: Synthetic oligonucleotide
  Sense strand starting at position 95 of SEQ ID NO: 3695
gcguccucccuccaaagaa

SEQ ID NO: 287423 - RNA, 19 nt, Artificial Sequence
  Description of Artificial Sequence: Synthetic oligonucleotide
  Antisense strand to SEQ ID NO: 287422
uucuuuggagggaggacgc

SEQ ID NO: 287424 - RNA, 19 nt, Artificial Sequence
  Description of Artificial Sequence: Synthetic oligonucleotide
  Sense strand starting at position 196 of SEQ ID NO: 3695
gcaccucagcucugggaua

SEQ ID NO: 287425 - RNA, 19 nt, Artificial Sequence
  Description of Artificial Sequence: Synthetic oligonucleotide
  Antisense strand to SEQ ID NO: 287424
uaucccagagcugaggugc

SEQ ID NO: 287426 - RNA, 19 nt, Artificial Sequence
  Description of Artificial Sequence: Synthetic oligonucleotide
  Sense strand starting at position 296 of SEQ ID NO: 3695
gcguaaaguagcgagauca

SEQ ID NO: 287427 - RNA, 19 nt, Artificial Sequence
  Description of Artificial Sequence: Synthetic oligonucleotide
  Antisense strand to SEQ ID NO: 287426
ugaucucgcuacuuuacgc

SEQ ID NO: 287428 - RNA, 19 nt, Artificial Sequence
  Description of Artificial Sequence: Synthetic oligonucleotide
  Sense strand starting at position 3481 of SEQ ID NO: 3695
gaagaucuuuaagagugua

SEQ ID NO: 287429 - RNA, 19 nt, Artificial Sequence
  Description of Artificial Sequence: Synthetic oligonucleotide
  Antisense strand to SEQ ID NO: 287428
uacacucuuaaagaucuuc

SEQ ID NO: 287430 - RNA, 19 nt, Artificial Sequence
  Description of Artificial Sequence: Synthetic oligonucleotide
  Sense strand starting at position 3484 of SEQ ID NO: 3695
gaucuuuaagaguguagca

SEQ ID NO: 287431 - RNA, 19 nt, Artificial Sequence
  Description of Artificial Sequence: Synthetic oligonucleotide
  Antisense strand to SEQ ID NO: 287430
ugcuacacucuuaaagauc

SEQ ID NO: 287432 - RNA, 19 nt, Artificial Sequence
  Description of Artificial Sequence: Synthetic oligonucleotide
  Sense strand starting at position 3486 of SEQ ID NO: 3695
ucuuuaagaguguagcagu

SEQ ID NO: 287433 - RNA, 19 nt, Artificial Sequence
  Description of Artificial Sequence: Synthetic oligonucleotide
  Antisense strand to SEQ ID NO: 287432
acugcuacacucuuaaaga

SEQ ID NO: 287434 - RNA, 19 nt, Artificial Sequence
  Description of Artificial Sequence: Synthetic oligonucleotide
  Sense strand starting at position 3499 of SEQ ID NO: 3695
agcaguugcuuccaaggga

SEQ ID NO: 287435 - RNA, 19 nt, Artificial Sequence
  Description of Artificial Sequence: Synthetic oligonucleotide
  Antisense strand to SEQ ID NO: 287434
ucccuuggaagcaacugcu

SEQ ID NO: 287436 - RNA, 19 nt, Artificial Sequence
  Description of Artificial Sequence: Synthetic oligonucleotide
  Sense strand starting at position 3860 of SEQ ID NO: 3695
cugaaagugugggauuaga

SEQ ID NO: 287437 - RNA, 19 nt, Artificial Sequence
  Description of Artificial Sequence: Synthetic oligonucleotide
  Antisense strand to SEQ ID NO: 287436
ucuaaucccacacuuucag

SEQ ID NO: 287438 - RNA, 19 nt, Artificial Sequence
  Description of Artificial Sequence: Synthetic oligonucleotide
  Sense strand starting at position 3919 of SEQ ID NO: 3695
ccuguuuaauaauguugga

SEQ ID NO: 287439 - RNA, 19 nt, Artificial Sequence
  Description of Artificial Sequence: Synthetic oligonucleotide
  Antisense strand to SEQ ID NO: 287438
uccaacauuauuaaacagg

SEQ ID NO: 287440 - RNA, 19 nt, Artificial Sequence
  Description of Artificial Sequence: Synthetic oligonucleotide
  Sense strand starting at position 31 of SEQ ID NO: 3696
augaauguaagaggaguuu

SEQ ID NO: 287441 - RNA, 19 nt, Artificial Sequence
  Description of Artificial Sequence: Synthetic oligonucleotide
  Antisense strand to SEQ ID NO: 287440
aaacuccucuuacauucau

SEQ ID NO: 287442 - RNA, 19 nt, Artificial Sequence
  Description of Artificial Sequence: Synthetic oligonucleotide
  Sense strand starting at position 37 of SEQ ID NO: 3696
guaagaggaguuuacaagu

SEQ ID NO: 287443 - RNA, 19 nt, Artificial Sequence
  Description of Artificial Sequence: Synthetic oligonucleotide
  Antisense strand to SEQ ID NO: 287442
acuuguaaacuccucuuac

SEQ ID NO: 287444 - RNA, 19 nt, Artificial Sequence
  Description of Artificial Sequence: Synthetic oligonucleotide
  Sense strand starting at position 202 of SEQ ID NO: 3696
ccaauaauggcuuaguuau

SEQ ID NO: 287445 - RNA, 19 nt, Artificial Sequence
  Description of Artificial Sequence: Synthetic oligonucleotide
  Antisense strand to SEQ ID NO: 287444
auaacuaagccauuauugg

SEQ ID NO: 287446 - RNA, 19 nt, Artificial Sequence
  Description of Artificial Sequence: Synthetic oligonucleotide
  Sense strand starting at position 204 of SEQ ID NO: 3696
aauaauggcuuaguuauga

SEQ ID NO: 287447 - RNA, 19 nt, Artificial Sequence
  Description of Artificial Sequence: Synthetic oligonucleotide
  Antisense strand to SEQ ID NO: 287446
ucauaacuaagccauuauu

SEQ ID NO: 287448 - RNA, 19 nt, Artificial Sequence
  Description of Artificial Sequence: Synthetic oligonucleotide
  Sense strand starting at position 263 of SEQ ID NO: 3696
cguuuaccagaguacuuaa

SEQ ID NO: 287449 - RNA, 19 nt, Artificial Sequence
  Description of Artificial Sequence: Synthetic oligonucleotide
  Antisense strand to SEQ ID NO: 287448
uuaaguacucugguaaacg

SEQ ID NO: 287450 - RNA, 19 nt, Artificial Sequence
  Description of Artificial Sequence: Synthetic oligonucleotide
  Sense strand starting at position 303 of SEQ ID NO: 3696
aaaggcauuugagaggaua

SEQ ID NO: 287451 - RNA, 19 nt, Artificial Sequence
  Description of Artificial Sequence: Synthetic oligonucleotide
  Antisense strand to SEQ ID NO: 287450
uauccucucaaaugccuuu

SEQ ID NO: 287452 - RNA, 19 nt, Artificial Sequence
  Description of Artificial Sequence: Synthetic oligonucleotide
  Sense strand starting at position 545 of SEQ ID NO: 3696
ggauuauaugcucaucuuu

SEQ ID NO: 287453 - RNA, 19 nt, Artificial Sequence
  Description of Artificial Sequence: Synthetic oligonucleotide
  Antisense strand to SEQ ID NO: 287452
aaagaugagcauauaaucc

SEQ ID NO: 287454 - RNA, 19 nt, Artificial Sequence
  Description of Artificial Sequence: Synthetic oligonucleotide
  Sense strand starting at position 897 of SEQ ID NO: 3696
aggcuagagcauugacaca

SEQ ID NO: 287455 - RNA, 19 nt, Artificial Sequence
  Description of Artificial Sequence: Synthetic oligonucleotide
  Antisense strand to SEQ ID NO: 287454
ugugucaaugcucuagccu

SEQ ID NO: 287456 - RNA, 19 nt, Artificial Sequence
  Description of Artificial Sequence: Synthetic oligonucleotide
  Sense strand starting at position 969 of SEQ ID NO: 3696
augaaauacuugucccaga

SEQ ID NO: 287457 - RNA, 19 nt, Artificial Sequence
  Description of Artificial Sequence: Synthetic oligonucleotide
  Antisense strand to SEQ ID NO: 287456
ucugggacaaguauuucau

SEQ ID NO: 287458 - RNA, 19 nt, Artificial Sequence
  Description of Artificial Sequence: Synthetic oligonucleotide
  Sense strand starting at position 1158 of SEQ ID NO: 3696
ggaagaauccaguguucag

SEQ ID NO: 287459 - RNA, 19 nt, Artificial Sequence
  Description of Artificial Sequence: Synthetic oligonucleotide
  Antisense strand to SEQ ID NO: 287458
cugaacacuggauucuucc

SEQ ID NO: 287460 - RNA, 19 nt, Artificial Sequence
  Description of Artificial Sequence: Synthetic oligonucleotide
  Sense strand starting at position 1333 of SEQ ID NO: 3696
ugccuuuaugacuaacaug

SEQ ID NO: 287461 - RNA, 19 nt, Artificial Sequence
  Description of Artificial Sequence: Synthetic oligonucleotide
  Antisense strand to SEQ ID NO: 287460
cauguuagucauaaaggca

SEQ ID NO: 287462 - RNA, 19 nt, Artificial Sequence
  Description of Artificial Sequence: Synthetic oligonucleotide
  Sense strand starting at position 1466 of SEQ ID NO: 3696
acaagauauugggcuuggu

SEQ ID NO: 287463 - RNA, 19 nt, Artificial Sequence
  Description of Artificial Sequence: Synthetic oligonucleotide
  Antisense strand to SEQ ID NO: 287462
accaagcccaauaucuugu

SEQ ID NO: 287464 - RNA, 19 nt, Artificial Sequence
  Description of Artificial Sequence: Synthetic oligonucleotide
  Sense strand starting at position 1469 of SEQ ID NO: 3696
agauauugggcuugguuaa

SEQ ID NO: 287465 - RNA, 19 nt, Artificial Sequence
  Description of Artificial Sequence: Synthetic oligonucleotide
  Antisense strand to SEQ ID NO: 287464
uuaaccaagcccaauaucu

SEQ ID NO: 287466 - RNA, 19 nt, Artificial Sequence
  Description of Artificial Sequence: Synthetic oligonucleotide
  Sense strand starting at position 1492 of SEQ ID NO: 3696
acauuaaucuguguauuga

SEQ ID NO: 287467 - RNA, 19 nt, Artificial Sequence
  Description of Artificial Sequence: Synthetic oligonucleotide
  Antisense strand to SEQ ID NO: 287466
ucaauacacagauuaaugu

SEQ ID NO: 287468 - RNA, 19 nt, Artificial Sequence
  Description of Artificial Sequence: Synthetic oligonucleotide
  Sense strand starting at position 1560 of SEQ ID NO: 3696
acauucugguuaguaaaua

SEQ ID NO: 287469 - RNA, 19 nt, Artificial Sequence
  Description of Artificial Sequence: Synthetic oligonucleotide
  Antisense strand to SEQ ID NO: 287468
uauuuacuaaccagaaugu

SEQ ID NO: 287470 - RNA, 19 nt, Artificial Sequence
  Description of Artificial Sequence: Synthetic oligonucleotide
  Sense strand starting at position 1568 of SEQ ID NO: 3696
guuaguaaauauccaacau

SEQ ID NO: 287471 - RNA, 19 nt, Artificial Sequence
  Description of Artificial Sequence: Synthetic oligonucleotide
  Antisense strand to SEQ ID NO: 287470
auguuggauauuuacuaac

SEQ ID NO: 287472 - RNA, 19 nt, Artificial Sequence
  Description of Artificial Sequence: Synthetic oligonucleotide
  Sense strand starting at position 1601 of SEQ ID NO: 3696
cauagacccgaucauguau

SEQ ID NO: 287473 - RNA, 19 nt, Artificial Sequence
  Description of Artificial Sequence: Synthetic oligonucleotide
  Antisense strand to SEQ ID NO: 287472
auacaugaucgggucuaug

SEQ ID NO: 287474 - RNA, 19 nt, Artificial Sequence
  Description of Artificial Sequence: Synthetic oligonucleotide
  Sense strand starting at position 1805 of SEQ ID NO: 3696
agaggagcuccacagcaua

SEQ ID NO: 287475 - RNA, 19 nt, Artificial Sequence
  Description of Artificial Sequence: Synthetic oligonucleotide
  Antisense strand to SEQ ID NO: 287474
uaugcuguggagcuccucu

SEQ ID NO: 287476 - RNA, 19 nt, Artificial Sequence
  Description of Artificial Sequence: Synthetic oligonucleotide
  Sense strand starting at position 2137 of SEQ ID NO: 3696
cugcacgauuucucuuaca

SEQ ID NO: 287477 - RNA, 19 nt, Artificial Sequence
  Description of Artificial Sequence: Synthetic oligonucleotide
  Antisense strand to SEQ ID NO: 287476
uguaagagaaaucgugcag

SEQ ID NO: 287478 - RNA, 19 nt, Artificial Sequence
  Description of Artificial Sequence: Synthetic oligonucleotide
  Sense strand starting at position 2158 of SEQ ID NO: 3696
gaaagaaaugugugucaga

SEQ ID NO: 287479 - RNA, 19 nt, Artificial Sequence
  Description of Artificial Sequence: Synthetic oligonucleotide
  Antisense strand to SEQ ID NO: 287478
ucugacacacauuucuuuc

SEQ ID NO: 287480 - RNA, 19 nt, Artificial Sequence
  Description of Artificial Sequence: Synthetic oligonucleotide
  Sense strand starting at position 2159 of SEQ ID NO: 3696
aaagaaaugugugucagac

SEQ ID NO: 287481 - RNA, 19 nt, Artificial Sequence
  Description of Artificial Sequence: Synthetic oligonucleotide
  Antisense strand to SEQ ID NO: 287480
gucugacacacauuucuuu

SEQ ID NO: 287482 - RNA, 19 nt, Artificial Sequence
  Description of Artificial Sequence: Synthetic oligonucleotide
  Sense strand starting at position 2165 of SEQ ID NO: 3696
augugugucagacagacau

SEQ ID NO: 287483 - RNA, 19 nt, Artificial Sequence
  Description of Artificial Sequence: Synthetic oligonucleotide
  Antisense strand to SEQ ID NO: 287482
augucugucugacacacau

SEQ ID NO: 287484 - RNA, 19 nt, Artificial Sequence
  Description of Artificial Sequence: Synthetic oligonucleotide
  Sense strand starting at position 2171 of SEQ ID NO: 3696
gucagacagacauggcuaa

SEQ ID NO: 287485 - RNA, 19 nt, Artificial Sequence
  Description of Artificial Sequence: Synthetic oligonucleotide
  Antisense strand to SEQ ID NO: 287484
uuagccaugucugucugac

SEQ ID NO: 287486 - RNA, 19 nt, Artificial Sequence
  Description of Artificial Sequence: Synthetic oligonucleotide
  Sense strand starting at position 2184 of SEQ ID NO: 3696
ggcuaauugcaagacaauc

SEQ ID NO: 287487 - RNA, 19 nt, Artificial Sequence
  Description of Artificial Sequence: Synthetic oligonucleotide
  Antisense strand to SEQ ID NO: 287486
gauugucuugcaauuagcc

SEQ ID NO: 287488 - RNA, 19 nt, Artificial Sequence
  Description of Artificial Sequence: Synthetic oligonucleotide
  Sense strand starting at position 2255 of SEQ ID NO: 3696
auuguugucgucguuguaa

SEQ ID NO: 287489 - RNA, 19 nt, Artificial Sequence
  Description of Artificial Sequence: Synthetic oligonucleotide
  Antisense strand to SEQ ID NO: 287488
uuacaacgacgacaacaau

SEQ ID NO: 287490 - RNA, 19 nt, Artificial Sequence
  Description of Artificial Sequence: Synthetic oligonucleotide
  Sense strand starting at position 2258 of SEQ ID NO: 3696
guugucgucguuguaagaa

SEQ ID NO: 287491 - RNA, 19 nt, Artificial Sequence
  Description of Artificial Sequence: Synthetic oligonucleotide
  Antisense strand to SEQ ID NO: 287490
uucuuacaacgacgacaac

SEQ ID NO: 287492 - RNA, 19 nt, Artificial Sequence
  Description of Artificial Sequence: Synthetic oligonucleotide
  Sense strand starting at position 2671 of SEQ ID NO: 3696
acacauacguaacuagaau

SEQ ID NO: 287493 - RNA, 19 nt, Artificial Sequence
  Description of Artificial Sequence: Synthetic oligonucleotide
  Antisense strand to SEQ ID NO: 287492
auucuaguuacguaugugu

SEQ ID NO: 287494 - RNA, 19 nt, Artificial Sequence
  Description of Artificial Sequence: Synthetic oligonucleotide
  Sense strand starting at position 2700 of SEQ ID NO: 3696
ucgaaaggaaguuguacua

SEQ ID NO: 287495 - RNA, 19 nt, Artificial Sequence
  Description of Artificial Sequence: Synthetic oligonucleotide
  Antisense strand to SEQ ID NO: 287494
uaguacaacuuccuuucga

SEQ ID NO: 287496 - RNA, 19 nt, Artificial Sequence
  Description of Artificial Sequence: Synthetic oligonucleotide
  Sense strand starting at position 2737 of SEQ ID NO: 3696
uguugaaucagaugaguug

SEQ ID NO: 287497 - RNA, 19 nt, Artificial Sequence
  Description of Artificial Sequence: Synthetic oligonucleotide
  Antisense strand to SEQ ID NO: 287496
caacucaucugauucaaca

SEQ ID NO: 287498 - RNA, 19 nt, Artificial Sequence
  Description of Artificial Sequence: Synthetic oligonucleotide
  Sense strand starting at position 2934 of SEQ ID NO: 3696
acuguauauguugacauau

SEQ ID NO: 287499 - RNA, 19 nt, Artificial Sequence
  Description of Artificial Sequence: Synthetic oligonucleotide
  Antisense strand to SEQ ID NO: 287498
auaugucaacauauacagu

SEQ ID NO: 287500 - RNA, 19 nt, Artificial Sequence
  Description of Artificial Sequence: Synthetic oligonucleotide
  Sense strand starting at position 2943 of SEQ ID NO: 3696
guugacauauacuuuaaga

SEQ ID NO: 287501 - RNA, 19 nt, Artificial Sequence
  Description of Artificial Sequence: Synthetic oligonucleotide
  Antisense strand to SEQ ID NO: 287500
ucuuaaaguauaugucaac

SEQ ID NO: 287502 - RNA, 19 nt, Artificial Sequence
  Description of Artificial Sequence: Synthetic oligonucleotide
  Sense strand starting at position 3056 of SEQ ID NO: 3696
ccagauacauugcuaaaug

SEQ ID NO: 287503 - RNA, 19 nt, Artificial Sequence
  Description of Artificial Sequence: Synthetic oligonucleotide
  Antisense strand to SEQ ID NO: 287502
cauuuagcaauguaucugg

SEQ ID NO: 287504 - RNA, 19 nt, Artificial Sequence
  Description of Artificial Sequence: Synthetic oligonucleotide
  Sense strand starting at position 3458 of SEQ ID NO: 3696
uguggauugauaugaauuc

SEQ ID NO: 287505 - RNA, 19 nt, Artificial Sequence
  Description of Artificial Sequence: Synthetic oligonucleotide
  Antisense strand to SEQ ID NO: 287504
gaauucauaucaauccaca

SEQ ID NO: 287506 - RNA, 19 nt, Artificial Sequence
  Description of Artificial Sequence: Synthetic oligonucleotide
  Sense strand starting at position 3549 of SEQ ID NO: 3696
ugaucaaaugcuggguuga

SEQ ID NO: 287507 - RNA, 19 nt, Artificial Sequence
  Description of Artificial Sequence: Synthetic oligonucleotide
  Antisense strand to SEQ ID NO: 287506
ucaacccagcauuugauca

SEQ ID NO: 287508 - RNA, 19 nt, Artificial Sequence
  Description of Artificial Sequence: Synthetic oligonucleotide
  Sense strand starting at position 3550 of SEQ ID NO: 3696
gaucaaaugcuggguugaa

SEQ ID NO: 287509 - RNA, 19 nt, Artificial Sequence
  Description of Artificial Sequence: Synthetic oligonucleotide
  Antisense strand to SEQ ID NO: 287508
uucaacccagcauuugauc

SEQ ID NO: 287510 - RNA, 19 nt, Artificial Sequence
  Description of Artificial Sequence: Synthetic oligonucleotide
  Sense strand starting at position 3625 of SEQ ID NO: 3696
cugacauccuuagcuaaga

SEQ ID NO: 287511 - RNA, 19 nt, Artificial Sequence
  Description of Artificial Sequence: Synthetic oligonucleotide
  Antisense strand to SEQ ID NO: 287510
ucuuagcuaaggaugucag

SEQ ID NO: 287512 - RNA, 19 nt, Artificial Sequence
  Description of Artificial Sequence: Synthetic oligonucleotide
  Sense strand starting at position 3626 of SEQ ID NO: 3696
ugacauccuuagcuaagau

SEQ ID NO: 287513 - RNA, 19 nt, Artificial Sequence
  Description of Artificial Sequence: Synthetic oligonucleotide
  Antisense strand to SEQ ID NO: 287512
aucuuagcuaaggauguca

SEQ ID NO: 287514 - RNA, 19 nt, Artificial Sequence
  Description of Artificial Sequence: Synthetic oligonucleotide
  Sense strand starting at position 3905 of SEQ ID NO: 3696
ucaacaucuugccuggaaa

SEQ ID NO: 287515 - RNA, 19 nt, Artificial Sequence
  Description of Artificial Sequence: Synthetic oligonucleotide
  Antisense strand to SEQ ID NO: 287514
uuuccaggcaagauguuga

SEQ ID NO: 287516 - RNA, 19 nt, Artificial Sequence
  Description of Artificial Sequence: Synthetic oligonucleotide
  Sense strand starting at position 3908 of SEQ ID NO: 3696
acaucuugccuggaaauau

SEQ ID NO: 287517 - RNA, 19 nt, Artificial Sequence
  Description of Artificial Sequence: Synthetic oligonucleotide
  Antisense strand to SEQ ID NO: 287516
auauuuccaggcaagaugu

SEQ ID NO: 287518 - RNA, 19 nt, Artificial Sequence
  Description of Artificial Sequence: Synthetic oligonucleotide
  Sense strand starting at position 3966 of SEQ ID NO: 3696
ucuccaaguagaugugaga

SEQ ID NO: 287519 - RNA, 19 nt, Artificial Sequence
  Description of Artificial Sequence: Synthetic oligonucleotide
  Antisense strand to SEQ ID NO: 287518
ucucacaucuacuuggaga

SEQ ID NO: 287520 - RNA, 19 nt, Artificial Sequence
  Description of Artificial Sequence: Synthetic oligonucleotide
  Sense strand starting at position 45 of SEQ ID NO: 3697
aguaguccugccugauauu

SEQ ID NO: 287521 - RNA, 19 nt, Artificial Sequence
  Description of Artificial Sequence: Synthetic oligonucleotide
  Antisense strand to SEQ ID NO: 287520
aauaucaggcaggacuacu

SEQ ID NO: 287522 - RNA, 19 nt, Artificial Sequence
  Description of Artificial Sequence: Synthetic oligonucleotide
  Sense strand starting at position 46 of SEQ ID NO: 3697
guaguccugccugauauua

SEQ ID NO: 287523 - RNA, 19 nt, Artificial Sequence
  Description of Artificial Sequence: Synthetic oligonucleotide
  Antisense strand to SEQ ID NO: 287522
uaauaucaggcaggacuac

SEQ ID NO: 287524 - RNA, 19 nt, Artificial Sequence
  Description of Artificial Sequence: Synthetic oligonucleotide
  Sense strand starting at position 126 of SEQ ID NO: 3697
gacuaacuguggcuguuaa

SEQ ID NO: 287525 - RNA, 19 nt, Artificial Sequence
  Description of Artificial Sequence: Synthetic oligonucleotide
  Antisense strand to SEQ ID NO: 287524
uuaacagccacaguuaguc

SEQ ID NO: 287526 - RNA, 19 nt, Artificial Sequence
  Description of Artificial Sequence: Synthetic oligonucleotide
  Sense strand starting at position 155 of SEQ ID NO: 3697
guggacagaaugugcauua

SEQ ID NO: 287527 - RNA, 19 nt, Artificial Sequence
  Description of Artificial Sequence: Synthetic oligonucleotide
  Antisense strand to SEQ ID NO: 287526
uaaugcacauucuguccac

SEQ ID NO: 287528 - RNA, 19 nt, Artificial Sequence
  Description of Artificial Sequence: Synthetic oligonucleotide
  Sense strand starting at position 160 of SEQ ID NO: 3697
cagaaugugcauuaguuga

SEQ ID NO: 287529 - RNA, 19 nt, Artificial Sequence
  Description of Artificial Sequence: Synthetic oligonucleotide
  Antisense strand to SEQ ID NO: 287528
ucaacuaaugcacauucug

SEQ ID NO: 287530 - RNA, 19 nt, Artificial Sequence
  Description of Artificial Sequence: Synthetic oligonucleotide
  Sense strand starting at position 162 of SEQ ID NO: 3697
gaaugugcauuaguugaaa

SEQ ID NO: 287531 - RNA, 19 nt, Artificial Sequence
  Description of Artificial Sequence: Synthetic oligonucleotide
  Antisense strand to SEQ ID NO: 287530
uuucaacuaaugcacauuc

SEQ ID NO: 287532 - RNA, 19 nt, Artificial Sequence
  Description of Artificial Sequence: Synthetic oligonucleotide
  Sense strand starting at position 165 of SEQ ID NO: 3697
ugugcauuaguugaaauga

SEQ ID NO: 287533 - RNA, 19 nt, Artificial Sequence
  Description of Artificial Sequence: Synthetic oligonucleotide
  Antisense strand to SEQ ID NO: 287532
ucauuucaacuaaugcaca

SEQ ID NO: 287534 - RNA, 19 nt, Artificial Sequence
  Description of Artificial Sequence: Synthetic oligonucleotide
  Sense strand starting at position 529 of SEQ ID NO: 3697
gguacaaggcuuugacaag

SEQ ID NO: 287535 - RNA, 19 nt, Artificial Sequence
  Description of Artificial Sequence: Synthetic oligonucleotide
  Antisense strand to SEQ ID NO: 287534
cuugucaaagccuuguacc

SEQ ID NO: 287536 - RNA, 19 nt, Artificial Sequence
  Description of Artificial Sequence: Synthetic oligonucleotide
  Sense strand starting at position 798 of SEQ ID NO: 3697
aaaugcuaucaguauugga

SEQ ID NO: 287537 - RNA, 19 nt, Artificial Sequence
  Description of Artificial Sequence: Synthetic oligonucleotide
  Antisense strand to SEQ ID NO: 287536
uccaauacugauagcauuu

SEQ ID NO: 287538 - RNA, 19 nt, Artificial Sequence
  Description of Artificial Sequence: Synthetic oligonucleotide
  Sense strand starting at position 864 of SEQ ID NO: 3697
uugggaaucucgcuccacu

SEQ ID NO: 287539 - RNA, 19 nt, Artificial Sequence
  Description of Artificial Sequence: Synthetic oligonucleotide
  Antisense strand to SEQ ID NO: 287538
aguggagcgagauucccaa

SEQ ID NO: 287540 - RNA, 19 nt, Artificial Sequence
  Description of Artificial Sequence: Synthetic oligonucleotide
  Sense strand starting at position 867 of SEQ ID NO: 3697
ggaaucucgcuccacugau

SEQ ID NO: 287541 - RNA, 19 nt, Artificial Sequence
  Description of Artificial Sequence: Synthetic oligonucleotide
  Antisense strand to SEQ ID NO: 287540
aucaguggagcgagauucc

SEQ ID NO: 287542 - RNA, 19 nt, Artificial Sequence
  Description of Artificial Sequence: Synthetic oligonucleotide
  Sense strand starting at position 1398 of SEQ ID NO: 3697
cccauaaggcuccgaauga

SEQ ID NO: 287543 - RNA, 19 nt, Artificial Sequence
  Description of Artificial Sequence: Synthetic oligonucleotide
  Antisense strand to SEQ ID NO: 287542
ucauucggagccuuauggg

SEQ ID NO: 287544 - RNA, 19 nt, Artificial Sequence
  Description of Artificial Sequence: Synthetic oligonucleotide
  Sense strand starting at position 1542 of SEQ ID NO: 3697
cuggaagucacucggguuu

SEQ ID NO: 287545 - RNA, 19 nt, Artificial Sequence
  Description of Artificial Sequence: Synthetic oligonucleotide
  Antisense strand to SEQ ID NO: 287544
aaacccgagugacuuccag

SEQ ID NO: 287546 - RNA, 19 nt, Artificial Sequence
  Description of Artificial Sequence: Synthetic oligonucleotide
  Sense strand starting at position 2076 of SEQ ID NO: 3697
gggcuuagcgcgucacaga

SEQ ID NO: 287547 - RNA, 19 nt, Artificial Sequence
  Description of Artificial Sequence: Synthetic oligonucleotide
  Antisense strand to SEQ ID NO: 287546
ucugugacgcgcuaagccc

SEQ ID NO: 287548 - RNA, 19 nt, Artificial Sequence
  Description of Artificial Sequence: Synthetic oligonucleotide
  Sense strand starting at position 2216 of SEQ ID NO: 3697
cgguuagucggcguaagag

SEQ ID NO: 287549 - RNA, 19 nt, Artificial Sequence
  Description of Artificial Sequence: Synthetic oligonucleotide
  Antisense strand to SEQ ID NO: 287548
cucuuacgccgacuaaccg

SEQ ID NO: 287550 - RNA, 19 nt, Artificial Sequence
  Description of Artificial Sequence: Synthetic oligonucleotide
  Sense strand starting at position 2499 of SEQ ID NO: 3697
ccuggauggcgugaaguua

SEQ ID NO: 287551 - RNA, 19 nt, Artificial Sequence
  Description of Artificial Sequence: Synthetic oligonucleotide
  Antisense strand to SEQ ID NO: 287550
uaacuucacgccauccagg

SEQ ID NO: 287552 - RNA, 19 nt, Artificial Sequence
  Description of Artificial Sequence: Synthetic oligonucleotide
  Sense strand starting at position 2645 of SEQ ID NO: 3697
uguuuaggccguuaaauag

SEQ ID NO: 287553 - RNA, 19 nt, Artificial Sequence
  Description of Artificial Sequence: Synthetic oligonucleotide
  Antisense strand to SEQ ID NO: 287552
cuauuuaacggccuaaaca

SEQ ID NO: 287554 - RNA, 19 nt, Artificial Sequence
  Description of Artificial Sequence: Synthetic oligonucleotide
  Sense strand starting at position 2717 of SEQ ID NO: 3697
agauguuagugccuuuauc

SEQ ID NO: 287555 - RNA, 19 nt, Artificial Sequence
  Description of Artificial Sequence: Synthetic oligonucleotide
  Antisense strand to SEQ ID NO: 287554
gauaaaggcacuaacaucu

SEQ ID NO: 287556 - RNA, 19 nt, Artificial Sequence
  Description of Artificial Sequence: Synthetic oligonucleotide
  Sense strand starting at position 2724 of SEQ ID NO: 3697
agugccuuuaucuggguaa

SEQ ID NO: 287557 - RNA, 19 nt, Artificial Sequence
  Description of Artificial Sequence: Synthetic oligonucleotide
  Antisense strand to SEQ ID NO: 287556
uuacccagauaaaggcacu

SEQ ID NO: 287558 - RNA, 19 nt, Artificial Sequence
  Description of Artificial Sequence: Synthetic oligonucleotide
  Sense strand starting at position 2726 of SEQ ID NO: 3697
ugccuuuaucuggguaaga

SEQ ID NO: 287559 - RNA, 19 nt, Artificial Sequence
  Description of Artificial Sequence: Synthetic oligonucleotide
  Antisense strand to SEQ ID NO: 287558
ucuuacccagauaaaggca

SEQ ID NO: 287560 - RNA, 19 nt, Artificial Sequence
  Description of Artificial Sequence: Synthetic oligonucleotide
  Sense strand starting at position 2727 of SEQ ID NO: 3697
gccuuuaucuggguaagag

SEQ ID NO: 287561 - RNA, 19 nt, Artificial Sequence
  Description of Artificial Sequence: Synthetic oligonucleotide
  Antisense strand to SEQ ID NO: 287560
cucuuacccagauaaaggc

SEQ ID NO: 287562 - RNA, 19 nt, Artificial Sequence
  Description of Artificial Sequence: Synthetic oligonucleotide
  Sense strand starting at position 2764 of SEQ ID NO: 3697
agaugauggguuuagcuuu

SEQ ID NO: 287563 - RNA, 19 nt, Artificial Sequence
  Description of Artificial Sequence: Synthetic oligonucleotide
  Antisense strand to SEQ ID NO: 287562
aaagcuaaacccaucaucu

SEQ ID NO: 287564 - RNA, 19 nt, Artificial Sequence
  Description of Artificial Sequence: Synthetic oligonucleotide
  Sense strand starting at position 2770 of SEQ ID NO: 3697
uggguuuagcuuuggacau

SEQ ID NO: 287565 - RNA, 19 nt, Artificial Sequence
  Description of Artificial Sequence: Synthetic oligonucleotide
  Antisense strand to SEQ ID NO: 287564
auguccaaagcuaaaccca

SEQ ID NO: 287566 - RNA, 19 nt, Artificial Sequence
  Description of Artificial Sequence: Synthetic oligonucleotide
  Sense strand starting at position 2786 of SEQ ID NO: 3697
cauguugaguugucuguga

SEQ ID NO: 287567 - RNA, 19 nt, Artificial Sequence
  Description of Artificial Sequence: Synthetic oligonucleotide
  Antisense strand to SEQ ID NO: 287566
ucacagacaacucaacaug

SEQ ID NO: 287568 - RNA, 19 nt, Artificial Sequence
  Description of Artificial Sequence: Synthetic oligonucleotide
  Sense strand starting at position 2788 of SEQ ID NO: 3697
uguugaguugucugugaga

SEQ ID NO: 287569 - RNA, 19 nt, Artificial Sequence
  Description of Artificial Sequence: Synthetic oligonucleotide
  Antisense strand to SEQ ID NO: 287568
ucucacagacaacucaaca

SEQ ID NO: 287570 - RNA, 19 nt, Artificial Sequence
  Description of Artificial Sequence: Synthetic oligonucleotide
  Sense strand starting at position 2790 of SEQ ID NO: 3697
uugaguugucugugagaca

SEQ ID NO: 287571 - RNA, 19 nt, Artificial Sequence
  Description of Artificial Sequence: Synthetic oligonucleotide
  Antisense strand to SEQ ID NO: 287570
ugucucacagacaacucaa

SEQ ID NO: 287572 - RNA, 19 nt, Artificial Sequence
  Description of Artificial Sequence: Synthetic oligonucleotide
  Sense strand starting at position 2799 of SEQ ID NO: 3697
cugugagacagucacaagu

SEQ ID NO: 287573 - RNA, 19 nt, Artificial Sequence
  Description of Artificial Sequence: Synthetic oligonucleotide
  Antisense strand to SEQ ID NO: 287572
acuugugacugucucacag

SEQ ID NO: 287574 - RNA, 19 nt, Artificial Sequence
  Description of Artificial Sequence: Synthetic oligonucleotide
  Sense strand starting at position 2843 of SEQ ID NO: 3697
cccgccaaccauuaagaaa

SEQ ID NO: 287575 - RNA, 19 nt, Artificial Sequence
  Description of Artificial Sequence: Synthetic oligonucleotide
  Antisense strand to SEQ ID NO: 287574
uuucuuaaugguuggcggg

SEQ ID NO: 287576 - RNA, 19 nt, Artificial Sequence
  Description of Artificial Sequence: Synthetic oligonucleotide
  Sense strand starting at position 2866 of SEQ ID NO: 3697
aguugagaaagugguagaa

SEQ ID NO: 287577 - RNA, 19 nt, Artificial Sequence
  Description of Artificial Sequence: Synthetic oligonucleotide
  Antisense strand to SEQ ID NO: 287576
uucuaccacuuucucaacu

SEQ ID NO: 287578 - RNA, 19 nt, Artificial Sequence
  Description of Artificial Sequence: Synthetic oligonucleotide
  Sense strand starting at position 2948 of SEQ ID NO: 3697
gcauaauagugucuaccuu

SEQ ID NO: 287579 - RNA, 19 nt, Artificial Sequence
  Description of Artificial Sequence: Synthetic oligonucleotide
  Antisense strand to SEQ ID NO: 287578
aagguagacacuauuaugc

SEQ ID NO: 287580 - RNA, 19 nt, Artificial Sequence
  Description of Artificial Sequence: Synthetic oligonucleotide
  Sense strand starting at position 2955 of SEQ ID NO: 3697
agugucuaccuuuaauuga

SEQ ID NO: 287581 - RNA, 19 nt, Artificial Sequence
  Description of Artificial Sequence: Synthetic oligonucleotide
  Antisense strand to SEQ ID NO: 287580
ucaauuaaagguagacacu

SEQ ID NO: 287582 - RNA, 19 nt, Artificial Sequence
  Description of Artificial Sequence: Synthetic oligonucleotide
  Sense strand starting at position 2962 of SEQ ID NO: 3697
accuuuaauugagccuuga

SEQ ID NO: 287583 - RNA, 19 nt, Artificial Sequence
  Description of Artificial Sequence: Synthetic oligonucleotide
  Antisense strand to SEQ ID NO: 287582
ucaaggcucaauuaaaggu

SEQ ID NO: 287584 - RNA, 19 nt, Artificial Sequence
  Description of Artificial Sequence: Synthetic oligonucleotide
  Sense strand starting at position 2966 of SEQ ID NO: 3697
uuaauugagccuugaacua

SEQ ID NO: 287585 - RNA, 19 nt, Artificial Sequence
  Description of Artificial Sequence: Synthetic oligonucleotide
  Antisense strand to SEQ ID NO: 287584
uaguucaaggcucaauuaa

SEQ ID NO: 287586 - RNA, 19 nt, Artificial Sequence
  Description of Artificial Sequence: Synthetic oligonucleotide
  Sense strand starting at position 2990 of SEQ ID NO: 3697
ggcaguguucuagguauuu

SEQ ID NO: 287587 - RNA, 19 nt, Artificial Sequence
  Description of Artificial Sequence: Synthetic oligonucleotide
  Antisense strand to SEQ ID NO: 287586
aaauaccuagaacacugcc

SEQ ID NO: 287588 - RNA, 19 nt, Artificial Sequence
  Description of Artificial Sequence: Synthetic oligonucleotide
  Sense strand starting at position 3043 of SEQ ID NO: 3697
cccagucugguagguauuu

SEQ ID NO: 287589 - RNA, 19 nt, Artificial Sequence
  Description of Artificial Sequence: Synthetic oligonucleotide
  Antisense strand to SEQ ID NO: 287588
aaauaccuaccagacuggg

SEQ ID NO: 287590 - RNA, 19 nt, Artificial Sequence
  Description of Artificial Sequence: Synthetic oligonucleotide
  Sense strand starting at position 3056 of SEQ ID NO: 3697
guauuuauguaugaggaau

SEQ ID NO: 287591 - RNA, 19 nt, Artificial Sequence
  Description of Artificial Sequence: Synthetic oligonucleotide
  Antisense strand to SEQ ID NO: 287590
auuccucauacauaaauac

SEQ ID NO: 287592 - RNA, 19 nt, Artificial Sequence
  Description of Artificial Sequence: Synthetic oligonucleotide
  Sense strand starting at position 3087 of SEQ ID NO: 3697
aaggcaucuugcccaaguu

SEQ ID NO: 287593 - RNA, 19 nt, Artificial Sequence
  Description of Artificial Sequence: Synthetic oligonucleotide
  Antisense strand to SEQ ID NO: 287592
aacuugggcaagaugccuu

SEQ ID NO: 287594 - RNA, 19 nt, Artificial Sequence
  Description of Artificial Sequence: Synthetic oligonucleotide
  Sense strand starting at position 3295 of SEQ ID NO: 3697
gcucauuucuugccaaaug

SEQ ID NO: 287595 - RNA, 19 nt, Artificial Sequence
  Description of Artificial Sequence: Synthetic oligonucleotide
  Antisense strand to SEQ ID NO: 287594
cauuuggcaagaaaugagc

SEQ ID NO: 287596 - RNA, 19 nt, Artificial Sequence
  Description of Artificial Sequence: Synthetic oligonucleotide
  Sense strand starting at position 3475 of SEQ ID NO: 3697
gucuacugugcguaacaau

SEQ ID NO: 287597 - RNA, 19 nt, Artificial Sequence
  Description of Artificial Sequence: Synthetic oligonucleotide
  Antisense strand to SEQ ID NO: 287596
auuguuacgcacaguagac

SEQ ID NO: 287598 - RNA, 19 nt, Artificial Sequence
  Description of Artificial Sequence: Synthetic oligonucleotide
  Sense strand starting at position 3517 of SEQ ID NO: 3697
agagaagucucagugaugg

SEQ ID NO: 287599 - RNA, 19 nt, Artificial Sequence
  Description of Artificial Sequence: Synthetic oligonucleotide
  Antisense strand to SEQ ID NO: 287598
ccaucacugagacuucucu

SEQ ID NO: 287600 - RNA, 19 nt, Artificial Sequence
  Description of Artificial Sequence: Synthetic oligonucleotide
  Sense strand starting at position 713 of SEQ ID NO: 3698
gucauaaugaacgguugga

SEQ ID NO: 287601 - RNA, 19 nt, Artificial Sequence
  Description of Artificial Sequence: Synthetic oligonucleotide
  Antisense strand to SEQ ID NO: 287600
uccaaccguucauuaugac

SEQ ID NO: 287602 - RNA, 19 nt, Artificial Sequence
  Description of Artificial Sequence: Synthetic oligonucleotide
  Sense strand starting at position 980 of SEQ ID NO: 3698
gcaucaaauuuguuugcau

SEQ ID NO: 287603 - RNA, 19 nt, Artificial Sequence
  Description of Artificial Sequence: Synthetic oligonucleotide
  Antisense strand to SEQ ID NO: 287602
augcaaacaaauuugaugc

SEQ ID NO: 287604 - RNA, 19 nt, Artificial Sequence
  Description of Artificial Sequence: Synthetic oligonucleotide
  Sense strand starting at position 1109 of SEQ ID NO: 3698
uggagagaaucugucaauu

SEQ ID NO: 287605 - RNA, 19 nt, Artificial Sequence
  Description of Artificial Sequence: Synthetic oligonucleotide
  Antisense strand to SEQ ID NO: 287604
aauugacagauucucucca

SEQ ID NO: 287606 - RNA, 19 nt, Artificial Sequence
  Description of Artificial Sequence: Synthetic oligonucleotide
  Sense strand starting at position 1111 of SEQ ID NO: 3698
gagagaaucugucaauuug

SEQ ID NO: 287607 - RNA, 19 nt, Artificial Sequence
  Description of Artificial Sequence: Synthetic oligonucleotide
  Antisense strand to SEQ ID NO: 287606
caaauugacagauucucuc

SEQ ID NO: 287608 - RNA, 19 nt, Artificial Sequence
  Description of Artificial Sequence: Synthetic oligonucleotide
  Sense strand starting at position 1503 of SEQ ID NO: 3698
uuuauuugucauggugcau

SEQ ID NO: 287609 - RNA, 19 nt, Artificial Sequence
  Description of Artificial Sequence: Synthetic oligonucleotide
  Antisense strand to SEQ ID NO: 287608
augcaccaugacaaauaaa

SEQ ID NO: 287610 - RNA, 19 nt, Artificial Sequence
  Description of Artificial Sequence: Synthetic oligonucleotide
  Sense strand starting at position 1524 of SEQ ID NO: 3698
gggacaguugcauauguua

SEQ ID NO: 287611 - RNA, 19 nt, Artificial Sequence
  Description of Artificial Sequence: Synthetic oligonucleotide
  Antisense strand to SEQ ID NO: 287610
uaacauaugcaacuguccc

SEQ ID NO: 287612 - RNA, 19 nt, Artificial Sequence
  Description of Artificial Sequence: Synthetic oligonucleotide
  Sense strand starting at position 1632 of SEQ ID NO: 3698
gcuaauuuggcauguguug

SEQ ID NO: 287613 - RNA, 19 nt, Artificial Sequence
  Description of Artificial Sequence: Synthetic oligonucleotide
  Antisense strand to SEQ ID NO: 287612
caacacaugccaaauuagc

SEQ ID NO: 287614 - RNA, 19 nt, Artificial Sequence
  Description of Artificial Sequence: Synthetic oligonucleotide
  Sense strand starting at position 1915 of SEQ ID NO: 3698
gcaagagauucucugguga

SEQ ID NO: 287615 - RNA, 19 nt, Artificial Sequence
  Description of Artificial Sequence: Synthetic oligonucleotide
  Antisense strand to SEQ ID NO: 287614
ucaccagagaaucucuugc

SEQ ID NO: 287616 - RNA, 19 nt, Artificial Sequence
  Description of Artificial Sequence: Synthetic oligonucleotide
  Sense strand starting at position 2189 of SEQ ID NO: 3698
cuguguugaguuuaguuaa

SEQ ID NO: 287617 - RNA, 19 nt, Artificial Sequence
  Description of Artificial Sequence: Synthetic oligonucleotide
  Antisense strand to SEQ ID NO: 287616
uuaacuaaacucaacacag

SEQ ID NO: 287618 - RNA, 19 nt, Artificial Sequence
  Description of Artificial Sequence: Synthetic oligonucleotide
  Sense strand starting at position 2225 of SEQ ID NO: 3698
auucuugugcuuuacugau

SEQ ID NO: 287619 - RNA, 19 nt, Artificial Sequence
  Description of Artificial Sequence: Synthetic oligonucleotide
  Antisense strand to SEQ ID NO: 287618
aucaguaaagcacaagaau

SEQ ID NO: 287620 - RNA, 19 nt, Artificial Sequence
  Description of Artificial Sequence: Synthetic oligonucleotide
  Sense strand starting at position 2296 of SEQ ID NO: 3698
aguacauuaggcuaauuaa

SEQ ID NO: 287621 - RNA, 19 nt, Artificial Sequence
  Description of Artificial Sequence: Synthetic oligonucleotide
  Antisense strand to SEQ ID NO: 287620
uuaauuagccuaauguacu

SEQ ID NO: 287622 - RNA, 19 nt, Artificial Sequence
  Description of Artificial Sequence: Synthetic oligonucleotide
  Sense strand starting at position 2362 of SEQ ID NO: 3698
ggagacugugcguauaaag

SEQ ID NO: 287623 - RNA, 19 nt, Artificial Sequence
  Description of Artificial Sequence: Synthetic oligonucleotide
  Antisense strand to SEQ ID NO: 287622
cuuuauacgcacagucucc

SEQ ID NO: 287624 - RNA, 19 nt, Artificial Sequence
  Description of Artificial Sequence: Synthetic oligonucleotide
  Sense strand starting at position 2417 of SEQ ID NO: 3698
aggaauugucucugagagg

SEQ ID NO: 287625 - RNA, 19 nt, Artificial Sequence
  Description of Artificial Sequence: Synthetic oligonucleotide
  Antisense strand to SEQ ID NO: 287624
ccucucagagacaauuccu

SEQ ID NO: 287626 - RNA, 19 nt, Artificial Sequence
  Description of Artificial Sequence: Synthetic oligonucleotide
  Sense strand starting at position 2422 of SEQ ID NO: 3698
uugucucugagaggacaua

SEQ ID NO: 287627 - RNA, 19 nt, Artificial Sequence
  Description of Artificial Sequence: Synthetic oligonucleotide
  Antisense strand to SEQ ID NO: 287626
uauguccucucagagacaa

SEQ ID NO: 287628 - RNA, 19 nt, Artificial Sequence
  Description of Artificial Sequence: Synthetic oligonucleotide
  Sense strand starting at position 2465 of SEQ ID NO: 3698
agugauuccuggccaagau

SEQ ID NO: 287629 - RNA, 19 nt, Artificial Sequence
  Description of Artificial Sequence: Synthetic oligonucleotide
  Antisense strand to SEQ ID NO: 287628
aucuuggccaggaaucacu

SEQ ID NO: 287630 - RNA, 19 nt, Artificial Sequence
  Description of Artificial Sequence: Synthetic oligonucleotide
  Sense strand starting at position 2466 of SEQ ID NO: 3698
gugauuccuggccaagaua

SEQ ID NO: 287631 - RNA, 19 nt, Artificial Sequence
  Description of Artificial Sequence: Synthetic oligonucleotide
  Antisense strand to SEQ ID NO: 287630
uaucuuggccaggaaucac

SEQ ID NO: 287632 - RNA, 19 nt, Artificial Sequence
  Description of Artificial Sequence: Synthetic oligonucleotide
  Sense strand starting at position 2486 of SEQ ID NO: 3698
ucaggauaguuugcaguga

SEQ ID NO: 287633 - RNA, 19 nt, Artificial Sequence
  Description of Artificial Sequence: Synthetic oligonucleotide
  Antisense strand to SEQ ID NO: 287632
ucacugcaaacuauccuga

SEQ ID NO: 287634 - RNA, 19 nt, Artificial Sequence
  Description of Artificial Sequence: Synthetic oligonucleotide
  Sense strand starting at position 2490 of SEQ ID NO: 3698
gauaguuugcagugaccaa

SEQ ID NO: 287635 - RNA, 19 nt, Artificial Sequence
  Description of Artificial Sequence: Synthetic oligonucleotide
  Antisense strand to SEQ ID NO: 287634
uuggucacugcaaacuauc

SEQ ID NO: 287636 - RNA, 19 nt, Artificial Sequence
  Description of Artificial Sequence: Synthetic oligonucleotide
  Sense strand starting at position 2559 of SEQ ID NO: 3698
cuucuaagauuugagacaa

SEQ ID NO: 287637 - RNA, 19 nt, Artificial Sequence
  Description of Artificial Sequence: Synthetic oligonucleotide
  Antisense strand to SEQ ID NO: 287636
uugucucaaaucuuagaag

SEQ ID NO: 287638 - RNA, 19 nt, Artificial Sequence
  Description of Artificial Sequence: Synthetic oligonucleotide
  Sense strand starting at position 2616 of SEQ ID NO: 3698
guuggcuuacuugaacaca

SEQ ID NO: 287639 - RNA, 19 nt, Artificial Sequence
  Description of Artificial Sequence: Synthetic oligonucleotide
  Antisense strand to SEQ ID NO: 287638
uguguucaaguaagccaac

SEQ ID NO: 287640 - RNA, 19 nt, Artificial Sequence
  Description of Artificial Sequence: Synthetic oligonucleotide
  Sense strand starting at position 2657 of SEQ ID NO: 3698
uuggacaaaugucauuuau

SEQ ID NO: 287641 - RNA, 19 nt, Artificial Sequence
  Description of Artificial Sequence: Synthetic oligonucleotide
  Antisense strand to SEQ ID NO: 287640
auaaaugacauuuguccaa

SEQ ID NO: 287642 - RNA, 19 nt, Artificial Sequence
  Description of Artificial Sequence: Synthetic oligonucleotide
  Sense strand starting at position 2710 of SEQ ID NO: 3698
gaaauugcuagauggaggu

SEQ ID NO: 287643 - RNA, 19 nt, Artificial Sequence
  Description of Artificial Sequence: Synthetic oligonucleotide
  Antisense strand to SEQ ID NO: 287642
accuccaucuagcaauuuc

SEQ ID NO: 287644 - RNA, 19 nt, Artificial Sequence
  Description of Artificial Sequence: Synthetic oligonucleotide
  Sense strand starting at position 2736 of SEQ ID NO: 3698
gaagaagauagcuguaggu

SEQ ID NO: 287645 - RNA, 19 nt, Artificial Sequence
  Description of Artificial Sequence: Synthetic oligonucleotide
  Antisense strand to SEQ ID NO: 287644
accuacagcuaucuucuuc

SEQ ID NO: 287646 - RNA, 19 nt, Artificial Sequence
  Description of Artificial Sequence: Synthetic oligonucleotide
  Sense strand starting at position 2859 of SEQ ID NO: 3698
augaaauucuugcugauuc

SEQ ID NO: 287647 - RNA, 19 nt, Artificial Sequence
  Description of Artificial Sequence: Synthetic oligonucleotide
  Antisense strand to SEQ ID NO: 287646
gaaucagcaagaauuucau

SEQ ID NO: 287648 - RNA, 19 nt, Artificial Sequence
  Description of Artificial Sequence: Synthetic oligonucleotide
  Sense strand starting at position 2871 of SEQ ID NO: 3698
cugauucuauaguccuaua

SEQ ID NO: 287649 - RNA, 19 nt, Artificial Sequence
  Description of Artificial Sequence: Synthetic oligonucleotide
  Antisense strand to SEQ ID NO: 287648
uauaggacuauagaaucag

SEQ ID NO: 287650 - RNA, 19 nt, Artificial Sequence
  Description of Artificial Sequence: Synthetic oligonucleotide
  Sense strand starting at position 3058 of SEQ ID NO: 3698
cugccacuuggccaugaau

SEQ ID NO: 287651 - RNA, 19 nt, Artificial Sequence
  Description of Artificial Sequence: Synthetic oligonucleotide
  Antisense strand to SEQ ID NO: 287650
auucauggccaaguggcag

SEQ ID NO: 287652 - RNA, 19 nt, Artificial Sequence
  Description of Artificial Sequence: Synthetic oligonucleotide
  Sense strand starting at position 3060 of SEQ ID NO: 3698
gccacuuggccaugaauuu

SEQ ID NO: 287653 - RNA, 19 nt, Artificial Sequence
  Description of Artificial Sequence: Synthetic oligonucleotide
  Antisense strand to SEQ ID NO: 287652
aaauucauggccaaguggc

SEQ ID NO: 287654 - RNA, 19 nt, Artificial Sequence
  Description of Artificial Sequence: Synthetic oligonucleotide
  Sense strand starting at position 3090 of SEQ ID NO: 3698
ugcauuaacucauuaaggu

SEQ ID NO: 287655 - RNA, 19 nt, Artificial Sequence
  Description of Artificial Sequence: Synthetic oligonucleotide
  Antisense strand to SEQ ID NO: 287654
accuuaaugaguuaaugca

SEQ ID NO: 287656 - RNA, 19 nt, Artificial Sequence
  Description of Artificial Sequence: Synthetic oligonucleotide
  Sense strand starting at position 3091 of SEQ ID NO: 3698
gcauuaacucauuaagguc

SEQ ID NO: 287657 - RNA, 19 nt, Artificial Sequence
  Description of Artificial Sequence: Synthetic oligonucleotide
  Antisense strand to SEQ ID NO: 287656
gaccuuaaugaguuaaugc

SEQ ID NO: 287658 - RNA, 19 nt, Artificial Sequence
  Description of Artificial Sequence: Synthetic oligonucleotide
  Sense strand starting at position 3112 of SEQ ID NO: 3698
caagcuaugguacaguuaa

SEQ ID NO: 287659 - RNA, 19 nt, Artificial Sequence
  Description of Artificial Sequence: Synthetic oligonucleotide
  Antisense strand to SEQ ID NO: 287658
uuaacuguaccauagcuug

SEQ ID NO: 287660 - RNA, 19 nt, Artificial Sequence
  Description of Artificial Sequence: Synthetic oligonucleotide
  Sense strand starting at position 3133 of SEQ ID NO: 3698
auagcuuugguguauauga

SEQ ID NO: 287661 - RNA, 19 nt, Artificial Sequence
  Description of Artificial Sequence: Synthetic oligonucleotide
  Antisense strand to SEQ ID NO: 287660
ucauauacaccaaagcuau

SEQ ID NO: 287662 - RNA, 19 nt, Artificial Sequence
  Description of Artificial Sequence: Synthetic oligonucleotide
  Sense strand starting at position 3230 of SEQ ID NO: 3698
ugagguuuauaaccauauu

SEQ ID NO: 287663 - RNA, 19 nt, Artificial Sequence
  Description of Artificial Sequence: Synthetic oligonucleotide
  Antisense strand to SEQ ID NO: 287662
aauaugguuauaaaccuca

SEQ ID NO: 287664 - RNA, 19 nt, Artificial Sequence
  Description of Artificial Sequence: Synthetic oligonucleotide
  Sense strand starting at position 3301 of SEQ ID NO: 3698
uuagucuacuaagugaagu

SEQ ID NO: 287665 - RNA, 19 nt, Artificial Sequence
  Description of Artificial Sequence: Synthetic oligonucleotide
  Antisense strand to SEQ ID NO: 287664
acuucacuuaguagacuaa

SEQ ID NO: 287666 - RNA, 19 nt, Artificial Sequence
  Description of Artificial Sequence: Synthetic oligonucleotide
  Sense strand starting at position 3365 of SEQ ID NO: 3698
aagaauagguugucuguaa

SEQ ID NO: 287667 - RNA, 19 nt, Artificial Sequence
  Description of Artificial Sequence: Synthetic oligonucleotide
  Antisense strand to SEQ ID NO: 287666
uuacagacaaccuauucuu

SEQ ID NO: 287668 - RNA, 19 nt, Artificial Sequence
  Description of Artificial Sequence: Synthetic oligonucleotide
  Sense strand starting at position 3366 of SEQ ID NO: 3698
agaauagguugucuguaaa

SEQ ID NO: 287669 - RNA, 19 nt, Artificial Sequence
  Description of Artificial Sequence: Synthetic oligonucleotide
  Antisense strand to SEQ ID NO: 287668
uuuacagacaaccuauucu

SEQ ID NO: 287670 - RNA, 19 nt, Artificial Sequence
  Description of Artificial Sequence: Synthetic oligonucleotide
  Sense strand starting at position 3369 of SEQ ID NO: 3698
auagguugucuguaaauca

SEQ ID NO: 287671 - RNA, 19 nt, Artificial Sequence
  Description of Artificial Sequence: Synthetic oligonucleotide
  Antisense strand to SEQ ID NO: 287670
ugauuuacagacaaccuau

SEQ ID NO: 287672 - RNA, 19 nt, Artificial Sequence
  Description of Artificial Sequence: Synthetic oligonucleotide
  Sense strand starting at position 3394 of SEQ ID NO: 3698
acugaauguucugucuaca

SEQ ID NO: 287673 - RNA, 19 nt, Artificial Sequence
  Description of Artificial Sequence: Synthetic oligonucleotide
  Antisense strand to SEQ ID NO: 287672
uguagacagaacauucagu

SEQ ID NO: 287674 - RNA, 19 nt, Artificial Sequence
  Description of Artificial Sequence: Synthetic oligonucleotide
  Sense strand starting at position 3722 of SEQ ID NO: 3698
augcuagaacaugagugua

SEQ ID NO: 287675 - RNA, 19 nt, Artificial Sequence
  Description of Artificial Sequence: Synthetic oligonucleotide
  Antisense strand to SEQ ID NO: 287674
uacacucauguucuagcau

SEQ ID NO: 287676 - RNA, 19 nt, Artificial Sequence
  Description of Artificial Sequence: Synthetic oligonucleotide
  Sense strand starting at position 3727 of SEQ ID NO: 3698
agaacaugaguguauguau

SEQ ID NO: 287677 - RNA, 19 nt, Artificial Sequence
  Description of Artificial Sequence: Synthetic oligonucleotide
  Antisense strand to SEQ ID NO: 287676
auacauacacucauguucu

SEQ ID NO: 287678 - RNA, 19 nt, Artificial Sequence
  Description of Artificial Sequence: Synthetic oligonucleotide
  Sense strand starting at position 3945 of SEQ ID NO: 3698
guauuuggguuguuuccaa

SEQ ID NO: 287679 - RNA, 19 nt, Artificial Sequence
  Description of Artificial Sequence: Synthetic oligonucleotide
  Antisense strand to SEQ ID NO: 287678
uuggaaacaacccaaauac

SEQ ID NO: 287680 - RNA, 19 nt, Artificial Sequence
  Description of Artificial Sequence: Synthetic oligonucleotide
  Sense strand starting at position 29 of SEQ ID NO: 3699
gauguugcugguuaggaga

SEQ ID NO: 287681 - RNA, 19 nt, Artificial Sequence
  Description of Artificial Sequence: Synthetic oligonucleotide
  Antisense strand to SEQ ID NO: 287680
ucuccuaaccagcaacauc

SEQ ID NO: 287682 - RNA, 19 nt, Artificial Sequence
  Description of Artificial Sequence: Synthetic oligonucleotide
  Sense strand starting at position 376 of SEQ ID NO: 3699
cugacauuguuaucugaaa

SEQ ID NO: 287683 - RNA, 19 nt, Artificial Sequence
  Description of Artificial Sequence: Synthetic oligonucleotide
  Antisense strand to SEQ ID NO: 287682
uuucagauaacaaugucag

SEQ ID NO: 287684 - RNA, 19 nt, Artificial Sequence
  Description of Artificial Sequence: Synthetic oligonucleotide
  Sense strand starting at position 377 of SEQ ID NO: 3699
ugacauuguuaucugaaag

SEQ ID NO: 287685 - RNA, 19 nt, Artificial Sequence
  Description of Artificial Sequence: Synthetic oligonucleotide
  Antisense strand to SEQ ID NO: 287684
cuuucagauaacaauguca

SEQ ID NO: 287686 - RNA, 19 nt, Artificial Sequence
  Description of Artificial Sequence: Synthetic oligonucleotide
  Sense strand starting at position 511 of SEQ ID NO: 3699
ucaagcuaugucuagggaa

SEQ ID NO: 287687 - RNA, 19 nt, Artificial Sequence
  Description of Artificial Sequence: Synthetic oligonucleotide
  Antisense strand to SEQ ID NO: 287686
uucccuagacauagcuuga

SEQ ID NO: 287688 - RNA, 19 nt, Artificial Sequence
  Description of Artificial Sequence: Synthetic oligonucleotide
  Sense strand starting at position 599 of SEQ ID NO: 3699
ggaaaucauguacauguuu

SEQ ID NO: 287689 - RNA, 19 nt, Artificial Sequence
  Description of Artificial Sequence: Synthetic oligonucleotide
  Antisense strand to SEQ ID NO: 287688
aaacauguacaugauuucc

SEQ ID NO: 287690 - RNA, 19 nt, Artificial Sequence
  Description of Artificial Sequence: Synthetic oligonucleotide
  Sense strand starting at position 682 of SEQ ID NO: 3699
cuguuaauaugguuaauag

SEQ ID NO: 287691 - RNA, 19 nt, Artificial Sequence
  Description of Artificial Sequence: Synthetic oligonucleotide
  Antisense strand to SEQ ID NO: 287690
cuauuaaccauauuaacag

SEQ ID NO: 287692 - RNA, 19 nt, Artificial Sequence
  Description of Artificial Sequence: Synthetic oligonucleotide
  Sense strand starting at position 801 of SEQ ID NO: 3699
ccuguuuaccuagaaagua

SEQ ID NO: 287693 - RNA, 19 nt, Artificial Sequence
  Description of Artificial Sequence: Synthetic oligonucleotide
  Antisense strand to SEQ ID NO: 287692
uacuuucuagguaaacagg

SEQ ID NO: 287694 - RNA, 19 nt, Artificial Sequence
  Description of Artificial Sequence: Synthetic oligonucleotide
  Sense strand starting at position 904 of SEQ ID NO: 3699
ugagaucacguagacaguu

SEQ ID NO: 287695 - RNA, 19 nt, Artificial Sequence
  Description of Artificial Sequence: Synthetic oligonucleotide
  Antisense strand to SEQ ID NO: 287694
aacugucuacgugaucuca

SEQ ID NO: 287696 - RNA, 19 nt, Artificial Sequence
  Description of Artificial Sequence: Synthetic oligonucleotide
  Sense strand starting at position 917 of SEQ ID NO: 3699
acaguuuaugcagacuuua

SEQ ID NO: 287697 - RNA, 19 nt, Artificial Sequence
  Description of Artificial Sequence: Synthetic oligonucleotide
  Antisense strand to SEQ ID NO: 287696
uaaagucugcauaaacugu

SEQ ID NO: 287698 - RNA, 19 nt, Artificial Sequence
  Description of Artificial Sequence: Synthetic oligonucleotide
  Sense strand starting at position 1689 of SEQ ID NO: 3699
auuccuugaugguuacaga

SEQ ID NO: 287699 - RNA, 19 nt, Artificial Sequence
  Description of Artificial Sequence: Synthetic oligonucleotide
  Antisense strand to SEQ ID NO: 287698
ucuguaaccaucaaggaau

SEQ ID NO: 287700 - RNA, 19 nt, Artificial Sequence
  Description of Artificial Sequence: Synthetic oligonucleotide
  Sense strand starting at position 1690 of SEQ ID NO: 3699
uuccuugaugguuacagau

SEQ ID NO: 287701 - RNA, 19 nt, Artificial Sequence
  Description of Artificial Sequence: Synthetic oligonucleotide
  Antisense strand to SEQ ID NO: 287700
aucuguaaccaucaaggaa

SEQ ID NO: 287702 - RNA, 19 nt, Artificial Sequence
  Description of Artificial Sequence: Synthetic oligonucleotide
  Sense strand starting at position 1696 of SEQ ID NO: 3699
gaugguuacagaugauguc

SEQ ID NO: 287703 - RNA, 19 nt, Artificial Sequence
  Description of Artificial Sequence: Synthetic oligonucleotide
  Antisense strand to SEQ ID NO: 287702
gacaucaucuguaaccauc

SEQ ID NO: 287704 - RNA, 19 nt, Artificial Sequence
  Description of Artificial Sequence: Synthetic oligonucleotide
  Sense strand starting at position 1702 of SEQ ID NO: 3699
uacagaugauguccgauaa

SEQ ID NO: 287705 - RNA, 19 nt, Artificial Sequence
  Description of Artificial Sequence: Synthetic oligonucleotide
  Antisense strand to SEQ ID NO: 287704
uuaucggacaucaucugua

SEQ ID NO: 287706 - RNA, 19 nt, Artificial Sequence
  Description of Artificial Sequence: Synthetic oligonucleotide
  Sense strand starting at position 1703 of SEQ ID NO: 3699
acagaugauguccgauaag

SEQ ID NO: 287707 - RNA, 19 nt, Artificial Sequence
  Description of Artificial Sequence: Synthetic oligonucleotide
  Antisense strand to SEQ ID NO: 287706
cuuaucggacaucaucugu

SEQ ID NO: 287708 - RNA, 19 nt, Artificial Sequence
  Description of Artificial Sequence: Synthetic oligonucleotide
  Sense strand starting at position 1706 of SEQ ID NO: 3699
gaugauguccgauaagcaa

SEQ ID NO: 287709 - RNA, 19 nt, Artificial Sequence
  Description of Artificial Sequence: Synthetic oligonucleotide
  Antisense strand to SEQ ID NO: 287708
uugcuuaucggacaucauc

SEQ ID NO: 287710 - RNA, 19 nt, Artificial Sequence
  Description of Artificial Sequence: Synthetic oligonucleotide
  Sense strand starting at position 1758 of SEQ ID NO: 3699
ucucaaagccaggauuacu

SEQ ID NO: 287711 - RNA, 19 nt, Artificial Sequence
  Description of Artificial Sequence: Synthetic oligonucleotide
  Antisense strand to SEQ ID NO: 287710
aguaauccuggcuuugaga

SEQ ID NO: 287712 - RNA, 19 nt, Artificial Sequence
  Description of Artificial Sequence: Synthetic oligonucleotide
  Sense strand starting at position 1809 of SEQ ID NO: 3699
acagaacuguaaucucagu

SEQ ID NO: 287713 - RNA, 19 nt, Artificial Sequence
  Description of Artificial Sequence: Synthetic oligonucleotide
  Antisense strand to SEQ ID NO: 287712
acugagauuacaguucugu

SEQ ID NO: 287714 - RNA, 19 nt, Artificial Sequence
  Description of Artificial Sequence: Synthetic oligonucleotide
  Sense strand starting at position 2136 of SEQ ID NO: 3699
gggaguuugcauggaaauc

SEQ ID NO: 287715 - RNA, 19 nt, Artificial Sequence
  Description of Artificial Sequence: Synthetic oligonucleotide
  Antisense strand to SEQ ID NO: 287714
gauuuccaugcaaacuccc

SEQ ID NO: 287716 - RNA, 19 nt, Artificial Sequence
  Description of Artificial Sequence: Synthetic oligonucleotide
  Sense strand starting at position 2200 of SEQ ID NO: 3699
aguuaagaauagcucagaa

SEQ ID NO: 287717 - RNA, 19 nt, Artificial Sequence
  Description of Artificial Sequence: Synthetic oligonucleotide
  Antisense strand to SEQ ID NO: 287716
uucugagcuauucuuaacu

SEQ ID NO: 287718 - RNA, 19 nt, Artificial Sequence
  Description of Artificial Sequence: Synthetic oligonucleotide
  Sense strand starting at position 2212 of SEQ ID NO: 3699
cucagaaacuggucucauu

SEQ ID NO: 287719 - RNA, 19 nt, Artificial Sequence
  Description of Artificial Sequence: Synthetic oligonucleotide
  Antisense strand to SEQ ID NO: 287718
aaugagaccaguuucugag

SEQ ID NO: 287720 - RNA, 19 nt, Artificial Sequence
  Description of Artificial Sequence: Synthetic oligonucleotide
  Sense strand starting at position 2337 of SEQ ID NO: 3699
aguaaaguccuguaccaug

SEQ ID NO: 287721 - RNA, 19 nt, Artificial Sequence
  Description of Artificial Sequence: Synthetic oligonucleotide
  Antisense strand to SEQ ID NO: 287720
caugguacaggacuuuacu

SEQ ID NO: 287722 - RNA, 19 nt, Artificial Sequence
  Description of Artificial Sequence: Synthetic oligonucleotide
  Sense strand starting at position 2431 of SEQ ID NO: 3699
acucauuguggugaguaga

SEQ ID NO: 287723 - RNA, 19 nt, Artificial Sequence
  Description of Artificial Sequence: Synthetic oligonucleotide
  Antisense strand to SEQ ID NO: 287722
ucuacucaccacaaugagu

SEQ ID NO: 287724 - RNA, 19 nt, Artificial Sequence
  Description of Artificial Sequence: Synthetic oligonucleotide
  Sense strand starting at position 2534 of SEQ ID NO: 3699
guuuauguuccuuaaagau

SEQ ID NO: 287725 - RNA, 19 nt, Artificial Sequence
  Description of Artificial Sequence: Synthetic oligonucleotide
  Antisense strand to SEQ ID NO: 287724
aucuuuaaggaacauaaac

SEQ ID NO: 287726 - RNA, 19 nt, Artificial Sequence
  Description of Artificial Sequence: Synthetic oligonucleotide
  Sense strand starting at position 2599 of SEQ ID NO: 3699
gguuaaacugguuguauuu

SEQ ID NO: 287727 - RNA, 19 nt, Artificial Sequence
  Description of Artificial Sequence: Synthetic oligonucleotide
  Antisense strand to SEQ ID NO: 287726
aaauacaaccaguuuaacc

SEQ ID NO: 287728 - RNA, 19 nt, Artificial Sequence
  Description of Artificial Sequence: Synthetic oligonucleotide
  Sense strand starting at position 2835 of SEQ ID NO: 3699
uugagauaaucuguguuag

SEQ ID NO: 287729 - RNA, 19 nt, Artificial Sequence
  Description of Artificial Sequence: Synthetic oligonucleotide
  Antisense strand to SEQ ID NO: 287728
cuaacacagauuaucucaa

SEQ ID NO: 287730 - RNA, 19 nt, Artificial Sequence
  Description of Artificial Sequence: Synthetic oligonucleotide
  Sense strand starting at position 2836 of SEQ ID NO: 3699
ugagauaaucuguguuaga

SEQ ID NO: 287731 - RNA, 19 nt, Artificial Sequence
  Description of Artificial Sequence: Synthetic oligonucleotide
  Antisense strand to SEQ ID NO: 287730
ucuaacacagauuaucuca

SEQ ID NO: 287732 - RNA, 19 nt, Artificial Sequence
  Description of Artificial Sequence: Synthetic oligonucleotide
  Sense strand starting at position 2837 of SEQ ID NO: 3699
gagauaaucuguguuagac

SEQ ID NO: 287733 - RNA, 19 nt, Artificial Sequence
  Description of Artificial Sequence: Synthetic oligonucleotide
  Antisense strand to SEQ ID NO: 287732
gucuaacacagauuaucuc

SEQ ID NO: 287734 - RNA, 19 nt, Artificial Sequence
  Description of Artificial Sequence: Synthetic oligonucleotide
  Sense strand starting at position 2944 of SEQ ID NO: 3699
gugcaaugcaaguuaugcu

SEQ ID NO: 287735 - RNA, 19 nt, Artificial Sequence
  Description of Artificial Sequence: Synthetic oligonucleotide
  Antisense strand to SEQ ID NO: 287734
agcauaacuugcauugcac

SEQ ID NO: 287736 - RNA, 19 nt, Artificial Sequence
  Description of Artificial Sequence: Synthetic oligonucleotide
  Sense strand starting at position 3099 of SEQ ID NO: 3699
uguauaauuccugagguaa

SEQ ID NO: 287737 - RNA, 19 nt, Artificial Sequence
  Description of Artificial Sequence: Synthetic oligonucleotide
  Antisense strand to SEQ ID NO: 287736
uuaccucaggaauuauaca

SEQ ID NO: 287738 - RNA, 19 nt, Artificial Sequence
  Description of Artificial Sequence: Synthetic oligonucleotide
  Sense strand starting at position 3177 of SEQ ID NO: 3699
ugggaaaccuaucugcuaa

SEQ ID NO: 287739 - RNA, 19 nt, Artificial Sequence
  Description of Artificial Sequence: Synthetic oligonucleotide
  Antisense strand to SEQ ID NO: 287738
uuagcagauagguuuccca

SEQ ID NO: 287740 - RNA, 19 nt, Artificial Sequence
  Description of Artificial Sequence: Synthetic oligonucleotide
  Sense strand starting at position 3179 of SEQ ID NO: 3699
ggaaaccuaucugcuaaug

SEQ ID NO: 287741 - RNA, 19 nt, Artificial Sequence
  Description of Artificial Sequence: Synthetic oligonucleotide
  Antisense strand to SEQ ID NO: 287740
cauuagcagauagguuucc

SEQ ID NO: 287742 - RNA, 19 nt, Artificial Sequence
  Description of Artificial Sequence: Synthetic oligonucleotide
  Sense strand starting at position 3245 of SEQ ID NO: 3699
ggaacacagugaucuaauu

SEQ ID NO: 287743 - RNA, 19 nt, Artificial Sequence
  Description of Artificial Sequence: Synthetic oligonucleotide
  Antisense strand to SEQ ID NO: 287742
aauuagaucacuguguucc

SEQ ID NO: 287744 - RNA, 19 nt, Artificial Sequence
  Description of Artificial Sequence: Synthetic oligonucleotide
  Sense strand starting at position 3310 of SEQ ID NO: 3699
agaugauaugccugacaua

SEQ ID NO: 287745 - RNA, 19 nt, Artificial Sequence
  Description of Artificial Sequence: Synthetic oligonucleotide
  Antisense strand to SEQ ID NO: 287744
uaugucaggcauaucaucu

SEQ ID NO: 287746 - RNA, 19 nt, Artificial Sequence
  Description of Artificial Sequence: Synthetic oligonucleotide
  Sense strand starting at position 3380 of SEQ ID NO: 3699
ucagcuauacugcaaugaa

SEQ ID NO: 287747 - RNA, 19 nt, Artificial Sequence
  Description of Artificial Sequence: Synthetic oligonucleotide
  Antisense strand to SEQ ID NO: 287746
uucauugcaguauagcuga

SEQ ID NO: 287748 - RNA, 19 nt, Artificial Sequence
  Description of Artificial Sequence: Synthetic oligonucleotide
  Sense strand starting at position 3418 of SEQ ID NO: 3699
gaguaaaggcuugauguac

SEQ ID NO: 287749 - RNA, 19 nt, Artificial Sequence
  Description of Artificial Sequence: Synthetic oligonucleotide
  Antisense strand to SEQ ID NO: 287748
guacaucaagccuuuacuc

SEQ ID NO: 287750 - RNA, 19 nt, Artificial Sequence
  Description of Artificial Sequence: Synthetic oligonucleotide
  Sense strand starting at position 3424 of SEQ ID NO: 3699
aggcuugauguacagugau

SEQ ID NO: 287751 - RNA, 19 nt, Artificial Sequence
  Description of Artificial Sequence: Synthetic oligonucleotide
  Antisense strand to SEQ ID NO: 287750
aucacuguacaucaagccu

SEQ ID NO: 287752 - RNA, 19 nt, Artificial Sequence
  Description of Artificial Sequence: Synthetic oligonucleotide
  Sense strand starting at position 3532 of SEQ ID NO: 3699
ucuguacugauuggaauga

SEQ ID NO: 287753 - RNA, 19 nt, Artificial Sequence
  Description of Artificial Sequence: Synthetic oligonucleotide
  Antisense strand to SEQ ID NO: 287752
ucauuccaaucaguacaga

SEQ ID NO: 287754 - RNA, 19 nt, Artificial Sequence
  Description of Artificial Sequence: Synthetic oligonucleotide
  Sense strand starting at position 3628 of SEQ ID NO: 3699
uuguguucugaacauuaag

SEQ ID NO: 287755 - RNA, 19 nt, Artificial Sequence
  Description of Artificial Sequence: Synthetic oligonucleotide
  Antisense strand to SEQ ID NO: 287754
cuuaauguucagaacacaa

SEQ ID NO: 287756 - RNA, 19 nt, Artificial Sequence
  Description of Artificial Sequence: Synthetic oligonucleotide
  Sense strand starting at position 3631 of SEQ ID NO: 3699
uguucugaacauuaagcua

SEQ ID NO: 287757 - RNA, 19 nt, Artificial Sequence
  Description of Artificial Sequence: Synthetic oligonucleotide
  Antisense strand to SEQ ID NO: 287756
uagcuuaauguucagaaca

SEQ ID NO: 287758 - RNA, 19 nt, Artificial Sequence
  Description of Artificial Sequence: Synthetic oligonucleotide
  Sense strand starting at position 3974 of SEQ ID NO: 3699
uagaguauggccuaguaga

SEQ ID NO: 287759 - RNA, 19 nt, Artificial Sequence
  Description of Artificial Sequence: Synthetic oligonucleotide
  Antisense strand to SEQ ID NO: 287758
ucuacuaggccauacucua

SEQ ID NO: 287760 - RNA, 19 nt, Artificial Sequence
  Description of Artificial Sequence: Synthetic oligonucleotide
  Sense strand starting at position 157 of SEQ ID NO: 3700
uugagcacugcauauaaua

SEQ ID NO: 287761 - RNA, 19 nt, Artificial Sequence
  Description of Artificial Sequence: Synthetic oligonucleotide
  Antisense strand to SEQ ID NO: 287760
uauuauaugcagugcucaa

SEQ ID NO: 287762 - RNA, 19 nt, Artificial Sequence
  Description of Artificial Sequence: Synthetic oligonucleotide
  Sense strand starting at position 170 of SEQ ID NO: 3700
auaauaugccauugagcaa

SEQ ID NO: 287763 - RNA, 19 nt, Artificial Sequence
  Description of Artificial Sequence: Synthetic oligonucleotide
  Antisense strand to SEQ ID NO: 287762
uugcucaauggcauauuau

SEQ ID NO: 287764 - RNA, 19 nt, Artificial Sequence
  Description of Artificial Sequence: Synthetic oligonucleotide
  Sense strand starting at position 177 of SEQ ID NO: 3700
gccauugagcaacaguaua

SEQ ID NO: 287765 - RNA, 19 nt, Artificial Sequence
  Description of Artificial Sequence: Synthetic oligonucleotide
  Antisense strand to SEQ ID NO: 287764
uauacuguugcucaauggc

SEQ ID NO: 287766 - RNA, 19 nt, Artificial Sequence
  Description of Artificial Sequence: Synthetic oligonucleotide
  Sense strand starting at position 279 of SEQ ID NO: 3700
aucaucauaccuggucuau

SEQ ID NO: 287767 - RNA, 19 nt, Artificial Sequence
  Description of Artificial Sequence: Synthetic oligonucleotide
  Antisense strand to SEQ ID NO: 287766
auagaccagguaugaugau

SEQ ID NO: 287768 - RNA, 19 nt, Artificial Sequence
  Description of Artificial Sequence: Synthetic oligonucleotide
  Sense strand starting at position 380 of SEQ ID NO: 3700
gccuuauuguaauuuagua

SEQ ID NO: 287769 - RNA, 19 nt, Artificial Sequence
  Description of Artificial Sequence: Synthetic oligonucleotide
  Antisense strand to SEQ ID NO: 287768
uacuaaauuacaauaaggc

SEQ ID NO: 287770 - RNA, 19 nt, Artificial Sequence
  Description of Artificial Sequence: Synthetic oligonucleotide
  Sense strand starting at position 387 of SEQ ID NO: 3700
uguaauuuaguacgugacu

SEQ ID NO: 287771 - RNA, 19 nt, Artificial Sequence
  Description of Artificial Sequence: Synthetic oligonucleotide
  Antisense strand to SEQ ID NO: 287770
agucacguacuaaauuaca

SEQ ID NO: 287772 - RNA, 19 nt, Artificial Sequence
  Description of Artificial Sequence: Synthetic oligonucleotide
  Sense strand starting at position 469 of SEQ ID NO: 3700
gguuaaauaucuguaauuc

SEQ ID NO: 287773 - RNA, 19 nt, Artificial Sequence
  Description of Artificial Sequence: Synthetic oligonucleotide
  Antisense strand to SEQ ID NO: 287772
gaauuacagauauuuaacc

SEQ ID NO: 287774 - RNA, 19 nt, Artificial Sequence
  Description of Artificial Sequence: Synthetic oligonucleotide
  Sense strand starting at position 742 of SEQ ID NO: 3700
cagcucuuuccacaggaga

SEQ ID NO: 287775 - RNA, 19 nt, Artificial Sequence
  Description of Artificial Sequence: Synthetic oligonucleotide
  Antisense strand to SEQ ID NO: 287774
ucuccuguggaaagagcug

SEQ ID NO: 287776 - RNA, 19 nt, Artificial Sequence
  Description of Artificial Sequence: Synthetic oligonucleotide
  Sense strand starting at position 966 of SEQ ID NO: 3700
cuuccaccuccugagucau

SEQ ID NO: 287777 - RNA, 19 nt, Artificial Sequence
  Description of Artificial Sequence: Synthetic oligonucleotide
  Antisense strand to SEQ ID NO: 287776
augacucaggagguggaag

SEQ ID NO: 287778 - RNA, 19 nt, Artificial Sequence
  Description of Artificial Sequence: Synthetic oligonucleotide
  Sense strand starting at position 1453 of SEQ ID NO: 3700
agcaguauuucccuuguga

SEQ ID NO: 287779 - RNA, 19 nt, Artificial Sequence
  Description of Artificial Sequence: Synthetic oligonucleotide
  Antisense strand to SEQ ID NO: 287778
ucacaagggaaauacugcu

SEQ ID NO: 287780 - RNA, 19 nt, Artificial Sequence
  Description of Artificial Sequence: Synthetic oligonucleotide
  Sense strand starting at position 1716 of SEQ ID NO: 3700
agauaacaauccguggaua

SEQ ID NO: 287781 - RNA, 19 nt, Artificial Sequence
  Description of Artificial Sequence: Synthetic oligonucleotide
  Antisense strand to SEQ ID NO: 287780
uauccacggauuguuaucu

SEQ ID NO: 287782 - RNA, 19 nt, Artificial Sequence
  Description of Artificial Sequence: Synthetic oligonucleotide
  Sense strand starting at position 1717 of SEQ ID NO: 3700
gauaacaauccguggauaa

SEQ ID NO: 287783 - RNA, 19 nt, Artificial Sequence
  Description of Artificial Sequence: Synthetic oligonucleotide
  Antisense strand to SEQ ID NO: 287782
uuauccacggauuguuauc

SEQ ID NO: 287784 - RNA, 19 nt, Artificial Sequence
  Description of Artificial Sequence: Synthetic oligonucleotide
  Sense strand starting at position 1718 of SEQ ID NO: 3700
auaacaauccguggauaag

SEQ ID NO: 287785 - RNA, 19 nt, Artificial Sequence
  Description of Artificial Sequence: Synthetic oligonucleotide
  Antisense strand to SEQ ID NO: 287784
cuuauccacggauuguuau

SEQ ID NO: 287786 - RNA, 19 nt, Artificial Sequence
  Description of Artificial Sequence: Synthetic oligonucleotide
  Sense strand starting at position 1719 of SEQ ID NO: 3700
uaacaauccguggauaagu

SEQ ID NO: 287787 - RNA, 19 nt, Artificial Sequence
  Description of Artificial Sequence: Synthetic oligonucleotide
  Antisense strand to SEQ ID NO: 287786
acuuauccacggauuguua

SEQ ID NO: 287788 - RNA, 19 nt, Artificial Sequence
  Description of Artificial Sequence: Synthetic oligonucleotide
  Sense strand starting at position 1753 of SEQ ID NO: 3700
gcuggcuuaccugaaauaa

SEQ ID NO: 287789 - RNA, 19 nt, Artificial Sequence
  Description of Artificial Sequence: Synthetic oligonucleotide
  Antisense strand to SEQ ID NO: 287788
uuauuucagguaagccagc

SEQ ID NO: 287790 - RNA, 19 nt, Artificial Sequence
  Description of Artificial Sequence: Synthetic oligonucleotide
  Sense strand starting at position 2127 of SEQ ID NO: 3700
ugauguacagcccauaauu

SEQ ID NO: 287791 - RNA, 19 nt, Artificial Sequence
  Description of Artificial Sequence: Synthetic oligonucleotide
  Antisense strand to SEQ ID NO: 287790
aauuaugggcuguacauca

SEQ ID NO: 287792 - RNA, 19 nt, Artificial Sequence
  Description of Artificial Sequence: Synthetic oligonucleotide
  Sense strand starting at position 2367 of SEQ ID NO: 3700
agaugucaagcuuauugau

SEQ ID NO: 287793 - RNA, 19 nt, Artificial Sequence
  Description of Artificial Sequence: Synthetic oligonucleotide
  Antisense strand to SEQ ID NO: 287792
aucaauaagcuugacaucu

SEQ ID NO: 287794 - RNA, 19 nt, Artificial Sequence
  Description of Artificial Sequence: Synthetic oligonucleotide
  Sense strand starting at position 2369 of SEQ ID NO: 3700
augucaagcuuauugauaa

SEQ ID NO: 287795 - RNA, 19 nt, Artificial Sequence
  Description of Artificial Sequence: Synthetic oligonucleotide
  Antisense strand to SEQ ID NO: 287794
uuaucaauaagcuugacau

SEQ ID NO: 287796 - RNA, 19 nt, Artificial Sequence
  Description of Artificial Sequence: Synthetic oligonucleotide
  Sense strand starting at position 2394 of SEQ ID NO: 3700
ucacaucucuuuguggaga

SEQ ID NO: 287797 - RNA, 19 nt, Artificial Sequence
  Description of Artificial Sequence: Synthetic oligonucleotide
  Antisense strand to SEQ ID NO: 287796
ucuccacaaagagauguga

SEQ ID NO: 287798 - RNA, 19 nt, Artificial Sequence
  Description of Artificial Sequence: Synthetic oligonucleotide
  Sense strand starting at position 2397 of SEQ ID NO: 3700
caucucuuuguggagaagu

SEQ ID NO: 287799 - RNA, 19 nt, Artificial Sequence
  Description of Artificial Sequence: Synthetic oligonucleotide
  Antisense strand to SEQ ID NO: 287798
acuucuccacaaagagaug

SEQ ID NO: 287800 - RNA, 19 nt, Artificial Sequence
  Description of Artificial Sequence: Synthetic oligonucleotide
  Sense strand starting at position 2399 of SEQ ID NO: 3700
ucucuuuguggagaaguau

SEQ ID NO: 287801 - RNA, 19 nt, Artificial Sequence
  Description of Artificial Sequence: Synthetic oligonucleotide
  Antisense strand to SEQ ID NO: 287800
auacuucuccacaaagaga

SEQ ID NO: 287802 - RNA, 19 nt, Artificial Sequence
  Description of Artificial Sequence: Synthetic oligonucleotide
  Sense strand starting at position 2405 of SEQ ID NO: 3700
uguggagaaguauaaguuu

SEQ ID NO: 287803 - RNA, 19 nt, Artificial Sequence
  Description of Artificial Sequence: Synthetic oligonucleotide
  Antisense strand to SEQ ID NO: 287802
aaacuuauacuucuccaca

SEQ ID NO: 287804 - RNA, 19 nt, Artificial Sequence
  Description of Artificial Sequence: Synthetic oligonucleotide
  Sense strand starting at position 2462 of SEQ ID NO: 3700
uauuguuuggaggaauguu

SEQ ID NO: 287805 - RNA, 19 nt, Artificial Sequence
  Description of Artificial Sequence: Synthetic oligonucleotide
  Antisense strand to SEQ ID NO: 287804
aacauuccuccaaacaaua

SEQ ID NO: 287806 - RNA, 19 nt, Artificial Sequence
  Description of Artificial Sequence: Synthetic oligonucleotide
  Sense strand starting at position 2470 of SEQ ID NO: 3700
ggaggaauguugaaagguu

SEQ ID NO: 287807 - RNA, 19 nt, Artificial Sequence
  Description of Artificial Sequence: Synthetic oligonucleotide
  Antisense strand to SEQ ID NO: 287806
aaccuuucaacauuccucc

SEQ ID NO: 287808 - RNA, 19 nt, Artificial Sequence
  Description of Artificial Sequence: Synthetic oligonucleotide
  Sense strand starting at position 2628 of SEQ ID NO: 3700
aguuacaucuucuuagaga

SEQ ID NO: 287809 - RNA, 19 nt, Artificial Sequence
  Description of Artificial Sequence: Synthetic oligonucleotide
  Antisense strand to SEQ ID NO: 287808
ucucuaagaagauguaacu

SEQ ID NO: 287810 - RNA, 19 nt, Artificial Sequence
  Description of Artificial Sequence: Synthetic oligonucleotide
  Sense strand starting at position 2673 of SEQ ID NO: 3700
gaauccauuugguaaauga

SEQ ID NO: 287811 - RNA, 19 nt, Artificial Sequence
  Description of Artificial Sequence: Synthetic oligonucleotide
  Antisense strand to SEQ ID NO: 287810
ucauuuaccaaauggauuc

SEQ ID NO: 287812 - RNA, 19 nt, Artificial Sequence
  Description of Artificial Sequence: Synthetic oligonucleotide
  Sense strand starting at position 2726 of SEQ ID NO: 3700
ugauguucucaauauaugu

SEQ ID NO: 287813 - RNA, 19 nt, Artificial Sequence
  Description of Artificial Sequence: Synthetic oligonucleotide
  Antisense strand to SEQ ID NO: 287812
acauauauugagaacauca

SEQ ID NO: 287814 - RNA, 19 nt, Artificial Sequence
  Description of Artificial Sequence: Synthetic oligonucleotide
  Sense strand starting at position 2777 of SEQ ID NO: 3700
ugugaaggccaggaucauu

SEQ ID NO: 287815 - RNA, 19 nt, Artificial Sequence
  Description of Artificial Sequence: Synthetic oligonucleotide
  Antisense strand to SEQ ID NO: 287814
aaugauccuggccuucaca

SEQ ID NO: 287816 - RNA, 19 nt, Artificial Sequence
  Description of Artificial Sequence: Synthetic oligonucleotide
  Sense strand starting at position 2927 of SEQ ID NO: 3700
uuuagaacucauggugagu

SEQ ID NO: 287817 - RNA, 19 nt, Artificial Sequence
  Description of Artificial Sequence: Synthetic oligonucleotide
  Antisense strand to SEQ ID NO: 287816
acucaccaugaguucuaaa

SEQ ID NO: 287818 - RNA, 19 nt, Artificial Sequence
  Description of Artificial Sequence: Synthetic oligonucleotide
  Sense strand starting at position 2953 of SEQ ID NO: 3700
cuuaaacgggucugaaaua

SEQ ID NO: 287819 - RNA, 19 nt, Artificial Sequence
  Description of Artificial Sequence: Synthetic oligonucleotide
  Antisense strand to SEQ ID NO: 287818
uauuucagacccguuuaag

SEQ ID NO: 287820 - RNA, 19 nt, Artificial Sequence
  Description of Artificial Sequence: Synthetic oligonucleotide
  Sense strand starting at position 3206 of SEQ ID NO: 3700
cugaauagauugcuuuaac

SEQ ID NO: 287821 - RNA, 19 nt, Artificial Sequence
  Description of Artificial Sequence: Synthetic oligonucleotide
  Antisense strand to SEQ ID NO: 287820
guuaaagcaaucuauucag

SEQ ID NO: 287822 - RNA, 19 nt, Artificial Sequence
  Description of Artificial Sequence: Synthetic oligonucleotide
  Sense strand starting at position 3207 of SEQ ID NO: 3700
ugaauagauugcuuuaaca

SEQ ID NO: 287823 - RNA, 19 nt, Artificial Sequence
  Description of Artificial Sequence: Synthetic oligonucleotide
  Antisense strand to SEQ ID NO: 287822
uguuaaagcaaucuauuca

SEQ ID NO: 287824 - RNA, 19 nt, Artificial Sequence
  Description of Artificial Sequence: Synthetic oligonucleotide
  Sense strand starting at position 3223 of SEQ ID NO: 3700
acauaagguuguucccaca

SEQ ID NO: 287825 - RNA, 19 nt, Artificial Sequence
  Description of Artificial Sequence: Synthetic oligonucleotide
  Antisense strand to SEQ ID NO: 287824
ugugggaacaaccuuaugu

SEQ ID NO: 287826 - RNA, 19 nt, Artificial Sequence
  Description of Artificial Sequence: Synthetic oligonucleotide
  Sense strand starting at position 3417 of SEQ ID NO: 3700
uaauuaaagugacuuggua

SEQ ID NO: 287827 - RNA, 19 nt, Artificial Sequence
  Description of Artificial Sequence: Synthetic oligonucleotide
  Antisense strand to SEQ ID NO: 287826
uaccaagucacuuuaauua

SEQ ID NO: 287828 - RNA, 19 nt, Artificial Sequence
  Description of Artificial Sequence: Synthetic oligonucleotide
  Sense strand starting at position 3419 of SEQ ID NO: 3700
auuaaagugacuugguaga

SEQ ID NO: 287829 - RNA, 19 nt, Artificial Sequence
  Description of Artificial Sequence: Synthetic oligonucleotide
  Antisense strand to SEQ ID NO: 287828
ucuaccaagucacuuuaau

SEQ ID NO: 287830 - RNA, 19 nt, Artificial Sequence
  Description of Artificial Sequence: Synthetic oligonucleotide
  Sense strand starting at position 3421 of SEQ ID NO: 3700
uaaagugacuugguagauc

SEQ ID NO: 287831 - RNA, 19 nt, Artificial Sequence
  Description of Artificial Sequence: Synthetic oligonucleotide
  Antisense strand to SEQ ID NO: 287830
gaucuaccaagucacuuua

SEQ ID NO: 287832 - RNA, 19 nt, Artificial Sequence
  Description of Artificial Sequence: Synthetic oligonucleotide
  Sense strand starting at position 3509 of SEQ ID NO: 3700
gcucucagggcacauaauu

SEQ ID NO: 287833 - RNA, 19 nt, Artificial Sequence
  Description of Artificial Sequence: Synthetic oligonucleotide
  Antisense strand to SEQ ID NO: 287832
aauuaugugcccugagagc

SEQ ID NO: 287834 - RNA, 19 nt, Artificial Sequence
  Description of Artificial Sequence: Synthetic oligonucleotide
  Sense strand starting at position 3585 of SEQ ID NO: 3700
agcuuaaaccuguaagauu

SEQ ID NO: 287835 - RNA, 19 nt, Artificial Sequence
  Description of Artificial Sequence: Synthetic oligonucleotide
  Antisense strand to SEQ ID NO: 287834
aaucuuacagguuuaagcu

SEQ ID NO: 287836 - RNA, 19 nt, Artificial Sequence
  Description of Artificial Sequence: Synthetic oligonucleotide
  Sense strand starting at position 3724 of SEQ ID NO: 3700
cauagucuugaggguaaau

SEQ ID NO: 287837 - RNA, 19 nt, Artificial Sequence
  Description of Artificial Sequence: Synthetic oligonucleotide
  Antisense strand to SEQ ID NO: 287836
auuuacccucaagacuaug

SEQ ID NO: 287838 - RNA, 19 nt, Artificial Sequence
  Description of Artificial Sequence: Synthetic oligonucleotide
  Sense strand starting at position 3938 of SEQ ID NO: 3700
ucuccuugugaauagucua

SEQ ID NO: 287839 - RNA, 19 nt, Artificial Sequence
  Description of Artificial Sequence: Synthetic oligonucleotide
  Antisense strand to SEQ ID NO: 287838
uagacuauucacaaggaga

SEQ ID NO: 287840 - RNA, 19 nt, Artificial Sequence
  Description of Artificial Sequence: Synthetic oligonucleotide
  Sense strand starting at position 126 of SEQ ID NO: 3702
gacacugagcacugagaua

SEQ ID NO: 287841 - RNA, 19 nt, Artificial Sequence
  Description of Artificial Sequence: Synthetic oligonucleotide
  Antisense strand to SEQ ID NO: 287840
uaucucagugcucaguguc

SEQ ID NO: 287842 - RNA, 19 nt, Artificial Sequence
  Description of Artificial Sequence: Synthetic oligonucleotide
  Sense strand starting at position 202 of SEQ ID NO: 3702
gggaaucucauaugugcau

SEQ ID NO: 287843 - RNA, 19 nt, Artificial Sequence
  Description of Artificial Sequence: Synthetic oligonucleotide
  Antisense strand to SEQ ID NO: 287842
augcacauaugagauuccc

SEQ ID NO: 287844 - RNA, 19 nt, Artificial Sequence
  Description of Artificial Sequence: Synthetic oligonucleotide
  Sense strand starting at position 226 of SEQ ID NO: 3702
ugcucacauggagaucuau

SEQ ID NO: 287845 - RNA, 19 nt, Artificial Sequence
  Description of Artificial Sequence: Synthetic oligonucleotide
  Antisense strand to SEQ ID NO: 287844
auagaucuccaugugagca

SEQ ID NO: 287846 - RNA, 19 nt, Artificial Sequence
  Description of Artificial Sequence: Synthetic oligonucleotide
  Sense strand starting at position 235 of SEQ ID NO: 3702
ggagaucuaucucucacau

SEQ ID NO: 287847 - RNA, 19 nt, Artificial Sequence
  Description of Artificial Sequence: Synthetic oligonucleotide
  Antisense strand to SEQ ID NO: 287846
augugagagauagaucucc

SEQ ID NO: 287848 - RNA, 19 nt, Artificial Sequence
  Description of Artificial Sequence: Synthetic oligonucleotide
  Sense strand starting at position 261 of SEQ ID NO: 3702
gugucuaugagguaaucua

SEQ ID NO: 287849 - RNA, 19 nt, Artificial Sequence
  Description of Artificial Sequence: Synthetic oligonucleotide
  Antisense strand to SEQ ID NO: 287848
uagauuaccucauagacac

SEQ ID NO: 287850 - RNA, 19 nt, Artificial Sequence
  Description of Artificial Sequence: Synthetic oligonucleotide
  Sense strand starting at position 489 of SEQ ID NO: 3702
gaggaucuugcacauaucu

SEQ ID NO: 287851 - RNA, 19 nt, Artificial Sequence
  Description of Artificial Sequence: Synthetic oligonucleotide
  Antisense strand to SEQ ID NO: 287850
agauaugugcaagauccuc

SEQ ID NO: 287852 - RNA, 19 nt, Artificial Sequence
  Description of Artificial Sequence: Synthetic oligonucleotide
  Sense strand starting at position 550 of SEQ ID NO: 3702
uuaagaguuuauuccaagu

SEQ ID NO: 287853 - RNA, 19 nt, Artificial Sequence
  Description of Artificial Sequence: Synthetic oligonucleotide
  Antisense strand to SEQ ID NO: 287852
acuuggaauaaacucuuaa

SEQ ID NO: 287854 - RNA, 19 nt, Artificial Sequence
  Description of Artificial Sequence: Synthetic oligonucleotide
  Sense strand starting at position 625 of SEQ ID NO: 3702
gguagauccugcuugaaag

SEQ ID NO: 287855 - RNA, 19 nt, Artificial Sequence
  Description of Artificial Sequence: Synthetic oligonucleotide
  Antisense strand to SEQ ID NO: 287854
cuuucaagcaggaucuacc

SEQ ID NO: 287856 - RNA, 19 nt, Artificial Sequence
  Description of Artificial Sequence: Synthetic oligonucleotide
  Sense strand starting at position 626 of SEQ ID NO: 3702
guagauccugcuugaaaga

SEQ ID NO: 287857 - RNA, 19 nt, Artificial Sequence
  Description of Artificial Sequence: Synthetic oligonucleotide
  Antisense strand to SEQ ID NO: 287856
ucuuucaagcaggaucuac

SEQ ID NO: 287858 - RNA, 19 nt, Artificial Sequence
  Description of Artificial Sequence: Synthetic oligonucleotide
  Sense strand starting at position 789 of SEQ ID NO: 3702
ugcugcuagcuaguguaau

SEQ ID NO: 287859 - RNA, 19 nt, Artificial Sequence
  Description of Artificial Sequence: Synthetic oligonucleotide
  Antisense strand to SEQ ID NO: 287858
auuacacuagcuagcagca

SEQ ID NO: 287860 - RNA, 19 nt, Artificial Sequence
  Description of Artificial Sequence: Synthetic oligonucleotide
  Sense strand starting at position 827 of SEQ ID NO: 3702
uuugcaguaccuuaggaaa

SEQ ID NO: 287861 - RNA, 19 nt, Artificial Sequence
  Description of Artificial Sequence: Synthetic oligonucleotide
  Antisense strand to SEQ ID NO: 287860
uuuccuaagguacugcaaa

SEQ ID NO: 287862 - RNA, 19 nt, Artificial Sequence
  Description of Artificial Sequence: Synthetic oligonucleotide
  Sense strand starting at position 905 of SEQ ID NO: 3702
agucuuaguguccauauca

SEQ ID NO: 287863 - RNA, 19 nt, Artificial Sequence
  Description of Artificial Sequence: Synthetic oligonucleotide
  Antisense strand to SEQ ID NO: 287862
ugauauggacacuaagacu

SEQ ID NO: 287864 - RNA, 19 nt, Artificial Sequence
  Description of Artificial Sequence: Synthetic oligonucleotide
  Sense strand starting at position 988 of SEQ ID NO: 3702
auaugagucuuugcaauaa

SEQ ID NO: 287865 - RNA, 19 nt, Artificial Sequence
  Description of Artificial Sequence: Synthetic oligonucleotide
  Antisense strand to SEQ ID NO: 287864
uuauugcaaagacucauau

SEQ ID NO: 287866 - RNA, 19 nt, Artificial Sequence
  Description of Artificial Sequence: Synthetic oligonucleotide
  Sense strand starting at position 1224 of SEQ ID NO: 3702
aggagucagaguugucauu

SEQ ID NO: 287867 - RNA, 19 nt, Artificial Sequence
  Description of Artificial Sequence: Synthetic oligonucleotide
  Antisense strand to SEQ ID NO: 287866
aaugacaacucugacuccu

SEQ ID NO: 287868 - RNA, 19 nt, Artificial Sequence
  Description of Artificial Sequence: Synthetic oligonucleotide
  Sense strand starting at position 1264 of SEQ ID NO: 3702
cuaagagugaaauguguua

SEQ ID NO: 287869 - RNA, 19 nt, Artificial Sequence
  Description of Artificial Sequence: Synthetic oligonucleotide
  Antisense strand to SEQ ID NO: 287868
uaacacauuucacucuuag

SEQ ID NO: 287870 - RNA, 19 nt, Artificial Sequence
  Description of Artificial Sequence: Synthetic oligonucleotide
  Sense strand starting at position 1266 of SEQ ID NO: 3702
aagagugaaauguguuaug

SEQ ID NO: 287871 - RNA, 19 nt, Artificial Sequence
  Description of Artificial Sequence: Synthetic oligonucleotide
  Antisense strand to SEQ ID NO: 287870
cauaacacauuucacucuu

SEQ ID NO: 287872 - RNA, 19 nt, Artificial Sequence
  Description of Artificial Sequence: Synthetic oligonucleotide
  Sense strand starting at position 1503 of SEQ ID NO: 3702
ugaagaugguccuugcaca

SEQ ID NO: 287873 - RNA, 19 nt, Artificial Sequence
  Description of Artificial Sequence: Synthetic oligonucleotide
  Antisense strand to SEQ ID NO: 287872
ugugcaaggaccaucuuca

SEQ ID NO: 287874 - RNA, 19 nt, Artificial Sequence
  Description of Artificial Sequence: Synthetic oligonucleotide
  Sense strand starting at position 1540 of SEQ ID NO: 3702
augccuggauucucuaaua

SEQ ID NO: 287875 - RNA, 19 nt, Artificial Sequence
  Description of Artificial Sequence: Synthetic oligonucleotide
  Antisense strand to SEQ ID NO: 287874
uauuagagaauccaggcau

SEQ ID NO: 287876 - RNA, 19 nt, Artificial Sequence
  Description of Artificial Sequence: Synthetic oligonucleotide
  Sense strand starting at position 1630 of SEQ ID NO: 3702
auucuacuacuguaaaggu

SEQ ID NO: 287877 - RNA, 19 nt, Artificial Sequence
  Description of Artificial Sequence: Synthetic oligonucleotide
  Antisense strand to SEQ ID NO: 287876
accuuuacaguaguagaau

SEQ ID NO: 287878 - RNA, 19 nt, Artificial Sequence
  Description of Artificial Sequence: Synthetic oligonucleotide
  Sense strand starting at position 2007 of SEQ ID NO: 3702
cucucaguuguggaacuga

SEQ ID NO: 287879 - RNA, 19 nt, Artificial Sequence
  Description of Artificial Sequence: Synthetic oligonucleotide
  Antisense strand to SEQ ID NO: 287878
ucaguuccacaacugagag

SEQ ID NO: 287880 - RNA, 19 nt, Artificial Sequence
  Description of Artificial Sequence: Synthetic oligonucleotide
  Sense strand starting at position 2290 of SEQ ID NO: 3702
uuuagacguguuuagauac

SEQ ID NO: 287881 - RNA, 19 nt, Artificial Sequence
  Description of Artificial Sequence: Synthetic oligonucleotide
  Antisense strand to SEQ ID NO: 287880
guaucuaaacacgucuaaa

SEQ ID NO: 287882 - RNA, 19 nt, Artificial Sequence
  Description of Artificial Sequence: Synthetic oligonucleotide
  Sense strand starting at position 2350 of SEQ ID NO: 3702
aguaacauccaguauaggu

SEQ ID NO: 287883 - RNA, 19 nt, Artificial Sequence
  Description of Artificial Sequence: Synthetic oligonucleotide
  Antisense strand to SEQ ID NO: 287882
accuauacuggauguuacu

SEQ ID NO: 287884 - RNA, 19 nt, Artificial Sequence
  Description of Artificial Sequence: Synthetic oligonucleotide
  Sense strand starting at position 2494 of SEQ ID NO: 3702
agaauauaucuugguccuu

SEQ ID NO: 287885 - RNA, 19 nt, Artificial Sequence
  Description of Artificial Sequence: Synthetic oligonucleotide
  Antisense strand to SEQ ID NO: 287884
aaggaccaagauauauucu

SEQ ID NO: 287886 - RNA, 19 nt, Artificial Sequence
  Description of Artificial Sequence: Synthetic oligonucleotide
  Sense strand starting at position 2664 of SEQ ID NO: 3702
agaguaggauuugauauua

SEQ ID NO: 287887 - RNA, 19 nt, Artificial Sequence
  Description of Artificial Sequence: Synthetic oligonucleotide
  Antisense strand to SEQ ID NO: 287886
uaauaucaaauccuacucu

SEQ ID NO: 287888 - RNA, 19 nt, Artificial Sequence
  Description of Artificial Sequence: Synthetic oligonucleotide
  Sense strand starting at position 2700 of SEQ ID NO: 3702
ucuuaaauccaauguaguu

SEQ ID NO: 287889 - RNA, 19 nt, Artificial Sequence
  Description of Artificial Sequence: Synthetic oligonucleotide
  Antisense strand to SEQ ID NO: 287888
aacuacauuggauuuaaga

SEQ ID NO: 287890 - RNA, 19 nt, Artificial Sequence
  Description of Artificial Sequence: Synthetic oligonucleotide
  Sense strand starting at position 2850 of SEQ ID NO: 3702
cugauaaaccagugagauu

SEQ ID NO: 287891 - RNA, 19 nt, Artificial Sequence
  Description of Artificial Sequence: Synthetic oligonucleotide
  Antisense strand to SEQ ID NO: 287890
aaucucacugguuuaucag

SEQ ID NO: 287892 - RNA, 19 nt, Artificial Sequence
  Description of Artificial Sequence: Synthetic oligonucleotide
  Sense strand starting at position 2897 of SEQ ID NO: 3702
uagugaagauuugaggacu

SEQ ID NO: 287893 - RNA, 19 nt, Artificial Sequence
  Description of Artificial Sequence: Synthetic oligonucleotide
  Antisense strand to SEQ ID NO: 287892
aguccucaaaucuucacua

SEQ ID NO: 287894 - RNA, 19 nt, Artificial Sequence
  Description of Artificial Sequence: Synthetic oligonucleotide
  Sense strand starting at position 2926 of SEQ ID NO: 3702
cagucacuuggcuaagaca

SEQ ID NO: 287895 - RNA, 19 nt, Artificial Sequence
  Description of Artificial Sequence: Synthetic oligonucleotide
  Antisense strand to SEQ ID NO: 287894
ugucuuagccaagugacug

SEQ ID NO: 287896 - RNA, 19 nt, Artificial Sequence
  Description of Artificial Sequence: Synthetic oligonucleotide
  Sense strand starting at position 3330 of SEQ ID NO: 3702
uggacuauaaguggguaua

SEQ ID NO: 287897 - RNA, 19 nt, Artificial Sequence
  Description of Artificial Sequence: Synthetic oligonucleotide
  Antisense strand to SEQ ID NO: 287896
uauacccacuuauagucca

SEQ ID NO: 287898 - RNA, 19 nt, Artificial Sequence
  Description of Artificial Sequence: Synthetic oligonucleotide
  Sense strand starting at position 3331 of SEQ ID NO: 3702
ggacuauaaguggguauag

SEQ ID NO: 287899 - RNA, 19 nt, Artificial Sequence
  Description of Artificial Sequence: Synthetic oligonucleotide
  Antisense strand to SEQ ID NO: 287898
cuauacccacuuauagucc

SEQ ID NO: 287900 - RNA, 19 nt, Artificial Sequence
  Description of Artificial Sequence: Synthetic oligonucleotide
  Sense strand starting at position 3436 of SEQ ID NO: 3702
ggcaucaugcaauauacca

SEQ ID NO: 287901 - RNA, 19 nt, Artificial Sequence
  Description of Artificial Sequence: Synthetic oligonucleotide
  Antisense strand to SEQ ID NO: 287900
ugguauauugcaugaugcc

SEQ ID NO: 287902 - RNA, 19 nt, Artificial Sequence
  Description of Artificial Sequence: Synthetic oligonucleotide
  Sense strand starting at position 3571 of SEQ ID NO: 3702
gucacuuuagcagauaacu

SEQ ID NO: 287903 - RNA, 19 nt, Artificial Sequence
  Description of Artificial Sequence: Synthetic oligonucleotide
  Antisense strand to SEQ ID NO: 287902
aguuaucugcuaaagugac

SEQ ID NO: 287904 - RNA, 19 nt, Artificial Sequence
  Description of Artificial Sequence: Synthetic oligonucleotide
  Sense strand starting at position 3612 of SEQ ID NO: 3702
gucucaaacuaauugaagu

SEQ ID NO: 287905 - RNA, 19 nt, Artificial Sequence
  Description of Artificial Sequence: Synthetic oligonucleotide
  Antisense strand to SEQ ID NO: 287904
acuucaauuaguuugagac

SEQ ID NO: 287906 - RNA, 19 nt, Artificial Sequence
  Description of Artificial Sequence: Synthetic oligonucleotide
  Sense strand starting at position 3648 of SEQ ID NO: 3702
aggaguuuauugguucaug

SEQ ID NO: 287907 - RNA, 19 nt, Artificial Sequence
  Description of Artificial Sequence: Synthetic oligonucleotide
  Antisense strand to SEQ ID NO: 287906
caugaaccaauaaacuccu

SEQ ID NO: 287908 - RNA, 19 nt, Artificial Sequence
  Description of Artificial Sequence: Synthetic oligonucleotide
  Sense strand starting at position 3678 of SEQ ID NO: 3702
gcuagucuuaggcauauga

SEQ ID NO: 287909 - RNA, 19 nt, Artificial Sequence
  Description of Artificial Sequence: Synthetic oligonucleotide
  Antisense strand to SEQ ID NO: 287908
ucauaugccuaagacuagc

SEQ ID NO: 287910 - RNA, 19 nt, Artificial Sequence
  Description of Artificial Sequence: Synthetic oligonucleotide
  Sense strand starting at position 3680 of SEQ ID NO: 3702
uagucuuaggcauaugaug

SEQ ID NO: 287911 - RNA, 19 nt, Artificial Sequence
  Description of Artificial Sequence: Synthetic oligonucleotide
  Antisense strand to SEQ ID NO: 287910
caucauaugccuaagacua

SEQ ID NO: 287912 - RNA, 19 nt, Artificial Sequence
  Description of Artificial Sequence: Synthetic oligonucleotide
  Sense strand starting at position 3682 of SEQ ID NO: 3702
gucuuaggcauaugaugau

SEQ ID NO: 287913 - RNA, 19 nt, Artificial Sequence
  Description of Artificial Sequence: Synthetic oligonucleotide
  Antisense strand to SEQ ID NO: 287912
aucaucauaugccuaagac

SEQ ID NO: 287914 - RNA, 19 nt, Artificial Sequence
  Description of Artificial Sequence: Synthetic oligonucleotide
  Sense strand starting at position 3703 of SEQ ID NO: 3702
aagagcucagcugauguua

SEQ ID NO: 287915 - RNA, 19 nt, Artificial Sequence
  Description of Artificial Sequence: Synthetic oligonucleotide
  Antisense strand to SEQ ID NO: 287914
uaacaucagcugagcucuu

SEQ ID NO: 287916 - RNA, 19 nt, Artificial Sequence
  Description of Artificial Sequence: Synthetic oligonucleotide
  Sense strand starting at position 3934 of SEQ ID NO: 3702
aauuacucuguccagggua

SEQ ID NO: 287917 - RNA, 19 nt, Artificial Sequence
  Description of Artificial Sequence: Synthetic oligonucleotide
  Antisense strand to SEQ ID NO: 287916
uacccuggacagaguaauu

SEQ ID NO: 287918 - RNA, 19 nt, Artificial Sequence
  Description of Artificial Sequence: Synthetic oligonucleotide
  Sense strand starting at position 3937 of SEQ ID NO: 3702
uacucuguccaggguaaug

SEQ ID NO: 287919 - RNA, 19 nt, Artificial Sequence
  Description of Artificial Sequence: Synthetic oligonucleotide
  Antisense strand to SEQ ID NO: 287918
cauuacccuggacagagua

SEQ ID NO: 287920 - RNA, 19 nt, Artificial Sequence
  Description of Artificial Sequence: Synthetic oligonucleotide
  Sense strand starting at position 122 of SEQ ID NO: 3701
ggguguuauaccuacagac

SEQ ID NO: 287921 - RNA, 19 nt, Artificial Sequence
  Description of Artificial Sequence: Synthetic oligonucleotide
  Antisense strand to SEQ ID NO: 287920
gucuguagguauaacaccc

SEQ ID NO: 287922 - RNA, 19 nt, Artificial Sequence
  Description of Artificial Sequence: Synthetic oligonucleotide
  Sense strand starting at position 124 of SEQ ID NO: 3701
guguuauaccuacagacac

SEQ ID NO: 287923 - RNA, 19 nt, Artificial Sequence
  Description of Artificial Sequence: Synthetic oligonucleotide
  Antisense strand to SEQ ID NO: 287922
gugucuguagguauaacac

SEQ ID NO: 287924 - RNA, 19 nt, Artificial Sequence
  Description of Artificial Sequence: Synthetic oligonucleotide
  Sense strand starting at position 144 of SEQ ID NO: 3701
auuguaaacgcuuacuaac

SEQ ID NO: 287925 - RNA, 19 nt, Artificial Sequence
  Description of Artificial Sequence: Synthetic oligonucleotide
  Antisense strand to SEQ ID NO: 287924
guuaguaagcguuuacaau

SEQ ID NO: 287926 - RNA, 19 nt, Artificial Sequence
  Description of Artificial Sequence: Synthetic oligonucleotide
  Sense strand starting at position 276 of SEQ ID NO: 3701
aaauuagcucauggaguuu

SEQ ID NO: 287927 - RNA, 19 nt, Artificial Sequence
  Description of Artificial Sequence: Synthetic oligonucleotide
  Antisense strand to SEQ ID NO: 287926
aaacuccaugagcuaauuu

SEQ ID NO: 287928 - RNA, 19 nt, Artificial Sequence
  Description of Artificial Sequence: Synthetic oligonucleotide
  Sense strand starting at position 288 of SEQ ID NO: 3701
ggaguuuacucccuuaccu

SEQ ID NO: 287929 - RNA, 19 nt, Artificial Sequence
  Description of Artificial Sequence: Synthetic oligonucleotide
  Antisense strand to SEQ ID NO: 287928
agguaagggaguaaacucc

SEQ ID NO: 287930 - RNA, 19 nt, Artificial Sequence
  Description of Artificial Sequence: Synthetic oligonucleotide
  Sense strand starting at position 331 of SEQ ID NO: 3701
ggaggaaagccugguaaca

SEQ ID NO: 287931 - RNA, 19 nt, Artificial Sequence
  Description of Artificial Sequence: Synthetic oligonucleotide
  Antisense strand to SEQ ID NO: 287930
uguuaccaggcuuuccucc

SEQ ID NO: 287932 - RNA, 19 nt, Artificial Sequence
  Description of Artificial Sequence: Synthetic oligonucleotide
  Sense strand starting at position 363 of SEQ ID NO: 3701
ugagaaaggcuugggaugu

SEQ ID NO: 287933 - RNA, 19 nt, Artificial Sequence
  Description of Artificial Sequence: Synthetic oligonucleotide
  Antisense strand to SEQ ID NO: 287932
acaucccaagccuuucuca

SEQ ID NO: 287934 - RNA, 19 nt, Artificial Sequence
  Description of Artificial Sequence: Synthetic oligonucleotide
  Sense strand starting at position 429 of SEQ ID NO: 3701
ugaguuggguagagaagaa

SEQ ID NO: 287935 - RNA, 19 nt, Artificial Sequence
  Description of Artificial Sequence: Synthetic oligonucleotide
  Antisense strand to SEQ ID NO: 287934
uucuucucuacccaacuca

SEQ ID NO: 287936 - RNA, 19 nt, Artificial Sequence
  Description of Artificial Sequence: Synthetic oligonucleotide
  Sense strand starting at position 476 of SEQ ID NO: 3701
acuuaccugugaucucauu

SEQ ID NO: 287937 - RNA, 19 nt, Artificial Sequence
  Description of Artificial Sequence: Synthetic oligonucleotide
  Antisense strand to SEQ ID NO: 287936
aaugagaucacagguaagu

SEQ ID NO: 287938 - RNA, 19 nt, Artificial Sequence
  Description of Artificial Sequence: Synthetic oligonucleotide
  Sense strand starting at position 501 of SEQ ID NO: 3701
caugcuaacgauugaguaa

SEQ ID NO: 287939 - RNA, 19 nt, Artificial Sequence
  Description of Artificial Sequence: Synthetic oligonucleotide
  Antisense strand to SEQ ID NO: 287938
uuacucaaucguuagcaug

SEQ ID NO: 287940 - RNA, 19 nt, Artificial Sequence
  Description of Artificial Sequence: Synthetic oligonucleotide
  Sense strand starting at position 502 of SEQ ID NO: 3701
augcuaacgauugaguaaa

SEQ ID NO: 287941 - RNA, 19 nt, Artificial Sequence
  Description of Artificial Sequence: Synthetic oligonucleotide
  Antisense strand to SEQ ID NO: 287940
uuuacucaaucguuagcau

SEQ ID NO: 287942 - RNA, 19 nt, Artificial Sequence
  Description of Artificial Sequence: Synthetic oligonucleotide
  Sense strand starting at position 581 of SEQ ID NO: 3701
gcucaauaacuuggucaaa

SEQ ID NO: 287943 - RNA, 19 nt, Artificial Sequence
  Description of Artificial Sequence: Synthetic oligonucleotide
  Antisense strand to SEQ ID NO: 287942
uuugaccaaguuauugagc

SEQ ID NO: 287944 - RNA, 19 nt, Artificial Sequence
  Description of Artificial Sequence: Synthetic oligonucleotide
  Sense strand starting at position 582 of SEQ ID NO: 3701
cucaauaacuuggucaaag

SEQ ID NO: 287945 - RNA, 19 nt, Artificial Sequence
  Description of Artificial Sequence: Synthetic oligonucleotide
  Antisense strand to SEQ ID NO: 287944
cuuugaccaaguuauugag

SEQ ID NO: 287946 - RNA, 19 nt, Artificial Sequence
  Description of Artificial Sequence: Synthetic oligonucleotide
  Sense strand starting at position 605 of SEQ ID NO: 3701
aaaucauauuaagugacga

SEQ ID NO: 287947 - RNA, 19 nt, Artificial Sequence
  Description of Artificial Sequence: Synthetic oligonucleotide
  Antisense strand to SEQ ID NO: 287946
ucgucacuuaauaugauuu

SEQ ID NO: 287948 - RNA, 19 nt, Artificial Sequence
  Description of Artificial Sequence: Synthetic oligonucleotide
  Sense strand starting at position 1177 of SEQ ID NO: 3701
auuauuccuucuguggaga

SEQ ID NO: 287949 - RNA, 19 nt, Artificial Sequence
  Description of Artificial Sequence: Synthetic oligonucleotide
  Antisense strand to SEQ ID NO: 287948
ucuccacagaaggaauaau

SEQ ID NO: 287950 - RNA, 19 nt, Artificial Sequence
  Description of Artificial Sequence: Synthetic oligonucleotide
  Sense strand starting at position 1182 of SEQ ID NO: 3701
uccuucuguggagagcaau

SEQ ID NO: 287951 - RNA, 19 nt, Artificial Sequence
  Description of Artificial Sequence: Synthetic oligonucleotide
  Antisense strand to SEQ ID NO: 287950
auugcucuccacagaagga

SEQ ID NO: 287952 - RNA, 19 nt, Artificial Sequence
  Description of Artificial Sequence: Synthetic oligonucleotide
  Sense strand starting at position 1502 of SEQ ID NO: 3701
ucaaaugagugcuuccaaa

SEQ ID NO: 287953 - RNA, 19 nt, Artificial Sequence
  Description of Artificial Sequence: Synthetic oligonucleotide
  Antisense strand to SEQ ID NO: 287952
uuuggaagcacucauuuga

SEQ ID NO: 287954 - RNA, 19 nt, Artificial Sequence
  Description of Artificial Sequence: Synthetic oligonucleotide
  Sense strand starting at position 1527 of SEQ ID NO: 3701
cuaggaucauugguccauu

SEQ ID NO: 287955 - RNA, 19 nt, Artificial Sequence
  Description of Artificial Sequence: Synthetic oligonucleotide
  Antisense strand to SEQ ID NO: 287954
aauggaccaaugauccuag

SEQ ID NO: 287956 - RNA, 19 nt, Artificial Sequence
  Description of Artificial Sequence: Synthetic oligonucleotide
  Sense strand starting at position 1528 of SEQ ID NO: 3701
uaggaucauugguccauua

SEQ ID NO: 287957 - RNA, 19 nt, Artificial Sequence
  Description of Artificial Sequence: Synthetic oligonucleotide
  Antisense strand to SEQ ID NO: 287956
uaauggaccaaugauccua

SEQ ID NO: 287958 - RNA, 19 nt, Artificial Sequence
  Description of Artificial Sequence: Synthetic oligonucleotide
  Sense strand starting at position 1612 of SEQ ID NO: 3701
accaucaucccugggacua

SEQ ID NO: 287959 - RNA, 19 nt, Artificial Sequence
  Description of Artificial Sequence: Synthetic oligonucleotide
  Antisense strand to SEQ ID NO: 287958
uagucccagggaugauggu

SEQ ID NO: 287960 - RNA, 19 nt, Artificial Sequence
  Description of Artificial Sequence: Synthetic oligonucleotide
  Sense strand starting at position 2068 of SEQ ID NO: 3701
gacacugagcacugagaua

SEQ ID NO: 287961 - RNA, 19 nt, Artificial Sequence
  Description of Artificial Sequence: Synthetic oligonucleotide
  Antisense strand to SEQ ID NO: 287960
uaucucagugcucaguguc

SEQ ID NO: 287962 - RNA, 19 nt, Artificial Sequence
  Description of Artificial Sequence: Synthetic oligonucleotide
  Sense strand starting at position 2144 of SEQ ID NO: 3701
gggaaucucauaugugcau

SEQ ID NO: 287963 - RNA, 19 nt, Artificial Sequence
  Description of Artificial Sequence: Synthetic oligonucleotide
  Antisense strand to SEQ ID NO: 287962
augcacauaugagauuccc

SEQ ID NO: 287964 - RNA, 19 nt, Artificial Sequence
  Description of Artificial Sequence: Synthetic oligonucleotide
  Sense strand starting at position 2168 of SEQ ID NO: 3701
ugcucacauggagaucuau

SEQ ID NO: 287965 - RNA, 19 nt, Artificial Sequence
  Description of Artificial Sequence: Synthetic oligonucleotide
  Antisense strand to SEQ ID NO: 287964
auagaucuccaugugagca

SEQ ID NO: 287966 - RNA, 19 nt, Artificial Sequence
  Description of Artificial Sequence: Synthetic oligonucleotide
  Sense strand starting at position 2177 of SEQ ID NO: 3701
ggagaucuaucucucacau

SEQ ID NO: 287967 - RNA, 19 nt, Artificial Sequence
  Description of Artificial Sequence: Synthetic oligonucleotide
  Antisense strand to SEQ ID NO: 287966
augugagagauagaucucc

SEQ ID NO: 287968 - RNA, 19 nt, Artificial Sequence
  Description of Artificial Sequence: Synthetic oligonucleotide
  Sense strand starting at position 2203 of SEQ ID NO: 3701
gugucuaugagguaaucua

SEQ ID NO: 287969 - RNA, 19 nt, Artificial Sequence
  Description of Artificial Sequence: Synthetic oligonucleotide
  Antisense strand to SEQ ID NO: 287968
uagauuaccucauagacac

SEQ ID NO: 287970 - RNA, 19 nt, Artificial Sequence
  Description of Artificial Sequence: Synthetic oligonucleotide
  Sense strand starting at position 2431 of SEQ ID NO: 3701
gaggaucuugcacauaucu

SEQ ID NO: 287971 - RNA, 19 nt, Artificial Sequence
  Description of Artificial Sequence: Synthetic oligonucleotide
  Antisense strand to SEQ ID NO: 287970
agauaugugcaagauccuc

SEQ ID NO: 287972 - RNA, 19 nt, Artificial Sequence
  Description of Artificial Sequence: Synthetic oligonucleotide
  Sense strand starting at position 2492 of SEQ ID NO: 3701
uuaagaguuuauuccaagu

SEQ ID NO: 287973 - RNA, 19 nt, Artificial Sequence
  Description of Artificial Sequence: Synthetic oligonucleotide
  Antisense strand to SEQ ID NO: 287972
acuuggaauaaacucuuaa

SEQ ID NO: 287974 - RNA, 19 nt, Artificial Sequence
  Description of Artificial Sequence: Synthetic oligonucleotide
  Sense strand starting at position 2567 of SEQ ID NO: 3701
gguagauccugcuugaaag

SEQ ID NO: 287975 - RNA, 19 nt, Artificial Sequence
  Description of Artificial Sequence: Synthetic oligonucleotide
  Antisense strand to SEQ ID NO: 287974
cuuucaagcaggaucuacc

SEQ ID NO: 287976 - RNA, 19 nt, Artificial Sequence
  Description of Artificial Sequence: Synthetic oligonucleotide
  Sense strand starting at position 2568 of SEQ ID NO: 3701
guagauccugcuugaaaga

SEQ ID NO: 287977 - RNA, 19 nt, Artificial Sequence
  Description of Artificial Sequence: Synthetic oligonucleotide
  Antisense strand to SEQ ID NO: 287976
ucuuucaagcaggaucuac

SEQ ID NO: 287978 - RNA, 19 nt, Artificial Sequence
  Description of Artificial Sequence: Synthetic oligonucleotide
  Sense strand starting at position 2731 of SEQ ID NO: 3701
ugcugcuagcuaguguaau

SEQ ID NO: 287979 - RNA, 19 nt, Artificial Sequence
  Description of Artificial Sequence: Synthetic oligonucleotide
  Antisense strand to SEQ ID NO: 287978
auuacacuagcuagcagca

SEQ ID NO: 287980 - RNA, 19 nt, Artificial Sequence
  Description of Artificial Sequence: Synthetic oligonucleotide
  Sense strand starting at position 2769 of SEQ ID NO: 3701
uuugcaguaccuuaggaaa

SEQ ID NO: 287981 - RNA, 19 nt, Artificial Sequence
  Description of Artificial Sequence: Synthetic oligonucleotide
  Antisense strand to SEQ ID NO: 287980
uuuccuaagguacugcaaa

SEQ ID NO: 287982 - RNA, 19 nt, Artificial Sequence
  Description of Artificial Sequence: Synthetic oligonucleotide
  Sense strand starting at position 2847 of SEQ ID NO: 3701
agucuuaguguccauauca

SEQ ID NO: 287983 - RNA, 19 nt, Artificial Sequence
  Description of Artificial Sequence: Synthetic oligonucleotide
  Antisense strand to SEQ ID NO: 287982
ugauauggacacuaagacu

SEQ ID NO: 287984 - RNA, 19 nt, Artificial Sequence
  Description of Artificial Sequence: Synthetic oligonucleotide
  Sense strand starting at position 2930 of SEQ ID NO: 3701
auaugagucuuugcaauaa

SEQ ID NO: 287985 - RNA, 19 nt, Artificial Sequence
  Description of Artificial Sequence: Synthetic oligonucleotide
  Antisense strand to SEQ ID NO: 287984
uuauugcaaagacucauau

SEQ ID NO: 287986 - RNA, 19 nt, Artificial Sequence
  Description of Artificial Sequence: Synthetic oligonucleotide
  Sense strand starting at position 3166 of SEQ ID NO: 3701
aggagucagaguugucauu

SEQ ID NO: 287987 - RNA, 19 nt, Artificial Sequence
  Description of Artificial Sequence: Synthetic oligonucleotide
  Antisense strand to SEQ ID NO: 287986
aaugacaacucugacuccu

SEQ ID NO: 287988 - RNA, 19 nt, Artificial Sequence
  Description of Artificial Sequence: Synthetic oligonucleotide
  Sense strand starting at position 3206 of SEQ ID NO: 3701
cuaagagugaaauguguua

SEQ ID NO: 287989 - RNA, 19 nt, Artificial Sequence
  Description of Artificial Sequence: Synthetic oligonucleotide
  Antisense strand to SEQ ID NO: 287988
uaacacauuucacucuuag

SEQ ID NO: 287990 - RNA, 19 nt, Artificial Sequence
  Description of Artificial Sequence: Synthetic oligonucleotide
  Sense strand starting at position 3208 of SEQ ID NO: 3701
aagagugaaauguguuaug

SEQ ID NO: 287991 - RNA, 19 nt, Artificial Sequence
  Description of Artificial Sequence: Synthetic oligonucleotide
  Antisense strand to SEQ ID NO: 287990
cauaacacauuucacucuu

SEQ ID NO: 287992 - RNA, 19 nt, Artificial Sequence
  Description of Artificial Sequence: Synthetic oligonucleotide
  Sense strand starting at position 3445 of SEQ ID NO: 3701
ugaagaugguccuugcaca

SEQ ID NO: 287993 - RNA, 19 nt, Artificial Sequence
  Description of Artificial Sequence: Synthetic oligonucleotide
  Antisense strand to SEQ ID NO: 287992
ugugcaaggaccaucuuca

SEQ ID NO: 287994 - RNA, 19 nt, Artificial Sequence
  Description of Artificial Sequence: Synthetic oligonucleotide
  Sense strand starting at position 3482 of SEQ ID NO: 3701
augccuggauucucuaaua

SEQ ID NO: 287995 - RNA, 19 nt, Artificial Sequence
  Description of Artificial Sequence: Synthetic oligonucleotide
  Antisense strand to SEQ ID NO: 287994
uauuagagaauccaggcau

SEQ ID NO: 287996 - RNA, 19 nt, Artificial Sequence
  Description of Artificial Sequence: Synthetic oligonucleotide
  Sense strand starting at position 3572 of SEQ ID NO: 3701
auucuacuacuguaaaggu

SEQ ID NO: 287997 - RNA, 19 nt, Artificial Sequence
  Description of Artificial Sequence: Synthetic oligonucleotide
  Antisense strand to SEQ ID NO: 287996
accuuuacaguaguagaau

SEQ ID NO: 287998 - RNA, 19 nt, Artificial Sequence
  Description of Artificial Sequence: Synthetic oligonucleotide
  Sense strand starting at position 3949 of SEQ ID NO: 3701
cucucaguuguggaacuga

SEQ ID NO: 287999 - RNA, 19 nt, Artificial Sequence
  Description of Artificial Sequence: Synthetic oligonucleotide
  Antisense strand to SEQ ID NO: 287998
ucaguuccacaacugagag

SEQ ID NO: 288000 - RNA, 19 nt, Artificial Sequence
  Description of Artificial Sequence: Synthetic oligonucleotide
  Sense strand starting at position 91 of SEQ ID NO: 3703
uuaaucaaagcagguuuaa

SEQ ID NO: 288001 - RNA, 19 nt, Artificial Sequence
  Description of Artificial Sequence: Synthetic oligonucleotide
  Antisense strand to SEQ ID NO: 288000
uuaaaccugcuuugauuaa

SEQ ID NO: 288002 - RNA, 19 nt, Artificial Sequence
  Description of Artificial Sequence: Synthetic oligonucleotide
  Sense strand starting at position 103 of SEQ ID NO: 3703
gguuuaauuuccgaaauuu

SEQ ID NO: 288003 - RNA, 19 nt, Artificial Sequence
  Description of Artificial Sequence: Synthetic oligonucleotide
  Antisense strand to SEQ ID NO: 288002
aaauuucggaaauuaaacc

SEQ ID NO: 288004 - RNA, 19 nt, Artificial Sequence
  Description of Artificial Sequence: Synthetic oligonucleotide
  Sense strand starting at position 143 of SEQ ID NO: 3703
agugaagaacucugagugu

SEQ ID NO: 288005 - RNA, 19 nt, Artificial Sequence
  Description of Artificial Sequence: Synthetic oligonucleotide
  Antisense strand to SEQ ID NO: 288004
acacucagaguucuucacu

SEQ ID NO: 288006 - RNA, 19 nt, Artificial Sequence
  Description of Artificial Sequence: Synthetic oligonucleotide
  Sense strand starting at position 146 of SEQ ID NO: 3703
gaagaacucugaguguauu

SEQ ID NO: 288007 - RNA, 19 nt, Artificial Sequence
  Description of Artificial Sequence: Synthetic oligonucleotide
  Antisense strand to SEQ ID NO: 288006
aauacacucagaguucuuc

SEQ ID NO: 288008 - RNA, 19 nt, Artificial Sequence
  Description of Artificial Sequence: Synthetic oligonucleotide
  Sense strand starting at position 152 of SEQ ID NO: 3703
cucugaguguauuugcuuu

SEQ ID NO: 288009 - RNA, 19 nt, Artificial Sequence
  Description of Artificial Sequence: Synthetic oligonucleotide
  Antisense strand to SEQ ID NO: 288008
aaagcaaauacacucagag

SEQ ID NO: 288010 - RNA, 19 nt, Artificial Sequence
  Description of Artificial Sequence: Synthetic oligonucleotide
  Sense strand starting at position 178 of SEQ ID NO: 3703
ggcgaccacauguauagau

SEQ ID NO: 288011 - RNA, 19 nt, Artificial Sequence
  Description of Artificial Sequence: Synthetic oligonucleotide
  Antisense strand to SEQ ID NO: 288010
aucuauacauguggucgcc

SEQ ID NO: 288012 - RNA, 19 nt, Artificial Sequence
  Description of Artificial Sequence: Synthetic oligonucleotide
  Sense strand starting at position 304 of SEQ ID NO: 3703
cucugaugcuuacucagaa

SEQ ID NO: 288013 - RNA, 19 nt, Artificial Sequence
  Description of Artificial Sequence: Synthetic oligonucleotide
  Antisense strand to SEQ ID NO: 288012
uucugaguaagcaucagag

SEQ ID NO: 288014 - RNA, 19 nt, Artificial Sequence
  Description of Artificial Sequence: Synthetic oligonucleotide
  Sense strand starting at position 311 of SEQ ID NO: 3703
gcuuacucagaacaaaguu

SEQ ID NO: 288015 - RNA, 19 nt, Artificial Sequence
  Description of Artificial Sequence: Synthetic oligonucleotide
  Antisense strand to SEQ ID NO: 288014
aacuuuguucugaguaagc

SEQ ID NO: 288016 - RNA, 19 nt, Artificial Sequence
  Description of Artificial Sequence: Synthetic oligonucleotide
  Sense strand starting at position 354 of SEQ ID NO: 3703
aagcaugguguguacaaua

SEQ ID NO: 288017 - RNA, 19 nt, Artificial Sequence
  Description of Artificial Sequence: Synthetic oligonucleotide
  Antisense strand to SEQ ID NO: 288016
uauuguacacaccaugcuu

SEQ ID NO: 288018 - RNA, 19 nt, Artificial Sequence
  Description of Artificial Sequence: Synthetic oligonucleotide
  Sense strand starting at position 516 of SEQ ID NO: 3703
ggacuauuauugcuacuca

SEQ ID NO: 288019 - RNA, 19 nt, Artificial Sequence
  Description of Artificial Sequence: Synthetic oligonucleotide
  Antisense strand to SEQ ID NO: 288018
ugaguagcaauaauagucc

SEQ ID NO: 288020 - RNA, 19 nt, Artificial Sequence
  Description of Artificial Sequence: Synthetic oligonucleotide
  Sense strand starting at position 683 of SEQ ID NO: 3703
acacucuauuuggagugaa

SEQ ID NO: 288021 - RNA, 19 nt, Artificial Sequence
  Description of Artificial Sequence: Synthetic oligonucleotide
  Antisense strand to SEQ ID NO: 288020
uucacuccaaauagagugu

SEQ ID NO: 288022 - RNA, 19 nt, Artificial Sequence
  Description of Artificial Sequence: Synthetic oligonucleotide
  Sense strand starting at position 696 of SEQ ID NO: 3703
agugaaugugaugaaaugu

SEQ ID NO: 288023 - RNA, 19 nt, Artificial Sequence
  Description of Artificial Sequence: Synthetic oligonucleotide
  Antisense strand to SEQ ID NO: 288022
acauuucaucacauucacu

SEQ ID NO: 288024 - RNA, 19 nt, Artificial Sequence
  Description of Artificial Sequence: Synthetic oligonucleotide
  Sense strand starting at position 705 of SEQ ID NO: 3703
gaugaaauguuuccaugca

SEQ ID NO: 288025 - RNA, 19 nt, Artificial Sequence
  Description of Artificial Sequence: Synthetic oligonucleotide
  Antisense strand to SEQ ID NO: 288024
ugcauggaaacauuucauc

SEQ ID NO: 288026 - RNA, 19 nt, Artificial Sequence
  Description of Artificial Sequence: Synthetic oligonucleotide
  Sense strand starting at position 878 of SEQ ID NO: 3703
uggcuaacugaaugaaaca

SEQ ID NO: 288027 - RNA, 19 nt, Artificial Sequence
  Description of Artificial Sequence: Synthetic oligonucleotide
  Antisense strand to SEQ ID NO: 288026
uguuucauucaguuagcca

SEQ ID NO: 288028 - RNA, 19 nt, Artificial Sequence
  Description of Artificial Sequence: Synthetic oligonucleotide
  Sense strand starting at position 1444 of SEQ ID NO: 3703
ucauuagacuagcuuuaag

SEQ ID NO: 288029 - RNA, 19 nt, Artificial Sequence
  Description of Artificial Sequence: Synthetic oligonucleotide
  Antisense strand to SEQ ID NO: 288028
cuuaaagcuagucuaauga

SEQ ID NO: 288030 - RNA, 19 nt, Artificial Sequence
  Description of Artificial Sequence: Synthetic oligonucleotide
  Sense strand starting at position 1447 of SEQ ID NO: 3703
uuagacuagcuuuaaguau

SEQ ID NO: 288031 - RNA, 19 nt, Artificial Sequence
  Description of Artificial Sequence: Synthetic oligonucleotide
  Antisense strand to SEQ ID NO: 288030
auacuuaaagcuagucuaa

SEQ ID NO: 288032 - RNA, 19 nt, Artificial Sequence
  Description of Artificial Sequence: Synthetic oligonucleotide
  Sense strand starting at position 1589 of SEQ ID NO: 3703
aagaaauaguaagcaguuu

SEQ ID NO: 288033 - RNA, 19 nt, Artificial Sequence
  Description of Artificial Sequence: Synthetic oligonucleotide
  Antisense strand to SEQ ID NO: 288032
aaacugcuuacuauuucuu

SEQ ID NO: 288034 - RNA, 19 nt, Artificial Sequence
  Description of Artificial Sequence: Synthetic oligonucleotide
  Sense strand starting at position 1716 of SEQ ID NO: 3703
gguucuauggugcagauaa

SEQ ID NO: 288035 - RNA, 19 nt, Artificial Sequence
  Description of Artificial Sequence: Synthetic oligonucleotide
  Antisense strand to SEQ ID NO: 288034
uuaucugcaccauagaacc

SEQ ID NO: 288036 - RNA, 19 nt, Artificial Sequence
  Description of Artificial Sequence: Synthetic oligonucleotide
  Sense strand starting at position 1911 of SEQ ID NO: 3703
ucuuucucuguggauaaga

SEQ ID NO: 288037 - RNA, 19 nt, Artificial Sequence
  Description of Artificial Sequence: Synthetic oligonucleotide
  Antisense strand to SEQ ID NO: 288036
ucuuauccacagagaaaga

SEQ ID NO: 288038 - RNA, 19 nt, Artificial Sequence
  Description of Artificial Sequence: Synthetic oligonucleotide
  Sense strand starting at position 2169 of SEQ ID NO: 3703
aagcauggguagucaugaa

SEQ ID NO: 288039 - RNA, 19 nt, Artificial Sequence
  Description of Artificial Sequence: Synthetic oligonucleotide
  Antisense strand to SEQ ID NO: 288038
uucaugacuacccaugcuu

SEQ ID NO: 288040 - RNA, 19 nt, Artificial Sequence
  Description of Artificial Sequence: Synthetic oligonucleotide
  Sense strand starting at position 2173 of SEQ ID NO: 3703
auggguagucaugaaagug

SEQ ID NO: 288041 - RNA, 19 nt, Artificial Sequence
  Description of Artificial Sequence: Synthetic oligonucleotide
  Antisense strand to SEQ ID NO: 288040
cacuuucaugacuacccau

SEQ ID NO: 288042 - RNA, 19 nt, Artificial Sequence
  Description of Artificial Sequence: Synthetic oligonucleotide
  Sense strand starting at position 2499 of SEQ ID NO: 3703
cucuuccugggaugaauua

SEQ ID NO: 288043 - RNA, 19 nt, Artificial Sequence
  Description of Artificial Sequence: Synthetic oligonucleotide
  Antisense strand to SEQ ID NO: 288042
uaauucaucccaggaagag

SEQ ID NO: 288044 - RNA, 19 nt, Artificial Sequence
  Description of Artificial Sequence: Synthetic oligonucleotide
  Sense strand starting at position 2542 of SEQ ID NO: 3703
cuuagagaacaguguaaac

SEQ ID NO: 288045 - RNA, 19 nt, Artificial Sequence
  Description of Artificial Sequence: Synthetic oligonucleotide
  Antisense strand to SEQ ID NO: 288044
guuuacacuguucucuaag

SEQ ID NO: 288046 - RNA, 19 nt, Artificial Sequence
  Description of Artificial Sequence: Synthetic oligonucleotide
  Sense strand starting at position 2559 of SEQ ID NO: 3703
acacauacucacugauagu

SEQ ID NO: 288047 - RNA, 19 nt, Artificial Sequence
  Description of Artificial Sequence: Synthetic oligonucleotide
  Antisense strand to SEQ ID NO: 288046
acuaucagugaguaugugu

SEQ ID NO: 288048 - RNA, 19 nt, Artificial Sequence
  Description of Artificial Sequence: Synthetic oligonucleotide
  Sense strand starting at position 3072 of SEQ ID NO: 3703
gucaguuccagguaaacua

SEQ ID NO: 288049 - RNA, 19 nt, Artificial Sequence
  Description of Artificial Sequence: Synthetic oligonucleotide
  Antisense strand to SEQ ID NO: 288048
uaguuuaccuggaacugac

SEQ ID NO: 288050 - RNA, 19 nt, Artificial Sequence
  Description of Artificial Sequence: Synthetic oligonucleotide
  Sense strand starting at position 3160 of SEQ ID NO: 3703
ucuccuucucauggagacu

SEQ ID NO: 288051 - RNA, 19 nt, Artificial Sequence
  Description of Artificial Sequence: Synthetic oligonucleotide
  Antisense strand to SEQ ID NO: 288050
agucuccaugagaaggaga

SEQ ID NO: 288052 - RNA, 19 nt, Artificial Sequence
  Description of Artificial Sequence: Synthetic oligonucleotide
  Sense strand starting at position 3166 of SEQ ID NO: 3703
ucucauggagacugaucua

SEQ ID NO: 288053 - RNA, 19 nt, Artificial Sequence
  Description of Artificial Sequence: Synthetic oligonucleotide
  Antisense strand to SEQ ID NO: 288052
uagaucagucuccaugaga

SEQ ID NO: 288054 - RNA, 19 nt, Artificial Sequence
  Description of Artificial Sequence: Synthetic oligonucleotide
  Sense strand starting at position 3169 of SEQ ID NO: 3703
cauggagacugaucuaagu

SEQ ID NO: 288055 - RNA, 19 nt, Artificial Sequence
  Description of Artificial Sequence: Synthetic oligonucleotide
  Antisense strand to SEQ ID NO: 288054
acuuagaucagucuccaug

SEQ ID NO: 288056 - RNA, 19 nt, Artificial Sequence
  Description of Artificial Sequence: Synthetic oligonucleotide
  Sense strand starting at position 3189 of SEQ ID NO: 3703
caggauuguguacauauau

SEQ ID NO: 288057 - RNA, 19 nt, Artificial Sequence
  Description of Artificial Sequence: Synthetic oligonucleotide
  Antisense strand to SEQ ID NO: 288056
auauauguacacaauccug

SEQ ID NO: 288058 - RNA, 19 nt, Artificial Sequence
  Description of Artificial Sequence: Synthetic oligonucleotide
  Sense strand starting at position 3264 of SEQ ID NO: 3703
ccaggaguccugcaugauc

SEQ ID NO: 288059 - RNA, 19 nt, Artificial Sequence
  Description of Artificial Sequence: Synthetic oligonucleotide
  Antisense strand to SEQ ID NO: 288058
gaucaugcaggacuccugg

SEQ ID NO: 288060 - RNA, 19 nt, Artificial Sequence
  Description of Artificial Sequence: Synthetic oligonucleotide
  Sense strand starting at position 3267 of SEQ ID NO: 3703
ggaguccugcaugauccau

SEQ ID NO: 288061 - RNA, 19 nt, Artificial Sequence
  Description of Artificial Sequence: Synthetic oligonucleotide
  Antisense strand to SEQ ID NO: 288060
auggaucaugcaggacucc

SEQ ID NO: 288062 - RNA, 19 nt, Artificial Sequence
  Description of Artificial Sequence: Synthetic oligonucleotide
  Sense strand starting at position 3273 of SEQ ID NO: 3703
cugcaugauccaugaccau

SEQ ID NO: 288063 - RNA, 19 nt, Artificial Sequence
  Description of Artificial Sequence: Synthetic oligonucleotide
  Antisense strand to SEQ ID NO: 288062
auggucauggaucaugcag

SEQ ID NO: 288064 - RNA, 19 nt, Artificial Sequence
  Description of Artificial Sequence: Synthetic oligonucleotide
  Sense strand starting at position 3415 of SEQ ID NO: 3703
uguccuuuaggaggagaga

SEQ ID NO: 288065 - RNA, 19 nt, Artificial Sequence
  Description of Artificial Sequence: Synthetic oligonucleotide
  Antisense strand to SEQ ID NO: 288064
ucucuccuccuaaaggaca

SEQ ID NO: 288066 - RNA, 19 nt, Artificial Sequence
  Description of Artificial Sequence: Synthetic oligonucleotide
  Sense strand starting at position 3468 of SEQ ID NO: 3703
cuguaauuggcugacuuaa

SEQ ID NO: 288067 - RNA, 19 nt, Artificial Sequence
  Description of Artificial Sequence: Synthetic oligonucleotide
  Antisense strand to SEQ ID NO: 288066
uuaagucagccaauuacag

SEQ ID NO: 288068 - RNA, 19 nt, Artificial Sequence
  Description of Artificial Sequence: Synthetic oligonucleotide
  Sense strand starting at position 3524 of SEQ ID NO: 3703
ucuguucugcuguuuguaa

SEQ ID NO: 288069 - RNA, 19 nt, Artificial Sequence
  Description of Artificial Sequence: Synthetic oligonucleotide
  Antisense strand to SEQ ID NO: 288068
uuacaaacagcagaacaga

SEQ ID NO: 288070 - RNA, 19 nt, Artificial Sequence
  Description of Artificial Sequence: Synthetic oligonucleotide
  Sense strand starting at position 3535 of SEQ ID NO: 3703
guuuguaaaccaugggaug

SEQ ID NO: 288071 - RNA, 19 nt, Artificial Sequence
  Description of Artificial Sequence: Synthetic oligonucleotide
  Antisense strand to SEQ ID NO: 288070
caucccaugguuuacaaac

SEQ ID NO: 288072 - RNA, 19 nt, Artificial Sequence
  Description of Artificial Sequence: Synthetic oligonucleotide
  Sense strand starting at position 3536 of SEQ ID NO: 3703
uuuguaaaccaugggaugu

SEQ ID NO: 288073 - RNA, 19 nt, Artificial Sequence
  Description of Artificial Sequence: Synthetic oligonucleotide
  Antisense strand to SEQ ID NO: 288072
acaucccaugguuuacaaa

SEQ ID NO: 288074 - RNA, 19 nt, Artificial Sequence
  Description of Artificial Sequence: Synthetic oligonucleotide
  Sense strand starting at position 3537 of SEQ ID NO: 3703
uuguaaaccaugggaugua

SEQ ID NO: 288075 - RNA, 19 nt, Artificial Sequence
  Description of Artificial Sequence: Synthetic oligonucleotide
  Antisense strand to SEQ ID NO: 288074
uacaucccaugguuuacaa

SEQ ID NO: 288076 - RNA, 19 nt, Artificial Sequence
  Description of Artificial Sequence: Synthetic oligonucleotide
  Sense strand starting at position 3610 of SEQ ID NO: 3703
guguaaauagauggaaacu

SEQ ID NO: 288077 - RNA, 19 nt, Artificial Sequence
  Description of Artificial Sequence: Synthetic oligonucleotide
  Antisense strand to SEQ ID NO: 288076
aguuuccaucuauuuacac

SEQ ID NO: 288078 - RNA, 19 nt, Artificial Sequence
  Description of Artificial Sequence: Synthetic oligonucleotide
  Sense strand starting at position 3651 of SEQ ID NO: 3703
cuaauccuagauuggcaaa

SEQ ID NO: 288079 - RNA, 19 nt, Artificial Sequence
  Description of Artificial Sequence: Synthetic oligonucleotide
  Antisense strand to SEQ ID NO: 288078
uuugccaaucuaggauuag

SEQ ID NO: 288080 - RNA, 19 nt, Artificial Sequence
  Description of Artificial Sequence: Synthetic oligonucleotide
  Sense strand starting at position 147 of SEQ ID NO: 3704
gugaaagaagucugacaug

SEQ ID NO: 288081 - RNA, 19 nt, Artificial Sequence
  Description of Artificial Sequence: Synthetic oligonucleotide
  Antisense strand to SEQ ID NO: 288080
caugucagacuucuuucac

SEQ ID NO: 288082 - RNA, 19 nt, Artificial Sequence
  Description of Artificial Sequence: Synthetic oligonucleotide
  Sense strand starting at position 307 of SEQ ID NO: 3704
gguucuacagauuaugugu

SEQ ID NO: 288083 - RNA, 19 nt, Artificial Sequence
  Description of Artificial Sequence: Synthetic oligonucleotide
  Antisense strand to SEQ ID NO: 288082
acacauaaucuguagaacc

SEQ ID NO: 288084 - RNA, 19 nt, Artificial Sequence
  Description of Artificial Sequence: Synthetic oligonucleotide
  Sense strand starting at position 310 of SEQ ID NO: 3704
ucuacagauuauguguuaa

SEQ ID NO: 288085 - RNA, 19 nt, Artificial Sequence
  Description of Artificial Sequence: Synthetic oligonucleotide
  Antisense strand to SEQ ID NO: 288084
uuaacacauaaucuguaga

SEQ ID NO: 288086 - RNA, 19 nt, Artificial Sequence
  Description of Artificial Sequence: Synthetic oligonucleotide
  Sense strand starting at position 359 of SEQ ID NO: 3704
ucucuuguugagggaagga

SEQ ID NO: 288087 - RNA, 19 nt, Artificial Sequence
  Description of Artificial Sequence: Synthetic oligonucleotide
  Antisense strand to SEQ ID NO: 288086
uccuucccucaacaagaga

SEQ ID NO: 288088 - RNA, 19 nt, Artificial Sequence
  Description of Artificial Sequence: Synthetic oligonucleotide
  Sense strand starting at position 380 of SEQ ID NO: 3704
agucuaagacauuaagcuu

SEQ ID NO: 288089 - RNA, 19 nt, Artificial Sequence
  Description of Artificial Sequence: Synthetic oligonucleotide
  Antisense strand to SEQ ID NO: 288088
aagcuuaaugucuuagacu

SEQ ID NO: 288090 - RNA, 19 nt, Artificial Sequence
  Description of Artificial Sequence: Synthetic oligonucleotide
  Sense strand starting at position 736 of SEQ ID NO: 3704
ccaguaacucugggaaagu

SEQ ID NO: 288091 - RNA, 19 nt, Artificial Sequence
  Description of Artificial Sequence: Synthetic oligonucleotide
  Antisense strand to SEQ ID NO: 288090
acuuucccagaguuacugg

SEQ ID NO: 288092 - RNA, 19 nt, Artificial Sequence
  Description of Artificial Sequence: Synthetic oligonucleotide
  Sense strand starting at position 798 of SEQ ID NO: 3704
ccagauguucucgaaacuu

SEQ ID NO: 288093 - RNA, 19 nt, Artificial Sequence
  Description of Artificial Sequence: Synthetic oligonucleotide
  Antisense strand to SEQ ID NO: 288092
aaguuucgagaacaucugg

SEQ ID NO: 288094 - RNA, 19 nt, Artificial Sequence
  Description of Artificial Sequence: Synthetic oligonucleotide
  Sense strand starting at position 897 of SEQ ID NO: 3704
caggauuguccuggaauuc

SEQ ID NO: 288095 - RNA, 19 nt, Artificial Sequence
  Description of Artificial Sequence: Synthetic oligonucleotide
  Antisense strand to SEQ ID NO: 288094
gaauuccaggacaauccug

SEQ ID NO: 288096 - RNA, 19 nt, Artificial Sequence
  Description of Artificial Sequence: Synthetic oligonucleotide
  Sense strand starting at position 925 of SEQ ID NO: 3704
uggauccagucuguuaaau

SEQ ID NO: 288097 - RNA, 19 nt, Artificial Sequence
  Description of Artificial Sequence: Synthetic oligonucleotide
  Antisense strand to SEQ ID NO: 288096
auuuaacagacuggaucca

SEQ ID NO: 288098 - RNA, 19 nt, Artificial Sequence
  Description of Artificial Sequence: Synthetic oligonucleotide
  Sense strand starting at position 1212 of SEQ ID NO: 3704
uuaaucugugguuagacuu

SEQ ID NO: 288099 - RNA, 19 nt, Artificial Sequence
  Description of Artificial Sequence: Synthetic oligonucleotide
  Antisense strand to SEQ ID NO: 288098
aagucuaaccacagauuaa

SEQ ID NO: 288100 - RNA, 19 nt, Artificial Sequence
  Description of Artificial Sequence: Synthetic oligonucleotide
  Sense strand starting at position 1218 of SEQ ID NO: 3704
ugugguuagacuuaaucug

SEQ ID NO: 288101 - RNA, 19 nt, Artificial Sequence
  Description of Artificial Sequence: Synthetic oligonucleotide
  Antisense strand to SEQ ID NO: 288100
cagauuaagucuaaccaca

SEQ ID NO: 288102 - RNA, 19 nt, Artificial Sequence
  Description of Artificial Sequence: Synthetic oligonucleotide
  Sense strand starting at position 1351 of SEQ ID NO: 3704
gucauauaaggucacucau

SEQ ID NO: 288103 - RNA, 19 nt, Artificial Sequence
  Description of Artificial Sequence: Synthetic oligonucleotide
  Antisense strand to SEQ ID NO: 288102
augagugaccuuauaugac

SEQ ID NO: 288104 - RNA, 19 nt, Artificial Sequence
  Description of Artificial Sequence: Synthetic oligonucleotide
  Sense strand starting at position 1521 of SEQ ID NO: 3704
gaggaugaccucugguuaa

SEQ ID NO: 288105 - RNA, 19 nt, Artificial Sequence
  Description of Artificial Sequence: Synthetic oligonucleotide
  Antisense strand to SEQ ID NO: 288104
uuaaccagaggucauccuc

SEQ ID NO: 288106 - RNA, 19 nt, Artificial Sequence
  Description of Artificial Sequence: Synthetic oligonucleotide
  Sense strand starting at position 1706 of SEQ ID NO: 3704
uugagaugaaucugaugca

SEQ ID NO: 288107 - RNA, 19 nt, Artificial Sequence
  Description of Artificial Sequence: Synthetic oligonucleotide
  Antisense strand to SEQ ID NO: 288106
ugcaucagauucaucucaa

SEQ ID NO: 288108 - RNA, 19 nt, Artificial Sequence
  Description of Artificial Sequence: Synthetic oligonucleotide
  Sense strand starting at position 1738 of SEQ ID NO: 3704
aaagaugccuuggcugaua

SEQ ID NO: 288109 - RNA, 19 nt, Artificial Sequence
  Description of Artificial Sequence: Synthetic oligonucleotide
  Antisense strand to SEQ ID NO: 288108
uaucagccaaggcaucuuu

SEQ ID NO: 288110 - RNA, 19 nt, Artificial Sequence
  Description of Artificial Sequence: Synthetic oligonucleotide
  Sense strand starting at position 1828 of SEQ ID NO: 3704
aucugauagccugaguaug

SEQ ID NO: 288111 - RNA, 19 nt, Artificial Sequence
  Description of Artificial Sequence: Synthetic oligonucleotide
  Antisense strand to SEQ ID NO: 288110
cauacucaggcuaucagau

SEQ ID NO: 288112 - RNA, 19 nt, Artificial Sequence
  Description of Artificial Sequence: Synthetic oligonucleotide
  Sense strand starting at position 1862 of SEQ ID NO: 3704
acaggaguugcugaggcaa

SEQ ID NO: 288113 - RNA, 19 nt, Artificial Sequence
  Description of Artificial Sequence: Synthetic oligonucleotide
  Antisense strand to SEQ ID NO: 288112
uugccucagcaacuccugu

SEQ ID NO: 288114 - RNA, 19 nt, Artificial Sequence
  Description of Artificial Sequence: Synthetic oligonucleotide
  Sense strand starting at position 1897 of SEQ ID NO: 3704
agcacuucuccagaagauc

SEQ ID NO: 288115 - RNA, 19 nt, Artificial Sequence
  Description of Artificial Sequence: Synthetic oligonucleotide
  Antisense strand to SEQ ID NO: 288114
gaucuucuggagaagugcu

SEQ ID NO: 288116 - RNA, 19 nt, Artificial Sequence
  Description of Artificial Sequence: Synthetic oligonucleotide
  Sense strand starting at position 2010 of SEQ ID NO: 3704
aguucuaaagcuugaaauc

SEQ ID NO: 288117 - RNA, 19 nt, Artificial Sequence
  Description of Artificial Sequence: Synthetic oligonucleotide
  Antisense strand to SEQ ID NO: 288116
gauuucaagcuuuagaacu

SEQ ID NO: 288118 - RNA, 19 nt, Artificial Sequence
  Description of Artificial Sequence: Synthetic oligonucleotide
  Sense strand starting at position 2011 of SEQ ID NO: 3704
guucuaaagcuugaaauca

SEQ ID NO: 288119 - RNA, 19 nt, Artificial Sequence
  Description of Artificial Sequence: Synthetic oligonucleotide
  Antisense strand to SEQ ID NO: 288118
ugauuucaagcuuuagaac

SEQ ID NO: 288120 - RNA, 19 nt, Artificial Sequence
  Description of Artificial Sequence: Synthetic oligonucleotide
  Sense strand starting at position 2198 of SEQ ID NO: 3704
ccuguuguugaggauuaac

SEQ ID NO: 288121 - RNA, 19 nt, Artificial Sequence
  Description of Artificial Sequence: Synthetic oligonucleotide
  Antisense strand to SEQ ID NO: 288120
guuaauccucaacaacagg

SEQ ID NO: 288122 - RNA, 19 nt, Artificial Sequence
  Description of Artificial Sequence: Synthetic oligonucleotide
  Sense strand starting at position 2201 of SEQ ID NO: 3704
guuguugaggauuaacuau

SEQ ID NO: 288123 - RNA, 19 nt, Artificial Sequence
  Description of Artificial Sequence: Synthetic oligonucleotide
  Antisense strand to SEQ ID NO: 288122
auaguuaauccucaacaac

SEQ ID NO: 288124 - RNA, 19 nt, Artificial Sequence
  Description of Artificial Sequence: Synthetic oligonucleotide
  Sense strand starting at position 2244 of SEQ ID NO: 3704
gaaacauccugaguuggau

SEQ ID NO: 288125 - RNA, 19 nt, Artificial Sequence
  Description of Artificial Sequence: Synthetic oligonucleotide
  Antisense strand to SEQ ID NO: 288124
auccaacucaggauguuuc

SEQ ID NO: 288126 - RNA, 19 nt, Artificial Sequence
  Description of Artificial Sequence: Synthetic oligonucleotide
  Sense strand starting at position 2294 of SEQ ID NO: 3704
gaaugcugucucuagagag

SEQ ID NO: 288127 - RNA, 19 nt, Artificial Sequence
  Description of Artificial Sequence: Synthetic oligonucleotide
  Antisense strand to SEQ ID NO: 288126
cucucuagagacagcauuc

SEQ ID NO: 288128 - RNA, 19 nt, Artificial Sequence
  Description of Artificial Sequence: Synthetic oligonucleotide
  Sense strand starting at position 2682 of SEQ ID NO: 3704
agauuagcuuugccaaaua

SEQ ID NO: 288129 - RNA, 19 nt, Artificial Sequence
  Description of Artificial Sequence: Synthetic oligonucleotide
  Antisense strand to SEQ ID NO: 288128
uauuuggcaaagcuaaucu

SEQ ID NO: 288130 - RNA, 19 nt, Artificial Sequence
  Description of Artificial Sequence: Synthetic oligonucleotide
  Sense strand starting at position 2693 of SEQ ID NO: 3704
gccaaauagaauugucgaa

SEQ ID NO: 288131 - RNA, 19 nt, Artificial Sequence
  Description of Artificial Sequence: Synthetic oligonucleotide
  Antisense strand to SEQ ID NO: 288130
uucgacaauucuauuuggc

SEQ ID NO: 288132 - RNA, 19 nt, Artificial Sequence
  Description of Artificial Sequence: Synthetic oligonucleotide
  Sense strand starting at position 2695 of SEQ ID NO: 3704
caaauagaauugucgaaug

SEQ ID NO: 288133 - RNA, 19 nt, Artificial Sequence
  Description of Artificial Sequence: Synthetic oligonucleotide
  Antisense strand to SEQ ID NO: 288132
cauucgacaauucuauuug

SEQ ID NO: 288134 - RNA, 19 nt, Artificial Sequence
  Description of Artificial Sequence: Synthetic oligonucleotide
  Sense strand starting at position 2697 of SEQ ID NO: 3704
aauagaauugucgaauguu

SEQ ID NO: 288135 - RNA, 19 nt, Artificial Sequence
  Description of Artificial Sequence: Synthetic oligonucleotide
  Antisense strand to SEQ ID NO: 288134
aacauucgacaauucuauu

SEQ ID NO: 288136 - RNA, 19 nt, Artificial Sequence
  Description of Artificial Sequence: Synthetic oligonucleotide
  Sense strand starting at position 2996 of SEQ ID NO: 3704
caaugacauuuagauaggu

SEQ ID NO: 288137 - RNA, 19 nt, Artificial Sequence
  Description of Artificial Sequence: Synthetic oligonucleotide
  Antisense strand to SEQ ID NO: 288136
accuaucuaaaugucauug

SEQ ID NO: 288138 - RNA, 19 nt, Artificial Sequence
  Description of Artificial Sequence: Synthetic oligonucleotide
  Sense strand starting at position 3044 of SEQ ID NO: 3704
cuaaguuaacuugggauca

SEQ ID NO: 288139 - RNA, 19 nt, Artificial Sequence
  Description of Artificial Sequence: Synthetic oligonucleotide
  Antisense strand to SEQ ID NO: 288138
ugaucccaaguuaacuuag

SEQ ID NO: 288140 - RNA, 19 nt, Artificial Sequence
  Description of Artificial Sequence: Synthetic oligonucleotide
  Sense strand starting at position 3094 of SEQ ID NO: 3704
aguuaaugugaccauugua

SEQ ID NO: 288141 - RNA, 19 nt, Artificial Sequence
  Description of Artificial Sequence: Synthetic oligonucleotide
  Antisense strand to SEQ ID NO: 288140
uacaauggucacauuaacu

SEQ ID NO: 288142 - RNA, 19 nt, Artificial Sequence
  Description of Artificial Sequence: Synthetic oligonucleotide
  Sense strand starting at position 3110 of SEQ ID NO: 3704
guacauaaucuguauuguu

SEQ ID NO: 288143 - RNA, 19 nt, Artificial Sequence
  Description of Artificial Sequence: Synthetic oligonucleotide
  Antisense strand to SEQ ID NO: 288142
aacaauacagauuauguac

SEQ ID NO: 288144 - RNA, 19 nt, Artificial Sequence
  Description of Artificial Sequence: Synthetic oligonucleotide
  Sense strand starting at position 3115 of SEQ ID NO: 3704
uaaucuguauuguugagaa

SEQ ID NO: 288145 - RNA, 19 nt, Artificial Sequence
  Description of Artificial Sequence: Synthetic oligonucleotide
  Antisense strand to SEQ ID NO: 288144
uucucaacaauacagauua

SEQ ID NO: 288146 - RNA, 19 nt, Artificial Sequence
  Description of Artificial Sequence: Synthetic oligonucleotide
  Sense strand starting at position 3117 of SEQ ID NO: 3704
aucuguauuguugagaaug

SEQ ID NO: 288147 - RNA, 19 nt, Artificial Sequence
  Description of Artificial Sequence: Synthetic oligonucleotide
  Antisense strand to SEQ ID NO: 288146
cauucucaacaauacagau

SEQ ID NO: 288148 - RNA, 19 nt, Artificial Sequence
  Description of Artificial Sequence: Synthetic oligonucleotide
  Sense strand starting at position 3122 of SEQ ID NO: 3704
uauuguugagaauguagga

SEQ ID NO: 288149 - RNA, 19 nt, Artificial Sequence
  Description of Artificial Sequence: Synthetic oligonucleotide
  Antisense strand to SEQ ID NO: 288148
uccuacauucucaacaaua

SEQ ID NO: 288150 - RNA, 19 nt, Artificial Sequence
  Description of Artificial Sequence: Synthetic oligonucleotide
  Sense strand starting at position 3310 of SEQ ID NO: 3704
agagcuuucugacuagaau

SEQ ID NO: 288151 - RNA, 19 nt, Artificial Sequence
  Description of Artificial Sequence: Synthetic oligonucleotide
  Antisense strand to SEQ ID NO: 288150
auucuagucagaaagcucu

SEQ ID NO: 288152 - RNA, 19 nt, Artificial Sequence
  Description of Artificial Sequence: Synthetic oligonucleotide
  Sense strand starting at position 3510 of SEQ ID NO: 3704
uagucuaacucuguagaga

SEQ ID NO: 288153 - RNA, 19 nt, Artificial Sequence
  Description of Artificial Sequence: Synthetic oligonucleotide
  Antisense strand to SEQ ID NO: 288152
ucucuacagaguuagacua

SEQ ID NO: 288154 - RNA, 19 nt, Artificial Sequence
  Description of Artificial Sequence: Synthetic oligonucleotide
  Sense strand starting at position 3511 of SEQ ID NO: 3704
agucuaacucuguagagac

SEQ ID NO: 288155 - RNA, 19 nt, Artificial Sequence
  Description of Artificial Sequence: Synthetic oligonucleotide
  Antisense strand to SEQ ID NO: 288154
gucucuacagaguuagacu

SEQ ID NO: 288156 - RNA, 19 nt, Artificial Sequence
  Description of Artificial Sequence: Synthetic oligonucleotide
  Sense strand starting at position 3609 of SEQ ID NO: 3704
gugagaauauaacuuagug

SEQ ID NO: 288157 - RNA, 19 nt, Artificial Sequence
  Description of Artificial Sequence: Synthetic oligonucleotide
  Antisense strand to SEQ ID NO: 288156
cacuaaguuauauucucac

SEQ ID NO: 288158 - RNA, 19 nt, Artificial Sequence
  Description of Artificial Sequence: Synthetic oligonucleotide
  Sense strand starting at position 3757 of SEQ ID NO: 3704
cccugagucaagggauucu

SEQ ID NO: 288159 - RNA, 19 nt, Artificial Sequence
  Description of Artificial Sequence: Synthetic oligonucleotide
  Antisense strand to SEQ ID NO: 288158
agaaucccuugacucaggg

SEQ ID NO: 288160 - RNA, 19 nt, Artificial Sequence
  Description of Artificial Sequence: Synthetic oligonucleotide
  Sense strand starting at position 162 of SEQ ID NO: 3705
cuuucuucuguagaagcau

SEQ ID NO: 288161 - RNA, 19 nt, Artificial Sequence
  Description of Artificial Sequence: Synthetic oligonucleotide
  Antisense strand to SEQ ID NO: 288160
augcuucuacagaagaaag

SEQ ID NO: 288162 - RNA, 19 nt, Artificial Sequence
  Description of Artificial Sequence: Synthetic oligonucleotide
  Sense strand starting at position 272 of SEQ ID NO: 3705
ugcacaguggcuuacuuaa

SEQ ID NO: 288163 - RNA, 19 nt, Artificial Sequence
  Description of Artificial Sequence: Synthetic oligonucleotide
  Antisense strand to SEQ ID NO: 288162
uuaaguaagccacugugca

SEQ ID NO: 288164 - RNA, 19 nt, Artificial Sequence
  Description of Artificial Sequence: Synthetic oligonucleotide
  Sense strand starting at position 345 of SEQ ID NO: 3705
cuaucaguugccuaaauag

SEQ ID NO: 288165 - RNA, 19 nt, Artificial Sequence
  Description of Artificial Sequence: Synthetic oligonucleotide
  Antisense strand to SEQ ID NO: 288164
cuauuuaggcaacugauag

SEQ ID NO: 288166 - RNA, 19 nt, Artificial Sequence
  Description of Artificial Sequence: Synthetic oligonucleotide
  Sense strand starting at position 363 of SEQ ID NO: 3705
gagggcacauucuucuuua

SEQ ID NO: 288167 - RNA, 19 nt, Artificial Sequence
  Description of Artificial Sequence: Synthetic oligonucleotide
  Antisense strand to SEQ ID NO: 288166
uaaagaagaaugugcccuc

SEQ ID NO: 288168 - RNA, 19 nt, Artificial Sequence
  Description of Artificial Sequence: Synthetic oligonucleotide
  Sense strand starting at position 388 of SEQ ID NO: 3705
auaccauauucugucuaga

SEQ ID NO: 288169 - RNA, 19 nt, Artificial Sequence
  Description of Artificial Sequence: Synthetic oligonucleotide
  Antisense strand to SEQ ID NO: 288168
ucuagacagaauaugguau

SEQ ID NO: 288170 - RNA, 19 nt, Artificial Sequence
  Description of Artificial Sequence: Synthetic oligonucleotide
  Sense strand starting at position 390 of SEQ ID NO: 3705
accauauucugucuagagu

SEQ ID NO: 288171 - RNA, 19 nt, Artificial Sequence
  Description of Artificial Sequence: Synthetic oligonucleotide
  Antisense strand to SEQ ID NO: 288170
acucuagacagaauauggu

SEQ ID NO: 288172 - RNA, 19 nt, Artificial Sequence
  Description of Artificial Sequence: Synthetic oligonucleotide
  Sense strand starting at position 416 of SEQ ID NO: 3705
uugauaagcuagucuaaca

SEQ ID NO: 288173 - RNA, 19 nt, Artificial Sequence
  Description of Artificial Sequence: Synthetic oligonucleotide
  Antisense strand to SEQ ID NO: 288172
uguuagacuagcuuaucaa

SEQ ID NO: 288174 - RNA, 19 nt, Artificial Sequence
  Description of Artificial Sequence: Synthetic oligonucleotide
  Sense strand starting at position 600 of SEQ ID NO: 3705
ugguuugcaguuuauauaa

SEQ ID NO: 288175 - RNA, 19 nt, Artificial Sequence
  Description of Artificial Sequence: Synthetic oligonucleotide
  Antisense strand to SEQ ID NO: 288174
uuauauaaacugcaaacca

SEQ ID NO: 288176 - RNA, 19 nt, Artificial Sequence
  Description of Artificial Sequence: Synthetic oligonucleotide
  Sense strand starting at position 699 of SEQ ID NO: 3705
ucuugucuacagggaagaa

SEQ ID NO: 288177 - RNA, 19 nt, Artificial Sequence
  Description of Artificial Sequence: Synthetic oligonucleotide
  Antisense strand to SEQ ID NO: 288176
uucuucccuguagacaaga

SEQ ID NO: 288178 - RNA, 19 nt, Artificial Sequence
  Description of Artificial Sequence: Synthetic oligonucleotide
  Sense strand starting at position 797 of SEQ ID NO: 3705
gcuaucacuuccuugaaag

SEQ ID NO: 288179 - RNA, 19 nt, Artificial Sequence
  Description of Artificial Sequence: Synthetic oligonucleotide
  Antisense strand to SEQ ID NO: 288178
cuuucaaggaagugauagc

SEQ ID NO: 288180 - RNA, 19 nt, Artificial Sequence
  Description of Artificial Sequence: Synthetic oligonucleotide
  Sense strand starting at position 808 of SEQ ID NO: 3705
cuugaaagcuuacuuugau

SEQ ID NO: 288181 - RNA, 19 nt, Artificial Sequence
  Description of Artificial Sequence: Synthetic oligonucleotide
  Antisense strand to SEQ ID NO: 288180
aucaaaguaagcuuucaag

SEQ ID NO: 288182 - RNA, 19 nt, Artificial Sequence
  Description of Artificial Sequence: Synthetic oligonucleotide
  Sense strand starting at position 809 of SEQ ID NO: 3705
uugaaagcuuacuuugauu

SEQ ID NO: 288183 - RNA, 19 nt, Artificial Sequence
  Description of Artificial Sequence: Synthetic oligonucleotide
  Antisense strand to SEQ ID NO: 288182
aaucaaaguaagcuuucaa

SEQ ID NO: 288184 - RNA, 19 nt, Artificial Sequence
  Description of Artificial Sequence: Synthetic oligonucleotide
  Sense strand starting at position 887 of SEQ ID NO: 3705
ugcucuuaacaucagagua

SEQ ID NO: 288185 - RNA, 19 nt, Artificial Sequence
  Description of Artificial Sequence: Synthetic oligonucleotide
  Antisense strand to SEQ ID NO: 288184
uacucugauguuaagagca

SEQ ID NO: 288186 - RNA, 19 nt, Artificial Sequence
  Description of Artificial Sequence: Synthetic oligonucleotide
  Sense strand starting at position 914 of SEQ ID NO: 3705
cuaugaacgcuccaacuua

SEQ ID NO: 288187 - RNA, 19 nt, Artificial Sequence
  Description of Artificial Sequence: Synthetic oligonucleotide
  Antisense strand to SEQ ID NO: 288186
uaaguuggagcguucauag

SEQ ID NO: 288188 - RNA, 19 nt, Artificial Sequence
  Description of Artificial Sequence: Synthetic oligonucleotide
  Sense strand starting at position 1062 of SEQ ID NO: 3705
guaaaugaguuucccaagu

SEQ ID NO: 288189 - RNA, 19 nt, Artificial Sequence
  Description of Artificial Sequence: Synthetic oligonucleotide
  Antisense strand to SEQ ID NO: 288188
acuugggaaacucauuuac

SEQ ID NO: 288190 - RNA, 19 nt, Artificial Sequence
  Description of Artificial Sequence: Synthetic oligonucleotide
  Sense strand starting at position 1129 of SEQ ID NO: 3705
cuauaaagugcuuauucga

SEQ ID NO: 288191 - RNA, 19 nt, Artificial Sequence
  Description of Artificial Sequence: Synthetic oligonucleotide
  Antisense strand to SEQ ID NO: 288190
ucgaauaagcacuuuauag

SEQ ID NO: 288192 - RNA, 19 nt, Artificial Sequence
  Description of Artificial Sequence: Synthetic oligonucleotide
  Sense strand starting at position 1159 of SEQ ID NO: 3705
aauaaucugcgcugagaaa

SEQ ID NO: 288193 - RNA, 19 nt, Artificial Sequence
  Description of Artificial Sequence: Synthetic oligonucleotide
  Antisense strand to SEQ ID NO: 288192
uuucucagcgcagauuauu

SEQ ID NO: 288194 - RNA, 19 nt, Artificial Sequence
  Description of Artificial Sequence: Synthetic oligonucleotide
  Sense strand starting at position 1160 of SEQ ID NO: 3705
auaaucugcgcugagaaau

SEQ ID NO: 288195 - RNA, 19 nt, Artificial Sequence
  Description of Artificial Sequence: Synthetic oligonucleotide
  Antisense strand to SEQ ID NO: 288194
auuucucagcgcagauuau

SEQ ID NO: 288196 - RNA, 19 nt, Artificial Sequence
  Description of Artificial Sequence: Synthetic oligonucleotide
  Sense strand starting at position 1206 of SEQ ID NO: 3705
uguguuugugugcucuuaa

SEQ ID NO: 288197 - RNA, 19 nt, Artificial Sequence
  Description of Artificial Sequence: Synthetic oligonucleotide
  Antisense strand to SEQ ID NO: 288196
uuaagagcacacaaacaca

SEQ ID NO: 288198 - RNA, 19 nt, Artificial Sequence
  Description of Artificial Sequence: Synthetic oligonucleotide
  Sense strand starting at position 1286 of SEQ ID NO: 3705
agcuuugcagaugggaaau

SEQ ID NO: 288199 - RNA, 19 nt, Artificial Sequence
  Description of Artificial Sequence: Synthetic oligonucleotide
  Antisense strand to SEQ ID NO: 288198
auuucccaucugcaaagcu

SEQ ID NO: 288200 - RNA, 19 nt, Artificial Sequence
  Description of Artificial Sequence: Synthetic oligonucleotide
  Sense strand starting at position 1592 of SEQ ID NO: 3705
ccagaaccgagaugugaaa

SEQ ID NO: 288201 - RNA, 19 nt, Artificial Sequence
  Description of Artificial Sequence: Synthetic oligonucleotide
  Antisense strand to SEQ ID NO: 288200
uuucacaucucgguucugg

SEQ ID NO: 288202 - RNA, 19 nt, Artificial Sequence
  Description of Artificial Sequence: Synthetic oligonucleotide
  Sense strand starting at position 2335 of SEQ ID NO: 3705
agcagaaucggcuaauguu

SEQ ID NO: 288203 - RNA, 19 nt, Artificial Sequence
  Description of Artificial Sequence: Synthetic oligonucleotide
  Antisense strand to SEQ ID NO: 288202
aacauuagccgauucugcu

SEQ ID NO: 288204 - RNA, 19 nt, Artificial Sequence
  Description of Artificial Sequence: Synthetic oligonucleotide
  Sense strand starting at position 2347 of SEQ ID NO: 3705
uaauguuuccgagaaguca

SEQ ID NO: 288205 - RNA, 19 nt, Artificial Sequence
  Description of Artificial Sequence: Synthetic oligonucleotide
  Antisense strand to SEQ ID NO: 288204
ugacuucucggaaacauua

SEQ ID NO: 288206 - RNA, 19 nt, Artificial Sequence
  Description of Artificial Sequence: Synthetic oligonucleotide
  Sense strand starting at position 2507 of SEQ ID NO: 3705
aagagucuaggcugggaau

SEQ ID NO: 288207 - RNA, 19 nt, Artificial Sequence
  Description of Artificial Sequence: Synthetic oligonucleotide
  Antisense strand to SEQ ID NO: 288206
auucccagccuagacucuu

SEQ ID NO: 288208 - RNA, 19 nt, Artificial Sequence
  Description of Artificial Sequence: Synthetic oligonucleotide
  Sense strand starting at position 2508 of SEQ ID NO: 3705
agagucuaggcugggaauu

SEQ ID NO: 288209 - RNA, 19 nt, Artificial Sequence
  Description of Artificial Sequence: Synthetic oligonucleotide
  Antisense strand to SEQ ID NO: 288208
aauucccagccuagacucu

SEQ ID NO: 288210 - RNA, 19 nt, Artificial Sequence
  Description of Artificial Sequence: Synthetic oligonucleotide
  Sense strand starting at position 2574 of SEQ ID NO: 3705
gcucaagaccgguaucuag

SEQ ID NO: 288211 - RNA, 19 nt, Artificial Sequence
  Description of Artificial Sequence: Synthetic oligonucleotide
  Antisense strand to SEQ ID NO: 288210
cuagauaccggucuugagc

SEQ ID NO: 288212 - RNA, 19 nt, Artificial Sequence
  Description of Artificial Sequence: Synthetic oligonucleotide
  Sense strand starting at position 2759 of SEQ ID NO: 3705
gggacccgauuaucugaau

SEQ ID NO: 288213 - RNA, 19 nt, Artificial Sequence
  Description of Artificial Sequence: Synthetic oligonucleotide
  Antisense strand to SEQ ID NO: 288212
auucagauaaucggguccc

SEQ ID NO: 288214 - RNA, 19 nt, Artificial Sequence
  Description of Artificial Sequence: Synthetic oligonucleotide
  Sense strand starting at position 2760 of SEQ ID NO: 3705
ggacccgauuaucugaaua

SEQ ID NO: 288215 - RNA, 19 nt, Artificial Sequence
  Description of Artificial Sequence: Synthetic oligonucleotide
  Antisense strand to SEQ ID NO: 288214
uauucagauaaucgggucc

SEQ ID NO: 288216 - RNA, 19 nt, Artificial Sequence
  Description of Artificial Sequence: Synthetic oligonucleotide
  Sense strand starting at position 2765 of SEQ ID NO: 3705
cgauuaucugaauaugcca

SEQ ID NO: 288217 - RNA, 19 nt, Artificial Sequence
  Description of Artificial Sequence: Synthetic oligonucleotide
  Antisense strand to SEQ ID NO: 288216
uggcauauucagauaaucg

SEQ ID NO: 288218 - RNA, 19 nt, Artificial Sequence
  Description of Artificial Sequence: Synthetic oligonucleotide
  Sense strand starting at position 2773 of SEQ ID NO: 3705
ugaauaugccaucagucau

SEQ ID NO: 288219 - RNA, 19 nt, Artificial Sequence
  Description of Artificial Sequence: Synthetic oligonucleotide
  Antisense strand to SEQ ID NO: 288218
augacugauggcauauuca

SEQ ID NO: 288220 - RNA, 19 nt, Artificial Sequence
  Description of Artificial Sequence: Synthetic oligonucleotide
  Sense strand starting at position 2784 of SEQ ID NO: 3705
ucagucauauggguucuga

SEQ ID NO: 288221 - RNA, 19 nt, Artificial Sequence
  Description of Artificial Sequence: Synthetic oligonucleotide
  Antisense strand to SEQ ID NO: 288220
ucagaacccauaugacuga

SEQ ID NO: 288222 - RNA, 19 nt, Artificial Sequence
  Description of Artificial Sequence: Synthetic oligonucleotide
  Sense strand starting at position 2814 of SEQ ID NO: 3705
gguaggagcgacugugaaa

SEQ ID NO: 288223 - RNA, 19 nt, Artificial Sequence
  Description of Artificial Sequence: Synthetic oligonucleotide
  Antisense strand to SEQ ID NO: 288222
uuucacagucgcuccuacc

SEQ ID NO: 288224 - RNA, 19 nt, Artificial Sequence
  Description of Artificial Sequence: Synthetic oligonucleotide
  Sense strand starting at position 3065 of SEQ ID NO: 3705
accuucuaucauggaaaug

SEQ ID NO: 288225 - RNA, 19 nt, Artificial Sequence
  Description of Artificial Sequence: Synthetic oligonucleotide
  Antisense strand to SEQ ID NO: 288224
cauuuccaugauagaaggu

SEQ ID NO: 288226 - RNA, 19 nt, Artificial Sequence
  Description of Artificial Sequence: Synthetic oligonucleotide
  Sense strand starting at position 3227 of SEQ ID NO: 3705
gacugagacugugcaauga

SEQ ID NO: 288227 - RNA, 19 nt, Artificial Sequence
  Description of Artificial Sequence: Synthetic oligonucleotide
  Antisense strand to SEQ ID NO: 288226
ucauugcacagucucaguc

SEQ ID NO: 288228 - RNA, 19 nt, Artificial Sequence
  Description of Artificial Sequence: Synthetic oligonucleotide
  Sense strand starting at position 3237 of SEQ ID NO: 3705
gugcaaugaaggugaacua

SEQ ID NO: 288229 - RNA, 19 nt, Artificial Sequence
  Description of Artificial Sequence: Synthetic oligonucleotide
  Antisense strand to SEQ ID NO: 288228
uaguucaccuucauugcac

SEQ ID NO: 288230 - RNA, 19 nt, Artificial Sequence
  Description of Artificial Sequence: Synthetic oligonucleotide
  Sense strand starting at position 3249 of SEQ ID NO: 3705
ugaacuagcucacuuguga

SEQ ID NO: 288231 - RNA, 19 nt, Artificial Sequence
  Description of Artificial Sequence: Synthetic oligonucleotide
  Antisense strand to SEQ ID NO: 288230
ucacaagugagcuaguuca

SEQ ID NO: 288232 - RNA, 19 nt, Artificial Sequence
  Description of Artificial Sequence: Synthetic oligonucleotide
  Sense strand starting at position 3277 of SEQ ID NO: 3705
gugccauauccuggacaaa

SEQ ID NO: 288233 - RNA, 19 nt, Artificial Sequence
  Description of Artificial Sequence: Synthetic oligonucleotide
  Antisense strand to SEQ ID NO: 288232
uuuguccaggauauggcac

SEQ ID NO: 288234 - RNA, 19 nt, Artificial Sequence
  Description of Artificial Sequence: Synthetic oligonucleotide
  Sense strand starting at position 3278 of SEQ ID NO: 3705
ugccauauccuggacaaau

SEQ ID NO: 288235 - RNA, 19 nt, Artificial Sequence
  Description of Artificial Sequence: Synthetic oligonucleotide
  Antisense strand to SEQ ID NO: 288234
auuuguccaggauauggca

SEQ ID NO: 288236 - RNA, 19 nt, Artificial Sequence
  Description of Artificial Sequence: Synthetic oligonucleotide
  Sense strand starting at position 3316 of SEQ ID NO: 3705
ggugguagauauaggaaga

SEQ ID NO: 288237 - RNA, 19 nt, Artificial Sequence
  Description of Artificial Sequence: Synthetic oligonucleotide
  Antisense strand to SEQ ID NO: 288236
ucuuccuauaucuaccacc

SEQ ID NO: 288238 - RNA, 19 nt, Artificial Sequence
  Description of Artificial Sequence: Synthetic oligonucleotide
  Sense strand starting at position 3926 of SEQ ID NO: 3705
auuccauugacugguggua

SEQ ID NO: 288239 - RNA, 19 nt, Artificial Sequence
  Description of Artificial Sequence: Synthetic oligonucleotide
  Antisense strand to SEQ ID NO: 288238
uaccaccagucaauggaau

SEQ ID NO: 288240 - RNA, 19 nt, Artificial Sequence
  Description of Artificial Sequence: Synthetic oligonucleotide
  Sense strand starting at position 36 of SEQ ID NO: 3706
ccuugagggcugggaguau

SEQ ID NO: 288241 - RNA, 19 nt, Artificial Sequence
  Description of Artificial Sequence: Synthetic oligonucleotide
  Antisense strand to SEQ ID NO: 288240
auacucccagcccucaagg

SEQ ID NO: 288242 - RNA, 19 nt, Artificial Sequence
  Description of Artificial Sequence: Synthetic oligonucleotide
  Sense strand starting at position 45 of SEQ ID NO: 3706
cugggaguaugucuuacua

SEQ ID NO: 288243 - RNA, 19 nt, Artificial Sequence
  Description of Artificial Sequence: Synthetic oligonucleotide
  Antisense strand to SEQ ID NO: 288242
uaguaagacauacucccag

SEQ ID NO: 288244 - RNA, 19 nt, Artificial Sequence
  Description of Artificial Sequence: Synthetic oligonucleotide
  Sense strand starting at position 252 of SEQ ID NO: 3706
ugcugauauuucuaggaga

SEQ ID NO: 288245 - RNA, 19 nt, Artificial Sequence
  Description of Artificial Sequence: Synthetic oligonucleotide
  Antisense strand to SEQ ID NO: 288244
ucuccuagaaauaucagca

SEQ ID NO: 288246 - RNA, 19 nt, Artificial Sequence
  Description of Artificial Sequence: Synthetic oligonucleotide
  Sense strand starting at position 462 of SEQ ID NO: 3706
uggcuuuacacaggcagau

SEQ ID NO: 288247 - RNA, 19 nt, Artificial Sequence
  Description of Artificial Sequence: Synthetic oligonucleotide
  Antisense strand to SEQ ID NO: 288246
aucugccuguguaaagcca

SEQ ID NO: 288248 - RNA, 19 nt, Artificial Sequence
  Description of Artificial Sequence: Synthetic oligonucleotide
  Sense strand starting at position 596 of SEQ ID NO: 3706
ugacgagaagucugauguc

SEQ ID NO: 288249 - RNA, 19 nt, Artificial Sequence
  Description of Artificial Sequence: Synthetic oligonucleotide
  Antisense strand to SEQ ID NO: 288248
gacaucagacuucucguca

SEQ ID NO: 288250 - RNA, 19 nt, Artificial Sequence
  Description of Artificial Sequence: Synthetic oligonucleotide
  Sense strand starting at position 602 of SEQ ID NO: 3706
gaagucugaugucuugaug

SEQ ID NO: 288251 - RNA, 19 nt, Artificial Sequence
  Description of Artificial Sequence: Synthetic oligonucleotide
  Antisense strand to SEQ ID NO: 288250
caucaagacaucagacuuc

SEQ ID NO: 288252 - RNA, 19 nt, Artificial Sequence
  Description of Artificial Sequence: Synthetic oligonucleotide
  Sense strand starting at position 700 of SEQ ID NO: 3706
acuauauaacuuuggcaga

SEQ ID NO: 288253 - RNA, 19 nt, Artificial Sequence
  Description of Artificial Sequence: Synthetic oligonucleotide
  Antisense strand to SEQ ID NO: 288252
ucugccaaaguuauauagu

SEQ ID NO: 288254 - RNA, 19 nt, Artificial Sequence
  Description of Artificial Sequence: Synthetic oligonucleotide
  Sense strand starting at position 705 of SEQ ID NO: 3706
auaacuuuggcagacuauu

SEQ ID NO: 288255 - RNA, 19 nt, Artificial Sequence
  Description of Artificial Sequence: Synthetic oligonucleotide
  Antisense strand to SEQ ID NO: 288254
aauagucugccaaaguuau

SEQ ID NO: 288256 - RNA, 19 nt, Artificial Sequence
  Description of Artificial Sequence: Synthetic oligonucleotide
  Sense strand starting at position 829 of SEQ ID NO: 3706
gugcauagaacauaguaga

SEQ ID NO: 288257 - RNA, 19 nt, Artificial Sequence
  Description of Artificial Sequence: Synthetic oligonucleotide
  Antisense strand to SEQ ID NO: 288256
ucuacuauguucuaugcac

SEQ ID NO: 288258 - RNA, 19 nt, Artificial Sequence
  Description of Artificial Sequence: Synthetic oligonucleotide
  Sense strand starting at position 870 of SEQ ID NO: 3706
guuauuauuugguaggaga

SEQ ID NO: 288259 - RNA, 19 nt, Artificial Sequence
  Description of Artificial Sequence: Synthetic oligonucleotide
  Antisense strand to SEQ ID NO: 288258
ucuccuaccaaauaauaac

SEQ ID NO: 288260 - RNA, 19 nt, Artificial Sequence
  Description of Artificial Sequence: Synthetic oligonucleotide
  Sense strand starting at position 1244 of SEQ ID NO: 3706
gagaacuugguugguggau

SEQ ID NO: 288261 - RNA, 19 nt, Artificial Sequence
  Description of Artificial Sequence: Synthetic oligonucleotide
  Antisense strand to SEQ ID NO: 288260
auccaccaaccaaguucuc

SEQ ID NO: 288262 - RNA, 19 nt, Artificial Sequence
  Description of Artificial Sequence: Synthetic oligonucleotide
  Sense strand starting at position 1468 of SEQ ID NO: 3706
guauuuauugaacgucuuu

SEQ ID NO: 288263 - RNA, 19 nt, Artificial Sequence
  Description of Artificial Sequence: Synthetic oligonucleotide
  Antisense strand to SEQ ID NO: 288262
aaagacguucaauaaauac

SEQ ID NO: 288264 - RNA, 19 nt, Artificial Sequence
  Description of Artificial Sequence: Synthetic oligonucleotide
  Sense strand starting at position 1628 of SEQ ID NO: 3706
cgguuagggccggaauuau

SEQ ID NO: 288265 - RNA, 19 nt, Artificial Sequence
  Description of Artificial Sequence: Synthetic oligonucleotide
  Antisense strand to SEQ ID NO: 288264
auaauuccggcccuaaccg

SEQ ID NO: 288266 - RNA, 19 nt, Artificial Sequence
  Description of Artificial Sequence: Synthetic oligonucleotide
  Sense strand starting at position 1992 of SEQ ID NO: 3706
accuuugaucucggaaguu

SEQ ID NO: 288267 - RNA, 19 nt, Artificial Sequence
  Description of Artificial Sequence: Synthetic oligonucleotide
  Antisense strand to SEQ ID NO: 288266
aacuuccgagaucaaaggu

SEQ ID NO: 288268 - RNA, 19 nt, Artificial Sequence
  Description of Artificial Sequence: Synthetic oligonucleotide
  Sense strand starting at position 2111 of SEQ ID NO: 3706
gggaaauccuucgccaacu

SEQ ID NO: 288269 - RNA, 19 nt, Artificial Sequence
  Description of Artificial Sequence: Synthetic oligonucleotide
  Antisense strand to SEQ ID NO: 288268
aguuggcgaaggauuuccc

SEQ ID NO: 288270 - RNA, 19 nt, Artificial Sequence
  Description of Artificial Sequence: Synthetic oligonucleotide
  Sense strand starting at position 2348 of SEQ ID NO: 3706
cggguccucagcguuuauu

SEQ ID NO: 288271 - RNA, 19 nt, Artificial Sequence
  Description of Artificial Sequence: Synthetic oligonucleotide
  Antisense strand to SEQ ID NO: 288270
aauaaacgcugaggacccg

SEQ ID NO: 288272 - RNA, 19 nt, Artificial Sequence
  Description of Artificial Sequence: Synthetic oligonucleotide
  Sense strand starting at position 2399 of SEQ ID NO: 3706
aucuuugucggccagaaug

SEQ ID NO: 288273 - RNA, 19 nt, Artificial Sequence
  Description of Artificial Sequence: Synthetic oligonucleotide
  Antisense strand to SEQ ID NO: 288272
cauucuggccgacaaagau

SEQ ID NO: 288274 - RNA, 19 nt, Artificial Sequence
  Description of Artificial Sequence: Synthetic oligonucleotide
  Sense strand starting at position 2606 of SEQ ID NO: 3706
ugacuaaacucguugaagu

SEQ ID NO: 288275 - RNA, 19 nt, Artificial Sequence
  Description of Artificial Sequence: Synthetic oligonucleotide
  Antisense strand to SEQ ID NO: 288274
acuucaacgaguuuaguca

SEQ ID NO: 288276 - RNA, 19 nt, Artificial Sequence
  Description of Artificial Sequence: Synthetic oligonucleotide
  Sense strand starting at position 2607 of SEQ ID NO: 3706
gacuaaacucguugaaguu

SEQ ID NO: 288277 - RNA, 19 nt, Artificial Sequence
  Description of Artificial Sequence: Synthetic oligonucleotide
  Antisense strand to SEQ ID NO: 288276
aacuucaacgaguuuaguc

SEQ ID NO: 288278 - RNA, 19 nt, Artificial Sequence
  Description of Artificial Sequence: Synthetic oligonucleotide
  Sense strand starting at position 2608 of SEQ ID NO: 3706
acuaaacucguugaaguuu

SEQ ID NO: 288279 - RNA, 19 nt, Artificial Sequence
  Description of Artificial Sequence: Synthetic oligonucleotide
  Antisense strand to SEQ ID NO: 288278
aaacuucaacgaguuuagu

SEQ ID NO: 288280 - RNA, 19 nt, Artificial Sequence
  Description of Artificial Sequence: Synthetic oligonucleotide
  Sense strand starting at position 2645 of SEQ ID NO: 3706
aggucuaccaguuguaaua

SEQ ID NO: 288281 - RNA, 19 nt, Artificial Sequence
  Description of Artificial Sequence: Synthetic oligonucleotide
  Antisense strand to SEQ ID NO: 288280
uauuacaacugguagaccu

SEQ ID NO: 288282 - RNA, 19 nt, Artificial Sequence
  Description of Artificial Sequence: Synthetic oligonucleotide
  Sense strand starting at position 2722 of SEQ ID NO: 3706
ggagucaaaccuggauucu

SEQ ID NO: 288283 - RNA, 19 nt, Artificial Sequence
  Description of Artificial Sequence: Synthetic oligonucleotide
  Antisense strand to SEQ ID NO: 288282
agaauccagguuugacucc

SEQ ID NO: 288284 - RNA, 19 nt, Artificial Sequence
  Description of Artificial Sequence: Synthetic oligonucleotide
  Sense strand starting at position 2732 of SEQ ID NO: 3706
cuggauucuaguuauucga

SEQ ID NO: 288285 - RNA, 19 nt, Artificial Sequence
  Description of Artificial Sequence: Synthetic oligonucleotide
  Antisense strand to SEQ ID NO: 288284
ucgaauaacuagaauccag

SEQ ID NO: 288286 - RNA, 19 nt, Artificial Sequence
  Description of Artificial Sequence: Synthetic oligonucleotide
  Sense strand starting at position 2807 of SEQ ID NO: 3706
gucuucuaaucuguaaauu

SEQ ID NO: 288287 - RNA, 19 nt, Artificial Sequence
  Description of Artificial Sequence: Synthetic oligonucleotide
  Antisense strand to SEQ ID NO: 288286
aauuuacagauuagaagac

SEQ ID NO: 288288 - RNA, 19 nt, Artificial Sequence
  Description of Artificial Sequence: Synthetic oligonucleotide
  Sense strand starting at position 3031 of SEQ ID NO: 3706
ucacuucuagaccagugau

SEQ ID NO: 288289 - RNA, 19 nt, Artificial Sequence
  Description of Artificial Sequence: Synthetic oligonucleotide
  Antisense strand to SEQ ID NO: 288288
aucacuggucuagaaguga

SEQ ID NO: 288290 - RNA, 19 nt, Artificial Sequence
  Description of Artificial Sequence: Synthetic oligonucleotide
  Sense strand starting at position 3066 of SEQ ID NO: 3706
acuguuaccuuccuaagga

SEQ ID NO: 288291 - RNA, 19 nt, Artificial Sequence
  Description of Artificial Sequence: Synthetic oligonucleotide
  Antisense strand to SEQ ID NO: 288290
uccuuaggaagguaacagu

SEQ ID NO: 288292 - RNA, 19 nt, Artificial Sequence
  Description of Artificial Sequence: Synthetic oligonucleotide
  Sense strand starting at position 3145 of SEQ ID NO: 3706
cuugaaagcucuuugguaa

SEQ ID NO: 288293 - RNA, 19 nt, Artificial Sequence
  Description of Artificial Sequence: Synthetic oligonucleotide
  Antisense strand to SEQ ID NO: 288292
uuaccaaagagcuuucaag

SEQ ID NO: 288294 - RNA, 19 nt, Artificial Sequence
  Description of Artificial Sequence: Synthetic oligonucleotide
  Sense strand starting at position 3146 of SEQ ID NO: 3706
uugaaagcucuuugguaau

SEQ ID NO: 288295 - RNA, 19 nt, Artificial Sequence
  Description of Artificial Sequence: Synthetic oligonucleotide
  Antisense strand to SEQ ID NO: 288294
auuaccaaagagcuuucaa

SEQ ID NO: 288296 - RNA, 19 nt, Artificial Sequence
  Description of Artificial Sequence: Synthetic oligonucleotide
  Sense strand starting at position 3148 of SEQ ID NO: 3706
gaaagcucuuugguaauca

SEQ ID NO: 288297 - RNA, 19 nt, Artificial Sequence
  Description of Artificial Sequence: Synthetic oligonucleotide
  Antisense strand to SEQ ID NO: 288296
ugauuaccaaagagcuuuc

SEQ ID NO: 288298 - RNA, 19 nt, Artificial Sequence
  Description of Artificial Sequence: Synthetic oligonucleotide
  Sense strand starting at position 3301 of SEQ ID NO: 3706
uguguuugugugguugcaa

SEQ ID NO: 288299 - RNA, 19 nt, Artificial Sequence
  Description of Artificial Sequence: Synthetic oligonucleotide
  Antisense strand to SEQ ID NO: 288298
uugcaaccacacaaacaca

SEQ ID NO: 288300 - RNA, 19 nt, Artificial Sequence
  Description of Artificial Sequence: Synthetic oligonucleotide
  Sense strand starting at position 3328 of SEQ ID NO: 3706
gggagagguuucuuguauu

SEQ ID NO: 288301 - RNA, 19 nt, Artificial Sequence
  Description of Artificial Sequence: Synthetic oligonucleotide
  Antisense strand to SEQ ID NO: 288300
aauacaagaaaccucuccc

SEQ ID NO: 288302 - RNA, 19 nt, Artificial Sequence
  Description of Artificial Sequence: Synthetic oligonucleotide
  Sense strand starting at position 3339 of SEQ ID NO: 3706
cuuguauuugguuggcuca

SEQ ID NO: 288303 - RNA, 19 nt, Artificial Sequence
  Description of Artificial Sequence: Synthetic oligonucleotide
  Antisense strand to SEQ ID NO: 288302
ugagccaaccaaauacaag

SEQ ID NO: 288304 - RNA, 19 nt, Artificial Sequence
  Description of Artificial Sequence: Synthetic oligonucleotide
  Sense strand starting at position 3340 of SEQ ID NO: 3706
uuguauuugguuggcucaa

SEQ ID NO: 288305 - RNA, 19 nt, Artificial Sequence
  Description of Artificial Sequence: Synthetic oligonucleotide
  Antisense strand to SEQ ID NO: 288304
uugagccaaccaaauacaa

SEQ ID NO: 288306 - RNA, 19 nt, Artificial Sequence
  Description of Artificial Sequence: Synthetic oligonucleotide
  Sense strand starting at position 3341 of SEQ ID NO: 3706
uguauuugguuggcucaau

SEQ ID NO: 288307 - RNA, 19 nt, Artificial Sequence
  Description of Artificial Sequence: Synthetic oligonucleotide
  Antisense strand to SEQ ID NO: 288306
auugagccaaccaaauaca

SEQ ID NO: 288308 - RNA, 19 nt, Artificial Sequence
  Description of Artificial Sequence: Synthetic oligonucleotide
  Sense strand starting at position 3342 of SEQ ID NO: 3706
guauuugguuggcucaaua

SEQ ID NO: 288309 - RNA, 19 nt, Artificial Sequence
  Description of Artificial Sequence: Synthetic oligonucleotide
  Antisense strand to SEQ ID NO: 288308
uauugagccaaccaaauac

SEQ ID NO: 288310 - RNA, 19 nt, Artificial Sequence
  Description of Artificial Sequence: Synthetic oligonucleotide
  Sense strand starting at position 3528 of SEQ ID NO: 3706
uuugacauuucgcuuuaua

SEQ ID NO: 288311 - RNA, 19 nt, Artificial Sequence
  Description of Artificial Sequence: Synthetic oligonucleotide
  Antisense strand to SEQ ID NO: 288310
uauaaagcgaaaugucaaa

SEQ ID NO: 288312 - RNA, 19 nt, Artificial Sequence
  Description of Artificial Sequence: Synthetic oligonucleotide
  Sense strand starting at position 3659 of SEQ ID NO: 3706
uucucaucuguguaaagug

SEQ ID NO: 288313 - RNA, 19 nt, Artificial Sequence
  Description of Artificial Sequence: Synthetic oligonucleotide
  Antisense strand to SEQ ID NO: 288312
cacuuuacacagaugagaa

SEQ ID NO: 288314 - RNA, 19 nt, Artificial Sequence
  Description of Artificial Sequence: Synthetic oligonucleotide
  Sense strand starting at position 3907 of SEQ ID NO: 3706
gauggauauguuuauagug

SEQ ID NO: 288315 - RNA, 19 nt, Artificial Sequence
  Description of Artificial Sequence: Synthetic oligonucleotide
  Antisense strand to SEQ ID NO: 288314
cacuauaaacauauccauc

SEQ ID NO: 288316 - RNA, 19 nt, Artificial Sequence
  Description of Artificial Sequence: Synthetic oligonucleotide
  Sense strand starting at position 3925 of SEQ ID NO: 3706
guagauugugaugaugguu

SEQ ID NO: 288317 - RNA, 19 nt, Artificial Sequence
  Description of Artificial Sequence: Synthetic oligonucleotide
  Antisense strand to SEQ ID NO: 288316
aaccaucaucacaaucuac

SEQ ID NO: 288318 - RNA, 19 nt, Artificial Sequence
  Description of Artificial Sequence: Synthetic oligonucleotide
  Sense strand starting at position 3949 of SEQ ID NO: 3706
gggauauacuugucaccaa

SEQ ID NO: 288319 - RNA, 19 nt, Artificial Sequence
  Description of Artificial Sequence: Synthetic oligonucleotide
  Antisense strand to SEQ ID NO: 288318
uuggugacaaguauauccc

SEQ ID NO: 288320 - RNA, 19 nt, Artificial Sequence
  Description of Artificial Sequence: Synthetic oligonucleotide
  Sense strand starting at position 20 of SEQ ID NO: 3707
cucccuucucucugagagu

SEQ ID NO: 288321 - RNA, 19 nt, Artificial Sequence
  Description of Artificial Sequence: Synthetic oligonucleotide
  Antisense strand to SEQ ID NO: 288320
acucucagagagaagggag

SEQ ID NO: 288322 - RNA, 19 nt, Artificial Sequence
  Description of Artificial Sequence: Synthetic oligonucleotide
  Sense strand starting at position 217 of SEQ ID NO: 3707
cgagguaccaguuacgaca

SEQ ID NO: 288323 - RNA, 19 nt, Artificial Sequence
  Description of Artificial Sequence: Synthetic oligonucleotide
  Antisense strand to SEQ ID NO: 288322
ugucguaacugguaccucg

SEQ ID NO: 288324 - RNA, 19 nt, Artificial Sequence
  Description of Artificial Sequence: Synthetic oligonucleotide
  Sense strand starting at position 236 of SEQ ID NO: 3707
gucucagagucacugcaaa

SEQ ID NO: 288325 - RNA, 19 nt, Artificial Sequence
  Description of Artificial Sequence: Synthetic oligonucleotide
  Antisense strand to SEQ ID NO: 288324
uuugcagugacucugagac

SEQ ID NO: 288326 - RNA, 19 nt, Artificial Sequence
  Description of Artificial Sequence: Synthetic oligonucleotide
  Sense strand starting at position 372 of SEQ ID NO: 3707
guuggcauuucuccaaauu

SEQ ID NO: 288327 - RNA, 19 nt, Artificial Sequence
  Description of Artificial Sequence: Synthetic oligonucleotide
  Antisense strand to SEQ ID NO: 288326
aauuuggagaaaugccaac

SEQ ID NO: 288328 - RNA, 19 nt, Artificial Sequence
  Description of Artificial Sequence: Synthetic oligonucleotide
  Sense strand starting at position 551 of SEQ ID NO: 3707
aaaugagcaucuccugagu

SEQ ID NO: 288329 - RNA, 19 nt, Artificial Sequence
  Description of Artificial Sequence: Synthetic oligonucleotide
  Antisense strand to SEQ ID NO: 288328
acucaggagaugcucauuu

SEQ ID NO: 288330 - RNA, 19 nt, Artificial Sequence
  Description of Artificial Sequence: Synthetic oligonucleotide
  Sense strand starting at position 556 of SEQ ID NO: 3707
agcaucuccugagugucaa

SEQ ID NO: 288331 - RNA, 19 nt, Artificial Sequence
  Description of Artificial Sequence: Synthetic oligonucleotide
  Antisense strand to SEQ ID NO: 288330
uugacacucaggagaugcu

SEQ ID NO: 288332 - RNA, 19 nt, Artificial Sequence
  Description of Artificial Sequence: Synthetic oligonucleotide
  Sense strand starting at position 659 of SEQ ID NO: 3707
gagacuugcccaggacaga

SEQ ID NO: 288333 - RNA, 19 nt, Artificial Sequence
  Description of Artificial Sequence: Synthetic oligonucleotide
  Antisense strand to SEQ ID NO: 288332
ucuguccugggcaagucuc

SEQ ID NO: 288334 - RNA, 19 nt, Artificial Sequence
  Description of Artificial Sequence: Synthetic oligonucleotide
  Sense strand starting at position 846 of SEQ ID NO: 3707
ggccacucucuuuaucaga

SEQ ID NO: 288335 - RNA, 19 nt, Artificial Sequence
  Description of Artificial Sequence: Synthetic oligonucleotide
  Antisense strand to SEQ ID NO: 288334
ucugauaaagagaguggcc

SEQ ID NO: 288336 - RNA, 19 nt, Artificial Sequence
  Description of Artificial Sequence: Synthetic oligonucleotide
  Sense strand starting at position 897 of SEQ ID NO: 3707
aggaauuucuguuggaaag

SEQ ID NO: 288337 - RNA, 19 nt, Artificial Sequence
  Description of Artificial Sequence: Synthetic oligonucleotide
  Antisense strand to SEQ ID NO: 288336
cuuuccaacagaaauuccu

SEQ ID NO: 288338 - RNA, 19 nt, Artificial Sequence
  Description of Artificial Sequence: Synthetic oligonucleotide
  Sense strand starting at position 1237 of SEQ ID NO: 3707
ucugacuugcagcaagaau

SEQ ID NO: 288339 - RNA, 19 nt, Artificial Sequence
  Description of Artificial Sequence: Synthetic oligonucleotide
  Antisense strand to SEQ ID NO: 288338
auucuugcugcaagucaga

SEQ ID NO: 288340 - RNA, 19 nt, Artificial Sequence
  Description of Artificial Sequence: Synthetic oligonucleotide
  Sense strand starting at position 1285 of SEQ ID NO: 3707
uccuuucuuugucuguaaa

SEQ ID NO: 288341 - RNA, 19 nt, Artificial Sequence
  Description of Artificial Sequence: Synthetic oligonucleotide
  Antisense strand to SEQ ID NO: 288340
uuuacagacaaagaaagga

SEQ ID NO: 288342 - RNA, 19 nt, Artificial Sequence
  Description of Artificial Sequence: Synthetic oligonucleotide
  Sense strand starting at position 1286 of SEQ ID NO: 3707
ccuuucuuugucuguaaag

SEQ ID NO: 288343 - RNA, 19 nt, Artificial Sequence
  Description of Artificial Sequence: Synthetic oligonucleotide
  Antisense strand to SEQ ID NO: 288342
cuuuacagacaaagaaagg

SEQ ID NO: 288344 - RNA, 19 nt, Artificial Sequence
  Description of Artificial Sequence: Synthetic oligonucleotide
  Sense strand starting at position 1297 of SEQ ID NO: 3707
cuguaaagugacggugaua

SEQ ID NO: 288345 - RNA, 19 nt, Artificial Sequence
  Description of Artificial Sequence: Synthetic oligonucleotide
  Antisense strand to SEQ ID NO: 288344
uaucaccgucacuuuacag

SEQ ID NO: 288346 - RNA, 19 nt, Artificial Sequence
  Description of Artificial Sequence: Synthetic oligonucleotide
  Sense strand starting at position 1401 of SEQ ID NO: 3707
gcuccagaauuuccgugua

SEQ ID NO: 288347 - RNA, 19 nt, Artificial Sequence
  Description of Artificial Sequence: Synthetic oligonucleotide
  Antisense strand to SEQ ID NO: 288346
uacacggaaauucuggagc

SEQ ID NO: 288348 - RNA, 19 nt, Artificial Sequence
  Description of Artificial Sequence: Synthetic oligonucleotide
  Sense strand starting at position 1581 of SEQ ID NO: 3707
gucccuauuccucauggga

SEQ ID NO: 288349 - RNA, 19 nt, Artificial Sequence
  Description of Artificial Sequence: Synthetic oligonucleotide
  Antisense strand to SEQ ID NO: 288348
ucccaugaggaauagggac

SEQ ID NO: 288350 - RNA, 19 nt, Artificial Sequence
  Description of Artificial Sequence: Synthetic oligonucleotide
  Sense strand starting at position 2312 of SEQ ID NO: 3707
ccacucucggacugaaagu

SEQ ID NO: 288351 - RNA, 19 nt, Artificial Sequence
  Description of Artificial Sequence: Synthetic oligonucleotide
  Antisense strand to SEQ ID NO: 288350
acuuucaguccgagagugg

SEQ ID NO: 288352 - RNA, 19 nt, Artificial Sequence
  Description of Artificial Sequence: Synthetic oligonucleotide
  Sense strand starting at position 2319 of SEQ ID NO: 3707
cggacugaaaguugucaca

SEQ ID NO: 288353 - RNA, 19 nt, Artificial Sequence
  Description of Artificial Sequence: Synthetic oligonucleotide
  Antisense strand to SEQ ID NO: 288352
ugugacaacuuucaguccg

SEQ ID NO: 288354 - RNA, 19 nt, Artificial Sequence
  Description of Artificial Sequence: Synthetic oligonucleotide
  Sense strand starting at position 2321 of SEQ ID NO: 3707
gacugaaaguugucacaca

SEQ ID NO: 288355 - RNA, 19 nt, Artificial Sequence
  Description of Artificial Sequence: Synthetic oligonucleotide
  Antisense strand to SEQ ID NO: 288354
ugugugacaacuuucaguc

SEQ ID NO: 288356 - RNA, 19 nt, Artificial Sequence
  Description of Artificial Sequence: Synthetic oligonucleotide
  Sense strand starting at position 2419 of SEQ ID NO: 3707
cgcuaauuccaugaaguuu

SEQ ID NO: 288357 - RNA, 19 nt, Artificial Sequence
  Description of Artificial Sequence: Synthetic oligonucleotide
  Antisense strand to SEQ ID NO: 288356
aaacuucauggaauuagcg

SEQ ID NO: 288358 - RNA, 19 nt, Artificial Sequence
  Description of Artificial Sequence: Synthetic oligonucleotide
  Sense strand starting at position 2580 of SEQ ID NO: 3707
cuguguauccuggagguuu

SEQ ID NO: 288359 - RNA, 19 nt, Artificial Sequence
  Description of Artificial Sequence: Synthetic oligonucleotide
  Antisense strand to SEQ ID NO: 288358
aaaccuccaggauacacag

SEQ ID NO: 288360 - RNA, 19 nt, Artificial Sequence
  Description of Artificial Sequence: Synthetic oligonucleotide
  Sense strand starting at position 2713 of SEQ ID NO: 3707
aagagagucucaccauguu

SEQ ID NO: 288361 - RNA, 19 nt, Artificial Sequence
  Description of Artificial Sequence: Synthetic oligonucleotide
  Antisense strand to SEQ ID NO: 288360
aacauggugagacucucuu

SEQ ID NO: 288362 - RNA, 19 nt, Artificial Sequence
  Description of Artificial Sequence: Synthetic oligonucleotide
  Sense strand starting at position 3173 of SEQ ID NO: 3707
ggaagagacuauuaguaaa

SEQ ID NO: 288363 - RNA, 19 nt, Artificial Sequence
  Description of Artificial Sequence: Synthetic oligonucleotide
  Antisense strand to SEQ ID NO: 288362
uuuacuaauagucucuucc

SEQ ID NO: 288364 - RNA, 19 nt, Artificial Sequence
  Description of Artificial Sequence: Synthetic oligonucleotide
  Sense strand starting at position 3176 of SEQ ID NO: 3707
agagacuauuaguaaauug

SEQ ID NO: 288365 - RNA, 19 nt, Artificial Sequence
  Description of Artificial Sequence: Synthetic oligonucleotide
  Antisense strand to SEQ ID NO: 288364
caauuuacuaauagucucu

SEQ ID NO: 288366 - RNA, 19 nt, Artificial Sequence
  Description of Artificial Sequence: Synthetic oligonucleotide
  Sense strand starting at position 3187 of SEQ ID NO: 3707
guaaauugaggcugguaaa

SEQ ID NO: 288367 - RNA, 19 nt, Artificial Sequence
  Description of Artificial Sequence: Synthetic oligonucleotide
  Antisense strand to SEQ ID NO: 288366
uuuaccagccucaauuuac

SEQ ID NO: 288368 - RNA, 19 nt, Artificial Sequence
  Description of Artificial Sequence: Synthetic oligonucleotide
  Sense strand starting at position 3188 of SEQ ID NO: 3707
uaaauugaggcugguaaau

SEQ ID NO: 288369 - RNA, 19 nt, Artificial Sequence
  Description of Artificial Sequence: Synthetic oligonucleotide
  Antisense strand to SEQ ID NO: 288368
auuuaccagccucaauuua

SEQ ID NO: 288370 - RNA, 19 nt, Artificial Sequence
  Description of Artificial Sequence: Synthetic oligonucleotide
  Sense strand starting at position 3343 of SEQ ID NO: 3707
ggccuaaugaaaugugcaa

SEQ ID NO: 288371 - RNA, 19 nt, Artificial Sequence
  Description of Artificial Sequence: Synthetic oligonucleotide
  Antisense strand to SEQ ID NO: 288370
uugcacauuucauuaggcc

SEQ ID NO: 288372 - RNA, 19 nt, Artificial Sequence
  Description of Artificial Sequence: Synthetic oligonucleotide
  Sense strand starting at position 3350 of SEQ ID NO: 3707
ugaaaugugcaaggauguu

SEQ ID NO: 288373 - RNA, 19 nt, Artificial Sequence
  Description of Artificial Sequence: Synthetic oligonucleotide
  Antisense strand to SEQ ID NO: 288372
aacauccuugcacauuuca

SEQ ID NO: 288374 - RNA, 19 nt, Artificial Sequence
  Description of Artificial Sequence: Synthetic oligonucleotide
  Sense strand starting at position 3449 of SEQ ID NO: 3707
ggcagcagucauuacuaua

SEQ ID NO: 288375 - RNA, 19 nt, Artificial Sequence
  Description of Artificial Sequence: Synthetic oligonucleotide
  Antisense strand to SEQ ID NO: 288374
uauaguaaugacugcugcc

SEQ ID NO: 288376 - RNA, 19 nt, Artificial Sequence
  Description of Artificial Sequence: Synthetic oligonucleotide
  Sense strand starting at position 3579 of SEQ ID NO: 3707
gccagcuuacaugauugau

SEQ ID NO: 288377 - RNA, 19 nt, Artificial Sequence
  Description of Artificial Sequence: Synthetic oligonucleotide
  Antisense strand to SEQ ID NO: 288376
aucaaucauguaagcuggc

SEQ ID NO: 288378 - RNA, 19 nt, Artificial Sequence
  Description of Artificial Sequence: Synthetic oligonucleotide
  Sense strand starting at position 3582 of SEQ ID NO: 3707
agcuuacaugauugaugca

SEQ ID NO: 288379 - RNA, 19 nt, Artificial Sequence
  Description of Artificial Sequence: Synthetic oligonucleotide
  Antisense strand to SEQ ID NO: 288378
ugcaucaaucauguaagcu

SEQ ID NO: 288380 - RNA, 19 nt, Artificial Sequence
  Description of Artificial Sequence: Synthetic oligonucleotide
  Sense strand starting at position 3592 of SEQ ID NO: 3707
auugaugcauuuggaauaa

SEQ ID NO: 288381 - RNA, 19 nt, Artificial Sequence
  Description of Artificial Sequence: Synthetic oligonucleotide
  Antisense strand to SEQ ID NO: 288380
uuauuccaaaugcaucaau

SEQ ID NO: 288382 - RNA, 19 nt, Artificial Sequence
  Description of Artificial Sequence: Synthetic oligonucleotide
  Sense strand starting at position 3747 of SEQ ID NO: 3707
acuguugucucucuaauuc

SEQ ID NO: 288383 - RNA, 19 nt, Artificial Sequence
  Description of Artificial Sequence: Synthetic oligonucleotide
  Antisense strand to SEQ ID NO: 288382
gaauuagagagacaacagu

SEQ ID NO: 288384 - RNA, 19 nt, Artificial Sequence
  Description of Artificial Sequence: Synthetic oligonucleotide
  Sense strand starting at position 3832 of SEQ ID NO: 3707
aagugauauuuggccgcau

SEQ ID NO: 288385 - RNA, 19 nt, Artificial Sequence
  Description of Artificial Sequence: Synthetic oligonucleotide
  Antisense strand to SEQ ID NO: 288384
augcggccaaauaucacuu

SEQ ID NO: 288386 - RNA, 19 nt, Artificial Sequence
  Description of Artificial Sequence: Synthetic oligonucleotide
  Sense strand starting at position 3833 of SEQ ID NO: 3707
agugauauuuggccgcauc

SEQ ID NO: 288387 - RNA, 19 nt, Artificial Sequence
  Description of Artificial Sequence: Synthetic oligonucleotide
  Antisense strand to SEQ ID NO: 288386
gaugcggccaaauaucacu

SEQ ID NO: 288388 - RNA, 19 nt, Artificial Sequence
  Description of Artificial Sequence: Synthetic oligonucleotide
  Sense strand starting at position 3834 of SEQ ID NO: 3707
gugauauuuggccgcaucu

SEQ ID NO: 288389 - RNA, 19 nt, Artificial Sequence
  Description of Artificial Sequence: Synthetic oligonucleotide
  Antisense strand to SEQ ID NO: 288388
agaugcggccaaauaucac

SEQ ID NO: 288390 - RNA, 19 nt, Artificial Sequence
  Description of Artificial Sequence: Synthetic oligonucleotide
  Sense strand starting at position 3836 of SEQ ID NO: 3707
gauauuuggccgcaucugu

SEQ ID NO: 288391 - RNA, 19 nt, Artificial Sequence
  Description of Artificial Sequence: Synthetic oligonucleotide
  Antisense strand to SEQ ID NO: 288390
acagaugcggccaaauauc

SEQ ID NO: 288392 - RNA, 19 nt, Artificial Sequence
  Description of Artificial Sequence: Synthetic oligonucleotide
  Sense strand starting at position 3844 of SEQ ID NO: 3707
gccgcaucugucuugaucu

SEQ ID NO: 288393 - RNA, 19 nt, Artificial Sequence
  Description of Artificial Sequence: Synthetic oligonucleotide
  Antisense strand to SEQ ID NO: 288392
agaucaagacagaugcggc

SEQ ID NO: 288394 - RNA, 19 nt, Artificial Sequence
  Description of Artificial Sequence: Synthetic oligonucleotide
  Sense strand starting at position 3846 of SEQ ID NO: 3707
cgcaucugucuugaucuua

SEQ ID NO: 288395 - RNA, 19 nt, Artificial Sequence
  Description of Artificial Sequence: Synthetic oligonucleotide
  Antisense strand to SEQ ID NO: 288394
uaagaucaagacagaugcg

SEQ ID NO: 288396 - RNA, 19 nt, Artificial Sequence
  Description of Artificial Sequence: Synthetic oligonucleotide
  Sense strand starting at position 3936 of SEQ ID NO: 3707
cuaaauauccaucgcaaag

SEQ ID NO: 288397 - RNA, 19 nt, Artificial Sequence
  Description of Artificial Sequence: Synthetic oligonucleotide
  Antisense strand to SEQ ID NO: 288396
cuuugcgauggauauuuag

SEQ ID NO: 288398 - RNA, 19 nt, Artificial Sequence
  Description of Artificial Sequence: Synthetic oligonucleotide
  Sense strand starting at position 3948 of SEQ ID NO: 3707
cgcaaagugccugagguaa

SEQ ID NO: 288399 - RNA, 19 nt, Artificial Sequence
  Description of Artificial Sequence: Synthetic oligonucleotide
  Antisense strand to SEQ ID NO: 288398
uuaccucaggcacuuugcg

SEQ ID NO: 288400 - RNA, 19 nt, Artificial Sequence
  Description of Artificial Sequence: Synthetic oligonucleotide
  Sense strand starting at position 26 of SEQ ID NO: 3709
gcacgagucaccugggaag

SEQ ID NO: 288401 - RNA, 19 nt, Artificial Sequence
  Description of Artificial Sequence: Synthetic oligonucleotide
  Antisense strand to SEQ ID NO: 288400
cuucccaggugacucgugc

SEQ ID NO: 288402 - RNA, 19 nt, Artificial Sequence
  Description of Artificial Sequence: Synthetic oligonucleotide
  Sense strand starting at position 60 of SEQ ID NO: 3709
acacaucggucucagaaac

SEQ ID NO: 288403 - RNA, 19 nt, Artificial Sequence
  Description of Artificial Sequence: Synthetic oligonucleotide
  Antisense strand to SEQ ID NO: 288402
guuucugagaccgaugugu

SEQ ID NO: 288404 - RNA, 19 nt, Artificial Sequence
  Description of Artificial Sequence: Synthetic oligonucleotide
  Sense strand starting at position 190 of SEQ ID NO: 3709
ugcugagacuuguccagau

SEQ ID NO: 288405 - RNA, 19 nt, Artificial Sequence
  Description of Artificial Sequence: Synthetic oligonucleotide
  Antisense strand to SEQ ID NO: 288404
aucuggacaagucucagca

SEQ ID NO: 288406 - RNA, 19 nt, Artificial Sequence
  Description of Artificial Sequence: Synthetic oligonucleotide
  Sense strand starting at position 194 of SEQ ID NO: 3709
gagacuuguccagaugcca

SEQ ID NO: 288407 - RNA, 19 nt, Artificial Sequence
  Description of Artificial Sequence: Synthetic oligonucleotide
  Antisense strand to SEQ ID NO: 288406
uggcaucuggacaagucuc

SEQ ID NO: 288408 - RNA, 19 nt, Artificial Sequence
  Description of Artificial Sequence: Synthetic oligonucleotide
  Sense strand starting at position 210 of SEQ ID NO: 3709
ccacauuagcaguggagaa

SEQ ID NO: 288409 - RNA, 19 nt, Artificial Sequence
  Description of Artificial Sequence: Synthetic oligonucleotide
  Antisense strand to SEQ ID NO: 288408
uucuccacugcuaaugugg

SEQ ID NO: 288410 - RNA, 19 nt, Artificial Sequence
  Description of Artificial Sequence: Synthetic oligonucleotide
  Sense strand starting at position 294 of SEQ ID NO: 3709
agucgaacuguccagaugu

SEQ ID NO: 288411 - RNA, 19 nt, Artificial Sequence
  Description of Artificial Sequence: Synthetic oligonucleotide
  Antisense strand to SEQ ID NO: 288410
acaucuggacaguucgacu

SEQ ID NO: 288412 - RNA, 19 nt, Artificial Sequence
  Description of Artificial Sequence: Synthetic oligonucleotide
  Sense strand starting at position 1208 of SEQ ID NO: 3709
ccgcgggucugguuugaau

SEQ ID NO: 288413 - RNA, 19 nt, Artificial Sequence
  Description of Artificial Sequence: Synthetic oligonucleotide
  Antisense strand to SEQ ID NO: 288412
auucaaaccagacccgcgg

SEQ ID NO: 288414 - RNA, 19 nt, Artificial Sequence
  Description of Artificial Sequence: Synthetic oligonucleotide
  Sense strand starting at position 1209 of SEQ ID NO: 3709
cgcgggucugguuugaauu

SEQ ID NO: 288415 - RNA, 19 nt, Artificial Sequence
  Description of Artificial Sequence: Synthetic oligonucleotide
  Antisense strand to SEQ ID NO: 288414
aauucaaaccagacccgcg

SEQ ID NO: 288416 - RNA, 19 nt, Artificial Sequence
  Description of Artificial Sequence: Synthetic oligonucleotide
  Sense strand starting at position 1210 of SEQ ID NO: 3709
gcgggucugguuugaauua

SEQ ID NO: 288417 - RNA, 19 nt, Artificial Sequence
  Description of Artificial Sequence: Synthetic oligonucleotide
  Antisense strand to SEQ ID NO: 288416
uaauucaaaccagacccgc

SEQ ID NO: 288418 - RNA, 19 nt, Artificial Sequence
  Description of Artificial Sequence: Synthetic oligonucleotide
  Sense strand starting at position 1366 of SEQ ID NO: 3709
gacagauguggagacguuu

SEQ ID NO: 288419 - RNA, 19 nt, Artificial Sequence
  Description of Artificial Sequence: Synthetic oligonucleotide
  Antisense strand to SEQ ID NO: 288418
aaacgucuccacaucuguc

SEQ ID NO: 288420 - RNA, 19 nt, Artificial Sequence
  Description of Artificial Sequence: Synthetic oligonucleotide
  Sense strand starting at position 1908 of SEQ ID NO: 3709
cgccgagcuccgccuuaua

SEQ ID NO: 288421 - RNA, 19 nt, Artificial Sequence
  Description of Artificial Sequence: Synthetic oligonucleotide
  Antisense strand to SEQ ID NO: 288420
uauaaggcggagcucggcg

SEQ ID NO: 288422 - RNA, 19 nt, Artificial Sequence
  Description of Artificial Sequence: Synthetic oligonucleotide
  Sense strand starting at position 1911 of SEQ ID NO: 3709
cgagcuccgccuuauaaua

SEQ ID NO: 288423 - RNA, 19 nt, Artificial Sequence
  Description of Artificial Sequence: Synthetic oligonucleotide
  Antisense strand to SEQ ID NO: 288422
uauuauaaggcggagcucg

SEQ ID NO: 288424 - RNA, 19 nt, Artificial Sequence
  Description of Artificial Sequence: Synthetic oligonucleotide
  Sense strand starting at position 1913 of SEQ ID NO: 3709
agcuccgccuuauaauaaa

SEQ ID NO: 288425 - RNA, 19 nt, Artificial Sequence
  Description of Artificial Sequence: Synthetic oligonucleotide
  Antisense strand to SEQ ID NO: 288424
uuuauuauaaggcggagcu

SEQ ID NO: 288426 - RNA, 19 nt, Artificial Sequence
  Description of Artificial Sequence: Synthetic oligonucleotide
  Sense strand starting at position 2521 of SEQ ID NO: 3709
ccacaaagugcuggagacu

SEQ ID NO: 288427 - RNA, 19 nt, Artificial Sequence
  Description of Artificial Sequence: Synthetic oligonucleotide
  Antisense strand to SEQ ID NO: 288426
agucuccagcacuuugugg

SEQ ID NO: 288428 - RNA, 19 nt, Artificial Sequence
  Description of Artificial Sequence: Synthetic oligonucleotide
  Sense strand starting at position 2601 of SEQ ID NO: 3709
ggcggaguucgcagcguuu

SEQ ID NO: 288429 - RNA, 19 nt, Artificial Sequence
  Description of Artificial Sequence: Synthetic oligonucleotide
  Antisense strand to SEQ ID NO: 288428
aaacgcugcgaacuccgcc

SEQ ID NO: 288430 - RNA, 19 nt, Artificial Sequence
  Description of Artificial Sequence: Synthetic oligonucleotide
  Sense strand starting at position 2727 of SEQ ID NO: 3709
aguugcugcuccuucgaga

SEQ ID NO: 288431 - RNA, 19 nt, Artificial Sequence
  Description of Artificial Sequence: Synthetic oligonucleotide
  Antisense strand to SEQ ID NO: 288430
ucucgaaggagcagcaacu

SEQ ID NO: 288432 - RNA, 19 nt, Artificial Sequence
  Description of Artificial Sequence: Synthetic oligonucleotide
  Sense strand starting at position 2728 of SEQ ID NO: 3709
guugcugcuccuucgagau

SEQ ID NO: 288433 - RNA, 19 nt, Artificial Sequence
  Description of Artificial Sequence: Synthetic oligonucleotide
  Antisense strand to SEQ ID NO: 288432
aucucgaaggagcagcaac

SEQ ID NO: 288434 - RNA, 19 nt, Artificial Sequence
  Description of Artificial Sequence: Synthetic oligonucleotide
  Sense strand starting at position 2866 of SEQ ID NO: 3709
gagagauggugccaaacga

SEQ ID NO: 288435 - RNA, 19 nt, Artificial Sequence
  Description of Artificial Sequence: Synthetic oligonucleotide
  Antisense strand to SEQ ID NO: 288434
ucguuuggcaccaucucuc

SEQ ID NO: 288436 - RNA, 19 nt, Artificial Sequence
  Description of Artificial Sequence: Synthetic oligonucleotide
  Sense strand starting at position 2990 of SEQ ID NO: 3709
ucgggaaguguccaguguu

SEQ ID NO: 288437 - RNA, 19 nt, Artificial Sequence
  Description of Artificial Sequence: Synthetic oligonucleotide
  Antisense strand to SEQ ID NO: 288436
aacacuggacacuucccga

SEQ ID NO: 288438 - RNA, 19 nt, Artificial Sequence
  Description of Artificial Sequence: Synthetic oligonucleotide
  Sense strand starting at position 2991 of SEQ ID NO: 3709
cgggaaguguccaguguuc

SEQ ID NO: 288439 - RNA, 19 nt, Artificial Sequence
  Description of Artificial Sequence: Synthetic oligonucleotide
  Antisense strand to SEQ ID NO: 288438
gaacacuggacacuucccg

SEQ ID NO: 288440 - RNA, 19 nt, Artificial Sequence
  Description of Artificial Sequence: Synthetic oligonucleotide
  Sense strand starting at position 2993 of SEQ ID NO: 3709
ggaaguguccaguguuccu

SEQ ID NO: 288441 - RNA, 19 nt, Artificial Sequence
  Description of Artificial Sequence: Synthetic oligonucleotide
  Antisense strand to SEQ ID NO: 288440
aggaacacuggacacuucc

SEQ ID NO: 288442 - RNA, 19 nt, Artificial Sequence
  Description of Artificial Sequence: Synthetic oligonucleotide
  Sense strand starting at position 2998 of SEQ ID NO: 3709
uguccaguguuccucuuua

SEQ ID NO: 288443 - RNA, 19 nt, Artificial Sequence
  Description of Artificial Sequence: Synthetic oligonucleotide
  Antisense strand to SEQ ID NO: 288442
uaaagaggaacacuggaca

SEQ ID NO: 288444 - RNA, 19 nt, Artificial Sequence
  Description of Artificial Sequence: Synthetic oligonucleotide
  Sense strand starting at position 3193 of SEQ ID NO: 3709
gcaccuguuugaccucaaa

SEQ ID NO: 288445 - RNA, 19 nt, Artificial Sequence
  Description of Artificial Sequence: Synthetic oligonucleotide
  Antisense strand to SEQ ID NO: 288444
uuugaggucaaacaggugc

SEQ ID NO: 288446 - RNA, 19 nt, Artificial Sequence
  Description of Artificial Sequence: Synthetic oligonucleotide
  Sense strand starting at position 3301 of SEQ ID NO: 3709
cgcugagugccugagugau

SEQ ID NO: 288447 - RNA, 19 nt, Artificial Sequence
  Description of Artificial Sequence: Synthetic oligonucleotide
  Antisense strand to SEQ ID NO: 288446
aucacucaggcacucagcg

SEQ ID NO: 288448 - RNA, 19 nt, Artificial Sequence
  Description of Artificial Sequence: Synthetic oligonucleotide
  Sense strand starting at position 3314 of SEQ ID NO: 3709
agugauggauggucucaca

SEQ ID NO: 288449 - RNA, 19 nt, Artificial Sequence
  Description of Artificial Sequence: Synthetic oligonucleotide
  Antisense strand to SEQ ID NO: 288448
ugugagaccauccaucacu

SEQ ID NO: 288450 - RNA, 19 nt, Artificial Sequence
  Description of Artificial Sequence: Synthetic oligonucleotide
  Sense strand starting at position 3317 of SEQ ID NO: 3709
gauggauggucucacagca

SEQ ID NO: 288451 - RNA, 19 nt, Artificial Sequence
  Description of Artificial Sequence: Synthetic oligonucleotide
  Antisense strand to SEQ ID NO: 288450
ugcugugagaccauccauc

SEQ ID NO: 288452 - RNA, 19 nt, Artificial Sequence
  Description of Artificial Sequence: Synthetic oligonucleotide
  Sense strand starting at position 3364 of SEQ ID NO: 3709
aggagucccuguggauuaa

SEQ ID NO: 288453 - RNA, 19 nt, Artificial Sequence
  Description of Artificial Sequence: Synthetic oligonucleotide
  Antisense strand to SEQ ID NO: 288452
uuaauccacagggacuccu

SEQ ID NO: 288454 - RNA, 19 nt, Artificial Sequence
  Description of Artificial Sequence: Synthetic oligonucleotide
  Sense strand starting at position 3365 of SEQ ID NO: 3709
ggagucccuguggauuaaa

SEQ ID NO: 288455 - RNA, 19 nt, Artificial Sequence
  Description of Artificial Sequence: Synthetic oligonucleotide
  Antisense strand to SEQ ID NO: 288454
uuuaauccacagggacucc

SEQ ID NO: 288456 - RNA, 19 nt, Artificial Sequence
  Description of Artificial Sequence: Synthetic oligonucleotide
  Sense strand starting at position 3398 of SEQ ID NO: 3709
agguucuaccucuaccaga

SEQ ID NO: 288457 - RNA, 19 nt, Artificial Sequence
  Description of Artificial Sequence: Synthetic oligonucleotide
  Antisense strand to SEQ ID NO: 288456
ucugguagagguagaaccu

SEQ ID NO: 288458 - RNA, 19 nt, Artificial Sequence
  Description of Artificial Sequence: Synthetic oligonucleotide
  Sense strand starting at position 27 of SEQ ID NO: 3708
agucgaacuguccagaugu

SEQ ID NO: 288459 - RNA, 19 nt, Artificial Sequence
  Description of Artificial Sequence: Synthetic oligonucleotide
  Antisense strand to SEQ ID NO: 288458
acaucuggacaguucgacu

SEQ ID NO: 288460 - RNA, 19 nt, Artificial Sequence
  Description of Artificial Sequence: Synthetic oligonucleotide
  Sense strand starting at position 941 of SEQ ID NO: 3708
ccgcgggucugguuugaau

SEQ ID NO: 288461 - RNA, 19 nt, Artificial Sequence
  Description of Artificial Sequence: Synthetic oligonucleotide
  Antisense strand to SEQ ID NO: 288460
auucaaaccagacccgcgg

SEQ ID NO: 288462 - RNA, 19 nt, Artificial Sequence
  Description of Artificial Sequence: Synthetic oligonucleotide
  Sense strand starting at position 942 of SEQ ID NO: 3708
cgcgggucugguuugaauu

SEQ ID NO: 288463 - RNA, 19 nt, Artificial Sequence
  Description of Artificial Sequence: Synthetic oligonucleotide
  Antisense strand to SEQ ID NO: 288462
aauucaaaccagacccgcg

SEQ ID NO: 288464 - RNA, 19 nt, Artificial Sequence
  Description of Artificial Sequence: Synthetic oligonucleotide
  Sense strand starting at position 943 of SEQ ID NO: 3708
gcgggucugguuugaauua

SEQ ID NO: 288465 - RNA, 19 nt, Artificial Sequence
  Description of Artificial Sequence: Synthetic oligonucleotide
  Antisense strand to SEQ ID NO: 288464
uaauucaaaccagacccgc

SEQ ID NO: 288466 - RNA, 19 nt, Artificial Sequence
  Description of Artificial Sequence: Synthetic oligonucleotide
  Sense strand starting at position 1099 of SEQ ID NO: 3708
gacagauguggagacguuu

SEQ ID NO: 288467 - RNA, 19 nt, Artificial Sequence
  Description of Artificial Sequence: Synthetic oligonucleotide
  Antisense strand to SEQ ID NO: 288466
aaacgucuccacaucuguc

SEQ ID NO: 288468 - RNA, 19 nt, Artificial Sequence
  Description of Artificial Sequence: Synthetic oligonucleotide
  Sense strand starting at position 1641 of SEQ ID NO: 3708
cgccgagcuccgccuuaua

SEQ ID NO: 288469 - RNA, 19 nt, Artificial Sequence
  Description of Artificial Sequence: Synthetic oligonucleotide
  Antisense strand to SEQ ID NO: 288468
uauaaggcggagcucggcg

SEQ ID NO: 288470 - RNA, 19 nt, Artificial Sequence
  Description of Artificial Sequence: Synthetic oligonucleotide
  Sense strand starting at position 1644 of SEQ ID NO: 3708
cgagcuccgccuuauaaua

SEQ ID NO: 288471 - RNA, 19 nt, Artificial Sequence
  Description of Artificial Sequence: Synthetic oligonucleotide
  Antisense strand to SEQ ID NO: 288470
uauuauaaggcggagcucg

SEQ ID NO: 288472 - RNA, 19 nt, Artificial Sequence
  Description of Artificial Sequence: Synthetic oligonucleotide
  Sense strand starting at position 1646 of SEQ ID NO: 3708
agcuccgccuuauaauaaa

SEQ ID NO: 288473 - RNA, 19 nt, Artificial Sequence
  Description of Artificial Sequence: Synthetic oligonucleotide
  Antisense strand to SEQ ID NO: 288472
uuuauuauaaggcggagcu

SEQ ID NO: 288474 - RNA, 19 nt, Artificial Sequence
  Description of Artificial Sequence: Synthetic oligonucleotide
  Sense strand starting at position 2254 of SEQ ID NO: 3708
ccacaaagugcuggagacu

SEQ ID NO: 288475 - RNA, 19 nt, Artificial Sequence
  Description of Artificial Sequence: Synthetic oligonucleotide
  Antisense strand to SEQ ID NO: 288474
agucuccagcacuuugugg

SEQ ID NO: 288476 - RNA, 19 nt, Artificial Sequence
  Description of Artificial Sequence: Synthetic oligonucleotide
  Sense strand starting at position 2334 of SEQ ID NO: 3708
ggcggaguucgcagcguuu

SEQ ID NO: 288477 - RNA, 19 nt, Artificial Sequence
  Description of Artificial Sequence: Synthetic oligonucleotide
  Antisense strand to SEQ ID NO: 288476
aaacgcugcgaacuccgcc

SEQ ID NO: 288478 - RNA, 19 nt, Artificial Sequence
  Description of Artificial Sequence: Synthetic oligonucleotide
  Sense strand starting at position 2460 of SEQ ID NO: 3708
aguugcugcuccuucgaga

SEQ ID NO: 288479 - RNA, 19 nt, Artificial Sequence
  Description of Artificial Sequence: Synthetic oligonucleotide
  Antisense strand to SEQ ID NO: 288478
ucucgaaggagcagcaacu

SEQ ID NO: 288480 - RNA, 19 nt, Artificial Sequence
  Description of Artificial Sequence: Synthetic oligonucleotide
  Sense strand starting at position 2461 of SEQ ID NO: 3708
guugcugcuccuucgagau

SEQ ID NO: 288481 - RNA, 19 nt, Artificial Sequence
  Description of Artificial Sequence: Synthetic oligonucleotide
  Antisense strand to SEQ ID NO: 288480
aucucgaaggagcagcaac

SEQ ID NO: 288482 - RNA, 19 nt, Artificial Sequence
  Description of Artificial Sequence: Synthetic oligonucleotide
  Sense strand starting at position 2599 of SEQ ID NO: 3708
gagagauggugccaaacga

SEQ ID NO: 288483 - RNA, 19 nt, Artificial Sequence
  Description of Artificial Sequence: Synthetic oligonucleotide
  Antisense strand to SEQ ID NO: 288482
ucguuuggcaccaucucuc

SEQ ID NO: 288484 - RNA, 19 nt, Artificial Sequence
  Description of Artificial Sequence: Synthetic oligonucleotide
  Sense strand starting at position 2723 of SEQ ID NO: 3708
ucgggaaguguccaguguu

SEQ ID NO: 288485 - RNA, 19 nt, Artificial Sequence
  Description of Artificial Sequence: Synthetic oligonucleotide
  Antisense strand to SEQ ID NO: 288484
aacacuggacacuucccga

SEQ ID NO: 288486 - RNA, 19 nt, Artificial Sequence
  Description of Artificial Sequence: Synthetic oligonucleotide
  Sense strand starting at position 2724 of SEQ ID NO: 3708
cgggaaguguccaguguuc

SEQ ID NO: 288487 - RNA, 19 nt, Artificial Sequence
  Description of Artificial Sequence: Synthetic oligonucleotide
  Antisense strand to SEQ ID NO: 288486
gaacacuggacacuucccg

SEQ ID NO: 288488 - RNA, 19 nt, Artificial Sequence
  Description of Artificial Sequence: Synthetic oligonucleotide
  Sense strand starting at position 2726 of SEQ ID NO: 3708
ggaaguguccaguguuccu

SEQ ID NO: 288489 - RNA, 19 nt, Artificial Sequence
  Description of Artificial Sequence: Synthetic oligonucleotide
  Antisense strand to SEQ ID NO: 288488
aggaacacuggacacuucc

SEQ ID NO: 288490 - RNA, 19 nt, Artificial Sequence
  Description of Artificial Sequence: Synthetic oligonucleotide
  Sense strand starting at position 2731 of SEQ ID NO: 3708
uguccaguguuccucuuua

SEQ ID NO: 288491 - RNA, 19 nt, Artificial Sequence
  Description of Artificial Sequence: Synthetic oligonucleotide
  Antisense strand to SEQ ID NO: 288490
uaaagaggaacacuggaca

SEQ ID NO: 288492 - RNA, 19 nt, Artificial Sequence
  Description of Artificial Sequence: Synthetic oligonucleotide
  Sense strand starting at position 2926 of SEQ ID NO: 3708
gcaccuguuugaccucaaa

SEQ ID NO: 288493 - RNA, 19 nt, Artificial Sequence
  Description of Artificial Sequence: Synthetic oligonucleotide
  Antisense strand to SEQ ID NO: 288492
uuugaggucaaacaggugc

SEQ ID NO: 288494 - RNA, 19 nt, Artificial Sequence
  Description of Artificial Sequence: Synthetic oligonucleotide
  Sense strand starting at position 3034 of SEQ ID NO: 3708
cgcugagugccugagugau

SEQ ID NO: 288495 - RNA, 19 nt, Artificial Sequence
  Description of Artificial Sequence: Synthetic oligonucleotide
  Antisense strand to SEQ ID NO: 288494
aucacucaggcacucagcg

SEQ ID NO: 288496 - RNA, 19 nt, Artificial Sequence
  Description of Artificial Sequence: Synthetic oligonucleotide
  Sense strand starting at position 3047 of SEQ ID NO: 3708
agugauggauggucucaca

SEQ ID NO: 288497 - RNA, 19 nt, Artificial Sequence
  Description of Artificial Sequence: Synthetic oligonucleotide
  Antisense strand to SEQ ID NO: 288496
ugugagaccauccaucacu

SEQ ID NO: 288498 - RNA, 19 nt, Artificial Sequence
  Description of Artificial Sequence: Synthetic oligonucleotide
  Sense strand starting at position 3050 of SEQ ID NO: 3708
gauggauggucucacagca

SEQ ID NO: 288499 - RNA, 19 nt, Artificial Sequence
  Description of Artificial Sequence: Synthetic oligonucleotide
  Antisense strand to SEQ ID NO: 288498
ugcugugagaccauccauc

SEQ ID NO: 288500 - RNA, 19 nt, Artificial Sequence
  Description of Artificial Sequence: Synthetic oligonucleotide
  Sense strand starting at position 3097 of SEQ ID NO: 3708
aggagucccuguggauuaa

SEQ ID NO: 288501 - RNA, 19 nt, Artificial Sequence
  Description of Artificial Sequence: Synthetic oligonucleotide
  Antisense strand to SEQ ID NO: 288500
uuaauccacagggacuccu

SEQ ID NO: 288502 - RNA, 19 nt, Artificial Sequence
  Description of Artificial Sequence: Synthetic oligonucleotide
  Sense strand starting at position 3098 of SEQ ID NO: 3708
ggagucccuguggauuaaa

SEQ ID NO: 288503 - RNA, 19 nt, Artificial Sequence
  Description of Artificial Sequence: Synthetic oligonucleotide
  Antisense strand to SEQ ID NO: 288502
uuuaauccacagggacucc

SEQ ID NO: 288504 - RNA, 19 nt, Artificial Sequence
  Description of Artificial Sequence: Synthetic oligonucleotide
  Sense strand starting at position 3131 of SEQ ID NO: 3708
agguucuaccucuaccaga

SEQ ID NO: 288505 - RNA, 19 nt, Artificial Sequence
  Description of Artificial Sequence: Synthetic oligonucleotide
  Antisense strand to SEQ ID NO: 288504
ucugguagagguagaaccu

SEQ ID NO: 288506 - RNA, 19 nt, Artificial Sequence
  Description of Artificial Sequence: Synthetic oligonucleotide
  Sense strand starting at position 3720 of SEQ ID NO: 3708
gugccuggcccuuauacuu

SEQ ID NO: 288507 - RNA, 19 nt, Artificial Sequence
  Description of Artificial Sequence: Synthetic oligonucleotide
  Antisense strand to SEQ ID NO: 288506
aaguauaagggccaggcac

SEQ ID NO: 288508 - RNA, 19 nt, Artificial Sequence
  Description of Artificial Sequence: Synthetic oligonucleotide
  Sense strand starting at position 3755 of SEQ ID NO: 3708
gugugaggcuuucucuaga

SEQ ID NO: 288509 - RNA, 19 nt, Artificial Sequence
  Description of Artificial Sequence: Synthetic oligonucleotide
  Antisense strand to SEQ ID NO: 288508
ucuagagaaagccucacac

SEQ ID NO: 288510 - RNA, 19 nt, Artificial Sequence
  Description of Artificial Sequence: Synthetic oligonucleotide
  Sense strand starting at position 3758 of SEQ ID NO: 3708
ugaggcuuucucuagaagu

SEQ ID NO: 288511 - RNA, 19 nt, Artificial Sequence
  Description of Artificial Sequence: Synthetic oligonucleotide
  Antisense strand to SEQ ID NO: 288510
acuucuagagaaagccuca

SEQ ID NO: 288512 - RNA, 19 nt, Artificial Sequence
  Description of Artificial Sequence: Synthetic oligonucleotide
  Sense strand starting at position 3760 of SEQ ID NO: 3708
aggcuuucucuagaaguag

SEQ ID NO: 288513 - RNA, 19 nt, Artificial Sequence
  Description of Artificial Sequence: Synthetic oligonucleotide
  Antisense strand to SEQ ID NO: 288512
cuacuucuagagaaagccu

SEQ ID NO: 288514 - RNA, 19 nt, Artificial Sequence
  Description of Artificial Sequence: Synthetic oligonucleotide
  Sense strand starting at position 3772 of SEQ ID NO: 3708
gaaguagagcucuggauua

SEQ ID NO: 288515 - RNA, 19 nt, Artificial Sequence
  Description of Artificial Sequence: Synthetic oligonucleotide
  Antisense strand to SEQ ID NO: 288514
uaauccagagcucuacuuc

SEQ ID NO: 288516 - RNA, 19 nt, Artificial Sequence
  Description of Artificial Sequence: Synthetic oligonucleotide
  Sense strand starting at position 3774 of SEQ ID NO: 3708
aguagagcucuggauuaua

SEQ ID NO: 288517 - RNA, 19 nt, Artificial Sequence
  Description of Artificial Sequence: Synthetic oligonucleotide
  Antisense strand to SEQ ID NO: 288516
uauaauccagagcucuacu

SEQ ID NO: 288518 - RNA, 19 nt, Artificial Sequence
  Description of Artificial Sequence: Synthetic oligonucleotide
  Sense strand starting at position 3782 of SEQ ID NO: 3708
ucuggauuauagguauaaa

SEQ ID NO: 288519 - RNA, 19 nt, Artificial Sequence
  Description of Artificial Sequence: Synthetic oligonucleotide
  Antisense strand to SEQ ID NO: 288518
uuuauaccuauaauccaga

SEQ ID NO: 288520 - RNA, 19 nt, Artificial Sequence
  Description of Artificial Sequence: Synthetic oligonucleotide
  Sense strand starting at position 3806 of SEQ ID NO: 3708
ucaacuuucucaggaauug

SEQ ID NO: 288521 - RNA, 19 nt, Artificial Sequence
  Description of Artificial Sequence: Synthetic oligonucleotide
  Antisense strand to SEQ ID NO: 288520
caauuccugagaaaguuga

SEQ ID NO: 288522 - RNA, 19 nt, Artificial Sequence
  Description of Artificial Sequence: Synthetic oligonucleotide
  Sense strand starting at position 3816 of SEQ ID NO: 3708
caggaauuguuguaagcaa

SEQ ID NO: 288523 - RNA, 19 nt, Artificial Sequence
  Description of Artificial Sequence: Synthetic oligonucleotide
  Antisense strand to SEQ ID NO: 288522
uugcuuacaacaauuccug

SEQ ID NO: 288524 - RNA, 19 nt, Artificial Sequence
  Description of Artificial Sequence: Synthetic oligonucleotide
  Sense strand starting at position 3844 of SEQ ID NO: 3708
gcaaauugcucuccaaagg

SEQ ID NO: 288525 - RNA, 19 nt, Artificial Sequence
  Description of Artificial Sequence: Synthetic oligonucleotide
  Antisense strand to SEQ ID NO: 288524
ccuuuggagagcaauuugc

SEQ ID NO: 288526 - RNA, 19 nt, Artificial Sequence
  Description of Artificial Sequence: Synthetic oligonucleotide
  Sense strand starting at position 3854 of SEQ ID NO: 3708
cuccaaagggcuuauagua

SEQ ID NO: 288527 - RNA, 19 nt, Artificial Sequence
  Description of Artificial Sequence: Synthetic oligonucleotide
  Antisense strand to SEQ ID NO: 288526
uacuauaagcccuuuggag

SEQ ID NO: 288528 - RNA, 19 nt, Artificial Sequence
  Description of Artificial Sequence: Synthetic oligonucleotide
  Sense strand starting at position 3859 of SEQ ID NO: 3708
aagggcuuauaguaauuua

SEQ ID NO: 288529 - RNA, 19 nt, Artificial Sequence
  Description of Artificial Sequence: Synthetic oligonucleotide
  Antisense strand to SEQ ID NO: 288528
uaaauuacuauaagcccuu

SEQ ID NO: 288530 - RNA, 19 nt, Artificial Sequence
  Description of Artificial Sequence: Synthetic oligonucleotide
  Sense strand starting at position 44 of SEQ ID NO: 3710
aaagaagacucccucgguu

SEQ ID NO: 288531 - RNA, 19 nt, Artificial Sequence
  Description of Artificial Sequence: Synthetic oligonucleotide
  Antisense strand to SEQ ID NO: 288530
aaccgagggagucuucuuu

SEQ ID NO: 288532 - RNA, 19 nt, Artificial Sequence
  Description of Artificial Sequence: Synthetic oligonucleotide
  Sense strand starting at position 46 of SEQ ID NO: 3710
agaagacucccucgguuua

SEQ ID NO: 288533 - RNA, 19 nt, Artificial Sequence
  Description of Artificial Sequence: Synthetic oligonucleotide
  Antisense strand to SEQ ID NO: 288532
uaaaccgagggagucuucu

SEQ ID NO: 288534 - RNA, 19 nt, Artificial Sequence
  Description of Artificial Sequence: Synthetic oligonucleotide
  Sense strand starting at position 47 of SEQ ID NO: 3710
gaagacucccucgguuuaa

SEQ ID NO: 288535 - RNA, 19 nt, Artificial Sequence
  Description of Artificial Sequence: Synthetic oligonucleotide
  Antisense strand to SEQ ID NO: 288534
uuaaaccgagggagucuuc

SEQ ID NO: 288536 - RNA, 19 nt, Artificial Sequence
  Description of Artificial Sequence: Synthetic oligonucleotide
  Sense strand starting at position 48 of SEQ ID NO: 3710
aagacucccucgguuuaaa

SEQ ID NO: 288537 - RNA, 19 nt, Artificial Sequence
  Description of Artificial Sequence: Synthetic oligonucleotide
  Antisense strand to SEQ ID NO: 288536
uuuaaaccgagggagucuu

SEQ ID NO: 288538 - RNA, 19 nt, Artificial Sequence
  Description of Artificial Sequence: Synthetic oligonucleotide
  Sense strand starting at position 74 of SEQ ID NO: 3710
uucuaaaucucucuuggga

SEQ ID NO: 288539 - RNA, 19 nt, Artificial Sequence
  Description of Artificial Sequence: Synthetic oligonucleotide
  Antisense strand to SEQ ID NO: 288538
ucccaagagagauuuagaa

SEQ ID NO: 288540 - RNA, 19 nt, Artificial Sequence
  Description of Artificial Sequence: Synthetic oligonucleotide
  Sense strand starting at position 453 of SEQ ID NO: 3710
agccuuugugacuauaacu

SEQ ID NO: 288541 - RNA, 19 nt, Artificial Sequence
  Description of Artificial Sequence: Synthetic oligonucleotide
  Antisense strand to SEQ ID NO: 288540
aguuauagucacaaaggcu

SEQ ID NO: 288542 - RNA, 19 nt, Artificial Sequence
  Description of Artificial Sequence: Synthetic oligonucleotide
  Sense strand starting at position 458 of SEQ ID NO: 3710
uugugacuauaacugauaa

SEQ ID NO: 288543 - RNA, 19 nt, Artificial Sequence
  Description of Artificial Sequence: Synthetic oligonucleotide
  Antisense strand to SEQ ID NO: 288542
uuaucaguuauagucacaa

SEQ ID NO: 288544 - RNA, 19 nt, Artificial Sequence
  Description of Artificial Sequence: Synthetic oligonucleotide
  Sense strand starting at position 555 of SEQ ID NO: 3710
ucuagugcauuugcuagaa

SEQ ID NO: 288545 - RNA, 19 nt, Artificial Sequence
  Description of Artificial Sequence: Synthetic oligonucleotide
  Antisense strand to SEQ ID NO: 288544
uucuagcaaaugcacuaga

SEQ ID NO: 288546 - RNA, 19 nt, Artificial Sequence
  Description of Artificial Sequence: Synthetic oligonucleotide
  Sense strand starting at position 670 of SEQ ID NO: 3710
uugauagccuuuguauaaa

SEQ ID NO: 288547 - RNA, 19 nt, Artificial Sequence
  Description of Artificial Sequence: Synthetic oligonucleotide
  Antisense strand to SEQ ID NO: 288546
uuuauacaaaggcuaucaa

SEQ ID NO: 288548 - RNA, 19 nt, Artificial Sequence
  Description of Artificial Sequence: Synthetic oligonucleotide
  Sense strand starting at position 678 of SEQ ID NO: 3710
cuuuguauaaagggauagu

SEQ ID NO: 288549 - RNA, 19 nt, Artificial Sequence
  Description of Artificial Sequence: Synthetic oligonucleotide
  Antisense strand to SEQ ID NO: 288548
acuaucccuuuauacaaag

SEQ ID NO: 288550 - RNA, 19 nt, Artificial Sequence
  Description of Artificial Sequence: Synthetic oligonucleotide
  Sense strand starting at position 762 of SEQ ID NO: 3710
augaacagccacugaauua

SEQ ID NO: 288551 - RNA, 19 nt, Artificial Sequence
  Description of Artificial Sequence: Synthetic oligonucleotide
  Antisense strand to SEQ ID NO: 288550
uaauucaguggcuguucau

SEQ ID NO: 288552 - RNA, 19 nt, Artificial Sequence
  Description of Artificial Sequence: Synthetic oligonucleotide
  Sense strand starting at position 941 of SEQ ID NO: 3710
gggacaucuucuuuggauu

SEQ ID NO: 288553 - RNA, 19 nt, Artificial Sequence
  Description of Artificial Sequence: Synthetic oligonucleotide
  Antisense strand to SEQ ID NO: 288552
aauccaaagaagauguccc

SEQ ID NO: 288554 - RNA, 19 nt, Artificial Sequence
  Description of Artificial Sequence: Synthetic oligonucleotide
  Sense strand starting at position 942 of SEQ ID NO: 3710
ggacaucuucuuuggauua

SEQ ID NO: 288555 - RNA, 19 nt, Artificial Sequence
  Description of Artificial Sequence: Synthetic oligonucleotide
  Antisense strand to SEQ ID NO: 288554
uaauccaaagaagaugucc

SEQ ID NO: 288556 - RNA, 19 nt, Artificial Sequence
  Description of Artificial Sequence: Synthetic oligonucleotide
  Sense strand starting at position 954 of SEQ ID NO: 3710
uggauuagucuguagugac

SEQ ID NO: 288557 - RNA, 19 nt, Artificial Sequence
  Description of Artificial Sequence: Synthetic oligonucleotide
  Antisense strand to SEQ ID NO: 288556
gucacuacagacuaaucca

SEQ ID NO: 288558 - RNA, 19 nt, Artificial Sequence
  Description of Artificial Sequence: Synthetic oligonucleotide
  Sense strand starting at position 962 of SEQ ID NO: 3710
ucuguagugaccugggaaa

SEQ ID NO: 288559 - RNA, 19 nt, Artificial Sequence
  Description of Artificial Sequence: Synthetic oligonucleotide
  Antisense strand to SEQ ID NO: 288558
uuucccaggucacuacaga

SEQ ID NO: 288560 - RNA, 19 nt, Artificial Sequence
  Description of Artificial Sequence: Synthetic oligonucleotide
  Sense strand starting at position 964 of SEQ ID NO: 3710
uguagugaccugggaaauu

SEQ ID NO: 288561 - RNA, 19 nt, Artificial Sequence
  Description of Artificial Sequence: Synthetic oligonucleotide
  Antisense strand to SEQ ID NO: 288560
aauuucccaggucacuaca

SEQ ID NO: 288562 - RNA, 19 nt, Artificial Sequence
  Description of Artificial Sequence: Synthetic oligonucleotide
  Sense strand starting at position 1045 of SEQ ID NO: 3710
augugugaucccugacagg

SEQ ID NO: 288563 - RNA, 19 nt, Artificial Sequence
  Description of Artificial Sequence: Synthetic oligonucleotide
  Antisense strand to SEQ ID NO: 288562
ccugucagggaucacacau

SEQ ID NO: 288564 - RNA, 19 nt, Artificial Sequence
  Description of Artificial Sequence: Synthetic oligonucleotide
  Sense strand starting at position 1168 of SEQ ID NO: 3710
agaugagcacuuugaaaug

SEQ ID NO: 288565 - RNA, 19 nt, Artificial Sequence
  Description of Artificial Sequence: Synthetic oligonucleotide
  Antisense strand to SEQ ID NO: 288564
cauuucaaagugcucaucu

SEQ ID NO: 288566 - RNA, 19 nt, Artificial Sequence
  Description of Artificial Sequence: Synthetic oligonucleotide
  Sense strand starting at position 1480 of SEQ ID NO: 3710
cugcguucaccugugaguu

SEQ ID NO: 288567 - RNA, 19 nt, Artificial Sequence
  Description of Artificial Sequence: Synthetic oligonucleotide
  Antisense strand to SEQ ID NO: 288566
aacucacaggugaacgcag

SEQ ID NO: 288568 - RNA, 19 nt, Artificial Sequence
  Description of Artificial Sequence: Synthetic oligonucleotide
  Sense strand starting at position 1688 of SEQ ID NO: 3710
cuugcucgggugagaaguu

SEQ ID NO: 288569 - RNA, 19 nt, Artificial Sequence
  Description of Artificial Sequence: Synthetic oligonucleotide
  Antisense strand to SEQ ID NO: 288568
aacuucucacccgagcaag

SEQ ID NO: 288570 - RNA, 19 nt, Artificial Sequence
  Description of Artificial Sequence: Synthetic oligonucleotide
  Sense strand starting at position 2134 of SEQ ID NO: 3710
ggauacaaguuauuguaac

SEQ ID NO: 288571 - RNA, 19 nt, Artificial Sequence
  Description of Artificial Sequence: Synthetic oligonucleotide
  Antisense strand to SEQ ID NO: 288570
guuacaauaacuuguaucc

SEQ ID NO: 288572 - RNA, 19 nt, Artificial Sequence
  Description of Artificial Sequence: Synthetic oligonucleotide
  Sense strand starting at position 2142 of SEQ ID NO: 3710
guuauuguaacggaaagua

SEQ ID NO: 288573 - RNA, 19 nt, Artificial Sequence
  Description of Artificial Sequence: Synthetic oligonucleotide
  Antisense strand to SEQ ID NO: 288572
uacuuuccguuacaauaac

SEQ ID NO: 288574 - RNA, 19 nt, Artificial Sequence
  Description of Artificial Sequence: Synthetic oligonucleotide
  Sense strand starting at position 2154 of SEQ ID NO: 3710
gaaaguauuguuugcauuu

SEQ ID NO: 288575 - RNA, 19 nt, Artificial Sequence
  Description of Artificial Sequence: Synthetic oligonucleotide
  Antisense strand to SEQ ID NO: 288574
aaaugcaaacaauacuuuc

SEQ ID NO: 288576 - RNA, 19 nt, Artificial Sequence
  Description of Artificial Sequence: Synthetic oligonucleotide
  Sense strand starting at position 2163 of SEQ ID NO: 3710
guuugcauuugcccuagaa

SEQ ID NO: 288577 - RNA, 19 nt, Artificial Sequence
  Description of Artificial Sequence: Synthetic oligonucleotide
  Antisense strand to SEQ ID NO: 288576
uucuagggcaaaugcaaac

SEQ ID NO: 288578 - RNA, 19 nt, Artificial Sequence
  Description of Artificial Sequence: Synthetic oligonucleotide
  Sense strand starting at position 2216 of SEQ ID NO: 3710
cugggaggcauagaguuua

SEQ ID NO: 288579 - RNA, 19 nt, Artificial Sequence
  Description of Artificial Sequence: Synthetic oligonucleotide
  Antisense strand to SEQ ID NO: 288578
uaaacucuaugccucccag

SEQ ID NO: 288580 - RNA, 19 nt, Artificial Sequence
  Description of Artificial Sequence: Synthetic oligonucleotide
  Sense strand starting at position 2514 of SEQ ID NO: 3710
aagaaccuaccgugaugau

SEQ ID NO: 288581 - RNA, 19 nt, Artificial Sequence
  Description of Artificial Sequence: Synthetic oligonucleotide
  Antisense strand to SEQ ID NO: 288580
aucaucacgguagguucuu

SEQ ID NO: 288582 - RNA, 19 nt, Artificial Sequence
  Description of Artificial Sequence: Synthetic oligonucleotide
  Sense strand starting at position 2515 of SEQ ID NO: 3710
agaaccuaccgugaugauu

SEQ ID NO: 288583 - RNA, 19 nt, Artificial Sequence
  Description of Artificial Sequence: Synthetic oligonucleotide
  Antisense strand to SEQ ID NO: 288582
aaucaucacgguagguucu

SEQ ID NO: 288584 - RNA, 19 nt, Artificial Sequence
  Description of Artificial Sequence: Synthetic oligonucleotide
  Sense strand starting at position 2544 of SEQ ID NO: 3710
aacuuugaguuggugagga

SEQ ID NO: 288585 - RNA, 19 nt, Artificial Sequence
  Description of Artificial Sequence: Synthetic oligonucleotide
  Antisense strand to SEQ ID NO: 288584
uccucaccaacucaaaguu

SEQ ID NO: 288586 - RNA, 19 nt, Artificial Sequence
  Description of Artificial Sequence: Synthetic oligonucleotide
  Sense strand starting at position 2833 of SEQ ID NO: 3710
auaggccuucuaugaacaa

SEQ ID NO: 288587 - RNA, 19 nt, Artificial Sequence
  Description of Artificial Sequence: Synthetic oligonucleotide
  Antisense strand to SEQ ID NO: 288586
uuguucauagaaggccuau

SEQ ID NO: 288588 - RNA, 19 nt, Artificial Sequence
  Description of Artificial Sequence: Synthetic oligonucleotide
  Sense strand starting at position 3012 of SEQ ID NO: 3710
uccagaagacauuggcaaa

SEQ ID NO: 288589 - RNA, 19 nt, Artificial Sequence
  Description of Artificial Sequence: Synthetic oligonucleotide
  Antisense strand to SEQ ID NO: 288588
uuugccaaugucuucugga

SEQ ID NO: 288590 - RNA, 19 nt, Artificial Sequence
  Description of Artificial Sequence: Synthetic oligonucleotide
  Sense strand starting at position 3186 of SEQ ID NO: 3710
gaagguuugguugagaugu

SEQ ID NO: 288591 - RNA, 19 nt, Artificial Sequence
  Description of Artificial Sequence: Synthetic oligonucleotide
  Antisense strand to SEQ ID NO: 288590
acaucucaaccaaaccuuc

SEQ ID NO: 288592 - RNA, 19 nt, Artificial Sequence
  Description of Artificial Sequence: Synthetic oligonucleotide
  Sense strand starting at position 3299 of SEQ ID NO: 3710
ggaugaaucaaguguugau

SEQ ID NO: 288593 - RNA, 19 nt, Artificial Sequence
  Description of Artificial Sequence: Synthetic oligonucleotide
  Antisense strand to SEQ ID NO: 288592
aucaacacuugauucaucc

SEQ ID NO: 288594 - RNA, 19 nt, Artificial Sequence
  Description of Artificial Sequence: Synthetic oligonucleotide
  Sense strand starting at position 3558 of SEQ ID NO: 3710
ugcagauucucauuuguca

SEQ ID NO: 288595 - RNA, 19 nt, Artificial Sequence
  Description of Artificial Sequence: Synthetic oligonucleotide
  Antisense strand to SEQ ID NO: 288594
ugacaaaugagaaucugca

SEQ ID NO: 288596 - RNA, 19 nt, Artificial Sequence
  Description of Artificial Sequence: Synthetic oligonucleotide
  Sense strand starting at position 3563 of SEQ ID NO: 3710
auucucauuugucagagga

SEQ ID NO: 288597 - RNA, 19 nt, Artificial Sequence
  Description of Artificial Sequence: Synthetic oligonucleotide
  Antisense strand to SEQ ID NO: 288596
uccucugacaaaugagaau

SEQ ID NO: 288598 - RNA, 19 nt, Artificial Sequence
  Description of Artificial Sequence: Synthetic oligonucleotide
  Sense strand starting at position 3576 of SEQ ID NO: 3710
agaggaguugcccaugauu

SEQ ID NO: 288599 - RNA, 19 nt, Artificial Sequence
  Description of Artificial Sequence: Synthetic oligonucleotide
  Antisense strand to SEQ ID NO: 288598
aaucaugggcaacuccucu

SEQ ID NO: 288600 - RNA, 19 nt, Artificial Sequence
  Description of Artificial Sequence: Synthetic oligonucleotide
  Sense strand starting at position 3730 of SEQ ID NO: 3710
auuguauaaucagcuagau

SEQ ID NO: 288601 - RNA, 19 nt, Artificial Sequence
  Description of Artificial Sequence: Synthetic oligonucleotide
  Antisense strand to SEQ ID NO: 288600
aucuagcugauuauacaau

SEQ ID NO: 288602 - RNA, 19 nt, Artificial Sequence
  Description of Artificial Sequence: Synthetic oligonucleotide
  Sense strand starting at position 3790 of SEQ ID NO: 3710
gaaagaggcuaguuguuaa

SEQ ID NO: 288603 - RNA, 19 nt, Artificial Sequence
  Description of Artificial Sequence: Synthetic oligonucleotide
  Antisense strand to SEQ ID NO: 288602
uuaacaacuagccucuuuc

SEQ ID NO: 288604 - RNA, 19 nt, Artificial Sequence
  Description of Artificial Sequence: Synthetic oligonucleotide
  Sense strand starting at position 3793 of SEQ ID NO: 3710
agaggcuaguuguuaaaua

SEQ ID NO: 288605 - RNA, 19 nt, Artificial Sequence
  Description of Artificial Sequence: Synthetic oligonucleotide
  Antisense strand to SEQ ID NO: 288604
uauuuaacaacuagccucu

SEQ ID NO: 288606 - RNA, 19 nt, Artificial Sequence
  Description of Artificial Sequence: Synthetic oligonucleotide
  Sense strand starting at position 3908 of SEQ ID NO: 3710
caugaaacucaguggcuua

SEQ ID NO: 288607 - RNA, 19 nt, Artificial Sequence
  Description of Artificial Sequence: Synthetic oligonucleotide
  Antisense strand to SEQ ID NO: 288606
uaagccacugaguuucaug

SEQ ID NO: 288608 - RNA, 19 nt, Artificial Sequence
  Description of Artificial Sequence: Synthetic oligonucleotide
  Sense strand starting at position 3972 of SEQ ID NO: 3710
gcucaacuagaauggauua

SEQ ID NO: 288609 - RNA, 19 nt, Artificial Sequence
  Description of Artificial Sequence: Synthetic oligonucleotide
  Antisense strand to SEQ ID NO: 288608
uaauccauucuaguugagc

SEQ ID NO: 288610 - RNA, 19 nt, Artificial Sequence
  Description of Artificial Sequence: Synthetic oligonucleotide
  Sense strand starting at position 126 of SEQ ID NO: 3711
aggaguugaguuggcugaa

SEQ ID NO: 288611 - RNA, 19 nt, Artificial Sequence
  Description of Artificial Sequence: Synthetic oligonucleotide
  Antisense strand to SEQ ID NO: 288610
uucagccaacucaacuccu

SEQ ID NO: 288612 - RNA, 19 nt, Artificial Sequence
  Description of Artificial Sequence: Synthetic oligonucleotide
  Sense strand starting at position 259 of SEQ ID NO: 3711
gccuaagagguuugaguuu

SEQ ID NO: 288613 - RNA, 19 nt, Artificial Sequence
  Description of Artificial Sequence: Synthetic oligonucleotide
  Antisense strand to SEQ ID NO: 288612
aaacucaaaccucuuaggc

SEQ ID NO: 288614 - RNA, 19 nt, Artificial Sequence
  Description of Artificial Sequence: Synthetic oligonucleotide
  Sense strand starting at position 266 of SEQ ID NO: 3711
agguuugaguuucuugaaa

SEQ ID NO: 288615 - RNA, 19 nt, Artificial Sequence
  Description of Artificial Sequence: Synthetic oligonucleotide
  Antisense strand to SEQ ID NO: 288614
uuucaagaaacucaaaccu

SEQ ID NO: 288616 - RNA, 19 nt, Artificial Sequence
  Description of Artificial Sequence: Synthetic oligonucleotide
  Sense strand starting at position 268 of SEQ ID NO: 3711
guuugaguuucuugaaaga

SEQ ID NO: 288617 - RNA, 19 nt, Artificial Sequence
  Description of Artificial Sequence: Synthetic oligonucleotide
  Antisense strand to SEQ ID NO: 288616
ucuuucaagaaacucaaac

SEQ ID NO: 288618 - RNA, 19 nt, Artificial Sequence
  Description of Artificial Sequence: Synthetic oligonucleotide
  Sense strand starting at position 334 of SEQ ID NO: 3711
acaccuaauucugggagga

SEQ ID NO: 288619 - RNA, 19 nt, Artificial Sequence
  Description of Artificial Sequence: Synthetic oligonucleotide
  Antisense strand to SEQ ID NO: 288618
uccucccagaauuaggugu

SEQ ID NO: 288620 - RNA, 19 nt, Artificial Sequence
  Description of Artificial Sequence: Synthetic oligonucleotide
  Sense strand starting at position 336 of SEQ ID NO: 3711
accuaauucugggaggaag

SEQ ID NO: 288621 - RNA, 19 nt, Artificial Sequence
  Description of Artificial Sequence: Synthetic oligonucleotide
  Antisense strand to SEQ ID NO: 288620
cuuccucccagaauuaggu

SEQ ID NO: 288622 - RNA, 19 nt, Artificial Sequence
  Description of Artificial Sequence: Synthetic oligonucleotide
  Sense strand starting at position 476 of SEQ ID NO: 3711
agacaauagcccugcagaa

SEQ ID NO: 288623 - RNA, 19 nt, Artificial Sequence
  Description of Artificial Sequence: Synthetic oligonucleotide
  Antisense strand to SEQ ID NO: 288622
uucugcagggcuauugucu

SEQ ID NO: 288624 - RNA, 19 nt, Artificial Sequence
  Description of Artificial Sequence: Synthetic oligonucleotide
  Sense strand starting at position 604 of SEQ ID NO: 3711
gugggaugggcguggaaau

SEQ ID NO: 288625 - RNA, 19 nt, Artificial Sequence
  Description of Artificial Sequence: Synthetic oligonucleotide
  Antisense strand to SEQ ID NO: 288624
auuuccacgcccaucccac

SEQ ID NO: 288626 - RNA, 19 nt, Artificial Sequence
  Description of Artificial Sequence: Synthetic oligonucleotide
  Sense strand starting at position 2378 of SEQ ID NO: 3711
acccgaucuuucugaagug

SEQ ID NO: 288627 - RNA, 19 nt, Artificial Sequence
  Description of Artificial Sequence: Synthetic oligonucleotide
  Antisense strand to SEQ ID NO: 288626
cacuucagaaagaucgggu

SEQ ID NO: 288628 - RNA, 19 nt, Artificial Sequence
  Description of Artificial Sequence: Synthetic oligonucleotide
  Sense strand starting at position 2379 of SEQ ID NO: 3711
cccgaucuuucugaagugu

SEQ ID NO: 288629 - RNA, 19 nt, Artificial Sequence
  Description of Artificial Sequence: Synthetic oligonucleotide
  Antisense strand to SEQ ID NO: 288628
acacuucagaaagaucggg

SEQ ID NO: 288630 - RNA, 19 nt, Artificial Sequence
  Description of Artificial Sequence: Synthetic oligonucleotide
  Sense strand starting at position 2726 of SEQ ID NO: 3711
cuggaaggcugauuaacaa

SEQ ID NO: 288631 - RNA, 19 nt, Artificial Sequence
  Description of Artificial Sequence: Synthetic oligonucleotide
  Antisense strand to SEQ ID NO: 288630
uuguuaaucagccuuccag

SEQ ID NO: 288632 - RNA, 19 nt, Artificial Sequence
  Description of Artificial Sequence: Synthetic oligonucleotide
  Sense strand starting at position 2746 of SEQ ID NO: 3711
uggcaugagcccuacuguu

SEQ ID NO: 288633 - RNA, 19 nt, Artificial Sequence
  Description of Artificial Sequence: Synthetic oligonucleotide
  Antisense strand to SEQ ID NO: 288632
aacaguagggcucaugcca

SEQ ID NO: 288634 - RNA, 19 nt, Artificial Sequence
  Description of Artificial Sequence: Synthetic oligonucleotide
  Sense strand starting at position 3016 of SEQ ID NO: 3711
gcuugacguccugagguuu

SEQ ID NO: 288635 - RNA, 19 nt, Artificial Sequence
  Description of Artificial Sequence: Synthetic oligonucleotide
  Antisense strand to SEQ ID NO: 288634
aaaccucaggacgucaagc

SEQ ID NO: 288636 - RNA, 19 nt, Artificial Sequence
  Description of Artificial Sequence: Synthetic oligonucleotide
  Sense strand starting at position 3024 of SEQ ID NO: 3711
uccugagguuuggagguaa

SEQ ID NO: 288637 - RNA, 19 nt, Artificial Sequence
  Description of Artificial Sequence: Synthetic oligonucleotide
  Antisense strand to SEQ ID NO: 288636
uuaccuccaaaccucagga

SEQ ID NO: 288638 - RNA, 19 nt, Artificial Sequence
  Description of Artificial Sequence: Synthetic oligonucleotide
  Sense strand starting at position 3028 of SEQ ID NO: 3711
gagguuuggagguaacuuu

SEQ ID NO: 288639 - RNA, 19 nt, Artificial Sequence
  Description of Artificial Sequence: Synthetic oligonucleotide
  Antisense strand to SEQ ID NO: 288638
aaaguuaccuccaaaccuc

SEQ ID NO: 288640 - RNA, 19 nt, Artificial Sequence
  Description of Artificial Sequence: Synthetic oligonucleotide
  Sense strand starting at position 3090 of SEQ ID NO: 3711
gucagcagaucuggauuau

SEQ ID NO: 288641 - RNA, 19 nt, Artificial Sequence
  Description of Artificial Sequence: Synthetic oligonucleotide
  Antisense strand to SEQ ID NO: 288640
auaauccagaucugcugac

SEQ ID NO: 288642 - RNA, 19 nt, Artificial Sequence
  Description of Artificial Sequence: Synthetic oligonucleotide
  Sense strand starting at position 3096 of SEQ ID NO: 3711
agaucuggauuauaaauca

SEQ ID NO: 288643 - RNA, 19 nt, Artificial Sequence
  Description of Artificial Sequence: Synthetic oligonucleotide
  Antisense strand to SEQ ID NO: 288642
ugauuuauaauccagaucu

SEQ ID NO: 288644 - RNA, 19 nt, Artificial Sequence
  Description of Artificial Sequence: Synthetic oligonucleotide
  Sense strand starting at position 3215 of SEQ ID NO: 3711
caguaacaaucgggucuuu

SEQ ID NO: 288645 - RNA, 19 nt, Artificial Sequence
  Description of Artificial Sequence: Synthetic oligonucleotide
  Antisense strand to SEQ ID NO: 288644
aaagacccgauuguuacug

SEQ ID NO: 288646 - RNA, 19 nt, Artificial Sequence
  Description of Artificial Sequence: Synthetic oligonucleotide
  Sense strand starting at position 3224 of SEQ ID NO: 3711
ucgggucuuugcugguaca

SEQ ID NO: 288647 - RNA, 19 nt, Artificial Sequence
  Description of Artificial Sequence: Synthetic oligonucleotide
  Antisense strand to SEQ ID NO: 288646
uguaccagcaaagacccga

SEQ ID NO: 288648 - RNA, 19 nt, Artificial Sequence
  Description of Artificial Sequence: Synthetic oligonucleotide
  Sense strand starting at position 3227 of SEQ ID NO: 3711
ggucuuugcugguacacau

SEQ ID NO: 288649 - RNA, 19 nt, Artificial Sequence
  Description of Artificial Sequence: Synthetic oligonucleotide
  Antisense strand to SEQ ID NO: 288648
auguguaccagcaaagacc

SEQ ID NO: 288650 - RNA, 19 nt, Artificial Sequence
  Description of Artificial Sequence: Synthetic oligonucleotide
  Sense strand starting at position 3324 of SEQ ID NO: 3711
cuuggagaugcuggagaua

SEQ ID NO: 288651 - RNA, 19 nt, Artificial Sequence
  Description of Artificial Sequence: Synthetic oligonucleotide
  Antisense strand to SEQ ID NO: 288650
uaucuccagcaucuccaag

SEQ ID NO: 288652 - RNA, 19 nt, Artificial Sequence
  Description of Artificial Sequence: Synthetic oligonucleotide
  Sense strand starting at position 3399 of SEQ ID NO: 3711
gugugucacccucguguuu

SEQ ID NO: 288653 - RNA, 19 nt, Artificial Sequence
  Description of Artificial Sequence: Synthetic oligonucleotide
  Antisense strand to SEQ ID NO: 288652
aaacacgagggugacacac

SEQ ID NO: 288654 - RNA, 19 nt, Artificial Sequence
  Description of Artificial Sequence: Synthetic oligonucleotide
  Sense strand starting at position 3400 of SEQ ID NO: 3711
ugugucacccucguguuua

SEQ ID NO: 288655 - RNA, 19 nt, Artificial Sequence
  Description of Artificial Sequence: Synthetic oligonucleotide
  Antisense strand to SEQ ID NO: 288654
uaaacacgagggugacaca

SEQ ID NO: 288656 - RNA, 19 nt, Artificial Sequence
  Description of Artificial Sequence: Synthetic oligonucleotide
  Sense strand starting at position 3401 of SEQ ID NO: 3711
gugucacccucguguuuag

SEQ ID NO: 288657 - RNA, 19 nt, Artificial Sequence
  Description of Artificial Sequence: Synthetic oligonucleotide
  Antisense strand to SEQ ID NO: 288656
cuaaacacgagggugacac

SEQ ID NO: 288658 - RNA, 19 nt, Artificial Sequence
  Description of Artificial Sequence: Synthetic oligonucleotide
  Sense strand starting at position 3446 of SEQ ID NO: 3711
aggguaaacugagaugcaa

SEQ ID NO: 288659 - RNA, 19 nt, Artificial Sequence
  Description of Artificial Sequence: Synthetic oligonucleotide
  Antisense strand to SEQ ID NO: 288658
uugcaucucaguuuacccu

SEQ ID NO: 288660 - RNA, 19 nt, Artificial Sequence
  Description of Artificial Sequence: Synthetic oligonucleotide
  Sense strand starting at position 3448 of SEQ ID NO: 3711
gguaaacugagaugcaagu

SEQ ID NO: 288661 - RNA, 19 nt, Artificial Sequence
  Description of Artificial Sequence: Synthetic oligonucleotide
  Antisense strand to SEQ ID NO: 288660
acuugcaucucaguuuacc

SEQ ID NO: 288662 - RNA, 19 nt, Artificial Sequence
  Description of Artificial Sequence: Synthetic oligonucleotide
  Sense strand starting at position 3471 of SEQ ID NO: 3711
ucacuuguguucugugcuu

SEQ ID NO: 288663 - RNA, 19 nt, Artificial Sequence
  Description of Artificial Sequence: Synthetic oligonucleotide
  Antisense strand to SEQ ID NO: 288662
aagcacagaacacaaguga

SEQ ID NO: 288664 - RNA, 19 nt, Artificial Sequence
  Description of Artificial Sequence: Synthetic oligonucleotide
  Sense strand starting at position 3473 of SEQ ID NO: 3711
acuuguguucugugcuuua

SEQ ID NO: 288665 - RNA, 19 nt, Artificial Sequence
  Description of Artificial Sequence: Synthetic oligonucleotide
  Antisense strand to SEQ ID NO: 288664
uaaagcacagaacacaagu

SEQ ID NO: 288666 - RNA, 19 nt, Artificial Sequence
  Description of Artificial Sequence: Synthetic oligonucleotide
  Sense strand starting at position 3476 of SEQ ID NO: 3711
uguguucugugcuuuagau

SEQ ID NO: 288667 - RNA, 19 nt, Artificial Sequence
  Description of Artificial Sequence: Synthetic oligonucleotide
  Antisense strand to SEQ ID NO: 288666
aucuaaagcacagaacaca

SEQ ID NO: 288668 - RNA, 19 nt, Artificial Sequence
  Description of Artificial Sequence: Synthetic oligonucleotide
  Sense strand starting at position 3478 of SEQ ID NO: 3711
uguucugugcuuuagauuu

SEQ ID NO: 288669 - RNA, 19 nt, Artificial Sequence
  Description of Artificial Sequence: Synthetic oligonucleotide
  Antisense strand to SEQ ID NO: 288668
aaaucuaaagcacagaaca

SEQ ID NO: 288670 - RNA, 19 nt, Artificial Sequence
  Description of Artificial Sequence: Synthetic oligonucleotide
  Sense strand starting at position 3498 of SEQ ID NO: 3711
ugcagcuugucuugaugua

SEQ ID NO: 288671 - RNA, 19 nt, Artificial Sequence
  Description of Artificial Sequence: Synthetic oligonucleotide
  Antisense strand to SEQ ID NO: 288670
uacaucaagacaagcugca

SEQ ID NO: 288672 - RNA, 19 nt, Artificial Sequence
  Description of Artificial Sequence: Synthetic oligonucleotide
  Sense strand starting at position 3555 of SEQ ID NO: 3711
guaaguaauuugggaggcu

SEQ ID NO: 288673 - RNA, 19 nt, Artificial Sequence
  Description of Artificial Sequence: Synthetic oligonucleotide
  Antisense strand to SEQ ID NO: 288672
agccucccaaauuacuuac

SEQ ID NO: 288674 - RNA, 19 nt, Artificial Sequence
  Description of Artificial Sequence: Synthetic oligonucleotide
  Sense strand starting at position 262 of SEQ ID NO: 3712
uggaauaaguuggcaugaa

SEQ ID NO: 288675 - RNA, 19 nt, Artificial Sequence
  Description of Artificial Sequence: Synthetic oligonucleotide
  Antisense strand to SEQ ID NO: 288674
uucaugccaacuuauucca

SEQ ID NO: 288676 - RNA, 19 nt, Artificial Sequence
  Description of Artificial Sequence: Synthetic oligonucleotide
  Sense strand starting at position 404 of SEQ ID NO: 3712
ccuagauguacugaugagu

SEQ ID NO: 288677 - RNA, 19 nt, Artificial Sequence
  Description of Artificial Sequence: Synthetic oligonucleotide
  Antisense strand to SEQ ID NO: 288676
acucaucaguacaucuagg

SEQ ID NO: 288678 - RNA, 19 nt, Artificial Sequence
  Description of Artificial Sequence: Synthetic oligonucleotide
  Sense strand starting at position 467 of SEQ ID NO: 3712
acucucucaugcuuaguau

SEQ ID NO: 288679 - RNA, 19 nt, Artificial Sequence
  Description of Artificial Sequence: Synthetic oligonucleotide
  Antisense strand to SEQ ID NO: 288678
auacuaagcaugagagagu

SEQ ID NO: 288680 - RNA, 19 nt, Artificial Sequence
  Description of Artificial Sequence: Synthetic oligonucleotide
  Sense strand starting at position 468 of SEQ ID NO: 3712
cucucucaugcuuaguaua

SEQ ID NO: 288681 - RNA, 19 nt, Artificial Sequence
  Description of Artificial Sequence: Synthetic oligonucleotide
  Antisense strand to SEQ ID NO: 288680
uauacuaagcaugagagag

SEQ ID NO: 288682 - RNA, 19 nt, Artificial Sequence
  Description of Artificial Sequence: Synthetic oligonucleotide
  Sense strand starting at position 470 of SEQ ID NO: 3712
cucucaugcuuaguauaag

SEQ ID NO: 288683 - RNA, 19 nt, Artificial Sequence
  Description of Artificial Sequence: Synthetic oligonucleotide
  Antisense strand to SEQ ID NO: 288682
cuuauacuaagcaugagag

SEQ ID NO: 288684 - RNA, 19 nt, Artificial Sequence
  Description of Artificial Sequence: Synthetic oligonucleotide
  Sense strand starting at position 480 of SEQ ID NO: 3712
uaguauaagcccuggauca

SEQ ID NO: 288685 - RNA, 19 nt, Artificial Sequence
  Description of Artificial Sequence: Synthetic oligonucleotide
  Antisense strand to SEQ ID NO: 288684
ugauccagggcuuauacua

SEQ ID NO: 288686 - RNA, 19 nt, Artificial Sequence
  Description of Artificial Sequence: Synthetic oligonucleotide
  Sense strand starting at position 889 of SEQ ID NO: 3712
uugugacgucuccuagcuu

SEQ ID NO: 288687 - RNA, 19 nt, Artificial Sequence
  Description of Artificial Sequence: Synthetic oligonucleotide
  Antisense strand to SEQ ID NO: 288686
aagcuaggagacgucacaa

SEQ ID NO: 288688 - RNA, 19 nt, Artificial Sequence
  Description of Artificial Sequence: Synthetic oligonucleotide
  Sense strand starting at position 1001 of SEQ ID NO: 3712
uugaaugguuuaccaauau

SEQ ID NO: 288689 - RNA, 19 nt, Artificial Sequence
  Description of Artificial Sequence: Synthetic oligonucleotide
  Antisense strand to SEQ ID NO: 288688
auauugguaaaccauucaa

SEQ ID NO: 288690 - RNA, 19 nt, Artificial Sequence
  Description of Artificial Sequence: Synthetic oligonucleotide
  Sense strand starting at position 1068 of SEQ ID NO: 3712
gagaguuaacguggaucca

SEQ ID NO: 288691 - RNA, 19 nt, Artificial Sequence
  Description of Artificial Sequence: Synthetic oligonucleotide
  Antisense strand to SEQ ID NO: 288690
uggauccacguuaacucuc

SEQ ID NO: 288692 - RNA, 19 nt, Artificial Sequence
  Description of Artificial Sequence: Synthetic oligonucleotide
  Sense strand starting at position 1069 of SEQ ID NO: 3712
agaguuaacguggauccaa

SEQ ID NO: 288693 - RNA, 19 nt, Artificial Sequence
  Description of Artificial Sequence: Synthetic oligonucleotide
  Antisense strand to SEQ ID NO: 288692
uuggauccacguuaacucu

SEQ ID NO: 288694 - RNA, 19 nt, Artificial Sequence
  Description of Artificial Sequence: Synthetic oligonucleotide
  Sense strand starting at position 1104 of SEQ ID NO: 3712
gcugcugucagagauguca

SEQ ID NO: 288695 - RNA, 19 nt, Artificial Sequence
  Description of Artificial Sequence: Synthetic oligonucleotide
  Antisense strand to SEQ ID NO: 288694
ugacaucucugacagcagc

SEQ ID NO: 288696 - RNA, 19 nt, Artificial Sequence
  Description of Artificial Sequence: Synthetic oligonucleotide
  Sense strand starting at position 1251 of SEQ ID NO: 3712
gacugaugggucugaaagc

SEQ ID NO: 288697 - RNA, 19 nt, Artificial Sequence
  Description of Artificial Sequence: Synthetic oligonucleotide
  Antisense strand to SEQ ID NO: 288696
gcuuucagacccaucaguc

SEQ ID NO: 288698 - RNA, 19 nt, Artificial Sequence
  Description of Artificial Sequence: Synthetic oligonucleotide
  Sense strand starting at position 1276 of SEQ ID NO: 3712
ggcgucaagcuggaaugau

SEQ ID NO: 288699 - RNA, 19 nt, Artificial Sequence
  Description of Artificial Sequence: Synthetic oligonucleotide
  Antisense strand to SEQ ID NO: 288698
aucauuccagcuugacgcc

SEQ ID NO: 288700 - RNA, 19 nt, Artificial Sequence
  Description of Artificial Sequence: Synthetic oligonucleotide
  Sense strand starting at position 1338 of SEQ ID NO: 3712
ggaacuucgaaaugaacga

SEQ ID NO: 288701 - RNA, 19 nt, Artificial Sequence
  Description of Artificial Sequence: Synthetic oligonucleotide
  Antisense strand to SEQ ID NO: 288700
ucguucauuucgaaguucc

SEQ ID NO: 288702 - RNA, 19 nt, Artificial Sequence
  Description of Artificial Sequence: Synthetic oligonucleotide
  Sense strand starting at position 1700 of SEQ ID NO: 3712
cgccuuaccagagauugga

SEQ ID NO: 288703 - RNA, 19 nt, Artificial Sequence
  Description of Artificial Sequence: Synthetic oligonucleotide
  Antisense strand to SEQ ID NO: 288702
uccaaucucugguaaggcg

SEQ ID NO: 288704 - RNA, 19 nt, Artificial Sequence
  Description of Artificial Sequence: Synthetic oligonucleotide
  Sense strand starting at position 2428 of SEQ ID NO: 3712
gggaguucacacuguaaug

SEQ ID NO: 288705 - RNA, 19 nt, Artificial Sequence
  Description of Artificial Sequence: Synthetic oligonucleotide
  Antisense strand to SEQ ID NO: 288704
cauuacagugugaacuccc

SEQ ID NO: 288706 - RNA, 19 nt, Artificial Sequence
  Description of Artificial Sequence: Synthetic oligonucleotide
  Sense strand starting at position 2473 of SEQ ID NO: 3712
gcaaauagauaauugcaau

SEQ ID NO: 288707 - RNA, 19 nt, Artificial Sequence
  Description of Artificial Sequence: Synthetic oligonucleotide
  Antisense strand to SEQ ID NO: 288706
auugcaauuaucuauuugc

SEQ ID NO: 288708 - RNA, 19 nt, Artificial Sequence
  Description of Artificial Sequence: Synthetic oligonucleotide
  Sense strand starting at position 2502 of SEQ ID NO: 3712
gcacguuugcuauaauaac

SEQ ID NO: 288709 - RNA, 19 nt, Artificial Sequence
  Description of Artificial Sequence: Synthetic oligonucleotide
  Antisense strand to SEQ ID NO: 288708
guuauuauagcaaacgugc

SEQ ID NO: 288710 - RNA, 19 nt, Artificial Sequence
  Description of Artificial Sequence: Synthetic oligonucleotide
  Sense strand starting at position 2653 of SEQ ID NO: 3712
gcauauccacuuggauauc

SEQ ID NO: 288711 - RNA, 19 nt, Artificial Sequence
  Description of Artificial Sequence: Synthetic oligonucleotide
  Antisense strand to SEQ ID NO: 288710
gauauccaaguggauaugc

SEQ ID NO: 288712 - RNA, 19 nt, Artificial Sequence
  Description of Artificial Sequence: Synthetic oligonucleotide
  Sense strand starting at position 3117 of SEQ ID NO: 3712
uguauuaguuauuuaggcu

SEQ ID NO: 288713 - RNA, 19 nt, Artificial Sequence
  Description of Artificial Sequence: Synthetic oligonucleotide
  Antisense strand to SEQ ID NO: 288712
agccuaaauaacuaauaca

SEQ ID NO: 288714 - RNA, 19 nt, Artificial Sequence
  Description of Artificial Sequence: Synthetic oligonucleotide
  Sense strand starting at position 3121 of SEQ ID NO: 3712
uuaguuauuuaggcugcaa

SEQ ID NO: 288715 - RNA, 19 nt, Artificial Sequence
  Description of Artificial Sequence: Synthetic oligonucleotide
  Antisense strand to SEQ ID NO: 288714
uugcagccuaaauaacuaa

SEQ ID NO: 288716 - RNA, 19 nt, Artificial Sequence
  Description of Artificial Sequence: Synthetic oligonucleotide
  Sense strand starting at position 3193 of SEQ ID NO: 3712
aagacauggucccugaauu

SEQ ID NO: 288717 - RNA, 19 nt, Artificial Sequence
  Description of Artificial Sequence: Synthetic oligonucleotide
  Antisense strand to SEQ ID NO: 288716
aauucagggaccaugucuu

SEQ ID NO: 288718 - RNA, 19 nt, Artificial Sequence
  Description of Artificial Sequence: Synthetic oligonucleotide
  Sense strand starting at position 3194 of SEQ ID NO: 3712
agacauggucccugaauuc

SEQ ID NO: 288719 - RNA, 19 nt, Artificial Sequence
  Description of Artificial Sequence: Synthetic oligonucleotide
  Antisense strand to SEQ ID NO: 288718
gaauucagggaccaugucu

SEQ ID NO: 288720 - RNA, 19 nt, Artificial Sequence
  Description of Artificial Sequence: Synthetic oligonucleotide
  Sense strand starting at position 3273 of SEQ ID NO: 3712
aucucucugcgucagaaau

SEQ ID NO: 288721 - RNA, 19 nt, Artificial Sequence
  Description of Artificial Sequence: Synthetic oligonucleotide
  Antisense strand to SEQ ID NO: 288720
auuucugacgcagagagau

SEQ ID NO: 288722 - RNA, 19 nt, Artificial Sequence
  Description of Artificial Sequence: Synthetic oligonucleotide
  Sense strand starting at position 3283 of SEQ ID NO: 3712
gucagaaauuuaggaguag

SEQ ID NO: 288723 - RNA, 19 nt, Artificial Sequence
  Description of Artificial Sequence: Synthetic oligonucleotide
  Antisense strand to SEQ ID NO: 288722
cuacuccuaaauuucugac

SEQ ID NO: 288724 - RNA, 19 nt, Artificial Sequence
  Description of Artificial Sequence: Synthetic oligonucleotide
  Sense strand starting at position 3284 of SEQ ID NO: 3712
ucagaaauuuaggaguagu

SEQ ID NO: 288725 - RNA, 19 nt, Artificial Sequence
  Description of Artificial Sequence: Synthetic oligonucleotide
  Antisense strand to SEQ ID NO: 288724
acuacuccuaaauuucuga

SEQ ID NO: 288726 - RNA, 19 nt, Artificial Sequence
  Description of Artificial Sequence: Synthetic oligonucleotide
  Sense strand starting at position 3294 of SEQ ID NO: 3712
aggaguaguuuagcuaggu

SEQ ID NO: 288727 - RNA, 19 nt, Artificial Sequence
  Description of Artificial Sequence: Synthetic oligonucleotide
  Antisense strand to SEQ ID NO: 288726
accuagcuaaacuacuccu

SEQ ID NO: 288728 - RNA, 19 nt, Artificial Sequence
  Description of Artificial Sequence: Synthetic oligonucleotide
  Sense strand starting at position 3295 of SEQ ID NO: 3712
ggaguaguuuagcuaggug

SEQ ID NO: 288729 - RNA, 19 nt, Artificial Sequence
  Description of Artificial Sequence: Synthetic oligonucleotide
  Antisense strand to SEQ ID NO: 288728
caccuagcuaaacuacucc

SEQ ID NO: 288730 - RNA, 19 nt, Artificial Sequence
  Description of Artificial Sequence: Synthetic oligonucleotide
  Sense strand starting at position 3457 of SEQ ID NO: 3712
aagugaagguuguucucca

SEQ ID NO: 288731 - RNA, 19 nt, Artificial Sequence
  Description of Artificial Sequence: Synthetic oligonucleotide
  Antisense strand to SEQ ID NO: 288730
uggagaacaaccuucacuu

SEQ ID NO: 288732 - RNA, 19 nt, Artificial Sequence
  Description of Artificial Sequence: Synthetic oligonucleotide
  Sense strand starting at position 3461 of SEQ ID NO: 3712
gaagguuguucuccacaug

SEQ ID NO: 288733 - RNA, 19 nt, Artificial Sequence
  Description of Artificial Sequence: Synthetic oligonucleotide
  Antisense strand to SEQ ID NO: 288732
cauguggagaacaaccuuc

SEQ ID NO: 288734 - RNA, 19 nt, Artificial Sequence
  Description of Artificial Sequence: Synthetic oligonucleotide
  Sense strand starting at position 3462 of SEQ ID NO: 3712
aagguuguucuccacauga

SEQ ID NO: 288735 - RNA, 19 nt, Artificial Sequence
  Description of Artificial Sequence: Synthetic oligonucleotide
  Antisense strand to SEQ ID NO: 288734
ucauguggagaacaaccuu

SEQ ID NO: 288736 - RNA, 19 nt, Artificial Sequence
  Description of Artificial Sequence: Synthetic oligonucleotide
  Sense strand starting at position 3464 of SEQ ID NO: 3712
gguuguucuccacaugaau

SEQ ID NO: 288737 - RNA, 19 nt, Artificial Sequence
  Description of Artificial Sequence: Synthetic oligonucleotide
  Antisense strand to SEQ ID NO: 288736
auucauguggagaacaacc

SEQ ID NO: 288738 - RNA, 19 nt, Artificial Sequence
  Description of Artificial Sequence: Synthetic oligonucleotide
  Sense strand starting at position 3519 of SEQ ID NO: 3712
gggugacuuccucagagca

SEQ ID NO: 288739 - RNA, 19 nt, Artificial Sequence
  Description of Artificial Sequence: Synthetic oligonucleotide
  Antisense strand to SEQ ID NO: 288738
ugcucugaggaagucaccc

SEQ ID NO: 288740 - RNA, 19 nt, Artificial Sequence
  Description of Artificial Sequence: Synthetic oligonucleotide
  Sense strand starting at position 3569 of SEQ ID NO: 3712
augauauauuugugaccua

SEQ ID NO: 288741 - RNA, 19 nt, Artificial Sequence
  Description of Artificial Sequence: Synthetic oligonucleotide
  Antisense strand to SEQ ID NO: 288740
uaggucacaaauauaucau

SEQ ID NO: 288742 - RNA, 19 nt, Artificial Sequence
  Description of Artificial Sequence: Synthetic oligonucleotide
  Sense strand starting at position 3570 of SEQ ID NO: 3712
ugauauauuugugaccuag

SEQ ID NO: 288743 - RNA, 19 nt, Artificial Sequence
  Description of Artificial Sequence: Synthetic oligonucleotide
  Antisense strand to SEQ ID NO: 288742
cuaggucacaaauauauca

SEQ ID NO: 288744 - RNA, 19 nt, Artificial Sequence
  Description of Artificial Sequence: Synthetic oligonucleotide
  Sense strand starting at position 3602 of SEQ ID NO: 3712
acacaaucucucggccaua

SEQ ID NO: 288745 - RNA, 19 nt, Artificial Sequence
  Description of Artificial Sequence: Synthetic oligonucleotide
  Antisense strand to SEQ ID NO: 288744
uauggccgagagauugugu

SEQ ID NO: 288746 - RNA, 19 nt, Artificial Sequence
  Description of Artificial Sequence: Synthetic oligonucleotide
  Sense strand starting at position 3662 of SEQ ID NO: 3712
gggacuucaccagguggua

SEQ ID NO: 288747 - RNA, 19 nt, Artificial Sequence
  Description of Artificial Sequence: Synthetic oligonucleotide
  Antisense strand to SEQ ID NO: 288746
uaccaccuggugaaguccc

SEQ ID NO: 288748 - RNA, 19 nt, Artificial Sequence
  Description of Artificial Sequence: Synthetic oligonucleotide
  Sense strand starting at position 3712 of SEQ ID NO: 3712
gccuccuuucuuggagacu

SEQ ID NO: 288749 - RNA, 19 nt, Artificial Sequence
  Description of Artificial Sequence: Synthetic oligonucleotide
  Antisense strand to SEQ ID NO: 288748
agucuccaagaaaggaggc

SEQ ID NO: 288750 - RNA, 19 nt, Artificial Sequence
  Description of Artificial Sequence: Synthetic oligonucleotide
  Sense strand starting at position 3845 of SEQ ID NO: 3712
ucaccuggacugugugaua

SEQ ID NO: 288751 - RNA, 19 nt, Artificial Sequence
  Description of Artificial Sequence: Synthetic oligonucleotide
  Antisense strand to SEQ ID NO: 288750
uaucacacaguccagguga

SEQ ID NO: 288752 - RNA, 19 nt, Artificial Sequence
  Description of Artificial Sequence: Synthetic oligonucleotide
  Sense strand starting at position 3913 of SEQ ID NO: 3712
cugccaucaggauaaucuu

SEQ ID NO: 288753 - RNA, 19 nt, Artificial Sequence
  Description of Artificial Sequence: Synthetic oligonucleotide
  Antisense strand to SEQ ID NO: 288752
aagauuauccugauggcag

SEQ ID NO: 288754 - RNA, 19 nt, Artificial Sequence
  Description of Artificial Sequence: Synthetic oligonucleotide
  Sense strand starting at position 5 of SEQ ID NO: 3713
agguuacuaacugggugau

SEQ ID NO: 288755 - RNA, 19 nt, Artificial Sequence
  Description of Artificial Sequence: Synthetic oligonucleotide
  Antisense strand to SEQ ID NO: 288754
aucacccaguuaguaaccu

SEQ ID NO: 288756 - RNA, 19 nt, Artificial Sequence
  Description of Artificial Sequence: Synthetic oligonucleotide
  Sense strand starting at position 6 of SEQ ID NO: 3713
gguuacuaacugggugauu

SEQ ID NO: 288757 - RNA, 19 nt, Artificial Sequence
  Description of Artificial Sequence: Synthetic oligonucleotide
  Antisense strand to SEQ ID NO: 288756
aaucacccaguuaguaacc

SEQ ID NO: 288758 - RNA, 19 nt, Artificial Sequence
  Description of Artificial Sequence: Synthetic oligonucleotide
  Sense strand starting at position 19 of SEQ ID NO: 3713
gugauuccauuauauaagu

SEQ ID NO: 288759 - RNA, 19 nt, Artificial Sequence
  Description of Artificial Sequence: Synthetic oligonucleotide
  Antisense strand to SEQ ID NO: 288758
acuuauauaauggaaucac

SEQ ID NO: 288760 - RNA, 19 nt, Artificial Sequence
  Description of Artificial Sequence: Synthetic oligonucleotide
  Sense strand starting at position 28 of SEQ ID NO: 3713
uuauauaagucuuggaaug

SEQ ID NO: 288761 - RNA, 19 nt, Artificial Sequence
  Description of Artificial Sequence: Synthetic oligonucleotide
  Antisense strand to SEQ ID NO: 288760
cauuccaagacuuauauaa

SEQ ID NO: 288762 - RNA, 19 nt, Artificial Sequence
  Description of Artificial Sequence: Synthetic oligonucleotide
  Sense strand starting at position 29 of SEQ ID NO: 3713
uauauaagucuuggaauga

SEQ ID NO: 288763 - RNA, 19 nt, Artificial Sequence
  Description of Artificial Sequence: Synthetic oligonucleotide
  Antisense strand to SEQ ID NO: 288762
ucauuccaagacuuauaua

SEQ ID NO: 288764 - RNA, 19 nt, Artificial Sequence
  Description of Artificial Sequence: Synthetic oligonucleotide
  Sense strand starting at position 30 of SEQ ID NO: 3713
auauaagucuuggaaugac

SEQ ID NO: 288765 - RNA, 19 nt, Artificial Sequence
  Description of Artificial Sequence: Synthetic oligonucleotide
  Antisense strand to SEQ ID NO: 288764
gucauuccaagacuuauau

SEQ ID NO: 288766 - RNA, 19 nt, Artificial Sequence
  Description of Artificial Sequence: Synthetic oligonucleotide
  Sense strand starting at position 158 of SEQ ID NO: 3713
cugggaacauccuuuaucu

SEQ ID NO: 288767 - RNA, 19 nt, Artificial Sequence
  Description of Artificial Sequence: Synthetic oligonucleotide
  Antisense strand to SEQ ID NO: 288766
agauaaaggauguucccag

SEQ ID NO: 288768 - RNA, 19 nt, Artificial Sequence
  Description of Artificial Sequence: Synthetic oligonucleotide
  Sense strand starting at position 195 of SEQ ID NO: 3713
acaauaugcugguugugau

SEQ ID NO: 288769 - RNA, 19 nt, Artificial Sequence
  Description of Artificial Sequence: Synthetic oligonucleotide
  Antisense strand to SEQ ID NO: 288768
aucacaaccagcauauugu

SEQ ID NO: 288770 - RNA, 19 nt, Artificial Sequence
  Description of Artificial Sequence: Synthetic oligonucleotide
  Sense strand starting at position 198 of SEQ ID NO: 3713
auaugcugguugugauauc

SEQ ID NO: 288771 - RNA, 19 nt, Artificial Sequence
  Description of Artificial Sequence: Synthetic oligonucleotide
  Antisense strand to SEQ ID NO: 288770
gauaucacaaccagcauau

SEQ ID NO: 288772 - RNA, 19 nt, Artificial Sequence
  Description of Artificial Sequence: Synthetic oligonucleotide
  Sense strand starting at position 209 of SEQ ID NO: 3713
gugauaucguacuaugggu

SEQ ID NO: 288773 - RNA, 19 nt, Artificial Sequence
  Description of Artificial Sequence: Synthetic oligonucleotide
  Antisense strand to SEQ ID NO: 288772
acccauaguacgauaucac

SEQ ID NO: 288774 - RNA, 19 nt, Artificial Sequence
  Description of Artificial Sequence: Synthetic oligonucleotide
  Sense strand starting at position 211 of SEQ ID NO: 3713
gauaucguacuauggguuu

SEQ ID NO: 288775 - RNA, 19 nt, Artificial Sequence
  Description of Artificial Sequence: Synthetic oligonucleotide
  Antisense strand to SEQ ID NO: 288774
aaacccauaguacgauauc

SEQ ID NO: 288776 - RNA, 19 nt, Artificial Sequence
  Description of Artificial Sequence: Synthetic oligonucleotide
  Sense strand starting at position 217 of SEQ ID NO: 3713
guacuauggguuugccaga

SEQ ID NO: 288777 - RNA, 19 nt, Artificial Sequence
  Description of Artificial Sequence: Synthetic oligonucleotide
  Antisense strand to SEQ ID NO: 288776
ucuggcaaacccauaguac

SEQ ID NO: 288778 - RNA, 19 nt, Artificial Sequence
  Description of Artificial Sequence: Synthetic oligonucleotide
  Sense strand starting at position 218 of SEQ ID NO: 3713
uacuauggguuugccagau

SEQ ID NO: 288779 - RNA, 19 nt, Artificial Sequence
  Description of Artificial Sequence: Synthetic oligonucleotide
  Antisense strand to SEQ ID NO: 288778
aucuggcaaacccauagua

SEQ ID NO: 288780 - RNA, 19 nt, Artificial Sequence
  Description of Artificial Sequence: Synthetic oligonucleotide
  Sense strand starting at position 222 of SEQ ID NO: 3713
auggguuugccagaucuua

SEQ ID NO: 288781 - RNA, 19 nt, Artificial Sequence
  Description of Artificial Sequence: Synthetic oligonucleotide
  Antisense strand to SEQ ID NO: 288780
uaagaucuggcaaacccau

SEQ ID NO: 288782 - RNA, 19 nt, Artificial Sequence
  Description of Artificial Sequence: Synthetic oligonucleotide
  Sense strand starting at position 230 of SEQ ID NO: 3713
gccagaucuuauuguggaa

SEQ ID NO: 288783 - RNA, 19 nt, Artificial Sequence
  Description of Artificial Sequence: Synthetic oligonucleotide
  Antisense strand to SEQ ID NO: 288782
uuccacaauaagaucuggc

SEQ ID NO: 288784 - RNA, 19 nt, Artificial Sequence
  Description of Artificial Sequence: Synthetic oligonucleotide
  Sense strand starting at position 232 of SEQ ID NO: 3713
cagaucuuauuguggaaag

SEQ ID NO: 288785 - RNA, 19 nt, Artificial Sequence
  Description of Artificial Sequence: Synthetic oligonucleotide
  Antisense strand to SEQ ID NO: 288784
cuuuccacaauaagaucug

SEQ ID NO: 288786 - RNA, 19 nt, Artificial Sequence
  Description of Artificial Sequence: Synthetic oligonucleotide
  Sense strand starting at position 234 of SEQ ID NO: 3713
gaucuuauuguggaaaggu

SEQ ID NO: 288787 - RNA, 19 nt, Artificial Sequence
  Description of Artificial Sequence: Synthetic oligonucleotide
  Antisense strand to SEQ ID NO: 288786
accuuuccacaauaagauc

SEQ ID NO: 288788 - RNA, 19 nt, Artificial Sequence
  Description of Artificial Sequence: Synthetic oligonucleotide
  Sense strand starting at position 261 of SEQ ID NO: 3713
gguacaggguucucacuau

SEQ ID NO: 288789 - RNA, 19 nt, Artificial Sequence
  Description of Artificial Sequence: Synthetic oligonucleotide
  Antisense strand to SEQ ID NO: 288788
auagugagaacccuguacc

SEQ ID NO: 288790 - RNA, 19 nt, Artificial Sequence
  Description of Artificial Sequence: Synthetic oligonucleotide
  Sense strand starting at position 265 of SEQ ID NO: 3713
caggguucucacuauacug

SEQ ID NO: 288791 - RNA, 19 nt, Artificial Sequence
  Description of Artificial Sequence: Synthetic oligonucleotide
  Antisense strand to SEQ ID NO: 288790
caguauagugagaacccug

SEQ ID NO: 288792 - RNA, 19 nt, Artificial Sequence
  Description of Artificial Sequence: Synthetic oligonucleotide
  Sense strand starting at position 267 of SEQ ID NO: 3713
ggguucucacuauacugua

SEQ ID NO: 288793 - RNA, 19 nt, Artificial Sequence
  Description of Artificial Sequence: Synthetic oligonucleotide
  Antisense strand to SEQ ID NO: 288792
uacaguauagugagaaccc

SEQ ID NO: 288794 - RNA, 19 nt, Artificial Sequence
  Description of Artificial Sequence: Synthetic oligonucleotide
  Sense strand starting at position 411 of SEQ ID NO: 3713
aguguucucuucugcucaa

SEQ ID NO: 288795 - RNA, 19 nt, Artificial Sequence
  Description of Artificial Sequence: Synthetic oligonucleotide
  Antisense strand to SEQ ID NO: 288794
uugagcagaagagaacacu

SEQ ID NO: 288796 - RNA, 19 nt, Artificial Sequence
  Description of Artificial Sequence: Synthetic oligonucleotide
  Sense strand starting at position 424 of SEQ ID NO: 3713
gcucaagcuuguuuggaua

SEQ ID NO: 288797 - RNA, 19 nt, Artificial Sequence
  Description of Artificial Sequence: Synthetic oligonucleotide
  Antisense strand to SEQ ID NO: 288796
uauccaaacaagcuugagc

SEQ ID NO: 288798 - RNA, 19 nt, Artificial Sequence
  Description of Artificial Sequence: Synthetic oligonucleotide
  Sense strand starting at position 431 of SEQ ID NO: 3713
cuuguuuggauacguaauc

SEQ ID NO: 288799 - RNA, 19 nt, Artificial Sequence
  Description of Artificial Sequence: Synthetic oligonucleotide
  Antisense strand to SEQ ID NO: 288798
gauuacguauccaaacaag

SEQ ID NO: 288800 - RNA, 19 nt, Artificial Sequence
  Description of Artificial Sequence: Synthetic oligonucleotide
  Sense strand starting at position 436 of SEQ ID NO: 3713
uuggauacguaaucuauga

SEQ ID NO: 288801 - RNA, 19 nt, Artificial Sequence
  Description of Artificial Sequence: Synthetic oligonucleotide
  Antisense strand to SEQ ID NO: 288800
ucauagauuacguauccaa

SEQ ID NO: 288802 - RNA, 19 nt, Artificial Sequence
  Description of Artificial Sequence: Synthetic oligonucleotide
  Sense strand starting at position 440 of SEQ ID NO: 3713
auacguaaucuaugaauca

SEQ ID NO: 288803 - RNA, 19 nt, Artificial Sequence
  Description of Artificial Sequence: Synthetic oligonucleotide
  Antisense strand to SEQ ID NO: 288802
ugauucauagauuacguau

SEQ ID NO: 288804 - RNA, 19 nt, Artificial Sequence
  Description of Artificial Sequence: Synthetic oligonucleotide
  Sense strand starting at position 718 of SEQ ID NO: 3713
uuaaacuucucauguagga

SEQ ID NO: 288805 - RNA, 19 nt, Artificial Sequence
  Description of Artificial Sequence: Synthetic oligonucleotide
  Antisense strand to SEQ ID NO: 288804
uccuacaugagaaguuuaa

SEQ ID NO: 288806 - RNA, 19 nt, Artificial Sequence
  Description of Artificial Sequence: Synthetic oligonucleotide
  Sense strand starting at position 734 of SEQ ID NO: 3713
ggagguugcuuaguagagu

SEQ ID NO: 288807 - RNA, 19 nt, Artificial Sequence
  Description of Artificial Sequence: Synthetic oligonucleotide
  Antisense strand to SEQ ID NO: 288806
acucuacuaagcaaccucc

SEQ ID NO: 288808 - RNA, 19 nt, Artificial Sequence
  Description of Artificial Sequence: Synthetic oligonucleotide
  Sense strand starting at position 738 of SEQ ID NO: 3713
guugcuuaguagagugguu

SEQ ID NO: 288809 - RNA, 19 nt, Artificial Sequence
  Description of Artificial Sequence: Synthetic oligonucleotide
  Antisense strand to SEQ ID NO: 288808
aaccacucuacuaagcaac

SEQ ID NO: 288810 - RNA, 19 nt, Artificial Sequence
  Description of Artificial Sequence: Synthetic oligonucleotide
  Sense strand starting at position 743 of SEQ ID NO: 3713
uuaguagagugguucucaa

SEQ ID NO: 288811 - RNA, 19 nt, Artificial Sequence
  Description of Artificial Sequence: Synthetic oligonucleotide
  Antisense strand to SEQ ID NO: 288810
uugagaaccacucuacuaa

SEQ ID NO: 288812 - RNA, 19 nt, Artificial Sequence
  Description of Artificial Sequence: Synthetic oligonucleotide
  Sense strand starting at position 932 of SEQ ID NO: 3713
acacgaccuugguacuauu

SEQ ID NO: 288813 - RNA, 19 nt, Artificial Sequence
  Description of Artificial Sequence: Synthetic oligonucleotide
  Antisense strand to SEQ ID NO: 288812
aauaguaccaaggucgugu

SEQ ID NO: 288814 - RNA, 19 nt, Artificial Sequence
  Description of Artificial Sequence: Synthetic oligonucleotide
  Sense strand starting at position 1263 of SEQ ID NO: 3713
cuccguuauagccguaaga

SEQ ID NO: 288815 - RNA, 19 nt, Artificial Sequence
  Description of Artificial Sequence: Synthetic oligonucleotide
  Antisense strand to SEQ ID NO: 288814
ucuuacggcuauaacggag

SEQ ID NO: 288816 - RNA, 19 nt, Artificial Sequence
  Description of Artificial Sequence: Synthetic oligonucleotide
  Sense strand starting at position 1265 of SEQ ID NO: 3713
ccguuauagccguaagaga

SEQ ID NO: 288817 - RNA, 19 nt, Artificial Sequence
  Description of Artificial Sequence: Synthetic oligonucleotide
  Antisense strand to SEQ ID NO: 288816
ucucuuacggcuauaacgg

SEQ ID NO: 288818 - RNA, 19 nt, Artificial Sequence
  Description of Artificial Sequence: Synthetic oligonucleotide
  Sense strand starting at position 1323 of SEQ ID NO: 3713
cgggaagucguucaagaac

SEQ ID NO: 288819 - RNA, 19 nt, Artificial Sequence
  Description of Artificial Sequence: Synthetic oligonucleotide
  Antisense strand to SEQ ID NO: 288818
guucuugaacgacuucccg

SEQ ID NO: 288820 - RNA, 19 nt, Artificial Sequence
  Description of Artificial Sequence: Synthetic oligonucleotide
  Sense strand starting at position 2028 of SEQ ID NO: 3713
gguagguguggccgagaca

SEQ ID NO: 288821 - RNA, 19 nt, Artificial Sequence
  Description of Artificial Sequence: Synthetic oligonucleotide
  Antisense strand to SEQ ID NO: 288820
ugucucggccacaccuacc

SEQ ID NO: 288822 - RNA, 19 nt, Artificial Sequence
  Description of Artificial Sequence: Synthetic oligonucleotide
  Sense strand starting at position 72 of SEQ ID NO: 3714
uuucuuuaugacggcagaa

SEQ ID NO: 288823 - RNA, 19 nt, Artificial Sequence
  Description of Artificial Sequence: Synthetic oligonucleotide
  Antisense strand to SEQ ID NO: 288822
uucugccgucauaaagaaa

SEQ ID NO: 288824 - RNA, 19 nt, Artificial Sequence
  Description of Artificial Sequence: Synthetic oligonucleotide
  Sense strand starting at position 74 of SEQ ID NO: 3714
ucuuuaugacggcagaacu

SEQ ID NO: 288825 - RNA, 19 nt, Artificial Sequence
  Description of Artificial Sequence: Synthetic oligonucleotide
  Antisense strand to SEQ ID NO: 288824
aguucugccgucauaaaga

SEQ ID NO: 288826 - RNA, 19 nt, Artificial Sequence
  Description of Artificial Sequence: Synthetic oligonucleotide
  Sense strand starting at position 176 of SEQ ID NO: 3714
caaugaguaugggugacaa

SEQ ID NO: 288827 - RNA, 19 nt, Artificial Sequence
  Description of Artificial Sequence: Synthetic oligonucleotide
  Antisense strand to SEQ ID NO: 288826
uugucacccauacucauug

SEQ ID NO: 288828 - RNA, 19 nt, Artificial Sequence
  Description of Artificial Sequence: Synthetic oligonucleotide
  Sense strand starting at position 217 of SEQ ID NO: 3714
ccaauaguccacuggacaa

SEQ ID NO: 288829 - RNA, 19 nt, Artificial Sequence
  Description of Artificial Sequence: Synthetic oligonucleotide
  Antisense strand to SEQ ID NO: 288828
uuguccaguggacuauugg

SEQ ID NO: 288830 - RNA, 19 nt, Artificial Sequence
  Description of Artificial Sequence: Synthetic oligonucleotide
  Sense strand starting at position 267 of SEQ ID NO: 3714
gccugucuggaggaaaucu

SEQ ID NO: 288831 - RNA, 19 nt, Artificial Sequence
  Description of Artificial Sequence: Synthetic oligonucleotide
  Antisense strand to SEQ ID NO: 288830
agauuuccuccagacaggc

SEQ ID NO: 288832 - RNA, 19 nt, Artificial Sequence
  Description of Artificial Sequence: Synthetic oligonucleotide
  Sense strand starting at position 329 of SEQ ID NO: 3714
gcaguuaaggugggaagua

SEQ ID NO: 288833 - RNA, 19 nt, Artificial Sequence
  Description of Artificial Sequence: Synthetic oligonucleotide
  Antisense strand to SEQ ID NO: 288832
uacuucccaccuuaacugc

SEQ ID NO: 288834 - RNA, 19 nt, Artificial Sequence
  Description of Artificial Sequence: Synthetic oligonucleotide
  Sense strand starting at position 379 of SEQ ID NO: 3714
ggugcagaaguuugaacua

SEQ ID NO: 288835 - RNA, 19 nt, Artificial Sequence
  Description of Artificial Sequence: Synthetic oligonucleotide
  Antisense strand to SEQ ID NO: 288834
uaguucaaacuucugcacc

SEQ ID NO: 288836 - RNA, 19 nt, Artificial Sequence
  Description of Artificial Sequence: Synthetic oligonucleotide
  Sense strand starting at position 397 of SEQ ID NO: 3714
acaagaaguucaguguagu

SEQ ID NO: 288837 - RNA, 19 nt, Artificial Sequence
  Description of Artificial Sequence: Synthetic oligonucleotide
  Antisense strand to SEQ ID NO: 288836
acuacacugaacuucuugu

SEQ ID NO: 288838 - RNA, 19 nt, Artificial Sequence
  Description of Artificial Sequence: Synthetic oligonucleotide
  Sense strand starting at position 423 of SEQ ID NO: 3714
uguguuuccguggagagag

SEQ ID NO: 288839 - RNA, 19 nt, Artificial Sequence
  Description of Artificial Sequence: Synthetic oligonucleotide
  Antisense strand to SEQ ID NO: 288838
cucucuccacggaaacaca

SEQ ID NO: 288840 - RNA, 19 nt, Artificial Sequence
  Description of Artificial Sequence: Synthetic oligonucleotide
  Sense strand starting at position 774 of SEQ ID NO: 3714
aggaaauggcaccguuaga

SEQ ID NO: 288841 - RNA, 19 nt, Artificial Sequence
  Description of Artificial Sequence: Synthetic oligonucleotide
  Antisense strand to SEQ ID NO: 288840
ucuaacggugccauuuccu

SEQ ID NO: 288842 - RNA, 19 nt, Artificial Sequence
  Description of Artificial Sequence: Synthetic oligonucleotide
  Sense strand starting at position 919 of SEQ ID NO: 3714
gaggaauucccgcaggguc

SEQ ID NO: 288843 - RNA, 19 nt, Artificial Sequence
  Description of Artificial Sequence: Synthetic oligonucleotide
  Antisense strand to SEQ ID NO: 288842
gacccugcgggaauuccuc

SEQ ID NO: 288844 - RNA, 19 nt, Artificial Sequence
  Description of Artificial Sequence: Synthetic oligonucleotide
  Sense strand starting at position 1475 of SEQ ID NO: 3714
ggcaguuggccauauagag

SEQ ID NO: 288845 - RNA, 19 nt, Artificial Sequence
  Description of Artificial Sequence: Synthetic oligonucleotide
  Antisense strand to SEQ ID NO: 288844
cucuauauggccaacugcc

SEQ ID NO: 288846 - RNA, 19 nt, Artificial Sequence
  Description of Artificial Sequence: Synthetic oligonucleotide
  Sense strand starting at position 2337 of SEQ ID NO: 3714
aggaaacacuuccugaguu

SEQ ID NO: 288847 - RNA, 19 nt, Artificial Sequence
  Description of Artificial Sequence: Synthetic oligonucleotide
  Antisense strand to SEQ ID NO: 288846
aacucaggaaguguuuccu

SEQ ID NO: 288848 - RNA, 19 nt, Artificial Sequence
  Description of Artificial Sequence: Synthetic oligonucleotide
  Sense strand starting at position 2507 of SEQ ID NO: 3714
gagggucagacuugacaug

SEQ ID NO: 288849 - RNA, 19 nt, Artificial Sequence
  Description of Artificial Sequence: Synthetic oligonucleotide
  Antisense strand to SEQ ID NO: 288848
caugucaagucugacccuc

SEQ ID NO: 288850 - RNA, 19 nt, Artificial Sequence
  Description of Artificial Sequence: Synthetic oligonucleotide
  Sense strand starting at position 2562 of SEQ ID NO: 3714
uugggcuuugcuuauuaaa

SEQ ID NO: 288851 - RNA, 19 nt, Artificial Sequence
  Description of Artificial Sequence: Synthetic oligonucleotide
  Antisense strand to SEQ ID NO: 288850
uuuaauaagcaaagcccaa

SEQ ID NO: 288852 - RNA, 19 nt, Artificial Sequence
  Description of Artificial Sequence: Synthetic oligonucleotide
  Sense strand starting at position 2585 of SEQ ID NO: 3714
gccuauuauggugaaauua

SEQ ID NO: 288853 - RNA, 19 nt, Artificial Sequence
  Description of Artificial Sequence: Synthetic oligonucleotide
  Antisense strand to SEQ ID NO: 288852
uaauuucaccauaauaggc

SEQ ID NO: 288854 - RNA, 19 nt, Artificial Sequence
  Description of Artificial Sequence: Synthetic oligonucleotide
  Sense strand starting at position 2594 of SEQ ID NO: 3714
ggugaaauuaaacggcuga

SEQ ID NO: 288855 - RNA, 19 nt, Artificial Sequence
  Description of Artificial Sequence: Synthetic oligonucleotide
  Antisense strand to SEQ ID NO: 288854
ucagccguuuaauuucacc

SEQ ID NO: 288856 - RNA, 19 nt, Artificial Sequence
  Description of Artificial Sequence: Synthetic oligonucleotide
  Sense strand starting at position 2595 of SEQ ID NO: 3714
gugaaauuaaacggcugaa

SEQ ID NO: 288857 - RNA, 19 nt, Artificial Sequence
  Description of Artificial Sequence: Synthetic oligonucleotide
  Antisense strand to SEQ ID NO: 288856
uucagccguuuaauuucac

SEQ ID NO: 288858 - RNA, 19 nt, Artificial Sequence
  Description of Artificial Sequence: Synthetic oligonucleotide
  Sense strand starting at position 2598 of SEQ ID NO: 3714
aaauuaaacggcugaagga

SEQ ID NO: 288859 - RNA, 19 nt, Artificial Sequence
  Description of Artificial Sequence: Synthetic oligonucleotide
  Antisense strand to SEQ ID NO: 288858
uccuucagccguuuaauuu

SEQ ID NO: 288860 - RNA, 19 nt, Artificial Sequence
  Description of Artificial Sequence: Synthetic oligonucleotide
  Sense strand starting at position 2615 of SEQ ID NO: 3714
gaauguggaugagucguaa

SEQ ID NO: 288861 - RNA, 19 nt, Artificial Sequence
  Description of Artificial Sequence: Synthetic oligonucleotide
  Antisense strand to SEQ ID NO: 288860
uuacgacucauccacauuc

SEQ ID NO: 288862 - RNA, 19 nt, Artificial Sequence
  Description of Artificial Sequence: Synthetic oligonucleotide
  Sense strand starting at position 2730 of SEQ ID NO: 3714
uuuauuuggugucugcuua

SEQ ID NO: 288863 - RNA, 19 nt, Artificial Sequence
  Description of Artificial Sequence: Synthetic oligonucleotide
  Antisense strand to SEQ ID NO: 288862
uaagcagacaccaaauaaa

SEQ ID NO: 288864 - RNA, 19 nt, Artificial Sequence
  Description of Artificial Sequence: Synthetic oligonucleotide
  Sense strand starting at position 2731 of SEQ ID NO: 3714
uuauuuggugucugcuuaa

SEQ ID NO: 288865 - RNA, 19 nt, Artificial Sequence
  Description of Artificial Sequence: Synthetic oligonucleotide
  Antisense strand to SEQ ID NO: 288864
uuaagcagacaccaaauaa

SEQ ID NO: 288866 - RNA, 19 nt, Artificial Sequence
  Description of Artificial Sequence: Synthetic oligonucleotide
  Sense strand starting at position 2744 of SEQ ID NO: 3714
gcuuaaggauagucacuuu

SEQ ID NO: 288867 - RNA, 19 nt, Artificial Sequence
  Description of Artificial Sequence: Synthetic oligonucleotide
  Antisense strand to SEQ ID NO: 288866
aaagugacuauccuuaagc

SEQ ID NO: 288868 - RNA, 19 nt, Artificial Sequence
  Description of Artificial Sequence: Synthetic oligonucleotide
  Sense strand starting at position 2788 of SEQ ID NO: 3714
cuauuaagauagguuaagu

SEQ ID NO: 288869 - RNA, 19 nt, Artificial Sequence
  Description of Artificial Sequence: Synthetic oligonucleotide
  Antisense strand to SEQ ID NO: 288868
acuuaaccuaucuuaauag

SEQ ID NO: 288870 - RNA, 19 nt, Artificial Sequence
  Description of Artificial Sequence: Synthetic oligonucleotide
  Sense strand starting at position 2849 of SEQ ID NO: 3714
gcauaauaagcuuaauguu

SEQ ID NO: 288871 - RNA, 19 nt, Artificial Sequence
  Description of Artificial Sequence: Synthetic oligonucleotide
  Antisense strand to SEQ ID NO: 288870
aacauuaagcuuauuaugc

SEQ ID NO: 288872 - RNA, 19 nt, Artificial Sequence
  Description of Artificial Sequence: Synthetic oligonucleotide
  Sense strand starting at position 2876 of SEQ ID NO: 3714
gaagcaaaucugggaugcu

SEQ ID NO: 288873 - RNA, 19 nt, Artificial Sequence
  Description of Artificial Sequence: Synthetic oligonucleotide
  Antisense strand to SEQ ID NO: 288872
agcaucccagauuugcuuc

SEQ ID NO: 288874 - RNA, 19 nt, Artificial Sequence
  Description of Artificial Sequence: Synthetic oligonucleotide
  Sense strand starting at position 2879 of SEQ ID NO: 3714
gcaaaucugggaugcugaa

SEQ ID NO: 288875 - RNA, 19 nt, Artificial Sequence
  Description of Artificial Sequence: Synthetic oligonucleotide
  Antisense strand to SEQ ID NO: 288874
uucagcaucccagauuugc

SEQ ID NO: 288876 - RNA, 19 nt, Artificial Sequence
  Description of Artificial Sequence: Synthetic oligonucleotide
  Sense strand starting at position 2993 of SEQ ID NO: 3714
gaugcuuggcaacaguauu

SEQ ID NO: 288877 - RNA, 19 nt, Artificial Sequence
  Description of Artificial Sequence: Synthetic oligonucleotide
  Antisense strand to SEQ ID NO: 288876
aauacuguugccaagcauc

SEQ ID NO: 288878 - RNA, 19 nt, Artificial Sequence
  Description of Artificial Sequence: Synthetic oligonucleotide
  Sense strand starting at position 3025 of SEQ ID NO: 3714
aaagguguuuggguaagaa

SEQ ID NO: 288879 - RNA, 19 nt, Artificial Sequence
  Description of Artificial Sequence: Synthetic oligonucleotide
  Antisense strand to SEQ ID NO: 288878
uucuuacccaaacaccuuu

SEQ ID NO: 288880 - RNA, 19 nt, Artificial Sequence
  Description of Artificial Sequence: Synthetic oligonucleotide
  Sense strand starting at position 3065 of SEQ ID NO: 3714
ccgaaucucugagucugaa

SEQ ID NO: 288881 - RNA, 19 nt, Artificial Sequence
  Description of Artificial Sequence: Synthetic oligonucleotide
  Antisense strand to SEQ ID NO: 288880
uucagacucagagauucgg

SEQ ID NO: 288882 - RNA, 19 nt, Artificial Sequence
  Description of Artificial Sequence: Synthetic oligonucleotide
  Sense strand starting at position 3187 of SEQ ID NO: 3714
ggauuaaacuuuccuguua

SEQ ID NO: 288883 - RNA, 19 nt, Artificial Sequence
  Description of Artificial Sequence: Synthetic oligonucleotide
  Antisense strand to SEQ ID NO: 288882
uaacaggaaaguuuaaucc

SEQ ID NO: 288884 - RNA, 19 nt, Artificial Sequence
  Description of Artificial Sequence: Synthetic oligonucleotide
  Sense strand starting at position 3242 of SEQ ID NO: 3714
agggacuuagcucaucuua

SEQ ID NO: 288885 - RNA, 19 nt, Artificial Sequence
  Description of Artificial Sequence: Synthetic oligonucleotide
  Antisense strand to SEQ ID NO: 288884
uaagaugagcuaagucccu

SEQ ID NO: 288886 - RNA, 19 nt, Artificial Sequence
  Description of Artificial Sequence: Synthetic oligonucleotide
  Sense strand starting at position 3244 of SEQ ID NO: 3714
ggacuuagcucaucuuauc

SEQ ID NO: 288887 - RNA, 19 nt, Artificial Sequence
  Description of Artificial Sequence: Synthetic oligonucleotide
  Antisense strand to SEQ ID NO: 288886
gauaagaugagcuaagucc

SEQ ID NO: 288888 - RNA, 19 nt, Artificial Sequence
  Description of Artificial Sequence: Synthetic oligonucleotide
  Sense strand starting at position 3322 of SEQ ID NO: 3714
agauauaguugaccuauau

SEQ ID NO: 288889 - RNA, 19 nt, Artificial Sequence
  Description of Artificial Sequence: Synthetic oligonucleotide
  Antisense strand to SEQ ID NO: 288888
auauaggucaacuauaucu

SEQ ID NO: 288890 - RNA, 19 nt, Artificial Sequence
  Description of Artificial Sequence: Synthetic oligonucleotide
  Sense strand starting at position 3355 of SEQ ID NO: 3714
ccacuaggcuuacuugaau

SEQ ID NO: 288891 - RNA, 19 nt, Artificial Sequence
  Description of Artificial Sequence: Synthetic oligonucleotide
  Antisense strand to SEQ ID NO: 288890
auucaaguaagccuagugg

SEQ ID NO: 288892 - RNA, 19 nt, Artificial Sequence
  Description of Artificial Sequence: Synthetic oligonucleotide
  Sense strand starting at position 3548 of SEQ ID NO: 3714
gaaauugcuguguaggguu

SEQ ID NO: 288893 - RNA, 19 nt, Artificial Sequence
  Description of Artificial Sequence: Synthetic oligonucleotide
  Antisense strand to SEQ ID NO: 288892
aacccuacacagcaauuuc

SEQ ID NO: 288894 - RNA, 19 nt, Artificial Sequence
  Description of Artificial Sequence: Synthetic oligonucleotide
  Sense strand starting at position 3947 of SEQ ID NO: 3714
ucuagugugagagacuuau

SEQ ID NO: 288895 - RNA, 19 nt, Artificial Sequence
  Description of Artificial Sequence: Synthetic oligonucleotide
  Antisense strand to SEQ ID NO: 288894
auaagucucucacacuaga

SEQ ID NO: 288896 - RNA, 19 nt, Artificial Sequence
  Description of Artificial Sequence: Synthetic oligonucleotide
  Sense strand starting at position 3957 of SEQ ID NO: 3714
gagacuuauuuguagaaga

SEQ ID NO: 288897 - RNA, 19 nt, Artificial Sequence
  Description of Artificial Sequence: Synthetic oligonucleotide
  Antisense strand to SEQ ID NO: 288896
ucuucuacaaauaagucuc

SEQ ID NO: 288898 - RNA, 19 nt, Artificial Sequence
  Description of Artificial Sequence: Synthetic oligonucleotide
  Sense strand starting at position 3968 of SEQ ID NO: 3714
guagaagaguaauuacauu

SEQ ID NO: 288899 - RNA, 19 nt, Artificial Sequence
  Description of Artificial Sequence: Synthetic oligonucleotide
  Antisense strand to SEQ ID NO: 288898
aauguaauuacucuucuac

SEQ ID NO: 288900 - RNA, 19 nt, Artificial Sequence
  Description of Artificial Sequence: Synthetic oligonucleotide
  Sense strand starting at position 3981 of SEQ ID NO: 3714
uacauuauggugugauaag

SEQ ID NO: 288901 - RNA, 19 nt, Artificial Sequence
  Description of Artificial Sequence: Synthetic oligonucleotide
  Antisense strand to SEQ ID NO: 288900
cuuaucacaccauaaugua

SEQ ID NO: 288902 - RNA, 19 nt, Artificial Sequence
  Description of Artificial Sequence: Synthetic oligonucleotide
  Sense strand starting at position 87 of SEQ ID NO: 3715
aacaucuggcgauguagaa

SEQ ID NO: 288903 - RNA, 19 nt, Artificial Sequence
  Description of Artificial Sequence: Synthetic oligonucleotide
  Antisense strand to SEQ ID NO: 288902
uucuacaucgccagauguu

SEQ ID NO: 288904 - RNA, 19 nt, Artificial Sequence
  Description of Artificial Sequence: Synthetic oligonucleotide
  Sense strand starting at position 107 of SEQ ID NO: 3715
ccggaagguccaugaucuu

SEQ ID NO: 288905 - RNA, 19 nt, Artificial Sequence
  Description of Artificial Sequence: Synthetic oligonucleotide
  Antisense strand to SEQ ID NO: 288904
aagaucauggaccuuccgg

SEQ ID NO: 288906 - RNA, 19 nt, Artificial Sequence
  Description of Artificial Sequence: Synthetic oligonucleotide
  Sense strand starting at position 110 of SEQ ID NO: 3715
gaagguccaugaucuuauu

SEQ ID NO: 288907 - RNA, 19 nt, Artificial Sequence
  Description of Artificial Sequence: Synthetic oligonucleotide
  Antisense strand to SEQ ID NO: 288906
aauaagaucauggaccuuc

SEQ ID NO: 288908 - RNA, 19 nt, Artificial Sequence
  Description of Artificial Sequence: Synthetic oligonucleotide
  Sense strand starting at position 210 of SEQ ID NO: 3715
ggauaaguggcauguauga

SEQ ID NO: 288909 - RNA, 19 nt, Artificial Sequence
  Description of Artificial Sequence: Synthetic oligonucleotide
  Antisense strand to SEQ ID NO: 288908
ucauacaugccacuuaucc

SEQ ID NO: 288910 - RNA, 19 nt, Artificial Sequence
  Description of Artificial Sequence: Synthetic oligonucleotide
  Sense strand starting at position 212 of SEQ ID NO: 3715
auaaguggcauguaugacu

SEQ ID NO: 288911 - RNA, 19 nt, Artificial Sequence
  Description of Artificial Sequence: Synthetic oligonucleotide
  Antisense strand to SEQ ID NO: 288910
agucauacaugccacuuau

SEQ ID NO: 288912 - RNA, 19 nt, Artificial Sequence
  Description of Artificial Sequence: Synthetic oligonucleotide
  Sense strand starting at position 217 of SEQ ID NO: 3715
uggcauguaugacuacuaa

SEQ ID NO: 288913 - RNA, 19 nt, Artificial Sequence
  Description of Artificial Sequence: Synthetic oligonucleotide
  Antisense strand to SEQ ID NO: 288912
uuaguagucauacaugcca

SEQ ID NO: 288914 - RNA, 19 nt, Artificial Sequence
  Description of Artificial Sequence: Synthetic oligonucleotide
  Sense strand starting at position 613 of SEQ ID NO: 3715
uacacaucaugaguuagga

SEQ ID NO: 288915 - RNA, 19 nt, Artificial Sequence
  Description of Artificial Sequence: Synthetic oligonucleotide
  Antisense strand to SEQ ID NO: 288914
uccuaacucaugaugugua

SEQ ID NO: 288916 - RNA, 19 nt, Artificial Sequence
  Description of Artificial Sequence: Synthetic oligonucleotide
  Sense strand starting at position 746 of SEQ ID NO: 3715
uuucuuuaugacggcagaa

SEQ ID NO: 288917 - RNA, 19 nt, Artificial Sequence
  Description of Artificial Sequence: Synthetic oligonucleotide
  Antisense strand to SEQ ID NO: 288916
uucugccgucauaaagaaa

SEQ ID NO: 288918 - RNA, 19 nt, Artificial Sequence
  Description of Artificial Sequence: Synthetic oligonucleotide
  Sense strand starting at position 748 of SEQ ID NO: 3715
ucuuuaugacggcagaacu

SEQ ID NO: 288919 - RNA, 19 nt, Artificial Sequence
  Description of Artificial Sequence: Synthetic oligonucleotide
  Antisense strand to SEQ ID NO: 288918
aguucugccgucauaaaga

SEQ ID NO: 288920 - RNA, 19 nt, Artificial Sequence
  Description of Artificial Sequence: Synthetic oligonucleotide
  Sense strand starting at position 850 of SEQ ID NO: 3715
caaugaguaugggugacaa

SEQ ID NO: 288921 - RNA, 19 nt, Artificial Sequence
  Description of Artificial Sequence: Synthetic oligonucleotide
  Antisense strand to SEQ ID NO: 288920
uugucacccauacucauug

SEQ ID NO: 288922 - RNA, 19 nt, Artificial Sequence
  Description of Artificial Sequence: Synthetic oligonucleotide
  Sense strand starting at position 891 of SEQ ID NO: 3715
ccaauaguccacuggacaa

SEQ ID NO: 288923 - RNA, 19 nt, Artificial Sequence
  Description of Artificial Sequence: Synthetic oligonucleotide
  Antisense strand to SEQ ID NO: 288922
uuguccaguggacuauugg

SEQ ID NO: 288924 - RNA, 19 nt, Artificial Sequence
  Description of Artificial Sequence: Synthetic oligonucleotide
  Sense strand starting at position 941 of SEQ ID NO: 3715
gccugucuggaggaaaucu

SEQ ID NO: 288925 - RNA, 19 nt, Artificial Sequence
  Description of Artificial Sequence: Synthetic oligonucleotide
  Antisense strand to SEQ ID NO: 288924
agauuuccuccagacaggc

SEQ ID NO: 288926 - RNA, 19 nt, Artificial Sequence
  Description of Artificial Sequence: Synthetic oligonucleotide
  Sense strand starting at position 1003 of SEQ ID NO: 3715
gcaguuaaggugggaagua

SEQ ID NO: 288927 - RNA, 19 nt, Artificial Sequence
  Description of Artificial Sequence: Synthetic oligonucleotide
  Antisense strand to SEQ ID NO: 288926
uacuucccaccuuaacugc

SEQ ID NO: 288928 - RNA, 19 nt, Artificial Sequence
  Description of Artificial Sequence: Synthetic oligonucleotide
  Sense strand starting at position 1053 of SEQ ID NO: 3715
ggugcagaaguuugaacua

SEQ ID NO: 288929 - RNA, 19 nt, Artificial Sequence
  Description of Artificial Sequence: Synthetic oligonucleotide
  Antisense strand to SEQ ID NO: 288928
uaguucaaacuucugcacc

SEQ ID NO: 288930 - RNA, 19 nt, Artificial Sequence
  Description of Artificial Sequence: Synthetic oligonucleotide
  Sense strand starting at position 1071 of SEQ ID NO: 3715
acaagaaguucaguguagu

SEQ ID NO: 288931 - RNA, 19 nt, Artificial Sequence
  Description of Artificial Sequence: Synthetic oligonucleotide
  Antisense strand to SEQ ID NO: 288930
acuacacugaacuucuugu

SEQ ID NO: 288932 - RNA, 19 nt, Artificial Sequence
  Description of Artificial Sequence: Synthetic oligonucleotide
  Sense strand starting at position 1097 of SEQ ID NO: 3715
uguguuuccguggagagag

SEQ ID NO: 288933 - RNA, 19 nt, Artificial Sequence
  Description of Artificial Sequence: Synthetic oligonucleotide
  Antisense strand to SEQ ID NO: 288932
cucucuccacggaaacaca

SEQ ID NO: 288934 - RNA, 19 nt, Artificial Sequence
  Description of Artificial Sequence: Synthetic oligonucleotide
  Sense strand starting at position 1448 of SEQ ID NO: 3715
aggaaauggcaccguuaga

SEQ ID NO: 288935 - RNA, 19 nt, Artificial Sequence
  Description of Artificial Sequence: Synthetic oligonucleotide
  Antisense strand to SEQ ID NO: 288934
ucuaacggugccauuuccu

SEQ ID NO: 288936 - RNA, 19 nt, Artificial Sequence
  Description of Artificial Sequence: Synthetic oligonucleotide
  Sense strand starting at position 1593 of SEQ ID NO: 3715
gaggaauucccgcaggguc

SEQ ID NO: 288937 - RNA, 19 nt, Artificial Sequence
  Description of Artificial Sequence: Synthetic oligonucleotide
  Antisense strand to SEQ ID NO: 288936
gacccugcgggaauuccuc

SEQ ID NO: 288938 - RNA, 19 nt, Artificial Sequence
  Description of Artificial Sequence: Synthetic oligonucleotide
  Sense strand starting at position 2149 of SEQ ID NO: 3715
ggcaguuggccauauagag

SEQ ID NO: 288939 - RNA, 19 nt, Artificial Sequence
  Description of Artificial Sequence: Synthetic oligonucleotide
  Antisense strand to SEQ ID NO: 288938
cucuauauggccaacugcc

SEQ ID NO: 288940 - RNA, 19 nt, Artificial Sequence
  Description of Artificial Sequence: Synthetic oligonucleotide
  Sense strand starting at position 3011 of SEQ ID NO: 3715
aggaaacacuuccugaguu

SEQ ID NO: 288941 - RNA, 19 nt, Artificial Sequence
  Description of Artificial Sequence: Synthetic oligonucleotide
  Antisense strand to SEQ ID NO: 288940
aacucaggaaguguuuccu

SEQ ID NO: 288942 - RNA, 19 nt, Artificial Sequence
  Description of Artificial Sequence: Synthetic oligonucleotide
  Sense strand starting at position 3181 of SEQ ID NO: 3715
gagggucagacuugacaug

SEQ ID NO: 288943 - RNA, 19 nt, Artificial Sequence
  Description of Artificial Sequence: Synthetic oligonucleotide
  Antisense strand to SEQ ID NO: 288942
caugucaagucugacccuc

SEQ ID NO: 288944 - RNA, 19 nt, Artificial Sequence
  Description of Artificial Sequence: Synthetic oligonucleotide
  Sense strand starting at position 3236 of SEQ ID NO: 3715
uugggcuuugcuuauuaaa

SEQ ID NO: 288945 - RNA, 19 nt, Artificial Sequence
  Description of Artificial Sequence: Synthetic oligonucleotide
  Antisense strand to SEQ ID NO: 288944
uuuaauaagcaaagcccaa

SEQ ID NO: 288946 - RNA, 19 nt, Artificial Sequence
  Description of Artificial Sequence: Synthetic oligonucleotide
  Sense strand starting at position 3259 of SEQ ID NO: 3715
gccuauuauggugaaauua

SEQ ID NO: 288947 - RNA, 19 nt, Artificial Sequence
  Description of Artificial Sequence: Synthetic oligonucleotide
  Antisense strand to SEQ ID NO: 288946
uaauuucaccauaauaggc

SEQ ID NO: 288948 - RNA, 19 nt, Artificial Sequence
  Description of Artificial Sequence: Synthetic oligonucleotide
  Sense strand starting at position 3268 of SEQ ID NO: 3715
ggugaaauuaaacggcuga

SEQ ID NO: 288949 - RNA, 19 nt, Artificial Sequence
  Description of Artificial Sequence: Synthetic oligonucleotide
  Antisense strand to SEQ ID NO: 288948
ucagccguuuaauuucacc

SEQ ID NO: 288950 - RNA, 19 nt, Artificial Sequence
  Description of Artificial Sequence: Synthetic oligonucleotide
  Sense strand starting at position 3269 of SEQ ID NO: 3715
gugaaauuaaacggcugaa

SEQ ID NO: 288951 - RNA, 19 nt, Artificial Sequence
  Description of Artificial Sequence: Synthetic oligonucleotide
  Antisense strand to SEQ ID NO: 288950
uucagccguuuaauuucac

SEQ ID NO: 288952 - RNA, 19 nt, Artificial Sequence
  Description of Artificial Sequence: Synthetic oligonucleotide
  Sense strand starting at position 3272 of SEQ ID NO: 3715
aaauuaaacggcugaagga

SEQ ID NO: 288953 - RNA, 19 nt, Artificial Sequence
  Description of Artificial Sequence: Synthetic oligonucleotide
  Antisense strand to SEQ ID NO: 288952
uccuucagccguuuaauuu

SEQ ID NO: 288954 - RNA, 19 nt, Artificial Sequence
  Description of Artificial Sequence: Synthetic oligonucleotide
  Sense strand starting at position 3289 of SEQ ID NO: 3715
gaauguggaugagucguaa

SEQ ID NO: 288955 - RNA, 19 nt, Artificial Sequence
  Description of Artificial Sequence: Synthetic oligonucleotide
  Antisense strand to SEQ ID NO: 288954
uuacgacucauccacauuc

SEQ ID NO: 288956 - RNA, 19 nt, Artificial Sequence
  Description of Artificial Sequence: Synthetic oligonucleotide
  Sense strand starting at position 3404 of SEQ ID NO: 3715
uuuauuuggugucugcuua

SEQ ID NO: 288957 - RNA, 19 nt, Artificial Sequence
  Description of Artificial Sequence: Synthetic oligonucleotide
  Antisense strand to SEQ ID NO: 288956
uaagcagacaccaaauaaa

SEQ ID NO: 288958 - RNA, 19 nt, Artificial Sequence
  Description of Artificial Sequence: Synthetic oligonucleotide
  Sense strand starting at position 3405 of SEQ ID NO: 3715
uuauuuggugucugcuuaa

SEQ ID NO: 288959 - RNA, 19 nt, Artificial Sequence
  Description of Artificial Sequence: Synthetic oligonucleotide
  Antisense strand to SEQ ID NO: 288958
uuaagcagacaccaaauaa

SEQ ID NO: 288960 - RNA, 19 nt, Artificial Sequence
  Description of Artificial Sequence: Synthetic oligonucleotide
  Sense strand starting at position 3418 of SEQ ID NO: 3715
gcuuaaggauagucacuuu

SEQ ID NO: 288961 - RNA, 19 nt, Artificial Sequence
  Description of Artificial Sequence: Synthetic oligonucleotide
  Antisense strand to SEQ ID NO: 288960
aaagugacuauccuuaagc

SEQ ID NO: 288962 - RNA, 19 nt, Artificial Sequence
  Description of Artificial Sequence: Synthetic oligonucleotide
  Sense strand starting at position 3462 of SEQ ID NO: 3715
cuauuaagauagguuaagu

SEQ ID NO: 288963 - RNA, 19 nt, Artificial Sequence
  Description of Artificial Sequence: Synthetic oligonucleotide
  Antisense strand to SEQ ID NO: 288962
acuuaaccuaucuuaauag

SEQ ID NO: 288964 - RNA, 19 nt, Artificial Sequence
  Description of Artificial Sequence: Synthetic oligonucleotide
  Sense strand starting at position 3523 of SEQ ID NO: 3715
gcauaauaagcuuaauguu

SEQ ID NO: 288965 - RNA, 19 nt, Artificial Sequence
  Description of Artificial Sequence: Synthetic oligonucleotide
  Antisense strand to SEQ ID NO: 288964
aacauuaagcuuauuaugc

SEQ ID NO: 288966 - RNA, 19 nt, Artificial Sequence
  Description of Artificial Sequence: Synthetic oligonucleotide
  Sense strand starting at position 3550 of SEQ ID NO: 3715
gaagcaaaucugggaugcu

SEQ ID NO: 288967 - RNA, 19 nt, Artificial Sequence
  Description of Artificial Sequence: Synthetic oligonucleotide
  Antisense strand to SEQ ID NO: 288966
agcaucccagauuugcuuc

SEQ ID NO: 288968 - RNA, 19 nt, Artificial Sequence
  Description of Artificial Sequence: Synthetic oligonucleotide
  Sense strand starting at position 3553 of SEQ ID NO: 3715
gcaaaucugggaugcugaa

SEQ ID NO: 288969 - RNA, 19 nt, Artificial Sequence
  Description of Artificial Sequence: Synthetic oligonucleotide
  Antisense strand to SEQ ID NO: 288968
uucagcaucccagauuugc

SEQ ID NO: 288970 - RNA, 19 nt, Artificial Sequence
  Description of Artificial Sequence: Synthetic oligonucleotide
  Sense strand starting at position 3667 of SEQ ID NO: 3715
gaugcuuggcaacaguauu

SEQ ID NO: 288971 - RNA, 19 nt, Artificial Sequence
  Description of Artificial Sequence: Synthetic oligonucleotide
  Antisense strand to SEQ ID NO: 288970
aauacuguugccaagcauc

SEQ ID NO: 288972 - RNA, 19 nt, Artificial Sequence
  Description of Artificial Sequence: Synthetic oligonucleotide
  Sense strand starting at position 3699 of SEQ ID NO: 3715
aaagguguuuggguaagaa

SEQ ID NO: 288973 - RNA, 19 nt, Artificial Sequence
  Description of Artificial Sequence: Synthetic oligonucleotide
  Antisense strand to SEQ ID NO: 288972
uucuuacccaaacaccuuu

SEQ ID NO: 288974 - RNA, 19 nt, Artificial Sequence
  Description of Artificial Sequence: Synthetic oligonucleotide
  Sense strand starting at position 3739 of SEQ ID NO: 3715
ccgaaucucugagucugaa

SEQ ID NO: 288975 - RNA, 19 nt, Artificial Sequence
  Description of Artificial Sequence: Synthetic oligonucleotide
  Antisense strand to SEQ ID NO: 288974
uucagacucagagauucgg

SEQ ID NO: 288976 - RNA, 19 nt, Artificial Sequence
  Description of Artificial Sequence: Synthetic oligonucleotide
  Sense strand starting at position 3861 of SEQ ID NO: 3715
ggauuaaacuuuccuguua

SEQ ID NO: 288977 - RNA, 19 nt, Artificial Sequence
  Description of Artificial Sequence: Synthetic oligonucleotide
  Antisense strand to SEQ ID NO: 288976
uaacaggaaaguuuaaucc

SEQ ID NO: 288978 - RNA, 19 nt, Artificial Sequence
  Description of Artificial Sequence: Synthetic oligonucleotide
  Sense strand starting at position 3916 of SEQ ID NO: 3715
agggacuuagcucaucuua

SEQ ID NO: 288979 - RNA, 19 nt, Artificial Sequence
  Description of Artificial Sequence: Synthetic oligonucleotide
  Antisense strand to SEQ ID NO: 288978
uaagaugagcuaagucccu

SEQ ID NO: 288980 - RNA, 19 nt, Artificial Sequence
  Description of Artificial Sequence: Synthetic oligonucleotide
  Sense strand starting at position 3918 of SEQ ID NO: 3715
ggacuuagcucaucuuauc

SEQ ID NO: 288981 - RNA, 19 nt, Artificial Sequence
  Description of Artificial Sequence: Synthetic oligonucleotide
  Antisense strand to SEQ ID NO: 288980
gauaagaugagcuaagucc

SEQ ID NO: 288982 - RNA, 19 nt, Artificial Sequence
  Description of Artificial Sequence: Synthetic oligonucleotide
  Sense strand starting at position 118 of SEQ ID NO: 3717
gagagacgugguugucacu

SEQ ID NO: 288983 - RNA, 19 nt, Artificial Sequence
  Description of Artificial Sequence: Synthetic oligonucleotide
  Antisense strand to SEQ ID NO: 288982
agugacaaccacgucucuc

SEQ ID NO: 288984 - RNA, 19 nt, Artificial Sequence
  Description of Artificial Sequence: Synthetic oligonucleotide
  Sense strand starting at position 459 of SEQ ID NO: 3717
guuucaagcgagcaaggau

SEQ ID NO: 288985 - RNA, 19 nt, Artificial Sequence
  Description of Artificial Sequence: Synthetic oligonucleotide
  Antisense strand to SEQ ID NO: 288984
auccuugcucgcuugaaac

SEQ ID NO: 288986 - RNA, 19 nt, Artificial Sequence
  Description of Artificial Sequence: Synthetic oligonucleotide
  Sense strand starting at position 467 of SEQ ID NO: 3717
cgagcaaggaucugcucua

SEQ ID NO: 288987 - RNA, 19 nt, Artificial Sequence
  Description of Artificial Sequence: Synthetic oligonucleotide
  Antisense strand to SEQ ID NO: 288986
uagagcagauccuugcucg

SEQ ID NO: 288988 - RNA, 19 nt, Artificial Sequence
  Description of Artificial Sequence: Synthetic oligonucleotide
  Sense strand starting at position 468 of SEQ ID NO: 3717
gagcaaggaucugcucuau

SEQ ID NO: 288989 - RNA, 19 nt, Artificial Sequence
  Description of Artificial Sequence: Synthetic oligonucleotide
  Antisense strand to SEQ ID NO: 288988
auagagcagauccuugcuc

SEQ ID NO: 288990 - RNA, 19 nt, Artificial Sequence
  Description of Artificial Sequence: Synthetic oligonucleotide
  Sense strand starting at position 537 of SEQ ID NO: 3717
gaagauuuauuggaugacu

SEQ ID NO: 288991 - RNA, 19 nt, Artificial Sequence
  Description of Artificial Sequence: Synthetic oligonucleotide
  Antisense strand to SEQ ID NO: 288990
agucauccaauaaaucuuc

SEQ ID NO: 288992 - RNA, 19 nt, Artificial Sequence
  Description of Artificial Sequence: Synthetic oligonucleotide
  Sense strand starting at position 618 of SEQ ID NO: 3717
cucuauucuccugguagaa

SEQ ID NO: 288993 - RNA, 19 nt, Artificial Sequence
  Description of Artificial Sequence: Synthetic oligonucleotide
  Antisense strand to SEQ ID NO: 288992
uucuaccaggagaauagag

SEQ ID NO: 288994 - RNA, 19 nt, Artificial Sequence
  Description of Artificial Sequence: Synthetic oligonucleotide
  Sense strand starting at position 685 of SEQ ID NO: 3717
aucgcuugcauugaagauu

SEQ ID NO: 288995 - RNA, 19 nt, Artificial Sequence
  Description of Artificial Sequence: Synthetic oligonucleotide
  Antisense strand to SEQ ID NO: 288994
aaucuucaaugcaagcgau

SEQ ID NO: 288996 - RNA, 19 nt, Artificial Sequence
  Description of Artificial Sequence: Synthetic oligonucleotide
  Sense strand starting at position 696 of SEQ ID NO: 3717
ugaagauuacagugggagu

SEQ ID NO: 288997 - RNA, 19 nt, Artificial Sequence
  Description of Artificial Sequence: Synthetic oligonucleotide
  Antisense strand to SEQ ID NO: 288996
acucccacuguaaucuuca

SEQ ID NO: 288998 - RNA, 19 nt, Artificial Sequence
  Description of Artificial Sequence: Synthetic oligonucleotide
  Sense strand starting at position 794 of SEQ ID NO: 3717
gcaagacuuggagguacuu

SEQ ID NO: 288999 - RNA, 19 nt, Artificial Sequence
  Description of Artificial Sequence: Synthetic oligonucleotide
  Antisense strand to SEQ ID NO: 288998
aaguaccuccaagucuugc

SEQ ID NO: 289000 - RNA, 19 nt, Artificial Sequence
  Description of Artificial Sequence: Synthetic oligonucleotide
  Sense strand starting at position 816 of SEQ ID NO: 3717
ggacuugguagcuggagua

SEQ ID NO: 289001 - RNA, 19 nt, Artificial Sequence
  Description of Artificial Sequence: Synthetic oligonucleotide
  Antisense strand to SEQ ID NO: 289000
uacuccagcuaccaagucc

SEQ ID NO: 289002 - RNA, 19 nt, Artificial Sequence
  Description of Artificial Sequence: Synthetic oligonucleotide
  Sense strand starting at position 1043 of SEQ ID NO: 3717
acaaucucugacugguauu

SEQ ID NO: 289003 - RNA, 19 nt, Artificial Sequence
  Description of Artificial Sequence: Synthetic oligonucleotide
  Antisense strand to SEQ ID NO: 289002
aauaccagucagagauugu

SEQ ID NO: 289004 - RNA, 19 nt, Artificial Sequence
  Description of Artificial Sequence: Synthetic oligonucleotide
  Sense strand starting at position 1046 of SEQ ID NO: 3717
aucucugacugguauuuaa

SEQ ID NO: 289005 - RNA, 19 nt, Artificial Sequence
  Description of Artificial Sequence: Synthetic oligonucleotide
  Antisense strand to SEQ ID NO: 289004
uuaaauaccagucagagau

SEQ ID NO: 289006 - RNA, 19 nt, Artificial Sequence
  Description of Artificial Sequence: Synthetic oligonucleotide
  Sense strand starting at position 1214 of SEQ ID NO: 3717
guaauugcccugcauggua

SEQ ID NO: 289007 - RNA, 19 nt, Artificial Sequence
  Description of Artificial Sequence: Synthetic oligonucleotide
  Antisense strand to SEQ ID NO: 289006
uaccaugcagggcaauuac

SEQ ID NO: 289008 - RNA, 19 nt, Artificial Sequence
  Description of Artificial Sequence: Synthetic oligonucleotide
  Sense strand starting at position 1221 of SEQ ID NO: 3717
cccugcaugguacgauauu

SEQ ID NO: 289009 - RNA, 19 nt, Artificial Sequence
  Description of Artificial Sequence: Synthetic oligonucleotide
  Antisense strand to SEQ ID NO: 289008
aauaucguaccaugcaggg

SEQ ID NO: 289010 - RNA, 19 nt, Artificial Sequence
  Description of Artificial Sequence: Synthetic oligonucleotide
  Sense strand starting at position 1287 of SEQ ID NO: 3717
accuuagauuacucagguu

SEQ ID NO: 289011 - RNA, 19 nt, Artificial Sequence
  Description of Artificial Sequence: Synthetic oligonucleotide
  Antisense strand to SEQ ID NO: 289010
aaccugaguaaucuaaggu

SEQ ID NO: 289012 - RNA, 19 nt, Artificial Sequence
  Description of Artificial Sequence: Synthetic oligonucleotide
  Sense strand starting at position 1357 of SEQ ID NO: 3717
gcaaauaaguacugauuua

SEQ ID NO: 289013 - RNA, 19 nt, Artificial Sequence
  Description of Artificial Sequence: Synthetic oligonucleotide
  Antisense strand to SEQ ID NO: 289012
uaaaucaguacuuauuugc

SEQ ID NO: 289014 - RNA, 19 nt, Artificial Sequence
  Description of Artificial Sequence: Synthetic oligonucleotide
  Sense strand starting at position 1409 of SEQ ID NO: 3717
uucgaagugugguuuagga

SEQ ID NO: 289015 - RNA, 19 nt, Artificial Sequence
  Description of Artificial Sequence: Synthetic oligonucleotide
  Antisense strand to SEQ ID NO: 289014
uccuaaaccacacuucgaa

SEQ ID NO: 289016 - RNA, 19 nt, Artificial Sequence
  Description of Artificial Sequence: Synthetic oligonucleotide
  Sense strand starting at position 1411 of SEQ ID NO: 3717
cgaagugugguuuaggaua

SEQ ID NO: 289017 - RNA, 19 nt, Artificial Sequence
  Description of Artificial Sequence: Synthetic oligonucleotide
  Antisense strand to SEQ ID NO: 289016
uauccuaaaccacacuucg

SEQ ID NO: 289018 - RNA, 19 nt, Artificial Sequence
  Description of Artificial Sequence: Synthetic oligonucleotide
  Sense strand starting at position 1435 of SEQ ID NO: 3717
auuagcaauguugacaauu

SEQ ID NO: 289019 - RNA, 19 nt, Artificial Sequence
  Description of Artificial Sequence: Synthetic oligonucleotide
  Antisense strand to SEQ ID NO: 289018
aauugucaacauugcuaau

SEQ ID NO: 289020 - RNA, 19 nt, Artificial Sequence
  Description of Artificial Sequence: Synthetic oligonucleotide
  Sense strand starting at position 1443 of SEQ ID NO: 3717
uguugacaauucuuccagu

SEQ ID NO: 289021 - RNA, 19 nt, Artificial Sequence
  Description of Artificial Sequence: Synthetic oligonucleotide
  Antisense strand to SEQ ID NO: 289020
acuggaagaauugucaaca

SEQ ID NO: 289022 - RNA, 19 nt, Artificial Sequence
  Description of Artificial Sequence: Synthetic oligonucleotide
  Sense strand starting at position 1444 of SEQ ID NO: 3717
guugacaauucuuccaguu

SEQ ID NO: 289023 - RNA, 19 nt, Artificial Sequence
  Description of Artificial Sequence: Synthetic oligonucleotide
  Antisense strand to SEQ ID NO: 289022
aacuggaagaauugucaac

SEQ ID NO: 289024 - RNA, 19 nt, Artificial Sequence
  Description of Artificial Sequence: Synthetic oligonucleotide
  Sense strand starting at position 1457 of SEQ ID NO: 3717
ccaguuaucugugcucaag

SEQ ID NO: 289025 - RNA, 19 nt, Artificial Sequence
  Description of Artificial Sequence: Synthetic oligonucleotide
  Antisense strand to SEQ ID NO: 289024
cuugagcacagauaacugg

SEQ ID NO: 289026 - RNA, 19 nt, Artificial Sequence
  Description of Artificial Sequence: Synthetic oligonucleotide
  Sense strand starting at position 1460 of SEQ ID NO: 3717
guuaucugugcucaaguuu

SEQ ID NO: 289027 - RNA, 19 nt, Artificial Sequence
  Description of Artificial Sequence: Synthetic oligonucleotide
  Antisense strand to SEQ ID NO: 289026
aaacuugagcacagauaac

SEQ ID NO: 289028 - RNA, 19 nt, Artificial Sequence
  Description of Artificial Sequence: Synthetic oligonucleotide
  Sense strand starting at position 1544 of SEQ ID NO: 3717
acggcuucuuggcuugaaa

SEQ ID NO: 289029 - RNA, 19 nt, Artificial Sequence
  Description of Artificial Sequence: Synthetic oligonucleotide
  Antisense strand to SEQ ID NO: 289028
uuucaagccaagaagccgu

SEQ ID NO: 289030 - RNA, 19 nt, Artificial Sequence
  Description of Artificial Sequence: Synthetic oligonucleotide
  Sense strand starting at position 1546 of SEQ ID NO: 3717
ggcuucuuggcuugaaaga

SEQ ID NO: 289031 - RNA, 19 nt, Artificial Sequence
  Description of Artificial Sequence: Synthetic oligonucleotide
  Antisense strand to SEQ ID NO: 289030
ucuuucaagccaagaagcc

SEQ ID NO: 289032 - RNA, 19 nt, Artificial Sequence
  Description of Artificial Sequence: Synthetic oligonucleotide
  Sense strand starting at position 1547 of SEQ ID NO: 3717
gcuucuuggcuugaaagag

SEQ ID NO: 289033 - RNA, 19 nt, Artificial Sequence
  Description of Artificial Sequence: Synthetic oligonucleotide
  Antisense strand to SEQ ID NO: 289032
cucuuucaagccaagaagc

SEQ ID NO: 289034 - RNA, 19 nt, Artificial Sequence
  Description of Artificial Sequence: Synthetic oligonucleotide
  Sense strand starting at position 1677 of SEQ ID NO: 3717
caaagaauguguuucguuc

SEQ ID NO: 289035 - RNA, 19 nt, Artificial Sequence
  Description of Artificial Sequence: Synthetic oligonucleotide
  Antisense strand to SEQ ID NO: 289034
gaacgaaacacauucuuug

SEQ ID NO: 289036 - RNA, 19 nt, Artificial Sequence
  Description of Artificial Sequence: Synthetic oligonucleotide
  Sense strand starting at position 1783 of SEQ ID NO: 3717
ucaguuuguggacacauua

SEQ ID NO: 289037 - RNA, 19 nt, Artificial Sequence
  Description of Artificial Sequence: Synthetic oligonucleotide
  Antisense strand to SEQ ID NO: 289036
uaauguguccacaaacuga

SEQ ID NO: 289038 - RNA, 19 nt, Artificial Sequence
  Description of Artificial Sequence: Synthetic oligonucleotide
  Sense strand starting at position 1877 of SEQ ID NO: 3717
cccguuucuacagaugaug

SEQ ID NO: 289039 - RNA, 19 nt, Artificial Sequence
  Description of Artificial Sequence: Synthetic oligonucleotide
  Antisense strand to SEQ ID NO: 289038
caucaucuguagaaacggg

SEQ ID NO: 289040 - RNA, 19 nt, Artificial Sequence
  Description of Artificial Sequence: Synthetic oligonucleotide
  Sense strand starting at position 1879 of SEQ ID NO: 3717
cguuucuacagaugaugaa

SEQ ID NO: 289041 - RNA, 19 nt, Artificial Sequence
  Description of Artificial Sequence: Synthetic oligonucleotide
  Antisense strand to SEQ ID NO: 289040
uucaucaucuguagaaacg

SEQ ID NO: 289042 - RNA, 19 nt, Artificial Sequence
  Description of Artificial Sequence: Synthetic oligonucleotide
  Sense strand starting at position 1910 of SEQ ID NO: 3717
cugcucgcucggguuaaau

SEQ ID NO: 289043 - RNA, 19 nt, Artificial Sequence
  Description of Artificial Sequence: Synthetic oligonucleotide
  Antisense strand to SEQ ID NO: 289042
auuuaacccgagcgagcag

SEQ ID NO: 289044 - RNA, 19 nt, Artificial Sequence
  Description of Artificial Sequence: Synthetic oligonucleotide
  Sense strand starting at position 1921 of SEQ ID NO: 3717
gguuaaaucggcugccaga

SEQ ID NO: 289045 - RNA, 19 nt, Artificial Sequence
  Description of Artificial Sequence: Synthetic oligonucleotide
  Antisense strand to SEQ ID NO: 289044
ucuggcagccgauuuaacc

SEQ ID NO: 289046 - RNA, 19 nt, Artificial Sequence
  Description of Artificial Sequence: Synthetic oligonucleotide
  Sense strand starting at position 2283 of SEQ ID NO: 3717
cugagaaaguucucugcuc

SEQ ID NO: 289047 - RNA, 19 nt, Artificial Sequence
  Description of Artificial Sequence: Synthetic oligonucleotide
  Antisense strand to SEQ ID NO: 289046
gagcagagaacuuucucag

SEQ ID NO: 289048 - RNA, 19 nt, Artificial Sequence
  Description of Artificial Sequence: Synthetic oligonucleotide
  Sense strand starting at position 3483 of SEQ ID NO: 3717
uaguguagaaucgucgcua

SEQ ID NO: 289049 - RNA, 19 nt, Artificial Sequence
  Description of Artificial Sequence: Synthetic oligonucleotide
  Antisense strand to SEQ ID NO: 289048
uagcgacgauucuacacua

SEQ ID NO: 289050 - RNA, 19 nt, Artificial Sequence
  Description of Artificial Sequence: Synthetic oligonucleotide
  Sense strand starting at position 3486 of SEQ ID NO: 3717
uguagaaucgucgcuagca

SEQ ID NO: 289051 - RNA, 19 nt, Artificial Sequence
  Description of Artificial Sequence: Synthetic oligonucleotide
  Antisense strand to SEQ ID NO: 289050
ugcuagcgacgauucuaca

SEQ ID NO: 289052 - RNA, 19 nt, Artificial Sequence
  Description of Artificial Sequence: Synthetic oligonucleotide
  Sense strand starting at position 3783 of SEQ ID NO: 3717
augagcaucuguuuaauua

SEQ ID NO: 289053 - RNA, 19 nt, Artificial Sequence
  Description of Artificial Sequence: Synthetic oligonucleotide
  Antisense strand to SEQ ID NO: 289052
uaauuaaacagaugcucau

SEQ ID NO: 289054 - RNA, 19 nt, Artificial Sequence
  Description of Artificial Sequence: Synthetic oligonucleotide
  Sense strand starting at position 3784 of SEQ ID NO: 3717
ugagcaucuguuuaauuau

SEQ ID NO: 289055 - RNA, 19 nt, Artificial Sequence
  Description of Artificial Sequence: Synthetic oligonucleotide
  Antisense strand to SEQ ID NO: 289054
auaauuaaacagaugcuca

SEQ ID NO: 289056 - RNA, 19 nt, Artificial Sequence
  Description of Artificial Sequence: Synthetic oligonucleotide
  Sense strand starting at position 3837 of SEQ ID NO: 3717
aggguaacuuucuuauucu

SEQ ID NO: 289057 - RNA, 19 nt, Artificial Sequence
  Description of Artificial Sequence: Synthetic oligonucleotide
  Antisense strand to SEQ ID NO: 289056
agaauaagaaaguuacccu

SEQ ID NO: 289058 - RNA, 19 nt, Artificial Sequence
  Description of Artificial Sequence: Synthetic oligonucleotide
  Sense strand starting at position 3848 of SEQ ID NO: 3717
cuuauucucugugccugaa

SEQ ID NO: 289059 - RNA, 19 nt, Artificial Sequence
  Description of Artificial Sequence: Synthetic oligonucleotide
  Antisense strand to SEQ ID NO: 289058
uucaggcacagagaauaag

SEQ ID NO: 289060 - RNA, 19 nt, Artificial Sequence
  Description of Artificial Sequence: Synthetic oligonucleotide
  Sense strand starting at position 3851 of SEQ ID NO: 3717
auucucugugccugaaaug

SEQ ID NO: 289061 - RNA, 19 nt, Artificial Sequence
  Description of Artificial Sequence: Synthetic oligonucleotide
  Antisense strand to SEQ ID NO: 289060
cauuucaggcacagagaau

SEQ ID NO: 289062 - RNA, 19 nt, Artificial Sequence
  Description of Artificial Sequence: Synthetic oligonucleotide
  Sense strand starting at position 6 of SEQ ID NO: 3716
aucgcuugcauugaagauu

SEQ ID NO: 289063 - RNA, 19 nt, Artificial Sequence
  Description of Artificial Sequence: Synthetic oligonucleotide
  Antisense strand to SEQ ID NO: 289062
aaucuucaaugcaagcgau

SEQ ID NO: 289064 - RNA, 19 nt, Artificial Sequence
  Description of Artificial Sequence: Synthetic oligonucleotide
  Sense strand starting at position 17 of SEQ ID NO: 3716
ugaagauuacagugggagu

SEQ ID NO: 289065 - RNA, 19 nt, Artificial Sequence
  Description of Artificial Sequence: Synthetic oligonucleotide
  Antisense strand to SEQ ID NO: 289064
acucccacuguaaucuuca

SEQ ID NO: 289066 - RNA, 19 nt, Artificial Sequence
  Description of Artificial Sequence: Synthetic oligonucleotide
  Sense strand starting at position 115 of SEQ ID NO: 3716
gcaagacuuggagguacuu

SEQ ID NO: 289067 - RNA, 19 nt, Artificial Sequence
  Description of Artificial Sequence: Synthetic oligonucleotide
  Antisense strand to SEQ ID NO: 289066
aaguaccuccaagucuugc

SEQ ID NO: 289068 - RNA, 19 nt, Artificial Sequence
  Description of Artificial Sequence: Synthetic oligonucleotide
  Sense strand starting at position 137 of SEQ ID NO: 3716
ggacuugguagcuggagua

SEQ ID NO: 289069 - RNA, 19 nt, Artificial Sequence
  Description of Artificial Sequence: Synthetic oligonucleotide
  Antisense strand to SEQ ID NO: 289068
uacuccagcuaccaagucc

SEQ ID NO: 289070 - RNA, 19 nt, Artificial Sequence
  Description of Artificial Sequence: Synthetic oligonucleotide
  Sense strand starting at position 364 of SEQ ID NO: 3716
acaaucucugacugguauu

SEQ ID NO: 289071 - RNA, 19 nt, Artificial Sequence
  Description of Artificial Sequence: Synthetic oligonucleotide
  Antisense strand to SEQ ID NO: 289070
aauaccagucagagauugu

SEQ ID NO: 289072 - RNA, 19 nt, Artificial Sequence
  Description of Artificial Sequence: Synthetic oligonucleotide
  Sense strand starting at position 367 of SEQ ID NO: 3716
aucucugacugguauuuaa

SEQ ID NO: 289073 - RNA, 19 nt, Artificial Sequence
  Description of Artificial Sequence: Synthetic oligonucleotide
  Antisense strand to SEQ ID NO: 289072
uuaaauaccagucagagau

SEQ ID NO: 289074 - RNA, 19 nt, Artificial Sequence
  Description of Artificial Sequence: Synthetic oligonucleotide
  Sense strand starting at position 535 of SEQ ID NO: 3716
guaauugcccugcauggua

SEQ ID NO: 289075 - RNA, 19 nt, Artificial Sequence
  Description of Artificial Sequence: Synthetic oligonucleotide
  Antisense strand to SEQ ID NO: 289074
uaccaugcagggcaauuac

SEQ ID NO: 289076 - RNA, 19 nt, Artificial Sequence
  Description of Artificial Sequence: Synthetic oligonucleotide
  Sense strand starting at position 608 of SEQ ID NO: 3716
accuuagauuacucagguu

SEQ ID NO: 289077 - RNA, 19 nt, Artificial Sequence
  Description of Artificial Sequence: Synthetic oligonucleotide
  Antisense strand to SEQ ID NO: 289076
aaccugaguaaucuaaggu

SEQ ID NO: 289078 - RNA, 19 nt, Artificial Sequence
  Description of Artificial Sequence: Synthetic oligonucleotide
  Sense strand starting at position 730 of SEQ ID NO: 3716
uucgaagugugguuuagga

SEQ ID NO: 289079 - RNA, 19 nt, Artificial Sequence
  Description of Artificial Sequence: Synthetic oligonucleotide
  Antisense strand to SEQ ID NO: 289078
uccuaaaccacacuucgaa

SEQ ID NO: 289080 - RNA, 19 nt, Artificial Sequence
  Description of Artificial Sequence: Synthetic oligonucleotide
  Sense strand starting at position 732 of SEQ ID NO: 3716
cgaagugugguuuaggaua

SEQ ID NO: 289081 - RNA, 19 nt, Artificial Sequence
  Description of Artificial Sequence: Synthetic oligonucleotide
  Antisense strand to SEQ ID NO: 289080
uauccuaaaccacacuucg

SEQ ID NO: 289082 - RNA, 19 nt, Artificial Sequence
  Description of Artificial Sequence: Synthetic oligonucleotide
  Sense strand starting at position 756 of SEQ ID NO: 3716
auuagcaauguugacaauu

SEQ ID NO: 289083 - RNA, 19 nt, Artificial Sequence
  Description of Artificial Sequence: Synthetic oligonucleotide
  Antisense strand to SEQ ID NO: 289082
aauugucaacauugcuaau

SEQ ID NO: 289084 - RNA, 19 nt, Artificial Sequence
  Description of Artificial Sequence: Synthetic oligonucleotide
  Sense strand starting at position 764 of SEQ ID NO: 3716
uguugacaauucuuccagu

SEQ ID NO: 289085 - RNA, 19 nt, Artificial Sequence
  Description of Artificial Sequence: Synthetic oligonucleotide
  Antisense strand to SEQ ID NO: 289084
acuggaagaauugucaaca

SEQ ID NO: 289086 - RNA, 19 nt, Artificial Sequence
  Description of Artificial Sequence: Synthetic oligonucleotide
  Sense strand starting at position 765 of SEQ ID NO: 3716
guugacaauucuuccaguu

SEQ ID NO: 289087 - RNA, 19 nt, Artificial Sequence
  Description of Artificial Sequence: Synthetic oligonucleotide
  Antisense strand to SEQ ID NO: 289086
aacuggaagaauugucaac

SEQ ID NO: 289088 - RNA, 19 nt, Artificial Sequence
  Description of Artificial Sequence: Synthetic oligonucleotide
  Sense strand starting at position 867 of SEQ ID NO: 3716
ggcuucuuggcuugaaaga

SEQ ID NO: 289089 - RNA, 19 nt, Artificial Sequence
  Description of Artificial Sequence: Synthetic oligonucleotide
  Antisense strand to SEQ ID NO: 289088
ucuuucaagccaagaagcc

SEQ ID NO: 289090 - RNA, 19 nt, Artificial Sequence
  Description of Artificial Sequence: Synthetic oligonucleotide
  Sense strand starting at position 868 of SEQ ID NO: 3716
gcuucuuggcuugaaagag

SEQ ID NO: 289091 - RNA, 19 nt, Artificial Sequence
  Description of Artificial Sequence: Synthetic oligonucleotide
  Antisense strand to SEQ ID NO: 289090
cucuuucaagccaagaagc

SEQ ID NO: 289092 - RNA, 19 nt, Artificial Sequence
  Description of Artificial Sequence: Synthetic oligonucleotide
  Sense strand starting at position 1104 of SEQ ID NO: 3716
ucaguuuguggacacauua

SEQ ID NO: 289093 - RNA, 19 nt, Artificial Sequence
  Description of Artificial Sequence: Synthetic oligonucleotide
  Antisense strand to SEQ ID NO: 289092
uaauguguccacaaacuga

SEQ ID NO: 289094 - RNA, 19 nt, Artificial Sequence
  Description of Artificial Sequence: Synthetic oligonucleotide
  Sense strand starting at position 1198 of SEQ ID NO: 3716
cccguuucuacagaugaug

SEQ ID NO: 289095 - RNA, 19 nt, Artificial Sequence
  Description of Artificial Sequence: Synthetic oligonucleotide
  Antisense strand to SEQ ID NO: 289094
caucaucuguagaaacggg

SEQ ID NO: 289096 - RNA, 19 nt, Artificial Sequence
  Description of Artificial Sequence: Synthetic oligonucleotide
  Sense strand starting at position 1200 of SEQ ID NO: 3716
cguuucuacagaugaugaa

SEQ ID NO: 289097 - RNA, 19 nt, Artificial Sequence
  Description of Artificial Sequence: Synthetic oligonucleotide
  Antisense strand to SEQ ID NO: 289096
uucaucaucuguagaaacg

SEQ ID NO: 289098 - RNA, 19 nt, Artificial Sequence
  Description of Artificial Sequence: Synthetic oligonucleotide
  Sense strand starting at position 1231 of SEQ ID NO: 3716
cugcucgcucggguuaaau

SEQ ID NO: 289099 - RNA, 19 nt, Artificial Sequence
  Description of Artificial Sequence: Synthetic oligonucleotide
  Antisense strand to SEQ ID NO: 289098
auuuaacccgagcgagcag

SEQ ID NO: 289100 - RNA, 19 nt, Artificial Sequence
  Description of Artificial Sequence: Synthetic oligonucleotide
  Sense strand starting at position 1604 of SEQ ID NO: 3716
cugagaaaguucucugcuc

SEQ ID NO: 289101 - RNA, 19 nt, Artificial Sequence
  Description of Artificial Sequence: Synthetic oligonucleotide
  Antisense strand to SEQ ID NO: 289100
gagcagagaacuuucucag

SEQ ID NO: 289102 - RNA, 19 nt, Artificial Sequence
  Description of Artificial Sequence: Synthetic oligonucleotide
  Sense strand starting at position 2804 of SEQ ID NO: 3716
uaguguagaaucgucgcua

SEQ ID NO: 289103 - RNA, 19 nt, Artificial Sequence
  Description of Artificial Sequence: Synthetic oligonucleotide
  Antisense strand to SEQ ID NO: 289102
uagcgacgauucuacacua

SEQ ID NO: 289104 - RNA, 19 nt, Artificial Sequence
  Description of Artificial Sequence: Synthetic oligonucleotide
  Sense strand starting at position 2807 of SEQ ID NO: 3716
uguagaaucgucgcuagca

SEQ ID NO: 289105 - RNA, 19 nt, Artificial Sequence
  Description of Artificial Sequence: Synthetic oligonucleotide
  Antisense strand to SEQ ID NO: 289104
ugcuagcgacgauucuaca

SEQ ID NO: 289106 - RNA, 19 nt, Artificial Sequence
  Description of Artificial Sequence: Synthetic oligonucleotide
  Sense strand starting at position 3104 of SEQ ID NO: 3716
augagcaucuguuuaauua

SEQ ID NO: 289107 - RNA, 19 nt, Artificial Sequence
  Description of Artificial Sequence: Synthetic oligonucleotide
  Antisense strand to SEQ ID NO: 289106
uaauuaaacagaugcucau

SEQ ID NO: 289108 - RNA, 19 nt, Artificial Sequence
  Description of Artificial Sequence: Synthetic oligonucleotide
  Sense strand starting at position 3105 of SEQ ID NO: 3716
ugagcaucuguuuaauuau

SEQ ID NO: 289109 - RNA, 19 nt, Artificial Sequence
  Description of Artificial Sequence: Synthetic oligonucleotide
  Antisense strand to SEQ ID NO: 289108
auaauuaaacagaugcuca

SEQ ID NO: 289110 - RNA, 19 nt, Artificial Sequence
  Description of Artificial Sequence: Synthetic oligonucleotide
  Sense strand starting at position 3158 of SEQ ID NO: 3716
aggguaacuuucuuauucu

SEQ ID NO: 289111 - RNA, 19 nt, Artificial Sequence
  Description of Artificial Sequence: Synthetic oligonucleotide
  Antisense strand to SEQ ID NO: 289110
agaauaagaaaguuacccu

SEQ ID NO: 289112 - RNA, 19 nt, Artificial Sequence
  Description of Artificial Sequence: Synthetic oligonucleotide
  Sense strand starting at position 3169 of SEQ ID NO: 3716
cuuauucucugugccugaa

SEQ ID NO: 289113 - RNA, 19 nt, Artificial Sequence
  Description of Artificial Sequence: Synthetic oligonucleotide
  Antisense strand to SEQ ID NO: 289112
uucaggcacagagaauaag

SEQ ID NO: 289114 - RNA, 19 nt, Artificial Sequence
  Description of Artificial Sequence: Synthetic oligonucleotide
  Sense strand starting at position 3172 of SEQ ID NO: 3716
auucucugugccugaaaug

SEQ ID NO: 289115 - RNA, 19 nt, Artificial Sequence
  Description of Artificial Sequence: Synthetic oligonucleotide
  Antisense strand to SEQ ID NO: 289114
cauuucaggcacagagaau

SEQ ID NO: 289116 - RNA, 19 nt, Artificial Sequence
  Description of Artificial Sequence: Synthetic oligonucleotide
  Sense strand starting at position 3398 of SEQ ID NO: 3716
ggaauauacucccagagac

SEQ ID NO: 289117 - RNA, 19 nt, Artificial Sequence
  Description of Artificial Sequence: Synthetic oligonucleotide
  Antisense strand to SEQ ID NO: 289116
gucucugggaguauauucc

SEQ ID NO: 289118 - RNA, 19 nt, Artificial Sequence
  Description of Artificial Sequence: Synthetic oligonucleotide
  Sense strand starting at position 3510 of SEQ ID NO: 3716
uuuguugacgaguggauga

SEQ ID NO: 289119 - RNA, 19 nt, Artificial Sequence
  Description of Artificial Sequence: Synthetic oligonucleotide
  Antisense strand to SEQ ID NO: 289118
ucauccacucgucaacaaa

SEQ ID NO: 289120 - RNA, 19 nt, Artificial Sequence
  Description of Artificial Sequence: Synthetic oligonucleotide
  Sense strand starting at position 3686 of SEQ ID NO: 3716
cugggaguauccucuucca

SEQ ID NO: 289121 - RNA, 19 nt, Artificial Sequence
  Description of Artificial Sequence: Synthetic oligonucleotide
  Antisense strand to SEQ ID NO: 289120
uggaagaggauacucccag

SEQ ID NO: 289122 - RNA, 19 nt, Artificial Sequence
  Description of Artificial Sequence: Synthetic oligonucleotide
  Sense strand starting at position 3689 of SEQ ID NO: 3716
ggaguauccucuuccagau

SEQ ID NO: 289123 - RNA, 19 nt, Artificial Sequence
  Description of Artificial Sequence: Synthetic oligonucleotide
  Antisense strand to SEQ ID NO: 289122
aucuggaagaggauacucc

SEQ ID NO: 289124 - RNA, 19 nt, Artificial Sequence
  Description of Artificial Sequence: Synthetic oligonucleotide
  Sense strand starting at position 3736 of SEQ ID NO: 3716
agaaauaacugggaaaugu

SEQ ID NO: 289125 - RNA, 19 nt, Artificial Sequence
  Description of Artificial Sequence: Synthetic oligonucleotide
  Antisense strand to SEQ ID NO: 289124
acauuucccaguuauuucu

SEQ ID NO: 289126 - RNA, 19 nt, Artificial Sequence
  Description of Artificial Sequence: Synthetic oligonucleotide
  Sense strand starting at position 3834 of SEQ ID NO: 3716
uuguaauagagguaauugu

SEQ ID NO: 289127 - RNA, 19 nt, Artificial Sequence
  Description of Artificial Sequence: Synthetic oligonucleotide
  Antisense strand to SEQ ID NO: 289126
acaauuaccucuauuacaa

SEQ ID NO: 289128 - RNA, 19 nt, Artificial Sequence
  Description of Artificial Sequence: Synthetic oligonucleotide
  Sense strand starting at position 3855 of SEQ ID NO: 3716
gcuggcaugcaguuguuaa

SEQ ID NO: 289129 - RNA, 19 nt, Artificial Sequence
  Description of Artificial Sequence: Synthetic oligonucleotide
  Antisense strand to SEQ ID NO: 289128
uuaacaacugcaugccagc

SEQ ID NO: 289130 - RNA, 19 nt, Artificial Sequence
  Description of Artificial Sequence: Synthetic oligonucleotide
  Sense strand starting at position 3873 of SEQ ID NO: 3716
agaaaugauucagagaggu

SEQ ID NO: 289131 - RNA, 19 nt, Artificial Sequence
  Description of Artificial Sequence: Synthetic oligonucleotide
  Antisense strand to SEQ ID NO: 289130
accucucugaaucauuucu

SEQ ID NO: 289132 - RNA, 19 nt, Artificial Sequence
  Description of Artificial Sequence: Synthetic oligonucleotide
  Sense strand starting at position 3907 of SEQ ID NO: 3716
ccaagucuuccucauggua

SEQ ID NO: 289133 - RNA, 19 nt, Artificial Sequence
  Description of Artificial Sequence: Synthetic oligonucleotide
  Antisense strand to SEQ ID NO: 289132
uaccaugaggaagacuugg

SEQ ID NO: 289134 - RNA, 19 nt, Artificial Sequence
  Description of Artificial Sequence: Synthetic oligonucleotide
  Sense strand starting at position 3910 of SEQ ID NO: 3716
agucuuccucaugguaaca

SEQ ID NO: 289135 - RNA, 19 nt, Artificial Sequence
  Description of Artificial Sequence: Synthetic oligonucleotide
  Antisense strand to SEQ ID NO: 289134
uguuaccaugaggaagacu

SEQ ID NO: 289136 - RNA, 19 nt, Artificial Sequence
  Description of Artificial Sequence: Synthetic oligonucleotide
  Sense strand starting at position 3961 of SEQ ID NO: 3716
ggauauuaacauugauacg

SEQ ID NO: 289137 - RNA, 19 nt, Artificial Sequence
  Description of Artificial Sequence: Synthetic oligonucleotide
  Antisense strand to SEQ ID NO: 289136
cguaucaauguuaauaucc

SEQ ID NO: 289138 - RNA, 19 nt, Artificial Sequence
  Description of Artificial Sequence: Synthetic oligonucleotide
  Sense strand starting at position 3967 of SEQ ID NO: 3716
uaacauugauacguugauu

SEQ ID NO: 289139 - RNA, 19 nt, Artificial Sequence
  Description of Artificial Sequence: Synthetic oligonucleotide
  Antisense strand to SEQ ID NO: 289138
aaucaacguaucaauguua

SEQ ID NO: 289140 - RNA, 19 nt, Artificial Sequence
  Description of Artificial Sequence: Synthetic oligonucleotide
  Sense strand starting at position 3972 of SEQ ID NO: 3716
uugauacguugauuccuau

SEQ ID NO: 289141 - RNA, 19 nt, Artificial Sequence
  Description of Artificial Sequence: Synthetic oligonucleotide
  Antisense strand to SEQ ID NO: 289140
auaggaaucaacguaucaa

SEQ ID NO: 289142 - RNA, 19 nt, Artificial Sequence
  Description of Artificial Sequence: Synthetic oligonucleotide
  Sense strand starting at position 33 of SEQ ID NO: 3718
agaacaacaugguuaugua

SEQ ID NO: 289143 - RNA, 19 nt, Artificial Sequence
  Description of Artificial Sequence: Synthetic oligonucleotide
  Antisense strand to SEQ ID NO: 289142
uacauaaccauguuguucu

SEQ ID NO: 289144 - RNA, 19 nt, Artificial Sequence
  Description of Artificial Sequence: Synthetic oligonucleotide
  Sense strand starting at position 340 of SEQ ID NO: 3718
aucagaauagacugcuaua

SEQ ID NO: 289145 - RNA, 19 nt, Artificial Sequence
  Description of Artificial Sequence: Synthetic oligonucleotide
  Antisense strand to SEQ ID NO: 289144
uauagcagucuauucugau

SEQ ID NO: 289146 - RNA, 19 nt, Artificial Sequence
  Description of Artificial Sequence: Synthetic oligonucleotide
  Sense strand starting at position 513 of SEQ ID NO: 3718
agggacuagucucuaacua

SEQ ID NO: 289147 - RNA, 19 nt, Artificial Sequence
  Description of Artificial Sequence: Synthetic oligonucleotide
  Antisense strand to SEQ ID NO: 289146
uaguuagagacuagucccu

SEQ ID NO: 289148 - RNA, 19 nt, Artificial Sequence
  Description of Artificial Sequence: Synthetic oligonucleotide
  Sense strand starting at position 933 of SEQ ID NO: 3718
gguaacuuauagccaagaa

SEQ ID NO: 289149 - RNA, 19 nt, Artificial Sequence
  Description of Artificial Sequence: Synthetic oligonucleotide
  Antisense strand to SEQ ID NO: 289148
uucuuggcuauaaguuacc

SEQ ID NO: 289150 - RNA, 19 nt, Artificial Sequence
  Description of Artificial Sequence: Synthetic oligonucleotide
  Sense strand starting at position 1087 of SEQ ID NO: 3718
gaagaugacuuguagauuu

SEQ ID NO: 289151 - RNA, 19 nt, Artificial Sequence
  Description of Artificial Sequence: Synthetic oligonucleotide
  Antisense strand to SEQ ID NO: 289150
aaaucuacaagucaucuuc

SEQ ID NO: 289152 - RNA, 19 nt, Artificial Sequence
  Description of Artificial Sequence: Synthetic oligonucleotide
  Sense strand starting at position 1121 of SEQ ID NO: 3718
acgagacguuaaguuuaau

SEQ ID NO: 289153 - RNA, 19 nt, Artificial Sequence
  Description of Artificial Sequence: Synthetic oligonucleotide
  Antisense strand to SEQ ID NO: 289152
auuaaacuuaacgucucgu

SEQ ID NO: 289154 - RNA, 19 nt, Artificial Sequence
  Description of Artificial Sequence: Synthetic oligonucleotide
  Sense strand starting at position 1880 of SEQ ID NO: 3718
agcauuauacaauggugga

SEQ ID NO: 289155 - RNA, 19 nt, Artificial Sequence
  Description of Artificial Sequence: Synthetic oligonucleotide
  Antisense strand to SEQ ID NO: 289154
uccaccauuguauaaugcu

SEQ ID NO: 289156 - RNA, 19 nt, Artificial Sequence
  Description of Artificial Sequence: Synthetic oligonucleotide
  Sense strand starting at position 2349 of SEQ ID NO: 3718
ucuagaagugcucaggcga

SEQ ID NO: 289157 - RNA, 19 nt, Artificial Sequence
  Description of Artificial Sequence: Synthetic oligonucleotide
  Antisense strand to SEQ ID NO: 289156
ucgccugagcacuucuaga

SEQ ID NO: 289158 - RNA, 19 nt, Artificial Sequence
  Description of Artificial Sequence: Synthetic oligonucleotide
  Sense strand starting at position 2892 of SEQ ID NO: 3718
acuuaaauuuaccagggaa

SEQ ID NO: 289159 - RNA, 19 nt, Artificial Sequence
  Description of Artificial Sequence: Synthetic oligonucleotide
  Antisense strand to SEQ ID NO: 289158
uucccugguaaauuuaagu

SEQ ID NO: 289160 - RNA, 19 nt, Artificial Sequence
  Description of Artificial Sequence: Synthetic oligonucleotide
  Sense strand starting at position 2904 of SEQ ID NO: 3718
cagggaaauuuauacuagu

SEQ ID NO: 289161 - RNA, 19 nt, Artificial Sequence
  Description of Artificial Sequence: Synthetic oligonucleotide
  Antisense strand to SEQ ID NO: 289160
acuaguauaaauuucccug

SEQ ID NO: 289162 - RNA, 19 nt, Artificial Sequence
  Description of Artificial Sequence: Synthetic oligonucleotide
  Sense strand starting at position 2941 of SEQ ID NO: 3718
ugcccaaauggugagaauu

SEQ ID NO: 289163 - RNA, 19 nt, Artificial Sequence
  Description of Artificial Sequence: Synthetic oligonucleotide
  Antisense strand to SEQ ID NO: 289162
aauucucaccauuugggca

SEQ ID NO: 289164 - RNA, 19 nt, Artificial Sequence
  Description of Artificial Sequence: Synthetic oligonucleotide
  Sense strand starting at position 2943 of SEQ ID NO: 3718
cccaaauggugagaauuua

SEQ ID NO: 289165 - RNA, 19 nt, Artificial Sequence
  Description of Artificial Sequence: Synthetic oligonucleotide
  Antisense strand to SEQ ID NO: 289164
uaaauucucaccauuuggg

SEQ ID NO: 289166 - RNA, 19 nt, Artificial Sequence
  Description of Artificial Sequence: Synthetic oligonucleotide
  Sense strand starting at position 2951 of SEQ ID NO: 3718
gugagaauuuaagagcacu

SEQ ID NO: 289167 - RNA, 19 nt, Artificial Sequence
  Description of Artificial Sequence: Synthetic oligonucleotide
  Antisense strand to SEQ ID NO: 289166
agugcucuuaaauucucac

SEQ ID NO: 289168 - RNA, 19 nt, Artificial Sequence
  Description of Artificial Sequence: Synthetic oligonucleotide
  Sense strand starting at position 2981 of SEQ ID NO: 3718
ccagauagaugguuccacu

SEQ ID NO: 289169 - RNA, 19 nt, Artificial Sequence
  Description of Artificial Sequence: Synthetic oligonucleotide
  Antisense strand to SEQ ID NO: 289168
aguggaaccaucuaucugg

SEQ ID NO: 289170 - RNA, 19 nt, Artificial Sequence
  Description of Artificial Sequence: Synthetic oligonucleotide
  Sense strand starting at position 3122 of SEQ ID NO: 3718
ggaguuuaaugguccacua

SEQ ID NO: 289171 - RNA, 19 nt, Artificial Sequence
  Description of Artificial Sequence: Synthetic oligonucleotide
  Antisense strand to SEQ ID NO: 289170
uaguggaccauuaaacucc

SEQ ID NO: 289172 - RNA, 19 nt, Artificial Sequence
  Description of Artificial Sequence: Synthetic oligonucleotide
  Sense strand starting at position 3124 of SEQ ID NO: 3718
aguuuaaugguccacuaua

SEQ ID NO: 289173 - RNA, 19 nt, Artificial Sequence
  Description of Artificial Sequence: Synthetic oligonucleotide
  Antisense strand to SEQ ID NO: 289172
uauaguggaccauuaaacu

SEQ ID NO: 289174 - RNA, 19 nt, Artificial Sequence
  Description of Artificial Sequence: Synthetic oligonucleotide
  Sense strand starting at position 3135 of SEQ ID NO: 3718
ccacuauacuaguuguauu

SEQ ID NO: 289175 - RNA, 19 nt, Artificial Sequence
  Description of Artificial Sequence: Synthetic oligonucleotide
  Antisense strand to SEQ ID NO: 289174
aauacaacuaguauagugg

SEQ ID NO: 289176 - RNA, 19 nt, Artificial Sequence
  Description of Artificial Sequence: Synthetic oligonucleotide
  Sense strand starting at position 3191 of SEQ ID NO: 3718
auuguaagucguuaacauc

SEQ ID NO: 289177 - RNA, 19 nt, Artificial Sequence
  Description of Artificial Sequence: Synthetic oligonucleotide
  Antisense strand to SEQ ID NO: 289176
gauguuaacgacuuacaau

SEQ ID NO: 289178 - RNA, 19 nt, Artificial Sequence
  Description of Artificial Sequence: Synthetic oligonucleotide
  Sense strand starting at position 3197 of SEQ ID NO: 3718
agucguuaacaucaagaga

SEQ ID NO: 289179 - RNA, 19 nt, Artificial Sequence
  Description of Artificial Sequence: Synthetic oligonucleotide
  Antisense strand to SEQ ID NO: 289178
ucucuugauguuaacgacu

SEQ ID NO: 289180 - RNA, 19 nt, Artificial Sequence
  Description of Artificial Sequence: Synthetic oligonucleotide
  Sense strand starting at position 3210 of SEQ ID NO: 3718
aagagaaauuuagacuugu

SEQ ID NO: 289181 - RNA, 19 nt, Artificial Sequence
  Description of Artificial Sequence: Synthetic oligonucleotide
  Antisense strand to SEQ ID NO: 289180
acaagucuaaauuucucuu

SEQ ID NO: 289182 - RNA, 19 nt, Artificial Sequence
  Description of Artificial Sequence: Synthetic oligonucleotide
  Sense strand starting at position 3218 of SEQ ID NO: 3718
uuuagacuuguuuaaacug

SEQ ID NO: 289183 - RNA, 19 nt, Artificial Sequence
  Description of Artificial Sequence: Synthetic oligonucleotide
  Antisense strand to SEQ ID NO: 289182
caguuuaaacaagucuaaa

SEQ ID NO: 289184 - RNA, 19 nt, Artificial Sequence
  Description of Artificial Sequence: Synthetic oligonucleotide
  Sense strand starting at position 3229 of SEQ ID NO: 3718
uuaaacuguucuguaauga

SEQ ID NO: 289185 - RNA, 19 nt, Artificial Sequence
  Description of Artificial Sequence: Synthetic oligonucleotide
  Antisense strand to SEQ ID NO: 289184
ucauuacagaacaguuuaa

SEQ ID NO: 289186 - RNA, 19 nt, Artificial Sequence
  Description of Artificial Sequence: Synthetic oligonucleotide
  Sense strand starting at position 3265 of SEQ ID NO: 3718
ugaugaucucaucgaaauu

SEQ ID NO: 289187 - RNA, 19 nt, Artificial Sequence
  Description of Artificial Sequence: Synthetic oligonucleotide
  Antisense strand to SEQ ID NO: 289186
aauuucgaugagaucauca

SEQ ID NO: 289188 - RNA, 19 nt, Artificial Sequence
  Description of Artificial Sequence: Synthetic oligonucleotide
  Sense strand starting at position 3283 of SEQ ID NO: 3718
uaaacuugugcugaaaugu

SEQ ID NO: 289189 - RNA, 19 nt, Artificial Sequence
  Description of Artificial Sequence: Synthetic oligonucleotide
  Antisense strand to SEQ ID NO: 289188
acauuucagcacaaguuua

SEQ ID NO: 289190 - RNA, 19 nt, Artificial Sequence
  Description of Artificial Sequence: Synthetic oligonucleotide
  Sense strand starting at position 3358 of SEQ ID NO: 3718
acuggacccucaguauaau

SEQ ID NO: 289191 - RNA, 19 nt, Artificial Sequence
  Description of Artificial Sequence: Synthetic oligonucleotide
  Antisense strand to SEQ ID NO: 289190
auuauacugaggguccagu

SEQ ID NO: 289192 - RNA, 19 nt, Artificial Sequence
  Description of Artificial Sequence: Synthetic oligonucleotide
  Sense strand starting at position 3359 of SEQ ID NO: 3718
cuggacccucaguauaauu

SEQ ID NO: 289193 - RNA, 19 nt, Artificial Sequence
  Description of Artificial Sequence: Synthetic oligonucleotide
  Antisense strand to SEQ ID NO: 289192
aauuauacugaggguccag

SEQ ID NO: 289194 - RNA, 19 nt, Artificial Sequence
  Description of Artificial Sequence: Synthetic oligonucleotide
  Sense strand starting at position 3419 of SEQ ID NO: 3718
uguggauaucuuugcaaag

SEQ ID NO: 289195 - RNA, 19 nt, Artificial Sequence
  Description of Artificial Sequence: Synthetic oligonucleotide
  Antisense strand to SEQ ID NO: 289194
cuuugcaaagauauccaca

SEQ ID NO: 289196 - RNA, 19 nt, Artificial Sequence
  Description of Artificial Sequence: Synthetic oligonucleotide
  Sense strand starting at position 3420 of SEQ ID NO: 3718
guggauaucuuugcaaagu

SEQ ID NO: 289197 - RNA, 19 nt, Artificial Sequence
  Description of Artificial Sequence: Synthetic oligonucleotide
  Antisense strand to SEQ ID NO: 289196
acuuugcaaagauauccac

SEQ ID NO: 289198 - RNA, 19 nt, Artificial Sequence
  Description of Artificial Sequence: Synthetic oligonucleotide
  Sense strand starting at position 3516 of SEQ ID NO: 3718
gccugaguggcauaacauu

SEQ ID NO: 289199 - RNA, 19 nt, Artificial Sequence
  Description of Artificial Sequence: Synthetic oligonucleotide
  Antisense strand to SEQ ID NO: 289198
aauguuaugccacucaggc

SEQ ID NO: 289200 - RNA, 19 nt, Artificial Sequence
  Description of Artificial Sequence: Synthetic oligonucleotide
  Sense strand starting at position 3571 of SEQ ID NO: 3718
uccagaguucugcaguuua

SEQ ID NO: 289201 - RNA, 19 nt, Artificial Sequence
  Description of Artificial Sequence: Synthetic oligonucleotide
  Antisense strand to SEQ ID NO: 289200
uaaacugcagaacucugga

SEQ ID NO: 289202 - RNA, 19 nt, Artificial Sequence
  Description of Artificial Sequence: Synthetic oligonucleotide
  Sense strand starting at position 3582 of SEQ ID NO: 3718
gcaguuuagagagggcauu

SEQ ID NO: 289203 - RNA, 19 nt, Artificial Sequence
  Description of Artificial Sequence: Synthetic oligonucleotide
  Antisense strand to SEQ ID NO: 289202
aaugcccucucuaaacugc

SEQ ID NO: 289204 - RNA, 19 nt, Artificial Sequence
  Description of Artificial Sequence: Synthetic oligonucleotide
  Sense strand starting at position 3583 of SEQ ID NO: 3718
caguuuagagagggcauua

SEQ ID NO: 289205 - RNA, 19 nt, Artificial Sequence
  Description of Artificial Sequence: Synthetic oligonucleotide
  Antisense strand to SEQ ID NO: 289204
uaaugcccucucuaaacug

SEQ ID NO: 289206 - RNA, 19 nt, Artificial Sequence
  Description of Artificial Sequence: Synthetic oligonucleotide
  Sense strand starting at position 3642 of SEQ ID NO: 3718
cagugcucacuuuaaggaa

SEQ ID NO: 289207 - RNA, 19 nt, Artificial Sequence
  Description of Artificial Sequence: Synthetic oligonucleotide
  Antisense strand to SEQ ID NO: 289206
uuccuuaaagugagcacug

SEQ ID NO: 289208 - RNA, 19 nt, Artificial Sequence
  Description of Artificial Sequence: Synthetic oligonucleotide
  Sense strand starting at position 3695 of SEQ ID NO: 3718
cugugauaucuuuguagag

SEQ ID NO: 289209 - RNA, 19 nt, Artificial Sequence
  Description of Artificial Sequence: Synthetic oligonucleotide
  Antisense strand to SEQ ID NO: 289208
cucuacaaagauaucacag

SEQ ID NO: 289210 - RNA, 19 nt, Artificial Sequence
  Description of Artificial Sequence: Synthetic oligonucleotide
  Sense strand starting at position 3696 of SEQ ID NO: 3718
ugugauaucuuuguagagg

SEQ ID NO: 289211 - RNA, 19 nt, Artificial Sequence
  Description of Artificial Sequence: Synthetic oligonucleotide
  Antisense strand to SEQ ID NO: 289210
ccucuacaaagauaucaca

SEQ ID NO: 289212 - RNA, 19 nt, Artificial Sequence
  Description of Artificial Sequence: Synthetic oligonucleotide
  Sense strand starting at position 3757 of SEQ ID NO: 3718
acugcuauuugugaauuua

SEQ ID NO: 289213 - RNA, 19 nt, Artificial Sequence
  Description of Artificial Sequence: Synthetic oligonucleotide
  Antisense strand to SEQ ID NO: 289212
uaaauucacaaauagcagu

SEQ ID NO: 289214 - RNA, 19 nt, Artificial Sequence
  Description of Artificial Sequence: Synthetic oligonucleotide
  Sense strand starting at position 3804 of SEQ ID NO: 3718
ggaaguuacacuugcagaa

SEQ ID NO: 289215 - RNA, 19 nt, Artificial Sequence
  Description of Artificial Sequence: Synthetic oligonucleotide
  Antisense strand to SEQ ID NO: 289214
uucugcaaguguaacuucc

SEQ ID NO: 289216 - RNA, 19 nt, Artificial Sequence
  Description of Artificial Sequence: Synthetic oligonucleotide
  Sense strand starting at position 3808 of SEQ ID NO: 3718
guuacacuugcagaacuuu

SEQ ID NO: 289217 - RNA, 19 nt, Artificial Sequence
  Description of Artificial Sequence: Synthetic oligonucleotide
  Antisense strand to SEQ ID NO: 289216
aaaguucugcaaguguaac

SEQ ID NO: 289218 - RNA, 19 nt, Artificial Sequence
  Description of Artificial Sequence: Synthetic oligonucleotide
  Sense strand starting at position 3826 of SEQ ID NO: 3718
uugugacacuuggauauuu

SEQ ID NO: 289219 - RNA, 19 nt, Artificial Sequence
  Description of Artificial Sequence: Synthetic oligonucleotide
  Antisense strand to SEQ ID NO: 289218
aaauauccaagugucacaa

SEQ ID NO: 289220 - RNA, 19 nt, Artificial Sequence
  Description of Artificial Sequence: Synthetic oligonucleotide
  Sense strand starting at position 3950 of SEQ ID NO: 3718
uccauaaggucuguauucu

SEQ ID NO: 289221 - RNA, 19 nt, Artificial Sequence
  Description of Artificial Sequence: Synthetic oligonucleotide
  Antisense strand to SEQ ID NO: 289220
agaauacagaccuuaugga

SEQ ID NO: 289222 - RNA, 19 nt, Artificial Sequence
  Description of Artificial Sequence: Synthetic oligonucleotide
  Sense strand starting at position 4 of SEQ ID NO: 3719
aucggauuaguuugguaca

SEQ ID NO: 289223 - RNA, 19 nt, Artificial Sequence
  Description of Artificial Sequence: Synthetic oligonucleotide
  Antisense strand to SEQ ID NO: 289222
uguaccaaacuaauccgau

SEQ ID NO: 289224 - RNA, 19 nt, Artificial Sequence
  Description of Artificial Sequence: Synthetic oligonucleotide
  Sense strand starting at position 6 of SEQ ID NO: 3719
cggauuaguuugguacaau

SEQ ID NO: 289225 - RNA, 19 nt, Artificial Sequence
  Description of Artificial Sequence: Synthetic oligonucleotide
  Antisense strand to SEQ ID NO: 289224
auuguaccaaacuaauccg

SEQ ID NO: 289226 - RNA, 19 nt, Artificial Sequence
  Description of Artificial Sequence: Synthetic oligonucleotide
  Sense strand starting at position 167 of SEQ ID NO: 3719
ucagauauaucauuaguag

SEQ ID NO: 289227 - RNA, 19 nt, Artificial Sequence
  Description of Artificial Sequence: Synthetic oligonucleotide
  Antisense strand to SEQ ID NO: 289226
cuacuaaugauauaucuga

SEQ ID NO: 289228 - RNA, 19 nt, Artificial Sequence
  Description of Artificial Sequence: Synthetic oligonucleotide
  Sense strand starting at position 179 of SEQ ID NO: 3719
uuaguagauuaccuguuua

SEQ ID NO: 289229 - RNA, 19 nt, Artificial Sequence
  Description of Artificial Sequence: Synthetic oligonucleotide
  Antisense strand to SEQ ID NO: 289228
uaaacagguaaucuacuaa

SEQ ID NO: 289230 - RNA, 19 nt, Artificial Sequence
  Description of Artificial Sequence: Synthetic oligonucleotide
  Sense strand starting at position 246 of SEQ ID NO: 3719
cuuugugaccucuacuuac

SEQ ID NO: 289231 - RNA, 19 nt, Artificial Sequence
  Description of Artificial Sequence: Synthetic oligonucleotide
  Antisense strand to SEQ ID NO: 289230
guaaguagaggucacaaag

SEQ ID NO: 289232 - RNA, 19 nt, Artificial Sequence
  Description of Artificial Sequence: Synthetic oligonucleotide
  Sense strand starting at position 291 of SEQ ID NO: 3719
ucagauuccuaguccauca

SEQ ID NO: 289233 - RNA, 19 nt, Artificial Sequence
  Description of Artificial Sequence: Synthetic oligonucleotide
  Antisense strand to SEQ ID NO: 289232
ugauggacuaggaaucuga

SEQ ID NO: 289234 - RNA, 19 nt, Artificial Sequence
  Description of Artificial Sequence: Synthetic oligonucleotide
  Sense strand starting at position 444 of SEQ ID NO: 3719
uuuaguccagaauguuuga

SEQ ID NO: 289235 - RNA, 19 nt, Artificial Sequence
  Description of Artificial Sequence: Synthetic oligonucleotide
  Antisense strand to SEQ ID NO: 289234
ucaaacauucuggacuaaa

SEQ ID NO: 289236 - RNA, 19 nt, Artificial Sequence
  Description of Artificial Sequence: Synthetic oligonucleotide
  Sense strand starting at position 447 of SEQ ID NO: 3719
aguccagaauguuugaaua

SEQ ID NO: 289237 - RNA, 19 nt, Artificial Sequence
  Description of Artificial Sequence: Synthetic oligonucleotide
  Antisense strand to SEQ ID NO: 289236
uauucaaacauucuggacu

SEQ ID NO: 289238 - RNA, 19 nt, Artificial Sequence
  Description of Artificial Sequence: Synthetic oligonucleotide
  Sense strand starting at position 509 of SEQ ID NO: 3719
agccuauagaguugugaaa

SEQ ID NO: 289239 - RNA, 19 nt, Artificial Sequence
  Description of Artificial Sequence: Synthetic oligonucleotide
  Antisense strand to SEQ ID NO: 289238
uuucacaacucuauaggcu

SEQ ID NO: 289240 - RNA, 19 nt, Artificial Sequence
  Description of Artificial Sequence: Synthetic oligonucleotide
  Sense strand starting at position 591 of SEQ ID NO: 3719
aaagcuuccugguccuaga

SEQ ID NO: 289241 - RNA, 19 nt, Artificial Sequence
  Description of Artificial Sequence: Synthetic oligonucleotide
  Antisense strand to SEQ ID NO: 289240
ucuaggaccaggaagcuuu

SEQ ID NO: 289242 - RNA, 19 nt, Artificial Sequence
  Description of Artificial Sequence: Synthetic oligonucleotide
  Sense strand starting at position 686 of SEQ ID NO: 3719
uagguauuggcauaacuua

SEQ ID NO: 289243 - RNA, 19 nt, Artificial Sequence
  Description of Artificial Sequence: Synthetic oligonucleotide
  Antisense strand to SEQ ID NO: 289242
uaaguuaugccaauaccua

SEQ ID NO: 289244 - RNA, 19 nt, Artificial Sequence
  Description of Artificial Sequence: Synthetic oligonucleotide
  Sense strand starting at position 741 of SEQ ID NO: 3719
uaugcauucuuccuuggga

SEQ ID NO: 289245 - RNA, 19 nt, Artificial Sequence
  Description of Artificial Sequence: Synthetic oligonucleotide
  Antisense strand to SEQ ID NO: 289244
ucccaaggaagaaugcaua

SEQ ID NO: 289246 - RNA, 19 nt, Artificial Sequence
  Description of Artificial Sequence: Synthetic oligonucleotide
  Sense strand starting at position 744 of SEQ ID NO: 3719
gcauucuuccuugggagga

SEQ ID NO: 289247 - RNA, 19 nt, Artificial Sequence
  Description of Artificial Sequence: Synthetic oligonucleotide
  Antisense strand to SEQ ID NO: 289246
uccucccaaggaagaaugc

SEQ ID NO: 289248 - RNA, 19 nt, Artificial Sequence
  Description of Artificial Sequence: Synthetic oligonucleotide
  Sense strand starting at position 831 of SEQ ID NO: 3719
guauguagguauguauaag

SEQ ID NO: 289249 - RNA, 19 nt, Artificial Sequence
  Description of Artificial Sequence: Synthetic oligonucleotide
  Antisense strand to SEQ ID NO: 289248
cuuauacauaccuacauac

SEQ ID NO: 289250 - RNA, 19 nt, Artificial Sequence
  Description of Artificial Sequence: Synthetic oligonucleotide
  Sense strand starting at position 890 of SEQ ID NO: 3719
caagcuaugcugggauaca

SEQ ID NO: 289251 - RNA, 19 nt, Artificial Sequence
  Description of Artificial Sequence: Synthetic oligonucleotide
  Antisense strand to SEQ ID NO: 289250
uguaucccagcauagcuug

SEQ ID NO: 289252 - RNA, 19 nt, Artificial Sequence
  Description of Artificial Sequence: Synthetic oligonucleotide
  Sense strand starting at position 911 of SEQ ID NO: 3719
gugggcaugcuugacacaa

SEQ ID NO: 289253 - RNA, 19 nt, Artificial Sequence
  Description of Artificial Sequence: Synthetic oligonucleotide
  Antisense strand to SEQ ID NO: 289252
uugugucaagcaugcccac

SEQ ID NO: 289254 - RNA, 19 nt, Artificial Sequence
  Description of Artificial Sequence: Synthetic oligonucleotide
  Sense strand starting at position 1015 of SEQ ID NO: 3719
cuguguguaagagaaagau

SEQ ID NO: 289255 - RNA, 19 nt, Artificial Sequence
  Description of Artificial Sequence: Synthetic oligonucleotide
  Antisense strand to SEQ ID NO: 289254
aucuuucucuuacacacag

SEQ ID NO: 289256 - RNA, 19 nt, Artificial Sequence
  Description of Artificial Sequence: Synthetic oligonucleotide
  Sense strand starting at position 2334 of SEQ ID NO: 3719
ggaggcagucuuggagagu

SEQ ID NO: 289257 - RNA, 19 nt, Artificial Sequence
  Description of Artificial Sequence: Synthetic oligonucleotide
  Antisense strand to SEQ ID NO: 289256
acucuccaagacugccucc

SEQ ID NO: 289258 - RNA, 19 nt, Artificial Sequence
  Description of Artificial Sequence: Synthetic oligonucleotide
  Sense strand starting at position 2374 of SEQ ID NO: 3719
gucagaagucugggcuuaa

SEQ ID NO: 289259 - RNA, 19 nt, Artificial Sequence
  Description of Artificial Sequence: Synthetic oligonucleotide
  Antisense strand to SEQ ID NO: 289258
uuaagcccagacuucugac

SEQ ID NO: 289260 - RNA, 19 nt, Artificial Sequence
  Description of Artificial Sequence: Synthetic oligonucleotide
  Sense strand starting at position 2375 of SEQ ID NO: 3719
ucagaagucugggcuuaag

SEQ ID NO: 289261 - RNA, 19 nt, Artificial Sequence
  Description of Artificial Sequence: Synthetic oligonucleotide
  Antisense strand to SEQ ID NO: 289260
cuuaagcccagacuucuga

SEQ ID NO: 289262 - RNA, 19 nt, Artificial Sequence
  Description of Artificial Sequence: Synthetic oligonucleotide
  Sense strand starting at position 2391 of SEQ ID NO: 3719
aagagaggguccguuacuu

SEQ ID NO: 289263 - RNA, 19 nt, Artificial Sequence
  Description of Artificial Sequence: Synthetic oligonucleotide
  Antisense strand to SEQ ID NO: 289262
aaguaacggacccucucuu

SEQ ID NO: 289264 - RNA, 19 nt, Artificial Sequence
  Description of Artificial Sequence: Synthetic oligonucleotide
  Sense strand starting at position 2511 of SEQ ID NO: 3719
ggugguguggcugaaggau

SEQ ID NO: 289265 - RNA, 19 nt, Artificial Sequence
  Description of Artificial Sequence: Synthetic oligonucleotide
  Antisense strand to SEQ ID NO: 289264
auccuucagccacaccacc

SEQ ID NO: 289266 - RNA, 19 nt, Artificial Sequence
  Description of Artificial Sequence: Synthetic oligonucleotide
  Sense strand starting at position 2592 of SEQ ID NO: 3719
cuuugaggaucuuuccacu

SEQ ID NO: 289267 - RNA, 19 nt, Artificial Sequence
  Description of Artificial Sequence: Synthetic oligonucleotide
  Antisense strand to SEQ ID NO: 289266
aguggaaagauccucaaag

SEQ ID NO: 289268 - RNA, 19 nt, Artificial Sequence
  Description of Artificial Sequence: Synthetic oligonucleotide
  Sense strand starting at position 2598 of SEQ ID NO: 3719
ggaucuuuccacuggacag

SEQ ID NO: 289269 - RNA, 19 nt, Artificial Sequence
  Description of Artificial Sequence: Synthetic oligonucleotide
  Antisense strand to SEQ ID NO: 289268
cuguccaguggaaagaucc

SEQ ID NO: 289270 - RNA, 19 nt, Artificial Sequence
  Description of Artificial Sequence: Synthetic oligonucleotide
  Sense strand starting at position 2728 of SEQ ID NO: 3719
uugcgcaaaucauuuguau

SEQ ID NO: 289271 - RNA, 19 nt, Artificial Sequence
  Description of Artificial Sequence: Synthetic oligonucleotide
  Antisense strand to SEQ ID NO: 289270
auacaaaugauuugcgcaa

SEQ ID NO: 289272 - RNA, 19 nt, Artificial Sequence
  Description of Artificial Sequence: Synthetic oligonucleotide
  Sense strand starting at position 2730 of SEQ ID NO: 3719
gcgcaaaucauuuguaugu

SEQ ID NO: 289273 - RNA, 19 nt, Artificial Sequence
  Description of Artificial Sequence: Synthetic oligonucleotide
  Antisense strand to SEQ ID NO: 289272
acauacaaaugauuugcgc

SEQ ID NO: 289274 - RNA, 19 nt, Artificial Sequence
  Description of Artificial Sequence: Synthetic oligonucleotide
  Sense strand starting at position 2863 of SEQ ID NO: 3719
ucaccuaauuccguugaua

SEQ ID NO: 289275 - RNA, 19 nt, Artificial Sequence
  Description of Artificial Sequence: Synthetic oligonucleotide
  Antisense strand to SEQ ID NO: 289274
uaucaacggaauuagguga

SEQ ID NO: 289276 - RNA, 19 nt, Artificial Sequence
  Description of Artificial Sequence: Synthetic oligonucleotide
  Sense strand starting at position 2865 of SEQ ID NO: 3719
accuaauuccguugauaaa

SEQ ID NO: 289277 - RNA, 19 nt, Artificial Sequence
  Description of Artificial Sequence: Synthetic oligonucleotide
  Antisense strand to SEQ ID NO: 289276
uuuaucaacggaauuaggu

SEQ ID NO: 289278 - RNA, 19 nt, Artificial Sequence
  Description of Artificial Sequence: Synthetic oligonucleotide
  Sense strand starting at position 2950 of SEQ ID NO: 3719
guggauuaauucuuccucu

SEQ ID NO: 289279 - RNA, 19 nt, Artificial Sequence
  Description of Artificial Sequence: Synthetic oligonucleotide
  Antisense strand to SEQ ID NO: 289278
agaggaagaauuaauccac

SEQ ID NO: 289280 - RNA, 19 nt, Artificial Sequence
  Description of Artificial Sequence: Synthetic oligonucleotide
  Sense strand starting at position 3267 of SEQ ID NO: 3719
gucuuugugcccuuguagu

SEQ ID NO: 289281 - RNA, 19 nt, Artificial Sequence
  Description of Artificial Sequence: Synthetic oligonucleotide
  Antisense strand to SEQ ID NO: 289280
acuacaagggcacaaagac

SEQ ID NO: 289282 - RNA, 19 nt, Artificial Sequence
  Description of Artificial Sequence: Synthetic oligonucleotide
  Sense strand starting at position 3372 of SEQ ID NO: 3719
cuuggaaucuucccugaca

SEQ ID NO: 289283 - RNA, 19 nt, Artificial Sequence
  Description of Artificial Sequence: Synthetic oligonucleotide
  Antisense strand to SEQ ID NO: 289282
ugucagggaagauuccaag

SEQ ID NO: 289284 - RNA, 19 nt, Artificial Sequence
  Description of Artificial Sequence: Synthetic oligonucleotide
  Sense strand starting at position 3373 of SEQ ID NO: 3719
uuggaaucuucccugacau

SEQ ID NO: 289285 - RNA, 19 nt, Artificial Sequence
  Description of Artificial Sequence: Synthetic oligonucleotide
  Antisense strand to SEQ ID NO: 289284
augucagggaagauuccaa

SEQ ID NO: 289286 - RNA, 19 nt, Artificial Sequence
  Description of Artificial Sequence: Synthetic oligonucleotide
  Sense strand starting at position 3374 of SEQ ID NO: 3719
uggaaucuucccugacauc

SEQ ID NO: 289287 - RNA, 19 nt, Artificial Sequence
  Description of Artificial Sequence: Synthetic oligonucleotide
  Antisense strand to SEQ ID NO: 289286
gaugucagggaagauucca

SEQ ID NO: 289288 - RNA, 19 nt, Artificial Sequence
  Description of Artificial Sequence: Synthetic oligonucleotide
  Sense strand starting at position 3473 of SEQ ID NO: 3719
aucgucuaucuacaguauu

SEQ ID NO: 289289 - RNA, 19 nt, Artificial Sequence
  Description of Artificial Sequence: Synthetic oligonucleotide
  Antisense strand to SEQ ID NO: 289288
aauacuguagauagacgau

SEQ ID NO: 289290 - RNA, 19 nt, Artificial Sequence
  Description of Artificial Sequence: Synthetic oligonucleotide
  Sense strand starting at position 3481 of SEQ ID NO: 3719
ucuacaguauucccuauga

SEQ ID NO: 289291 - RNA, 19 nt, Artificial Sequence
  Description of Artificial Sequence: Synthetic oligonucleotide
  Antisense strand to SEQ ID NO: 289290
ucauagggaauacuguaga

SEQ ID NO: 289292 - RNA, 19 nt, Artificial Sequence
  Description of Artificial Sequence: Synthetic oligonucleotide
  Sense strand starting at position 3660 of SEQ ID NO: 3719
ugcugaagcguugaaauaa

SEQ ID NO: 289293 - RNA, 19 nt, Artificial Sequence
  Description of Artificial Sequence: Synthetic oligonucleotide
  Antisense strand to SEQ ID NO: 289292
uuauuucaacgcuucagca

SEQ ID NO: 289294 - RNA, 19 nt, Artificial Sequence
  Description of Artificial Sequence: Synthetic oligonucleotide
  Sense strand starting at position 3694 of SEQ ID NO: 3719
aauagauguugagcaucua

SEQ ID NO: 289295 - RNA, 19 nt, Artificial Sequence
  Description of Artificial Sequence: Synthetic oligonucleotide
  Antisense strand to SEQ ID NO: 289294
uagaugcucaacaucuauu

SEQ ID NO: 289296 - RNA, 19 nt, Artificial Sequence
  Description of Artificial Sequence: Synthetic oligonucleotide
  Sense strand starting at position 3929 of SEQ ID NO: 3719
acauacuucugguuccaca

SEQ ID NO: 289297 - RNA, 19 nt, Artificial Sequence
  Description of Artificial Sequence: Synthetic oligonucleotide
  Antisense strand to SEQ ID NO: 289296
uguggaaccagaaguaugu

SEQ ID NO: 289298 - RNA, 19 nt, Artificial Sequence
  Description of Artificial Sequence: Synthetic oligonucleotide
  Sense strand starting at position 3937 of SEQ ID NO: 3719
cugguuccacauuguauua

SEQ ID NO: 289299 - RNA, 19 nt, Artificial Sequence
  Description of Artificial Sequence: Synthetic oligonucleotide
  Antisense strand to SEQ ID NO: 289298
uaauacaauguggaaccag

SEQ ID NO: 289300 - RNA, 19 nt, Artificial Sequence
  Description of Artificial Sequence: Synthetic oligonucleotide
  Sense strand starting at position 3950 of SEQ ID NO: 3719
guauuaccuagguguuaga

SEQ ID NO: 289301 - RNA, 19 nt, Artificial Sequence
  Description of Artificial Sequence: Synthetic oligonucleotide
  Antisense strand to SEQ ID NO: 289300
ucuaacaccuagguaauac

SEQ ID NO: 289302 - RNA, 19 nt, Artificial Sequence
  Description of Artificial Sequence: Synthetic oligonucleotide
  Sense strand starting at position 91 of SEQ ID NO: 3720
aagcuaugucaguauuaug

SEQ ID NO: 289303 - RNA, 19 nt, Artificial Sequence
  Description of Artificial Sequence: Synthetic oligonucleotide
  Antisense strand to SEQ ID NO: 289302
cauaauacugacauagcuu

SEQ ID NO: 289304 - RNA, 19 nt, Artificial Sequence
  Description of Artificial Sequence: Synthetic oligonucleotide
  Sense strand starting at position 98 of SEQ ID NO: 3720
gucaguauuauguguauuu

SEQ ID NO: 289305 - RNA, 19 nt, Artificial Sequence
  Description of Artificial Sequence: Synthetic oligonucleotide
  Antisense strand to SEQ ID NO: 289304
aaauacacauaauacugac

SEQ ID NO: 289306 - RNA, 19 nt, Artificial Sequence
  Description of Artificial Sequence: Synthetic oligonucleotide
  Sense strand starting at position 161 of SEQ ID NO: 3720
cacagacagugcucaagua

SEQ ID NO: 289307 - RNA, 19 nt, Artificial Sequence
  Description of Artificial Sequence: Synthetic oligonucleotide
  Antisense strand to SEQ ID NO: 289306
uacuugagcacugucugug

SEQ ID NO: 289308 - RNA, 19 nt, Artificial Sequence
  Description of Artificial Sequence: Synthetic oligonucleotide
  Sense strand starting at position 162 of SEQ ID NO: 3720
acagacagugcucaaguau

SEQ ID NO: 289309 - RNA, 19 nt, Artificial Sequence
  Description of Artificial Sequence: Synthetic oligonucleotide
  Antisense strand to SEQ ID NO: 289308
auacuugagcacugucugu

SEQ ID NO: 289310 - RNA, 19 nt, Artificial Sequence
  Description of Artificial Sequence: Synthetic oligonucleotide
  Sense strand starting at position 179 of SEQ ID NO: 3720
auugaauguucugcuauuu

SEQ ID NO: 289311 - RNA, 19 nt, Artificial Sequence
  Description of Artificial Sequence: Synthetic oligonucleotide
  Antisense strand to SEQ ID NO: 289310
aaauagcagaacauucaau

SEQ ID NO: 289312 - RNA, 19 nt, Artificial Sequence
  Description of Artificial Sequence: Synthetic oligonucleotide
  Sense strand starting at position 247 of SEQ ID NO: 3720
aaguuuggccaaugaauag

SEQ ID NO: 289313 - RNA, 19 nt, Artificial Sequence
  Description of Artificial Sequence: Synthetic oligonucleotide
  Antisense strand to SEQ ID NO: 289312
cuauucauuggccaaacuu

SEQ ID NO: 289314 - RNA, 19 nt, Artificial Sequence
  Description of Artificial Sequence: Synthetic oligonucleotide
  Sense strand starting at position 464 of SEQ ID NO: 3720
aagguuauauuugagauag

SEQ ID NO: 289315 - RNA, 19 nt, Artificial Sequence
  Description of Artificial Sequence: Synthetic oligonucleotide
  Antisense strand to SEQ ID NO: 289314
cuaucucaaauauaaccuu

SEQ ID NO: 289316 - RNA, 19 nt, Artificial Sequence
  Description of Artificial Sequence: Synthetic oligonucleotide
  Sense strand starting at position 577 of SEQ ID NO: 3720
ucauuagcauguuugauaa

SEQ ID NO: 289317 - RNA, 19 nt, Artificial Sequence
  Description of Artificial Sequence: Synthetic oligonucleotide
  Antisense strand to SEQ ID NO: 289316
uuaucaaacaugcuaauga

SEQ ID NO: 289318 - RNA, 19 nt, Artificial Sequence
  Description of Artificial Sequence: Synthetic oligonucleotide
  Sense strand starting at position 725 of SEQ ID NO: 3720
guggacuacuacucaaaca

SEQ ID NO: 289319 - RNA, 19 nt, Artificial Sequence
  Description of Artificial Sequence: Synthetic oligonucleotide
  Antisense strand to SEQ ID NO: 289318
uguuugaguaguaguccac

SEQ ID NO: 289320 - RNA, 19 nt, Artificial Sequence
  Description of Artificial Sequence: Synthetic oligonucleotide
  Sense strand starting at position 837 of SEQ ID NO: 3720
auguaaccuccucagugaa

SEQ ID NO: 289321 - RNA, 19 nt, Artificial Sequence
  Description of Artificial Sequence: Synthetic oligonucleotide
  Antisense strand to SEQ ID NO: 289320
uucacugaggagguuacau

SEQ ID NO: 289322 - RNA, 19 nt, Artificial Sequence
  Description of Artificial Sequence: Synthetic oligonucleotide
  Sense strand starting at position 839 of SEQ ID NO: 3720
guaaccuccucagugaaac

SEQ ID NO: 289323 - RNA, 19 nt, Artificial Sequence
  Description of Artificial Sequence: Synthetic oligonucleotide
  Antisense strand to SEQ ID NO: 289322
guuucacugaggagguuac

SEQ ID NO: 289324 - RNA, 19 nt, Artificial Sequence
  Description of Artificial Sequence: Synthetic oligonucleotide
  Sense strand starting at position 925 of SEQ ID NO: 3720
ugcaucuggccucaugaga

SEQ ID NO: 289325 - RNA, 19 nt, Artificial Sequence
  Description of Artificial Sequence: Synthetic oligonucleotide
  Antisense strand to SEQ ID NO: 289324
ucucaugaggccagaugca

SEQ ID NO: 289326 - RNA, 19 nt, Artificial Sequence
  Description of Artificial Sequence: Synthetic oligonucleotide
  Sense strand starting at position 1174 of SEQ ID NO: 3720
cugucaucucuggauacuu

SEQ ID NO: 289327 - RNA, 19 nt, Artificial Sequence
  Description of Artificial Sequence: Synthetic oligonucleotide
  Antisense strand to SEQ ID NO: 289326
aaguauccagagaugacag

SEQ ID NO: 289328 - RNA, 19 nt, Artificial Sequence
  Description of Artificial Sequence: Synthetic oligonucleotide
  Sense strand starting at position 1182 of SEQ ID NO: 3720
ucuggauacuuccuaauga

SEQ ID NO: 289329 - RNA, 19 nt, Artificial Sequence
  Description of Artificial Sequence: Synthetic oligonucleotide
  Antisense strand to SEQ ID NO: 289328
ucauuaggaaguauccaga

SEQ ID NO: 289330 - RNA, 19 nt, Artificial Sequence
  Description of Artificial Sequence: Synthetic oligonucleotide
  Sense strand starting at position 1254 of SEQ ID NO: 3720
acgaucaacuagcuugaaa

SEQ ID NO: 289331 - RNA, 19 nt, Artificial Sequence
  Description of Artificial Sequence: Synthetic oligonucleotide
  Antisense strand to SEQ ID NO: 289330
uuucaagcuaguugaucgu

SEQ ID NO: 289332 - RNA, 19 nt, Artificial Sequence
  Description of Artificial Sequence: Synthetic oligonucleotide
  Sense strand starting at position 1269 of SEQ ID NO: 3720
gaaagcuucggccauuaau

SEQ ID NO: 289333 - RNA, 19 nt, Artificial Sequence
  Description of Artificial Sequence: Synthetic oligonucleotide
  Antisense strand to SEQ ID NO: 289332
auuaauggccgaagcuuuc

SEQ ID NO: 289334 - RNA, 19 nt, Artificial Sequence
  Description of Artificial Sequence: Synthetic oligonucleotide
  Sense strand starting at position 1272 of SEQ ID NO: 3720
agcuucggccauuaaugaa

SEQ ID NO: 289335 - RNA, 19 nt, Artificial Sequence
  Description of Artificial Sequence: Synthetic oligonucleotide
  Antisense strand to SEQ ID NO: 289334
uucauuaauggccgaagcu

SEQ ID NO: 289336 - RNA, 19 nt, Artificial Sequence
  Description of Artificial Sequence: Synthetic oligonucleotide
  Sense strand starting at position 1276 of SEQ ID NO: 3720
ucggccauuaaugaaagua

SEQ ID NO: 289337 - RNA, 19 nt, Artificial Sequence
  Description of Artificial Sequence: Synthetic oligonucleotide
  Antisense strand to SEQ ID NO: 289336
uacuuucauuaauggccga

SEQ ID NO: 289338 - RNA, 19 nt, Artificial Sequence
  Description of Artificial Sequence: Synthetic oligonucleotide
  Sense strand starting at position 1475 of SEQ ID NO: 3720
ggaaucucgguuuaaccaa

SEQ ID NO: 289339 - RNA, 19 nt, Artificial Sequence
  Description of Artificial Sequence: Synthetic oligonucleotide
  Antisense strand to SEQ ID NO: 289338
uugguuaaaccgagauucc

SEQ ID NO: 289340 - RNA, 19 nt, Artificial Sequence
  Description of Artificial Sequence: Synthetic oligonucleotide
  Sense strand starting at position 2202 of SEQ ID NO: 3720
uaagguccuuaagugagua

SEQ ID NO: 289341 - RNA, 19 nt, Artificial Sequence
  Description of Artificial Sequence: Synthetic oligonucleotide
  Antisense strand to SEQ ID NO: 289340
uacucacuuaaggaccuua

SEQ ID NO: 289342 - RNA, 19 nt, Artificial Sequence
  Description of Artificial Sequence: Synthetic oligonucleotide
  Sense strand starting at position 2207 of SEQ ID NO: 3720
uccuuaagugaguaacuuu

SEQ ID NO: 289343 - RNA, 19 nt, Artificial Sequence
  Description of Artificial Sequence: Synthetic oligonucleotide
  Antisense strand to SEQ ID NO: 289342
aaaguuacucacuuaagga

SEQ ID NO: 289344 - RNA, 19 nt, Artificial Sequence
  Description of Artificial Sequence: Synthetic oligonucleotide
  Sense strand starting at position 2218 of SEQ ID NO: 3720
guaacuuugcccuggagga

SEQ ID NO: 289345 - RNA, 19 nt, Artificial Sequence
  Description of Artificial Sequence: Synthetic oligonucleotide
  Antisense strand to SEQ ID NO: 289344
uccuccagggcaaaguuac

SEQ ID NO: 289346 - RNA, 19 nt, Artificial Sequence
  Description of Artificial Sequence: Synthetic oligonucleotide
  Sense strand starting at position 2219 of SEQ ID NO: 3720
uaacuuugcccuggaggaa

SEQ ID NO: 289347 - RNA, 19 nt, Artificial Sequence
  Description of Artificial Sequence: Synthetic oligonucleotide
  Antisense strand to SEQ ID NO: 289346
uuccuccagggcaaaguua

SEQ ID NO: 289348 - RNA, 19 nt, Artificial Sequence
  Description of Artificial Sequence: Synthetic oligonucleotide
  Sense strand starting at position 2241 of SEQ ID NO: 3720
ggauucuacgaagggaguu

SEQ ID NO: 289349 - RNA, 19 nt, Artificial Sequence
  Description of Artificial Sequence: Synthetic oligonucleotide
  Antisense strand to SEQ ID NO: 289348
aacucccuucguagaaucc

SEQ ID NO: 289350 - RNA, 19 nt, Artificial Sequence
  Description of Artificial Sequence: Synthetic oligonucleotide
  Sense strand starting at position 2242 of SEQ ID NO: 3720
gauucuacgaagggaguua

SEQ ID NO: 289351 - RNA, 19 nt, Artificial Sequence
  Description of Artificial Sequence: Synthetic oligonucleotide
  Antisense strand to SEQ ID NO: 289350
uaacucccuucguagaauc

SEQ ID NO: 289352 - RNA, 19 nt, Artificial Sequence
  Description of Artificial Sequence: Synthetic oligonucleotide
  Sense strand starting at position 2650 of SEQ ID NO: 3720
uaggaauuucguugagccu

SEQ ID NO: 289353 - RNA, 19 nt, Artificial Sequence
  Description of Artificial Sequence: Synthetic oligonucleotide
  Antisense strand to SEQ ID NO: 289352
aggcucaacgaaauuccua

SEQ ID NO: 289354 - RNA, 19 nt, Artificial Sequence
  Description of Artificial Sequence: Synthetic oligonucleotide
  Sense strand starting at position 2726 of SEQ ID NO: 3720
cuuuauggguuccuagaaa

SEQ ID NO: 289355 - RNA, 19 nt, Artificial Sequence
  Description of Artificial Sequence: Synthetic oligonucleotide
  Antisense strand to SEQ ID NO: 289354
uuucuaggaacccauaaag

SEQ ID NO: 289356 - RNA, 19 nt, Artificial Sequence
  Description of Artificial Sequence: Synthetic oligonucleotide
  Sense strand starting at position 2745 of SEQ ID NO: 3720
accacucaucgucauuauu

SEQ ID NO: 289357 - RNA, 19 nt, Artificial Sequence
  Description of Artificial Sequence: Synthetic oligonucleotide
  Antisense strand to SEQ ID NO: 289356
aauaaugacgaugaguggu

SEQ ID NO: 289358 - RNA, 19 nt, Artificial Sequence
  Description of Artificial Sequence: Synthetic oligonucleotide
  Sense strand starting at position 2783 of SEQ ID NO: 3720
ucuuaaauccuagacggua

SEQ ID NO: 289359 - RNA, 19 nt, Artificial Sequence
  Description of Artificial Sequence: Synthetic oligonucleotide
  Antisense strand to SEQ ID NO: 289358
uaccgucuaggauuuaaga

SEQ ID NO: 289360 - RNA, 19 nt, Artificial Sequence
  Description of Artificial Sequence: Synthetic oligonucleotide
  Sense strand starting at position 2791 of SEQ ID NO: 3720
ccuagacgguauuccuaaa

SEQ ID NO: 289361 - RNA, 19 nt, Artificial Sequence
  Description of Artificial Sequence: Synthetic oligonucleotide
  Antisense strand to SEQ ID NO: 289360
uuuaggaauaccgucuagg

SEQ ID NO: 289362 - RNA, 19 nt, Artificial Sequence
  Description of Artificial Sequence: Synthetic oligonucleotide
  Sense strand starting at position 2846 of SEQ ID NO: 3720
uuuccugggcaucaauuau

SEQ ID NO: 289363 - RNA, 19 nt, Artificial Sequence
  Description of Artificial Sequence: Synthetic oligonucleotide
  Antisense strand to SEQ ID NO: 289362
auaauugaugcccaggaaa

SEQ ID NO: 289364 - RNA, 19 nt, Artificial Sequence
  Description of Artificial Sequence: Synthetic oligonucleotide
  Sense strand starting at position 2892 of SEQ ID NO: 3720
cuuugacuucgacgaugaa

SEQ ID NO: 289365 - RNA, 19 nt, Artificial Sequence
  Description of Artificial Sequence: Synthetic oligonucleotide
  Antisense strand to SEQ ID NO: 289364
uucaucgucgaagucaaag

SEQ ID NO: 289366 - RNA, 19 nt, Artificial Sequence
  Description of Artificial Sequence: Synthetic oligonucleotide
  Sense strand starting at position 2893 of SEQ ID NO: 3720
uuugacuucgacgaugaaa

SEQ ID NO: 289367 - RNA, 19 nt, Artificial Sequence
  Description of Artificial Sequence: Synthetic oligonucleotide
  Antisense strand to SEQ ID NO: 289366
uuucaucgucgaagucaaa

SEQ ID NO: 289368 - RNA, 19 nt, Artificial Sequence
  Description of Artificial Sequence: Synthetic oligonucleotide
  Sense strand starting at position 2962 of SEQ ID NO: 3720
gguaguuaucaagguuaga

SEQ ID NO: 289369 - RNA, 19 nt, Artificial Sequence
  Description of Artificial Sequence: Synthetic oligonucleotide
  Antisense strand to SEQ ID NO: 289368
ucuaaccuugauaacuacc

SEQ ID NO: 289370 - RNA, 19 nt, Artificial Sequence
  Description of Artificial Sequence: Synthetic oligonucleotide
  Sense strand starting at position 3011 of SEQ ID NO: 3720
gugauaaaccugcaaccca

SEQ ID NO: 289371 - RNA, 19 nt, Artificial Sequence
  Description of Artificial Sequence: Synthetic oligonucleotide
  Antisense strand to SEQ ID NO: 289370
uggguugcagguuuaucac

SEQ ID NO: 289372 - RNA, 19 nt, Artificial Sequence
  Description of Artificial Sequence: Synthetic oligonucleotide
  Sense strand starting at position 3073 of SEQ ID NO: 3720
ggaaaugguauggguguau

SEQ ID NO: 289373 - RNA, 19 nt, Artificial Sequence
  Description of Artificial Sequence: Synthetic oligonucleotide
  Antisense strand to SEQ ID NO: 289372
auacacccauaccauuucc

SEQ ID NO: 289374 - RNA, 19 nt, Artificial Sequence
  Description of Artificial Sequence: Synthetic oligonucleotide
  Sense strand starting at position 3110 of SEQ ID NO: 3720
ccauaucuacuuuggguaa

SEQ ID NO: 289375 - RNA, 19 nt, Artificial Sequence
  Description of Artificial Sequence: Synthetic oligonucleotide
  Antisense strand to SEQ ID NO: 289374
uuacccaaaguagauaugg

SEQ ID NO: 289376 - RNA, 19 nt, Artificial Sequence
  Description of Artificial Sequence: Synthetic oligonucleotide
  Sense strand starting at position 3113 of SEQ ID NO: 3720
uaucuacuuuggguaaagu

SEQ ID NO: 289377 - RNA, 19 nt, Artificial Sequence
  Description of Artificial Sequence: Synthetic oligonucleotide
  Antisense strand to SEQ ID NO: 289376
acuuuacccaaaguagaua

SEQ ID NO: 289378 - RNA, 19 nt, Artificial Sequence
  Description of Artificial Sequence: Synthetic oligonucleotide
  Sense strand starting at position 3156 of SEQ ID NO: 3720
cgguaggugggagauauau

SEQ ID NO: 289379 - RNA, 19 nt, Artificial Sequence
  Description of Artificial Sequence: Synthetic oligonucleotide
  Antisense strand to SEQ ID NO: 289378
auauaucucccaccuaccg

SEQ ID NO: 289380 - RNA, 19 nt, Artificial Sequence
  Description of Artificial Sequence: Synthetic oligonucleotide
  Sense strand starting at position 3376 of SEQ ID NO: 3720
uaacuucgaccuuaagguu

SEQ ID NO: 289381 - RNA, 19 nt, Artificial Sequence
  Description of Artificial Sequence: Synthetic oligonucleotide
  Antisense strand to SEQ ID NO: 289380
aaccuuaaggucgaaguua

SEQ ID NO: 289382 - RNA, 19 nt, Artificial Sequence
  Description of Artificial Sequence: Synthetic oligonucleotide
  Sense strand starting at position 179 of SEQ ID NO: 3721
gauucuuguuucuuggaga

SEQ ID NO: 289383 - RNA, 19 nt, Artificial Sequence
  Description of Artificial Sequence: Synthetic oligonucleotide
  Antisense strand to SEQ ID NO: 289382
ucuccaagaaacaagaauc

SEQ ID NO: 289384 - RNA, 19 nt, Artificial Sequence
  Description of Artificial Sequence: Synthetic oligonucleotide
  Sense strand starting at position 346 of SEQ ID NO: 3721
cucccauuggcauaaagau

SEQ ID NO: 289385 - RNA, 19 nt, Artificial Sequence
  Description of Artificial Sequence: Synthetic oligonucleotide
  Antisense strand to SEQ ID NO: 289384
aucuuuaugccaaugggag

SEQ ID NO: 289386 - RNA, 19 nt, Artificial Sequence
  Description of Artificial Sequence: Synthetic oligonucleotide
  Sense strand starting at position 826 of SEQ ID NO: 3721
ugauuccuaucaucaaggu

SEQ ID NO: 289387 - RNA, 19 nt, Artificial Sequence
  Description of Artificial Sequence: Synthetic oligonucleotide
  Antisense strand to SEQ ID NO: 289386
accuugaugauaggaauca

SEQ ID NO: 289388 - RNA, 19 nt, Artificial Sequence
  Description of Artificial Sequence: Synthetic oligonucleotide
  Sense strand starting at position 1161 of SEQ ID NO: 3721
guaacacuguacucucaaa

SEQ ID NO: 289389 - RNA, 19 nt, Artificial Sequence
  Description of Artificial Sequence: Synthetic oligonucleotide
  Antisense strand to SEQ ID NO: 289388
uuugagaguacaguguuac

SEQ ID NO: 289390 - RNA, 19 nt, Artificial Sequence
  Description of Artificial Sequence: Synthetic oligonucleotide
  Sense strand starting at position 1218 of SEQ ID NO: 3721
cuguauucccaauacguaa

SEQ ID NO: 289391 - RNA, 19 nt, Artificial Sequence
  Description of Artificial Sequence: Synthetic oligonucleotide
  Antisense strand to SEQ ID NO: 289390
uuacguauugggaauacag

SEQ ID NO: 289392 - RNA, 19 nt, Artificial Sequence
  Description of Artificial Sequence: Synthetic oligonucleotide
  Sense strand starting at position 1235 of SEQ ID NO: 3721
aagacuagugucuggcaca

SEQ ID NO: 289393 - RNA, 19 nt, Artificial Sequence
  Description of Artificial Sequence: Synthetic oligonucleotide
  Antisense strand to SEQ ID NO: 289392
ugugccagacacuagucuu

SEQ ID NO: 289394 - RNA, 19 nt, Artificial Sequence
  Description of Artificial Sequence: Synthetic oligonucleotide
  Sense strand starting at position 1347 of SEQ ID NO: 3721
guguuaaugaaggauccga

SEQ ID NO: 289395 - RNA, 19 nt, Artificial Sequence
  Description of Artificial Sequence: Synthetic oligonucleotide
  Antisense strand to SEQ ID NO: 289394
ucggauccuucauuaacac

SEQ ID NO: 289396 - RNA, 19 nt, Artificial Sequence
  Description of Artificial Sequence: Synthetic oligonucleotide
  Sense strand starting at position 1398 of SEQ ID NO: 3721
cuaguuguuggugaaccau

SEQ ID NO: 289397 - RNA, 19 nt, Artificial Sequence
  Description of Artificial Sequence: Synthetic oligonucleotide
  Antisense strand to SEQ ID NO: 289396
augguucaccaacaacuag

SEQ ID NO: 289398 - RNA, 19 nt, Artificial Sequence
  Description of Artificial Sequence: Synthetic oligonucleotide
  Sense strand starting at position 1413 of SEQ ID NO: 3721
ccauuaaguuaguugagga

SEQ ID NO: 289399 - RNA, 19 nt, Artificial Sequence
  Description of Artificial Sequence: Synthetic oligonucleotide
  Antisense strand to SEQ ID NO: 289398
uccucaacuaacuuaaugg

SEQ ID NO: 289400 - RNA, 19 nt, Artificial Sequence
  Description of Artificial Sequence: Synthetic oligonucleotide
  Sense strand starting at position 1418 of SEQ ID NO: 3721
aaguuaguugaggacucuu

SEQ ID NO: 289401 - RNA, 19 nt, Artificial Sequence
  Description of Artificial Sequence: Synthetic oligonucleotide
  Antisense strand to SEQ ID NO: 289400
aagaguccucaacuaacuu

SEQ ID NO: 289402 - RNA, 19 nt, Artificial Sequence
  Description of Artificial Sequence: Synthetic oligonucleotide
  Sense strand starting at position 1440 of SEQ ID NO: 3721
agauaucgacuuuaaguca

SEQ ID NO: 289403 - RNA, 19 nt, Artificial Sequence
  Description of Artificial Sequence: Synthetic oligonucleotide
  Antisense strand to SEQ ID NO: 289402
ugacuuaaagucgauaucu

SEQ ID NO: 289404 - RNA, 19 nt, Artificial Sequence
  Description of Artificial Sequence: Synthetic oligonucleotide
  Sense strand starting at position 1588 of SEQ ID NO: 3721
aggagcauaucucugagga

SEQ ID NO: 289405 - RNA, 19 nt, Artificial Sequence
  Description of Artificial Sequence: Synthetic oligonucleotide
  Antisense strand to SEQ ID NO: 289404
uccucagagauaugcuccu

SEQ ID NO: 289406 - RNA, 19 nt, Artificial Sequence
  Description of Artificial Sequence: Synthetic oligonucleotide
  Sense strand starting at position 1589 of SEQ ID NO: 3721
ggagcauaucucugaggau

SEQ ID NO: 289407 - RNA, 19 nt, Artificial Sequence
  Description of Artificial Sequence: Synthetic oligonucleotide
  Antisense strand to SEQ ID NO: 289406
auccucagagauaugcucc

SEQ ID NO: 289408 - RNA, 19 nt, Artificial Sequence
  Description of Artificial Sequence: Synthetic oligonucleotide
  Sense strand starting at position 1618 of SEQ ID NO: 3721
agugucuucgcugacagga

SEQ ID NO: 289409 - RNA, 19 nt, Artificial Sequence
  Description of Artificial Sequence: Synthetic oligonucleotide
  Antisense strand to SEQ ID NO: 289408
uccugucagcgaagacacu

SEQ ID NO: 289410 - RNA, 19 nt, Artificial Sequence
  Description of Artificial Sequence: Synthetic oligonucleotide
  Sense strand starting at position 1675 of SEQ ID NO: 3721
gagcaagaaugcuccgauc

SEQ ID NO: 289411 - RNA, 19 nt, Artificial Sequence
  Description of Artificial Sequence: Synthetic oligonucleotide
  Antisense strand to SEQ ID NO: 289410
gaucggagcauucuugcuc

SEQ ID NO: 289412 - RNA, 19 nt, Artificial Sequence
  Description of Artificial Sequence: Synthetic oligonucleotide
  Sense strand starting at position 1677 of SEQ ID NO: 3721
gcaagaaugcuccgaucca

SEQ ID NO: 289413 - RNA, 19 nt, Artificial Sequence
  Description of Artificial Sequence: Synthetic oligonucleotide
  Antisense strand to SEQ ID NO: 289412
uggaucggagcauucuugc

SEQ ID NO: 289414 - RNA, 19 nt, Artificial Sequence
  Description of Artificial Sequence: Synthetic oligonucleotide
  Sense strand starting at position 1690 of SEQ ID NO: 3721
gauccacgccgcuaagaaa

SEQ ID NO: 289415 - RNA, 19 nt, Artificial Sequence
  Description of Artificial Sequence: Synthetic oligonucleotide
  Antisense strand to SEQ ID NO: 289414
uuucuuagcggcguggauc

SEQ ID NO: 289416 - RNA, 19 nt, Artificial Sequence
  Description of Artificial Sequence: Synthetic oligonucleotide
  Sense strand starting at position 1793 of SEQ ID NO: 3721
ggcugaugaaguuaccgua

SEQ ID NO: 289417 - RNA, 19 nt, Artificial Sequence
  Description of Artificial Sequence: Synthetic oligonucleotide
  Antisense strand to SEQ ID NO: 289416
uacgguaacuucaucagcc

SEQ ID NO: 289418 - RNA, 19 nt, Artificial Sequence
  Description of Artificial Sequence: Synthetic oligonucleotide
  Sense strand starting at position 2019 of SEQ ID NO: 3721
gcgagaguccaagacacuu

SEQ ID NO: 289419 - RNA, 19 nt, Artificial Sequence
  Description of Artificial Sequence: Synthetic oligonucleotide
  Antisense strand to SEQ ID NO: 289418
aagugucuuggacucucgc

SEQ ID NO: 289420 - RNA, 19 nt, Artificial Sequence
  Description of Artificial Sequence: Synthetic oligonucleotide
  Sense strand starting at position 2296 of SEQ ID NO: 3721
agugaguauccgggaggga

SEQ ID NO: 289421 - RNA, 19 nt, Artificial Sequence
  Description of Artificial Sequence: Synthetic oligonucleotide
  Antisense strand to SEQ ID NO: 289420
ucccucccggauacucacu

SEQ ID NO: 289422 - RNA, 19 nt, Artificial Sequence
  Description of Artificial Sequence: Synthetic oligonucleotide
  Sense strand starting at position 2901 of SEQ ID NO: 3721
cugaucgggccucaguaau

SEQ ID NO: 289423 - RNA, 19 nt, Artificial Sequence
  Description of Artificial Sequence: Synthetic oligonucleotide
  Antisense strand to SEQ ID NO: 289422
auuacugaggcccgaucag

SEQ ID NO: 289424 - RNA, 19 nt, Artificial Sequence
  Description of Artificial Sequence: Synthetic oligonucleotide
  Sense strand starting at position 3065 of SEQ ID NO: 3721
uugugaaucuucuccaggu

SEQ ID NO: 289425 - RNA, 19 nt, Artificial Sequence
  Description of Artificial Sequence: Synthetic oligonucleotide
  Antisense strand to SEQ ID NO: 289424
accuggagaagauucacaa

SEQ ID NO: 289426 - RNA, 19 nt, Artificial Sequence
  Description of Artificial Sequence: Synthetic oligonucleotide
  Sense strand starting at position 3066 of SEQ ID NO: 3721
ugugaaucuucuccagguu

SEQ ID NO: 289427 - RNA, 19 nt, Artificial Sequence
  Description of Artificial Sequence: Synthetic oligonucleotide
  Antisense strand to SEQ ID NO: 289426
aaccuggagaagauucaca

SEQ ID NO: 289428 - RNA, 19 nt, Artificial Sequence
  Description of Artificial Sequence: Synthetic oligonucleotide
  Sense strand starting at position 3067 of SEQ ID NO: 3721
gugaaucuucuccagguuu

SEQ ID NO: 289429 - RNA, 19 nt, Artificial Sequence
  Description of Artificial Sequence: Synthetic oligonucleotide
  Antisense strand to SEQ ID NO: 289428
aaaccuggagaagauucac

SEQ ID NO: 289430 - RNA, 19 nt, Artificial Sequence
  Description of Artificial Sequence: Synthetic oligonucleotide
  Sense strand starting at position 3078 of SEQ ID NO: 3721
ccagguuugcucuggaaag

SEQ ID NO: 289431 - RNA, 19 nt, Artificial Sequence
  Description of Artificial Sequence: Synthetic oligonucleotide
  Antisense strand to SEQ ID NO: 289430
cuuuccagagcaaaccugg

SEQ ID NO: 289432 - RNA, 19 nt, Artificial Sequence
  Description of Artificial Sequence: Synthetic oligonucleotide
  Sense strand starting at position 3207 of SEQ ID NO: 3721
uucggucacuggguagauu

SEQ ID NO: 289433 - RNA, 19 nt, Artificial Sequence
  Description of Artificial Sequence: Synthetic oligonucleotide
  Antisense strand to SEQ ID NO: 289432
aaucuacccagugaccgaa

SEQ ID NO: 289434 - RNA, 19 nt, Artificial Sequence
  Description of Artificial Sequence: Synthetic oligonucleotide
  Sense strand starting at position 3216 of SEQ ID NO: 3721
uggguagauucuguccaga

SEQ ID NO: 289435 - RNA, 19 nt, Artificial Sequence
  Description of Artificial Sequence: Synthetic oligonucleotide
  Antisense strand to SEQ ID NO: 289434
ucuggacagaaucuaccca

SEQ ID NO: 289436 - RNA, 19 nt, Artificial Sequence
  Description of Artificial Sequence: Synthetic oligonucleotide
  Sense strand starting at position 3218 of SEQ ID NO: 3721
gguagauucuguccagaac

SEQ ID NO: 289437 - RNA, 19 nt, Artificial Sequence
  Description of Artificial Sequence: Synthetic oligonucleotide
  Antisense strand to SEQ ID NO: 289436
guucuggacagaaucuacc

SEQ ID NO: 289438 - RNA, 19 nt, Artificial Sequence
  Description of Artificial Sequence: Synthetic oligonucleotide
  Sense strand starting at position 3274 of SEQ ID NO: 3721
ggcagaauuugcuccguga

SEQ ID NO: 289439 - RNA, 19 nt, Artificial Sequence
  Description of Artificial Sequence: Synthetic oligonucleotide
  Antisense strand to SEQ ID NO: 289438
ucacggagcaaauucugcc

SEQ ID NO: 289440 - RNA, 19 nt, Artificial Sequence
  Description of Artificial Sequence: Synthetic oligonucleotide
  Sense strand starting at position 3278 of SEQ ID NO: 3721
gaauuugcuccgugaaagc

SEQ ID NO: 289441 - RNA, 19 nt, Artificial Sequence
  Description of Artificial Sequence: Synthetic oligonucleotide
  Antisense strand to SEQ ID NO: 289440
gcuuucacggagcaaauuc

SEQ ID NO: 289442 - RNA, 19 nt, Artificial Sequence
  Description of Artificial Sequence: Synthetic oligonucleotide
  Sense strand starting at position 3302 of SEQ ID NO: 3721
ccagcauuugcuuguacua

SEQ ID NO: 289443 - RNA, 19 nt, Artificial Sequence
  Description of Artificial Sequence: Synthetic oligonucleotide
  Antisense strand to SEQ ID NO: 289442
uaguacaagcaaaugcugg

SEQ ID NO: 289444 - RNA, 19 nt, Artificial Sequence
  Description of Artificial Sequence: Synthetic oligonucleotide
  Sense strand starting at position 3476 of SEQ ID NO: 3721
gaaggagucaugugccauc

SEQ ID NO: 289445 - RNA, 19 nt, Artificial Sequence
  Description of Artificial Sequence: Synthetic oligonucleotide
  Antisense strand to SEQ ID NO: 289444
gauggcacaugacuccuuc

SEQ ID NO: 289446 - RNA, 19 nt, Artificial Sequence
  Description of Artificial Sequence: Synthetic oligonucleotide
  Sense strand starting at position 3494 of SEQ ID NO: 3721
cucagaauauguccgauag

SEQ ID NO: 289447 - RNA, 19 nt, Artificial Sequence
  Description of Artificial Sequence: Synthetic oligonucleotide
  Antisense strand to SEQ ID NO: 289446
cuaucggacauauucugag

SEQ ID NO: 289448 - RNA, 19 nt, Artificial Sequence
  Description of Artificial Sequence: Synthetic oligonucleotide
  Sense strand starting at position 3495 of SEQ ID NO: 3721
ucagaauauguccgauagg

SEQ ID NO: 289449 - RNA, 19 nt, Artificial Sequence
  Description of Artificial Sequence: Synthetic oligonucleotide
  Antisense strand to SEQ ID NO: 289448
ccuaucggacauauucuga

SEQ ID NO: 289450 - RNA, 19 nt, Artificial Sequence
  Description of Artificial Sequence: Synthetic oligonucleotide
  Sense strand starting at position 3498 of SEQ ID NO: 3721
gaauauguccgauagguau

SEQ ID NO: 289451 - RNA, 19 nt, Artificial Sequence
  Description of Artificial Sequence: Synthetic oligonucleotide
  Antisense strand to SEQ ID NO: 289450
auaccuaucggacauauuc

SEQ ID NO: 289452 - RNA, 19 nt, Artificial Sequence
  Description of Artificial Sequence: Synthetic oligonucleotide
  Sense strand starting at position 3500 of SEQ ID NO: 3721
auauguccgauagguauau

SEQ ID NO: 289453 - RNA, 19 nt, Artificial Sequence
  Description of Artificial Sequence: Synthetic oligonucleotide
  Antisense strand to SEQ ID NO: 289452
auauaccuaucggacauau

SEQ ID NO: 289454 - RNA, 19 nt, Artificial Sequence
  Description of Artificial Sequence: Synthetic oligonucleotide
  Sense strand starting at position 3501 of SEQ ID NO: 3721
uauguccgauagguauauu

SEQ ID NO: 289455 - RNA, 19 nt, Artificial Sequence
  Description of Artificial Sequence: Synthetic oligonucleotide
  Antisense strand to SEQ ID NO: 289454
aauauaccuaucggacaua

SEQ ID NO: 289456 - RNA, 19 nt, Artificial Sequence
  Description of Artificial Sequence: Synthetic oligonucleotide
  Sense strand starting at position 3504 of SEQ ID NO: 3721
guccgauagguauauuguu

SEQ ID NO: 289457 - RNA, 19 nt, Artificial Sequence
  Description of Artificial Sequence: Synthetic oligonucleotide
  Antisense strand to SEQ ID NO: 289456
aacaauauaccuaucggac

SEQ ID NO: 289458 - RNA, 19 nt, Artificial Sequence
  Description of Artificial Sequence: Synthetic oligonucleotide
  Sense strand starting at position 3708 of SEQ ID NO: 3721
ggaaguaacccuuaucuuc

SEQ ID NO: 289459 - RNA, 19 nt, Artificial Sequence
  Description of Artificial Sequence: Synthetic oligonucleotide
  Antisense strand to SEQ ID NO: 289458
gaagauaaggguuacuucc

SEQ ID NO: 289460 - RNA, 19 nt, Artificial Sequence
  Description of Artificial Sequence: Synthetic oligonucleotide
  Sense strand starting at position 3854 of SEQ ID NO: 3721
ucuuacuuuggccgaauca

SEQ ID NO: 289461 - RNA, 19 nt, Artificial Sequence
  Description of Artificial Sequence: Synthetic oligonucleotide
  Antisense strand to SEQ ID NO: 289460
ugauucggccaaaguaaga

SEQ ID NO: 289462 - RNA, 19 nt, Artificial Sequence
  Description of Artificial Sequence: Synthetic oligonucleotide
  Sense strand starting at position 2008 of SEQ ID NO: 3722
guguaacucagguggguuu

SEQ ID NO: 289463 - RNA, 19 nt, Artificial Sequence
  Description of Artificial Sequence: Synthetic oligonucleotide
  Antisense strand to SEQ ID NO: 289462
aaacccaccugaguuacac

SEQ ID NO: 289464 - RNA, 19 nt, Artificial Sequence
  Description of Artificial Sequence: Synthetic oligonucleotide
  Sense strand starting at position 2044 of SEQ ID NO: 3722
ucugauuaguuaccucacu

SEQ ID NO: 289465 - RNA, 19 nt, Artificial Sequence
  Description of Artificial Sequence: Synthetic oligonucleotide
  Antisense strand to SEQ ID NO: 289464
agugagguaacuaaucaga

SEQ ID NO: 289466 - RNA, 19 nt, Artificial Sequence
  Description of Artificial Sequence: Synthetic oligonucleotide
  Sense strand starting at position 2045 of SEQ ID NO: 3722
cugauuaguuaccucacuu

SEQ ID NO: 289467 - RNA, 19 nt, Artificial Sequence
  Description of Artificial Sequence: Synthetic oligonucleotide
  Antisense strand to SEQ ID NO: 289466
aagugagguaacuaaucag

SEQ ID NO: 289468 - RNA, 19 nt, Artificial Sequence
  Description of Artificial Sequence: Synthetic oligonucleotide
  Sense strand starting at position 2053 of SEQ ID NO: 3722
uuaccucacuuguaguaau

SEQ ID NO: 289469 - RNA, 19 nt, Artificial Sequence
  Description of Artificial Sequence: Synthetic oligonucleotide
  Antisense strand to SEQ ID NO: 289468
auuacuacaagugagguaa

SEQ ID NO: 289470 - RNA, 19 nt, Artificial Sequence
  Description of Artificial Sequence: Synthetic oligonucleotide
  Sense strand starting at position 2056 of SEQ ID NO: 3722
ccucacuuguaguaauagu

SEQ ID NO: 289471 - RNA, 19 nt, Artificial Sequence
  Description of Artificial Sequence: Synthetic oligonucleotide
  Antisense strand to SEQ ID NO: 289470
acuauuacuacaagugagg

SEQ ID NO: 289472 - RNA, 19 nt, Artificial Sequence
  Description of Artificial Sequence: Synthetic oligonucleotide
  Sense strand starting at position 2072 of SEQ ID NO: 3722
agugaccauccugaucauu

SEQ ID NO: 289473 - RNA, 19 nt, Artificial Sequence
  Description of Artificial Sequence: Synthetic oligonucleotide
  Antisense strand to SEQ ID NO: 289472
aaugaucaggauggucacu

SEQ ID NO: 289474 - RNA, 19 nt, Artificial Sequence
  Description of Artificial Sequence: Synthetic oligonucleotide
  Sense strand starting at position 2142 of SEQ ID NO: 3722
ucucuauucuguucucagu

SEQ ID NO: 289475 - RNA, 19 nt, Artificial Sequence
  Description of Artificial Sequence: Synthetic oligonucleotide
  Antisense strand to SEQ ID NO: 289474
acugagaacagaauagaga

SEQ ID NO: 289476 - RNA, 19 nt, Artificial Sequence
  Description of Artificial Sequence: Synthetic oligonucleotide
  Sense strand starting at position 2144 of SEQ ID NO: 3722
ucuauucuguucucaguuu

SEQ ID NO: 289477 - RNA, 19 nt, Artificial Sequence
  Description of Artificial Sequence: Synthetic oligonucleotide
  Antisense strand to SEQ ID NO: 289476
aaacugagaacagaauaga

SEQ ID NO: 289478 - RNA, 19 nt, Artificial Sequence
  Description of Artificial Sequence: Synthetic oligonucleotide
  Sense strand starting at position 2281 of SEQ ID NO: 3722
cugacucaucgucacauca

SEQ ID NO: 289479 - RNA, 19 nt, Artificial Sequence
  Description of Artificial Sequence: Synthetic oligonucleotide
  Antisense strand to SEQ ID NO: 289478
ugaugugacgaugagucag

SEQ ID NO: 289480 - RNA, 19 nt, Artificial Sequence
  Description of Artificial Sequence: Synthetic oligonucleotide
  Sense strand starting at position 2289 of SEQ ID NO: 3722
ucgucacaucacugugaca

SEQ ID NO: 289481 - RNA, 19 nt, Artificial Sequence
  Description of Artificial Sequence: Synthetic oligonucleotide
  Antisense strand to SEQ ID NO: 289480
ugucacagugaugugacga

SEQ ID NO: 289482 - RNA, 19 nt, Artificial Sequence
  Description of Artificial Sequence: Synthetic oligonucleotide
  Sense strand starting at position 2291 of SEQ ID NO: 3722
gucacaucacugugacaag

SEQ ID NO: 289483 - RNA, 19 nt, Artificial Sequence
  Description of Artificial Sequence: Synthetic oligonucleotide
  Antisense strand to SEQ ID NO: 289482
cuugucacagugaugugac

SEQ ID NO: 289484 - RNA, 19 nt, Artificial Sequence
  Description of Artificial Sequence: Synthetic oligonucleotide
  Sense strand starting at position 2322 of SEQ ID NO: 3722
caggucaauccugaucugu

SEQ ID NO: 289485 - RNA, 19 nt, Artificial Sequence
  Description of Artificial Sequence: Synthetic oligonucleotide
  Antisense strand to SEQ ID NO: 289484
acagaucaggauugaccug

SEQ ID NO: 289486 - RNA, 19 nt, Artificial Sequence
  Description of Artificial Sequence: Synthetic oligonucleotide
  Sense strand starting at position 2324 of SEQ ID NO: 3722
ggucaauccugaucuguuc

SEQ ID NO: 289487 - RNA, 19 nt, Artificial Sequence
  Description of Artificial Sequence: Synthetic oligonucleotide
  Antisense strand to SEQ ID NO: 289486
gaacagaucaggauugacc

SEQ ID NO: 289488 - RNA, 19 nt, Artificial Sequence
  Description of Artificial Sequence: Synthetic oligonucleotide
  Sense strand starting at position 2396 of SEQ ID NO: 3722
gcuugugguuccucucaca

SEQ ID NO: 289489 - RNA, 19 nt, Artificial Sequence
  Description of Artificial Sequence: Synthetic oligonucleotide
  Antisense strand to SEQ ID NO: 289488
ugugagaggaaccacaagc

SEQ ID NO: 289490 - RNA, 19 nt, Artificial Sequence
  Description of Artificial Sequence: Synthetic oligonucleotide
  Sense strand starting at position 2414 of SEQ ID NO: 3722
aggucagauuccuccagau

SEQ ID NO: 289491 - RNA, 19 nt, Artificial Sequence
  Description of Artificial Sequence: Synthetic oligonucleotide
  Antisense strand to SEQ ID NO: 289490
aucuggaggaaucugaccu

SEQ ID NO: 289492 - RNA, 19 nt, Artificial Sequence
  Description of Artificial Sequence: Synthetic oligonucleotide
  Sense strand starting at position 2416 of SEQ ID NO: 3722
gucagauuccuccagauuc

SEQ ID NO: 289493 - RNA, 19 nt, Artificial Sequence
  Description of Artificial Sequence: Synthetic oligonucleotide
  Antisense strand to SEQ ID NO: 289492
gaaucuggaggaaucugac

SEQ ID NO: 289494 - RNA, 19 nt, Artificial Sequence
  Description of Artificial Sequence: Synthetic oligonucleotide
  Sense strand starting at position 2618 of SEQ ID NO: 3722
uugguuggauccuggcaga

SEQ ID NO: 289495 - RNA, 19 nt, Artificial Sequence
  Description of Artificial Sequence: Synthetic oligonucleotide
  Antisense strand to SEQ ID NO: 289494
ucugccaggauccaaccaa

SEQ ID NO: 289496 - RNA, 19 nt, Artificial Sequence
  Description of Artificial Sequence: Synthetic oligonucleotide
  Sense strand starting at position 2665 of SEQ ID NO: 3722
uuuguuaucucacuugaua

SEQ ID NO: 289497 - RNA, 19 nt, Artificial Sequence
  Description of Artificial Sequence: Synthetic oligonucleotide
  Antisense strand to SEQ ID NO: 289496
uaucaagugagauaacaaa

SEQ ID NO: 289498 - RNA, 19 nt, Artificial Sequence
  Description of Artificial Sequence: Synthetic oligonucleotide
  Sense strand starting at position 2691 of SEQ ID NO: 3722
ugaccagccugaucacuua

SEQ ID NO: 289499 - RNA, 19 nt, Artificial Sequence
  Description of Artificial Sequence: Synthetic oligonucleotide
  Antisense strand to SEQ ID NO: 289498
uaagugaucaggcugguca

SEQ ID NO: 289500 - RNA, 19 nt, Artificial Sequence
  Description of Artificial Sequence: Synthetic oligonucleotide
  Sense strand starting at position 2837 of SEQ ID NO: 3722
ugcuauauccgcuguggaa

SEQ ID NO: 289501 - RNA, 19 nt, Artificial Sequence
  Description of Artificial Sequence: Synthetic oligonucleotide
  Antisense strand to SEQ ID NO: 289500
uuccacagcggauauagca

SEQ ID NO: 289502 - RNA, 19 nt, Artificial Sequence
  Description of Artificial Sequence: Synthetic oligonucleotide
  Sense strand starting at position 2948 of SEQ ID NO: 3722
uuuguauacaguuaugugu

SEQ ID NO: 289503 - RNA, 19 nt, Artificial Sequence
  Description of Artificial Sequence: Synthetic oligonucleotide
  Antisense strand to SEQ ID NO: 289502
acacauaacuguauacaaa

SEQ ID NO: 289504 - RNA, 19 nt, Artificial Sequence
  Description of Artificial Sequence: Synthetic oligonucleotide
  Sense strand starting at position 2951 of SEQ ID NO: 3722
guauacaguuaugugugua

SEQ ID NO: 289505 - RNA, 19 nt, Artificial Sequence
  Description of Artificial Sequence: Synthetic oligonucleotide
  Antisense strand to SEQ ID NO: 289504
uacacacauaacuguauac

SEQ ID NO: 289506 - RNA, 19 nt, Artificial Sequence
  Description of Artificial Sequence: Synthetic oligonucleotide
  Sense strand starting at position 2954 of SEQ ID NO: 3722
uacaguuauguguguaugu

SEQ ID NO: 289507 - RNA, 19 nt, Artificial Sequence
  Description of Artificial Sequence: Synthetic oligonucleotide
  Antisense strand to SEQ ID NO: 289506
acauacacacauaacugua

SEQ ID NO: 289508 - RNA, 19 nt, Artificial Sequence
  Description of Artificial Sequence: Synthetic oligonucleotide
  Sense strand starting at position 2956 of SEQ ID NO: 3722
caguuauguguguaugugu

SEQ ID NO: 289509 - RNA, 19 nt, Artificial Sequence
  Description of Artificial Sequence: Synthetic oligonucleotide
  Antisense strand to SEQ ID NO: 289508
acacauacacacauaacug

SEQ ID NO: 289510 - RNA, 19 nt, Artificial Sequence
  Description of Artificial Sequence: Synthetic oligonucleotide
  Sense strand starting at position 2998 of SEQ ID NO: 3722
gcaguuccacucuggauau

SEQ ID NO: 289511 - RNA, 19 nt, Artificial Sequence
  Description of Artificial Sequence: Synthetic oligonucleotide
  Antisense strand to SEQ ID NO: 289510
auauccagaguggaacugc

SEQ ID NO: 289512 - RNA, 19 nt, Artificial Sequence
  Description of Artificial Sequence: Synthetic oligonucleotide
  Sense strand starting at position 3000 of SEQ ID NO: 3722
aguuccacucuggauauau

SEQ ID NO: 289513 - RNA, 19 nt, Artificial Sequence
  Description of Artificial Sequence: Synthetic oligonucleotide
  Antisense strand to SEQ ID NO: 289512
auauauccagaguggaacu

SEQ ID NO: 289514 - RNA, 19 nt, Artificial Sequence
  Description of Artificial Sequence: Synthetic oligonucleotide
  Sense strand starting at position 3043 of SEQ ID NO: 3722
cucagagauuuguauaacu

SEQ ID NO: 289515 - RNA, 19 nt, Artificial Sequence
  Description of Artificial Sequence: Synthetic oligonucleotide
  Antisense strand to SEQ ID NO: 289514
aguuauacaaaucucugag

SEQ ID NO: 289516 - RNA, 19 nt, Artificial Sequence
  Description of Artificial Sequence: Synthetic oligonucleotide
  Sense strand starting at position 3106 of SEQ ID NO: 3722
ccaaguguccaccagcaga

SEQ ID NO: 289517 - RNA, 19 nt, Artificial Sequence
  Description of Artificial Sequence: Synthetic oligonucleotide
  Antisense strand to SEQ ID NO: 289516
ucugcugguggacacuugg

SEQ ID NO: 289518 - RNA, 19 nt, Artificial Sequence
  Description of Artificial Sequence: Synthetic oligonucleotide
  Sense strand starting at position 3275 of SEQ ID NO: 3722
ccacuucugugagguacuu

SEQ ID NO: 289519 - RNA, 19 nt, Artificial Sequence
  Description of Artificial Sequence: Synthetic oligonucleotide
  Antisense strand to SEQ ID NO: 289518
aaguaccucacagaagugg

SEQ ID NO: 289520 - RNA, 19 nt, Artificial Sequence
  Description of Artificial Sequence: Synthetic oligonucleotide
  Sense strand starting at position 3281 of SEQ ID NO: 3722
cugugagguacuuagagua

SEQ ID NO: 289521 - RNA, 19 nt, Artificial Sequence
  Description of Artificial Sequence: Synthetic oligonucleotide
  Antisense strand to SEQ ID NO: 289520
uacucuaaguaccucacag

SEQ ID NO: 289522 - RNA, 19 nt, Artificial Sequence
  Description of Artificial Sequence: Synthetic oligonucleotide
  Sense strand starting at position 3322 of SEQ ID NO: 3722
guggacugggugcauaaau

SEQ ID NO: 289523 - RNA, 19 nt, Artificial Sequence
  Description of Artificial Sequence: Synthetic oligonucleotide
  Antisense strand to SEQ ID NO: 289522
auuuaugcacccaguccac

SEQ ID NO: 289524 - RNA, 19 nt, Artificial Sequence
  Description of Artificial Sequence: Synthetic oligonucleotide
  Sense strand starting at position 3332 of SEQ ID NO: 3722
ugcauaaaugcccaucagu

SEQ ID NO: 289525 - RNA, 19 nt, Artificial Sequence
  Description of Artificial Sequence: Synthetic oligonucleotide
  Antisense strand to SEQ ID NO: 289524
acugaugggcauuuaugca

SEQ ID NO: 289526 - RNA, 19 nt, Artificial Sequence
  Description of Artificial Sequence: Synthetic oligonucleotide
  Sense strand starting at position 3446 of SEQ ID NO: 3722
gagguaaccuacucaaggu

SEQ ID NO: 289527 - RNA, 19 nt, Artificial Sequence
  Description of Artificial Sequence: Synthetic oligonucleotide
  Antisense strand to SEQ ID NO: 289526
accuugaguagguuaccuc

SEQ ID NO: 289528 - RNA, 19 nt, Artificial Sequence
  Description of Artificial Sequence: Synthetic oligonucleotide
  Sense strand starting at position 3499 of SEQ ID NO: 3722
ugugauuccugguuucuaa

SEQ ID NO: 289529 - RNA, 19 nt, Artificial Sequence
  Description of Artificial Sequence: Synthetic oligonucleotide
  Antisense strand to SEQ ID NO: 289528
uuagaaaccaggaaucaca

SEQ ID NO: 289530 - RNA, 19 nt, Artificial Sequence
  Description of Artificial Sequence: Synthetic oligonucleotide
  Sense strand starting at position 3523 of SEQ ID NO: 3722
ugggcuucccauugcagaa

SEQ ID NO: 289531 - RNA, 19 nt, Artificial Sequence
  Description of Artificial Sequence: Synthetic oligonucleotide
  Antisense strand to SEQ ID NO: 289530
uucugcaaugggaagccca

SEQ ID NO: 289532 - RNA, 19 nt, Artificial Sequence
  Description of Artificial Sequence: Synthetic oligonucleotide
  Sense strand starting at position 3772 of SEQ ID NO: 3722
cggcuagugcggugaguuu

SEQ ID NO: 289533 - RNA, 19 nt, Artificial Sequence
  Description of Artificial Sequence: Synthetic oligonucleotide
  Antisense strand to SEQ ID NO: 289532
aaacucaccgcacuagccg

SEQ ID NO: 289534 - RNA, 19 nt, Artificial Sequence
  Description of Artificial Sequence: Synthetic oligonucleotide
  Sense strand starting at position 3781 of SEQ ID NO: 3722
cggugaguuucggcccuca

SEQ ID NO: 289535 - RNA, 19 nt, Artificial Sequence
  Description of Artificial Sequence: Synthetic oligonucleotide
  Antisense strand to SEQ ID NO: 289534
ugagggccgaaacucaccg

SEQ ID NO: 289536 - RNA, 19 nt, Artificial Sequence
  Description of Artificial Sequence: Synthetic oligonucleotide
  Sense strand starting at position 3845 of SEQ ID NO: 3722
cugagaccucagcguuguu

SEQ ID NO: 289537 - RNA, 19 nt, Artificial Sequence
  Description of Artificial Sequence: Synthetic oligonucleotide
  Antisense strand to SEQ ID NO: 289536
aacaacgcugaggucucag

SEQ ID NO: 289538 - RNA, 19 nt, Artificial Sequence
  Description of Artificial Sequence: Synthetic oligonucleotide
  Sense strand starting at position 3857 of SEQ ID NO: 3722
cguuguugcgccugggaua

SEQ ID NO: 289539 - RNA, 19 nt, Artificial Sequence
  Description of Artificial Sequence: Synthetic oligonucleotide
  Antisense strand to SEQ ID NO: 289538
uaucccaggcgcaacaacg

SEQ ID NO: 289540 - RNA, 19 nt, Artificial Sequence
  Description of Artificial Sequence: Synthetic oligonucleotide
  Sense strand starting at position 3858 of SEQ ID NO: 3722
guuguugcgccugggauau

SEQ ID NO: 289541 - RNA, 19 nt, Artificial Sequence
  Description of Artificial Sequence: Synthetic oligonucleotide
  Antisense strand to SEQ ID NO: 289540
auaucccaggcgcaacaac

SEQ ID NO: 289542 - RNA, 19 nt, Artificial Sequence
  Description of Artificial Sequence: Synthetic oligonucleotide
  Sense strand starting at position 120 of SEQ ID NO: 3723
acgagugccaaggaguuaa

SEQ ID NO: 289543 - RNA, 19 nt, Artificial Sequence
  Description of Artificial Sequence: Synthetic oligonucleotide
  Antisense strand to SEQ ID NO: 289542
uuaacuccuuggcacucgu

SEQ ID NO: 289544 - RNA, 19 nt, Artificial Sequence
  Description of Artificial Sequence: Synthetic oligonucleotide
  Sense strand starting at position 131 of SEQ ID NO: 3723
ggaguuaaguaguugggca

SEQ ID NO: 289545 - RNA, 19 nt, Artificial Sequence
  Description of Artificial Sequence: Synthetic oligonucleotide
  Antisense strand to SEQ ID NO: 289544
ugcccaacuacuuaacucc

SEQ ID NO: 289546 - RNA, 19 nt, Artificial Sequence
  Description of Artificial Sequence: Synthetic oligonucleotide
  Sense strand starting at position 261 of SEQ ID NO: 3723
uccuccucagccuggaaau

SEQ ID NO: 289547 - RNA, 19 nt, Artificial Sequence
  Description of Artificial Sequence: Synthetic oligonucleotide
  Antisense strand to SEQ ID NO: 289546
auuuccaggcugaggagga

SEQ ID NO: 289548 - RNA, 19 nt, Artificial Sequence
  Description of Artificial Sequence: Synthetic oligonucleotide
  Sense strand starting at position 344 of SEQ ID NO: 3723
ccaggaucugggcaucauu

SEQ ID NO: 289549 - RNA, 19 nt, Artificial Sequence
  Description of Artificial Sequence: Synthetic oligonucleotide
  Antisense strand to SEQ ID NO: 289548
aaugaugcccagauccugg

SEQ ID NO: 289550 - RNA, 19 nt, Artificial Sequence
  Description of Artificial Sequence: Synthetic oligonucleotide
  Sense strand starting at position 353 of SEQ ID NO: 3723
gggcaucauuaccuggaaa

SEQ ID NO: 289551 - RNA, 19 nt, Artificial Sequence
  Description of Artificial Sequence: Synthetic oligonucleotide
  Antisense strand to SEQ ID NO: 289550
uuuccagguaaugaugccc

SEQ ID NO: 289552 - RNA, 19 nt, Artificial Sequence
  Description of Artificial Sequence: Synthetic oligonucleotide
  Sense strand starting at position 632 of SEQ ID NO: 3723
aucuuuauucugugucauc

SEQ ID NO: 289553 - RNA, 19 nt, Artificial Sequence
  Description of Artificial Sequence: Synthetic oligonucleotide
  Antisense strand to SEQ ID NO: 289552
gaugacacagaauaaagau

SEQ ID NO: 289554 - RNA, 19 nt, Artificial Sequence
  Description of Artificial Sequence: Synthetic oligonucleotide
  Sense strand starting at position 914 of SEQ ID NO: 3723
ccaugcauccuugguggua

SEQ ID NO: 289555 - RNA, 19 nt, Artificial Sequence
  Description of Artificial Sequence: Synthetic oligonucleotide
  Antisense strand to SEQ ID NO: 289554
uaccaccaaggaugcaugg

SEQ ID NO: 289556 - RNA, 19 nt, Artificial Sequence
  Description of Artificial Sequence: Synthetic oligonucleotide
  Sense strand starting at position 953 of SEQ ID NO: 3723
ccagacuuccuguaggcaa

SEQ ID NO: 289557 - RNA, 19 nt, Artificial Sequence
  Description of Artificial Sequence: Synthetic oligonucleotide
  Antisense strand to SEQ ID NO: 289556
uugccuacaggaagucugg

SEQ ID NO: 289558 - RNA, 19 nt, Artificial Sequence
  Description of Artificial Sequence: Synthetic oligonucleotide
  Sense strand starting at position 1005 of SEQ ID NO: 3723
aggcuuuggcaccagaacu

SEQ ID NO: 289559 - RNA, 19 nt, Artificial Sequence
  Description of Artificial Sequence: Synthetic oligonucleotide
  Antisense strand to SEQ ID NO: 289558
aguucuggugccaaagccu

SEQ ID NO: 289560 - RNA, 19 nt, Artificial Sequence
  Description of Artificial Sequence: Synthetic oligonucleotide
  Sense strand starting at position 1168 of SEQ ID NO: 3723
ccauuaaacauguggacgu

SEQ ID NO: 289561 - RNA, 19 nt, Artificial Sequence
  Description of Artificial Sequence: Synthetic oligonucleotide
  Antisense strand to SEQ ID NO: 289560
acguccacauguuuaaugg

SEQ ID NO: 289562 - RNA, 19 nt, Artificial Sequence
  Description of Artificial Sequence: Synthetic oligonucleotide
  Sense strand starting at position 1172 of SEQ ID NO: 3723
uaaacauguggacgucaga

SEQ ID NO: 289563 - RNA, 19 nt, Artificial Sequence
  Description of Artificial Sequence: Synthetic oligonucleotide
  Antisense strand to SEQ ID NO: 289562
ucugacguccacauguuua

SEQ ID NO: 289564 - RNA, 19 nt, Artificial Sequence
  Description of Artificial Sequence: Synthetic oligonucleotide
  Sense strand starting at position 1286 of SEQ ID NO: 3723
ugaggacagacuuggguua

SEQ ID NO: 289565 - RNA, 19 nt, Artificial Sequence
  Description of Artificial Sequence: Synthetic oligonucleotide
  Antisense strand to SEQ ID NO: 289564
uaacccaagucuguccuca

SEQ ID NO: 289566 - RNA, 19 nt, Artificial Sequence
  Description of Artificial Sequence: Synthetic oligonucleotide
  Sense strand starting at position 1298 of SEQ ID NO: 3723
uggguuaaugccuagcaca

SEQ ID NO: 289567 - RNA, 19 nt, Artificial Sequence
  Description of Artificial Sequence: Synthetic oligonucleotide
  Antisense strand to SEQ ID NO: 289566
ugugcuaggcauuaaccca

SEQ ID NO: 289568 - RNA, 19 nt, Artificial Sequence
  Description of Artificial Sequence: Synthetic oligonucleotide
  Sense strand starting at position 1424 of SEQ ID NO: 3723
gcaggugugacucagccau

SEQ ID NO: 289569 - RNA, 19 nt, Artificial Sequence
  Description of Artificial Sequence: Synthetic oligonucleotide
  Antisense strand to SEQ ID NO: 289568
auggcugagucacaccugc

SEQ ID NO: 289570 - RNA, 19 nt, Artificial Sequence
  Description of Artificial Sequence: Synthetic oligonucleotide
  Sense strand starting at position 1527 of SEQ ID NO: 3723
gaccucaguguuugucuuu

SEQ ID NO: 289571 - RNA, 19 nt, Artificial Sequence
  Description of Artificial Sequence: Synthetic oligonucleotide
  Antisense strand to SEQ ID NO: 289570
aaagacaaacacugagguc

SEQ ID NO: 289572 - RNA, 19 nt, Artificial Sequence
  Description of Artificial Sequence: Synthetic oligonucleotide
  Sense strand starting at position 1536 of SEQ ID NO: 3723
guuugucuuugcucugaag

SEQ ID NO: 289573 - RNA, 19 nt, Artificial Sequence
  Description of Artificial Sequence: Synthetic oligonucleotide
  Antisense strand to SEQ ID NO: 289572
cuucagagcaaagacaaac

SEQ ID NO: 289574 - RNA, 19 nt, Artificial Sequence
  Description of Artificial Sequence: Synthetic oligonucleotide
  Sense strand starting at position 1538 of SEQ ID NO: 3723
uugucuuugcucugaagag

SEQ ID NO: 289575 - RNA, 19 nt, Artificial Sequence
  Description of Artificial Sequence: Synthetic oligonucleotide
  Antisense strand to SEQ ID NO: 289574
cucuucagagcaaagacaa

SEQ ID NO: 289576 - RNA, 19 nt, Artificial Sequence
  Description of Artificial Sequence: Synthetic oligonucleotide
  Sense strand starting at position 1844 of SEQ ID NO: 3723
agcaaugcucuugagagcu

SEQ ID NO: 289577 - RNA, 19 nt, Artificial Sequence
  Description of Artificial Sequence: Synthetic oligonucleotide
  Antisense strand to SEQ ID NO: 289576
agcucucaagagcauugcu

SEQ ID NO: 289578 - RNA, 19 nt, Artificial Sequence
  Description of Artificial Sequence: Synthetic oligonucleotide
  Sense strand starting at position 1957 of SEQ ID NO: 3723
guucuauggacacaugguu

SEQ ID NO: 289579 - RNA, 19 nt, Artificial Sequence
  Description of Artificial Sequence: Synthetic oligonucleotide
  Antisense strand to SEQ ID NO: 289578
aaccauguguccauagaac

SEQ ID NO: 289580 - RNA, 19 nt, Artificial Sequence
  Description of Artificial Sequence: Synthetic oligonucleotide
  Sense strand starting at position 1964 of SEQ ID NO: 3723
ggacacaugguuugcauua

SEQ ID NO: 289581 - RNA, 19 nt, Artificial Sequence
  Description of Artificial Sequence: Synthetic oligonucleotide
  Antisense strand to SEQ ID NO: 289580
uaaugcaaaccaugugucc

SEQ ID NO: 289582 - RNA, 19 nt, Artificial Sequence
  Description of Artificial Sequence: Synthetic oligonucleotide
  Sense strand starting at position 1973 of SEQ ID NO: 3723
guuugcauuagucagaaga

SEQ ID NO: 289583 - RNA, 19 nt, Artificial Sequence
  Description of Artificial Sequence: Synthetic oligonucleotide
  Antisense strand to SEQ ID NO: 289582
ucuucugacuaaugcaaac

SEQ ID NO: 289584 - RNA, 19 nt, Artificial Sequence
  Description of Artificial Sequence: Synthetic oligonucleotide
  Sense strand starting at position 2018 of SEQ ID NO: 3723
uacccugagucagagacaa

SEQ ID NO: 289585 - RNA, 19 nt, Artificial Sequence
  Description of Artificial Sequence: Synthetic oligonucleotide
  Antisense strand to SEQ ID NO: 289584
uugucucugacucagggua

SEQ ID NO: 289586 - RNA, 19 nt, Artificial Sequence
  Description of Artificial Sequence: Synthetic oligonucleotide
  Sense strand starting at position 2311 of SEQ ID NO: 3723
uuaucugaucucugcagga

SEQ ID NO: 289587 - RNA, 19 nt, Artificial Sequence
  Description of Artificial Sequence: Synthetic oligonucleotide
  Antisense strand to SEQ ID NO: 289586
uccugcagagaucagauaa

SEQ ID NO: 289588 - RNA, 19 nt, Artificial Sequence
  Description of Artificial Sequence: Synthetic oligonucleotide
  Sense strand starting at position 2403 of SEQ ID NO: 3723
aggaauuaguaccaugaug

SEQ ID NO: 289589 - RNA, 19 nt, Artificial Sequence
  Description of Artificial Sequence: Synthetic oligonucleotide
  Antisense strand to SEQ ID NO: 289588
caucaugguacuaauuccu

SEQ ID NO: 289590 - RNA, 19 nt, Artificial Sequence
  Description of Artificial Sequence: Synthetic oligonucleotide
  Sense strand starting at position 2695 of SEQ ID NO: 3723
gugugaggccauuaaacau

SEQ ID NO: 289591 - RNA, 19 nt, Artificial Sequence
  Description of Artificial Sequence: Synthetic oligonucleotide
  Antisense strand to SEQ ID NO: 289590
auguuuaauggccucacac

SEQ ID NO: 289592 - RNA, 19 nt, Artificial Sequence
  Description of Artificial Sequence: Synthetic oligonucleotide
  Sense strand starting at position 2706 of SEQ ID NO: 3723
uuaaacauguggccauuaa

SEQ ID NO: 289593 - RNA, 19 nt, Artificial Sequence
  Description of Artificial Sequence: Synthetic oligonucleotide
  Antisense strand to SEQ ID NO: 289592
uuaauggccacauguuuaa

SEQ ID NO: 289594 - RNA, 19 nt, Artificial Sequence
  Description of Artificial Sequence: Synthetic oligonucleotide
  Sense strand starting at position 2786 of SEQ ID NO: 3723
ccauguuggccagguaaca

SEQ ID NO: 289595 - RNA, 19 nt, Artificial Sequence
  Description of Artificial Sequence: Synthetic oligonucleotide
  Antisense strand to SEQ ID NO: 289594
uguuaccuggccaacaugg

SEQ ID NO: 289596 - RNA, 19 nt, Artificial Sequence
  Description of Artificial Sequence: Synthetic oligonucleotide
  Sense strand starting at position 2848 of SEQ ID NO: 3723
uggcuaaugccacacucaa

SEQ ID NO: 289597 - RNA, 19 nt, Artificial Sequence
  Description of Artificial Sequence: Synthetic oligonucleotide
  Antisense strand to SEQ ID NO: 289596
uugaguguggcauuagcca

SEQ ID NO: 289598 - RNA, 19 nt, Artificial Sequence
  Description of Artificial Sequence: Synthetic oligonucleotide
  Sense strand starting at position 2877 of SEQ ID NO: 3723
ggauuuauguaguuucugu

SEQ ID NO: 289599 - RNA, 19 nt, Artificial Sequence
  Description of Artificial Sequence: Synthetic oligonucleotide
  Antisense strand to SEQ ID NO: 289598
acagaaacuacauaaaucc

SEQ ID NO: 289600 - RNA, 19 nt, Artificial Sequence
  Description of Artificial Sequence: Synthetic oligonucleotide
  Sense strand starting at position 2898 of SEQ ID NO: 3723
gccucaaguccuugucagu

SEQ ID NO: 289601 - RNA, 19 nt, Artificial Sequence
  Description of Artificial Sequence: Synthetic oligonucleotide
  Antisense strand to SEQ ID NO: 289600
acugacaaggacuugaggc

SEQ ID NO: 289602 - RNA, 19 nt, Artificial Sequence
  Description of Artificial Sequence: Synthetic oligonucleotide
  Sense strand starting at position 2904 of SEQ ID NO: 3723
aguccuugucaguacaaca

SEQ ID NO: 289603 - RNA, 19 nt, Artificial Sequence
  Description of Artificial Sequence: Synthetic oligonucleotide
  Antisense strand to SEQ ID NO: 289602
uguuguacugacaaggacu

SEQ ID NO: 289604 - RNA, 19 nt, Artificial Sequence
  Description of Artificial Sequence: Synthetic oligonucleotide
  Sense strand starting at position 2987 of SEQ ID NO: 3723
cugagugaccuugguagaa

SEQ ID NO: 289605 - RNA, 19 nt, Artificial Sequence
  Description of Artificial Sequence: Synthetic oligonucleotide
  Antisense strand to SEQ ID NO: 289604
uucuaccaaggucacucag

SEQ ID NO: 289606 - RNA, 19 nt, Artificial Sequence
  Description of Artificial Sequence: Synthetic oligonucleotide
  Sense strand starting at position 3021 of SEQ ID NO: 3723
acugaaacgugcuuguuau

SEQ ID NO: 289607 - RNA, 19 nt, Artificial Sequence
  Description of Artificial Sequence: Synthetic oligonucleotide
  Antisense strand to SEQ ID NO: 289606
auaacaagcacguuucagu

SEQ ID NO: 289608 - RNA, 19 nt, Artificial Sequence
  Description of Artificial Sequence: Synthetic oligonucleotide
  Sense strand starting at position 3060 of SEQ ID NO: 3723
cagcgagugguaucucguu

SEQ ID NO: 289609 - RNA, 19 nt, Artificial Sequence
  Description of Artificial Sequence: Synthetic oligonucleotide
  Antisense strand to SEQ ID NO: 289608
aacgagauaccacucgcug

SEQ ID NO: 289610 - RNA, 19 nt, Artificial Sequence
  Description of Artificial Sequence: Synthetic oligonucleotide
  Sense strand starting at position 3065 of SEQ ID NO: 3723
agugguaucucguuugaau

SEQ ID NO: 289611 - RNA, 19 nt, Artificial Sequence
  Description of Artificial Sequence: Synthetic oligonucleotide
  Antisense strand to SEQ ID NO: 289610
auucaaacgagauaccacu

SEQ ID NO: 289612 - RNA, 19 nt, Artificial Sequence
  Description of Artificial Sequence: Synthetic oligonucleotide
  Sense strand starting at position 3067 of SEQ ID NO: 3723
ugguaucucguuugaauac

SEQ ID NO: 289613 - RNA, 19 nt, Artificial Sequence
  Description of Artificial Sequence: Synthetic oligonucleotide
  Antisense strand to SEQ ID NO: 289612
guauucaaacgagauacca

SEQ ID NO: 289614 - RNA, 19 nt, Artificial Sequence
  Description of Artificial Sequence: Synthetic oligonucleotide
  Sense strand starting at position 3172 of SEQ ID NO: 3723
cagagagcccuccagucua

SEQ ID NO: 289615 - RNA, 19 nt, Artificial Sequence
  Description of Artificial Sequence: Synthetic oligonucleotide
  Antisense strand to SEQ ID NO: 289614
uagacuggagggcucucug

SEQ ID NO: 289616 - RNA, 19 nt, Artificial Sequence
  Description of Artificial Sequence: Synthetic oligonucleotide
  Sense strand starting at position 3326 of SEQ ID NO: 3723
ccaccuaagucuccagagu

SEQ ID NO: 289617 - RNA, 19 nt, Artificial Sequence
  Description of Artificial Sequence: Synthetic oligonucleotide
  Antisense strand to SEQ ID NO: 289616
acucuggagacuuaggugg

SEQ ID NO: 289618 - RNA, 19 nt, Artificial Sequence
  Description of Artificial Sequence: Synthetic oligonucleotide
  Sense strand starting at position 3520 of SEQ ID NO: 3723
gccacauguuuccuucuuu

SEQ ID NO: 289619 - RNA, 19 nt, Artificial Sequence
  Description of Artificial Sequence: Synthetic oligonucleotide
  Antisense strand to SEQ ID NO: 289618
aaagaaggaaacauguggc

SEQ ID NO: 289620 - RNA, 19 nt, Artificial Sequence
  Description of Artificial Sequence: Synthetic oligonucleotide
  Sense strand starting at position 3677 of SEQ ID NO: 3723
ccgugaucacgcccagcua

SEQ ID NO: 289621 - RNA, 19 nt, Artificial Sequence
  Description of Artificial Sequence: Synthetic oligonucleotide
  Antisense strand to SEQ ID NO: 289620
uagcugggcgugaucacgg

SEQ ID NO: 289622 - RNA, 19 nt, Artificial Sequence
  Description of Artificial Sequence: Synthetic oligonucleotide
  Sense strand starting at position 44 of SEQ ID NO: 3724
ugucuccaucaggguaaga

SEQ ID NO: 289623 - RNA, 19 nt, Artificial Sequence
  Description of Artificial Sequence: Synthetic oligonucleotide
  Antisense strand to SEQ ID NO: 289622
ucuuacccugauggagaca

SEQ ID NO: 289624 - RNA, 19 nt, Artificial Sequence
  Description of Artificial Sequence: Synthetic oligonucleotide
  Sense strand starting at position 122 of SEQ ID NO: 3724
gaaaccaagucgucacaca

SEQ ID NO: 289625 - RNA, 19 nt, Artificial Sequence
  Description of Artificial Sequence: Synthetic oligonucleotide
  Antisense strand to SEQ ID NO: 289624
ugugugacgacuugguuuc

SEQ ID NO: 289626 - RNA, 19 nt, Artificial Sequence
  Description of Artificial Sequence: Synthetic oligonucleotide
  Sense strand starting at position 172 of SEQ ID NO: 3724
uauggagagcuaugaggau

SEQ ID NO: 289627 - RNA, 19 nt, Artificial Sequence
  Description of Artificial Sequence: Synthetic oligonucleotide
  Antisense strand to SEQ ID NO: 289626
auccucauagcucuccaua

SEQ ID NO: 289628 - RNA, 19 nt, Artificial Sequence
  Description of Artificial Sequence: Synthetic oligonucleotide
  Sense strand starting at position 256 of SEQ ID NO: 3724
ggagcaaguguuugccaga

SEQ ID NO: 289629 - RNA, 19 nt, Artificial Sequence
  Description of Artificial Sequence: Synthetic oligonucleotide
  Antisense strand to SEQ ID NO: 289628
ucuggcaaacacuugcucc

SEQ ID NO: 289630 - RNA, 19 nt, Artificial Sequence
  Description of Artificial Sequence: Synthetic oligonucleotide
  Sense strand starting at position 338 of SEQ ID NO: 3724
guaauaaggucacucaagu

SEQ ID NO: 289631 - RNA, 19 nt, Artificial Sequence
  Description of Artificial Sequence: Synthetic oligonucleotide
  Antisense strand to SEQ ID NO: 289630
acuugagugaccuuauuac

SEQ ID NO: 289632 - RNA, 19 nt, Artificial Sequence
  Description of Artificial Sequence: Synthetic oligonucleotide
  Sense strand starting at position 416 of SEQ ID NO: 3724
gccagucucgccucggaua

SEQ ID NO: 289633 - RNA, 19 nt, Artificial Sequence
  Description of Artificial Sequence: Synthetic oligonucleotide
  Antisense strand to SEQ ID NO: 289632
uauccgaggcgagacuggc

SEQ ID NO: 289634 - RNA, 19 nt, Artificial Sequence
  Description of Artificial Sequence: Synthetic oligonucleotide
  Sense strand starting at position 517 of SEQ ID NO: 3724
ggagccaaguucccuaauu

SEQ ID NO: 289635 - RNA, 19 nt, Artificial Sequence
  Description of Artificial Sequence: Synthetic oligonucleotide
  Antisense strand to SEQ ID NO: 289634
aauuagggaacuuggcucc

SEQ ID NO: 289636 - RNA, 19 nt, Artificial Sequence
  Description of Artificial Sequence: Synthetic oligonucleotide
  Sense strand starting at position 1595 of SEQ ID NO: 3724
cccguugaccaaugggaaa

SEQ ID NO: 289637 - RNA, 19 nt, Artificial Sequence
  Description of Artificial Sequence: Synthetic oligonucleotide
  Antisense strand to SEQ ID NO: 289636
uuucccauuggucaacggg

SEQ ID NO: 289638 - RNA, 19 nt, Artificial Sequence
  Description of Artificial Sequence: Synthetic oligonucleotide
  Sense strand starting at position 1939 of SEQ ID NO: 3724
cccgauuggcccuaaucaa

SEQ ID NO: 289639 - RNA, 19 nt, Artificial Sequence
  Description of Artificial Sequence: Synthetic oligonucleotide
  Antisense strand to SEQ ID NO: 289638
uugauuagggccaaucggg

SEQ ID NO: 289640 - RNA, 19 nt, Artificial Sequence
  Description of Artificial Sequence: Synthetic oligonucleotide
  Sense strand starting at position 2104 of SEQ ID NO: 3724
caggaaagguguuccugua

SEQ ID NO: 289641 - RNA, 19 nt, Artificial Sequence
  Description of Artificial Sequence: Synthetic oligonucleotide
  Antisense strand to SEQ ID NO: 289640
uacaggaacaccuuuccug

SEQ ID NO: 289642 - RNA, 19 nt, Artificial Sequence
  Description of Artificial Sequence: Synthetic oligonucleotide
  Sense strand starting at position 2110 of SEQ ID NO: 3724
agguguuccuguacgacga

SEQ ID NO: 289643 - RNA, 19 nt, Artificial Sequence
  Description of Artificial Sequence: Synthetic oligonucleotide
  Antisense strand to SEQ ID NO: 289642
ucgucguacaggaacaccu

SEQ ID NO: 289644 - RNA, 19 nt, Artificial Sequence
  Description of Artificial Sequence: Synthetic oligonucleotide
  Sense strand starting at position 2286 of SEQ ID NO: 3724
ggcuuucuccaaggaguug

SEQ ID NO: 289645 - RNA, 19 nt, Artificial Sequence
  Description of Artificial Sequence: Synthetic oligonucleotide
  Antisense strand to SEQ ID NO: 289644
caacuccuuggagaaagcc

SEQ ID NO: 289646 - RNA, 19 nt, Artificial Sequence
  Description of Artificial Sequence: Synthetic oligonucleotide
  Sense strand starting at position 2377 of SEQ ID NO: 3724
cacucaguuccuggagcau

SEQ ID NO: 289647 - RNA, 19 nt, Artificial Sequence
  Description of Artificial Sequence: Synthetic oligonucleotide
  Antisense strand to SEQ ID NO: 289646
augcuccaggaacugagug

SEQ ID NO: 289648 - RNA, 19 nt, Artificial Sequence
  Description of Artificial Sequence: Synthetic oligonucleotide
  Sense strand starting at position 2426 of SEQ ID NO: 3724
acauucuguacccggaaga

SEQ ID NO: 289649 - RNA, 19 nt, Artificial Sequence
  Description of Artificial Sequence: Synthetic oligonucleotide
  Antisense strand to SEQ ID NO: 289648
ucuuccggguacagaaugu

SEQ ID NO: 289650 - RNA, 19 nt, Artificial Sequence
  Description of Artificial Sequence: Synthetic oligonucleotide
  Sense strand starting at position 2442 of SEQ ID NO: 3724
agacuaaaucuucgccuga

SEQ ID NO: 289651 - RNA, 19 nt, Artificial Sequence
  Description of Artificial Sequence: Synthetic oligonucleotide
  Antisense strand to SEQ ID NO: 289650
ucaggcgaagauuuagucu

SEQ ID NO: 289652 - RNA, 19 nt, Artificial Sequence
  Description of Artificial Sequence: Synthetic oligonucleotide
  Sense strand starting at position 2444 of SEQ ID NO: 3724
acuaaaucuucgccugaug

SEQ ID NO: 289653 - RNA, 19 nt, Artificial Sequence
  Description of Artificial Sequence: Synthetic oligonucleotide
  Antisense strand to SEQ ID NO: 289652
caucaggcgaagauuuagu

SEQ ID NO: 289654 - RNA, 19 nt, Artificial Sequence
  Description of Artificial Sequence: Synthetic oligonucleotide
  Sense strand starting at position 2471 of SEQ ID NO: 3724
cuggcuuuagccuaaacau

SEQ ID NO: 289655 - RNA, 19 nt, Artificial Sequence
  Description of Artificial Sequence: Synthetic oligonucleotide
  Antisense strand to SEQ ID NO: 289654
auguuuaggcuaaagccag

SEQ ID NO: 289656 - RNA, 19 nt, Artificial Sequence
  Description of Artificial Sequence: Synthetic oligonucleotide
  Sense strand starting at position 2593 of SEQ ID NO: 3724
ucuuucuuacuguaaaguu

SEQ ID NO: 289657 - RNA, 19 nt, Artificial Sequence
  Description of Artificial Sequence: Synthetic oligonucleotide
  Antisense strand to SEQ ID NO: 289656
aacuuuacaguaagaaaga

SEQ ID NO: 289658 - RNA, 19 nt, Artificial Sequence
  Description of Artificial Sequence: Synthetic oligonucleotide
  Sense strand starting at position 2689 of SEQ ID NO: 3724
aaauaaguguuggcuguga

SEQ ID NO: 289659 - RNA, 19 nt, Artificial Sequence
  Description of Artificial Sequence: Synthetic oligonucleotide
  Antisense strand to SEQ ID NO: 289658
ucacagccaacacuuauuu

SEQ ID NO: 289660 - RNA, 19 nt, Artificial Sequence
  Description of Artificial Sequence: Synthetic oligonucleotide
  Sense strand starting at position 2780 of SEQ ID NO: 3724
gccuaauuccugggcagga

SEQ ID NO: 289661 - RNA, 19 nt, Artificial Sequence
  Description of Artificial Sequence: Synthetic oligonucleotide
  Antisense strand to SEQ ID NO: 289660
uccugcccaggaauuaggc

SEQ ID NO: 289662 - RNA, 19 nt, Artificial Sequence
  Description of Artificial Sequence: Synthetic oligonucleotide
  Sense strand starting at position 2893 of SEQ ID NO: 3724
acaguuguagaauggauua

SEQ ID NO: 289663 - RNA, 19 nt, Artificial Sequence
  Description of Artificial Sequence: Synthetic oligonucleotide
  Antisense strand to SEQ ID NO: 289662
uaauccauucuacaacugu

SEQ ID NO: 289664 - RNA, 19 nt, Artificial Sequence
  Description of Artificial Sequence: Synthetic oligonucleotide
  Sense strand starting at position 2926 of SEQ ID NO: 3724
gcugaauuaccuggucagu

SEQ ID NO: 289665 - RNA, 19 nt, Artificial Sequence
  Description of Artificial Sequence: Synthetic oligonucleotide
  Antisense strand to SEQ ID NO: 289664
acugaccagguaauucagc

SEQ ID NO: 289666 - RNA, 19 nt, Artificial Sequence
  Description of Artificial Sequence: Synthetic oligonucleotide
  Sense strand starting at position 2928 of SEQ ID NO: 3724
ugaauuaccuggucaguga

SEQ ID NO: 289667 - RNA, 19 nt, Artificial Sequence
  Description of Artificial Sequence: Synthetic oligonucleotide
  Antisense strand to SEQ ID NO: 289666
ucacugaccagguaauuca

SEQ ID NO: 289668 - RNA, 19 nt, Artificial Sequence
  Description of Artificial Sequence: Synthetic oligonucleotide
  Sense strand starting at position 2995 of SEQ ID NO: 3724
uuuggucuucuagggaacu

SEQ ID NO: 289669 - RNA, 19 nt, Artificial Sequence
  Description of Artificial Sequence: Synthetic oligonucleotide
  Antisense strand to SEQ ID NO: 289668
aguucccuagaagaccaaa

SEQ ID NO: 289670 - RNA, 19 nt, Artificial Sequence
  Description of Artificial Sequence: Synthetic oligonucleotide
  Sense strand starting at position 3055 of SEQ ID NO: 3724
ggcucaugucugccagugu

SEQ ID NO: 289671 - RNA, 19 nt, Artificial Sequence
  Description of Artificial Sequence: Synthetic oligonucleotide
  Antisense strand to SEQ ID NO: 289670
acacuggcagacaugagcc

SEQ ID NO: 289672 - RNA, 19 nt, Artificial Sequence
  Description of Artificial Sequence: Synthetic oligonucleotide
  Sense strand starting at position 3069 of SEQ ID NO: 3724
aguguuucuggacacuaca

SEQ ID NO: 289673 - RNA, 19 nt, Artificial Sequence
  Description of Artificial Sequence: Synthetic oligonucleotide
  Antisense strand to SEQ ID NO: 289672
uguaguguccagaaacacu

SEQ ID NO: 289674 - RNA, 19 nt, Artificial Sequence
  Description of Artificial Sequence: Synthetic oligonucleotide
  Sense strand starting at position 3083 of SEQ ID NO: 3724
cuacaugagcuguagcagu

SEQ ID NO: 289675 - RNA, 19 nt, Artificial Sequence
  Description of Artificial Sequence: Synthetic oligonucleotide
  Antisense strand to SEQ ID NO: 289674
acugcuacagcucauguag

SEQ ID NO: 289676 - RNA, 19 nt, Artificial Sequence
  Description of Artificial Sequence: Synthetic oligonucleotide
  Sense strand starting at position 3090 of SEQ ID NO: 3724
agcuguagcagucaaaguu

SEQ ID NO: 289677 - RNA, 19 nt, Artificial Sequence
  Description of Artificial Sequence: Synthetic oligonucleotide
  Antisense strand to SEQ ID NO: 289676
aacuuugacugcuacagcu

SEQ ID NO: 289678 - RNA, 19 nt, Artificial Sequence
  Description of Artificial Sequence: Synthetic oligonucleotide
  Sense strand starting at position 3159 of SEQ ID NO: 3724
gggagauucuagcuagcca

SEQ ID NO: 289679 - RNA, 19 nt, Artificial Sequence
  Description of Artificial Sequence: Synthetic oligonucleotide
  Antisense strand to SEQ ID NO: 289678
uggcuagcuagaaucuccc

SEQ ID NO: 289680 - RNA, 19 nt, Artificial Sequence
  Description of Artificial Sequence: Synthetic oligonucleotide
  Sense strand starting at position 3187 of SEQ ID NO: 3724
auuuguaucuuggauuugu

SEQ ID NO: 289681 - RNA, 19 nt, Artificial Sequence
  Description of Artificial Sequence: Synthetic oligonucleotide
  Antisense strand to SEQ ID NO: 289680
acaaauccaagauacaaau

SEQ ID NO: 289682 - RNA, 19 nt, Artificial Sequence
  Description of Artificial Sequence: Synthetic oligonucleotide
  Sense strand starting at position 3198 of SEQ ID NO: 3724
ggauuuguaucuuaucuua

SEQ ID NO: 289683 - RNA, 19 nt, Artificial Sequence
  Description of Artificial Sequence: Synthetic oligonucleotide
  Antisense strand to SEQ ID NO: 289682
uaagauaagauacaaaucc

SEQ ID NO: 289684 - RNA, 19 nt, Artificial Sequence
  Description of Artificial Sequence: Synthetic oligonucleotide
  Sense strand starting at position 3201 of SEQ ID NO: 3724
uuuguaucuuaucuuagag

SEQ ID NO: 289685 - RNA, 19 nt, Artificial Sequence
  Description of Artificial Sequence: Synthetic oligonucleotide
  Antisense strand to SEQ ID NO: 289684
cucuaagauaagauacaaa

SEQ ID NO: 289686 - RNA, 19 nt, Artificial Sequence
  Description of Artificial Sequence: Synthetic oligonucleotide
  Sense strand starting at position 3222 of SEQ ID NO: 3724
ucuaucuagccaugaagaa

SEQ ID NO: 289687 - RNA, 19 nt, Artificial Sequence
  Description of Artificial Sequence: Synthetic oligonucleotide
  Antisense strand to SEQ ID NO: 289686
uucuucauggcuagauaga

SEQ ID NO: 289688 - RNA, 19 nt, Artificial Sequence
  Description of Artificial Sequence: Synthetic oligonucleotide
  Sense strand starting at position 3241 of SEQ ID NO: 3724
cuauuuguaucuuggauuu

SEQ ID NO: 289689 - RNA, 19 nt, Artificial Sequence
  Description of Artificial Sequence: Synthetic oligonucleotide
  Antisense strand to SEQ ID NO: 289688
aaauccaagauacaaauag

SEQ ID NO: 289690 - RNA, 19 nt, Artificial Sequence
  Description of Artificial Sequence: Synthetic oligonucleotide
  Sense strand starting at position 3343 of SEQ ID NO: 3724
aucuuaggugcgcaauaaa

SEQ ID NO: 289691 - RNA, 19 nt, Artificial Sequence
  Description of Artificial Sequence: Synthetic oligonucleotide
  Antisense strand to SEQ ID NO: 289690
uuuauugcgcaccuaagau

SEQ ID NO: 289692 - RNA, 19 nt, Artificial Sequence
  Description of Artificial Sequence: Synthetic oligonucleotide
  Sense strand starting at position 3441 of SEQ ID NO: 3724
gggacagugucauccaaga

SEQ ID NO: 289693 - RNA, 19 nt, Artificial Sequence
  Description of Artificial Sequence: Synthetic oligonucleotide
  Antisense strand to SEQ ID NO: 289692
ucuuggaugacacuguccc

SEQ ID NO: 289694 - RNA, 19 nt, Artificial Sequence
  Description of Artificial Sequence: Synthetic oligonucleotide
  Sense strand starting at position 3674 of SEQ ID NO: 3724
gcaacuuuccuccaagugu

SEQ ID NO: 289695 - RNA, 19 nt, Artificial Sequence
  Description of Artificial Sequence: Synthetic oligonucleotide
  Antisense strand to SEQ ID NO: 289694
acacuuggaggaaaguugc

SEQ ID NO: 289696 - RNA, 19 nt, Artificial Sequence
  Description of Artificial Sequence: Synthetic oligonucleotide
  Sense strand starting at position 3934 of SEQ ID NO: 3724
uuucucagauuugaugagu

SEQ ID NO: 289697 - RNA, 19 nt, Artificial Sequence
  Description of Artificial Sequence: Synthetic oligonucleotide
  Antisense strand to SEQ ID NO: 289696
acucaucaaaucugagaaa

SEQ ID NO: 289698 - RNA, 19 nt, Artificial Sequence
  Description of Artificial Sequence: Synthetic oligonucleotide
  Sense strand starting at position 3947 of SEQ ID NO: 3724
augaguggaguuuaaggua

SEQ ID NO: 289699 - RNA, 19 nt, Artificial Sequence
  Description of Artificial Sequence: Synthetic oligonucleotide
  Antisense strand to SEQ ID NO: 289698
uaccuuaaacuccacucau

SEQ ID NO: 289700 - RNA, 19 nt, Artificial Sequence
  Description of Artificial Sequence: Synthetic oligonucleotide
  Sense strand starting at position 3952 of SEQ ID NO: 3724
uggaguuuaagguagguaa

SEQ ID NO: 289701 - RNA, 19 nt, Artificial Sequence
  Description of Artificial Sequence: Synthetic oligonucleotide
  Antisense strand to SEQ ID NO: 289700
uuaccuaccuuaaacucca

SEQ ID NO: 289702 - RNA, 19 nt, Artificial Sequence
  Description of Artificial Sequence: Synthetic oligonucleotide
  Sense strand starting at position 96 of SEQ ID NO: 3725
cuugacaugcucuaaagca

SEQ ID NO: 289703 - RNA, 19 nt, Artificial Sequence
  Description of Artificial Sequence: Synthetic oligonucleotide
  Antisense strand to SEQ ID NO: 289702
ugcuuuagagcaugucaag

SEQ ID NO: 289704 - RNA, 19 nt, Artificial Sequence
  Description of Artificial Sequence: Synthetic oligonucleotide
  Sense strand starting at position 103 of SEQ ID NO: 3725
ugcucuaaagcagaaacuu

SEQ ID NO: 289705 - RNA, 19 nt, Artificial Sequence
  Description of Artificial Sequence: Synthetic oligonucleotide
  Antisense strand to SEQ ID NO: 289704
aaguuucugcuuuagagca

SEQ ID NO: 289706 - RNA, 19 nt, Artificial Sequence
  Description of Artificial Sequence: Synthetic oligonucleotide
  Sense strand starting at position 382 of SEQ ID NO: 3725
uugucaaauuuguuugcuu

SEQ ID NO: 289707 - RNA, 19 nt, Artificial Sequence
  Description of Artificial Sequence: Synthetic oligonucleotide
  Antisense strand to SEQ ID NO: 289706
aagcaaacaaauuugacaa

SEQ ID NO: 289708 - RNA, 19 nt, Artificial Sequence
  Description of Artificial Sequence: Synthetic oligonucleotide
  Sense strand starting at position 384 of SEQ ID NO: 3725
gucaaauuuguuugcuucu

SEQ ID NO: 289709 - RNA, 19 nt, Artificial Sequence
  Description of Artificial Sequence: Synthetic oligonucleotide
  Antisense strand to SEQ ID NO: 289708
agaagcaaacaaauuugac

SEQ ID NO: 289710 - RNA, 19 nt, Artificial Sequence
  Description of Artificial Sequence: Synthetic oligonucleotide
  Sense strand starting at position 399 of SEQ ID NO: 3725
uucuguaccuuaguacaga

SEQ ID NO: 289711 - RNA, 19 nt, Artificial Sequence
  Description of Artificial Sequence: Synthetic oligonucleotide
  Antisense strand to SEQ ID NO: 289710
ucuguacuaagguacagaa

SEQ ID NO: 289712 - RNA, 19 nt, Artificial Sequence
  Description of Artificial Sequence: Synthetic oligonucleotide
  Sense strand starting at position 402 of SEQ ID NO: 3725
uguaccuuaguacagaaau

SEQ ID NO: 289713 - RNA, 19 nt, Artificial Sequence
  Description of Artificial Sequence: Synthetic oligonucleotide
  Antisense strand to SEQ ID NO: 289712
auuucuguacuaagguaca

SEQ ID NO: 289714 - RNA, 19 nt, Artificial Sequence
  Description of Artificial Sequence: Synthetic oligonucleotide
  Sense strand starting at position 435 of SEQ ID NO: 3725
gcagcugcuggauaaacau

SEQ ID NO: 289715 - RNA, 19 nt, Artificial Sequence
  Description of Artificial Sequence: Synthetic oligonucleotide
  Antisense strand to SEQ ID NO: 289714
auguuuauccagcagcugc

SEQ ID NO: 289716 - RNA, 19 nt, Artificial Sequence
  Description of Artificial Sequence: Synthetic oligonucleotide
  Sense strand starting at position 445 of SEQ ID NO: 3725
gauaaacauuuguggaaga

SEQ ID NO: 289717 - RNA, 19 nt, Artificial Sequence
  Description of Artificial Sequence: Synthetic oligonucleotide
  Antisense strand to SEQ ID NO: 289716
ucuuccacaaauguuuauc

SEQ ID NO: 289718 - RNA, 19 nt, Artificial Sequence
  Description of Artificial Sequence: Synthetic oligonucleotide
  Sense strand starting at position 515 of SEQ ID NO: 3725
uggaaugggucuccuuuga

SEQ ID NO: 289719 - RNA, 19 nt, Artificial Sequence
  Description of Artificial Sequence: Synthetic oligonucleotide
  Antisense strand to SEQ ID NO: 289718
ucaaaggagacccauucca

SEQ ID NO: 289720 - RNA, 19 nt, Artificial Sequence
  Description of Artificial Sequence: Synthetic oligonucleotide
  Sense strand starting at position 519 of SEQ ID NO: 3725
augggucuccuuugaaagu

SEQ ID NO: 289721 - RNA, 19 nt, Artificial Sequence
  Description of Artificial Sequence: Synthetic oligonucleotide
  Antisense strand to SEQ ID NO: 289720
acuuucaaaggagacccau

SEQ ID NO: 289722 - RNA, 19 nt, Artificial Sequence
  Description of Artificial Sequence: Synthetic oligonucleotide
  Sense strand starting at position 532 of SEQ ID NO: 3725
gaaaguguuaagcagaugu

SEQ ID NO: 289723 - RNA, 19 nt, Artificial Sequence
  Description of Artificial Sequence: Synthetic oligonucleotide
  Antisense strand to SEQ ID NO: 289722
acaucugcuuaacacuuuc

SEQ ID NO: 289724 - RNA, 19 nt, Artificial Sequence
  Description of Artificial Sequence: Synthetic oligonucleotide
  Sense strand starting at position 546 of SEQ ID NO: 3725
gauguugggaggugucaag

SEQ ID NO: 289725 - RNA, 19 nt, Artificial Sequence
  Description of Artificial Sequence: Synthetic oligonucleotide
  Antisense strand to SEQ ID NO: 289724
cuugacaccucccaacauc

SEQ ID NO: 289726 - RNA, 19 nt, Artificial Sequence
  Description of Artificial Sequence: Synthetic oligonucleotide
  Sense strand starting at position 940 of SEQ ID NO: 3725
gaaaucugggaguguuccu

SEQ ID NO: 289727 - RNA, 19 nt, Artificial Sequence
  Description of Artificial Sequence: Synthetic oligonucleotide
  Antisense strand to SEQ ID NO: 289726
aggaacacucccagauuuc

SEQ ID NO: 289728 - RNA, 19 nt, Artificial Sequence
  Description of Artificial Sequence: Synthetic oligonucleotide
  Sense strand starting at position 945 of SEQ ID NO: 3725
cugggaguguuccuugaca

SEQ ID NO: 289729 - RNA, 19 nt, Artificial Sequence
  Description of Artificial Sequence: Synthetic oligonucleotide
  Antisense strand to SEQ ID NO: 289728
ugucaaggaacacucccag

SEQ ID NO: 289730 - RNA, 19 nt, Artificial Sequence
  Description of Artificial Sequence: Synthetic oligonucleotide
  Sense strand starting at position 1074 of SEQ ID NO: 3725
uuaugauagugauuacaac

SEQ ID NO: 289731 - RNA, 19 nt, Artificial Sequence
  Description of Artificial Sequence: Synthetic oligonucleotide
  Antisense strand to SEQ ID NO: 289730
guuguaaucacuaucauaa

SEQ ID NO: 289732 - RNA, 19 nt, Artificial Sequence
  Description of Artificial Sequence: Synthetic oligonucleotide
  Sense strand starting at position 1083 of SEQ ID NO: 3725
ugauuacaacuguguugga

SEQ ID NO: 289733 - RNA, 19 nt, Artificial Sequence
  Description of Artificial Sequence: Synthetic oligonucleotide
  Antisense strand to SEQ ID NO: 289732
uccaacacaguuguaauca

SEQ ID NO: 289734 - RNA, 19 nt, Artificial Sequence
  Description of Artificial Sequence: Synthetic oligonucleotide
  Sense strand starting at position 1121 of SEQ ID NO: 3725
auagcuaugugaucucaac

SEQ ID NO: 289735 - RNA, 19 nt, Artificial Sequence
  Description of Artificial Sequence: Synthetic oligonucleotide
  Antisense strand to SEQ ID NO: 289734
guugagaucacauagcuau

SEQ ID NO: 289736 - RNA, 19 nt, Artificial Sequence
  Description of Artificial Sequence: Synthetic oligonucleotide
  Sense strand starting at position 1147 of SEQ ID NO: 3725
cgucucaauuuccagauuu

SEQ ID NO: 289737 - RNA, 19 nt, Artificial Sequence
  Description of Artificial Sequence: Synthetic oligonucleotide
  Antisense strand to SEQ ID NO: 289736
aaaucuggaaauugagacg

SEQ ID NO: 289738 - RNA, 19 nt, Artificial Sequence
  Description of Artificial Sequence: Synthetic oligonucleotide
  Sense strand starting at position 1245 of SEQ ID NO: 3725
gguaaacuaucagcacuca

SEQ ID NO: 289739 - RNA, 19 nt, Artificial Sequence
  Description of Artificial Sequence: Synthetic oligonucleotide
  Antisense strand to SEQ ID NO: 289738
ugagugcugauaguuuacc

SEQ ID NO: 289740 - RNA, 19 nt, Artificial Sequence
  Description of Artificial Sequence: Synthetic oligonucleotide
  Sense strand starting at position 1316 of SEQ ID NO: 3725
acgaaauacucaguuccac

SEQ ID NO: 289741 - RNA, 19 nt, Artificial Sequence
  Description of Artificial Sequence: Synthetic oligonucleotide
  Antisense strand to SEQ ID NO: 289740
guggaacugaguauuucgu

SEQ ID NO: 289742 - RNA, 19 nt, Artificial Sequence
  Description of Artificial Sequence: Synthetic oligonucleotide
  Sense strand starting at position 1492 of SEQ ID NO: 3725
gggcuccuucgagaacuuu

SEQ ID NO: 289743 - RNA, 19 nt, Artificial Sequence
  Description of Artificial Sequence: Synthetic oligonucleotide
  Antisense strand to SEQ ID NO: 289742
aaaguucucgaaggagccc

SEQ ID NO: 289744 - RNA, 19 nt, Artificial Sequence
  Description of Artificial Sequence: Synthetic oligonucleotide
  Sense strand starting at position 1544 of SEQ ID NO: 3725
cguacugagcgcucacaau

SEQ ID NO: 289745 - RNA, 19 nt, Artificial Sequence
  Description of Artificial Sequence: Synthetic oligonucleotide
  Antisense strand to SEQ ID NO: 289744
auugugagcgcucaguacg

SEQ ID NO: 289746 - RNA, 19 nt, Artificial Sequence
  Description of Artificial Sequence: Synthetic oligonucleotide
  Sense strand starting at position 1707 of SEQ ID NO: 3725
acaggacuccgucaacgaa

SEQ ID NO: 289747 - RNA, 19 nt, Artificial Sequence
  Description of Artificial Sequence: Synthetic oligonucleotide
  Antisense strand to SEQ ID NO: 289746
uucguugacggaguccugu

SEQ ID NO: 289748 - RNA, 19 nt, Artificial Sequence
  Description of Artificial Sequence: Synthetic oligonucleotide
  Sense strand starting at position 2171 of SEQ ID NO: 3725
uccugaagcguugauggaa

SEQ ID NO: 289749 - RNA, 19 nt, Artificial Sequence
  Description of Artificial Sequence: Synthetic oligonucleotide
  Antisense strand to SEQ ID NO: 289748
uuccaucaacgcuucagga

SEQ ID NO: 289750 - RNA, 19 nt, Artificial Sequence
  Description of Artificial Sequence: Synthetic oligonucleotide
  Sense strand starting at position 2412 of SEQ ID NO: 3725
augacauuucguugcaaac

SEQ ID NO: 289751 - RNA, 19 nt, Artificial Sequence
  Description of Artificial Sequence: Synthetic oligonucleotide
  Antisense strand to SEQ ID NO: 289750
guuugcaacgaaaugucau

SEQ ID NO: 289752 - RNA, 19 nt, Artificial Sequence
  Description of Artificial Sequence: Synthetic oligonucleotide
  Sense strand starting at position 2431 of SEQ ID NO: 3725
cccggaucucauuaauauu

SEQ ID NO: 289753 - RNA, 19 nt, Artificial Sequence
  Description of Artificial Sequence: Synthetic oligonucleotide
  Antisense strand to SEQ ID NO: 289752
aauauuaaugagauccggg

SEQ ID NO: 289754 - RNA, 19 nt, Artificial Sequence
  Description of Artificial Sequence: Synthetic oligonucleotide
  Sense strand starting at position 2434 of SEQ ID NO: 3725
ggaucucauuaauauuuag

SEQ ID NO: 289755 - RNA, 19 nt, Artificial Sequence
  Description of Artificial Sequence: Synthetic oligonucleotide
  Antisense strand to SEQ ID NO: 289754
cuaaauauuaaugagaucc

SEQ ID NO: 289756 - RNA, 19 nt, Artificial Sequence
  Description of Artificial Sequence: Synthetic oligonucleotide
  Sense strand starting at position 2667 of SEQ ID NO: 3725
uuguuaaaucaagguucca

SEQ ID NO: 289757 - RNA, 19 nt, Artificial Sequence
  Description of Artificial Sequence: Synthetic oligonucleotide
  Antisense strand to SEQ ID NO: 289756
uggaaccuugauuuaacaa

SEQ ID NO: 289758 - RNA, 19 nt, Artificial Sequence
  Description of Artificial Sequence: Synthetic oligonucleotide
  Sense strand starting at position 2877 of SEQ ID NO: 3725
augaaucuuguguaaguag

SEQ ID NO: 289759 - RNA, 19 nt, Artificial Sequence
  Description of Artificial Sequence: Synthetic oligonucleotide
  Antisense strand to SEQ ID NO: 289758
cuacuuacacaagauucau

SEQ ID NO: 289760 - RNA, 19 nt, Artificial Sequence
  Description of Artificial Sequence: Synthetic oligonucleotide
  Sense strand starting at position 2880 of SEQ ID NO: 3725
aaucuuguguaaguagaaa

SEQ ID NO: 289761 - RNA, 19 nt, Artificial Sequence
  Description of Artificial Sequence: Synthetic oligonucleotide
  Antisense strand to SEQ ID NO: 289760
uuucuacuuacacaagauu

SEQ ID NO: 289762 - RNA, 19 nt, Artificial Sequence
  Description of Artificial Sequence: Synthetic oligonucleotide
  Sense strand starting at position 2929 of SEQ ID NO: 3725
uccagaagacagugguuua

SEQ ID NO: 289763 - RNA, 19 nt, Artificial Sequence
  Description of Artificial Sequence: Synthetic oligonucleotide
  Antisense strand to SEQ ID NO: 289762
uaaaccacugucuucugga

SEQ ID NO: 289764 - RNA, 19 nt, Artificial Sequence
  Description of Artificial Sequence: Synthetic oligonucleotide
  Sense strand starting at position 2932 of SEQ ID NO: 3725
agaagacagugguuuacaa

SEQ ID NO: 289765 - RNA, 19 nt, Artificial Sequence
  Description of Artificial Sequence: Synthetic oligonucleotide
  Antisense strand to SEQ ID NO: 289764
uuguaaaccacugucuucu

SEQ ID NO: 289766 - RNA, 19 nt, Artificial Sequence
  Description of Artificial Sequence: Synthetic oligonucleotide
  Sense strand starting at position 2952 of SEQ ID NO: 3725
guaauauacugguuauaga

SEQ ID NO: 289767 - RNA, 19 nt, Artificial Sequence
  Description of Artificial Sequence: Synthetic oligonucleotide
  Antisense strand to SEQ ID NO: 289766
ucuauaaccaguauauuac

SEQ ID NO: 289768 - RNA, 19 nt, Artificial Sequence
  Description of Artificial Sequence: Synthetic oligonucleotide
  Sense strand starting at position 3071 of SEQ ID NO: 3725
uguagugacugugccauuu

SEQ ID NO: 289769 - RNA, 19 nt, Artificial Sequence
  Description of Artificial Sequence: Synthetic oligonucleotide
  Antisense strand to SEQ ID NO: 289768
aaauggcacagucacuaca

SEQ ID NO: 289770 - RNA, 19 nt, Artificial Sequence
  Description of Artificial Sequence: Synthetic oligonucleotide
  Sense strand starting at position 3130 of SEQ ID NO: 3725
ggcuucuguuuccuuauuu

SEQ ID NO: 289771 - RNA, 19 nt, Artificial Sequence
  Description of Artificial Sequence: Synthetic oligonucleotide
  Antisense strand to SEQ ID NO: 289770
aaauaaggaaacagaagcc

SEQ ID NO: 289772 - RNA, 19 nt, Artificial Sequence
  Description of Artificial Sequence: Synthetic oligonucleotide
  Sense strand starting at position 3816 of SEQ ID NO: 3725
acgugaucucagcuugcuu

SEQ ID NO: 289773 - RNA, 19 nt, Artificial Sequence
  Description of Artificial Sequence: Synthetic oligonucleotide
  Antisense strand to SEQ ID NO: 289772
aagcaagcugagaucacgu

SEQ ID NO: 289774 - RNA, 19 nt, Artificial Sequence
  Description of Artificial Sequence: Synthetic oligonucleotide
  Sense strand starting at position 3817 of SEQ ID NO: 3725
cgugaucucagcuugcuuu

SEQ ID NO: 289775 - RNA, 19 nt, Artificial Sequence
  Description of Artificial Sequence: Synthetic oligonucleotide
  Antisense strand to SEQ ID NO: 289774
aaagcaagcugagaucacg

SEQ ID NO: 289776 - RNA, 19 nt, Artificial Sequence
  Description of Artificial Sequence: Synthetic oligonucleotide
  Sense strand starting at position 3876 of SEQ ID NO: 3725
gcaggagcccuggaugaga

SEQ ID NO: 289777 - RNA, 19 nt, Artificial Sequence
  Description of Artificial Sequence: Synthetic oligonucleotide
  Antisense strand to SEQ ID NO: 289776
ucucauccagggcuccugc

SEQ ID NO: 289778 - RNA, 19 nt, Artificial Sequence
  Description of Artificial Sequence: Synthetic oligonucleotide
  Sense strand starting at position 3899 of SEQ ID NO: 3725
uggagaugcaguuauuaua

SEQ ID NO: 289779 - RNA, 19 nt, Artificial Sequence
  Description of Artificial Sequence: Synthetic oligonucleotide
  Antisense strand to SEQ ID NO: 289778
uauaauaacugcaucucca

SEQ ID NO: 289780 - RNA, 19 nt, Artificial Sequence
  Description of Artificial Sequence: Synthetic oligonucleotide
  Sense strand starting at position 3927 of SEQ ID NO: 3725
gagccauuagcuguguguu

SEQ ID NO: 289781 - RNA, 19 nt, Artificial Sequence
  Description of Artificial Sequence: Synthetic oligonucleotide
  Antisense strand to SEQ ID NO: 289780
aacacacagcuaauggcuc

SEQ ID NO: 289782 - RNA, 19 nt, Artificial Sequence
  Description of Artificial Sequence: Synthetic oligonucleotide
  Sense strand starting at position 51 of SEQ ID NO: 3726
aggauugucaagcaguaag

SEQ ID NO: 289783 - RNA, 19 nt, Artificial Sequence
  Description of Artificial Sequence: Synthetic oligonucleotide
  Antisense strand to SEQ ID NO: 289782
cuuacugcuugacaauccu

SEQ ID NO: 289784 - RNA, 19 nt, Artificial Sequence
  Description of Artificial Sequence: Synthetic oligonucleotide
  Sense strand starting at position 81 of SEQ ID NO: 3726
guguaagaaaucugcuuag

SEQ ID NO: 289785 - RNA, 19 nt, Artificial Sequence
  Description of Artificial Sequence: Synthetic oligonucleotide
  Antisense strand to SEQ ID NO: 289784
cuaagcagauuucuuacac

SEQ ID NO: 289786 - RNA, 19 nt, Artificial Sequence
  Description of Artificial Sequence: Synthetic oligonucleotide
  Sense strand starting at position 121 of SEQ ID NO: 3726
gauccaacuguggaguuua

SEQ ID NO: 289787 - RNA, 19 nt, Artificial Sequence
  Description of Artificial Sequence: Synthetic oligonucleotide
  Antisense strand to SEQ ID NO: 289786
uaaacuccacaguuggauc

SEQ ID NO: 289788 - RNA, 19 nt, Artificial Sequence
  Description of Artificial Sequence: Synthetic oligonucleotide
  Sense strand starting at position 126 of SEQ ID NO: 3726
aacuguggaguuuaaaguu

SEQ ID NO: 289789 - RNA, 19 nt, Artificial Sequence
  Description of Artificial Sequence: Synthetic oligonucleotide
  Antisense strand to SEQ ID NO: 289788
aacuuuaaacuccacaguu

SEQ ID NO: 289790 - RNA, 19 nt, Artificial Sequence
  Description of Artificial Sequence: Synthetic oligonucleotide
  Sense strand starting at position 132 of SEQ ID NO: 3726
ggaguuuaaaguuaaguua

SEQ ID NO: 289791 - RNA, 19 nt, Artificial Sequence
  Description of Artificial Sequence: Synthetic oligonucleotide
  Antisense strand to SEQ ID NO: 289790
uaacuuaacuuuaaacucc

SEQ ID NO: 289792 - RNA, 19 nt, Artificial Sequence
  Description of Artificial Sequence: Synthetic oligonucleotide
  Sense strand starting at position 230 of SEQ ID NO: 3726
aggguagaagcuugugaag

SEQ ID NO: 289793 - RNA, 19 nt, Artificial Sequence
  Description of Artificial Sequence: Synthetic oligonucleotide
  Antisense strand to SEQ ID NO: 289792
cuucacaagcuucuacccu

SEQ ID NO: 289794 - RNA, 19 nt, Artificial Sequence
  Description of Artificial Sequence: Synthetic oligonucleotide
  Sense strand starting at position 294 of SEQ ID NO: 3726
gugugugcaccgaauaugu

SEQ ID NO: 289795 - RNA, 19 nt, Artificial Sequence
  Description of Artificial Sequence: Synthetic oligonucleotide
  Antisense strand to SEQ ID NO: 289794
acauauucggugcacacac

SEQ ID NO: 289796 - RNA, 19 nt, Artificial Sequence
  Description of Artificial Sequence: Synthetic oligonucleotide
  Sense strand starting at position 590 of SEQ ID NO: 3726
ggguucucauacucaucua

SEQ ID NO: 289797 - RNA, 19 nt, Artificial Sequence
  Description of Artificial Sequence: Synthetic oligonucleotide
  Antisense strand to SEQ ID NO: 289796
uagaugaguaugagaaccc

SEQ ID NO: 289798 - RNA, 19 nt, Artificial Sequence
  Description of Artificial Sequence: Synthetic oligonucleotide
  Sense strand starting at position 604 of SEQ ID NO: 3726
aucuauagguuaccggaau

SEQ ID NO: 289799 - RNA, 19 nt, Artificial Sequence
  Description of Artificial Sequence: Synthetic oligonucleotide
  Antisense strand to SEQ ID NO: 289798
auuccgguaaccuauagau

SEQ ID NO: 289800 - RNA, 19 nt, Artificial Sequence
  Description of Artificial Sequence: Synthetic oligonucleotide
  Sense strand starting at position 617 of SEQ ID NO: 3726
cggaaugucacaugggaua

SEQ ID NO: 289801 - RNA, 19 nt, Artificial Sequence
  Description of Artificial Sequence: Synthetic oligonucleotide
  Antisense strand to SEQ ID NO: 289800
uaucccaugugacauuccg

SEQ ID NO: 289802 - RNA, 19 nt, Artificial Sequence
  Description of Artificial Sequence: Synthetic oligonucleotide
  Sense strand starting at position 770 of SEQ ID NO: 3726
uucguaauuccucaguuac

SEQ ID NO: 289803 - RNA, 19 nt, Artificial Sequence
  Description of Artificial Sequence: Synthetic oligonucleotide
  Antisense strand to SEQ ID NO: 289802
guaacugaggaauuacgaa

SEQ ID NO: 289804 - RNA, 19 nt, Artificial Sequence
  Description of Artificial Sequence: Synthetic oligonucleotide
  Sense strand starting at position 793 of SEQ ID NO: 3726
ucuagaaauuuacacguaa

SEQ ID NO: 289805 - RNA, 19 nt, Artificial Sequence
  Description of Artificial Sequence: Synthetic oligonucleotide
  Antisense strand to SEQ ID NO: 289804
uuacguguaaauuucuaga

SEQ ID NO: 289806 - RNA, 19 nt, Artificial Sequence
  Description of Artificial Sequence: Synthetic oligonucleotide
  Sense strand starting at position 867 of SEQ ID NO: 3726
guacaaggaauucgaauua

SEQ ID NO: 289807 - RNA, 19 nt, Artificial Sequence
  Description of Artificial Sequence: Synthetic oligonucleotide
  Antisense strand to SEQ ID NO: 289806
uaauucgaauuccuuguac

SEQ ID NO: 289808 - RNA, 19 nt, Artificial Sequence
  Description of Artificial Sequence: Synthetic oligonucleotide
  Sense strand starting at position 921 of SEQ ID NO: 3726
uuugacuuugccgagggaa

SEQ ID NO: 289809 - RNA, 19 nt, Artificial Sequence
  Description of Artificial Sequence: Synthetic oligonucleotide
  Antisense strand to SEQ ID NO: 289808
uucccucggcaaagucaaa

SEQ ID NO: 289810 - RNA, 19 nt, Artificial Sequence
  Description of Artificial Sequence: Synthetic oligonucleotide
  Sense strand starting at position 1124 of SEQ ID NO: 3726
ccagaagcaucuguuagaa

SEQ ID NO: 289811 - RNA, 19 nt, Artificial Sequence
  Description of Artificial Sequence: Synthetic oligonucleotide
  Antisense strand to SEQ ID NO: 289810
uucuaacagaugcuucugg

SEQ ID NO: 289812 - RNA, 19 nt, Artificial Sequence
  Description of Artificial Sequence: Synthetic oligonucleotide
  Sense strand starting at position 1257 of SEQ ID NO: 3726
uuguaaaucucucuaggag

SEQ ID NO: 289813 - RNA, 19 nt, Artificial Sequence
  Description of Artificial Sequence: Synthetic oligonucleotide
  Antisense strand to SEQ ID NO: 289812
cuccuagagagauuuacaa

SEQ ID NO: 289814 - RNA, 19 nt, Artificial Sequence
  Description of Artificial Sequence: Synthetic oligonucleotide
  Sense strand starting at position 1491 of SEQ ID NO: 3726
cuggcaucuacgugaauuu

SEQ ID NO: 289815 - RNA, 19 nt, Artificial Sequence
  Description of Artificial Sequence: Synthetic oligonucleotide
  Antisense strand to SEQ ID NO: 289814
aaauucacguagaugccag

SEQ ID NO: 289816 - RNA, 19 nt, Artificial Sequence
  Description of Artificial Sequence: Synthetic oligonucleotide
  Sense strand starting at position 2537 of SEQ ID NO: 3726
acuaguucccaguaaauac

SEQ ID NO: 289817 - RNA, 19 nt, Artificial Sequence
  Description of Artificial Sequence: Synthetic oligonucleotide
  Antisense strand to SEQ ID NO: 289816
guauuuacugggaacuagu

SEQ ID NO: 289818 - RNA, 19 nt, Artificial Sequence
  Description of Artificial Sequence: Synthetic oligonucleotide
  Sense strand starting at position 2567 of SEQ ID NO: 3726
cagggagaauucccaaguu

SEQ ID NO: 289819 - RNA, 19 nt, Artificial Sequence
  Description of Artificial Sequence: Synthetic oligonucleotide
  Antisense strand to SEQ ID NO: 289818
aacuugggaauucucccug

SEQ ID NO: 289820 - RNA, 19 nt, Artificial Sequence
  Description of Artificial Sequence: Synthetic oligonucleotide
  Sense strand starting at position 2815 of SEQ ID NO: 3726
ccgcucugccucucuuuaa

SEQ ID NO: 289821 - RNA, 19 nt, Artificial Sequence
  Description of Artificial Sequence: Synthetic oligonucleotide
  Antisense strand to SEQ ID NO: 289820
uuaaagagaggcagagcgg

SEQ ID NO: 289822 - RNA, 19 nt, Artificial Sequence
  Description of Artificial Sequence: Synthetic oligonucleotide
  Sense strand starting at position 3073 of SEQ ID NO: 3726
aggugaucagucugcaaca

SEQ ID NO: 289823 - RNA, 19 nt, Artificial Sequence
  Description of Artificial Sequence: Synthetic oligonucleotide
  Antisense strand to SEQ ID NO: 289822
uguugcagacugaucaccu

SEQ ID NO: 289824 - RNA, 19 nt, Artificial Sequence
  Description of Artificial Sequence: Synthetic oligonucleotide
  Sense strand starting at position 3074 of SEQ ID NO: 3726
ggugaucagucugcaacaa

SEQ ID NO: 289825 - RNA, 19 nt, Artificial Sequence
  Description of Artificial Sequence: Synthetic oligonucleotide
  Antisense strand to SEQ ID NO: 289824
uuguugcagacugaucacc

SEQ ID NO: 289826 - RNA, 19 nt, Artificial Sequence
  Description of Artificial Sequence: Synthetic oligonucleotide
  Sense strand starting at position 3075 of SEQ ID NO: 3726
gugaucagucugcaacaaa

SEQ ID NO: 289827 - RNA, 19 nt, Artificial Sequence
  Description of Artificial Sequence: Synthetic oligonucleotide
  Antisense strand to SEQ ID NO: 289826
uuuguugcagacugaucac

SEQ ID NO: 289828 - RNA, 19 nt, Artificial Sequence
  Description of Artificial Sequence: Synthetic oligonucleotide
  Sense strand starting at position 3123 of SEQ ID NO: 3726
agcagaaaccugcauguuu

SEQ ID NO: 289829 - RNA, 19 nt, Artificial Sequence
  Description of Artificial Sequence: Synthetic oligonucleotide
  Antisense strand to SEQ ID NO: 289828
aaacaugcagguuucugcu

SEQ ID NO: 289830 - RNA, 19 nt, Artificial Sequence
  Description of Artificial Sequence: Synthetic oligonucleotide
  Sense strand starting at position 3142 of SEQ ID NO: 3726
ccugauuguccaugcaaag

SEQ ID NO: 289831 - RNA, 19 nt, Artificial Sequence
  Description of Artificial Sequence: Synthetic oligonucleotide
  Antisense strand to SEQ ID NO: 289830
cuuugcauggacaaucagg

SEQ ID NO: 289832 - RNA, 19 nt, Artificial Sequence
  Description of Artificial Sequence: Synthetic oligonucleotide
  Sense strand starting at position 3168 of SEQ ID NO: 3726
agaauuugguugcacaaau

SEQ ID NO: 289833 - RNA, 19 nt, Artificial Sequence
  Description of Artificial Sequence: Synthetic oligonucleotide
  Antisense strand to SEQ ID NO: 289832
auuugugcaaccaaauucu

SEQ ID NO: 289834 - RNA, 19 nt, Artificial Sequence
  Description of Artificial Sequence: Synthetic oligonucleotide
  Sense strand starting at position 3235 of SEQ ID NO: 3726
gccugaaugucuuugggau

SEQ ID NO: 289835 - RNA, 19 nt, Artificial Sequence
  Description of Artificial Sequence: Synthetic oligonucleotide
  Antisense strand to SEQ ID NO: 289834
aucccaaagacauucaggc

SEQ ID NO: 289836 - RNA, 19 nt, Artificial Sequence
  Description of Artificial Sequence: Synthetic oligonucleotide
  Sense strand starting at position 3241 of SEQ ID NO: 3726
augucuuugggaugugacu

SEQ ID NO: 289837 - RNA, 19 nt, Artificial Sequence
  Description of Artificial Sequence: Synthetic oligonucleotide
  Antisense strand to SEQ ID NO: 289836
agucacaucccaaagacau

SEQ ID NO: 289838 - RNA, 19 nt, Artificial Sequence
  Description of Artificial Sequence: Synthetic oligonucleotide
  Sense strand starting at position 3250 of SEQ ID NO: 3726
ggaugugacuuuccaggau

SEQ ID NO: 289839 - RNA, 19 nt, Artificial Sequence
  Description of Artificial Sequence: Synthetic oligonucleotide
  Antisense strand to SEQ ID NO: 289838
auccuggaaagucacaucc

SEQ ID NO: 289840 - RNA, 19 nt, Artificial Sequence
  Description of Artificial Sequence: Synthetic oligonucleotide
  Sense strand starting at position 3253 of SEQ ID NO: 3726
ugugacuuuccaggaugau

SEQ ID NO: 289841 - RNA, 19 nt, Artificial Sequence
  Description of Artificial Sequence: Synthetic oligonucleotide
  Antisense strand to SEQ ID NO: 289840
aucauccuggaaagucaca

SEQ ID NO: 289842 - RNA, 19 nt, Artificial Sequence
  Description of Artificial Sequence: Synthetic oligonucleotide
  Sense strand starting at position 3256 of SEQ ID NO: 3726
gacuuuccaggaugaugua

SEQ ID NO: 289843 - RNA, 19 nt, Artificial Sequence
  Description of Artificial Sequence: Synthetic oligonucleotide
  Antisense strand to SEQ ID NO: 289842
uacaucauccuggaaaguc

SEQ ID NO: 289844 - RNA, 19 nt, Artificial Sequence
  Description of Artificial Sequence: Synthetic oligonucleotide
  Sense strand starting at position 3389 of SEQ ID NO: 3726
agaagacacgcagaguuau

SEQ ID NO: 289845 - RNA, 19 nt, Artificial Sequence
  Description of Artificial Sequence: Synthetic oligonucleotide
  Antisense strand to SEQ ID NO: 289844
auaacucugcgugucuucu

SEQ ID NO: 289846 - RNA, 19 nt, Artificial Sequence
  Description of Artificial Sequence: Synthetic oligonucleotide
  Sense strand starting at position 3455 of SEQ ID NO: 3726
ggaagcaucucuccacaau

SEQ ID NO: 289847 - RNA, 19 nt, Artificial Sequence
  Description of Artificial Sequence: Synthetic oligonucleotide
  Antisense strand to SEQ ID NO: 289846
auuguggagagaugcuucc

SEQ ID NO: 289848 - RNA, 19 nt, Artificial Sequence
  Description of Artificial Sequence: Synthetic oligonucleotide
  Sense strand starting at position 3482 of SEQ ID NO: 3726
cugucauuuacagguguga

SEQ ID NO: 289849 - RNA, 19 nt, Artificial Sequence
  Description of Artificial Sequence: Synthetic oligonucleotide
  Antisense strand to SEQ ID NO: 289848
ucacaccuguaaaugacag

SEQ ID NO: 289850 - RNA, 19 nt, Artificial Sequence
  Description of Artificial Sequence: Synthetic oligonucleotide
  Sense strand starting at position 3616 of SEQ ID NO: 3726
cgaauuuagugcuucgauu

SEQ ID NO: 289851 - RNA, 19 nt, Artificial Sequence
  Description of Artificial Sequence: Synthetic oligonucleotide
  Antisense strand to SEQ ID NO: 289850
aaucgaagcacuaaauucg

SEQ ID NO: 289852 - RNA, 19 nt, Artificial Sequence
  Description of Artificial Sequence: Synthetic oligonucleotide
  Sense strand starting at position 3689 of SEQ ID NO: 3726
uuaaguuaauugccaaaga

SEQ ID NO: 289853 - RNA, 19 nt, Artificial Sequence
  Description of Artificial Sequence: Synthetic oligonucleotide
  Antisense strand to SEQ ID NO: 289852
ucuuuggcaauuaacuuaa

SEQ ID NO: 289854 - RNA, 19 nt, Artificial Sequence
  Description of Artificial Sequence: Synthetic oligonucleotide
  Sense strand starting at position 3788 of SEQ ID NO: 3726
ugauguaagucaccauaug

SEQ ID NO: 289855 - RNA, 19 nt, Artificial Sequence
  Description of Artificial Sequence: Synthetic oligonucleotide
  Antisense strand to SEQ ID NO: 289854
cauauggugacuuacauca

SEQ ID NO: 289856 - RNA, 19 nt, Artificial Sequence
  Description of Artificial Sequence: Synthetic oligonucleotide
  Sense strand starting at position 3811 of SEQ ID NO: 3726
aguuuaucccuguaaugaa

SEQ ID NO: 289857 - RNA, 19 nt, Artificial Sequence
  Description of Artificial Sequence: Synthetic oligonucleotide
  Antisense strand to SEQ ID NO: 289856
uucauuacagggauaaacu

SEQ ID NO: 289858 - RNA, 19 nt, Artificial Sequence
  Description of Artificial Sequence: Synthetic oligonucleotide
  Sense strand starting at position 3911 of SEQ ID NO: 3726
ucaugauaagaagguguau

SEQ ID NO: 289859 - RNA, 19 nt, Artificial Sequence
  Description of Artificial Sequence: Synthetic oligonucleotide
  Antisense strand to SEQ ID NO: 289858
auacaccuucuuaucauga

SEQ ID NO: 289860 - RNA, 19 nt, Artificial Sequence
  Description of Artificial Sequence: Synthetic oligonucleotide
  Sense strand starting at position 3913 of SEQ ID NO: 3726
augauaagaagguguauug

SEQ ID NO: 289861 - RNA, 19 nt, Artificial Sequence
  Description of Artificial Sequence: Synthetic oligonucleotide
  Antisense strand to SEQ ID NO: 289860
caauacaccuucuuaucau

SEQ ID NO: 289862 - RNA, 19 nt, Artificial Sequence
  Description of Artificial Sequence: Synthetic oligonucleotide
  Sense strand starting at position 9 of SEQ ID NO: 3727
aguggaaggcucuagguga

SEQ ID NO: 289863 - RNA, 19 nt, Artificial Sequence
  Description of Artificial Sequence: Synthetic oligonucleotide
  Antisense strand to SEQ ID NO: 289862
ucaccuagagccuuccacu

SEQ ID NO: 289864 - RNA, 19 nt, Artificial Sequence
  Description of Artificial Sequence: Synthetic oligonucleotide
  Sense strand starting at position 13 of SEQ ID NO: 3727
gaaggcucuaggugagcau

SEQ ID NO: 289865 - RNA, 19 nt, Artificial Sequence
  Description of Artificial Sequence: Synthetic oligonucleotide
  Antisense strand to SEQ ID NO: 289864
augcucaccuagagccuuc

SEQ ID NO: 289866 - RNA, 19 nt, Artificial Sequence
  Description of Artificial Sequence: Synthetic oligonucleotide
  Sense strand starting at position 91 of SEQ ID NO: 3727
gcuugugggcacugggaaa

SEQ ID NO: 289867 - RNA, 19 nt, Artificial Sequence
  Description of Artificial Sequence: Synthetic oligonucleotide
  Antisense strand to SEQ ID NO: 289866
uuucccagugcccacaagc

SEQ ID NO: 289868 - RNA, 19 nt, Artificial Sequence
  Description of Artificial Sequence: Synthetic oligonucleotide
  Sense strand starting at position 378 of SEQ ID NO: 3727
ggagcaauuuccugaggca

SEQ ID NO: 289869 - RNA, 19 nt, Artificial Sequence
  Description of Artificial Sequence: Synthetic oligonucleotide
  Antisense strand to SEQ ID NO: 289868
ugccucaggaaauugcucc

SEQ ID NO: 289870 - RNA, 19 nt, Artificial Sequence
  Description of Artificial Sequence: Synthetic oligonucleotide
  Sense strand starting at position 381 of SEQ ID NO: 3727
gcaauuuccugaggcaacu

SEQ ID NO: 289871 - RNA, 19 nt, Artificial Sequence
  Description of Artificial Sequence: Synthetic oligonucleotide
  Antisense strand to SEQ ID NO: 289870
aguugccucaggaaauugc

SEQ ID NO: 289872 - RNA, 19 nt, Artificial Sequence
  Description of Artificial Sequence: Synthetic oligonucleotide
  Sense strand starting at position 546 of SEQ ID NO: 3727
gacucuuauguccaaggcu

SEQ ID NO: 289873 - RNA, 19 nt, Artificial Sequence
  Description of Artificial Sequence: Synthetic oligonucleotide
  Antisense strand to SEQ ID NO: 289872
agccuuggacauaagaguc

SEQ ID NO: 289874 - RNA, 19 nt, Artificial Sequence
  Description of Artificial Sequence: Synthetic oligonucleotide
  Sense strand starting at position 549 of SEQ ID NO: 3727
ucuuauguccaaggcuaga

SEQ ID NO: 289875 - RNA, 19 nt, Artificial Sequence
  Description of Artificial Sequence: Synthetic oligonucleotide
  Antisense strand to SEQ ID NO: 289874
ucuagccuuggacauaaga

SEQ ID NO: 289876 - RNA, 19 nt, Artificial Sequence
  Description of Artificial Sequence: Synthetic oligonucleotide
  Sense strand starting at position 554 of SEQ ID NO: 3727
uguccaaggcuagaucaaa

SEQ ID NO: 289877 - RNA, 19 nt, Artificial Sequence
  Description of Artificial Sequence: Synthetic oligonucleotide
  Antisense strand to SEQ ID NO: 289876
uuugaucuagccuuggaca

SEQ ID NO: 289878 - RNA, 19 nt, Artificial Sequence
  Description of Artificial Sequence: Synthetic oligonucleotide
  Sense strand starting at position 627 of SEQ ID NO: 3727
gggugucucuaguuugcau

SEQ ID NO: 289879 - RNA, 19 nt, Artificial Sequence
  Description of Artificial Sequence: Synthetic oligonucleotide
  Antisense strand to SEQ ID NO: 289878
augcaaacuagagacaccc

SEQ ID NO: 289880 - RNA, 19 nt, Artificial Sequence
  Description of Artificial Sequence: Synthetic oligonucleotide
  Sense strand starting at position 687 of SEQ ID NO: 3727
agacaagagucugaagauc

SEQ ID NO: 289881 - RNA, 19 nt, Artificial Sequence
  Description of Artificial Sequence: Synthetic oligonucleotide
  Antisense strand to SEQ ID NO: 289880
gaucuucagacucuugucu

SEQ ID NO: 289882 - RNA, 19 nt, Artificial Sequence
  Description of Artificial Sequence: Synthetic oligonucleotide
  Sense strand starting at position 836 of SEQ ID NO: 3727
ggcucugggcucugucauu

SEQ ID NO: 289883 - RNA, 19 nt, Artificial Sequence
  Description of Artificial Sequence: Synthetic oligonucleotide
  Antisense strand to SEQ ID NO: 289882
aaugacagagcccagagcc

SEQ ID NO: 289884 - RNA, 19 nt, Artificial Sequence
  Description of Artificial Sequence: Synthetic oligonucleotide
  Sense strand starting at position 1453 of SEQ ID NO: 3727
gggugcaguuauuuauguu

SEQ ID NO: 289885 - RNA, 19 nt, Artificial Sequence
  Description of Artificial Sequence: Synthetic oligonucleotide
  Antisense strand to SEQ ID NO: 289884
aacauaaauaacugcaccc

SEQ ID NO: 289886 - RNA, 19 nt, Artificial Sequence
  Description of Artificial Sequence: Synthetic oligonucleotide
  Sense strand starting at position 1457 of SEQ ID NO: 3727
gcaguuauuuauguuccca

SEQ ID NO: 289887 - RNA, 19 nt, Artificial Sequence
  Description of Artificial Sequence: Synthetic oligonucleotide
  Antisense strand to SEQ ID NO: 289886
ugggaacauaaauaacugc

SEQ ID NO: 289888 - RNA, 19 nt, Artificial Sequence
  Description of Artificial Sequence: Synthetic oligonucleotide
  Sense strand starting at position 1545 of SEQ ID NO: 3727
gccgcacacguguguucaa

SEQ ID NO: 289889 - RNA, 19 nt, Artificial Sequence
  Description of Artificial Sequence: Synthetic oligonucleotide
  Antisense strand to SEQ ID NO: 289888
uugaacacacgugugcggc

SEQ ID NO: 289890 - RNA, 19 nt, Artificial Sequence
  Description of Artificial Sequence: Synthetic oligonucleotide
  Sense strand starting at position 1546 of SEQ ID NO: 3727
ccgcacacguguguucaau

SEQ ID NO: 289891 - RNA, 19 nt, Artificial Sequence
  Description of Artificial Sequence: Synthetic oligonucleotide
  Antisense strand to SEQ ID NO: 289890
auugaacacacgugugcgg

SEQ ID NO: 289892 - RNA, 19 nt, Artificial Sequence
  Description of Artificial Sequence: Synthetic oligonucleotide
  Sense strand starting at position 1548 of SEQ ID NO: 3727
gcacacguguguucaaugu

SEQ ID NO: 289893 - RNA, 19 nt, Artificial Sequence
  Description of Artificial Sequence: Synthetic oligonucleotide
  Antisense strand to SEQ ID NO: 289892
acauugaacacacgugugc

SEQ ID NO: 289894 - RNA, 19 nt, Artificial Sequence
  Description of Artificial Sequence: Synthetic oligonucleotide
  Sense strand starting at position 1552 of SEQ ID NO: 3727
acguguguucaauguguuc

SEQ ID NO: 289895 - RNA, 19 nt, Artificial Sequence
  Description of Artificial Sequence: Synthetic oligonucleotide
  Antisense strand to SEQ ID NO: 289894
gaacacauugaacacacgu

SEQ ID NO: 289896 - RNA, 19 nt, Artificial Sequence
  Description of Artificial Sequence: Synthetic oligonucleotide
  Sense strand starting at position 1593 of SEQ ID NO: 3727
ccaagaggguuccugggua

SEQ ID NO: 289897 - RNA, 19 nt, Artificial Sequence
  Description of Artificial Sequence: Synthetic oligonucleotide
  Antisense strand to SEQ ID NO: 289896
uacccaggaacccucuugg

SEQ ID NO: 289898 - RNA, 19 nt, Artificial Sequence
  Description of Artificial Sequence: Synthetic oligonucleotide
  Sense strand starting at position 1597 of SEQ ID NO: 3727
gaggguuccuggguaagga

SEQ ID NO: 289899 - RNA, 19 nt, Artificial Sequence
  Description of Artificial Sequence: Synthetic oligonucleotide
  Antisense strand to SEQ ID NO: 289898
uccuuacccaggaacccuc

SEQ ID NO: 289900 - RNA, 19 nt, Artificial Sequence
  Description of Artificial Sequence: Synthetic oligonucleotide
  Sense strand starting at position 2036 of SEQ ID NO: 3727
gucagagcuucagggacau

SEQ ID NO: 289901 - RNA, 19 nt, Artificial Sequence
  Description of Artificial Sequence: Synthetic oligonucleotide
  Antisense strand to SEQ ID NO: 289900
augucccugaagcucugac

SEQ ID NO: 289902 - RNA, 19 nt, Artificial Sequence
  Description of Artificial Sequence: Synthetic oligonucleotide
  Sense strand starting at position 2048 of SEQ ID NO: 3727
gggacauccucaguaacuu

SEQ ID NO: 289903 - RNA, 19 nt, Artificial Sequence
  Description of Artificial Sequence: Synthetic oligonucleotide
  Antisense strand to SEQ ID NO: 289902
aaguuacugaggauguccc

SEQ ID NO: 289904 - RNA, 19 nt, Artificial Sequence
  Description of Artificial Sequence: Synthetic oligonucleotide
  Sense strand starting at position 2135 of SEQ ID NO: 3727
ugcugaagaugccugcauu

SEQ ID NO: 289905 - RNA, 19 nt, Artificial Sequence
  Description of Artificial Sequence: Synthetic oligonucleotide
  Antisense strand to SEQ ID NO: 289904
aaugcaggcaucuucagca

SEQ ID NO: 289906 - RNA, 19 nt, Artificial Sequence
  Description of Artificial Sequence: Synthetic oligonucleotide
  Sense strand starting at position 2136 of SEQ ID NO: 3727
gcugaagaugccugcauuc

SEQ ID NO: 289907 - RNA, 19 nt, Artificial Sequence
  Description of Artificial Sequence: Synthetic oligonucleotide
  Antisense strand to SEQ ID NO: 289906
gaaugcaggcaucuucagc

SEQ ID NO: 289908 - RNA, 19 nt, Artificial Sequence
  Description of Artificial Sequence: Synthetic oligonucleotide
  Sense strand starting at position 2252 of SEQ ID NO: 3727
acaaucaguugggauaacu

SEQ ID NO: 289909 - RNA, 19 nt, Artificial Sequence
  Description of Artificial Sequence: Synthetic oligonucleotide
  Antisense strand to SEQ ID NO: 289908
aguuaucccaacugauugu

SEQ ID NO: 289910 - RNA, 19 nt, Artificial Sequence
  Description of Artificial Sequence: Synthetic oligonucleotide
  Sense strand starting at position 2313 of SEQ ID NO: 3727
ucugcuguucccuggcaua

SEQ ID NO: 289911 - RNA, 19 nt, Artificial Sequence
  Description of Artificial Sequence: Synthetic oligonucleotide
  Antisense strand to SEQ ID NO: 289910
uaugccagggaacagcaga

SEQ ID NO: 289912 - RNA, 19 nt, Artificial Sequence
  Description of Artificial Sequence: Synthetic oligonucleotide
  Sense strand starting at position 2482 of SEQ ID NO: 3727
aacucagggucuuuauguu

SEQ ID NO: 289913 - RNA, 19 nt, Artificial Sequence
  Description of Artificial Sequence: Synthetic oligonucleotide
  Antisense strand to SEQ ID NO: 289912
aacauaaagacccugaguu

SEQ ID NO: 289914 - RNA, 19 nt, Artificial Sequence
  Description of Artificial Sequence: Synthetic oligonucleotide
  Sense strand starting at position 2634 of SEQ ID NO: 3727
cucugugucucacauacau

SEQ ID NO: 289915 - RNA, 19 nt, Artificial Sequence
  Description of Artificial Sequence: Synthetic oligonucleotide
  Antisense strand to SEQ ID NO: 289914
auguaugugagacacagag

SEQ ID NO: 289916 - RNA, 19 nt, Artificial Sequence
  Description of Artificial Sequence: Synthetic oligonucleotide
  Sense strand starting at position 2693 of SEQ ID NO: 3727
cacugauguccugggcaga

SEQ ID NO: 289917 - RNA, 19 nt, Artificial Sequence
  Description of Artificial Sequence: Synthetic oligonucleotide
  Antisense strand to SEQ ID NO: 289916
ucugcccaggacaucagug

SEQ ID NO: 289918 - RNA, 19 nt, Artificial Sequence
  Description of Artificial Sequence: Synthetic oligonucleotide
  Sense strand starting at position 2737 of SEQ ID NO: 3727
agcugagagucugagucaa

SEQ ID NO: 289919 - RNA, 19 nt, Artificial Sequence
  Description of Artificial Sequence: Synthetic oligonucleotide
  Antisense strand to SEQ ID NO: 289918
uugacucagacucucagcu

SEQ ID NO: 289920 - RNA, 19 nt, Artificial Sequence
  Description of Artificial Sequence: Synthetic oligonucleotide
  Sense strand starting at position 2739 of SEQ ID NO: 3727
cugagagucugagucaaag

SEQ ID NO: 289921 - RNA, 19 nt, Artificial Sequence
  Description of Artificial Sequence: Synthetic oligonucleotide
  Antisense strand to SEQ ID NO: 289920
cuuugacucagacucucag

SEQ ID NO: 289922 - RNA, 19 nt, Artificial Sequence
  Description of Artificial Sequence: Synthetic oligonucleotide
  Sense strand starting at position 3011 of SEQ ID NO: 3727
gugugauguccaugcggug

SEQ ID NO: 289923 - RNA, 19 nt, Artificial Sequence
  Description of Artificial Sequence: Synthetic oligonucleotide
  Antisense strand to SEQ ID NO: 289922
caccgcauggacaucacac

SEQ ID NO: 289924 - RNA, 19 nt, Artificial Sequence
  Description of Artificial Sequence: Synthetic oligonucleotide
  Sense strand starting at position 3098 of SEQ ID NO: 3727
guguguugugcugugagca

SEQ ID NO: 289925 - RNA, 19 nt, Artificial Sequence
  Description of Artificial Sequence: Synthetic oligonucleotide
  Antisense strand to SEQ ID NO: 289924
ugcucacagcacaacacac

SEQ ID NO: 289926 - RNA, 19 nt, Artificial Sequence
  Description of Artificial Sequence: Synthetic oligonucleotide
  Sense strand starting at position 3356 of SEQ ID NO: 3727
acccucuuucugggagcua

SEQ ID NO: 289927 - RNA, 19 nt, Artificial Sequence
  Description of Artificial Sequence: Synthetic oligonucleotide
  Antisense strand to SEQ ID NO: 289926
uagcucccagaaagagggu

SEQ ID NO: 289928 - RNA, 19 nt, Artificial Sequence
  Description of Artificial Sequence: Synthetic oligonucleotide
  Sense strand starting at position 3367 of SEQ ID NO: 3727
gggagcuagcuugaaugau

SEQ ID NO: 289929 - RNA, 19 nt, Artificial Sequence
  Description of Artificial Sequence: Synthetic oligonucleotide
  Antisense strand to SEQ ID NO: 289928
aucauucaagcuagcuccc

SEQ ID NO: 289930 - RNA, 19 nt, Artificial Sequence
  Description of Artificial Sequence: Synthetic oligonucleotide
  Sense strand starting at position 3578 of SEQ ID NO: 3727
agggauauuuccuggcccu

SEQ ID NO: 289931 - RNA, 19 nt, Artificial Sequence
  Description of Artificial Sequence: Synthetic oligonucleotide
  Antisense strand to SEQ ID NO: 289930
agggccaggaaauaucccu

SEQ ID NO: 289932 - RNA, 19 nt, Artificial Sequence
  Description of Artificial Sequence: Synthetic oligonucleotide
  Sense strand starting at position 3620 of SEQ ID NO: 3727
ccaguuucuuaaccagaag

SEQ ID NO: 289933 - RNA, 19 nt, Artificial Sequence
  Description of Artificial Sequence: Synthetic oligonucleotide
  Antisense strand to SEQ ID NO: 289932
cuucugguuaagaaacugg

SEQ ID NO: 289934 - RNA, 19 nt, Artificial Sequence
  Description of Artificial Sequence: Synthetic oligonucleotide
  Sense strand starting at position 3623 of SEQ ID NO: 3727
guuucuuaaccagaagccu

SEQ ID NO: 289935 - RNA, 19 nt, Artificial Sequence
  Description of Artificial Sequence: Synthetic oligonucleotide
  Antisense strand to SEQ ID NO: 289934
aggcuucugguuaagaaac

SEQ ID NO: 289936 - RNA, 19 nt, Artificial Sequence
  Description of Artificial Sequence: Synthetic oligonucleotide
  Sense strand starting at position 3747 of SEQ ID NO: 3727
aggaauucagcgggacuga

SEQ ID NO: 289937 - RNA, 19 nt, Artificial Sequence
  Description of Artificial Sequence: Synthetic oligonucleotide
  Antisense strand to SEQ ID NO: 289936
ucagucccgcugaauuccu

SEQ ID NO: 289938 - RNA, 19 nt, Artificial Sequence
  Description of Artificial Sequence: Synthetic oligonucleotide
  Sense strand starting at position 3775 of SEQ ID NO: 3727
agcagagucuccuuagggu

SEQ ID NO: 289939 - RNA, 19 nt, Artificial Sequence
  Description of Artificial Sequence: Synthetic oligonucleotide
  Antisense strand to SEQ ID NO: 289938
acccuaaggagacucugcu

SEQ ID NO: 289940 - RNA, 19 nt, Artificial Sequence
  Description of Artificial Sequence: Synthetic oligonucleotide
  Sense strand starting at position 3855 of SEQ ID NO: 3727
ccugaugguucucugcaca

SEQ ID NO: 289941 - RNA, 19 nt, Artificial Sequence
  Description of Artificial Sequence: Synthetic oligonucleotide
  Antisense strand to SEQ ID NO: 289940
ugugcagagaaccaucagg

SEQ ID NO: 289942 - RNA, 19 nt, Artificial Sequence
  Description of Artificial Sequence: Synthetic oligonucleotide
  Sense strand starting at position 171 of SEQ ID NO: 3728
gaauauuguccucagggcu

SEQ ID NO: 289943 - RNA, 19 nt, Artificial Sequence
  Description of Artificial Sequence: Synthetic oligonucleotide
  Antisense strand to SEQ ID NO: 289942
agcccugaggacaauauuc

SEQ ID NO: 289944 - RNA, 19 nt, Artificial Sequence
  Description of Artificial Sequence: Synthetic oligonucleotide
  Sense strand starting at position 243 of SEQ ID NO: 3728
agccuauuacacugcauga

SEQ ID NO: 289945 - RNA, 19 nt, Artificial Sequence
  Description of Artificial Sequence: Synthetic oligonucleotide
  Antisense strand to SEQ ID NO: 289944
ucaugcaguguaauaggcu

SEQ ID NO: 289946 - RNA, 19 nt, Artificial Sequence
  Description of Artificial Sequence: Synthetic oligonucleotide
  Sense strand starting at position 528 of SEQ ID NO: 3728
cagagauucugcccgggua

SEQ ID NO: 289947 - RNA, 19 nt, Artificial Sequence
  Description of Artificial Sequence: Synthetic oligonucleotide
  Antisense strand to SEQ ID NO: 289946
uacccgggcagaaucucug

SEQ ID NO: 289948 - RNA, 19 nt, Artificial Sequence
  Description of Artificial Sequence: Synthetic oligonucleotide
  Sense strand starting at position 621 of SEQ ID NO: 3728
gauucucugguuuaggcaa

SEQ ID NO: 289949 - RNA, 19 nt, Artificial Sequence
  Description of Artificial Sequence: Synthetic oligonucleotide
  Antisense strand to SEQ ID NO: 289948
uugccuaaaccagagaauc

SEQ ID NO: 289950 - RNA, 19 nt, Artificial Sequence
  Description of Artificial Sequence: Synthetic oligonucleotide
  Sense strand starting at position 637 of SEQ ID NO: 3728
caagaauggcuccaguucu

SEQ ID NO: 289951 - RNA, 19 nt, Artificial Sequence
  Description of Artificial Sequence: Synthetic oligonucleotide
  Antisense strand to SEQ ID NO: 289950
agaacuggagccauucuug

SEQ ID NO: 289952 - RNA, 19 nt, Artificial Sequence
  Description of Artificial Sequence: Synthetic oligonucleotide
  Sense strand starting at position 680 of SEQ ID NO: 3728
cugugacaaggcugguaaa

SEQ ID NO: 289953 - RNA, 19 nt, Artificial Sequence
  Description of Artificial Sequence: Synthetic oligonucleotide
  Antisense strand to SEQ ID NO: 289952
uuuaccagccuugucacag

SEQ ID NO: 289954 - RNA, 19 nt, Artificial Sequence
  Description of Artificial Sequence: Synthetic oligonucleotide
  Sense strand starting at position 723 of SEQ ID NO: 3728
cuguuugcuguuuauauuu

SEQ ID NO: 289955 - RNA, 19 nt, Artificial Sequence
  Description of Artificial Sequence: Synthetic oligonucleotide
  Antisense strand to SEQ ID NO: 289954
aaauauaaacagcaaacag

SEQ ID NO: 289956 - RNA, 19 nt, Artificial Sequence
  Description of Artificial Sequence: Synthetic oligonucleotide
  Sense strand starting at position 758 of SEQ ID NO: 3728
uucuguccugagcauacau

SEQ ID NO: 289957 - RNA, 19 nt, Artificial Sequence
  Description of Artificial Sequence: Synthetic oligonucleotide
  Antisense strand to SEQ ID NO: 289956
auguaugcucaggacagaa

SEQ ID NO: 289958 - RNA, 19 nt, Artificial Sequence
  Description of Artificial Sequence: Synthetic oligonucleotide
  Sense strand starting at position 776 of SEQ ID NO: 3728
uuguuucuguaaucagaac

SEQ ID NO: 289959 - RNA, 19 nt, Artificial Sequence
  Description of Artificial Sequence: Synthetic oligonucleotide
  Antisense strand to SEQ ID NO: 289958
guucugauuacagaaacaa

SEQ ID NO: 289960 - RNA, 19 nt, Artificial Sequence
  Description of Artificial Sequence: Synthetic oligonucleotide
  Sense strand starting at position 808 of SEQ ID NO: 3728
acuuuauuauuaucacgga

SEQ ID NO: 289961 - RNA, 19 nt, Artificial Sequence
  Description of Artificial Sequence: Synthetic oligonucleotide
  Antisense strand to SEQ ID NO: 289960
uccgugauaauaauaaagu

SEQ ID NO: 289962 - RNA, 19 nt, Artificial Sequence
  Description of Artificial Sequence: Synthetic oligonucleotide
  Sense strand starting at position 848 of SEQ ID NO: 3728
gccuacuaacuuggaaaga

SEQ ID NO: 289963 - RNA, 19 nt, Artificial Sequence
  Description of Artificial Sequence: Synthetic oligonucleotide
  Antisense strand to SEQ ID NO: 289962
ucuuuccaaguuaguaggc

SEQ ID NO: 289964 - RNA, 19 nt, Artificial Sequence
  Description of Artificial Sequence: Synthetic oligonucleotide
  Sense strand starting at position 849 of SEQ ID NO: 3728
ccuacuaacuuggaaagaa

SEQ ID NO: 289965 - RNA, 19 nt, Artificial Sequence
  Description of Artificial Sequence: Synthetic oligonucleotide
  Antisense strand to SEQ ID NO: 289964
uucuuuccaaguuaguagg

SEQ ID NO: 289966 - RNA, 19 nt, Artificial Sequence
  Description of Artificial Sequence: Synthetic oligonucleotide
  Sense strand starting at position 1116 of SEQ ID NO: 3728
cgggcuucucgguaaacau

SEQ ID NO: 289967 - RNA, 19 nt, Artificial Sequence
  Description of Artificial Sequence: Synthetic oligonucleotide
  Antisense strand to SEQ ID NO: 289966
auguuuaccgagaagcccg

SEQ ID NO: 289968 - RNA, 19 nt, Artificial Sequence
  Description of Artificial Sequence: Synthetic oligonucleotide
  Sense strand starting at position 1127 of SEQ ID NO: 3728
guaaacaucgcucagagaa

SEQ ID NO: 289969 - RNA, 19 nt, Artificial Sequence
  Description of Artificial Sequence: Synthetic oligonucleotide
  Antisense strand to SEQ ID NO: 289968
uucucugagcgauguuuac

SEQ ID NO: 289970 - RNA, 19 nt, Artificial Sequence
  Description of Artificial Sequence: Synthetic oligonucleotide
  Sense strand starting at position 1271 of SEQ ID NO: 3728
cuccgaagaaguugaaaua

SEQ ID NO: 289971 - RNA, 19 nt, Artificial Sequence
  Description of Artificial Sequence: Synthetic oligonucleotide
  Antisense strand to SEQ ID NO: 289970
uauuucaacuucuucggag

SEQ ID NO: 289972 - RNA, 19 nt, Artificial Sequence
  Description of Artificial Sequence: Synthetic oligonucleotide
  Sense strand starting at position 1289 of SEQ ID NO: 3728
augcauugucaccaacaag

SEQ ID NO: 289973 - RNA, 19 nt, Artificial Sequence
  Description of Artificial Sequence: Synthetic oligonucleotide
  Antisense strand to SEQ ID NO: 289972
cuuguuggugacaaugcau

SEQ ID NO: 289974 - RNA, 19 nt, Artificial Sequence
  Description of Artificial Sequence: Synthetic oligonucleotide
  Sense strand starting at position 2562 of SEQ ID NO: 3728
ggaggagaguuuccugcga

SEQ ID NO: 289975 - RNA, 19 nt, Artificial Sequence
  Description of Artificial Sequence: Synthetic oligonucleotide
  Antisense strand to SEQ ID NO: 289974
ucgcaggaaacucuccucc

SEQ ID NO: 289976 - RNA, 19 nt, Artificial Sequence
  Description of Artificial Sequence: Synthetic oligonucleotide
  Sense strand starting at position 2600 of SEQ ID NO: 3728
ggcucuggucggaaucguu

SEQ ID NO: 289977 - RNA, 19 nt, Artificial Sequence
  Description of Artificial Sequence: Synthetic oligonucleotide
  Antisense strand to SEQ ID NO: 289976
aacgauuccgaccagagcc

SEQ ID NO: 289978 - RNA, 19 nt, Artificial Sequence
  Description of Artificial Sequence: Synthetic oligonucleotide
  Sense strand starting at position 2607 of SEQ ID NO: 3728
gucggaaucguuuacacuu

SEQ ID NO: 289979 - RNA, 19 nt, Artificial Sequence
  Description of Artificial Sequence: Synthetic oligonucleotide
  Antisense strand to SEQ ID NO: 289978
aaguguaaacgauuccgac

SEQ ID NO: 289980 - RNA, 19 nt, Artificial Sequence
  Description of Artificial Sequence: Synthetic oligonucleotide
  Sense strand starting at position 2691 of SEQ ID NO: 3728
aucaaugcccagugaguga

SEQ ID NO: 289981 - RNA, 19 nt, Artificial Sequence
  Description of Artificial Sequence: Synthetic oligonucleotide
  Antisense strand to SEQ ID NO: 289980
ucacucacugggcauugau

SEQ ID NO: 289982 - RNA, 19 nt, Artificial Sequence
  Description of Artificial Sequence: Synthetic oligonucleotide
  Sense strand starting at position 2704 of SEQ ID NO: 3728
gagugaacgcaccacuuaa

SEQ ID NO: 289983 - RNA, 19 nt, Artificial Sequence
  Description of Artificial Sequence: Synthetic oligonucleotide
  Antisense strand to SEQ ID NO: 289982
uuaaguggugcguucacuc

SEQ ID NO: 289984 - RNA, 19 nt, Artificial Sequence
  Description of Artificial Sequence: Synthetic oligonucleotide
  Sense strand starting at position 2738 of SEQ ID NO: 3728
cgucuauggaccgacacau

SEQ ID NO: 289985 - RNA, 19 nt, Artificial Sequence
  Description of Artificial Sequence: Synthetic oligonucleotide
  Antisense strand to SEQ ID NO: 289984
augugucgguccauagacg

SEQ ID NO: 289986 - RNA, 19 nt, Artificial Sequence
  Description of Artificial Sequence: Synthetic oligonucleotide
  Sense strand starting at position 2829 of SEQ ID NO: 3728
guugguucgccacagagga

SEQ ID NO: 289987 - RNA, 19 nt, Artificial Sequence
  Description of Artificial Sequence: Synthetic oligonucleotide
  Antisense strand to SEQ ID NO: 289986
uccucuguggcgaaccaac

SEQ ID NO: 289988 - RNA, 19 nt, Artificial Sequence
  Description of Artificial Sequence: Synthetic oligonucleotide
  Sense strand starting at position 3035 of SEQ ID NO: 3728
acagucaguccucaccauu

SEQ ID NO: 289989 - RNA, 19 nt, Artificial Sequence
  Description of Artificial Sequence: Synthetic oligonucleotide
  Antisense strand to SEQ ID NO: 289988
aauggugaggacugacugu

SEQ ID NO: 289990 - RNA, 19 nt, Artificial Sequence
  Description of Artificial Sequence: Synthetic oligonucleotide
  Sense strand starting at position 3038 of SEQ ID NO: 3728
gucaguccucaccauuaac

SEQ ID NO: 289991 - RNA, 19 nt, Artificial Sequence
  Description of Artificial Sequence: Synthetic oligonucleotide
  Antisense strand to SEQ ID NO: 289990
guuaauggugaggacugac

SEQ ID NO: 289992 - RNA, 19 nt, Artificial Sequence
  Description of Artificial Sequence: Synthetic oligonucleotide
  Sense strand starting at position 3265 of SEQ ID NO: 3728
uuugaagucuguguugaag

SEQ ID NO: 289993 - RNA, 19 nt, Artificial Sequence
  Description of Artificial Sequence: Synthetic oligonucleotide
  Antisense strand to SEQ ID NO: 289992
cuucaacacagacuucaaa

SEQ ID NO: 289994 - RNA, 19 nt, Artificial Sequence
  Description of Artificial Sequence: Synthetic oligonucleotide
  Sense strand starting at position 3268 of SEQ ID NO: 3728
gaagucuguguugaaguuu

SEQ ID NO: 289995 - RNA, 19 nt, Artificial Sequence
  Description of Artificial Sequence: Synthetic oligonucleotide
  Antisense strand to SEQ ID NO: 289994
aaacuucaacacagacuuc

SEQ ID NO: 289996 - RNA, 19 nt, Artificial Sequence
  Description of Artificial Sequence: Synthetic oligonucleotide
  Sense strand starting at position 3361 of SEQ ID NO: 3728
gucaucuguguguagauca

SEQ ID NO: 289997 - RNA, 19 nt, Artificial Sequence
  Description of Artificial Sequence: Synthetic oligonucleotide
  Antisense strand to SEQ ID NO: 289996
ugaucuacacacagaugac

SEQ ID NO: 289998 - RNA, 19 nt, Artificial Sequence
  Description of Artificial Sequence: Synthetic oligonucleotide
  Sense strand starting at position 3366 of SEQ ID NO: 3728
cuguguguagaucauggaa

SEQ ID NO: 289999 - RNA, 19 nt, Artificial Sequence
  Description of Artificial Sequence: Synthetic oligonucleotide
  Antisense strand to SEQ ID NO: 289998
uuccaugaucuacacacag

SEQ ID NO: 290000 - RNA, 19 nt, Artificial Sequence
  Description of Artificial Sequence: Synthetic oligonucleotide
  Sense strand starting at position 3369 of SEQ ID NO: 3728
uguguagaucauggaauuc

SEQ ID NO: 290001 - RNA, 19 nt, Artificial Sequence
  Description of Artificial Sequence: Synthetic oligonucleotide
  Antisense strand to SEQ ID NO: 290000
gaauuccaugaucuacaca

SEQ ID NO: 290002 - RNA, 19 nt, Artificial Sequence
  Description of Artificial Sequence: Synthetic oligonucleotide
  Sense strand starting at position 3396 of SEQ ID NO: 3728
ggauacgaguaucccuaaa

SEQ ID NO: 290003 - RNA, 19 nt, Artificial Sequence
  Description of Artificial Sequence: Synthetic oligonucleotide
  Antisense strand to SEQ ID NO: 290002
uuuagggauacucguaucc

SEQ ID NO: 290004 - RNA, 19 nt, Artificial Sequence
  Description of Artificial Sequence: Synthetic oligonucleotide
  Sense strand starting at position 3491 of SEQ ID NO: 3728
ggagaguuucuggguggcu

SEQ ID NO: 290005 - RNA, 19 nt, Artificial Sequence
  Description of Artificial Sequence: Synthetic oligonucleotide
  Antisense strand to SEQ ID NO: 290004
agccacccagaaacucucc

SEQ ID NO: 290006 - RNA, 19 nt, Artificial Sequence
  Description of Artificial Sequence: Synthetic oligonucleotide
  Sense strand starting at position 3492 of SEQ ID NO: 3728
gagaguuucuggguggcua

SEQ ID NO: 290007 - RNA, 19 nt, Artificial Sequence
  Description of Artificial Sequence: Synthetic oligonucleotide
  Antisense strand to SEQ ID NO: 290006
uagccacccagaaacucuc

SEQ ID NO: 290008 - RNA, 19 nt, Artificial Sequence
  Description of Artificial Sequence: Synthetic oligonucleotide
  Sense strand starting at position 3515 of SEQ ID NO: 3728
gucugauugguguagggau

SEQ ID NO: 290009 - RNA, 19 nt, Artificial Sequence
  Description of Artificial Sequence: Synthetic oligonucleotide
  Antisense strand to SEQ ID NO: 290008
aucccuacaccaaucagac

SEQ ID NO: 290010 - RNA, 19 nt, Artificial Sequence
  Description of Artificial Sequence: Synthetic oligonucleotide
  Sense strand starting at position 3526 of SEQ ID NO: 3728
guagggaugugucuggagu

SEQ ID NO: 290011 - RNA, 19 nt, Artificial Sequence
  Description of Artificial Sequence: Synthetic oligonucleotide
  Antisense strand to SEQ ID NO: 290010
acuccagacacaucccuac

SEQ ID NO: 290012 - RNA, 19 nt, Artificial Sequence
  Description of Artificial Sequence: Synthetic oligonucleotide
  Sense strand starting at position 3580 of SEQ ID NO: 3728
gugacucaguuuccuaaau

SEQ ID NO: 290013 - RNA, 19 nt, Artificial Sequence
  Description of Artificial Sequence: Synthetic oligonucleotide
  Antisense strand to SEQ ID NO: 290012
auuuaggaaacugagucac

SEQ ID NO: 290014 - RNA, 19 nt, Artificial Sequence
  Description of Artificial Sequence: Synthetic oligonucleotide
  Sense strand starting at position 3589 of SEQ ID NO: 3728
uuuccuaaaugaguguaaa

SEQ ID NO: 290015 - RNA, 19 nt, Artificial Sequence
  Description of Artificial Sequence: Synthetic oligonucleotide
  Antisense strand to SEQ ID NO: 290014
uuuacacucauuuaggaaa

SEQ ID NO: 290016 - RNA, 19 nt, Artificial Sequence
  Description of Artificial Sequence: Synthetic oligonucleotide
  Sense strand starting at position 3621 of SEQ ID NO: 3728
auguaaagugcucagcaga

SEQ ID NO: 290017 - RNA, 19 nt, Artificial Sequence
  Description of Artificial Sequence: Synthetic oligonucleotide
  Antisense strand to SEQ ID NO: 290016
ucugcugagcacuuuacau

SEQ ID NO: 290018 - RNA, 19 nt, Artificial Sequence
  Description of Artificial Sequence: Synthetic oligonucleotide
  Sense strand starting at position 3777 of SEQ ID NO: 3728
cuaugaagguaauuccuga

SEQ ID NO: 290019 - RNA, 19 nt, Artificial Sequence
  Description of Artificial Sequence: Synthetic oligonucleotide
  Antisense strand to SEQ ID NO: 290018
ucaggaauuaccuucauag

SEQ ID NO: 290020 - RNA, 19 nt, Artificial Sequence
  Description of Artificial Sequence: Synthetic oligonucleotide
  Sense strand starting at position 3825 of SEQ ID NO: 3728
gcuccuugacuauacuagu

SEQ ID NO: 290021 - RNA, 19 nt, Artificial Sequence
  Description of Artificial Sequence: Synthetic oligonucleotide
  Antisense strand to SEQ ID NO: 290020
acuaguauagucaaggagc

SEQ ID NO: 290022 - RNA, 19 nt, Artificial Sequence
  Description of Artificial Sequence: Synthetic oligonucleotide
  Sense strand starting at position 162 of SEQ ID NO: 3729
gcaagcauuuagcuggauu

SEQ ID NO: 290023 - RNA, 19 nt, Artificial Sequence
  Description of Artificial Sequence: Synthetic oligonucleotide
  Antisense strand to SEQ ID NO: 290022
aauccagcuaaaugcuugc

SEQ ID NO: 290024 - RNA, 19 nt, Artificial Sequence
  Description of Artificial Sequence: Synthetic oligonucleotide
  Sense strand starting at position 242 of SEQ ID NO: 3729
agugacuauccuugacugu

SEQ ID NO: 290025 - RNA, 19 nt, Artificial Sequence
  Description of Artificial Sequence: Synthetic oligonucleotide
  Antisense strand to SEQ ID NO: 290024
acagucaaggauagucacu

SEQ ID NO: 290026 - RNA, 19 nt, Artificial Sequence
  Description of Artificial Sequence: Synthetic oligonucleotide
  Sense strand starting at position 300 of SEQ ID NO: 3729
agcaaaguauggcauuuaa

SEQ ID NO: 290027 - RNA, 19 nt, Artificial Sequence
  Description of Artificial Sequence: Synthetic oligonucleotide
  Antisense strand to SEQ ID NO: 290026
uuaaaugccauacuuugcu

SEQ ID NO: 290028 - RNA, 19 nt, Artificial Sequence
  Description of Artificial Sequence: Synthetic oligonucleotide
  Sense strand starting at position 337 of SEQ ID NO: 3729
ggguuuaaguuccuaaccu

SEQ ID NO: 290029 - RNA, 19 nt, Artificial Sequence
  Description of Artificial Sequence: Synthetic oligonucleotide
  Antisense strand to SEQ ID NO: 290028
agguuaggaacuuaaaccc

SEQ ID NO: 290030 - RNA, 19 nt, Artificial Sequence
  Description of Artificial Sequence: Synthetic oligonucleotide
  Sense strand starting at position 360 of SEQ ID NO: 3729
cuuagagauuugcaguacu

SEQ ID NO: 290031 - RNA, 19 nt, Artificial Sequence
  Description of Artificial Sequence: Synthetic oligonucleotide
  Antisense strand to SEQ ID NO: 290030
aguacugcaaaucucuaag

SEQ ID NO: 290032 - RNA, 19 nt, Artificial Sequence
  Description of Artificial Sequence: Synthetic oligonucleotide
  Sense strand starting at position 370 of SEQ ID NO: 3729
ugcaguacugccuaaucca

SEQ ID NO: 290033 - RNA, 19 nt, Artificial Sequence
  Description of Artificial Sequence: Synthetic oligonucleotide
  Antisense strand to SEQ ID NO: 290032
uggauuaggcaguacugca

SEQ ID NO: 290034 - RNA, 19 nt, Artificial Sequence
  Description of Artificial Sequence: Synthetic oligonucleotide
  Sense strand starting at position 377 of SEQ ID NO: 3729
cugccuaauccaggugcua

SEQ ID NO: 290035 - RNA, 19 nt, Artificial Sequence
  Description of Artificial Sequence: Synthetic oligonucleotide
  Antisense strand to SEQ ID NO: 290034
uagcaccuggauuaggcag

SEQ ID NO: 290036 - RNA, 19 nt, Artificial Sequence
  Description of Artificial Sequence: Synthetic oligonucleotide
  Sense strand starting at position 379 of SEQ ID NO: 3729
gccuaauccaggugcuaga

SEQ ID NO: 290037 - RNA, 19 nt, Artificial Sequence
  Description of Artificial Sequence: Synthetic oligonucleotide
  Antisense strand to SEQ ID NO: 290036
ucuagcaccuggauuaggc

SEQ ID NO: 290038 - RNA, 19 nt, Artificial Sequence
  Description of Artificial Sequence: Synthetic oligonucleotide
  Sense strand starting at position 392 of SEQ ID NO: 3729
gcuagaauguucccagcau

SEQ ID NO: 290039 - RNA, 19 nt, Artificial Sequence
  Description of Artificial Sequence: Synthetic oligonucleotide
  Antisense strand to SEQ ID NO: 290038
augcugggaacauucuagc

SEQ ID NO: 290040 - RNA, 19 nt, Artificial Sequence
  Description of Artificial Sequence: Synthetic oligonucleotide
  Sense strand starting at position 471 of SEQ ID NO: 3729
gaggaauaaaguuguguuu

SEQ ID NO: 290041 - RNA, 19 nt, Artificial Sequence
  Description of Artificial Sequence: Synthetic oligonucleotide
  Antisense strand to SEQ ID NO: 290040
aaacacaacuuuauuccuc

SEQ ID NO: 290042 - RNA, 19 nt, Artificial Sequence
  Description of Artificial Sequence: Synthetic oligonucleotide
  Sense strand starting at position 474 of SEQ ID NO: 3729
gaauaaaguuguguuucua

SEQ ID NO: 290043 - RNA, 19 nt, Artificial Sequence
  Description of Artificial Sequence: Synthetic oligonucleotide
  Antisense strand to SEQ ID NO: 290042
uagaaacacaacuuuauuc

SEQ ID NO: 290044 - RNA, 19 nt, Artificial Sequence
  Description of Artificial Sequence: Synthetic oligonucleotide
  Sense strand starting at position 639 of SEQ ID NO: 3729
guggcaaggguguguaaua

SEQ ID NO: 290045 - RNA, 19 nt, Artificial Sequence
  Description of Artificial Sequence: Synthetic oligonucleotide
  Antisense strand to SEQ ID NO: 290044
uauuacacacccuugccac

SEQ ID NO: 290046 - RNA, 19 nt, Artificial Sequence
  Description of Artificial Sequence: Synthetic oligonucleotide
  Sense strand starting at position 640 of SEQ ID NO: 3729
uggcaaggguguguaauaa

SEQ ID NO: 290047 - RNA, 19 nt, Artificial Sequence
  Description of Artificial Sequence: Synthetic oligonucleotide
  Antisense strand to SEQ ID NO: 290046
uuauuacacacccuugcca

SEQ ID NO: 290048 - RNA, 19 nt, Artificial Sequence
  Description of Artificial Sequence: Synthetic oligonucleotide
  Sense strand starting at position 644 of SEQ ID NO: 3729
aaggguguguaauaagaag

SEQ ID NO: 290049 - RNA, 19 nt, Artificial Sequence
  Description of Artificial Sequence: Synthetic oligonucleotide
  Antisense strand to SEQ ID NO: 290048
cuucuuauuacacacccuu

SEQ ID NO: 290050 - RNA, 19 nt, Artificial Sequence
  Description of Artificial Sequence: Synthetic oligonucleotide
  Sense strand starting at position 652 of SEQ ID NO: 3729
guaauaagaagcuguaaga

SEQ ID NO: 290051 - RNA, 19 nt, Artificial Sequence
  Description of Artificial Sequence: Synthetic oligonucleotide
  Antisense strand to SEQ ID NO: 290050
ucuuacagcuucuuauuac

SEQ ID NO: 290052 - RNA, 19 nt, Artificial Sequence
  Description of Artificial Sequence: Synthetic oligonucleotide
  Sense strand starting at position 701 of SEQ ID NO: 3729
cagagaagaucuuucgucu

SEQ ID NO: 290053 - RNA, 19 nt, Artificial Sequence
  Description of Artificial Sequence: Synthetic oligonucleotide
  Antisense strand to SEQ ID NO: 290052
agacgaaagaucuucucug

SEQ ID NO: 290054 - RNA, 19 nt, Artificial Sequence
  Description of Artificial Sequence: Synthetic oligonucleotide
  Sense strand starting at position 704 of SEQ ID NO: 3729
agaagaucuuucgucuaaa

SEQ ID NO: 290055 - RNA, 19 nt, Artificial Sequence
  Description of Artificial Sequence: Synthetic oligonucleotide
  Antisense strand to SEQ ID NO: 290054
uuuagacgaaagaucuucu

SEQ ID NO: 290056 - RNA, 19 nt, Artificial Sequence
  Description of Artificial Sequence: Synthetic oligonucleotide
  Sense strand starting at position 829 of SEQ ID NO: 3729
cuuggcuucugguuagaca

SEQ ID NO: 290057 - RNA, 19 nt, Artificial Sequence
  Description of Artificial Sequence: Synthetic oligonucleotide
  Antisense strand to SEQ ID NO: 290056
ugucuaaccagaagccaag

SEQ ID NO: 290058 - RNA, 19 nt, Artificial Sequence
  Description of Artificial Sequence: Synthetic oligonucleotide
  Sense strand starting at position 1011 of SEQ ID NO: 3729
ccaucagagcccugucaga

SEQ ID NO: 290059 - RNA, 19 nt, Artificial Sequence
  Description of Artificial Sequence: Synthetic oligonucleotide
  Antisense strand to SEQ ID NO: 290058
ucugacagggcucugaugg

SEQ ID NO: 290060 - RNA, 19 nt, Artificial Sequence
  Description of Artificial Sequence: Synthetic oligonucleotide
  Sense strand starting at position 1129 of SEQ ID NO: 3729
gggcgaugcuaaguuuaag

SEQ ID NO: 290061 - RNA, 19 nt, Artificial Sequence
  Description of Artificial Sequence: Synthetic oligonucleotide
  Antisense strand to SEQ ID NO: 290060
cuuaaacuuagcaucgccc

SEQ ID NO: 290062 - RNA, 19 nt, Artificial Sequence
  Description of Artificial Sequence: Synthetic oligonucleotide
  Sense strand starting at position 2503 of SEQ ID NO: 3729
cgcuguccuccagaggauu

SEQ ID NO: 290063 - RNA, 19 nt, Artificial Sequence
  Description of Artificial Sequence: Synthetic oligonucleotide
  Antisense strand to SEQ ID NO: 290062
aauccucuggaggacagcg

SEQ ID NO: 290064 - RNA, 19 nt, Artificial Sequence
  Description of Artificial Sequence: Synthetic oligonucleotide
  Sense strand starting at position 2768 of SEQ ID NO: 3729
gagggacguuuccugccaa

SEQ ID NO: 290065 - RNA, 19 nt, Artificial Sequence
  Description of Artificial Sequence: Synthetic oligonucleotide
  Antisense strand to SEQ ID NO: 290064
uuggcaggaaacgucccuc

SEQ ID NO: 290066 - RNA, 19 nt, Artificial Sequence
  Description of Artificial Sequence: Synthetic oligonucleotide
  Sense strand starting at position 2800 of SEQ ID NO: 3729
gaaaguuugggcggcguua

SEQ ID NO: 290067 - RNA, 19 nt, Artificial Sequence
  Description of Artificial Sequence: Synthetic oligonucleotide
  Antisense strand to SEQ ID NO: 290066
uaacgccgcccaaacuuuc

SEQ ID NO: 290068 - RNA, 19 nt, Artificial Sequence
  Description of Artificial Sequence: Synthetic oligonucleotide
  Sense strand starting at position 2813 of SEQ ID NO: 3729
gcguuaucccgacugccuu

SEQ ID NO: 290069 - RNA, 19 nt, Artificial Sequence
  Description of Artificial Sequence: Synthetic oligonucleotide
  Antisense strand to SEQ ID NO: 290068
aaggcagucgggauaacgc

SEQ ID NO: 290070 - RNA, 19 nt, Artificial Sequence
  Description of Artificial Sequence: Synthetic oligonucleotide
  Sense strand starting at position 2914 of SEQ ID NO: 3729
ucagacuccuuuccgagaa

SEQ ID NO: 290071 - RNA, 19 nt, Artificial Sequence
  Description of Artificial Sequence: Synthetic oligonucleotide
  Antisense strand to SEQ ID NO: 290070
uucucggaaaggagucuga

SEQ ID NO: 290072 - RNA, 19 nt, Artificial Sequence
  Description of Artificial Sequence: Synthetic oligonucleotide
  Sense strand starting at position 3243 of SEQ ID NO: 3729
ggugaauucgcgcucuccu

SEQ ID NO: 290073 - RNA, 19 nt, Artificial Sequence
  Description of Artificial Sequence: Synthetic oligonucleotide
  Antisense strand to SEQ ID NO: 290072
aggagagcgcgaauucacc

SEQ ID NO: 290074 - RNA, 19 nt, Artificial Sequence
  Description of Artificial Sequence: Synthetic oligonucleotide
  Sense strand starting at position 3244 of SEQ ID NO: 3729
gugaauucgcgcucuccuu

SEQ ID NO: 290075 - RNA, 19 nt, Artificial Sequence
  Description of Artificial Sequence: Synthetic oligonucleotide
  Antisense strand to SEQ ID NO: 290074
aaggagagcgcgaauucac

SEQ ID NO: 290076 - RNA, 19 nt, Artificial Sequence
  Description of Artificial Sequence: Synthetic oligonucleotide
  Sense strand starting at position 3398 of SEQ ID NO: 3729
uuugcguucccgucgggaa

SEQ ID NO: 290077 - RNA, 19 nt, Artificial Sequence
  Description of Artificial Sequence: Synthetic oligonucleotide
  Antisense strand to SEQ ID NO: 290076
uucccgacgggaacgcaaa

SEQ ID NO: 290078 - RNA, 19 nt, Artificial Sequence
  Description of Artificial Sequence: Synthetic oligonucleotide
  Sense strand starting at position 3486 of SEQ ID NO: 3729
gggcuaacaucagaagagu

SEQ ID NO: 290079 - RNA, 19 nt, Artificial Sequence
  Description of Artificial Sequence: Synthetic oligonucleotide
  Antisense strand to SEQ ID NO: 290078
acucuucugauguuagccc

SEQ ID NO: 290080 - RNA, 19 nt, Artificial Sequence
  Description of Artificial Sequence: Synthetic oligonucleotide
  Sense strand starting at position 3531 of SEQ ID NO: 3729
cuguccuugugguuuguga

SEQ ID NO: 290081 - RNA, 19 nt, Artificial Sequence
  Description of Artificial Sequence: Synthetic oligonucleotide
  Antisense strand to SEQ ID NO: 290080
ucacaaaccacaaggacag

SEQ ID NO: 290082 - RNA, 19 nt, Artificial Sequence
  Description of Artificial Sequence: Synthetic oligonucleotide
  Sense strand starting at position 3533 of SEQ ID NO: 3729
guccuugugguuugugaag

SEQ ID NO: 290083 - RNA, 19 nt, Artificial Sequence
  Description of Artificial Sequence: Synthetic oligonucleotide
  Antisense strand to SEQ ID NO: 290082
cuucacaaaccacaaggac

SEQ ID NO: 290084 - RNA, 19 nt, Artificial Sequence
  Description of Artificial Sequence: Synthetic oligonucleotide
  Sense strand starting at position 3538 of SEQ ID NO: 3729
ugugguuugugaaguugua

SEQ ID NO: 290085 - RNA, 19 nt, Artificial Sequence
  Description of Artificial Sequence: Synthetic oligonucleotide
  Antisense strand to SEQ ID NO: 290084
uacaacuucacaaaccaca

SEQ ID NO: 290086 - RNA, 19 nt, Artificial Sequence
  Description of Artificial Sequence: Synthetic oligonucleotide
  Sense strand starting at position 3545 of SEQ ID NO: 3729
ugugaaguuguaugaucuu

SEQ ID NO: 290087 - RNA, 19 nt, Artificial Sequence
  Description of Artificial Sequence: Synthetic oligonucleotide
  Antisense strand to SEQ ID NO: 290086
aagaucauacaacuucaca

SEQ ID NO: 290088 - RNA, 19 nt, Artificial Sequence
  Description of Artificial Sequence: Synthetic oligonucleotide
  Sense strand starting at position 3551 of SEQ ID NO: 3729
guuguaugaucuuucuguu

SEQ ID NO: 290089 - RNA, 19 nt, Artificial Sequence
  Description of Artificial Sequence: Synthetic oligonucleotide
  Antisense strand to SEQ ID NO: 290088
aacagaaagaucauacaac

SEQ ID NO: 290090 - RNA, 19 nt, Artificial Sequence
  Description of Artificial Sequence: Synthetic oligonucleotide
  Sense strand starting at position 3585 of SEQ ID NO: 3729
aguaguauuuguugaggcu

SEQ ID NO: 290091 - RNA, 19 nt, Artificial Sequence
  Description of Artificial Sequence: Synthetic oligonucleotide
  Antisense strand to SEQ ID NO: 290090
agccucaacaaauacuacu

SEQ ID NO: 290092 - RNA, 19 nt, Artificial Sequence
  Description of Artificial Sequence: Synthetic oligonucleotide
  Sense strand starting at position 3588 of SEQ ID NO: 3729
aguauuuguugaggcuaaa

SEQ ID NO: 290093 - RNA, 19 nt, Artificial Sequence
  Description of Artificial Sequence: Synthetic oligonucleotide
  Antisense strand to SEQ ID NO: 290092
uuuagccucaacaaauacu

SEQ ID NO: 290094 - RNA, 19 nt, Artificial Sequence
  Description of Artificial Sequence: Synthetic oligonucleotide
  Sense strand starting at position 3607 of SEQ ID NO: 3729
aggccaagagcgugcuaua

SEQ ID NO: 290095 - RNA, 19 nt, Artificial Sequence
  Description of Artificial Sequence: Synthetic oligonucleotide
  Antisense strand to SEQ ID NO: 290094
uauagcacgcucuuggccu

SEQ ID NO: 290096 - RNA, 19 nt, Artificial Sequence
  Description of Artificial Sequence: Synthetic oligonucleotide
  Sense strand starting at position 3612 of SEQ ID NO: 3729
aagagcgugcuauauauua

SEQ ID NO: 290097 - RNA, 19 nt, Artificial Sequence
  Description of Artificial Sequence: Synthetic oligonucleotide
  Antisense strand to SEQ ID NO: 290096
uaauauauagcacgcucuu

SEQ ID NO: 290098 - RNA, 19 nt, Artificial Sequence
  Description of Artificial Sequence: Synthetic oligonucleotide
  Sense strand starting at position 3644 of SEQ ID NO: 3729
acagcucugccagauaauu

SEQ ID NO: 290099 - RNA, 19 nt, Artificial Sequence
  Description of Artificial Sequence: Synthetic oligonucleotide
  Antisense strand to SEQ ID NO: 290098
aauuaucuggcagagcugu

SEQ ID NO: 290100 - RNA, 19 nt, Artificial Sequence
  Description of Artificial Sequence: Synthetic oligonucleotide
  Sense strand starting at position 3968 of SEQ ID NO: 3729
cggugcccaaccugugaua

SEQ ID NO: 290101 - RNA, 19 nt, Artificial Sequence
  Description of Artificial Sequence: Synthetic oligonucleotide
  Antisense strand to SEQ ID NO: 290100
uaucacagguugggcaccg

SEQ ID NO: 290102 - RNA, 19 nt, Artificial Sequence
  Description of Artificial Sequence: Synthetic oligonucleotide
  Sense strand starting at position 12 of SEQ ID NO: 3732
auagacuauucucuuguua

SEQ ID NO: 290103 - RNA, 19 nt, Artificial Sequence
  Description of Artificial Sequence: Synthetic oligonucleotide
  Antisense strand to SEQ ID NO: 290102
uaacaagagaauagucuau

SEQ ID NO: 290104 - RNA, 19 nt, Artificial Sequence
  Description of Artificial Sequence: Synthetic oligonucleotide
  Sense strand starting at position 109 of SEQ ID NO: 3732
uugucucacugucuacaau

SEQ ID NO: 290105 - RNA, 19 nt, Artificial Sequence
  Description of Artificial Sequence: Synthetic oligonucleotide
  Antisense strand to SEQ ID NO: 290104
auuguagacagugagacaa

SEQ ID NO: 290106 - RNA, 19 nt, Artificial Sequence
  Description of Artificial Sequence: Synthetic oligonucleotide
  Sense strand starting at position 110 of SEQ ID NO: 3732
ugucucacugucuacaauu

SEQ ID NO: 290107 - RNA, 19 nt, Artificial Sequence
  Description of Artificial Sequence: Synthetic oligonucleotide
  Antisense strand to SEQ ID NO: 290106
aauuguagacagugagaca

SEQ ID NO: 290108 - RNA, 19 nt, Artificial Sequence
  Description of Artificial Sequence: Synthetic oligonucleotide
  Sense strand starting at position 195 of SEQ ID NO: 3732
uguuucgccucaguaauuu

SEQ ID NO: 290109 - RNA, 19 nt, Artificial Sequence
  Description of Artificial Sequence: Synthetic oligonucleotide
  Antisense strand to SEQ ID NO: 290108
aaauuacugaggcgaaaca

SEQ ID NO: 290110 - RNA, 19 nt, Artificial Sequence
  Description of Artificial Sequence: Synthetic oligonucleotide
  Sense strand starting at position 221 of SEQ ID NO: 3732
agagaugaaguacgcuaau

SEQ ID NO: 290111 - RNA, 19 nt, Artificial Sequence
  Description of Artificial Sequence: Synthetic oligonucleotide
  Antisense strand to SEQ ID NO: 290110
auuagcguacuucaucucu

SEQ ID NO: 290112 - RNA, 19 nt, Artificial Sequence
  Description of Artificial Sequence: Synthetic oligonucleotide
  Sense strand starting at position 311 of SEQ ID NO: 3732
cugggaacucugugaggca

SEQ ID NO: 290113 - RNA, 19 nt, Artificial Sequence
  Description of Artificial Sequence: Synthetic oligonucleotide
  Antisense strand to SEQ ID NO: 290112
ugccucacagaguucccag

SEQ ID NO: 290114 - RNA, 19 nt, Artificial Sequence
  Description of Artificial Sequence: Synthetic oligonucleotide
  Sense strand starting at position 523 of SEQ ID NO: 3732
cuaagugacuauuccugua

SEQ ID NO: 290115 - RNA, 19 nt, Artificial Sequence
  Description of Artificial Sequence: Synthetic oligonucleotide
  Antisense strand to SEQ ID NO: 290114
uacaggaauagucacuuag

SEQ ID NO: 290116 - RNA, 19 nt, Artificial Sequence
  Description of Artificial Sequence: Synthetic oligonucleotide
  Sense strand starting at position 634 of SEQ ID NO: 3732
cccgccuuucuggaucuaa

SEQ ID NO: 290117 - RNA, 19 nt, Artificial Sequence
  Description of Artificial Sequence: Synthetic oligonucleotide
  Antisense strand to SEQ ID NO: 290116
uuagauccagaaaggcggg

SEQ ID NO: 290118 - RNA, 19 nt, Artificial Sequence
  Description of Artificial Sequence: Synthetic oligonucleotide
  Sense strand starting at position 812 of SEQ ID NO: 3732
ugugucagagcucauguau

SEQ ID NO: 290119 - RNA, 19 nt, Artificial Sequence
  Description of Artificial Sequence: Synthetic oligonucleotide
  Antisense strand to SEQ ID NO: 290118
auacaugagcucugacaca

SEQ ID NO: 290120 - RNA, 19 nt, Artificial Sequence
  Description of Artificial Sequence: Synthetic oligonucleotide
  Sense strand starting at position 827 of SEQ ID NO: 3732
guauaaacucaugguuuau

SEQ ID NO: 290121 - RNA, 19 nt, Artificial Sequence
  Description of Artificial Sequence: Synthetic oligonucleotide
  Antisense strand to SEQ ID NO: 290120
auaaaccaugaguuuauac

SEQ ID NO: 290122 - RNA, 19 nt, Artificial Sequence
  Description of Artificial Sequence: Synthetic oligonucleotide
  Sense strand starting at position 837 of SEQ ID NO: 3732
augguuuauucuuucgaca

SEQ ID NO: 290123 - RNA, 19 nt, Artificial Sequence
  Description of Artificial Sequence: Synthetic oligonucleotide
  Antisense strand to SEQ ID NO: 290122
ugucgaaagaauaaaccau

SEQ ID NO: 290124 - RNA, 19 nt, Artificial Sequence
  Description of Artificial Sequence: Synthetic oligonucleotide
  Sense strand starting at position 842 of SEQ ID NO: 3732
uuauucuuucgacagauca

SEQ ID NO: 290125 - RNA, 19 nt, Artificial Sequence
  Description of Artificial Sequence: Synthetic oligonucleotide
  Antisense strand to SEQ ID NO: 290124
ugaucugucgaaagaauaa

SEQ ID NO: 290126 - RNA, 19 nt, Artificial Sequence
  Description of Artificial Sequence: Synthetic oligonucleotide
  Sense strand starting at position 1353 of SEQ ID NO: 3732
ggcucaacacaggaguauu

SEQ ID NO: 290127 - RNA, 19 nt, Artificial Sequence
  Description of Artificial Sequence: Synthetic oligonucleotide
  Antisense strand to SEQ ID NO: 290126
aauacuccuguguugagcc

SEQ ID NO: 290128 - RNA, 19 nt, Artificial Sequence
  Description of Artificial Sequence: Synthetic oligonucleotide
  Sense strand starting at position 1468 of SEQ ID NO: 3732
uuaagugugcaugaugcau

SEQ ID NO: 290129 - RNA, 19 nt, Artificial Sequence
  Description of Artificial Sequence: Synthetic oligonucleotide
  Antisense strand to SEQ ID NO: 290128
augcaucaugcacacuuaa

SEQ ID NO: 290130 - RNA, 19 nt, Artificial Sequence
  Description of Artificial Sequence: Synthetic oligonucleotide
  Sense strand starting at position 1518 of SEQ ID NO: 3732
guggcaucacagcauuagu

SEQ ID NO: 290131 - RNA, 19 nt, Artificial Sequence
  Description of Artificial Sequence: Synthetic oligonucleotide
  Antisense strand to SEQ ID NO: 290130
acuaaugcugugaugccac

SEQ ID NO: 290132 - RNA, 19 nt, Artificial Sequence
  Description of Artificial Sequence: Synthetic oligonucleotide
  Sense strand starting at position 1521 of SEQ ID NO: 3732
gcaucacagcauuagugua

SEQ ID NO: 290133 - RNA, 19 nt, Artificial Sequence
  Description of Artificial Sequence: Synthetic oligonucleotide
  Antisense strand to SEQ ID NO: 290132
uacacuaaugcugugaugc

SEQ ID NO: 290134 - RNA, 19 nt, Artificial Sequence
  Description of Artificial Sequence: Synthetic oligonucleotide
  Sense strand starting at position 1766 of SEQ ID NO: 3732
gugccaaucugauuucugu

SEQ ID NO: 290135 - RNA, 19 nt, Artificial Sequence
  Description of Artificial Sequence: Synthetic oligonucleotide
  Antisense strand to SEQ ID NO: 290134
acagaaaucagauuggcac

SEQ ID NO: 290136 - RNA, 19 nt, Artificial Sequence
  Description of Artificial Sequence: Synthetic oligonucleotide
  Sense strand starting at position 1773 of SEQ ID NO: 3732
ucugauuucugucauuaag

SEQ ID NO: 290137 - RNA, 19 nt, Artificial Sequence
  Description of Artificial Sequence: Synthetic oligonucleotide
  Antisense strand to SEQ ID NO: 290136
cuuaaugacagaaaucaga

SEQ ID NO: 290138 - RNA, 19 nt, Artificial Sequence
  Description of Artificial Sequence: Synthetic oligonucleotide
  Sense strand starting at position 1779 of SEQ ID NO: 3732
uucugucauuaaguaugaa

SEQ ID NO: 290139 - RNA, 19 nt, Artificial Sequence
  Description of Artificial Sequence: Synthetic oligonucleotide
  Antisense strand to SEQ ID NO: 290138
uucauacuuaaugacagaa

SEQ ID NO: 290140 - RNA, 19 nt, Artificial Sequence
  Description of Artificial Sequence: Synthetic oligonucleotide
  Sense strand starting at position 1869 of SEQ ID NO: 3732
ugaaauuacugagacucaa

SEQ ID NO: 290141 - RNA, 19 nt, Artificial Sequence
  Description of Artificial Sequence: Synthetic oligonucleotide
  Antisense strand to SEQ ID NO: 290140
uugagucucaguaauuuca

SEQ ID NO: 290142 - RNA, 19 nt, Artificial Sequence
  Description of Artificial Sequence: Synthetic oligonucleotide
  Sense strand starting at position 1883 of SEQ ID NO: 3732
cucaaauugcugcacagau

SEQ ID NO: 290143 - RNA, 19 nt, Artificial Sequence
  Description of Artificial Sequence: Synthetic oligonucleotide
  Antisense strand to SEQ ID NO: 290142
aucugugcagcaauuugag

SEQ ID NO: 290144 - RNA, 19 nt, Artificial Sequence
  Description of Artificial Sequence: Synthetic oligonucleotide
  Sense strand starting at position 1928 of SEQ ID NO: 3732
gguauucuaauguguggac

SEQ ID NO: 290145 - RNA, 19 nt, Artificial Sequence
  Description of Artificial Sequence: Synthetic oligonucleotide
  Antisense strand to SEQ ID NO: 290144
guccacacauuagaauacc

SEQ ID NO: 290146 - RNA, 19 nt, Artificial Sequence
  Description of Artificial Sequence: Synthetic oligonucleotide
  Sense strand starting at position 1929 of SEQ ID NO: 3732
guauucuaauguguggaca

SEQ ID NO: 290147 - RNA, 19 nt, Artificial Sequence
  Description of Artificial Sequence: Synthetic oligonucleotide
  Antisense strand to SEQ ID NO: 290146
uguccacacauuagaauac

SEQ ID NO: 290148 - RNA, 19 nt, Artificial Sequence
  Description of Artificial Sequence: Synthetic oligonucleotide
  Sense strand starting at position 1930 of SEQ ID NO: 3732
uauucuaauguguggacau

SEQ ID NO: 290149 - RNA, 19 nt, Artificial Sequence
  Description of Artificial Sequence: Synthetic oligonucleotide
  Antisense strand to SEQ ID NO: 290148
auguccacacauuagaaua

SEQ ID NO: 290150 - RNA, 19 nt, Artificial Sequence
  Description of Artificial Sequence: Synthetic oligonucleotide
  Sense strand starting at position 2388 of SEQ ID NO: 3732
uuggguaauuaccuaggau

SEQ ID NO: 290151 - RNA, 19 nt, Artificial Sequence
  Description of Artificial Sequence: Synthetic oligonucleotide
  Antisense strand to SEQ ID NO: 290150
auccuagguaauuacccaa

SEQ ID NO: 290152 - RNA, 19 nt, Artificial Sequence
  Description of Artificial Sequence: Synthetic oligonucleotide
  Sense strand starting at position 2457 of SEQ ID NO: 3732
accuaagaguucucuaaag

SEQ ID NO: 290153 - RNA, 19 nt, Artificial Sequence
  Description of Artificial Sequence: Synthetic oligonucleotide
  Antisense strand to SEQ ID NO: 290152
cuuuagagaacucuuaggu

SEQ ID NO: 290154 - RNA, 19 nt, Artificial Sequence
  Description of Artificial Sequence: Synthetic oligonucleotide
  Sense strand starting at position 2459 of SEQ ID NO: 3732
cuaagaguucucuaaagug

SEQ ID NO: 290155 - RNA, 19 nt, Artificial Sequence
  Description of Artificial Sequence: Synthetic oligonucleotide
  Antisense strand to SEQ ID NO: 290154
cacuuuagagaacucuuag

SEQ ID NO: 290156 - RNA, 19 nt, Artificial Sequence
  Description of Artificial Sequence: Synthetic oligonucleotide
  Sense strand starting at position 2490 of SEQ ID NO: 3732
aggcuuccaccagaaacuu

SEQ ID NO: 290157 - RNA, 19 nt, Artificial Sequence
  Description of Artificial Sequence: Synthetic oligonucleotide
  Antisense strand to SEQ ID NO: 290156
aaguuucugguggaagccu

SEQ ID NO: 290158 - RNA, 19 nt, Artificial Sequence
  Description of Artificial Sequence: Synthetic oligonucleotide
  Sense strand starting at position 2513 of SEQ ID NO: 3732
aagaguucugguuauucca

SEQ ID NO: 290159 - RNA, 19 nt, Artificial Sequence
  Description of Artificial Sequence: Synthetic oligonucleotide
  Antisense strand to SEQ ID NO: 290158
uggaauaaccagaacucuu

SEQ ID NO: 290160 - RNA, 19 nt, Artificial Sequence
  Description of Artificial Sequence: Synthetic oligonucleotide
  Sense strand starting at position 2515 of SEQ ID NO: 3732
gaguucugguuauuccaua

SEQ ID NO: 290161 - RNA, 19 nt, Artificial Sequence
  Description of Artificial Sequence: Synthetic oligonucleotide
  Antisense strand to SEQ ID NO: 290160
uauggaauaaccagaacuc

SEQ ID NO: 290162 - RNA, 19 nt, Artificial Sequence
  Description of Artificial Sequence: Synthetic oligonucleotide
  Sense strand starting at position 2516 of SEQ ID NO: 3732
aguucugguuauuccauau

SEQ ID NO: 290163 - RNA, 19 nt, Artificial Sequence
  Description of Artificial Sequence: Synthetic oligonucleotide
  Antisense strand to SEQ ID NO: 290162
auauggaauaaccagaacu

SEQ ID NO: 290164 - RNA, 19 nt, Artificial Sequence
  Description of Artificial Sequence: Synthetic oligonucleotide
  Sense strand starting at position 2620 of SEQ ID NO: 3732
cguuucucagaugacuaau

SEQ ID NO: 290165 - RNA, 19 nt, Artificial Sequence
  Description of Artificial Sequence: Synthetic oligonucleotide
  Antisense strand to SEQ ID NO: 290164
auuagucaucugagaaacg

SEQ ID NO: 290166 - RNA, 19 nt, Artificial Sequence
  Description of Artificial Sequence: Synthetic oligonucleotide
  Sense strand starting at position 2957 of SEQ ID NO: 3732
aucuuugccagcgauuaug

SEQ ID NO: 290167 - RNA, 19 nt, Artificial Sequence
  Description of Artificial Sequence: Synthetic oligonucleotide
  Antisense strand to SEQ ID NO: 290166
cauaaucgcuggcaaagau

SEQ ID NO: 290168 - RNA, 19 nt, Artificial Sequence
  Description of Artificial Sequence: Synthetic oligonucleotide
  Sense strand starting at position 2965 of SEQ ID NO: 3732
cagcgauuauguccacaau

SEQ ID NO: 290169 - RNA, 19 nt, Artificial Sequence
  Description of Artificial Sequence: Synthetic oligonucleotide
  Antisense strand to SEQ ID NO: 290168
auuguggacauaaucgcug

SEQ ID NO: 290170 - RNA, 19 nt, Artificial Sequence
  Description of Artificial Sequence: Synthetic oligonucleotide
  Sense strand starting at position 2966 of SEQ ID NO: 3732
agcgauuauguccacaaug

SEQ ID NO: 290171 - RNA, 19 nt, Artificial Sequence
  Description of Artificial Sequence: Synthetic oligonucleotide
  Antisense strand to SEQ ID NO: 290170
cauuguggacauaaucgcu

SEQ ID NO: 290172 - RNA, 19 nt, Artificial Sequence
  Description of Artificial Sequence: Synthetic oligonucleotide
  Sense strand starting at position 2968 of SEQ ID NO: 3732
cgauuauguccacaaugga

SEQ ID NO: 290173 - RNA, 19 nt, Artificial Sequence
  Description of Artificial Sequence: Synthetic oligonucleotide
  Antisense strand to SEQ ID NO: 290172
uccauuguggacauaaucg

SEQ ID NO: 290174 - RNA, 19 nt, Artificial Sequence
  Description of Artificial Sequence: Synthetic oligonucleotide
  Sense strand starting at position 2971 of SEQ ID NO: 3732
uuauguccacaauggaauu

SEQ ID NO: 290175 - RNA, 19 nt, Artificial Sequence
  Description of Artificial Sequence: Synthetic oligonucleotide
  Antisense strand to SEQ ID NO: 290174
aauuccauuguggacauaa

SEQ ID NO: 290176 - RNA, 19 nt, Artificial Sequence
  Description of Artificial Sequence: Synthetic oligonucleotide
  Sense strand starting at position 3044 of SEQ ID NO: 3732
ggcuaaaugugaccugaga

SEQ ID NO: 290177 - RNA, 19 nt, Artificial Sequence
  Description of Artificial Sequence: Synthetic oligonucleotide
  Antisense strand to SEQ ID NO: 290176
ucucaggucacauuuagcc

SEQ ID NO: 290178 - RNA, 19 nt, Artificial Sequence
  Description of Artificial Sequence: Synthetic oligonucleotide
  Sense strand starting at position 3123 of SEQ ID NO: 3732
agacaagauugagaacuua

SEQ ID NO: 290179 - RNA, 19 nt, Artificial Sequence
  Description of Artificial Sequence: Synthetic oligonucleotide
  Antisense strand to SEQ ID NO: 290178
uaaguucucaaucuugucu

SEQ ID NO: 290180 - RNA, 19 nt, Artificial Sequence
  Description of Artificial Sequence: Synthetic oligonucleotide
  Sense strand starting at position 3139 of SEQ ID NO: 3732
uuaacuuaggaguaugcau

SEQ ID NO: 290181 - RNA, 19 nt, Artificial Sequence
  Description of Artificial Sequence: Synthetic oligonucleotide
  Antisense strand to SEQ ID NO: 290180
augcauacuccuaaguuaa

SEQ ID NO: 290182 - RNA, 19 nt, Artificial Sequence
  Description of Artificial Sequence: Synthetic oligonucleotide
  Sense strand starting at position 143 of SEQ ID NO: 3730
ggacacaaagcuugucagu

SEQ ID NO: 290183 - RNA, 19 nt, Artificial Sequence
  Description of Artificial Sequence: Synthetic oligonucleotide
  Antisense strand to SEQ ID NO: 290182
acugacaagcuuugugucc

SEQ ID NO: 290184 - RNA, 19 nt, Artificial Sequence
  Description of Artificial Sequence: Synthetic oligonucleotide
  Sense strand starting at position 145 of SEQ ID NO: 3730
acacaaagcuugucaguuc

SEQ ID NO: 290185 - RNA, 19 nt, Artificial Sequence
  Description of Artificial Sequence: Synthetic oligonucleotide
  Antisense strand to SEQ ID NO: 290184
gaacugacaagcuuugugu

SEQ ID NO: 290186 - RNA, 19 nt, Artificial Sequence
  Description of Artificial Sequence: Synthetic oligonucleotide
  Sense strand starting at position 177 of SEQ ID NO: 3730
cugucucucuggucagauc

SEQ ID NO: 290187 - RNA, 19 nt, Artificial Sequence
  Description of Artificial Sequence: Synthetic oligonucleotide
  Antisense strand to SEQ ID NO: 290186
gaucugaccagagagacag

SEQ ID NO: 290188 - RNA, 19 nt, Artificial Sequence
  Description of Artificial Sequence: Synthetic oligonucleotide
  Sense strand starting at position 218 of SEQ ID NO: 3730
cagacuaccgucugaacau

SEQ ID NO: 290189 - RNA, 19 nt, Artificial Sequence
  Description of Artificial Sequence: Synthetic oligonucleotide
  Antisense strand to SEQ ID NO: 290188
auguucagacgguagucug

SEQ ID NO: 290190 - RNA, 19 nt, Artificial Sequence
  Description of Artificial Sequence: Synthetic oligonucleotide
  Sense strand starting at position 373 of SEQ ID NO: 3730
aacugaagagugugaucuu

SEQ ID NO: 290191 - RNA, 19 nt, Artificial Sequence
  Description of Artificial Sequence: Synthetic oligonucleotide
  Antisense strand to SEQ ID NO: 290190
aagaucacacucuucaguu

SEQ ID NO: 290192 - RNA, 19 nt, Artificial Sequence
  Description of Artificial Sequence: Synthetic oligonucleotide
  Sense strand starting at position 376 of SEQ ID NO: 3730
ugaagagugugaucuuggu

SEQ ID NO: 290193 - RNA, 19 nt, Artificial Sequence
  Description of Artificial Sequence: Synthetic oligonucleotide
  Antisense strand to SEQ ID NO: 290192
accaagaucacacucuuca

SEQ ID NO: 290194 - RNA, 19 nt, Artificial Sequence
  Description of Artificial Sequence: Synthetic oligonucleotide
  Sense strand starting at position 380 of SEQ ID NO: 3730
gagugugaucuugguacag

SEQ ID NO: 290195 - RNA, 19 nt, Artificial Sequence
  Description of Artificial Sequence: Synthetic oligonucleotide
  Antisense strand to SEQ ID NO: 290194
cuguaccaagaucacacuc

SEQ ID NO: 290196 - RNA, 19 nt, Artificial Sequence
  Description of Artificial Sequence: Synthetic oligonucleotide
  Sense strand starting at position 414 of SEQ ID NO: 3730
gccacacuggucugaucuu

SEQ ID NO: 290197 - RNA, 19 nt, Artificial Sequence
  Description of Artificial Sequence: Synthetic oligonucleotide
  Antisense strand to SEQ ID NO: 290196
aagaucagaccaguguggc

SEQ ID NO: 290198 - RNA, 19 nt, Artificial Sequence
  Description of Artificial Sequence: Synthetic oligonucleotide
  Sense strand starting at position 445 of SEQ ID NO: 3730
augggaucuucucagagaa

SEQ ID NO: 290199 - RNA, 19 nt, Artificial Sequence
  Description of Artificial Sequence: Synthetic oligonucleotide
  Antisense strand to SEQ ID NO: 290198
uucucugagaagaucccau

SEQ ID NO: 290200 - RNA, 19 nt, Artificial Sequence
  Description of Artificial Sequence: Synthetic oligonucleotide
  Sense strand starting at position 589 of SEQ ID NO: 3730
agcaguuauuucccuuuga

SEQ ID NO: 290201 - RNA, 19 nt, Artificial Sequence
  Description of Artificial Sequence: Synthetic oligonucleotide
  Antisense strand to SEQ ID NO: 290200
ucaaagggaaauaacugcu

SEQ ID NO: 290202 - RNA, 19 nt, Artificial Sequence
  Description of Artificial Sequence: Synthetic oligonucleotide
  Sense strand starting at position 590 of SEQ ID NO: 3730
gcaguuauuucccuuugac

SEQ ID NO: 290203 - RNA, 19 nt, Artificial Sequence
  Description of Artificial Sequence: Synthetic oligonucleotide
  Antisense strand to SEQ ID NO: 290202
gucaaagggaaauaacugc

SEQ ID NO: 290204 - RNA, 19 nt, Artificial Sequence
  Description of Artificial Sequence: Synthetic oligonucleotide
  Sense strand starting at position 631 of SEQ ID NO: 3730
guugacaugccagauccuu

SEQ ID NO: 290205 - RNA, 19 nt, Artificial Sequence
  Description of Artificial Sequence: Synthetic oligonucleotide
  Antisense strand to SEQ ID NO: 290204
aaggaucuggcaugucaac

SEQ ID NO: 290206 - RNA, 19 nt, Artificial Sequence
  Description of Artificial Sequence: Synthetic oligonucleotide
  Sense strand starting at position 644 of SEQ ID NO: 3730
auccuuauuucugcggaau

SEQ ID NO: 290207 - RNA, 19 nt, Artificial Sequence
  Description of Artificial Sequence: Synthetic oligonucleotide
  Antisense strand to SEQ ID NO: 290206
auuccgcagaaauaaggau

SEQ ID NO: 290208 - RNA, 19 nt, Artificial Sequence
  Description of Artificial Sequence: Synthetic oligonucleotide
  Sense strand starting at position 862 of SEQ ID NO: 3730
agguuaucacuuugaucau

SEQ ID NO: 290209 - RNA, 19 nt, Artificial Sequence
  Description of Artificial Sequence: Synthetic oligonucleotide
  Antisense strand to SEQ ID NO: 290208
augaucaaagugauaaccu

SEQ ID NO: 290210 - RNA, 19 nt, Artificial Sequence
  Description of Artificial Sequence: Synthetic oligonucleotide
  Sense strand starting at position 987 of SEQ ID NO: 3730
cucaacuguguguacagau

SEQ ID NO: 290211 - RNA, 19 nt, Artificial Sequence
  Description of Artificial Sequence: Synthetic oligonucleotide
  Antisense strand to SEQ ID NO: 290210
aucuguacacacaguugag

SEQ ID NO: 290212 - RNA, 19 nt, Artificial Sequence
  Description of Artificial Sequence: Synthetic oligonucleotide
  Sense strand starting at position 1006 of SEQ ID NO: 3730
uuucuaagucguuaugaau

SEQ ID NO: 290213 - RNA, 19 nt, Artificial Sequence
  Description of Artificial Sequence: Synthetic oligonucleotide
  Antisense strand to SEQ ID NO: 290212
auucauaacgacuuagaaa

SEQ ID NO: 290214 - RNA, 19 nt, Artificial Sequence
  Description of Artificial Sequence: Synthetic oligonucleotide
  Sense strand starting at position 1075 of SEQ ID NO: 3730
ggacaugcaucuccuguaa

SEQ ID NO: 290215 - RNA, 19 nt, Artificial Sequence
  Description of Artificial Sequence: Synthetic oligonucleotide
  Antisense strand to SEQ ID NO: 290214
uuacaggagaugcaugucc

SEQ ID NO: 290216 - RNA, 19 nt, Artificial Sequence
  Description of Artificial Sequence: Synthetic oligonucleotide
  Sense strand starting at position 1131 of SEQ ID NO: 3730
ggcagcuucgugucacuuu

SEQ ID NO: 290217 - RNA, 19 nt, Artificial Sequence
  Description of Artificial Sequence: Synthetic oligonucleotide
  Antisense strand to SEQ ID NO: 290216
aaagugacacgaagcugcc

SEQ ID NO: 290218 - RNA, 19 nt, Artificial Sequence
  Description of Artificial Sequence: Synthetic oligonucleotide
  Sense strand starting at position 1202 of SEQ ID NO: 3730
ggacacaucucuguccaca

SEQ ID NO: 290219 - RNA, 19 nt, Artificial Sequence
  Description of Artificial Sequence: Synthetic oligonucleotide
  Antisense strand to SEQ ID NO: 290218
uguggacagagaugugucc

SEQ ID NO: 290220 - RNA, 19 nt, Artificial Sequence
  Description of Artificial Sequence: Synthetic oligonucleotide
  Sense strand starting at position 1210 of SEQ ID NO: 3730
cucuguccacaguguaaau

SEQ ID NO: 290221 - RNA, 19 nt, Artificial Sequence
  Description of Artificial Sequence: Synthetic oligonucleotide
  Antisense strand to SEQ ID NO: 290220
auuuacacuguggacagag

SEQ ID NO: 290222 - RNA, 19 nt, Artificial Sequence
  Description of Artificial Sequence: Synthetic oligonucleotide
  Sense strand starting at position 1533 of SEQ ID NO: 3730
cgcgcauucgacccaaacu

SEQ ID NO: 290223 - RNA, 19 nt, Artificial Sequence
  Description of Artificial Sequence: Synthetic oligonucleotide
  Antisense strand to SEQ ID NO: 290222
aguuugggucgaaugcgcg

SEQ ID NO: 290224 - RNA, 19 nt, Artificial Sequence
  Description of Artificial Sequence: Synthetic oligonucleotide
  Sense strand starting at position 1534 of SEQ ID NO: 3730
gcgcauucgacccaaacuu

SEQ ID NO: 290225 - RNA, 19 nt, Artificial Sequence
  Description of Artificial Sequence: Synthetic oligonucleotide
  Antisense strand to SEQ ID NO: 290224
aaguuugggucgaaugcgc

SEQ ID NO: 290226 - RNA, 19 nt, Artificial Sequence
  Description of Artificial Sequence: Synthetic oligonucleotide
  Sense strand starting at position 1703 of SEQ ID NO: 3730
aaucgcuguggucaagaaa

SEQ ID NO: 290227 - RNA, 19 nt, Artificial Sequence
  Description of Artificial Sequence: Synthetic oligonucleotide
  Antisense strand to SEQ ID NO: 290226
uuucuugaccacagcgauu

SEQ ID NO: 290228 - RNA, 19 nt, Artificial Sequence
  Description of Artificial Sequence: Synthetic oligonucleotide
  Sense strand starting at position 1715 of SEQ ID NO: 3730
caagaaaguccuggaagcu

SEQ ID NO: 290229 - RNA, 19 nt, Artificial Sequence
  Description of Artificial Sequence: Synthetic oligonucleotide
  Antisense strand to SEQ ID NO: 290228
agcuuccaggacuuucuug

SEQ ID NO: 290230 - RNA, 19 nt, Artificial Sequence
  Description of Artificial Sequence: Synthetic oligonucleotide
  Sense strand starting at position 1750 of SEQ ID NO: 3730
gggcgguuugcgguuaaca

SEQ ID NO: 290231 - RNA, 19 nt, Artificial Sequence
  Description of Artificial Sequence: Synthetic oligonucleotide
  Antisense strand to SEQ ID NO: 290230
uguuaaccgcaaaccgccc

SEQ ID NO: 290232 - RNA, 19 nt, Artificial Sequence
  Description of Artificial Sequence: Synthetic oligonucleotide
  Sense strand starting at position 2899 of SEQ ID NO: 3730
uugugugucuggguaagag

SEQ ID NO: 290233 - RNA, 19 nt, Artificial Sequence
  Description of Artificial Sequence: Synthetic oligonucleotide
  Antisense strand to SEQ ID NO: 290232
cucuuacccagacacacaa

SEQ ID NO: 290234 - RNA, 19 nt, Artificial Sequence
  Description of Artificial Sequence: Synthetic oligonucleotide
  Sense strand starting at position 2939 of SEQ ID NO: 3730
ugacguccucuggagaguu

SEQ ID NO: 290235 - RNA, 19 nt, Artificial Sequence
  Description of Artificial Sequence: Synthetic oligonucleotide
  Antisense strand to SEQ ID NO: 290234
aacucuccagaggacguca

SEQ ID NO: 290236 - RNA, 19 nt, Artificial Sequence
  Description of Artificial Sequence: Synthetic oligonucleotide
  Sense strand starting at position 2950 of SEQ ID NO: 3730
ggagaguuggaucgggcuu

SEQ ID NO: 290237 - RNA, 19 nt, Artificial Sequence
  Description of Artificial Sequence: Synthetic oligonucleotide
  Antisense strand to SEQ ID NO: 290236
aagcccgauccaacucucc

SEQ ID NO: 290238 - RNA, 19 nt, Artificial Sequence
  Description of Artificial Sequence: Synthetic oligonucleotide
  Sense strand starting at position 3035 of SEQ ID NO: 3730
uaggguguucuaggagugu

SEQ ID NO: 290239 - RNA, 19 nt, Artificial Sequence
  Description of Artificial Sequence: Synthetic oligonucleotide
  Antisense strand to SEQ ID NO: 290238
acacuccuagaacacccua

SEQ ID NO: 290240 - RNA, 19 nt, Artificial Sequence
  Description of Artificial Sequence: Synthetic oligonucleotide
  Sense strand starting at position 3186 of SEQ ID NO: 3730
uuucuuugcgacuacuaga

SEQ ID NO: 290241 - RNA, 19 nt, Artificial Sequence
  Description of Artificial Sequence: Synthetic oligonucleotide
  Antisense strand to SEQ ID NO: 290240
ucuaguagucgcaaagaaa

SEQ ID NO: 290242 - RNA, 19 nt, Artificial Sequence
  Description of Artificial Sequence: Synthetic oligonucleotide
  Sense strand starting at position 3278 of SEQ ID NO: 3730
uccugaguccuaugacaac

SEQ ID NO: 290243 - RNA, 19 nt, Artificial Sequence
  Description of Artificial Sequence: Synthetic oligonucleotide
  Antisense strand to SEQ ID NO: 290242
guugucauaggacucagga

SEQ ID NO: 290244 - RNA, 19 nt, Artificial Sequence
  Description of Artificial Sequence: Synthetic oligonucleotide
  Sense strand starting at position 3284 of SEQ ID NO: 3730
guccuaugacaacauuguu

SEQ ID NO: 290245 - RNA, 19 nt, Artificial Sequence
  Description of Artificial Sequence: Synthetic oligonucleotide
  Antisense strand to SEQ ID NO: 290244
aacaauguugucauaggac

SEQ ID NO: 290246 - RNA, 19 nt, Artificial Sequence
  Description of Artificial Sequence: Synthetic oligonucleotide
  Sense strand starting at position 3318 of SEQ ID NO: 3730
cuuagcccaugcuuagaua

SEQ ID NO: 290247 - RNA, 19 nt, Artificial Sequence
  Description of Artificial Sequence: Synthetic oligonucleotide
  Antisense strand to SEQ ID NO: 290246
uaucuaagcaugggcuaag

SEQ ID NO: 290248 - RNA, 19 nt, Artificial Sequence
  Description of Artificial Sequence: Synthetic oligonucleotide
  Sense strand starting at position 3346 of SEQ ID NO: 3730
guuaaagggagaugaaguu

SEQ ID NO: 290249 - RNA, 19 nt, Artificial Sequence
  Description of Artificial Sequence: Synthetic oligonucleotide
  Antisense strand to SEQ ID NO: 290248
aacuucaucucccuuuaac

SEQ ID NO: 290250 - RNA, 19 nt, Artificial Sequence
  Description of Artificial Sequence: Synthetic oligonucleotide
  Sense strand starting at position 3374 of SEQ ID NO: 3730
cggguuucuugauuguaaa

SEQ ID NO: 290251 - RNA, 19 nt, Artificial Sequence
  Description of Artificial Sequence: Synthetic oligonucleotide
  Antisense strand to SEQ ID NO: 290250
uuuacaaucaagaaacccg

SEQ ID NO: 290252 - RNA, 19 nt, Artificial Sequence
  Description of Artificial Sequence: Synthetic oligonucleotide
  Sense strand starting at position 3551 of SEQ ID NO: 3730
uccguuuggucuucaggga

SEQ ID NO: 290253 - RNA, 19 nt, Artificial Sequence
  Description of Artificial Sequence: Synthetic oligonucleotide
  Antisense strand to SEQ ID NO: 290252
ucccugaagaccaaacgga

SEQ ID NO: 290254 - RNA, 19 nt, Artificial Sequence
  Description of Artificial Sequence: Synthetic oligonucleotide
  Sense strand starting at position 3552 of SEQ ID NO: 3730
ccguuuggucuucagggau

SEQ ID NO: 290255 - RNA, 19 nt, Artificial Sequence
  Description of Artificial Sequence: Synthetic oligonucleotide
  Antisense strand to SEQ ID NO: 290254
aucccugaagaccaaacgg

SEQ ID NO: 290256 - RNA, 19 nt, Artificial Sequence
  Description of Artificial Sequence: Synthetic oligonucleotide
  Sense strand starting at position 3566 of SEQ ID NO: 3730
gggaucuuccuuuggugua

SEQ ID NO: 290257 - RNA, 19 nt, Artificial Sequence
  Description of Artificial Sequence: Synthetic oligonucleotide
  Antisense strand to SEQ ID NO: 290256
uacaccaaaggaagauccc

SEQ ID NO: 290258 - RNA, 19 nt, Artificial Sequence
  Description of Artificial Sequence: Synthetic oligonucleotide
  Sense strand starting at position 3888 of SEQ ID NO: 3730
uuugcuuucccagaucaug

SEQ ID NO: 290259 - RNA, 19 nt, Artificial Sequence
  Description of Artificial Sequence: Synthetic oligonucleotide
  Antisense strand to SEQ ID NO: 290258
caugaucugggaaagcaaa

SEQ ID NO: 290260 - RNA, 19 nt, Artificial Sequence
  Description of Artificial Sequence: Synthetic oligonucleotide
  Sense strand starting at position 3896 of SEQ ID NO: 3730
cccagaucaugaguugcuu

SEQ ID NO: 290261 - RNA, 19 nt, Artificial Sequence
  Description of Artificial Sequence: Synthetic oligonucleotide
  Antisense strand to SEQ ID NO: 290260
aagcaacucaugaucuggg

SEQ ID NO: 290262 - RNA, 19 nt, Artificial Sequence
  Description of Artificial Sequence: Synthetic oligonucleotide
  Sense strand starting at position 93 of SEQ ID NO: 3731
agguuaucacuuugaucau

SEQ ID NO: 290263 - RNA, 19 nt, Artificial Sequence
  Description of Artificial Sequence: Synthetic oligonucleotide
  Antisense strand to SEQ ID NO: 290262
augaucaaagugauaaccu

SEQ ID NO: 290264 - RNA, 19 nt, Artificial Sequence
  Description of Artificial Sequence: Synthetic oligonucleotide
  Sense strand starting at position 218 of SEQ ID NO: 3731
cucaacuguguguacagau

SEQ ID NO: 290265 - RNA, 19 nt, Artificial Sequence
  Description of Artificial Sequence: Synthetic oligonucleotide
  Antisense strand to SEQ ID NO: 290264
aucuguacacacaguugag

SEQ ID NO: 290266 - RNA, 19 nt, Artificial Sequence
  Description of Artificial Sequence: Synthetic oligonucleotide
  Sense strand starting at position 237 of SEQ ID NO: 3731
uuucuaagucguuaugaau

SEQ ID NO: 290267 - RNA, 19 nt, Artificial Sequence
  Description of Artificial Sequence: Synthetic oligonucleotide
  Antisense strand to SEQ ID NO: 290266
auucauaacgacuuagaaa

SEQ ID NO: 290268 - RNA, 19 nt, Artificial Sequence
  Description of Artificial Sequence: Synthetic oligonucleotide
  Sense strand starting at position 306 of SEQ ID NO: 3731
ggacaugcaucuccuguaa

SEQ ID NO: 290269 - RNA, 19 nt, Artificial Sequence
  Description of Artificial Sequence: Synthetic oligonucleotide
  Antisense strand to SEQ ID NO: 290268
uuacaggagaugcaugucc

SEQ ID NO: 290270 - RNA, 19 nt, Artificial Sequence
  Description of Artificial Sequence: Synthetic oligonucleotide
  Sense strand starting at position 362 of SEQ ID NO: 3731
ggcagcuucgugucacuuu

SEQ ID NO: 290271 - RNA, 19 nt, Artificial Sequence
  Description of Artificial Sequence: Synthetic oligonucleotide
  Antisense strand to SEQ ID NO: 290270
aaagugacacgaagcugcc

SEQ ID NO: 290272 - RNA, 19 nt, Artificial Sequence
  Description of Artificial Sequence: Synthetic oligonucleotide
  Sense strand starting at position 433 of SEQ ID NO: 3731
ggacacaucucuguccaca

SEQ ID NO: 290273 - RNA, 19 nt, Artificial Sequence
  Description of Artificial Sequence: Synthetic oligonucleotide
  Antisense strand to SEQ ID NO: 290272
uguggacagagaugugucc

SEQ ID NO: 290274 - RNA, 19 nt, Artificial Sequence
  Description of Artificial Sequence: Synthetic oligonucleotide
  Sense strand starting at position 764 of SEQ ID NO: 3731
cgcgcauucgacccaaacu

SEQ ID NO: 290275 - RNA, 19 nt, Artificial Sequence
  Description of Artificial Sequence: Synthetic oligonucleotide
  Antisense strand to SEQ ID NO: 290274
aguuugggucgaaugcgcg

SEQ ID NO: 290276 - RNA, 19 nt, Artificial Sequence
  Description of Artificial Sequence: Synthetic oligonucleotide
  Sense strand starting at position 934 of SEQ ID NO: 3731
aaucgcuguggucaagaaa

SEQ ID NO: 290277 - RNA, 19 nt, Artificial Sequence
  Description of Artificial Sequence: Synthetic oligonucleotide
  Antisense strand to SEQ ID NO: 290276
uuucuugaccacagcgauu

SEQ ID NO: 290278 - RNA, 19 nt, Artificial Sequence
  Description of Artificial Sequence: Synthetic oligonucleotide
  Sense strand starting at position 946 of SEQ ID NO: 3731
caagaaaguccuggaagcu

SEQ ID NO: 290279 - RNA, 19 nt, Artificial Sequence
  Description of Artificial Sequence: Synthetic oligonucleotide
  Antisense strand to SEQ ID NO: 290278
agcuuccaggacuuucuug

SEQ ID NO: 290280 - RNA, 19 nt, Artificial Sequence
  Description of Artificial Sequence: Synthetic oligonucleotide
  Sense strand starting at position 981 of SEQ ID NO: 3731
gggcgguuugcgguuaaca

SEQ ID NO: 290281 - RNA, 19 nt, Artificial Sequence
  Description of Artificial Sequence: Synthetic oligonucleotide
  Antisense strand to SEQ ID NO: 290280
uguuaaccgcaaaccgccc

SEQ ID NO: 290282 - RNA, 19 nt, Artificial Sequence
  Description of Artificial Sequence: Synthetic oligonucleotide
  Sense strand starting at position 2170 of SEQ ID NO: 3731
ugacguccucuggagaguu

SEQ ID NO: 290283 - RNA, 19 nt, Artificial Sequence
  Description of Artificial Sequence: Synthetic oligonucleotide
  Antisense strand to SEQ ID NO: 290282
aacucuccagaggacguca

SEQ ID NO: 290284 - RNA, 19 nt, Artificial Sequence
  Description of Artificial Sequence: Synthetic oligonucleotide
  Sense strand starting at position 2181 of SEQ ID NO: 3731
ggagaguuggaucgggcuu

SEQ ID NO: 290285 - RNA, 19 nt, Artificial Sequence
  Description of Artificial Sequence: Synthetic oligonucleotide
  Antisense strand to SEQ ID NO: 290284
aagcccgauccaacucucc

SEQ ID NO: 290286 - RNA, 19 nt, Artificial Sequence
  Description of Artificial Sequence: Synthetic oligonucleotide
  Sense strand starting at position 2417 of SEQ ID NO: 3731
uuucuuugcgacuacuaga

SEQ ID NO: 290287 - RNA, 19 nt, Artificial Sequence
  Description of Artificial Sequence: Synthetic oligonucleotide
  Antisense strand to SEQ ID NO: 290286
ucuaguagucgcaaagaaa

SEQ ID NO: 290288 - RNA, 19 nt, Artificial Sequence
  Description of Artificial Sequence: Synthetic oligonucleotide
  Sense strand starting at position 2509 of SEQ ID NO: 3731
uccugaguccuaugacaac

SEQ ID NO: 290289 - RNA, 19 nt, Artificial Sequence
  Description of Artificial Sequence: Synthetic oligonucleotide
  Antisense strand to SEQ ID NO: 290288
guugucauaggacucagga

SEQ ID NO: 290290 - RNA, 19 nt, Artificial Sequence
  Description of Artificial Sequence: Synthetic oligonucleotide
  Sense strand starting at position 2515 of SEQ ID NO: 3731
guccuaugacaacauuguu

SEQ ID NO: 290291 - RNA, 19 nt, Artificial Sequence
  Description of Artificial Sequence: Synthetic oligonucleotide
  Antisense strand to SEQ ID NO: 290290
aacaauguugucauaggac

SEQ ID NO: 290292 - RNA, 19 nt, Artificial Sequence
  Description of Artificial Sequence: Synthetic oligonucleotide
  Sense strand starting at position 2577 of SEQ ID NO: 3731
guuaaagggagaugaaguu

SEQ ID NO: 290293 - RNA, 19 nt, Artificial Sequence
  Description of Artificial Sequence: Synthetic oligonucleotide
  Antisense strand to SEQ ID NO: 290292
aacuucaucucccuuuaac

SEQ ID NO: 290294 - RNA, 19 nt, Artificial Sequence
  Description of Artificial Sequence: Synthetic oligonucleotide
  Sense strand starting at position 2605 of SEQ ID NO: 3731
cggguuucuugauuguaaa

SEQ ID NO: 290295 - RNA, 19 nt, Artificial Sequence
  Description of Artificial Sequence: Synthetic oligonucleotide
  Antisense strand to SEQ ID NO: 290294
uuuacaaucaagaaacccg

SEQ ID NO: 290296 - RNA, 19 nt, Artificial Sequence
  Description of Artificial Sequence: Synthetic oligonucleotide
  Sense strand starting at position 2783 of SEQ ID NO: 3731
ccguuuggucuucagggau

SEQ ID NO: 290297 - RNA, 19 nt, Artificial Sequence
  Description of Artificial Sequence: Synthetic oligonucleotide
  Antisense strand to SEQ ID NO: 290296
aucccugaagaccaaacgg

SEQ ID NO: 290298 - RNA, 19 nt, Artificial Sequence
  Description of Artificial Sequence: Synthetic oligonucleotide
  Sense strand starting at position 2797 of SEQ ID NO: 3731
gggaucuuccuuuggugua

SEQ ID NO: 290299 - RNA, 19 nt, Artificial Sequence
  Description of Artificial Sequence: Synthetic oligonucleotide
  Antisense strand to SEQ ID NO: 290298
uacaccaaaggaagauccc

SEQ ID NO: 290300 - RNA, 19 nt, Artificial Sequence
  Description of Artificial Sequence: Synthetic oligonucleotide
  Sense strand starting at position 3119 of SEQ ID NO: 3731
uuugcuuucccagaucaug

SEQ ID NO: 290301 - RNA, 19 nt, Artificial Sequence
  Description of Artificial Sequence: Synthetic oligonucleotide
  Antisense strand to SEQ ID NO: 290300
caugaucugggaaagcaaa

SEQ ID NO: 290302 - RNA, 19 nt, Artificial Sequence
  Description of Artificial Sequence: Synthetic oligonucleotide
  Sense strand starting at position 3127 of SEQ ID NO: 3731
cccagaucaugaguugcuu

SEQ ID NO: 290303 - RNA, 19 nt, Artificial Sequence
  Description of Artificial Sequence: Synthetic oligonucleotide
  Antisense strand to SEQ ID NO: 290302
aagcaacucaugaucuggg

SEQ ID NO: 290304 - RNA, 19 nt, Artificial Sequence
  Description of Artificial Sequence: Synthetic oligonucleotide
  Sense strand starting at position 3218 of SEQ ID NO: 3731
aggugugauuccuuaucga

SEQ ID NO: 290305 - RNA, 19 nt, Artificial Sequence
  Description of Artificial Sequence: Synthetic oligonucleotide
  Antisense strand to SEQ ID NO: 290304
ucgauaaggaaucacaccu

SEQ ID NO: 290306 - RNA, 19 nt, Artificial Sequence
  Description of Artificial Sequence: Synthetic oligonucleotide
  Sense strand starting at position 3221 of SEQ ID NO: 3731
ugugauuccuuaucgacau

SEQ ID NO: 290307 - RNA, 19 nt, Artificial Sequence
  Description of Artificial Sequence: Synthetic oligonucleotide
  Antisense strand to SEQ ID NO: 290306
augucgauaaggaaucaca

SEQ ID NO: 290308 - RNA, 19 nt, Artificial Sequence
  Description of Artificial Sequence: Synthetic oligonucleotide
  Sense strand starting at position 3391 of SEQ ID NO: 3731
aaguuaacuucugugaaag

SEQ ID NO: 290309 - RNA, 19 nt, Artificial Sequence
  Description of Artificial Sequence: Synthetic oligonucleotide
  Antisense strand to SEQ ID NO: 290308
cuuucacagaaguuaacuu

SEQ ID NO: 290310 - RNA, 19 nt, Artificial Sequence
  Description of Artificial Sequence: Synthetic oligonucleotide
  Sense strand starting at position 3392 of SEQ ID NO: 3731
aguuaacuucugugaaaga

SEQ ID NO: 290311 - RNA, 19 nt, Artificial Sequence
  Description of Artificial Sequence: Synthetic oligonucleotide
  Antisense strand to SEQ ID NO: 290310
ucuuucacagaaguuaacu

SEQ ID NO: 290312 - RNA, 19 nt, Artificial Sequence
  Description of Artificial Sequence: Synthetic oligonucleotide
  Sense strand starting at position 3399 of SEQ ID NO: 3731
uucugugaaagacgaauua

SEQ ID NO: 290313 - RNA, 19 nt, Artificial Sequence
  Description of Artificial Sequence: Synthetic oligonucleotide
  Antisense strand to SEQ ID NO: 290312
uaauucgucuuucacagaa

SEQ ID NO: 290314 - RNA, 19 nt, Artificial Sequence
  Description of Artificial Sequence: Synthetic oligonucleotide
  Sense strand starting at position 3469 of SEQ ID NO: 3731
cucauugaaggcugaauga

SEQ ID NO: 290315 - RNA, 19 nt, Artificial Sequence
  Description of Artificial Sequence: Synthetic oligonucleotide
  Antisense strand to SEQ ID NO: 290314
ucauucagccuucaaugag

SEQ ID NO: 290316 - RNA, 19 nt, Artificial Sequence
  Description of Artificial Sequence: Synthetic oligonucleotide
  Sense strand starting at position 3506 of SEQ ID NO: 3731
uaaacaguaguuugguuaa

SEQ ID NO: 290317 - RNA, 19 nt, Artificial Sequence
  Description of Artificial Sequence: Synthetic oligonucleotide
  Antisense strand to SEQ ID NO: 290316
uuaaccaaacuacuguuua

SEQ ID NO: 290318 - RNA, 19 nt, Artificial Sequence
  Description of Artificial Sequence: Synthetic oligonucleotide
  Sense strand starting at position 3509 of SEQ ID NO: 3731
acaguaguuugguuaagga

SEQ ID NO: 290319 - RNA, 19 nt, Artificial Sequence
  Description of Artificial Sequence: Synthetic oligonucleotide
  Antisense strand to SEQ ID NO: 290318
uccuuaaccaaacuacugu

SEQ ID NO: 290320 - RNA, 19 nt, Artificial Sequence
  Description of Artificial Sequence: Synthetic oligonucleotide
  Sense strand starting at position 3519 of SEQ ID NO: 3731
gguuaaggaugguuacuaa

SEQ ID NO: 290321 - RNA, 19 nt, Artificial Sequence
  Description of Artificial Sequence: Synthetic oligonucleotide
  Antisense strand to SEQ ID NO: 290320
uuaguaaccauccuuaacc

SEQ ID NO: 290322 - RNA, 19 nt, Artificial Sequence
  Description of Artificial Sequence: Synthetic oligonucleotide
  Sense strand starting at position 3543 of SEQ ID NO: 3731
auuccauucccuuguauag

SEQ ID NO: 290323 - RNA, 19 nt, Artificial Sequence
  Description of Artificial Sequence: Synthetic oligonucleotide
  Antisense strand to SEQ ID NO: 290322
cuauacaagggaauggaau

SEQ ID NO: 290324 - RNA, 19 nt, Artificial Sequence
  Description of Artificial Sequence: Synthetic oligonucleotide
  Sense strand starting at position 3567 of SEQ ID NO: 3731
guugguauugucgauuaug

SEQ ID NO: 290325 - RNA, 19 nt, Artificial Sequence
  Description of Artificial Sequence: Synthetic oligonucleotide
  Antisense strand to SEQ ID NO: 290324
cauaaucgacaauaccaac

SEQ ID NO: 290326 - RNA, 19 nt, Artificial Sequence
  Description of Artificial Sequence: Synthetic oligonucleotide
  Sense strand starting at position 3588 of SEQ ID NO: 3731
ggcauaaugcaucaugguu

SEQ ID NO: 290327 - RNA, 19 nt, Artificial Sequence
  Description of Artificial Sequence: Synthetic oligonucleotide
  Antisense strand to SEQ ID NO: 290326
aaccaugaugcauuaugcc

SEQ ID NO: 290328 - RNA, 19 nt, Artificial Sequence
  Description of Artificial Sequence: Synthetic oligonucleotide
  Sense strand starting at position 3618 of SEQ ID NO: 3731
ggaaguguauccuugcaua

SEQ ID NO: 290329 - RNA, 19 nt, Artificial Sequence
  Description of Artificial Sequence: Synthetic oligonucleotide
  Antisense strand to SEQ ID NO: 290328
uaugcaaggauacacuucc

SEQ ID NO: 290330 - RNA, 19 nt, Artificial Sequence
  Description of Artificial Sequence: Synthetic oligonucleotide
  Sense strand starting at position 3885 of SEQ ID NO: 3731
gaagauuuguucguacugu

SEQ ID NO: 290331 - RNA, 19 nt, Artificial Sequence
  Description of Artificial Sequence: Synthetic oligonucleotide
  Antisense strand to SEQ ID NO: 290330
acaguacgaacaaaucuuc

SEQ ID NO: 290332 - RNA, 19 nt, Artificial Sequence
  Description of Artificial Sequence: Synthetic oligonucleotide
  Sense strand starting at position 3908 of SEQ ID NO: 3731
cuuaguaaccucgguauaa

SEQ ID NO: 290333 - RNA, 19 nt, Artificial Sequence
  Description of Artificial Sequence: Synthetic oligonucleotide
  Antisense strand to SEQ ID NO: 290332
uuauaccgagguuacuaag

SEQ ID NO: 290334 - RNA, 19 nt, Artificial Sequence
  Description of Artificial Sequence: Synthetic oligonucleotide
  Sense strand starting at position 3909 of SEQ ID NO: 3731
uuaguaaccucgguauaag

SEQ ID NO: 290335 - RNA, 19 nt, Artificial Sequence
  Description of Artificial Sequence: Synthetic oligonucleotide
  Antisense strand to SEQ ID NO: 290334
cuuauaccgagguuacuaa

SEQ ID NO: 290336 - RNA, 19 nt, Artificial Sequence
  Description of Artificial Sequence: Synthetic oligonucleotide
  Sense strand starting at position 3910 of SEQ ID NO: 3731
uaguaaccucgguauaagu

SEQ ID NO: 290337 - RNA, 19 nt, Artificial Sequence
  Description of Artificial Sequence: Synthetic oligonucleotide
  Antisense strand to SEQ ID NO: 290336
acuuauaccgagguuacua

SEQ ID NO: 290338 - RNA, 19 nt, Artificial Sequence
  Description of Artificial Sequence: Synthetic oligonucleotide
  Sense strand starting at position 3912 of SEQ ID NO: 3731
guaaccucgguauaaguuu

SEQ ID NO: 290339 - RNA, 19 nt, Artificial Sequence
  Description of Artificial Sequence: Synthetic oligonucleotide
  Antisense strand to SEQ ID NO: 290338
aaacuuauaccgagguuac

SEQ ID NO: 290340 - RNA, 19 nt, Artificial Sequence
  Description of Artificial Sequence: Synthetic oligonucleotide
  Sense strand starting at position 3983 of SEQ ID NO: 3731
gugcuuauggcuucucuuu

SEQ ID NO: 290341 - RNA, 19 nt, Artificial Sequence
  Description of Artificial Sequence: Synthetic oligonucleotide
  Antisense strand to SEQ ID NO: 290340
aaagagaagccauaagcac

SEQ ID NO: 290342 - RNA, 19 nt, Artificial Sequence
  Description of Artificial Sequence: Synthetic oligonucleotide
  Sense strand starting at position 40 of SEQ ID NO: 3733
ucugcuuuccugggaggga

SEQ ID NO: 290343 - RNA, 19 nt, Artificial Sequence
  Description of Artificial Sequence: Synthetic oligonucleotide
  Antisense strand to SEQ ID NO: 290342
ucccucccaggaaagcaga

SEQ ID NO: 290344 - RNA, 19 nt, Artificial Sequence
  Description of Artificial Sequence: Synthetic oligonucleotide
  Sense strand starting at position 115 of SEQ ID NO: 3733
gucucagauaccuggaagu

SEQ ID NO: 290345 - RNA, 19 nt, Artificial Sequence
  Description of Artificial Sequence: Synthetic oligonucleotide
  Antisense strand to SEQ ID NO: 290344
acuuccagguaucugagac

SEQ ID NO: 290346 - RNA, 19 nt, Artificial Sequence
  Description of Artificial Sequence: Synthetic oligonucleotide
  Sense strand starting at position 267 of SEQ ID NO: 3733
gcuggauucuguucccaua

SEQ ID NO: 290347 - RNA, 19 nt, Artificial Sequence
  Description of Artificial Sequence: Synthetic oligonucleotide
  Antisense strand to SEQ ID NO: 290346
uaugggaacagaauccagc

SEQ ID NO: 290348 - RNA, 19 nt, Artificial Sequence
  Description of Artificial Sequence: Synthetic oligonucleotide
  Sense strand starting at position 269 of SEQ ID NO: 3733
uggauucuguucccauaau

SEQ ID NO: 290349 - RNA, 19 nt, Artificial Sequence
  Description of Artificial Sequence: Synthetic oligonucleotide
  Antisense strand to SEQ ID NO: 290348
auuaugggaacagaaucca

SEQ ID NO: 290350 - RNA, 19 nt, Artificial Sequence
  Description of Artificial Sequence: Synthetic oligonucleotide
  Sense strand starting at position 286 of SEQ ID NO: 3733
auaaguuucucuccagguu

SEQ ID NO: 290351 - RNA, 19 nt, Artificial Sequence
  Description of Artificial Sequence: Synthetic oligonucleotide
  Antisense strand to SEQ ID NO: 290350
aaccuggagagaaacuuau

SEQ ID NO: 290352 - RNA, 19 nt, Artificial Sequence
  Description of Artificial Sequence: Synthetic oligonucleotide
  Sense strand starting at position 289 of SEQ ID NO: 3733
aguuucucuccagguuuga

SEQ ID NO: 290353 - RNA, 19 nt, Artificial Sequence
  Description of Artificial Sequence: Synthetic oligonucleotide
  Antisense strand to SEQ ID NO: 290352
ucaaaccuggagagaaacu

SEQ ID NO: 290354 - RNA, 19 nt, Artificial Sequence
  Description of Artificial Sequence: Synthetic oligonucleotide
  Sense strand starting at position 334 of SEQ ID NO: 3733
guggcaagggccuaaugau

SEQ ID NO: 290355 - RNA, 19 nt, Artificial Sequence
  Description of Artificial Sequence: Synthetic oligonucleotide
  Antisense strand to SEQ ID NO: 290354
aucauuaggcccuugccac

SEQ ID NO: 290356 - RNA, 19 nt, Artificial Sequence
  Description of Artificial Sequence: Synthetic oligonucleotide
  Sense strand starting at position 341 of SEQ ID NO: 3733
gggccuaaugaucaaccuu

SEQ ID NO: 290357 - RNA, 19 nt, Artificial Sequence
  Description of Artificial Sequence: Synthetic oligonucleotide
  Antisense strand to SEQ ID NO: 290356
aagguugaucauuaggccc

SEQ ID NO: 290358 - RNA, 19 nt, Artificial Sequence
  Description of Artificial Sequence: Synthetic oligonucleotide
  Sense strand starting at position 369 of SEQ ID NO: 3733
ucaggaaguccugguuuac

SEQ ID NO: 290359 - RNA, 19 nt, Artificial Sequence
  Description of Artificial Sequence: Synthetic oligonucleotide
  Antisense strand to SEQ ID NO: 290358
guaaaccaggacuuccuga

SEQ ID NO: 290360 - RNA, 19 nt, Artificial Sequence
  Description of Artificial Sequence: Synthetic oligonucleotide
  Sense strand starting at position 584 of SEQ ID NO: 3733
ucuggauccuuucuaagga

SEQ ID NO: 290361 - RNA, 19 nt, Artificial Sequence
  Description of Artificial Sequence: Synthetic oligonucleotide
  Antisense strand to SEQ ID NO: 290360
uccuuagaaaggauccaga

SEQ ID NO: 290362 - RNA, 19 nt, Artificial Sequence
  Description of Artificial Sequence: Synthetic oligonucleotide
  Sense strand starting at position 666 of SEQ ID NO: 3733
caggucauucuagggaagu

SEQ ID NO: 290363 - RNA, 19 nt, Artificial Sequence
  Description of Artificial Sequence: Synthetic oligonucleotide
  Antisense strand to SEQ ID NO: 290362
acuucccuagaaugaccug

SEQ ID NO: 290364 - RNA, 19 nt, Artificial Sequence
  Description of Artificial Sequence: Synthetic oligonucleotide
  Sense strand starting at position 668 of SEQ ID NO: 3733
ggucauucuagggaaguuc

SEQ ID NO: 290365 - RNA, 19 nt, Artificial Sequence
  Description of Artificial Sequence: Synthetic oligonucleotide
  Antisense strand to SEQ ID NO: 290364
gaacuucccuagaaugacc

SEQ ID NO: 290366 - RNA, 19 nt, Artificial Sequence
  Description of Artificial Sequence: Synthetic oligonucleotide
  Sense strand starting at position 709 of SEQ ID NO: 3733
acacuuuggccuggagcua

SEQ ID NO: 290367 - RNA, 19 nt, Artificial Sequence
  Description of Artificial Sequence: Synthetic oligonucleotide
  Antisense strand to SEQ ID NO: 290366
uagcuccaggccaaagugu

SEQ ID NO: 290368 - RNA, 19 nt, Artificial Sequence
  Description of Artificial Sequence: Synthetic oligonucleotide
  Sense strand starting at position 760 of SEQ ID NO: 3733
gcaagaaaucugcaaaucc

SEQ ID NO: 290369 - RNA, 19 nt, Artificial Sequence
  Description of Artificial Sequence: Synthetic oligonucleotide
  Antisense strand to SEQ ID NO: 290368
ggauuugcagauuucuugc

SEQ ID NO: 290370 - RNA, 19 nt, Artificial Sequence
  Description of Artificial Sequence: Synthetic oligonucleotide
  Sense strand starting at position 911 of SEQ ID NO: 3733
ccgaguaguuaguugacaa

SEQ ID NO: 290371 - RNA, 19 nt, Artificial Sequence
  Description of Artificial Sequence: Synthetic oligonucleotide
  Antisense strand to SEQ ID NO: 290370
uugucaacuaacuacucgg

SEQ ID NO: 290372 - RNA, 19 nt, Artificial Sequence
  Description of Artificial Sequence: Synthetic oligonucleotide
  Sense strand starting at position 912 of SEQ ID NO: 3733
cgaguaguuaguugacaac

SEQ ID NO: 290373 - RNA, 19 nt, Artificial Sequence
  Description of Artificial Sequence: Synthetic oligonucleotide
  Antisense strand to SEQ ID NO: 290372
guugucaacuaacuacucg

SEQ ID NO: 290374 - RNA, 19 nt, Artificial Sequence
  Description of Artificial Sequence: Synthetic oligonucleotide
  Sense strand starting at position 922 of SEQ ID NO: 3733
guugacaacuuccugaauu

SEQ ID NO: 290375 - RNA, 19 nt, Artificial Sequence
  Description of Artificial Sequence: Synthetic oligonucleotide
  Antisense strand to SEQ ID NO: 290374
aauucaggaaguugucaac

SEQ ID NO: 290376 - RNA, 19 nt, Artificial Sequence
  Description of Artificial Sequence: Synthetic oligonucleotide
  Sense strand starting at position 939 of SEQ ID NO: 3733
uugcucugcccgcuuuaga

SEQ ID NO: 290377 - RNA, 19 nt, Artificial Sequence
  Description of Artificial Sequence: Synthetic oligonucleotide
  Antisense strand to SEQ ID NO: 290376
ucuaaagcgggcagagcaa

SEQ ID NO: 290378 - RNA, 19 nt, Artificial Sequence
  Description of Artificial Sequence: Synthetic oligonucleotide
  Sense strand starting at position 972 of SEQ ID NO: 3733
ccgggucuccggcauagaa

SEQ ID NO: 290379 - RNA, 19 nt, Artificial Sequence
  Description of Artificial Sequence: Synthetic oligonucleotide
  Antisense strand to SEQ ID NO: 290378
uucuaugccggagacccgg

SEQ ID NO: 290380 - RNA, 19 nt, Artificial Sequence
  Description of Artificial Sequence: Synthetic oligonucleotide
  Sense strand starting at position 1467 of SEQ ID NO: 3733
cgugguugugcggcgagaa

SEQ ID NO: 290381 - RNA, 19 nt, Artificial Sequence
  Description of Artificial Sequence: Synthetic oligonucleotide
  Antisense strand to SEQ ID NO: 290380
uucucgccgcacaaccacg

SEQ ID NO: 290382 - RNA, 19 nt, Artificial Sequence
  Description of Artificial Sequence: Synthetic oligonucleotide
  Sense strand starting at position 1665 of SEQ ID NO: 3733
ccacuugcuccugcgugaa

SEQ ID NO: 290383 - RNA, 19 nt, Artificial Sequence
  Description of Artificial Sequence: Synthetic oligonucleotide
  Antisense strand to SEQ ID NO: 290382
uucacgcaggagcaagugg

SEQ ID NO: 290384 - RNA, 19 nt, Artificial Sequence
  Description of Artificial Sequence: Synthetic oligonucleotide
  Sense strand starting at position 2146 of SEQ ID NO: 3733
gagucaaauuauucgccau

SEQ ID NO: 290385 - RNA, 19 nt, Artificial Sequence
  Description of Artificial Sequence: Synthetic oligonucleotide
  Antisense strand to SEQ ID NO: 290384
auggcgaauaauuugacuc

SEQ ID NO: 290386 - RNA, 19 nt, Artificial Sequence
  Description of Artificial Sequence: Synthetic oligonucleotide
  Sense strand starting at position 2149 of SEQ ID NO: 3733
ucaaauuauucgccaugga

SEQ ID NO: 290387 - RNA, 19 nt, Artificial Sequence
  Description of Artificial Sequence: Synthetic oligonucleotide
  Antisense strand to SEQ ID NO: 290386
uccauggcgaauaauuuga

SEQ ID NO: 290388 - RNA, 19 nt, Artificial Sequence
  Description of Artificial Sequence: Synthetic oligonucleotide
  Sense strand starting at position 2150 of SEQ ID NO: 3733
caaauuauucgccauggag

SEQ ID NO: 290389 - RNA, 19 nt, Artificial Sequence
  Description of Artificial Sequence: Synthetic oligonucleotide
  Antisense strand to SEQ ID NO: 290388
cuccauggcgaauaauuug

SEQ ID NO: 290390 - RNA, 19 nt, Artificial Sequence
  Description of Artificial Sequence: Synthetic oligonucleotide
  Sense strand starting at position 2152 of SEQ ID NO: 3733
aauuauucgccauggagac

SEQ ID NO: 290391 - RNA, 19 nt, Artificial Sequence
  Description of Artificial Sequence: Synthetic oligonucleotide
  Antisense strand to SEQ ID NO: 290390
gucuccauggcgaauaauu

SEQ ID NO: 290392 - RNA, 19 nt, Artificial Sequence
  Description of Artificial Sequence: Synthetic oligonucleotide
  Sense strand starting at position 2537 of SEQ ID NO: 3733
ggcagcuuuggcuaggaga

SEQ ID NO: 290393 - RNA, 19 nt, Artificial Sequence
  Description of Artificial Sequence: Synthetic oligonucleotide
  Antisense strand to SEQ ID NO: 290392
ucuccuagccaaagcugcc

SEQ ID NO: 290394 - RNA, 19 nt, Artificial Sequence
  Description of Artificial Sequence: Synthetic oligonucleotide
  Sense strand starting at position 2841 of SEQ ID NO: 3733
aaucgacuucccggaggau

SEQ ID NO: 290395 - RNA, 19 nt, Artificial Sequence
  Description of Artificial Sequence: Synthetic oligonucleotide
  Antisense strand to SEQ ID NO: 290394
auccuccgggaagucgauu

SEQ ID NO: 290396 - RNA, 19 nt, Artificial Sequence
  Description of Artificial Sequence: Synthetic oligonucleotide
  Sense strand starting at position 2999 of SEQ ID NO: 3733
ccguguggccucuauggaa

SEQ ID NO: 290397 - RNA, 19 nt, Artificial Sequence
  Description of Artificial Sequence: Synthetic oligonucleotide
  Antisense strand to SEQ ID NO: 290396
uuccauagaggccacacgg

SEQ ID NO: 290398 - RNA, 19 nt, Artificial Sequence
  Description of Artificial Sequence: Synthetic oligonucleotide
  Sense strand starting at position 3362 of SEQ ID NO: 3733
ugaggauggguguguucuu

SEQ ID NO: 290399 - RNA, 19 nt, Artificial Sequence
  Description of Artificial Sequence: Synthetic oligonucleotide
  Antisense strand to SEQ ID NO: 290398
aagaacacacccauccuca

SEQ ID NO: 290400 - RNA, 19 nt, Artificial Sequence
  Description of Artificial Sequence: Synthetic oligonucleotide
  Sense strand starting at position 3372 of SEQ ID NO: 3733
uguguucuugcucuacguu

SEQ ID NO: 290401 - RNA, 19 nt, Artificial Sequence
  Description of Artificial Sequence: Synthetic oligonucleotide
  Antisense strand to SEQ ID NO: 290400
aacguagagcaagaacaca

SEQ ID NO: 290402 - RNA, 19 nt, Artificial Sequence
  Description of Artificial Sequence: Synthetic oligonucleotide
  Sense strand starting at position 3546 of SEQ ID NO: 3733
ccagucuagggcuauggaa

SEQ ID NO: 290403 - RNA, 19 nt, Artificial Sequence
  Description of Artificial Sequence: Synthetic oligonucleotide
  Antisense strand to SEQ ID NO: 290402
uuccauagcccuagacugg

SEQ ID NO: 290404 - RNA, 19 nt, Artificial Sequence
  Description of Artificial Sequence: Synthetic oligonucleotide
  Sense strand starting at position 3610 of SEQ ID NO: 3733
uauggaguuugugcuagga

SEQ ID NO: 290405 - RNA, 19 nt, Artificial Sequence
  Description of Artificial Sequence: Synthetic oligonucleotide
  Antisense strand to SEQ ID NO: 290404
uccuagcacaaacuccaua

SEQ ID NO: 290406 - RNA, 19 nt, Artificial Sequence
  Description of Artificial Sequence: Synthetic oligonucleotide
  Sense strand starting at position 3698 of SEQ ID NO: 3733
auuuaugccuuuguguuua

SEQ ID NO: 290407 - RNA, 19 nt, Artificial Sequence
  Description of Artificial Sequence: Synthetic oligonucleotide
  Antisense strand to SEQ ID NO: 290406
uaaacacaaaggcauaaau

SEQ ID NO: 290408 - RNA, 19 nt, Artificial Sequence
  Description of Artificial Sequence: Synthetic oligonucleotide
  Sense strand starting at position 3764 of SEQ ID NO: 3733
ccggaaguccuuugggagu

SEQ ID NO: 290409 - RNA, 19 nt, Artificial Sequence
  Description of Artificial Sequence: Synthetic oligonucleotide
  Antisense strand to SEQ ID NO: 290408
acucccaaaggacuuccgg

SEQ ID NO: 290410 - RNA, 19 nt, Artificial Sequence
  Description of Artificial Sequence: Synthetic oligonucleotide
  Sense strand starting at position 3777 of SEQ ID NO: 3733
gggaguguuguaggcauga

SEQ ID NO: 290411 - RNA, 19 nt, Artificial Sequence
  Description of Artificial Sequence: Synthetic oligonucleotide
  Antisense strand to SEQ ID NO: 290410
ucaugccuacaacacuccc

SEQ ID NO: 290412 - RNA, 19 nt, Artificial Sequence
  Description of Artificial Sequence: Synthetic oligonucleotide
  Sense strand starting at position 3779 of SEQ ID NO: 3733
gaguguuguaggcaugaga

SEQ ID NO: 290413 - RNA, 19 nt, Artificial Sequence
  Description of Artificial Sequence: Synthetic oligonucleotide
  Antisense strand to SEQ ID NO: 290412
ucucaugccuacaacacuc

SEQ ID NO: 290414 - RNA, 19 nt, Artificial Sequence
  Description of Artificial Sequence: Synthetic oligonucleotide
  Sense strand starting at position 3782 of SEQ ID NO: 3733
uguuguaggcaugagagaa

SEQ ID NO: 290415 - RNA, 19 nt, Artificial Sequence
  Description of Artificial Sequence: Synthetic oligonucleotide
  Antisense strand to SEQ ID NO: 290414
uucucucaugccuacaaca

SEQ ID NO: 290416 - RNA, 19 nt, Artificial Sequence
  Description of Artificial Sequence: Synthetic oligonucleotide
  Sense strand starting at position 3914 of SEQ ID NO: 3733
ggaagcuuucugcagaaau

SEQ ID NO: 290417 - RNA, 19 nt, Artificial Sequence
  Description of Artificial Sequence: Synthetic oligonucleotide
  Antisense strand to SEQ ID NO: 290416
auuucugcagaaagcuucc

SEQ ID NO: 290418 - RNA, 19 nt, Artificial Sequence
  Description of Artificial Sequence: Synthetic oligonucleotide
  Sense strand starting at position 3924 of SEQ ID NO: 3733
ugcagaaauccagguggca

SEQ ID NO: 290419 - RNA, 19 nt, Artificial Sequence
  Description of Artificial Sequence: Synthetic oligonucleotide
  Antisense strand to SEQ ID NO: 290418
ugccaccuggauuucugca

SEQ ID NO: 290420 - RNA, 19 nt, Artificial Sequence
  Description of Artificial Sequence: Synthetic oligonucleotide
  Sense strand starting at position 3942 of SEQ ID NO: 3733
aucuuuagagucuguaucu

SEQ ID NO: 290421 - RNA, 19 nt, Artificial Sequence
  Description of Artificial Sequence: Synthetic oligonucleotide
  Antisense strand to SEQ ID NO: 290420
agauacagacucuaaagau

SEQ ID NO: 290422 - RNA, 19 nt, Artificial Sequence
  Description of Artificial Sequence: Synthetic oligonucleotide
  Sense strand starting at position 80 of SEQ ID NO: 3734
gguccugcucccugaagua

SEQ ID NO: 290423 - RNA, 19 nt, Artificial Sequence
  Description of Artificial Sequence: Synthetic oligonucleotide
  Antisense strand to SEQ ID NO: 290422
uacuucagggagcaggacc

SEQ ID NO: 290424 - RNA, 19 nt, Artificial Sequence
  Description of Artificial Sequence: Synthetic oligonucleotide
  Sense strand starting at position 110 of SEQ ID NO: 3734
gggccuuccuggcuggaua

SEQ ID NO: 290425 - RNA, 19 nt, Artificial Sequence
  Description of Artificial Sequence: Synthetic oligonucleotide
  Antisense strand to SEQ ID NO: 290424
uauccagccaggaaggccc

SEQ ID NO: 290426 - RNA, 19 nt, Artificial Sequence
  Description of Artificial Sequence: Synthetic oligonucleotide
  Sense strand starting at position 268 of SEQ ID NO: 3734
uuggucaagcccuauacaa

SEQ ID NO: 290427 - RNA, 19 nt, Artificial Sequence
  Description of Artificial Sequence: Synthetic oligonucleotide
  Antisense strand to SEQ ID NO: 290426
uuguauagggcuugaccaa

SEQ ID NO: 290428 - RNA, 19 nt, Artificial Sequence
  Description of Artificial Sequence: Synthetic oligonucleotide
  Sense strand starting at position 270 of SEQ ID NO: 3734
ggucaagcccuauacaauu

SEQ ID NO: 290429 - RNA, 19 nt, Artificial Sequence
  Description of Artificial Sequence: Synthetic oligonucleotide
  Antisense strand to SEQ ID NO: 290428
aauuguauagggcuugacc

SEQ ID NO: 290430 - RNA, 19 nt, Artificial Sequence
  Description of Artificial Sequence: Synthetic oligonucleotide
  Sense strand starting at position 291 of SEQ ID NO: 3734
gugacuuuguggccaacuu

SEQ ID NO: 290431 - RNA, 19 nt, Artificial Sequence
  Description of Artificial Sequence: Synthetic oligonucleotide
  Antisense strand to SEQ ID NO: 290430
aaguuggccacaaagucac

SEQ ID NO: 290432 - RNA, 19 nt, Artificial Sequence
  Description of Artificial Sequence: Synthetic oligonucleotide
  Sense strand starting at position 357 of SEQ ID NO: 3734
agggauucuccucggcuga

SEQ ID NO: 290433 - RNA, 19 nt, Artificial Sequence
  Description of Artificial Sequence: Synthetic oligonucleotide
  Antisense strand to SEQ ID NO: 290432
ucagccgaggagaaucccu

SEQ ID NO: 290434 - RNA, 19 nt, Artificial Sequence
  Description of Artificial Sequence: Synthetic oligonucleotide
  Sense strand starting at position 358 of SEQ ID NO: 3734
gggauucuccucggcugaa

SEQ ID NO: 290435 - RNA, 19 nt, Artificial Sequence
  Description of Artificial Sequence: Synthetic oligonucleotide
  Antisense strand to SEQ ID NO: 290434
uucagccgaggagaauccc

SEQ ID NO: 290436 - RNA, 19 nt, Artificial Sequence
  Description of Artificial Sequence: Synthetic oligonucleotide
  Sense strand starting at position 359 of SEQ ID NO: 3734
ggauucuccucggcugaaa

SEQ ID NO: 290437 - RNA, 19 nt, Artificial Sequence
  Description of Artificial Sequence: Synthetic oligonucleotide
  Antisense strand to SEQ ID NO: 290436
uuucagccgaggagaaucc

SEQ ID NO: 290438 - RNA, 19 nt, Artificial Sequence
  Description of Artificial Sequence: Synthetic oligonucleotide
  Sense strand starting at position 625 of SEQ ID NO: 3734
ggcaaagagugcuuuccuu

SEQ ID NO: 290439 - RNA, 19 nt, Artificial Sequence
  Description of Artificial Sequence: Synthetic oligonucleotide
  Antisense strand to SEQ ID NO: 290438
aaggaaagcacucuuugcc

SEQ ID NO: 290440 - RNA, 19 nt, Artificial Sequence
  Description of Artificial Sequence: Synthetic oligonucleotide
  Sense strand starting at position 765 of SEQ ID NO: 3734
acucucugcccugacgaaa

SEQ ID NO: 290441 - RNA, 19 nt, Artificial Sequence
  Description of Artificial Sequence: Synthetic oligonucleotide
  Antisense strand to SEQ ID NO: 290440
uuucgucagggcagagagu

SEQ ID NO: 290442 - RNA, 19 nt, Artificial Sequence
  Description of Artificial Sequence: Synthetic oligonucleotide
  Sense strand starting at position 854 of SEQ ID NO: 3734
gcggaaacuuucuccgacu

SEQ ID NO: 290443 - RNA, 19 nt, Artificial Sequence
  Description of Artificial Sequence: Synthetic oligonucleotide
  Antisense strand to SEQ ID NO: 290442
agucggagaaaguuuccgc

SEQ ID NO: 290444 - RNA, 19 nt, Artificial Sequence
  Description of Artificial Sequence: Synthetic oligonucleotide
  Sense strand starting at position 2128 of SEQ ID NO: 3734
cagcgauuccaccgcaauc

SEQ ID NO: 290445 - RNA, 19 nt, Artificial Sequence
  Description of Artificial Sequence: Synthetic oligonucleotide
  Antisense strand to SEQ ID NO: 290444
gauugcgguggaaucgcug

SEQ ID NO: 290446 - RNA, 19 nt, Artificial Sequence
  Description of Artificial Sequence: Synthetic oligonucleotide
  Sense strand starting at position 2293 of SEQ ID NO: 3734
aaucaauaccgagaacgua

SEQ ID NO: 290447 - RNA, 19 nt, Artificial Sequence
  Description of Artificial Sequence: Synthetic oligonucleotide
  Antisense strand to SEQ ID NO: 290446
uacguucucgguauugauu

SEQ ID NO: 290448 - RNA, 19 nt, Artificial Sequence
  Description of Artificial Sequence: Synthetic oligonucleotide
  Sense strand starting at position 2472 of SEQ ID NO: 3734
uaccgcugucucugagacu

SEQ ID NO: 290449 - RNA, 19 nt, Artificial Sequence
  Description of Artificial Sequence: Synthetic oligonucleotide
  Antisense strand to SEQ ID NO: 290448
agucucagagacagcggua

SEQ ID NO: 290450 - RNA, 19 nt, Artificial Sequence
  Description of Artificial Sequence: Synthetic oligonucleotide
  Sense strand starting at position 2540 of SEQ ID NO: 3734
ugggcagaguuguugaaug

SEQ ID NO: 290451 - RNA, 19 nt, Artificial Sequence
  Description of Artificial Sequence: Synthetic oligonucleotide
  Antisense strand to SEQ ID NO: 290450
cauucaacaacucugccca

SEQ ID NO: 290452 - RNA, 19 nt, Artificial Sequence
  Description of Artificial Sequence: Synthetic oligonucleotide
  Sense strand starting at position 2545 of SEQ ID NO: 3734
agaguuguugaaugggaug

SEQ ID NO: 290453 - RNA, 19 nt, Artificial Sequence
  Description of Artificial Sequence: Synthetic oligonucleotide
  Antisense strand to SEQ ID NO: 290452
caucccauucaacaacucu

SEQ ID NO: 290454 - RNA, 19 nt, Artificial Sequence
  Description of Artificial Sequence: Synthetic oligonucleotide
  Sense strand starting at position 2550 of SEQ ID NO: 3734
uguugaaugggaugugcaa

SEQ ID NO: 290455 - RNA, 19 nt, Artificial Sequence
  Description of Artificial Sequence: Synthetic oligonucleotide
  Antisense strand to SEQ ID NO: 290454
uugcacaucccauucaaca

SEQ ID NO: 290456 - RNA, 19 nt, Artificial Sequence
  Description of Artificial Sequence: Synthetic oligonucleotide
  Sense strand starting at position 2552 of SEQ ID NO: 3734
uugaaugggaugugcaauu

SEQ ID NO: 290457 - RNA, 19 nt, Artificial Sequence
  Description of Artificial Sequence: Synthetic oligonucleotide
  Antisense strand to SEQ ID NO: 290456
aauugcacaucccauucaa

SEQ ID NO: 290458 - RNA, 19 nt, Artificial Sequence
  Description of Artificial Sequence: Synthetic oligonucleotide
  Sense strand starting at position 2697 of SEQ ID NO: 3734
ccucuuucugccuauguga

SEQ ID NO: 290459 - RNA, 19 nt, Artificial Sequence
  Description of Artificial Sequence: Synthetic oligonucleotide
  Antisense strand to SEQ ID NO: 290458
ucacauaggcagaaagagg

SEQ ID NO: 290460 - RNA, 19 nt, Artificial Sequence
  Description of Artificial Sequence: Synthetic oligonucleotide
  Sense strand starting at position 2704 of SEQ ID NO: 3734
cugccuaugugagcacuaa

SEQ ID NO: 290461 - RNA, 19 nt, Artificial Sequence
  Description of Artificial Sequence: Synthetic oligonucleotide
  Antisense strand to SEQ ID NO: 290460
uuagugcucacauaggcag

SEQ ID NO: 290462 - RNA, 19 nt, Artificial Sequence
  Description of Artificial Sequence: Synthetic oligonucleotide
  Sense strand starting at position 2705 of SEQ ID NO: 3734
ugccuaugugagcacuaau

SEQ ID NO: 290463 - RNA, 19 nt, Artificial Sequence
  Description of Artificial Sequence: Synthetic oligonucleotide
  Antisense strand to SEQ ID NO: 290462
auuagugcucacauaggca

SEQ ID NO: 290464 - RNA, 19 nt, Artificial Sequence
  Description of Artificial Sequence: Synthetic oligonucleotide
  Sense strand starting at position 2708 of SEQ ID NO: 3734
cuaugugagcacuaauagu

SEQ ID NO: 290465 - RNA, 19 nt, Artificial Sequence
  Description of Artificial Sequence: Synthetic oligonucleotide
  Antisense strand to SEQ ID NO: 290464
acuauuagugcucacauag

SEQ ID NO: 290466 - RNA, 19 nt, Artificial Sequence
  Description of Artificial Sequence: Synthetic oligonucleotide
  Sense strand starting at position 2717 of SEQ ID NO: 3734
cacuaauaguggcaaggaa

SEQ ID NO: 290467 - RNA, 19 nt, Artificial Sequence
  Description of Artificial Sequence: Synthetic oligonucleotide
  Antisense strand to SEQ ID NO: 290466
uuccuugccacuauuagug

SEQ ID NO: 290468 - RNA, 19 nt, Artificial Sequence
  Description of Artificial Sequence: Synthetic oligonucleotide
  Sense strand starting at position 3048 of SEQ ID NO: 3734
cucuuuguuucuucccaga

SEQ ID NO: 290469 - RNA, 19 nt, Artificial Sequence
  Description of Artificial Sequence: Synthetic oligonucleotide
  Antisense strand to SEQ ID NO: 290468
ucugggaagaaacaaagag

SEQ ID NO: 290470 - RNA, 19 nt, Artificial Sequence
  Description of Artificial Sequence: Synthetic oligonucleotide
  Sense strand starting at position 3266 of SEQ ID NO: 3734
gcuuguuugcucguauugu

SEQ ID NO: 290471 - RNA, 19 nt, Artificial Sequence
  Description of Artificial Sequence: Synthetic oligonucleotide
  Antisense strand to SEQ ID NO: 290470
acaauacgagcaaacaagc

SEQ ID NO: 290472 - RNA, 19 nt, Artificial Sequence
  Description of Artificial Sequence: Synthetic oligonucleotide
  Sense strand starting at position 3323 of SEQ ID NO: 3734
uaauuucucuagggaaagu

SEQ ID NO: 290473 - RNA, 19 nt, Artificial Sequence
  Description of Artificial Sequence: Synthetic oligonucleotide
  Antisense strand to SEQ ID NO: 290472
acuuucccuagagaaauua

SEQ ID NO: 290474 - RNA, 19 nt, Artificial Sequence
  Description of Artificial Sequence: Synthetic oligonucleotide
  Sense strand starting at position 3434 of SEQ ID NO: 3734
gguauuuauucuuagguau

SEQ ID NO: 290475 - RNA, 19 nt, Artificial Sequence
  Description of Artificial Sequence: Synthetic oligonucleotide
  Antisense strand to SEQ ID NO: 290474
auaccuaagaauaaauacc

SEQ ID NO: 290476 - RNA, 19 nt, Artificial Sequence
  Description of Artificial Sequence: Synthetic oligonucleotide
  Sense strand starting at position 3505 of SEQ ID NO: 3734
ggcuucuguaacuauggaa

SEQ ID NO: 290477 - RNA, 19 nt, Artificial Sequence
  Description of Artificial Sequence: Synthetic oligonucleotide
  Antisense strand to SEQ ID NO: 290476
uuccauaguuacagaagcc

SEQ ID NO: 290478 - RNA, 19 nt, Artificial Sequence
  Description of Artificial Sequence: Synthetic oligonucleotide
  Sense strand starting at position 3554 of SEQ ID NO: 3734
agacgucuuucccugagca

SEQ ID NO: 290479 - RNA, 19 nt, Artificial Sequence
  Description of Artificial Sequence: Synthetic oligonucleotide
  Antisense strand to SEQ ID NO: 290478
ugcucagggaaagacgucu

SEQ ID NO: 290480 - RNA, 19 nt, Artificial Sequence
  Description of Artificial Sequence: Synthetic oligonucleotide
  Sense strand starting at position 3556 of SEQ ID NO: 3734
acgucuuucccugagcacu

SEQ ID NO: 290481 - RNA, 19 nt, Artificial Sequence
  Description of Artificial Sequence: Synthetic oligonucleotide
  Antisense strand to SEQ ID NO: 290480
agugcucagggaaagacgu

SEQ ID NO: 290482 - RNA, 19 nt, Artificial Sequence
  Description of Artificial Sequence: Synthetic oligonucleotide
  Sense strand starting at position 3564 of SEQ ID NO: 3734
cccugagcacuguguauau

SEQ ID NO: 290483 - RNA, 19 nt, Artificial Sequence
  Description of Artificial Sequence: Synthetic oligonucleotide
  Antisense strand to SEQ ID NO: 290482
auauacacagugcucaggg

SEQ ID NO: 290484 - RNA, 19 nt, Artificial Sequence
  Description of Artificial Sequence: Synthetic oligonucleotide
  Sense strand starting at position 3574 of SEQ ID NO: 3734
uguguauauuuagacagga

SEQ ID NO: 290485 - RNA, 19 nt, Artificial Sequence
  Description of Artificial Sequence: Synthetic oligonucleotide
  Antisense strand to SEQ ID NO: 290484
uccugucuaaauauacaca

SEQ ID NO: 290486 - RNA, 19 nt, Artificial Sequence
  Description of Artificial Sequence: Synthetic oligonucleotide
  Sense strand starting at position 3590 of SEQ ID NO: 3734
ggacucgguuugguguuaa

SEQ ID NO: 290487 - RNA, 19 nt, Artificial Sequence
  Description of Artificial Sequence: Synthetic oligonucleotide
  Antisense strand to SEQ ID NO: 290486
uuaacaccaaaccgagucc

SEQ ID NO: 290488 - RNA, 19 nt, Artificial Sequence
  Description of Artificial Sequence: Synthetic oligonucleotide
  Sense strand starting at position 3611 of SEQ ID NO: 3734
aguguauauguugaaugga

SEQ ID NO: 290489 - RNA, 19 nt, Artificial Sequence
  Description of Artificial Sequence: Synthetic oligonucleotide
  Antisense strand to SEQ ID NO: 290488
uccauucaacauauacacu

SEQ ID NO: 290490 - RNA, 19 nt, Artificial Sequence
  Description of Artificial Sequence: Synthetic oligonucleotide
  Sense strand starting at position 3614 of SEQ ID NO: 3734
guauauguugaauggauuc

SEQ ID NO: 290491 - RNA, 19 nt, Artificial Sequence
  Description of Artificial Sequence: Synthetic oligonucleotide
  Antisense strand to SEQ ID NO: 290490
gaauccauucaacauauac

SEQ ID NO: 290492 - RNA, 19 nt, Artificial Sequence
  Description of Artificial Sequence: Synthetic oligonucleotide
  Sense strand starting at position 3669 of SEQ ID NO: 3734
guguacaacgcguauugaa

SEQ ID NO: 290493 - RNA, 19 nt, Artificial Sequence
  Description of Artificial Sequence: Synthetic oligonucleotide
  Antisense strand to SEQ ID NO: 290492
uucaauacgcguuguacac

SEQ ID NO: 290494 - RNA, 19 nt, Artificial Sequence
  Description of Artificial Sequence: Synthetic oligonucleotide
  Sense strand starting at position 3746 of SEQ ID NO: 3734
gcugccuuuccagaagaaa

SEQ ID NO: 290495 - RNA, 19 nt, Artificial Sequence
  Description of Artificial Sequence: Synthetic oligonucleotide
  Antisense strand to SEQ ID NO: 290494
uuucuucuggaaaggcagc

SEQ ID NO: 290496 - RNA, 19 nt, Artificial Sequence
  Description of Artificial Sequence: Synthetic oligonucleotide
  Sense strand starting at position 3813 of SEQ ID NO: 3734
ucugcauuccgaugcagau

SEQ ID NO: 290497 - RNA, 19 nt, Artificial Sequence
  Description of Artificial Sequence: Synthetic oligonucleotide
  Antisense strand to SEQ ID NO: 290496
aucugcaucggaaugcaga

SEQ ID NO: 290498 - RNA, 19 nt, Artificial Sequence
  Description of Artificial Sequence: Synthetic oligonucleotide
  Sense strand starting at position 3857 of SEQ ID NO: 3734
ccacuuuggugaucucaau

SEQ ID NO: 290499 - RNA, 19 nt, Artificial Sequence
  Description of Artificial Sequence: Synthetic oligonucleotide
  Antisense strand to SEQ ID NO: 290498
auugagaucaccaaagugg

SEQ ID NO: 290500 - RNA, 19 nt, Artificial Sequence
  Description of Artificial Sequence: Synthetic oligonucleotide
  Sense strand starting at position 3863 of SEQ ID NO: 3734
uggugaucucaaugaggga

SEQ ID NO: 290501 - RNA, 19 nt, Artificial Sequence
  Description of Artificial Sequence: Synthetic oligonucleotide
  Antisense strand to SEQ ID NO: 290500
ucccucauugagaucacca

SEQ ID NO: 290502 - RNA, 19 nt, Artificial Sequence
  Description of Artificial Sequence: Synthetic oligonucleotide
  Sense strand starting at position 55 of SEQ ID NO: 3735
cuugucagguccucagaga

SEQ ID NO: 290503 - RNA, 19 nt, Artificial Sequence
  Description of Artificial Sequence: Synthetic oligonucleotide
  Antisense strand to SEQ ID NO: 290502
ucucugaggaccugacaag

SEQ ID NO: 290504 - RNA, 19 nt, Artificial Sequence
  Description of Artificial Sequence: Synthetic oligonucleotide
  Sense strand starting at position 213 of SEQ ID NO: 3735
auggcauauugacuuagaa

SEQ ID NO: 290505 - RNA, 19 nt, Artificial Sequence
  Description of Artificial Sequence: Synthetic oligonucleotide
  Antisense strand to SEQ ID NO: 290504
uucuaagucaauaugccau

SEQ ID NO: 290506 - RNA, 19 nt, Artificial Sequence
  Description of Artificial Sequence: Synthetic oligonucleotide
  Sense strand starting at position 226 of SEQ ID NO: 3735
uuagaaaucugcugaagau

SEQ ID NO: 290507 - RNA, 19 nt, Artificial Sequence
  Description of Artificial Sequence: Synthetic oligonucleotide
  Antisense strand to SEQ ID NO: 290506
aucuucagcagauuucuaa

SEQ ID NO: 290508 - RNA, 19 nt, Artificial Sequence
  Description of Artificial Sequence: Synthetic oligonucleotide
  Sense strand starting at position 564 of SEQ ID NO: 3735
gacagcauccuagaugcua

SEQ ID NO: 290509 - RNA, 19 nt, Artificial Sequence
  Description of Artificial Sequence: Synthetic oligonucleotide
  Antisense strand to SEQ ID NO: 290508
uagcaucuaggaugcuguc

SEQ ID NO: 290510 - RNA, 19 nt, Artificial Sequence
  Description of Artificial Sequence: Synthetic oligonucleotide
  Sense strand starting at position 632 of SEQ ID NO: 3735
gcuauaacauguccucaag

SEQ ID NO: 290511 - RNA, 19 nt, Artificial Sequence
  Description of Artificial Sequence: Synthetic oligonucleotide
  Antisense strand to SEQ ID NO: 290510
cuugaggacauguuauagc

SEQ ID NO: 290512 - RNA, 19 nt, Artificial Sequence
  Description of Artificial Sequence: Synthetic oligonucleotide
  Sense strand starting at position 635 of SEQ ID NO: 3735
auaacauguccucaaggcu

SEQ ID NO: 290513 - RNA, 19 nt, Artificial Sequence
  Description of Artificial Sequence: Synthetic oligonucleotide
  Antisense strand to SEQ ID NO: 290512
agccuugaggacauguuau

SEQ ID NO: 290514 - RNA, 19 nt, Artificial Sequence
  Description of Artificial Sequence: Synthetic oligonucleotide
  Sense strand starting at position 908 of SEQ ID NO: 3735
ggaaguuuccagcauccca

SEQ ID NO: 290515 - RNA, 19 nt, Artificial Sequence
  Description of Artificial Sequence: Synthetic oligonucleotide
  Antisense strand to SEQ ID NO: 290514
ugggaugcuggaaacuucc

SEQ ID NO: 290516 - RNA, 19 nt, Artificial Sequence
  Description of Artificial Sequence: Synthetic oligonucleotide
  Sense strand starting at position 1093 of SEQ ID NO: 3735
gugaguguccugccucuuu

SEQ ID NO: 290517 - RNA, 19 nt, Artificial Sequence
  Description of Artificial Sequence: Synthetic oligonucleotide
  Antisense strand to SEQ ID NO: 290516
aaagaggcaggacacucac

SEQ ID NO: 290518 - RNA, 19 nt, Artificial Sequence
  Description of Artificial Sequence: Synthetic oligonucleotide
  Sense strand starting at position 1111 of SEQ ID NO: 3735
ucugguggcccagaguuaa

SEQ ID NO: 290519 - RNA, 19 nt, Artificial Sequence
  Description of Artificial Sequence: Synthetic oligonucleotide
  Antisense strand to SEQ ID NO: 290518
uuaacucugggccaccaga

SEQ ID NO: 290520 - RNA, 19 nt, Artificial Sequence
  Description of Artificial Sequence: Synthetic oligonucleotide
  Sense strand starting at position 1221 of SEQ ID NO: 3735
acaaacauuccagaugugu

SEQ ID NO: 290521 - RNA, 19 nt, Artificial Sequence
  Description of Artificial Sequence: Synthetic oligonucleotide
  Antisense strand to SEQ ID NO: 290520
acacaucuggaauguuugu

SEQ ID NO: 290522 - RNA, 19 nt, Artificial Sequence
  Description of Artificial Sequence: Synthetic oligonucleotide
  Sense strand starting at position 1416 of SEQ ID NO: 3735
ggcuuugauccacggacuu

SEQ ID NO: 290523 - RNA, 19 nt, Artificial Sequence
  Description of Artificial Sequence: Synthetic oligonucleotide
  Antisense strand to SEQ ID NO: 290522
aaguccguggaucaaagcc

SEQ ID NO: 290524 - RNA, 19 nt, Artificial Sequence
  Description of Artificial Sequence: Synthetic oligonucleotide
  Sense strand starting at position 1472 of SEQ ID NO: 3735
gacuccacccagugagauu

SEQ ID NO: 290525 - RNA, 19 nt, Artificial Sequence
  Description of Artificial Sequence: Synthetic oligonucleotide
  Antisense strand to SEQ ID NO: 290524
aaucucacuggguggaguc

SEQ ID NO: 290526 - RNA, 19 nt, Artificial Sequence
  Description of Artificial Sequence: Synthetic oligonucleotide
  Sense strand starting at position 1491 of SEQ ID NO: 3735
gagucugguguccagaacu

SEQ ID NO: 290527 - RNA, 19 nt, Artificial Sequence
  Description of Artificial Sequence: Synthetic oligonucleotide
  Antisense strand to SEQ ID NO: 290526
aguucuggacaccagacuc

SEQ ID NO: 290528 - RNA, 19 nt, Artificial Sequence
  Description of Artificial Sequence: Synthetic oligonucleotide
  Sense strand starting at position 1499 of SEQ ID NO: 3735
uguccagaacuguguucua

SEQ ID NO: 290529 - RNA, 19 nt, Artificial Sequence
  Description of Artificial Sequence: Synthetic oligonucleotide
  Antisense strand to SEQ ID NO: 290528
uagaacacaguucuggaca

SEQ ID NO: 290530 - RNA, 19 nt, Artificial Sequence
  Description of Artificial Sequence: Synthetic oligonucleotide
  Sense strand starting at position 1502 of SEQ ID NO: 3735
ccagaacuguguucuagac

SEQ ID NO: 290531 - RNA, 19 nt, Artificial Sequence
  Description of Artificial Sequence: Synthetic oligonucleotide
  Antisense strand to SEQ ID NO: 290530
gucuagaacacaguucugg

SEQ ID NO: 290532 - RNA, 19 nt, Artificial Sequence
  Description of Artificial Sequence: Synthetic oligonucleotide
  Sense strand starting at position 1504 of SEQ ID NO: 3735
agaacuguguucuagacua

SEQ ID NO: 290533 - RNA, 19 nt, Artificial Sequence
  Description of Artificial Sequence: Synthetic oligonucleotide
  Antisense strand to SEQ ID NO: 290532
uagucuagaacacaguucu

SEQ ID NO: 290534 - RNA, 19 nt, Artificial Sequence
  Description of Artificial Sequence: Synthetic oligonucleotide
  Sense strand starting at position 1509 of SEQ ID NO: 3735
uguguucuagacuaggacu

SEQ ID NO: 290535 - RNA, 19 nt, Artificial Sequence
  Description of Artificial Sequence: Synthetic oligonucleotide
  Antisense strand to SEQ ID NO: 290534
aguccuagucuagaacaca

SEQ ID NO: 290536 - RNA, 19 nt, Artificial Sequence
  Description of Artificial Sequence: Synthetic oligonucleotide
  Sense strand starting at position 1563 of SEQ ID NO: 3735
gggcuuucuugcuuccuca

SEQ ID NO: 290537 - RNA, 19 nt, Artificial Sequence
  Description of Artificial Sequence: Synthetic oligonucleotide
  Antisense strand to SEQ ID NO: 290536
ugaggaagcaagaaagccc

SEQ ID NO: 290538 - RNA, 19 nt, Artificial Sequence
  Description of Artificial Sequence: Synthetic oligonucleotide
  Sense strand starting at position 2007 of SEQ ID NO: 3735
ccaaguuagcucugauuuc

SEQ ID NO: 290539 - RNA, 19 nt, Artificial Sequence
  Description of Artificial Sequence: Synthetic oligonucleotide
  Antisense strand to SEQ ID NO: 290538
gaaaucagagcuaacuugg

SEQ ID NO: 290540 - RNA, 19 nt, Artificial Sequence
  Description of Artificial Sequence: Synthetic oligonucleotide
  Sense strand starting at position 2128 of SEQ ID NO: 3735
agagucaggucuuucuuau

SEQ ID NO: 290541 - RNA, 19 nt, Artificial Sequence
  Description of Artificial Sequence: Synthetic oligonucleotide
  Antisense strand to SEQ ID NO: 290540
auaagaaagaccugacucu

SEQ ID NO: 290542 - RNA, 19 nt, Artificial Sequence
  Description of Artificial Sequence: Synthetic oligonucleotide
  Sense strand starting at position 2307 of SEQ ID NO: 3735
ggaucugguccugguucaa

SEQ ID NO: 290543 - RNA, 19 nt, Artificial Sequence
  Description of Artificial Sequence: Synthetic oligonucleotide
  Antisense strand to SEQ ID NO: 290542
uugaaccaggaccagaucc

SEQ ID NO: 290544 - RNA, 19 nt, Artificial Sequence
  Description of Artificial Sequence: Synthetic oligonucleotide
  Sense strand starting at position 2336 of SEQ ID NO: 3735
acuugagauugucaccaga

SEQ ID NO: 290545 - RNA, 19 nt, Artificial Sequence
  Description of Artificial Sequence: Synthetic oligonucleotide
  Antisense strand to SEQ ID NO: 290544
ucuggugacaaucucaagu

SEQ ID NO: 290546 - RNA, 19 nt, Artificial Sequence
  Description of Artificial Sequence: Synthetic oligonucleotide
  Sense strand starting at position 2338 of SEQ ID NO: 3735
uugagauugucaccagauc

SEQ ID NO: 290547 - RNA, 19 nt, Artificial Sequence
  Description of Artificial Sequence: Synthetic oligonucleotide
  Antisense strand to SEQ ID NO: 290546
gaucuggugacaaucucaa

SEQ ID NO: 290548 - RNA, 19 nt, Artificial Sequence
  Description of Artificial Sequence: Synthetic oligonucleotide
  Sense strand starting at position 2355 of SEQ ID NO: 3735
ucaugucccuucucagagu

SEQ ID NO: 290549 - RNA, 19 nt, Artificial Sequence
  Description of Artificial Sequence: Synthetic oligonucleotide
  Antisense strand to SEQ ID NO: 290548
acucugagaagggacauga

SEQ ID NO: 290550 - RNA, 19 nt, Artificial Sequence
  Description of Artificial Sequence: Synthetic oligonucleotide
  Sense strand starting at position 2364 of SEQ ID NO: 3735
uucucagaguuguuuauuc

SEQ ID NO: 290551 - RNA, 19 nt, Artificial Sequence
  Description of Artificial Sequence: Synthetic oligonucleotide
  Antisense strand to SEQ ID NO: 290550
gaauaaacaacucugagaa

SEQ ID NO: 290552 - RNA, 19 nt, Artificial Sequence
  Description of Artificial Sequence: Synthetic oligonucleotide
  Sense strand starting at position 2366 of SEQ ID NO: 3735
cucagaguuguuuauucua

SEQ ID NO: 290553 - RNA, 19 nt, Artificial Sequence
  Description of Artificial Sequence: Synthetic oligonucleotide
  Antisense strand to SEQ ID NO: 290552
uagaauaaacaacucugag

SEQ ID NO: 290554 - RNA, 19 nt, Artificial Sequence
  Description of Artificial Sequence: Synthetic oligonucleotide
  Sense strand starting at position 2369 of SEQ ID NO: 3735
agaguuguuuauucuauuc

SEQ ID NO: 290555 - RNA, 19 nt, Artificial Sequence
  Description of Artificial Sequence: Synthetic oligonucleotide
  Antisense strand to SEQ ID NO: 290554
gaauagaauaaacaacucu

SEQ ID NO: 290556 - RNA, 19 nt, Artificial Sequence
  Description of Artificial Sequence: Synthetic oligonucleotide
  Sense strand starting at position 2465 of SEQ ID NO: 3735
gcuagagugaggugugaag

SEQ ID NO: 290557 - RNA, 19 nt, Artificial Sequence
  Description of Artificial Sequence: Synthetic oligonucleotide
  Antisense strand to SEQ ID NO: 290556
cuucacaccucacucuagc

SEQ ID NO: 290558 - RNA, 19 nt, Artificial Sequence
  Description of Artificial Sequence: Synthetic oligonucleotide
  Sense strand starting at position 2490 of SEQ ID NO: 3735
ggugccaucuuaguuuacu

SEQ ID NO: 290559 - RNA, 19 nt, Artificial Sequence
  Description of Artificial Sequence: Synthetic oligonucleotide
  Antisense strand to SEQ ID NO: 290558
aguaaacuaagauggcacc

SEQ ID NO: 290560 - RNA, 19 nt, Artificial Sequence
  Description of Artificial Sequence: Synthetic oligonucleotide
  Sense strand starting at position 2604 of SEQ ID NO: 3735
cucuguccuccauguuuaa

SEQ ID NO: 290561 - RNA, 19 nt, Artificial Sequence
  Description of Artificial Sequence: Synthetic oligonucleotide
  Antisense strand to SEQ ID NO: 290560
uuaaacauggaggacagag

SEQ ID NO: 290562 - RNA, 19 nt, Artificial Sequence
  Description of Artificial Sequence: Synthetic oligonucleotide
  Sense strand starting at position 2608 of SEQ ID NO: 3735
guccuccauguuuaagcaa

SEQ ID NO: 290563 - RNA, 19 nt, Artificial Sequence
  Description of Artificial Sequence: Synthetic oligonucleotide
  Antisense strand to SEQ ID NO: 290562
uugcuuaaacauggaggac

SEQ ID NO: 290564 - RNA, 19 nt, Artificial Sequence
  Description of Artificial Sequence: Synthetic oligonucleotide
  Sense strand starting at position 3141 of SEQ ID NO: 3735
ccuggcauauagccuuaaa

SEQ ID NO: 290565 - RNA, 19 nt, Artificial Sequence
  Description of Artificial Sequence: Synthetic oligonucleotide
  Antisense strand to SEQ ID NO: 290564
uuuaaggcuauaugccagg

SEQ ID NO: 290566 - RNA, 19 nt, Artificial Sequence
  Description of Artificial Sequence: Synthetic oligonucleotide
  Sense strand starting at position 3144 of SEQ ID NO: 3735
ggcauauagccuuaaacuc

SEQ ID NO: 290567 - RNA, 19 nt, Artificial Sequence
  Description of Artificial Sequence: Synthetic oligonucleotide
  Antisense strand to SEQ ID NO: 290566
gaguuuaaggcuauaugcc

SEQ ID NO: 290568 - RNA, 19 nt, Artificial Sequence
  Description of Artificial Sequence: Synthetic oligonucleotide
  Sense strand starting at position 3229 of SEQ ID NO: 3735
gcuugacuguuucuucuau

SEQ ID NO: 290569 - RNA, 19 nt, Artificial Sequence
  Description of Artificial Sequence: Synthetic oligonucleotide
  Antisense strand to SEQ ID NO: 290568
auagaagaaacagucaagc

SEQ ID NO: 290570 - RNA, 19 nt, Artificial Sequence
  Description of Artificial Sequence: Synthetic oligonucleotide
  Sense strand starting at position 3230 of SEQ ID NO: 3735
cuugacuguuucuucuauu

SEQ ID NO: 290571 - RNA, 19 nt, Artificial Sequence
  Description of Artificial Sequence: Synthetic oligonucleotide
  Antisense strand to SEQ ID NO: 290570
aauagaagaaacagucaag

SEQ ID NO: 290572 - RNA, 19 nt, Artificial Sequence
  Description of Artificial Sequence: Synthetic oligonucleotide
  Sense strand starting at position 3231 of SEQ ID NO: 3735
uugacuguuucuucuauua

SEQ ID NO: 290573 - RNA, 19 nt, Artificial Sequence
  Description of Artificial Sequence: Synthetic oligonucleotide
  Antisense strand to SEQ ID NO: 290572
uaauagaagaaacagucaa

SEQ ID NO: 290574 - RNA, 19 nt, Artificial Sequence
  Description of Artificial Sequence: Synthetic oligonucleotide
  Sense strand starting at position 3686 of SEQ ID NO: 3735
accuguagucuccauuacu

SEQ ID NO: 290575 - RNA, 19 nt, Artificial Sequence
  Description of Artificial Sequence: Synthetic oligonucleotide
  Antisense strand to SEQ ID NO: 290574
aguaauggagacuacaggu

SEQ ID NO: 290576 - RNA, 19 nt, Artificial Sequence
  Description of Artificial Sequence: Synthetic oligonucleotide
  Sense strand starting at position 3759 of SEQ ID NO: 3735
ugaucagugagccgugauc

SEQ ID NO: 290577 - RNA, 19 nt, Artificial Sequence
  Description of Artificial Sequence: Synthetic oligonucleotide
  Antisense strand to SEQ ID NO: 290576
gaucacggcucacugauca

SEQ ID NO: 290578 - RNA, 19 nt, Artificial Sequence
  Description of Artificial Sequence: Synthetic oligonucleotide
  Sense strand starting at position 3761 of SEQ ID NO: 3735
aucagugagccgugaucau

SEQ ID NO: 290579 - RNA, 19 nt, Artificial Sequence
  Description of Artificial Sequence: Synthetic oligonucleotide
  Antisense strand to SEQ ID NO: 290578
augaucacggcucacugau

SEQ ID NO: 290580 - RNA, 19 nt, Artificial Sequence
  Description of Artificial Sequence: Synthetic oligonucleotide
  Sense strand starting at position 3882 of SEQ ID NO: 3735
auggcaagcagguaagaua

SEQ ID NO: 290581 - RNA, 19 nt, Artificial Sequence
  Description of Artificial Sequence: Synthetic oligonucleotide
  Antisense strand to SEQ ID NO: 290580
uaucuuaccugcuugccau

SEQ ID NO: 290582 - RNA, 19 nt, Artificial Sequence
  Description of Artificial Sequence: Synthetic oligonucleotide
  Sense strand starting at position 354 of SEQ ID NO: 3736
caguccaauuggcaugaau

SEQ ID NO: 290583 - RNA, 19 nt, Artificial Sequence
  Description of Artificial Sequence: Synthetic oligonucleotide
  Antisense strand to SEQ ID NO: 290582
auucaugccaauuggacug

SEQ ID NO: 290584 - RNA, 19 nt, Artificial Sequence
  Description of Artificial Sequence: Synthetic oligonucleotide
  Sense strand starting at position 356 of SEQ ID NO: 3736
guccaauuggcaugaaugu

SEQ ID NO: 290585 - RNA, 19 nt, Artificial Sequence
  Description of Artificial Sequence: Synthetic oligonucleotide
  Antisense strand to SEQ ID NO: 290584
acauucaugccaauuggac

SEQ ID NO: 290586 - RNA, 19 nt, Artificial Sequence
  Description of Artificial Sequence: Synthetic oligonucleotide
  Sense strand starting at position 363 of SEQ ID NO: 3736
uggcaugaauguccgcauu

SEQ ID NO: 290587 - RNA, 19 nt, Artificial Sequence
  Description of Artificial Sequence: Synthetic oligonucleotide
  Antisense strand to SEQ ID NO: 290586
aaugcggacauucaugcca

SEQ ID NO: 290588 - RNA, 19 nt, Artificial Sequence
  Description of Artificial Sequence: Synthetic oligonucleotide
  Sense strand starting at position 387 of SEQ ID NO: 3736
gaggaagaaucugagccau

SEQ ID NO: 290589 - RNA, 19 nt, Artificial Sequence
  Description of Artificial Sequence: Synthetic oligonucleotide
  Antisense strand to SEQ ID NO: 290588
auggcucagauucuuccuc

SEQ ID NO: 290590 - RNA, 19 nt, Artificial Sequence
  Description of Artificial Sequence: Synthetic oligonucleotide
  Sense strand starting at position 389 of SEQ ID NO: 3736
ggaagaaucugagccauca

SEQ ID NO: 290591 - RNA, 19 nt, Artificial Sequence
  Description of Artificial Sequence: Synthetic oligonucleotide
  Antisense strand to SEQ ID NO: 290590
ugauggcucagauucuucc

SEQ ID NO: 290592 - RNA, 19 nt, Artificial Sequence
  Description of Artificial Sequence: Synthetic oligonucleotide
  Sense strand starting at position 416 of SEQ ID NO: 3736
caaugaagcuuagaaaggu

SEQ ID NO: 290593 - RNA, 19 nt, Artificial Sequence
  Description of Artificial Sequence: Synthetic oligonucleotide
  Antisense strand to SEQ ID NO: 290592
accuuucuaagcuucauug

SEQ ID NO: 290594 - RNA, 19 nt, Artificial Sequence
  Description of Artificial Sequence: Synthetic oligonucleotide
  Sense strand starting at position 665 of SEQ ID NO: 3736
cucagucauccuuguuaau

SEQ ID NO: 290595 - RNA, 19 nt, Artificial Sequence
  Description of Artificial Sequence: Synthetic oligonucleotide
  Antisense strand to SEQ ID NO: 290594
auuaacaaggaugacugag

SEQ ID NO: 290596 - RNA, 19 nt, Artificial Sequence
  Description of Artificial Sequence: Synthetic oligonucleotide
  Sense strand starting at position 677 of SEQ ID NO: 3736
uguuaaugagcccgaauca

SEQ ID NO: 290597 - RNA, 19 nt, Artificial Sequence
  Description of Artificial Sequence: Synthetic oligonucleotide
  Antisense strand to SEQ ID NO: 290596
ugauucgggcucauuaaca

SEQ ID NO: 290598 - RNA, 19 nt, Artificial Sequence
  Description of Artificial Sequence: Synthetic oligonucleotide
  Sense strand starting at position 678 of SEQ ID NO: 3736
guuaaugagcccgaaucaa

SEQ ID NO: 290599 - RNA, 19 nt, Artificial Sequence
  Description of Artificial Sequence: Synthetic oligonucleotide
  Antisense strand to SEQ ID NO: 290598
uugauucgggcucauuaac

SEQ ID NO: 290600 - RNA, 19 nt, Artificial Sequence
  Description of Artificial Sequence: Synthetic oligonucleotide
  Sense strand starting at position 1638 of SEQ ID NO: 3736
gcugcuggguguagagauu

SEQ ID NO: 290601 - RNA, 19 nt, Artificial Sequence
  Description of Artificial Sequence: Synthetic oligonucleotide
  Antisense strand to SEQ ID NO: 290600
aaucucuacacccagcagc

SEQ ID NO: 290602 - RNA, 19 nt, Artificial Sequence
  Description of Artificial Sequence: Synthetic oligonucleotide
  Sense strand starting at position 1645 of SEQ ID NO: 3736
gguguagagauuuguugca

SEQ ID NO: 290603 - RNA, 19 nt, Artificial Sequence
  Description of Artificial Sequence: Synthetic oligonucleotide
  Antisense strand to SEQ ID NO: 290602
ugcaacaaaucucuacacc

SEQ ID NO: 290604 - RNA, 19 nt, Artificial Sequence
  Description of Artificial Sequence: Synthetic oligonucleotide
  Sense strand starting at position 1650 of SEQ ID NO: 3736
agagauuuguugcaauguc

SEQ ID NO: 290605 - RNA, 19 nt, Artificial Sequence
  Description of Artificial Sequence: Synthetic oligonucleotide
  Antisense strand to SEQ ID NO: 290604
gacauugcaacaaaucucu

SEQ ID NO: 290606 - RNA, 19 nt, Artificial Sequence
  Description of Artificial Sequence: Synthetic oligonucleotide
  Sense strand starting at position 1658 of SEQ ID NO: 3736
guugcaaugucgccuauca

SEQ ID NO: 290607 - RNA, 19 nt, Artificial Sequence
  Description of Artificial Sequence: Synthetic oligonucleotide
  Antisense strand to SEQ ID NO: 290606
ugauaggcgacauugcaac

SEQ ID NO: 290608 - RNA, 19 nt, Artificial Sequence
  Description of Artificial Sequence: Synthetic oligonucleotide
  Sense strand starting at position 1660 of SEQ ID NO: 3736
ugcaaugucgccuaucauc

SEQ ID NO: 290609 - RNA, 19 nt, Artificial Sequence
  Description of Artificial Sequence: Synthetic oligonucleotide
  Antisense strand to SEQ ID NO: 290608
gaugauaggcgacauugca

SEQ ID NO: 290610 - RNA, 19 nt, Artificial Sequence
  Description of Artificial Sequence: Synthetic oligonucleotide
  Sense strand starting at position 1777 of SEQ ID NO: 3736
agcguuugguggagcugaa

SEQ ID NO: 290611 - RNA, 19 nt, Artificial Sequence
  Description of Artificial Sequence: Synthetic oligonucleotide
  Antisense strand to SEQ ID NO: 290610
uucagcuccaccaaacgcu

SEQ ID NO: 290612 - RNA, 19 nt, Artificial Sequence
  Description of Artificial Sequence: Synthetic oligonucleotide
  Sense strand starting at position 1916 of SEQ ID NO: 3736
ggcuaauucugguuuggca

SEQ ID NO: 290613 - RNA, 19 nt, Artificial Sequence
  Description of Artificial Sequence: Synthetic oligonucleotide
  Antisense strand to SEQ ID NO: 290612
ugccaaaccagaauuagcc

SEQ ID NO: 290614 - RNA, 19 nt, Artificial Sequence
  Description of Artificial Sequence: Synthetic oligonucleotide
  Sense strand starting at position 1966 of SEQ ID NO: 3736
acucuuguggccgguugaa

SEQ ID NO: 290615 - RNA, 19 nt, Artificial Sequence
  Description of Artificial Sequence: Synthetic oligonucleotide
  Antisense strand to SEQ ID NO: 290614
uucaaccggccacaagagu

SEQ ID NO: 290616 - RNA, 19 nt, Artificial Sequence
  Description of Artificial Sequence: Synthetic oligonucleotide
  Sense strand starting at position 1984 of SEQ ID NO: 3736
aguuuauagcuuuggcuga

SEQ ID NO: 290617 - RNA, 19 nt, Artificial Sequence
  Description of Artificial Sequence: Synthetic oligonucleotide
  Antisense strand to SEQ ID NO: 290616
ucagccaaagcuauaaacu

SEQ ID NO: 290618 - RNA, 19 nt, Artificial Sequence
  Description of Artificial Sequence: Synthetic oligonucleotide
  Sense strand starting at position 2024 of SEQ ID NO: 3736
auuuaucacuggcggaaag

SEQ ID NO: 290619 - RNA, 19 nt, Artificial Sequence
  Description of Artificial Sequence: Synthetic oligonucleotide
  Antisense strand to SEQ ID NO: 290618
cuuuccgccagugauaaau

SEQ ID NO: 290620 - RNA, 19 nt, Artificial Sequence
  Description of Artificial Sequence: Synthetic oligonucleotide
  Sense strand starting at position 2058 of SEQ ID NO: 3736
ccaggaugcaagugagacu

SEQ ID NO: 290621 - RNA, 19 nt, Artificial Sequence
  Description of Artificial Sequence: Synthetic oligonucleotide
  Antisense strand to SEQ ID NO: 290620
agucucacuugcauccugg

SEQ ID NO: 290622 - RNA, 19 nt, Artificial Sequence
  Description of Artificial Sequence: Synthetic oligonucleotide
  Sense strand starting at position 2088 of SEQ ID NO: 3736
ccauuucucugagauggga

SEQ ID NO: 290623 - RNA, 19 nt, Artificial Sequence
  Description of Artificial Sequence: Synthetic oligonucleotide
  Antisense strand to SEQ ID NO: 290622
ucccaucucagagaaaugg

SEQ ID NO: 290624 - RNA, 19 nt, Artificial Sequence
  Description of Artificial Sequence: Synthetic oligonucleotide
  Sense strand starting at position 2437 of SEQ ID NO: 3736
gugcuuugccuuggacagu

SEQ ID NO: 290625 - RNA, 19 nt, Artificial Sequence
  Description of Artificial Sequence: Synthetic oligonucleotide
  Antisense strand to SEQ ID NO: 290624
acuguccaaggcaaagcac

SEQ ID NO: 290626 - RNA, 19 nt, Artificial Sequence
  Description of Artificial Sequence: Synthetic oligonucleotide
  Sense strand starting at position 2461 of SEQ ID NO: 3736
guauuauugaagugaaugu

SEQ ID NO: 290627 - RNA, 19 nt, Artificial Sequence
  Description of Artificial Sequence: Synthetic oligonucleotide
  Antisense strand to SEQ ID NO: 290626
acauucacuucaauaauac

SEQ ID NO: 290628 - RNA, 19 nt, Artificial Sequence
  Description of Artificial Sequence: Synthetic oligonucleotide
  Sense strand starting at position 2465 of SEQ ID NO: 3736
uauugaagugaauguguga

SEQ ID NO: 290629 - RNA, 19 nt, Artificial Sequence
  Description of Artificial Sequence: Synthetic oligonucleotide
  Antisense strand to SEQ ID NO: 290628
ucacacauucacuucaaua

SEQ ID NO: 290630 - RNA, 19 nt, Artificial Sequence
  Description of Artificial Sequence: Synthetic oligonucleotide
  Sense strand starting at position 2471 of SEQ ID NO: 3736
agugaaugugugagucgau

SEQ ID NO: 290631 - RNA, 19 nt, Artificial Sequence
  Description of Artificial Sequence: Synthetic oligonucleotide
  Antisense strand to SEQ ID NO: 290630
aucgacucacacauucacu

SEQ ID NO: 290632 - RNA, 19 nt, Artificial Sequence
  Description of Artificial Sequence: Synthetic oligonucleotide
  Sense strand starting at position 2474 of SEQ ID NO: 3736
gaaugugugagucgaugaa

SEQ ID NO: 290633 - RNA, 19 nt, Artificial Sequence
  Description of Artificial Sequence: Synthetic oligonucleotide
  Antisense strand to SEQ ID NO: 290632
uucaucgacucacacauuc

SEQ ID NO: 290634 - RNA, 19 nt, Artificial Sequence
  Description of Artificial Sequence: Synthetic oligonucleotide
  Sense strand starting at position 2486 of SEQ ID NO: 3736
cgaugaagccugugcuguu

SEQ ID NO: 290635 - RNA, 19 nt, Artificial Sequence
  Description of Artificial Sequence: Synthetic oligonucleotide
  Antisense strand to SEQ ID NO: 290634
aacagcacaggcuucaucg

SEQ ID NO: 290636 - RNA, 19 nt, Artificial Sequence
  Description of Artificial Sequence: Synthetic oligonucleotide
  Sense strand starting at position 2525 of SEQ ID NO: 3736
gcaguaauucucugcugcu

SEQ ID NO: 290637 - RNA, 19 nt, Artificial Sequence
  Description of Artificial Sequence: Synthetic oligonucleotide
  Antisense strand to SEQ ID NO: 290636
agcagcagagaauuacugc

SEQ ID NO: 290638 - RNA, 19 nt, Artificial Sequence
  Description of Artificial Sequence: Synthetic oligonucleotide
  Sense strand starting at position 2547 of SEQ ID NO: 3736
gugauaaacugccacagua

SEQ ID NO: 290639 - RNA, 19 nt, Artificial Sequence
  Description of Artificial Sequence: Synthetic oligonucleotide
  Antisense strand to SEQ ID NO: 290638
uacuguggcaguuuaucac

SEQ ID NO: 290640 - RNA, 19 nt, Artificial Sequence
  Description of Artificial Sequence: Synthetic oligonucleotide
  Sense strand starting at position 2615 of SEQ ID NO: 3736
ggaaguuugaaauggguca

SEQ ID NO: 290641 - RNA, 19 nt, Artificial Sequence
  Description of Artificial Sequence: Synthetic oligonucleotide
  Antisense strand to SEQ ID NO: 290640
ugacccauuucaaacuucc

SEQ ID NO: 290642 - RNA, 19 nt, Artificial Sequence
  Description of Artificial Sequence: Synthetic oligonucleotide
  Sense strand starting at position 2628 of SEQ ID NO: 3736
gggucauacuaggcugaga

SEQ ID NO: 290643 - RNA, 19 nt, Artificial Sequence
  Description of Artificial Sequence: Synthetic oligonucleotide
  Antisense strand to SEQ ID NO: 290642
ucucagccuaguaugaccc

SEQ ID NO: 290644 - RNA, 19 nt, Artificial Sequence
  Description of Artificial Sequence: Synthetic oligonucleotide
  Sense strand starting at position 2630 of SEQ ID NO: 3736
gucauacuaggcugagauc

SEQ ID NO: 290645 - RNA, 19 nt, Artificial Sequence
  Description of Artificial Sequence: Synthetic oligonucleotide
  Antisense strand to SEQ ID NO: 290644
gaucucagccuaguaugac

SEQ ID NO: 290646 - RNA, 19 nt, Artificial Sequence
  Description of Artificial Sequence: Synthetic oligonucleotide
  Sense strand starting at position 2639 of SEQ ID NO: 3736
ggcugagaucaugguguug

SEQ ID NO: 290647 - RNA, 19 nt, Artificial Sequence
  Description of Artificial Sequence: Synthetic oligonucleotide
  Antisense strand to SEQ ID NO: 290646
caacaccaugaucucagcc

SEQ ID NO: 290648 - RNA, 19 nt, Artificial Sequence
  Description of Artificial Sequence: Synthetic oligonucleotide
  Sense strand starting at position 2763 of SEQ ID NO: 3736
ccagcacugcugcgucauu

SEQ ID NO: 290649 - RNA, 19 nt, Artificial Sequence
  Description of Artificial Sequence: Synthetic oligonucleotide
  Antisense strand to SEQ ID NO: 290648
aaugacgcagcagugcugg

SEQ ID NO: 290650 - RNA, 19 nt, Artificial Sequence
  Description of Artificial Sequence: Synthetic oligonucleotide
  Sense strand starting at position 2864 of SEQ ID NO: 3736
cauugaguccaaugagaua

SEQ ID NO: 290651 - RNA, 19 nt, Artificial Sequence
  Description of Artificial Sequence: Synthetic oligonucleotide
  Antisense strand to SEQ ID NO: 290650
uaucucauuggacucaaug

SEQ ID NO: 290652 - RNA, 19 nt, Artificial Sequence
  Description of Artificial Sequence: Synthetic oligonucleotide
  Sense strand starting at position 3392 of SEQ ID NO: 3736
ggccuauauugcuauuucu

SEQ ID NO: 290653 - RNA, 19 nt, Artificial Sequence
  Description of Artificial Sequence: Synthetic oligonucleotide
  Antisense strand to SEQ ID NO: 290652
agaaauagcaauauaggcc

SEQ ID NO: 290654 - RNA, 19 nt, Artificial Sequence
  Description of Artificial Sequence: Synthetic oligonucleotide
  Sense strand starting at position 3817 of SEQ ID NO: 3736
gcacgauauugcuugaauc

SEQ ID NO: 290655 - RNA, 19 nt, Artificial Sequence
  Description of Artificial Sequence: Synthetic oligonucleotide
  Antisense strand to SEQ ID NO: 290654
gauucaagcaauaucgugc

SEQ ID NO: 290656 - RNA, 19 nt, Artificial Sequence
  Description of Artificial Sequence: Synthetic oligonucleotide
  Sense strand starting at position 3819 of SEQ ID NO: 3736
acgauauugcuugaaucug

SEQ ID NO: 290657 - RNA, 19 nt, Artificial Sequence
  Description of Artificial Sequence: Synthetic oligonucleotide
  Antisense strand to SEQ ID NO: 290656
cagauucaagcaauaucgu

SEQ ID NO: 290658 - RNA, 19 nt, Artificial Sequence
  Description of Artificial Sequence: Synthetic oligonucleotide
  Sense strand starting at position 3840 of SEQ ID NO: 3736
aggcgagaaucgcuugaac

SEQ ID NO: 290659 - RNA, 19 nt, Artificial Sequence
  Description of Artificial Sequence: Synthetic oligonucleotide
  Antisense strand to SEQ ID NO: 290658
guucaagcgauucucgccu

SEQ ID NO: 290660 - RNA, 19 nt, Artificial Sequence
  Description of Artificial Sequence: Synthetic oligonucleotide
  Sense strand starting at position 3956 of SEQ ID NO: 3736
agaaauuguggccaaguga

SEQ ID NO: 290661 - RNA, 19 nt, Artificial Sequence
  Description of Artificial Sequence: Synthetic oligonucleotide
  Antisense strand to SEQ ID NO: 290660
ucacuuggccacaauuucu

SEQ ID NO: 290662 - RNA, 19 nt, Artificial Sequence
  Description of Artificial Sequence: Synthetic oligonucleotide
  Sense strand starting at position 4 of SEQ ID NO: 3737
uugagaugcagugaaaguu

SEQ ID NO: 290663 - RNA, 19 nt, Artificial Sequence
  Description of Artificial Sequence: Synthetic oligonucleotide
  Antisense strand to SEQ ID NO: 290662
aacuuucacugcaucucaa

SEQ ID NO: 290664 - RNA, 19 nt, Artificial Sequence
  Description of Artificial Sequence: Synthetic oligonucleotide
  Sense strand starting at position 12 of SEQ ID NO: 3737
cagugaaaguuucugauua

SEQ ID NO: 290665 - RNA, 19 nt, Artificial Sequence
  Description of Artificial Sequence: Synthetic oligonucleotide
  Antisense strand to SEQ ID NO: 290664
uaaucagaaacuuucacug

SEQ ID NO: 290666 - RNA, 19 nt, Artificial Sequence
  Description of Artificial Sequence: Synthetic oligonucleotide
  Sense strand starting at position 16 of SEQ ID NO: 3737
gaaaguuucugauuaaaug

SEQ ID NO: 290667 - RNA, 19 nt, Artificial Sequence
  Description of Artificial Sequence: Synthetic oligonucleotide
  Antisense strand to SEQ ID NO: 290666
cauuuaaucagaaacuuuc

SEQ ID NO: 290668 - RNA, 19 nt, Artificial Sequence
  Description of Artificial Sequence: Synthetic oligonucleotide
  Sense strand starting at position 132 of SEQ ID NO: 3737
uggcaauguuaaguaauua

SEQ ID NO: 290669 - RNA, 19 nt, Artificial Sequence
  Description of Artificial Sequence: Synthetic oligonucleotide
  Antisense strand to SEQ ID NO: 290668
uaauuacuuaacauugcca

SEQ ID NO: 290670 - RNA, 19 nt, Artificial Sequence
  Description of Artificial Sequence: Synthetic oligonucleotide
  Sense strand starting at position 144 of SEQ ID NO: 3737
guaauuauugucuauagac

SEQ ID NO: 290671 - RNA, 19 nt, Artificial Sequence
  Description of Artificial Sequence: Synthetic oligonucleotide
  Antisense strand to SEQ ID NO: 290670
gucuauagacaauaauuac

SEQ ID NO: 290672 - RNA, 19 nt, Artificial Sequence
  Description of Artificial Sequence: Synthetic oligonucleotide
  Sense strand starting at position 165 of SEQ ID NO: 3737
gcaaauaagguuuauccca

SEQ ID NO: 290673 - RNA, 19 nt, Artificial Sequence
  Description of Artificial Sequence: Synthetic oligonucleotide
  Antisense strand to SEQ ID NO: 290672
ugggauaaaccuuauuugc

SEQ ID NO: 290674 - RNA, 19 nt, Artificial Sequence
  Description of Artificial Sequence: Synthetic oligonucleotide
  Sense strand starting at position 258 of SEQ ID NO: 3737
auuccugaucuacgaaugu

SEQ ID NO: 290675 - RNA, 19 nt, Artificial Sequence
  Description of Artificial Sequence: Synthetic oligonucleotide
  Antisense strand to SEQ ID NO: 290674
acauucguagaucaggaau

SEQ ID NO: 290676 - RNA, 19 nt, Artificial Sequence
  Description of Artificial Sequence: Synthetic oligonucleotide
  Sense strand starting at position 296 of SEQ ID NO: 3737
cuuugaucuggcuacuaca

SEQ ID NO: 290677 - RNA, 19 nt, Artificial Sequence
  Description of Artificial Sequence: Synthetic oligonucleotide
  Antisense strand to SEQ ID NO: 290676
uguaguagccagaucaaag

SEQ ID NO: 290678 - RNA, 19 nt, Artificial Sequence
  Description of Artificial Sequence: Synthetic oligonucleotide
  Sense strand starting at position 309 of SEQ ID NO: 3737
acuacagacucaucaguuu

SEQ ID NO: 290679 - RNA, 19 nt, Artificial Sequence
  Description of Artificial Sequence: Synthetic oligonucleotide
  Antisense strand to SEQ ID NO: 290678
aaacugaugagucuguagu

SEQ ID NO: 290680 - RNA, 19 nt, Artificial Sequence
  Description of Artificial Sequence: Synthetic oligonucleotide
  Sense strand starting at position 321 of SEQ ID NO: 3737
ucaguuucgucacuaauaa

SEQ ID NO: 290681 - RNA, 19 nt, Artificial Sequence
  Description of Artificial Sequence: Synthetic oligonucleotide
  Antisense strand to SEQ ID NO: 290680
uuauuagugacgaaacuga

SEQ ID NO: 290682 - RNA, 19 nt, Artificial Sequence
  Description of Artificial Sequence: Synthetic oligonucleotide
  Sense strand starting at position 322 of SEQ ID NO: 3737
caguuucgucacuaauaag

SEQ ID NO: 290683 - RNA, 19 nt, Artificial Sequence
  Description of Artificial Sequence: Synthetic oligonucleotide
  Antisense strand to SEQ ID NO: 290682
cuuauuagugacgaaacug

SEQ ID NO: 290684 - RNA, 19 nt, Artificial Sequence
  Description of Artificial Sequence: Synthetic oligonucleotide
  Sense strand starting at position 636 of SEQ ID NO: 3737
ccucauuugccaggguagu

SEQ ID NO: 290685 - RNA, 19 nt, Artificial Sequence
  Description of Artificial Sequence: Synthetic oligonucleotide
  Antisense strand to SEQ ID NO: 290684
acuacccuggcaaaugagg

SEQ ID NO: 290686 - RNA, 19 nt, Artificial Sequence
  Description of Artificial Sequence: Synthetic oligonucleotide
  Sense strand starting at position 642 of SEQ ID NO: 3737
uugccaggguagucuauaa

SEQ ID NO: 290687 - RNA, 19 nt, Artificial Sequence
  Description of Artificial Sequence: Synthetic oligonucleotide
  Antisense strand to SEQ ID NO: 290686
uuauagacuacccuggcaa

SEQ ID NO: 290688 - RNA, 19 nt, Artificial Sequence
  Description of Artificial Sequence: Synthetic oligonucleotide
  Sense strand starting at position 678 of SEQ ID NO: 3737
caggguggguaaucaauca

SEQ ID NO: 290689 - RNA, 19 nt, Artificial Sequence
  Description of Artificial Sequence: Synthetic oligonucleotide
  Antisense strand to SEQ ID NO: 290688
ugauugauuacccacccug

SEQ ID NO: 290690 - RNA, 19 nt, Artificial Sequence
  Description of Artificial Sequence: Synthetic oligonucleotide
  Sense strand starting at position 685 of SEQ ID NO: 3737
gguaaucaaucacucugau

SEQ ID NO: 290691 - RNA, 19 nt, Artificial Sequence
  Description of Artificial Sequence: Synthetic oligonucleotide
  Antisense strand to SEQ ID NO: 290690
aucagagugauugauuacc

SEQ ID NO: 290692 - RNA, 19 nt, Artificial Sequence
  Description of Artificial Sequence: Synthetic oligonucleotide
  Sense strand starting at position 769 of SEQ ID NO: 3737
guuggucuauuagcaauaa

SEQ ID NO: 290693 - RNA, 19 nt, Artificial Sequence
  Description of Artificial Sequence: Synthetic oligonucleotide
  Antisense strand to SEQ ID NO: 290692
uuauugcuaauagaccaac

SEQ ID NO: 290694 - RNA, 19 nt, Artificial Sequence
  Description of Artificial Sequence: Synthetic oligonucleotide
  Sense strand starting at position 773 of SEQ ID NO: 3737
gucuauuagcaauaaugac

SEQ ID NO: 290695 - RNA, 19 nt, Artificial Sequence
  Description of Artificial Sequence: Synthetic oligonucleotide
  Antisense strand to SEQ ID NO: 290694
gucauuauugcuaauagac

SEQ ID NO: 290696 - RNA, 19 nt, Artificial Sequence
  Description of Artificial Sequence: Synthetic oligonucleotide
  Sense strand starting at position 843 of SEQ ID NO: 3737
uaagauauuugggaaguua

SEQ ID NO: 290697 - RNA, 19 nt, Artificial Sequence
  Description of Artificial Sequence: Synthetic oligonucleotide
  Antisense strand to SEQ ID NO: 290696
uaacuucccaaauaucuua

SEQ ID NO: 290698 - RNA, 19 nt, Artificial Sequence
  Description of Artificial Sequence: Synthetic oligonucleotide
  Sense strand starting at position 878 of SEQ ID NO: 3737
auauaugugccucgaugaa

SEQ ID NO: 290699 - RNA, 19 nt, Artificial Sequence
  Description of Artificial Sequence: Synthetic oligonucleotide
  Antisense strand to SEQ ID NO: 290698
uucaucgaggcacauauau

SEQ ID NO: 290700 - RNA, 19 nt, Artificial Sequence
  Description of Artificial Sequence: Synthetic oligonucleotide
  Sense strand starting at position 1559 of SEQ ID NO: 3737
ccauccuuggauuggaauu

SEQ ID NO: 290701 - RNA, 19 nt, Artificial Sequence
  Description of Artificial Sequence: Synthetic oligonucleotide
  Antisense strand to SEQ ID NO: 290700
aauuccaauccaaggaugg

SEQ ID NO: 290702 - RNA, 19 nt, Artificial Sequence
  Description of Artificial Sequence: Synthetic oligonucleotide
  Sense strand starting at position 1576 of SEQ ID NO: 3737
uuuggaauucuaugcuaaa

SEQ ID NO: 290703 - RNA, 19 nt, Artificial Sequence
  Description of Artificial Sequence: Synthetic oligonucleotide
  Antisense strand to SEQ ID NO: 290702
uuuagcauagaauuccaaa

SEQ ID NO: 290704 - RNA, 19 nt, Artificial Sequence
  Description of Artificial Sequence: Synthetic oligonucleotide
  Sense strand starting at position 1618 of SEQ ID NO: 3737
gaacgugggauguaaccau

SEQ ID NO: 290705 - RNA, 19 nt, Artificial Sequence
  Description of Artificial Sequence: Synthetic oligonucleotide
  Antisense strand to SEQ ID NO: 290704
augguuacaucccacguuc

SEQ ID NO: 290706 - RNA, 19 nt, Artificial Sequence
  Description of Artificial Sequence: Synthetic oligonucleotide
  Sense strand starting at position 1646 of SEQ ID NO: 3737
uggcacuuuacgggaauca

SEQ ID NO: 290707 - RNA, 19 nt, Artificial Sequence
  Description of Artificial Sequence: Synthetic oligonucleotide
  Antisense strand to SEQ ID NO: 290706
ugauucccguaaagugcca

SEQ ID NO: 290708 - RNA, 19 nt, Artificial Sequence
  Description of Artificial Sequence: Synthetic oligonucleotide
  Sense strand starting at position 1647 of SEQ ID NO: 3737
ggcacuuuacgggaaucau

SEQ ID NO: 290709 - RNA, 19 nt, Artificial Sequence
  Description of Artificial Sequence: Synthetic oligonucleotide
  Antisense strand to SEQ ID NO: 290708
augauucccguaaagugcc

SEQ ID NO: 290710 - RNA, 19 nt, Artificial Sequence
  Description of Artificial Sequence: Synthetic oligonucleotide
  Sense strand starting at position 1922 of SEQ ID NO: 3737
gggagugucuguucaccaa

SEQ ID NO: 290711 - RNA, 19 nt, Artificial Sequence
  Description of Artificial Sequence: Synthetic oligonucleotide
  Antisense strand to SEQ ID NO: 290710
uuggugaacagacacuccc

SEQ ID NO: 290712 - RNA, 19 nt, Artificial Sequence
  Description of Artificial Sequence: Synthetic oligonucleotide
  Sense strand starting at position 2144 of SEQ ID NO: 3737
acagucaacucugcugaaa

SEQ ID NO: 290713 - RNA, 19 nt, Artificial Sequence
  Description of Artificial Sequence: Synthetic oligonucleotide
  Antisense strand to SEQ ID NO: 290712
uuucagcagaguugacugu

SEQ ID NO: 290714 - RNA, 19 nt, Artificial Sequence
  Description of Artificial Sequence: Synthetic oligonucleotide
  Sense strand starting at position 2147 of SEQ ID NO: 3737
gucaacucugcugaaagga

SEQ ID NO: 290715 - RNA, 19 nt, Artificial Sequence
  Description of Artificial Sequence: Synthetic oligonucleotide
  Antisense strand to SEQ ID NO: 290714
uccuuucagcagaguugac

SEQ ID NO: 290716 - RNA, 19 nt, Artificial Sequence
  Description of Artificial Sequence: Synthetic oligonucleotide
  Sense strand starting at position 2211 of SEQ ID NO: 3737
gccugaauccaacagcgau

SEQ ID NO: 290717 - RNA, 19 nt, Artificial Sequence
  Description of Artificial Sequence: Synthetic oligonucleotide
  Antisense strand to SEQ ID NO: 290716
aucgcuguuggauucaggc

SEQ ID NO: 290718 - RNA, 19 nt, Artificial Sequence
  Description of Artificial Sequence: Synthetic oligonucleotide
  Sense strand starting at position 2229 of SEQ ID NO: 3737
ucguuugcuuuauuuacaa

SEQ ID NO: 290719 - RNA, 19 nt, Artificial Sequence
  Description of Artificial Sequence: Synthetic oligonucleotide
  Antisense strand to SEQ ID NO: 290718
uuguaaauaaagcaaacga

SEQ ID NO: 290720 - RNA, 19 nt, Artificial Sequence
  Description of Artificial Sequence: Synthetic oligonucleotide
  Sense strand starting at position 2367 of SEQ ID NO: 3737
aauagagaagccuggguuu

SEQ ID NO: 290721 - RNA, 19 nt, Artificial Sequence
  Description of Artificial Sequence: Synthetic oligonucleotide
  Antisense strand to SEQ ID NO: 290720
aaacccaggcuucucuauu

SEQ ID NO: 290722 - RNA, 19 nt, Artificial Sequence
  Description of Artificial Sequence: Synthetic oligonucleotide
  Sense strand starting at position 2403 of SEQ ID NO: 3737
uccagagccagugguuaua

SEQ ID NO: 290723 - RNA, 19 nt, Artificial Sequence
  Description of Artificial Sequence: Synthetic oligonucleotide
  Antisense strand to SEQ ID NO: 290722
uauaaccacuggcucugga

SEQ ID NO: 290724 - RNA, 19 nt, Artificial Sequence
  Description of Artificial Sequence: Synthetic oligonucleotide
  Sense strand starting at position 2405 of SEQ ID NO: 3737
cagagccagugguuauaau

SEQ ID NO: 290725 - RNA, 19 nt, Artificial Sequence
  Description of Artificial Sequence: Synthetic oligonucleotide
  Antisense strand to SEQ ID NO: 290724
auuauaaccacuggcucug

SEQ ID NO: 290726 - RNA, 19 nt, Artificial Sequence
  Description of Artificial Sequence: Synthetic oligonucleotide
  Sense strand starting at position 2414 of SEQ ID NO: 3737
ugguuauaaucacucugca

SEQ ID NO: 290727 - RNA, 19 nt, Artificial Sequence
  Description of Artificial Sequence: Synthetic oligonucleotide
  Antisense strand to SEQ ID NO: 290726
ugcagagugauuauaacca

SEQ ID NO: 290728 - RNA, 19 nt, Artificial Sequence
  Description of Artificial Sequence: Synthetic oligonucleotide
  Sense strand starting at position 3484 of SEQ ID NO: 3737
cugcaaagaguuuauauau

SEQ ID NO: 290729 - RNA, 19 nt, Artificial Sequence
  Description of Artificial Sequence: Synthetic oligonucleotide
  Antisense strand to SEQ ID NO: 290728
auauauaaacucuuugcag

SEQ ID NO: 290730 - RNA, 19 nt, Artificial Sequence
  Description of Artificial Sequence: Synthetic oligonucleotide
  Sense strand starting at position 3660 of SEQ ID NO: 3737
guggaagugaaauggauua

SEQ ID NO: 290731 - RNA, 19 nt, Artificial Sequence
  Description of Artificial Sequence: Synthetic oligonucleotide
  Antisense strand to SEQ ID NO: 290730
uaauccauuucacuuccac

SEQ ID NO: 290732 - RNA, 19 nt, Artificial Sequence
  Description of Artificial Sequence: Synthetic oligonucleotide
  Sense strand starting at position 3766 of SEQ ID NO: 3737
gaaccuuagguguaggagu

SEQ ID NO: 290733 - RNA, 19 nt, Artificial Sequence
  Description of Artificial Sequence: Synthetic oligonucleotide
  Antisense strand to SEQ ID NO: 290732
acuccuacaccuaagguuc

SEQ ID NO: 290734 - RNA, 19 nt, Artificial Sequence
  Description of Artificial Sequence: Synthetic oligonucleotide
  Sense strand starting at position 3811 of SEQ ID NO: 3737
auugcuggguccucccaaa

SEQ ID NO: 290735 - RNA, 19 nt, Artificial Sequence
  Description of Artificial Sequence: Synthetic oligonucleotide
  Antisense strand to SEQ ID NO: 290734
uuugggaggacccagcaau

SEQ ID NO: 290736 - RNA, 19 nt, Artificial Sequence
  Description of Artificial Sequence: Synthetic oligonucleotide
  Sense strand starting at position 3912 of SEQ ID NO: 3737
uugagaaguuuacucugau

SEQ ID NO: 290737 - RNA, 19 nt, Artificial Sequence
  Description of Artificial Sequence: Synthetic oligonucleotide
  Antisense strand to SEQ ID NO: 290736
aucagaguaaacuucucaa

SEQ ID NO: 290738 - RNA, 19 nt, Artificial Sequence
  Description of Artificial Sequence: Synthetic oligonucleotide
  Sense strand starting at position 3913 of SEQ ID NO: 3737
ugagaaguuuacucugauu

SEQ ID NO: 290739 - RNA, 19 nt, Artificial Sequence
  Description of Artificial Sequence: Synthetic oligonucleotide
  Antisense strand to SEQ ID NO: 290738
aaucagaguaaacuucuca

SEQ ID NO: 290740 - RNA, 19 nt, Artificial Sequence
  Description of Artificial Sequence: Synthetic oligonucleotide
  Sense strand starting at position 3915 of SEQ ID NO: 3737
agaaguuuacucugauucu

SEQ ID NO: 290741 - RNA, 19 nt, Artificial Sequence
  Description of Artificial Sequence: Synthetic oligonucleotide
  Antisense strand to SEQ ID NO: 290740
agaaucagaguaaacuucu

SEQ ID NO: 290742 - RNA, 19 nt, Artificial Sequence
  Description of Artificial Sequence: Synthetic oligonucleotide
  Sense strand starting at position 30 of SEQ ID NO: 3738
acugguucuugcucaaaga

SEQ ID NO: 290743 - RNA, 19 nt, Artificial Sequence
  Description of Artificial Sequence: Synthetic oligonucleotide
  Antisense strand to SEQ ID NO: 290742
ucuuugagcaagaaccagu

SEQ ID NO: 290744 - RNA, 19 nt, Artificial Sequence
  Description of Artificial Sequence: Synthetic oligonucleotide
  Sense strand starting at position 31 of SEQ ID NO: 3738
cugguucuugcucaaagau

SEQ ID NO: 290745 - RNA, 19 nt, Artificial Sequence
  Description of Artificial Sequence: Synthetic oligonucleotide
  Antisense strand to SEQ ID NO: 290744
aucuuugagcaagaaccag

SEQ ID NO: 290746 - RNA, 19 nt, Artificial Sequence
  Description of Artificial Sequence: Synthetic oligonucleotide
  Sense strand starting at position 179 of SEQ ID NO: 3738
aacucuuaggaguguauaa

SEQ ID NO: 290747 - RNA, 19 nt, Artificial Sequence
  Description of Artificial Sequence: Synthetic oligonucleotide
  Antisense strand to SEQ ID NO: 290746
uuauacacuccuaagaguu

SEQ ID NO: 290748 - RNA, 19 nt, Artificial Sequence
  Description of Artificial Sequence: Synthetic oligonucleotide
  Sense strand starting at position 195 of SEQ ID NO: 3738
uaagcauauggguguauga

SEQ ID NO: 290749 - RNA, 19 nt, Artificial Sequence
  Description of Artificial Sequence: Synthetic oligonucleotide
  Antisense strand to SEQ ID NO: 290748
ucauacacccauaugcuua

SEQ ID NO: 290750 - RNA, 19 nt, Artificial Sequence
  Description of Artificial Sequence: Synthetic oligonucleotide
  Sense strand starting at position 197 of SEQ ID NO: 3738
agcauauggguguaugaac

SEQ ID NO: 290751 - RNA, 19 nt, Artificial Sequence
  Description of Artificial Sequence: Synthetic oligonucleotide
  Antisense strand to SEQ ID NO: 290750
guucauacacccauaugcu

SEQ ID NO: 290752 - RNA, 19 nt, Artificial Sequence
  Description of Artificial Sequence: Synthetic oligonucleotide
  Sense strand starting at position 1817 of SEQ ID NO: 3738
cagccauaccgcuagagaa

SEQ ID NO: 290753 - RNA, 19 nt, Artificial Sequence
  Description of Artificial Sequence: Synthetic oligonucleotide
  Antisense strand to SEQ ID NO: 290752
uucucuagcgguauggcug

SEQ ID NO: 290754 - RNA, 19 nt, Artificial Sequence
  Description of Artificial Sequence: Synthetic oligonucleotide
  Sense strand starting at position 2217 of SEQ ID NO: 3738
gcgaguuacaagggaaacu

SEQ ID NO: 290755 - RNA, 19 nt, Artificial Sequence
  Description of Artificial Sequence: Synthetic oligonucleotide
  Antisense strand to SEQ ID NO: 290754
aguuucccuuguaacucgc

SEQ ID NO: 290756 - RNA, 19 nt, Artificial Sequence
  Description of Artificial Sequence: Synthetic oligonucleotide
  Sense strand starting at position 2227 of SEQ ID NO: 3738
agggaaacuucugcugagu

SEQ ID NO: 290757 - RNA, 19 nt, Artificial Sequence
  Description of Artificial Sequence: Synthetic oligonucleotide
  Antisense strand to SEQ ID NO: 290756
acucagcagaaguuucccu

SEQ ID NO: 290758 - RNA, 19 nt, Artificial Sequence
  Description of Artificial Sequence: Synthetic oligonucleotide
  Sense strand starting at position 2230 of SEQ ID NO: 3738
gaaacuucugcugagucuu

SEQ ID NO: 290759 - RNA, 19 nt, Artificial Sequence
  Description of Artificial Sequence: Synthetic oligonucleotide
  Antisense strand to SEQ ID NO: 290758
aagacucagcagaaguuuc

SEQ ID NO: 290760 - RNA, 19 nt, Artificial Sequence
  Description of Artificial Sequence: Synthetic oligonucleotide
  Sense strand starting at position 2292 of SEQ ID NO: 3738
gcuugugaauuguucuuua

SEQ ID NO: 290761 - RNA, 19 nt, Artificial Sequence
  Description of Artificial Sequence: Synthetic oligonucleotide
  Antisense strand to SEQ ID NO: 290760
uaaagaacaauucacaagc

SEQ ID NO: 290762 - RNA, 19 nt, Artificial Sequence
  Description of Artificial Sequence: Synthetic oligonucleotide
  Sense strand starting at position 2295 of SEQ ID NO: 3738
ugugaauuguucuuuaaag

SEQ ID NO: 290763 - RNA, 19 nt, Artificial Sequence
  Description of Artificial Sequence: Synthetic oligonucleotide
  Antisense strand to SEQ ID NO: 290762
cuuuaaagaacaauucaca

SEQ ID NO: 290764 - RNA, 19 nt, Artificial Sequence
  Description of Artificial Sequence: Synthetic oligonucleotide
  Sense strand starting at position 2566 of SEQ ID NO: 3738
ggaagacuuaauuguggcu

SEQ ID NO: 290765 - RNA, 19 nt, Artificial Sequence
  Description of Artificial Sequence: Synthetic oligonucleotide
  Antisense strand to SEQ ID NO: 290764
agccacaauuaagucuucc

SEQ ID NO: 290766 - RNA, 19 nt, Artificial Sequence
  Description of Artificial Sequence: Synthetic oligonucleotide
  Sense strand starting at position 2578 of SEQ ID NO: 3738
uguggcuaaccucaauuaa

SEQ ID NO: 290767 - RNA, 19 nt, Artificial Sequence
  Description of Artificial Sequence: Synthetic oligonucleotide
  Antisense strand to SEQ ID NO: 290766
uuaauugagguuagccaca

SEQ ID NO: 290768 - RNA, 19 nt, Artificial Sequence
  Description of Artificial Sequence: Synthetic oligonucleotide
  Sense strand starting at position 2655 of SEQ ID NO: 3738
augacauauuugugcaaau

SEQ ID NO: 290769 - RNA, 19 nt, Artificial Sequence
  Description of Artificial Sequence: Synthetic oligonucleotide
  Antisense strand to SEQ ID NO: 290768
auuugcacaaauaugucau

SEQ ID NO: 290770 - RNA, 19 nt, Artificial Sequence
  Description of Artificial Sequence: Synthetic oligonucleotide
  Sense strand starting at position 2765 of SEQ ID NO: 3738
acuuguaaggauugugugu

SEQ ID NO: 290771 - RNA, 19 nt, Artificial Sequence
  Description of Artificial Sequence: Synthetic oligonucleotide
  Antisense strand to SEQ ID NO: 290770
acacacaauccuuacaagu

SEQ ID NO: 290772 - RNA, 19 nt, Artificial Sequence
  Description of Artificial Sequence: Synthetic oligonucleotide
  Sense strand starting at position 2809 of SEQ ID NO: 3738
gguagugucagaugaagag

SEQ ID NO: 290773 - RNA, 19 nt, Artificial Sequence
  Description of Artificial Sequence: Synthetic oligonucleotide
  Antisense strand to SEQ ID NO: 290772
cucuucaucugacacuacc

SEQ ID NO: 290774 - RNA, 19 nt, Artificial Sequence
  Description of Artificial Sequence: Synthetic oligonucleotide
  Sense strand starting at position 2819 of SEQ ID NO: 3738
gaugaagagcugcacauau

SEQ ID NO: 290775 - RNA, 19 nt, Artificial Sequence
  Description of Artificial Sequence: Synthetic oligonucleotide
  Antisense strand to SEQ ID NO: 290774
auaugugcagcucuucauc

SEQ ID NO: 290776 - RNA, 19 nt, Artificial Sequence
  Description of Artificial Sequence: Synthetic oligonucleotide
  Sense strand starting at position 2840 of SEQ ID NO: 3738
auaucuggcuuuccagaau

SEQ ID NO: 290777 - RNA, 19 nt, Artificial Sequence
  Description of Artificial Sequence: Synthetic oligonucleotide
  Antisense strand to SEQ ID NO: 290776
auucuggaaagccagauau

SEQ ID NO: 290778 - RNA, 19 nt, Artificial Sequence
  Description of Artificial Sequence: Synthetic oligonucleotide
  Sense strand starting at position 2843 of SEQ ID NO: 3738
ucuggcuuuccagaaugca

SEQ ID NO: 290779 - RNA, 19 nt, Artificial Sequence
  Description of Artificial Sequence: Synthetic oligonucleotide
  Antisense strand to SEQ ID NO: 290778
ugcauucuggaaagccaga

SEQ ID NO: 290780 - RNA, 19 nt, Artificial Sequence
  Description of Artificial Sequence: Synthetic oligonucleotide
  Sense strand starting at position 2846 of SEQ ID NO: 3738
ggcuuuccagaaugcaguu

SEQ ID NO: 290781 - RNA, 19 nt, Artificial Sequence
  Description of Artificial Sequence: Synthetic oligonucleotide
  Antisense strand to SEQ ID NO: 290780
aacugcauucuggaaagcc

SEQ ID NO: 290782 - RNA, 19 nt, Artificial Sequence
  Description of Artificial Sequence: Synthetic oligonucleotide
  Sense strand starting at position 2870 of SEQ ID NO: 3738
cucuaugugcacugaagaa

SEQ ID NO: 290783 - RNA, 19 nt, Artificial Sequence
  Description of Artificial Sequence: Synthetic oligonucleotide
  Antisense strand to SEQ ID NO: 290782
uucuucagugcacauagag

SEQ ID NO: 290784 - RNA, 19 nt, Artificial Sequence
  Description of Artificial Sequence: Synthetic oligonucleotide
  Sense strand starting at position 3123 of SEQ ID NO: 3738
cccagucaccucuguguga

SEQ ID NO: 290785 - RNA, 19 nt, Artificial Sequence
  Description of Artificial Sequence: Synthetic oligonucleotide
  Antisense strand to SEQ ID NO: 290784
ucacacagaggugacuggg

SEQ ID NO: 290786 - RNA, 19 nt, Artificial Sequence
  Description of Artificial Sequence: Synthetic oligonucleotide
  Sense strand starting at position 3124 of SEQ ID NO: 3738
ccagucaccucugugugaa

SEQ ID NO: 290787 - RNA, 19 nt, Artificial Sequence
  Description of Artificial Sequence: Synthetic oligonucleotide
  Antisense strand to SEQ ID NO: 290786
uucacacagaggugacugg

SEQ ID NO: 290788 - RNA, 19 nt, Artificial Sequence
  Description of Artificial Sequence: Synthetic oligonucleotide
  Sense strand starting at position 3125 of SEQ ID NO: 3738
cagucaccucugugugaaa

SEQ ID NO: 290789 - RNA, 19 nt, Artificial Sequence
  Description of Artificial Sequence: Synthetic oligonucleotide
  Antisense strand to SEQ ID NO: 290788
uuucacacagaggugacug

SEQ ID NO: 290790 - RNA, 19 nt, Artificial Sequence
  Description of Artificial Sequence: Synthetic oligonucleotide
  Sense strand starting at position 3127 of SEQ ID NO: 3738
gucaccucugugugaaacu

SEQ ID NO: 290791 - RNA, 19 nt, Artificial Sequence
  Description of Artificial Sequence: Synthetic oligonucleotide
  Antisense strand to SEQ ID NO: 290790
aguuucacacagaggugac

SEQ ID NO: 290792 - RNA, 19 nt, Artificial Sequence
  Description of Artificial Sequence: Synthetic oligonucleotide
  Sense strand starting at position 3156 of SEQ ID NO: 3738
cuuugauucuucccucugu

SEQ ID NO: 290793 - RNA, 19 nt, Artificial Sequence
  Description of Artificial Sequence: Synthetic oligonucleotide
  Antisense strand to SEQ ID NO: 290792
acagagggaagaaucaaag

SEQ ID NO: 290794 - RNA, 19 nt, Artificial Sequence
  Description of Artificial Sequence: Synthetic oligonucleotide
  Sense strand starting at position 3199 of SEQ ID NO: 3738
ugccaagucccacagagau

SEQ ID NO: 290795 - RNA, 19 nt, Artificial Sequence
  Description of Artificial Sequence: Synthetic oligonucleotide
  Antisense strand to SEQ ID NO: 290794
aucucugugggacuuggca

SEQ ID NO: 290796 - RNA, 19 nt, Artificial Sequence
  Description of Artificial Sequence: Synthetic oligonucleotide
  Sense strand starting at position 3296 of SEQ ID NO: 3738
acuucuuaucugggcuauu

SEQ ID NO: 290797 - RNA, 19 nt, Artificial Sequence
  Description of Artificial Sequence: Synthetic oligonucleotide
  Antisense strand to SEQ ID NO: 290796
aauagcccagauaagaagu

SEQ ID NO: 290798 - RNA, 19 nt, Artificial Sequence
  Description of Artificial Sequence: Synthetic oligonucleotide
  Sense strand starting at position 3299 of SEQ ID NO: 3738
ucuuaucugggcuauugaa

SEQ ID NO: 290799 - RNA, 19 nt, Artificial Sequence
  Description of Artificial Sequence: Synthetic oligonucleotide
  Antisense strand to SEQ ID NO: 290798
uucaauagcccagauaaga

SEQ ID NO: 290800 - RNA, 19 nt, Artificial Sequence
  Description of Artificial Sequence: Synthetic oligonucleotide
  Sense strand starting at position 3307 of SEQ ID NO: 3738
gggcuauugaaauguucuc

SEQ ID NO: 290801 - RNA, 19 nt, Artificial Sequence
  Description of Artificial Sequence: Synthetic oligonucleotide
  Antisense strand to SEQ ID NO: 290800
gagaacauuucaauagccc

SEQ ID NO: 290802 - RNA, 19 nt, Artificial Sequence
  Description of Artificial Sequence: Synthetic oligonucleotide
  Sense strand starting at position 3390 of SEQ ID NO: 3738
aggcuaaucuuccuaauga

SEQ ID NO: 290803 - RNA, 19 nt, Artificial Sequence
  Description of Artificial Sequence: Synthetic oligonucleotide
  Antisense strand to SEQ ID NO: 290802
ucauuaggaagauuagccu

SEQ ID NO: 290804 - RNA, 19 nt, Artificial Sequence
  Description of Artificial Sequence: Synthetic oligonucleotide
  Sense strand starting at position 3413 of SEQ ID NO: 3738
uauacauguuaggauaaag

SEQ ID NO: 290805 - RNA, 19 nt, Artificial Sequence
  Description of Artificial Sequence: Synthetic oligonucleotide
  Antisense strand to SEQ ID NO: 290804
cuuuauccuaacauguaua

SEQ ID NO: 290806 - RNA, 19 nt, Artificial Sequence
  Description of Artificial Sequence: Synthetic oligonucleotide
  Sense strand starting at position 3574 of SEQ ID NO: 3738
aacguuagggaauguaauu

SEQ ID NO: 290807 - RNA, 19 nt, Artificial Sequence
  Description of Artificial Sequence: Synthetic oligonucleotide
  Antisense strand to SEQ ID NO: 290806
aauuacauucccuaacguu

SEQ ID NO: 290808 - RNA, 19 nt, Artificial Sequence
  Description of Artificial Sequence: Synthetic oligonucleotide
  Sense strand starting at position 3626 of SEQ ID NO: 3738
auuggaguuucuguuacua

SEQ ID NO: 290809 - RNA, 19 nt, Artificial Sequence
  Description of Artificial Sequence: Synthetic oligonucleotide
  Antisense strand to SEQ ID NO: 290808
uaguaacagaaacuccaau

SEQ ID NO: 290810 - RNA, 19 nt, Artificial Sequence
  Description of Artificial Sequence: Synthetic oligonucleotide
  Sense strand starting at position 3630 of SEQ ID NO: 3738
gaguuucuguuacuaagga

SEQ ID NO: 290811 - RNA, 19 nt, Artificial Sequence
  Description of Artificial Sequence: Synthetic oligonucleotide
  Antisense strand to SEQ ID NO: 290810
uccuuaguaacagaaacuc

SEQ ID NO: 290812 - RNA, 19 nt, Artificial Sequence
  Description of Artificial Sequence: Synthetic oligonucleotide
  Sense strand starting at position 3710 of SEQ ID NO: 3738
aguggcucccagugaauua

SEQ ID NO: 290813 - RNA, 19 nt, Artificial Sequence
  Description of Artificial Sequence: Synthetic oligonucleotide
  Antisense strand to SEQ ID NO: 290812
uaauucacugggagccacu

SEQ ID NO: 290814 - RNA, 19 nt, Artificial Sequence
  Description of Artificial Sequence: Synthetic oligonucleotide
  Sense strand starting at position 3711 of SEQ ID NO: 3738
guggcucccagugaauuaa

SEQ ID NO: 290815 - RNA, 19 nt, Artificial Sequence
  Description of Artificial Sequence: Synthetic oligonucleotide
  Antisense strand to SEQ ID NO: 290814
uuaauucacugggagccac

SEQ ID NO: 290816 - RNA, 19 nt, Artificial Sequence
  Description of Artificial Sequence: Synthetic oligonucleotide
  Sense strand starting at position 3721 of SEQ ID NO: 3738
gugaauuaagaauguguuc

SEQ ID NO: 290817 - RNA, 19 nt, Artificial Sequence
  Description of Artificial Sequence: Synthetic oligonucleotide
  Antisense strand to SEQ ID NO: 290816
gaacacauucuuaauucac

SEQ ID NO: 290818 - RNA, 19 nt, Artificial Sequence
  Description of Artificial Sequence: Synthetic oligonucleotide
  Sense strand starting at position 3726 of SEQ ID NO: 3738
uuaagaauguguuccucau

SEQ ID NO: 290819 - RNA, 19 nt, Artificial Sequence
  Description of Artificial Sequence: Synthetic oligonucleotide
  Antisense strand to SEQ ID NO: 290818
augaggaacacauucuuaa

SEQ ID NO: 290820 - RNA, 19 nt, Artificial Sequence
  Description of Artificial Sequence: Synthetic oligonucleotide
  Sense strand starting at position 3730 of SEQ ID NO: 3738
gaauguguuccucauccug

SEQ ID NO: 290821 - RNA, 19 nt, Artificial Sequence
  Description of Artificial Sequence: Synthetic oligonucleotide
  Antisense strand to SEQ ID NO: 290820
caggaugaggaacacauuc

SEQ ID NO: 290822 - RNA, 19 nt, Artificial Sequence
  Description of Artificial Sequence: Synthetic oligonucleotide
  Sense strand starting at position 47 of SEQ ID NO: 3739
uuuaaauacggauguccua

SEQ ID NO: 290823 - RNA, 19 nt, Artificial Sequence
  Description of Artificial Sequence: Synthetic oligonucleotide
  Antisense strand to SEQ ID NO: 290822
uaggacauccguauuuaaa

SEQ ID NO: 290824 - RNA, 19 nt, Artificial Sequence
  Description of Artificial Sequence: Synthetic oligonucleotide
  Sense strand starting at position 201 of SEQ ID NO: 3739
ugaggagcuuugccucaau

SEQ ID NO: 290825 - RNA, 19 nt, Artificial Sequence
  Description of Artificial Sequence: Synthetic oligonucleotide
  Antisense strand to SEQ ID NO: 290824
auugaggcaaagcuccuca

SEQ ID NO: 290826 - RNA, 19 nt, Artificial Sequence
  Description of Artificial Sequence: Synthetic oligonucleotide
  Sense strand starting at position 204 of SEQ ID NO: 3739
ggagcuuugccucaauaac

SEQ ID NO: 290827 - RNA, 19 nt, Artificial Sequence
  Description of Artificial Sequence: Synthetic oligonucleotide
  Antisense strand to SEQ ID NO: 290826
guuauugaggcaaagcucc

SEQ ID NO: 290828 - RNA, 19 nt, Artificial Sequence
  Description of Artificial Sequence: Synthetic oligonucleotide
  Sense strand starting at position 307 of SEQ ID NO: 3739
ucaacugaaccugguuaga

SEQ ID NO: 290829 - RNA, 19 nt, Artificial Sequence
  Description of Artificial Sequence: Synthetic oligonucleotide
  Antisense strand to SEQ ID NO: 290828
ucuaaccagguucaguuga

SEQ ID NO: 290830 - RNA, 19 nt, Artificial Sequence
  Description of Artificial Sequence: Synthetic oligonucleotide
  Sense strand starting at position 309 of SEQ ID NO: 3739
aacugaaccugguuagauc

SEQ ID NO: 290831 - RNA, 19 nt, Artificial Sequence
  Description of Artificial Sequence: Synthetic oligonucleotide
  Antisense strand to SEQ ID NO: 290830
gaucuaaccagguucaguu

SEQ ID NO: 290832 - RNA, 19 nt, Artificial Sequence
  Description of Artificial Sequence: Synthetic oligonucleotide
  Sense strand starting at position 317 of SEQ ID NO: 3739
cugguuagaucaguaaaug

SEQ ID NO: 290833 - RNA, 19 nt, Artificial Sequence
  Description of Artificial Sequence: Synthetic oligonucleotide
  Antisense strand to SEQ ID NO: 290832
cauuuacugaucuaaccag

SEQ ID NO: 290834 - RNA, 19 nt, Artificial Sequence
  Description of Artificial Sequence: Synthetic oligonucleotide
  Sense strand starting at position 318 of SEQ ID NO: 3739
ugguuagaucaguaaaugc

SEQ ID NO: 290835 - RNA, 19 nt, Artificial Sequence
  Description of Artificial Sequence: Synthetic oligonucleotide
  Antisense strand to SEQ ID NO: 290834
gcauuuacugaucuaacca

SEQ ID NO: 290836 - RNA, 19 nt, Artificial Sequence
  Description of Artificial Sequence: Synthetic oligonucleotide
  Sense strand starting at position 360 of SEQ ID NO: 3739
ugugaacuuugggcuaaug

SEQ ID NO: 290837 - RNA, 19 nt, Artificial Sequence
  Description of Artificial Sequence: Synthetic oligonucleotide
  Antisense strand to SEQ ID NO: 290836
cauuagcccaaaguucaca

SEQ ID NO: 290838 - RNA, 19 nt, Artificial Sequence
  Description of Artificial Sequence: Synthetic oligonucleotide
  Sense strand starting at position 403 of SEQ ID NO: 3739
uuggauaagucacagaaag

SEQ ID NO: 290839 - RNA, 19 nt, Artificial Sequence
  Description of Artificial Sequence: Synthetic oligonucleotide
  Antisense strand to SEQ ID NO: 290838
cuuucugugacuuauccaa

SEQ ID NO: 290840 - RNA, 19 nt, Artificial Sequence
  Description of Artificial Sequence: Synthetic oligonucleotide
  Sense strand starting at position 618 of SEQ ID NO: 3739
gaggcauauuucugggcaa

SEQ ID NO: 290841 - RNA, 19 nt, Artificial Sequence
  Description of Artificial Sequence: Synthetic oligonucleotide
  Antisense strand to SEQ ID NO: 290840
uugcccagaaauaugccuc

SEQ ID NO: 290842 - RNA, 19 nt, Artificial Sequence
  Description of Artificial Sequence: Synthetic oligonucleotide
  Sense strand starting at position 619 of SEQ ID NO: 3739
aggcauauuucugggcaau

SEQ ID NO: 290843 - RNA, 19 nt, Artificial Sequence
  Description of Artificial Sequence: Synthetic oligonucleotide
  Antisense strand to SEQ ID NO: 290842
auugcccagaaauaugccu

SEQ ID NO: 290844 - RNA, 19 nt, Artificial Sequence
  Description of Artificial Sequence: Synthetic oligonucleotide
  Sense strand starting at position 632 of SEQ ID NO: 3739
ggcaauaugucucacucaa

SEQ ID NO: 290845 - RNA, 19 nt, Artificial Sequence
  Description of Artificial Sequence: Synthetic oligonucleotide
  Antisense strand to SEQ ID NO: 290844
uugagugagacauauugcc

SEQ ID NO: 290846 - RNA, 19 nt, Artificial Sequence
  Description of Artificial Sequence: Synthetic oligonucleotide
  Sense strand starting at position 662 of SEQ ID NO: 3739
ccuauuauccgugggucca

SEQ ID NO: 290847 - RNA, 19 nt, Artificial Sequence
  Description of Artificial Sequence: Synthetic oligonucleotide
  Antisense strand to SEQ ID NO: 290846
uggacccacggauaauagg

SEQ ID NO: 290848 - RNA, 19 nt, Artificial Sequence
  Description of Artificial Sequence: Synthetic oligonucleotide
  Sense strand starting at position 907 of SEQ ID NO: 3739
gcuggcucuucccuaacaa

SEQ ID NO: 290849 - RNA, 19 nt, Artificial Sequence
  Description of Artificial Sequence: Synthetic oligonucleotide
  Antisense strand to SEQ ID NO: 290848
uuguuagggaagagccagc

SEQ ID NO: 290850 - RNA, 19 nt, Artificial Sequence
  Description of Artificial Sequence: Synthetic oligonucleotide
  Sense strand starting at position 946 of SEQ ID NO: 3739
acugguucuugcucaaaga

SEQ ID NO: 290851 - RNA, 19 nt, Artificial Sequence
  Description of Artificial Sequence: Synthetic oligonucleotide
  Antisense strand to SEQ ID NO: 290850
ucuuugagcaagaaccagu

SEQ ID NO: 290852 - RNA, 19 nt, Artificial Sequence
  Description of Artificial Sequence: Synthetic oligonucleotide
  Sense strand starting at position 947 of SEQ ID NO: 3739
cugguucuugcucaaagau

SEQ ID NO: 290853 - RNA, 19 nt, Artificial Sequence
  Description of Artificial Sequence: Synthetic oligonucleotide
  Antisense strand to SEQ ID NO: 290852
aucuuugagcaagaaccag

SEQ ID NO: 290854 - RNA, 19 nt, Artificial Sequence
  Description of Artificial Sequence: Synthetic oligonucleotide
  Sense strand starting at position 1089 of SEQ ID NO: 3739
agaauuaacucuuaggagu

SEQ ID NO: 290855 - RNA, 19 nt, Artificial Sequence
  Description of Artificial Sequence: Synthetic oligonucleotide
  Antisense strand to SEQ ID NO: 290854
acuccuaagaguuaauucu

SEQ ID NO: 290856 - RNA, 19 nt, Artificial Sequence
  Description of Artificial Sequence: Synthetic oligonucleotide
  Sense strand starting at position 1092 of SEQ ID NO: 3739
auuaacucuuaggagugua

SEQ ID NO: 290857 - RNA, 19 nt, Artificial Sequence
  Description of Artificial Sequence: Synthetic oligonucleotide
  Antisense strand to SEQ ID NO: 290856
uacacuccuaagaguuaau

SEQ ID NO: 290858 - RNA, 19 nt, Artificial Sequence
  Description of Artificial Sequence: Synthetic oligonucleotide
  Sense strand starting at position 1095 of SEQ ID NO: 3739
aacucuuaggaguguauaa

SEQ ID NO: 290859 - RNA, 19 nt, Artificial Sequence
  Description of Artificial Sequence: Synthetic oligonucleotide
  Antisense strand to SEQ ID NO: 290858
uuauacacuccuaagaguu

SEQ ID NO: 290860 - RNA, 19 nt, Artificial Sequence
  Description of Artificial Sequence: Synthetic oligonucleotide
  Sense strand starting at position 1111 of SEQ ID NO: 3739
uaagcauauggguguauga

SEQ ID NO: 290861 - RNA, 19 nt, Artificial Sequence
  Description of Artificial Sequence: Synthetic oligonucleotide
  Antisense strand to SEQ ID NO: 290860
ucauacacccauaugcuua

SEQ ID NO: 290862 - RNA, 19 nt, Artificial Sequence
  Description of Artificial Sequence: Synthetic oligonucleotide
  Sense strand starting at position 1113 of SEQ ID NO: 3739
agcauauggguguaugaac

SEQ ID NO: 290863 - RNA, 19 nt, Artificial Sequence
  Description of Artificial Sequence: Synthetic oligonucleotide
  Antisense strand to SEQ ID NO: 290862
guucauacacccauaugcu

SEQ ID NO: 290864 - RNA, 19 nt, Artificial Sequence
  Description of Artificial Sequence: Synthetic oligonucleotide
  Sense strand starting at position 2614 of SEQ ID NO: 3739
gggcuugugcgguaaagca

SEQ ID NO: 290865 - RNA, 19 nt, Artificial Sequence
  Description of Artificial Sequence: Synthetic oligonucleotide
  Antisense strand to SEQ ID NO: 290864
ugcuuuaccgcacaagccc

SEQ ID NO: 290866 - RNA, 19 nt, Artificial Sequence
  Description of Artificial Sequence: Synthetic oligonucleotide
  Sense strand starting at position 2733 of SEQ ID NO: 3739
cagccauaccgcuagagaa

SEQ ID NO: 290867 - RNA, 19 nt, Artificial Sequence
  Description of Artificial Sequence: Synthetic oligonucleotide
  Antisense strand to SEQ ID NO: 290866
uucucuagcgguauggcug

SEQ ID NO: 290868 - RNA, 19 nt, Artificial Sequence
  Description of Artificial Sequence: Synthetic oligonucleotide
  Sense strand starting at position 3133 of SEQ ID NO: 3739
gcgaguuacaagggaaacu

SEQ ID NO: 290869 - RNA, 19 nt, Artificial Sequence
  Description of Artificial Sequence: Synthetic oligonucleotide
  Antisense strand to SEQ ID NO: 290868
aguuucccuuguaacucgc

SEQ ID NO: 290870 - RNA, 19 nt, Artificial Sequence
  Description of Artificial Sequence: Synthetic oligonucleotide
  Sense strand starting at position 3143 of SEQ ID NO: 3739
agggaaacuucugcugagu

SEQ ID NO: 290871 - RNA, 19 nt, Artificial Sequence
  Description of Artificial Sequence: Synthetic oligonucleotide
  Antisense strand to SEQ ID NO: 290870
acucagcagaaguuucccu

SEQ ID NO: 290872 - RNA, 19 nt, Artificial Sequence
  Description of Artificial Sequence: Synthetic oligonucleotide
  Sense strand starting at position 3146 of SEQ ID NO: 3739
gaaacuucugcugagucuu

SEQ ID NO: 290873 - RNA, 19 nt, Artificial Sequence
  Description of Artificial Sequence: Synthetic oligonucleotide
  Antisense strand to SEQ ID NO: 290872
aagacucagcagaaguuuc

SEQ ID NO: 290874 - RNA, 19 nt, Artificial Sequence
  Description of Artificial Sequence: Synthetic oligonucleotide
  Sense strand starting at position 3208 of SEQ ID NO: 3739
gcuugugaauuguucuuua

SEQ ID NO: 290875 - RNA, 19 nt, Artificial Sequence
  Description of Artificial Sequence: Synthetic oligonucleotide
  Antisense strand to SEQ ID NO: 290874
uaaagaacaauucacaagc

SEQ ID NO: 290876 - RNA, 19 nt, Artificial Sequence
  Description of Artificial Sequence: Synthetic oligonucleotide
  Sense strand starting at position 3211 of SEQ ID NO: 3739
ugugaauuguucuuuaaag

SEQ ID NO: 290877 - RNA, 19 nt, Artificial Sequence
  Description of Artificial Sequence: Synthetic oligonucleotide
  Antisense strand to SEQ ID NO: 290876
cuuuaaagaacaauucaca

SEQ ID NO: 290878 - RNA, 19 nt, Artificial Sequence
  Description of Artificial Sequence: Synthetic oligonucleotide
  Sense strand starting at position 3482 of SEQ ID NO: 3739
ggaagacuuaauuguggcu

SEQ ID NO: 290879 - RNA, 19 nt, Artificial Sequence
  Description of Artificial Sequence: Synthetic oligonucleotide
  Antisense strand to SEQ ID NO: 290878
agccacaauuaagucuucc

SEQ ID NO: 290880 - RNA, 19 nt, Artificial Sequence
  Description of Artificial Sequence: Synthetic oligonucleotide
  Sense strand starting at position 3494 of SEQ ID NO: 3739
uguggcuaaccucaauuaa

SEQ ID NO: 290881 - RNA, 19 nt, Artificial Sequence
  Description of Artificial Sequence: Synthetic oligonucleotide
  Antisense strand to SEQ ID NO: 290880
uuaauugagguuagccaca

SEQ ID NO: 290882 - RNA, 19 nt, Artificial Sequence
  Description of Artificial Sequence: Synthetic oligonucleotide
  Sense strand starting at position 3571 of SEQ ID NO: 3739
augacauauuugugcaaau

SEQ ID NO: 290883 - RNA, 19 nt, Artificial Sequence
  Description of Artificial Sequence: Synthetic oligonucleotide
  Antisense strand to SEQ ID NO: 290882
auuugcacaaauaugucau

SEQ ID NO: 290884 - RNA, 19 nt, Artificial Sequence
  Description of Artificial Sequence: Synthetic oligonucleotide
  Sense strand starting at position 3681 of SEQ ID NO: 3739
acuuguaaggauugugugu

SEQ ID NO: 290885 - RNA, 19 nt, Artificial Sequence
  Description of Artificial Sequence: Synthetic oligonucleotide
  Antisense strand to SEQ ID NO: 290884
acacacaauccuuacaagu

SEQ ID NO: 290886 - RNA, 19 nt, Artificial Sequence
  Description of Artificial Sequence: Synthetic oligonucleotide
  Sense strand starting at position 3721 of SEQ ID NO: 3739
gggagguagugucagauga

SEQ ID NO: 290887 - RNA, 19 nt, Artificial Sequence
  Description of Artificial Sequence: Synthetic oligonucleotide
  Antisense strand to SEQ ID NO: 290886
ucaucugacacuaccuccc

SEQ ID NO: 290888 - RNA, 19 nt, Artificial Sequence
  Description of Artificial Sequence: Synthetic oligonucleotide
  Sense strand starting at position 3723 of SEQ ID NO: 3739
gagguagugucagaugaag

SEQ ID NO: 290889 - RNA, 19 nt, Artificial Sequence
  Description of Artificial Sequence: Synthetic oligonucleotide
  Antisense strand to SEQ ID NO: 290888
cuucaucugacacuaccuc

SEQ ID NO: 290890 - RNA, 19 nt, Artificial Sequence
  Description of Artificial Sequence: Synthetic oligonucleotide
  Sense strand starting at position 3725 of SEQ ID NO: 3739
gguagugucagaugaagag

SEQ ID NO: 290891 - RNA, 19 nt, Artificial Sequence
  Description of Artificial Sequence: Synthetic oligonucleotide
  Antisense strand to SEQ ID NO: 290890
cucuucaucugacacuacc

SEQ ID NO: 290892 - RNA, 19 nt, Artificial Sequence
  Description of Artificial Sequence: Synthetic oligonucleotide
  Sense strand starting at position 3735 of SEQ ID NO: 3739
gaugaagagcugcacauau

SEQ ID NO: 290893 - RNA, 19 nt, Artificial Sequence
  Description of Artificial Sequence: Synthetic oligonucleotide
  Antisense strand to SEQ ID NO: 290892
auaugugcagcucuucauc

SEQ ID NO: 290894 - RNA, 19 nt, Artificial Sequence
  Description of Artificial Sequence: Synthetic oligonucleotide
  Sense strand starting at position 3756 of SEQ ID NO: 3739
auaucuggcuuuccagaau

SEQ ID NO: 290895 - RNA, 19 nt, Artificial Sequence
  Description of Artificial Sequence: Synthetic oligonucleotide
  Antisense strand to SEQ ID NO: 290894
auucuggaaagccagauau

SEQ ID NO: 290896 - RNA, 19 nt, Artificial Sequence
  Description of Artificial Sequence: Synthetic oligonucleotide
  Sense strand starting at position 3759 of SEQ ID NO: 3739
ucuggcuuuccagaaugca

SEQ ID NO: 290897 - RNA, 19 nt, Artificial Sequence
  Description of Artificial Sequence: Synthetic oligonucleotide
  Antisense strand to SEQ ID NO: 290896
ugcauucuggaaagccaga

SEQ ID NO: 290898 - RNA, 19 nt, Artificial Sequence
  Description of Artificial Sequence: Synthetic oligonucleotide
  Sense strand starting at position 3762 of SEQ ID NO: 3739
ggcuuuccagaaugcaguu

SEQ ID NO: 290899 - RNA, 19 nt, Artificial Sequence
  Description of Artificial Sequence: Synthetic oligonucleotide
  Antisense strand to SEQ ID NO: 290898
aacugcauucuggaaagcc

SEQ ID NO: 290900 - RNA, 19 nt, Artificial Sequence
  Description of Artificial Sequence: Synthetic oligonucleotide
  Sense strand starting at position 3786 of SEQ ID NO: 3739
cucuaugugcacugaagaa

SEQ ID NO: 290901 - RNA, 19 nt, Artificial Sequence
  Description of Artificial Sequence: Synthetic oligonucleotide
  Antisense strand to SEQ ID NO: 290900
uucuucagugcacauagag

SEQ ID NO: 290902 - RNA, 19 nt, Artificial Sequence
  Description of Artificial Sequence: Synthetic oligonucleotide
  Sense strand starting at position 63 of SEQ ID NO: 3740
uuugaaaucgauugggugu

SEQ ID NO: 290903 - RNA, 19 nt, Artificial Sequence
  Description of Artificial Sequence: Synthetic oligonucleotide
  Antisense strand to SEQ ID NO: 290902
acacccaaucgauuucaaa

SEQ ID NO: 290904 - RNA, 19 nt, Artificial Sequence
  Description of Artificial Sequence: Synthetic oligonucleotide
  Sense strand starting at position 74 of SEQ ID NO: 3740
uugggugugcuccaugaaa

SEQ ID NO: 290905 - RNA, 19 nt, Artificial Sequence
  Description of Artificial Sequence: Synthetic oligonucleotide
  Antisense strand to SEQ ID NO: 290904
uuucauggagcacacccaa

SEQ ID NO: 290906 - RNA, 19 nt, Artificial Sequence
  Description of Artificial Sequence: Synthetic oligonucleotide
  Sense strand starting at position 76 of SEQ ID NO: 3740
gggugugcuccaugaaagg

SEQ ID NO: 290907 - RNA, 19 nt, Artificial Sequence
  Description of Artificial Sequence: Synthetic oligonucleotide
  Antisense strand to SEQ ID NO: 290906
ccuuucauggagcacaccc

SEQ ID NO: 290908 - RNA, 19 nt, Artificial Sequence
  Description of Artificial Sequence: Synthetic oligonucleotide
  Sense strand starting at position 330 of SEQ ID NO: 3740
accuaaugccaugguaaca

SEQ ID NO: 290909 - RNA, 19 nt, Artificial Sequence
  Description of Artificial Sequence: Synthetic oligonucleotide
  Antisense strand to SEQ ID NO: 290908
uguuaccauggcauuaggu

SEQ ID NO: 290910 - RNA, 19 nt, Artificial Sequence
  Description of Artificial Sequence: Synthetic oligonucleotide
  Sense strand starting at position 367 of SEQ ID NO: 3740
uaagaagccguuuggaauu

SEQ ID NO: 290911 - RNA, 19 nt, Artificial Sequence
  Description of Artificial Sequence: Synthetic oligonucleotide
  Antisense strand to SEQ ID NO: 290910
aauuccaaacggcuucuua

SEQ ID NO: 290912 - RNA, 19 nt, Artificial Sequence
  Description of Artificial Sequence: Synthetic oligonucleotide
  Sense strand starting at position 373 of SEQ ID NO: 3740
gccguuuggaauuaaacau

SEQ ID NO: 290913 - RNA, 19 nt, Artificial Sequence
  Description of Artificial Sequence: Synthetic oligonucleotide
  Antisense strand to SEQ ID NO: 290912
auguuuaauuccaaacggc

SEQ ID NO: 290914 - RNA, 19 nt, Artificial Sequence
  Description of Artificial Sequence: Synthetic oligonucleotide
  Sense strand starting at position 609 of SEQ ID NO: 3740
cggaaagguuaugcacaaa

SEQ ID NO: 290915 - RNA, 19 nt, Artificial Sequence
  Description of Artificial Sequence: Synthetic oligonucleotide
  Antisense strand to SEQ ID NO: 290914
uuugugcauaaccuuuccg

SEQ ID NO: 290916 - RNA, 19 nt, Artificial Sequence
  Description of Artificial Sequence: Synthetic oligonucleotide
  Sense strand starting at position 2188 of SEQ ID NO: 3740
gcugauuacagccagagau

SEQ ID NO: 290917 - RNA, 19 nt, Artificial Sequence
  Description of Artificial Sequence: Synthetic oligonucleotide
  Antisense strand to SEQ ID NO: 290916
aucucuggcuguaaucagc

SEQ ID NO: 290918 - RNA, 19 nt, Artificial Sequence
  Description of Artificial Sequence: Synthetic oligonucleotide
  Sense strand starting at position 2532 of SEQ ID NO: 3740
cagucaugcacuuggguga

SEQ ID NO: 290919 - RNA, 19 nt, Artificial Sequence
  Description of Artificial Sequence: Synthetic oligonucleotide
  Antisense strand to SEQ ID NO: 290918
ucacccaagugcaugacug

SEQ ID NO: 290920 - RNA, 19 nt, Artificial Sequence
  Description of Artificial Sequence: Synthetic oligonucleotide
  Sense strand starting at position 2559 of SEQ ID NO: 3740
ugaagagucacgggaacca

SEQ ID NO: 290921 - RNA, 19 nt, Artificial Sequence
  Description of Artificial Sequence: Synthetic oligonucleotide
  Antisense strand to SEQ ID NO: 290920
ugguucccgugacucuuca

SEQ ID NO: 290922 - RNA, 19 nt, Artificial Sequence
  Description of Artificial Sequence: Synthetic oligonucleotide
  Sense strand starting at position 2613 of SEQ ID NO: 3740
auggcugugggucauuaau

SEQ ID NO: 290923 - RNA, 19 nt, Artificial Sequence
  Description of Artificial Sequence: Synthetic oligonucleotide
  Antisense strand to SEQ ID NO: 290922
auuaaugacccacagccau

SEQ ID NO: 290924 - RNA, 19 nt, Artificial Sequence
  Description of Artificial Sequence: Synthetic oligonucleotide
  Sense strand starting at position 2615 of SEQ ID NO: 3740
ggcugugggucauuaauuu

SEQ ID NO: 290925 - RNA, 19 nt, Artificial Sequence
  Description of Artificial Sequence: Synthetic oligonucleotide
  Antisense strand to SEQ ID NO: 290924
aaauuaaugacccacagcc

SEQ ID NO: 290926 - RNA, 19 nt, Artificial Sequence
  Description of Artificial Sequence: Synthetic oligonucleotide
  Sense strand starting at position 2625 of SEQ ID NO: 3740
cauuaauuucuccguggcu

SEQ ID NO: 290927 - RNA, 19 nt, Artificial Sequence
  Description of Artificial Sequence: Synthetic oligonucleotide
  Antisense strand to SEQ ID NO: 290926
agccacggagaaauuaaug

SEQ ID NO: 290928 - RNA, 19 nt, Artificial Sequence
  Description of Artificial Sequence: Synthetic oligonucleotide
  Sense strand starting at position 2627 of SEQ ID NO: 3740
uuaauuucuccguggcuga

SEQ ID NO: 290929 - RNA, 19 nt, Artificial Sequence
  Description of Artificial Sequence: Synthetic oligonucleotide
  Antisense strand to SEQ ID NO: 290928
ucagccacggagaaauuaa

SEQ ID NO: 290930 - RNA, 19 nt, Artificial Sequence
  Description of Artificial Sequence: Synthetic oligonucleotide
  Sense strand starting at position 2680 of SEQ ID NO: 3740
gaaggacacugcuucggau

SEQ ID NO: 290931 - RNA, 19 nt, Artificial Sequence
  Description of Artificial Sequence: Synthetic oligonucleotide
  Antisense strand to SEQ ID NO: 290930
auccgaagcaguguccuuc

SEQ ID NO: 290932 - RNA, 19 nt, Artificial Sequence
  Description of Artificial Sequence: Synthetic oligonucleotide
  Sense strand starting at position 2789 of SEQ ID NO: 3740
cuaccuuguggcuggaauu

SEQ ID NO: 290933 - RNA, 19 nt, Artificial Sequence
  Description of Artificial Sequence: Synthetic oligonucleotide
  Antisense strand to SEQ ID NO: 290932
aauuccagccacaagguag

SEQ ID NO: 290934 - RNA, 19 nt, Artificial Sequence
  Description of Artificial Sequence: Synthetic oligonucleotide
  Sense strand starting at position 2790 of SEQ ID NO: 3740
uaccuuguggcuggaauua

SEQ ID NO: 290935 - RNA, 19 nt, Artificial Sequence
  Description of Artificial Sequence: Synthetic oligonucleotide
  Antisense strand to SEQ ID NO: 290934
uaauuccagccacaaggua

SEQ ID NO: 290936 - RNA, 19 nt, Artificial Sequence
  Description of Artificial Sequence: Synthetic oligonucleotide
  Sense strand starting at position 2809 of SEQ ID NO: 3740
aaugaauuaacguguguga

SEQ ID NO: 290937 - RNA, 19 nt, Artificial Sequence
  Description of Artificial Sequence: Synthetic oligonucleotide
  Antisense strand to SEQ ID NO: 290936
ucacacacguuaauucauu

SEQ ID NO: 290938 - RNA, 19 nt, Artificial Sequence
  Description of Artificial Sequence: Synthetic oligonucleotide
  Sense strand starting at position 2811 of SEQ ID NO: 3740
ugaauuaacgugugugaau

SEQ ID NO: 290939 - RNA, 19 nt, Artificial Sequence
  Description of Artificial Sequence: Synthetic oligonucleotide
  Antisense strand to SEQ ID NO: 290938
auucacacacguuaauuca

SEQ ID NO: 290940 - RNA, 19 nt, Artificial Sequence
  Description of Artificial Sequence: Synthetic oligonucleotide
  Sense strand starting at position 2812 of SEQ ID NO: 3740
gaauuaacgugugugaaug

SEQ ID NO: 290941 - RNA, 19 nt, Artificial Sequence
  Description of Artificial Sequence: Synthetic oligonucleotide
  Antisense strand to SEQ ID NO: 290940
cauucacacacguuaauuc

SEQ ID NO: 290942 - RNA, 19 nt, Artificial Sequence
  Description of Artificial Sequence: Synthetic oligonucleotide
  Sense strand starting at position 2822 of SEQ ID NO: 3740
gugugaaugugacuagaau

SEQ ID NO: 290943 - RNA, 19 nt, Artificial Sequence
  Description of Artificial Sequence: Synthetic oligonucleotide
  Antisense strand to SEQ ID NO: 290942
auucuagucacauucacac

SEQ ID NO: 290944 - RNA, 19 nt, Artificial Sequence
  Description of Artificial Sequence: Synthetic oligonucleotide
  Sense strand starting at position 2875 of SEQ ID NO: 3740
ugcuguuaccgugaauauu

SEQ ID NO: 290945 - RNA, 19 nt, Artificial Sequence
  Description of Artificial Sequence: Synthetic oligonucleotide
  Antisense strand to SEQ ID NO: 290944
aauauucacgguaacagca

SEQ ID NO: 290946 - RNA, 19 nt, Artificial Sequence
  Description of Artificial Sequence: Synthetic oligonucleotide
  Sense strand starting at position 3027 of SEQ ID NO: 3740
ugcacauuuggguguugau

SEQ ID NO: 290947 - RNA, 19 nt, Artificial Sequence
  Description of Artificial Sequence: Synthetic oligonucleotide
  Antisense strand to SEQ ID NO: 290946
aucaacacccaaaugugca

SEQ ID NO: 290948 - RNA, 19 nt, Artificial Sequence
  Description of Artificial Sequence: Synthetic oligonucleotide
  Sense strand starting at position 3043 of SEQ ID NO: 3740
gauuauauggcuuacgauc

SEQ ID NO: 290949 - RNA, 19 nt, Artificial Sequence
  Description of Artificial Sequence: Synthetic oligonucleotide
  Antisense strand to SEQ ID NO: 290948
gaucguaagccauauaauc

SEQ ID NO: 290950 - RNA, 19 nt, Artificial Sequence
  Description of Artificial Sequence: Synthetic oligonucleotide
  Sense strand starting at position 3049 of SEQ ID NO: 3740
auggcuuacgaucaagacu

SEQ ID NO: 290951 - RNA, 19 nt, Artificial Sequence
  Description of Artificial Sequence: Synthetic oligonucleotide
  Antisense strand to SEQ ID NO: 290950
agucuugaucguaagccau

SEQ ID NO: 290952 - RNA, 19 nt, Artificial Sequence
  Description of Artificial Sequence: Synthetic oligonucleotide
  Sense strand starting at position 3100 of SEQ ID NO: 3740
gucucuugucaggauugua

SEQ ID NO: 290953 - RNA, 19 nt, Artificial Sequence
  Description of Artificial Sequence: Synthetic oligonucleotide
  Antisense strand to SEQ ID NO: 290952
uacaauccugacaagagac

SEQ ID NO: 290954 - RNA, 19 nt, Artificial Sequence
  Description of Artificial Sequence: Synthetic oligonucleotide
  Sense strand starting at position 3151 of SEQ ID NO: 3740
ggcuuagaaugcucugaag

SEQ ID NO: 290955 - RNA, 19 nt, Artificial Sequence
  Description of Artificial Sequence: Synthetic oligonucleotide
  Antisense strand to SEQ ID NO: 290954
cuucagagcauucuaagcc

SEQ ID NO: 290956 - RNA, 19 nt, Artificial Sequence
  Description of Artificial Sequence: Synthetic oligonucleotide
  Sense strand starting at position 3218 of SEQ ID NO: 3740
aaacaaagacguuguaaau

SEQ ID NO: 290957 - RNA, 19 nt, Artificial Sequence
  Description of Artificial Sequence: Synthetic oligonucleotide
  Antisense strand to SEQ ID NO: 290956
auuuacaacgucuuuguuu

SEQ ID NO: 290958 - RNA, 19 nt, Artificial Sequence
  Description of Artificial Sequence: Synthetic oligonucleotide
  Sense strand starting at position 3238 of SEQ ID NO: 3740
guugcugccugagucauuu

SEQ ID NO: 290959 - RNA, 19 nt, Artificial Sequence
  Description of Artificial Sequence: Synthetic oligonucleotide
  Antisense strand to SEQ ID NO: 290958
aaaugacucaggcagcaac

SEQ ID NO: 290960 - RNA, 19 nt, Artificial Sequence
  Description of Artificial Sequence: Synthetic oligonucleotide
  Sense strand starting at position 3274 of SEQ ID NO: 3740
cugaauguccucugaccua

SEQ ID NO: 290961 - RNA, 19 nt, Artificial Sequence
  Description of Artificial Sequence: Synthetic oligonucleotide
  Antisense strand to SEQ ID NO: 290960
uaggucagaggacauucag

SEQ ID NO: 290962 - RNA, 19 nt, Artificial Sequence
  Description of Artificial Sequence: Synthetic oligonucleotide
  Sense strand starting at position 3305 of SEQ ID NO: 3740
gauggaguuguaugaguaa

SEQ ID NO: 290963 - RNA, 19 nt, Artificial Sequence
  Description of Artificial Sequence: Synthetic oligonucleotide
  Antisense strand to SEQ ID NO: 290962
uuacucauacaacuccauc

SEQ ID NO: 290964 - RNA, 19 nt, Artificial Sequence
  Description of Artificial Sequence: Synthetic oligonucleotide
  Sense strand starting at position 3308 of SEQ ID NO: 3740
ggaguuguaugaguaacuu

SEQ ID NO: 290965 - RNA, 19 nt, Artificial Sequence
  Description of Artificial Sequence: Synthetic oligonucleotide
  Antisense strand to SEQ ID NO: 290964
aaguuacucauacaacucc

SEQ ID NO: 290966 - RNA, 19 nt, Artificial Sequence
  Description of Artificial Sequence: Synthetic oligonucleotide
  Sense strand starting at position 3312 of SEQ ID NO: 3740
uuguaugaguaacuuacaa

SEQ ID NO: 290967 - RNA, 19 nt, Artificial Sequence
  Description of Artificial Sequence: Synthetic oligonucleotide
  Antisense strand to SEQ ID NO: 290966
uuguaaguuacucauacaa

SEQ ID NO: 290968 - RNA, 19 nt, Artificial Sequence
  Description of Artificial Sequence: Synthetic oligonucleotide
  Sense strand starting at position 3365 of SEQ ID NO: 3740
guucauauccgggagcacu

SEQ ID NO: 290969 - RNA, 19 nt, Artificial Sequence
  Description of Artificial Sequence: Synthetic oligonucleotide
  Antisense strand to SEQ ID NO: 290968
agugcucccggauaugaac

SEQ ID NO: 290970 - RNA, 19 nt, Artificial Sequence
  Description of Artificial Sequence: Synthetic oligonucleotide
  Sense strand starting at position 3631 of SEQ ID NO: 3740
uuuauaggucugugauagu

SEQ ID NO: 290971 - RNA, 19 nt, Artificial Sequence
  Description of Artificial Sequence: Synthetic oligonucleotide
  Antisense strand to SEQ ID NO: 290970
acuaucacagaccuauaaa

SEQ ID NO: 290972 - RNA, 19 nt, Artificial Sequence
  Description of Artificial Sequence: Synthetic oligonucleotide
  Sense strand starting at position 3736 of SEQ ID NO: 3740
guggguuugcagggaaauc

SEQ ID NO: 290973 - RNA, 19 nt, Artificial Sequence
  Description of Artificial Sequence: Synthetic oligonucleotide
  Antisense strand to SEQ ID NO: 290972
gauuucccugcaaacccac

SEQ ID NO: 290974 - RNA, 19 nt, Artificial Sequence
  Description of Artificial Sequence: Synthetic oligonucleotide
  Sense strand starting at position 3737 of SEQ ID NO: 3740
uggguuugcagggaaauca

SEQ ID NO: 290975 - RNA, 19 nt, Artificial Sequence
  Description of Artificial Sequence: Synthetic oligonucleotide
  Antisense strand to SEQ ID NO: 290974
ugauuucccugcaaaccca

SEQ ID NO: 290976 - RNA, 19 nt, Artificial Sequence
  Description of Artificial Sequence: Synthetic oligonucleotide
  Sense strand starting at position 3814 of SEQ ID NO: 3740
ucugauauaguguaauccu

SEQ ID NO: 290977 - RNA, 19 nt, Artificial Sequence
  Description of Artificial Sequence: Synthetic oligonucleotide
  Antisense strand to SEQ ID NO: 290976
aggauuacacuauaucaga

SEQ ID NO: 290978 - RNA, 19 nt, Artificial Sequence
  Description of Artificial Sequence: Synthetic oligonucleotide
  Sense strand starting at position 3871 of SEQ ID NO: 3740
gaugcuucugccgaagagu

SEQ ID NO: 290979 - RNA, 19 nt, Artificial Sequence
  Description of Artificial Sequence: Synthetic oligonucleotide
  Antisense strand to SEQ ID NO: 290978
acucuucggcagaagcauc

SEQ ID NO: 290980 - RNA, 19 nt, Artificial Sequence
  Description of Artificial Sequence: Synthetic oligonucleotide
  Sense strand starting at position 3874 of SEQ ID NO: 3740
gcuucugccgaagaguaga

SEQ ID NO: 290981 - RNA, 19 nt, Artificial Sequence
  Description of Artificial Sequence: Synthetic oligonucleotide
  Antisense strand to SEQ ID NO: 290980
ucuacucuucggcagaagc

SEQ ID NO: 290982 - RNA, 19 nt, Artificial Sequence
  Description of Artificial Sequence: Synthetic oligonucleotide
  Sense strand starting at position 122 of SEQ ID NO: 3741
agaggagugugaguugaug

SEQ ID NO: 290983 - RNA, 19 nt, Artificial Sequence
  Description of Artificial Sequence: Synthetic oligonucleotide
  Antisense strand to SEQ ID NO: 290982
caucaacucacacuccucu

SEQ ID NO: 290984 - RNA, 19 nt, Artificial Sequence
  Description of Artificial Sequence: Synthetic oligonucleotide
  Sense strand starting at position 292 of SEQ ID NO: 3741
ugggcagaauaucauaaga

SEQ ID NO: 290985 - RNA, 19 nt, Artificial Sequence
  Description of Artificial Sequence: Synthetic oligonucleotide
  Antisense strand to SEQ ID NO: 290984
ucuuaugauauucugccca

SEQ ID NO: 290986 - RNA, 19 nt, Artificial Sequence
  Description of Artificial Sequence: Synthetic oligonucleotide
  Sense strand starting at position 329 of SEQ ID NO: 3741
gaaggaaacucccauggaa

SEQ ID NO: 290987 - RNA, 19 nt, Artificial Sequence
  Description of Artificial Sequence: Synthetic oligonucleotide
  Antisense strand to SEQ ID NO: 290986
uuccaugggaguuuccuuc

SEQ ID NO: 290988 - RNA, 19 nt, Artificial Sequence
  Description of Artificial Sequence: Synthetic oligonucleotide
  Sense strand starting at position 794 of SEQ ID NO: 3741
ucagccuggucuuccuaau

SEQ ID NO: 290989 - RNA, 19 nt, Artificial Sequence
  Description of Artificial Sequence: Synthetic oligonucleotide
  Antisense strand to SEQ ID NO: 290988
auuaggaagaccaggcuga

SEQ ID NO: 290990 - RNA, 19 nt, Artificial Sequence
  Description of Artificial Sequence: Synthetic oligonucleotide
  Sense strand starting at position 800 of SEQ ID NO: 3741
uggucuuccuaauucuaag

SEQ ID NO: 290991 - RNA, 19 nt, Artificial Sequence
  Description of Artificial Sequence: Synthetic oligonucleotide
  Antisense strand to SEQ ID NO: 290990
cuuagaauuaggaagacca

SEQ ID NO: 290992 - RNA, 19 nt, Artificial Sequence
  Description of Artificial Sequence: Synthetic oligonucleotide
  Sense strand starting at position 850 of SEQ ID NO: 3741
gcaucucagucugugcaua

SEQ ID NO: 290993 - RNA, 19 nt, Artificial Sequence
  Description of Artificial Sequence: Synthetic oligonucleotide
  Antisense strand to SEQ ID NO: 290992
uaugcacagacugagaugc

SEQ ID NO: 290994 - RNA, 19 nt, Artificial Sequence
  Description of Artificial Sequence: Synthetic oligonucleotide
  Sense strand starting at position 852 of SEQ ID NO: 3741
aucucagucugugcauaau

SEQ ID NO: 290995 - RNA, 19 nt, Artificial Sequence
  Description of Artificial Sequence: Synthetic oligonucleotide
  Antisense strand to SEQ ID NO: 290994
auuaugcacagacugagau

SEQ ID NO: 290996 - RNA, 19 nt, Artificial Sequence
  Description of Artificial Sequence: Synthetic oligonucleotide
  Sense strand starting at position 855 of SEQ ID NO: 3741
ucagucugugcauaaugga

SEQ ID NO: 290997 - RNA, 19 nt, Artificial Sequence
  Description of Artificial Sequence: Synthetic oligonucleotide
  Antisense strand to SEQ ID NO: 290996
uccauuaugcacagacuga

SEQ ID NO: 290998 - RNA, 19 nt, Artificial Sequence
  Description of Artificial Sequence: Synthetic oligonucleotide
  Sense strand starting at position 1437 of SEQ ID NO: 3741
ccaaguuugcaggauggua

SEQ ID NO: 290999 - RNA, 19 nt, Artificial Sequence
  Description of Artificial Sequence: Synthetic oligonucleotide
  Antisense strand to SEQ ID NO: 290998
uaccauccugcaaacuugg

SEQ ID NO: 291000 - RNA, 19 nt, Artificial Sequence
  Description of Artificial Sequence: Synthetic oligonucleotide
  Sense strand starting at position 1634 of SEQ ID NO: 3741
acaauacuuccagaggcuu

SEQ ID NO: 291001 - RNA, 19 nt, Artificial Sequence
  Description of Artificial Sequence: Synthetic oligonucleotide
  Antisense strand to SEQ ID NO: 291000
aagccucuggaaguauugu

SEQ ID NO: 291002 - RNA, 19 nt, Artificial Sequence
  Description of Artificial Sequence: Synthetic oligonucleotide
  Sense strand starting at position 1853 of SEQ ID NO: 3741
aucggaguuggcugggauu

SEQ ID NO: 291003 - RNA, 19 nt, Artificial Sequence
  Description of Artificial Sequence: Synthetic oligonucleotide
  Antisense strand to SEQ ID NO: 291002
aaucccagccaacuccgau

SEQ ID NO: 291004 - RNA, 19 nt, Artificial Sequence
  Description of Artificial Sequence: Synthetic oligonucleotide
  Sense strand starting at position 1855 of SEQ ID NO: 3741
cggaguuggcugggauuga

SEQ ID NO: 291005 - RNA, 19 nt, Artificial Sequence
  Description of Artificial Sequence: Synthetic oligonucleotide
  Antisense strand to SEQ ID NO: 291004
ucaaucccagccaacuccg

SEQ ID NO: 291006 - RNA, 19 nt, Artificial Sequence
  Description of Artificial Sequence: Synthetic oligonucleotide
  Sense strand starting at position 2068 of SEQ ID NO: 3741
cccagcuguugugcaaauu

SEQ ID NO: 291007 - RNA, 19 nt, Artificial Sequence
  Description of Artificial Sequence: Synthetic oligonucleotide
  Antisense strand to SEQ ID NO: 291006
aauuugcacaacagcuggg

SEQ ID NO: 291008 - RNA, 19 nt, Artificial Sequence
  Description of Artificial Sequence: Synthetic oligonucleotide
  Sense strand starting at position 2129 of SEQ ID NO: 3741
ccgagaaucuucuuccaga

SEQ ID NO: 291009 - RNA, 19 nt, Artificial Sequence
  Description of Artificial Sequence: Synthetic oligonucleotide
  Antisense strand to SEQ ID NO: 291008
ucuggaagaagauucucgg

SEQ ID NO: 291010 - RNA, 19 nt, Artificial Sequence
  Description of Artificial Sequence: Synthetic oligonucleotide
  Sense strand starting at position 2130 of SEQ ID NO: 3741
cgagaaucuucuuccagau

SEQ ID NO: 291011 - RNA, 19 nt, Artificial Sequence
  Description of Artificial Sequence: Synthetic oligonucleotide
  Antisense strand to SEQ ID NO: 291010
aucuggaagaagauucucg

SEQ ID NO: 291012 - RNA, 19 nt, Artificial Sequence
  Description of Artificial Sequence: Synthetic oligonucleotide
  Sense strand starting at position 2166 of SEQ ID NO: 3741
ggcuguagaaaguaggaua

SEQ ID NO: 291013 - RNA, 19 nt, Artificial Sequence
  Description of Artificial Sequence: Synthetic oligonucleotide
  Antisense strand to SEQ ID NO: 291012
uauccuacuuucuacagcc

SEQ ID NO: 291014 - RNA, 19 nt, Artificial Sequence
  Description of Artificial Sequence: Synthetic oligonucleotide
  Sense strand starting at position 2325 of SEQ ID NO: 3741
ugaaacuugugggcucagu

SEQ ID NO: 291015 - RNA, 19 nt, Artificial Sequence
  Description of Artificial Sequence: Synthetic oligonucleotide
  Antisense strand to SEQ ID NO: 291014
acugagcccacaaguuuca

SEQ ID NO: 291016 - RNA, 19 nt, Artificial Sequence
  Description of Artificial Sequence: Synthetic oligonucleotide
  Sense strand starting at position 2380 of SEQ ID NO: 3741
ggccgaacuggguguauca

SEQ ID NO: 291017 - RNA, 19 nt, Artificial Sequence
  Description of Artificial Sequence: Synthetic oligonucleotide
  Antisense strand to SEQ ID NO: 291016
ugauacacccaguucggcc

SEQ ID NO: 291018 - RNA, 19 nt, Artificial Sequence
  Description of Artificial Sequence: Synthetic oligonucleotide
  Sense strand starting at position 2687 of SEQ ID NO: 3741
ccugaaacaugcucacugu

SEQ ID NO: 291019 - RNA, 19 nt, Artificial Sequence
  Description of Artificial Sequence: Synthetic oligonucleotide
  Antisense strand to SEQ ID NO: 291018
acagugagcauguuucagg

SEQ ID NO: 291020 - RNA, 19 nt, Artificial Sequence
  Description of Artificial Sequence: Synthetic oligonucleotide
  Sense strand starting at position 2688 of SEQ ID NO: 3741
cugaaacaugcucacugua

SEQ ID NO: 291021 - RNA, 19 nt, Artificial Sequence
  Description of Artificial Sequence: Synthetic oligonucleotide
  Antisense strand to SEQ ID NO: 291020
uacagugagcauguuucag

SEQ ID NO: 291022 - RNA, 19 nt, Artificial Sequence
  Description of Artificial Sequence: Synthetic oligonucleotide
  Sense strand starting at position 2693 of SEQ ID NO: 3741
acaugcucacuguaaagaa

SEQ ID NO: 291023 - RNA, 19 nt, Artificial Sequence
  Description of Artificial Sequence: Synthetic oligonucleotide
  Antisense strand to SEQ ID NO: 291022
uucuuuacagugagcaugu

SEQ ID NO: 291024 - RNA, 19 nt, Artificial Sequence
  Description of Artificial Sequence: Synthetic oligonucleotide
  Sense strand starting at position 2735 of SEQ ID NO: 3741
ucauuacgugaaggcuuaa

SEQ ID NO: 291025 - RNA, 19 nt, Artificial Sequence
  Description of Artificial Sequence: Synthetic oligonucleotide
  Antisense strand to SEQ ID NO: 291024
uuaagccuucacguaauga

SEQ ID NO: 291026 - RNA, 19 nt, Artificial Sequence
  Description of Artificial Sequence: Synthetic oligonucleotide
  Sense strand starting at position 2815 of SEQ ID NO: 3741
aauugcugugguugcaaua

SEQ ID NO: 291027 - RNA, 19 nt, Artificial Sequence
  Description of Artificial Sequence: Synthetic oligonucleotide
  Antisense strand to SEQ ID NO: 291026
uauugcaaccacagcaauu

SEQ ID NO: 291028 - RNA, 19 nt, Artificial Sequence
  Description of Artificial Sequence: Synthetic oligonucleotide
  Sense strand starting at position 2874 of SEQ ID NO: 3741
ugauguugguaacccgauu

SEQ ID NO: 291029 - RNA, 19 nt, Artificial Sequence
  Description of Artificial Sequence: Synthetic oligonucleotide
  Antisense strand to SEQ ID NO: 291028
aaucggguuaccaacauca

SEQ ID NO: 291030 - RNA, 19 nt, Artificial Sequence
  Description of Artificial Sequence: Synthetic oligonucleotide
  Sense strand starting at position 2942 of SEQ ID NO: 3741
cgucuuaauuuacauggga

SEQ ID NO: 291031 - RNA, 19 nt, Artificial Sequence
  Description of Artificial Sequence: Synthetic oligonucleotide
  Antisense strand to SEQ ID NO: 291030
ucccauguaaauuaagacg

SEQ ID NO: 291032 - RNA, 19 nt, Artificial Sequence
  Description of Artificial Sequence: Synthetic oligonucleotide
  Sense strand starting at position 2957 of SEQ ID NO: 3741
gggaaugaauuccuagcaa

SEQ ID NO: 291033 - RNA, 19 nt, Artificial Sequence
  Description of Artificial Sequence: Synthetic oligonucleotide
  Antisense strand to SEQ ID NO: 291032
uugcuaggaauucauuccc

SEQ ID NO: 291034 - RNA, 19 nt, Artificial Sequence
  Description of Artificial Sequence: Synthetic oligonucleotide
  Sense strand starting at position 3010 of SEQ ID NO: 3741
acguuuacaugugcaaaga

SEQ ID NO: 291035 - RNA, 19 nt, Artificial Sequence
  Description of Artificial Sequence: Synthetic oligonucleotide
  Antisense strand to SEQ ID NO: 291034
ucuuugcacauguaaacgu

SEQ ID NO: 291036 - RNA, 19 nt, Artificial Sequence
  Description of Artificial Sequence: Synthetic oligonucleotide
  Sense strand starting at position 3029 of SEQ ID NO: 3741
caguucuaggcucagauaa

SEQ ID NO: 291037 - RNA, 19 nt, Artificial Sequence
  Description of Artificial Sequence: Synthetic oligonucleotide
  Antisense strand to SEQ ID NO: 291036
uuaucugagccuagaacug

SEQ ID NO: 291038 - RNA, 19 nt, Artificial Sequence
  Description of Artificial Sequence: Synthetic oligonucleotide
  Sense strand starting at position 3061 of SEQ ID NO: 3741
auacauaaagcuggucauu

SEQ ID NO: 291039 - RNA, 19 nt, Artificial Sequence
  Description of Artificial Sequence: Synthetic oligonucleotide
  Antisense strand to SEQ ID NO: 291038
aaugaccagcuuuauguau

SEQ ID NO: 291040 - RNA, 19 nt, Artificial Sequence
  Description of Artificial Sequence: Synthetic oligonucleotide
  Sense strand starting at position 3246 of SEQ ID NO: 3741
accacuucuuccgugaagu

SEQ ID NO: 291041 - RNA, 19 nt, Artificial Sequence
  Description of Artificial Sequence: Synthetic oligonucleotide
  Antisense strand to SEQ ID NO: 291040
acuucacggaagaaguggu

SEQ ID NO: 291042 - RNA, 19 nt, Artificial Sequence
  Description of Artificial Sequence: Synthetic oligonucleotide
  Sense strand starting at position 3247 of SEQ ID NO: 3741
ccacuucuuccgugaagua

SEQ ID NO: 291043 - RNA, 19 nt, Artificial Sequence
  Description of Artificial Sequence: Synthetic oligonucleotide
  Antisense strand to SEQ ID NO: 291042
uacuucacggaagaagugg

SEQ ID NO: 291044 - RNA, 19 nt, Artificial Sequence
  Description of Artificial Sequence: Synthetic oligonucleotide
  Sense strand starting at position 3248 of SEQ ID NO: 3741
cacuucuuccgugaaguau

SEQ ID NO: 291045 - RNA, 19 nt, Artificial Sequence
  Description of Artificial Sequence: Synthetic oligonucleotide
  Antisense strand to SEQ ID NO: 291044
auacuucacggaagaagug

SEQ ID NO: 291046 - RNA, 19 nt, Artificial Sequence
  Description of Artificial Sequence: Synthetic oligonucleotide
  Sense strand starting at position 3350 of SEQ ID NO: 3741
aguucuuggaauuguuaag

SEQ ID NO: 291047 - RNA, 19 nt, Artificial Sequence
  Description of Artificial Sequence: Synthetic oligonucleotide
  Antisense strand to SEQ ID NO: 291046
cuuaacaauuccaagaacu

SEQ ID NO: 291048 - RNA, 19 nt, Artificial Sequence
  Description of Artificial Sequence: Synthetic oligonucleotide
  Sense strand starting at position 3376 of SEQ ID NO: 3741
ugaccaucaccauguguca

SEQ ID NO: 291049 - RNA, 19 nt, Artificial Sequence
  Description of Artificial Sequence: Synthetic oligonucleotide
  Antisense strand to SEQ ID NO: 291048
ugacacauggugaugguca

SEQ ID NO: 291050 - RNA, 19 nt, Artificial Sequence
  Description of Artificial Sequence: Synthetic oligonucleotide
  Sense strand starting at position 3489 of SEQ ID NO: 3741
cgagaugugcuuugggauc

SEQ ID NO: 291051 - RNA, 19 nt, Artificial Sequence
  Description of Artificial Sequence: Synthetic oligonucleotide
  Antisense strand to SEQ ID NO: 291050
gaucccaaagcacaucucg

SEQ ID NO: 291052 - RNA, 19 nt, Artificial Sequence
  Description of Artificial Sequence: Synthetic oligonucleotide
  Sense strand starting at position 3514 of SEQ ID NO: 3741
gagagugcuuacccagaac

SEQ ID NO: 291053 - RNA, 19 nt, Artificial Sequence
  Description of Artificial Sequence: Synthetic oligonucleotide
  Antisense strand to SEQ ID NO: 291052
guucuggguaagcacucuc

SEQ ID NO: 291054 - RNA, 19 nt, Artificial Sequence
  Description of Artificial Sequence: Synthetic oligonucleotide
  Sense strand starting at position 3517 of SEQ ID NO: 3741
agugcuuacccagaacaag

SEQ ID NO: 291055 - RNA, 19 nt, Artificial Sequence
  Description of Artificial Sequence: Synthetic oligonucleotide
  Antisense strand to SEQ ID NO: 291054
cuuguucuggguaagcacu

SEQ ID NO: 291056 - RNA, 19 nt, Artificial Sequence
  Description of Artificial Sequence: Synthetic oligonucleotide
  Sense strand starting at position 3670 of SEQ ID NO: 3741
auaggaaaguccugagaug

SEQ ID NO: 291057 - RNA, 19 nt, Artificial Sequence
  Description of Artificial Sequence: Synthetic oligonucleotide
  Antisense strand to SEQ ID NO: 291056
caucucaggacuuuccuau

SEQ ID NO: 291058 - RNA, 19 nt, Artificial Sequence
  Description of Artificial Sequence: Synthetic oligonucleotide
  Sense strand starting at position 3699 of SEQ ID NO: 3741
aacaguuugugagaugaca

SEQ ID NO: 291059 - RNA, 19 nt, Artificial Sequence
  Description of Artificial Sequence: Synthetic oligonucleotide
  Antisense strand to SEQ ID NO: 291058
ugucaucucacaaacuguu

SEQ ID NO: 291060 - RNA, 19 nt, Artificial Sequence
  Description of Artificial Sequence: Synthetic oligonucleotide
  Sense strand starting at position 3888 of SEQ ID NO: 3741
gagaauaccugggagaaga

SEQ ID NO: 291061 - RNA, 19 nt, Artificial Sequence
  Description of Artificial Sequence: Synthetic oligonucleotide
  Antisense strand to SEQ ID NO: 291060
ucuucucccagguauucuc

SEQ ID NO: 291062 - RNA, 19 nt, Artificial Sequence
  Description of Artificial Sequence: Synthetic oligonucleotide
  Sense strand starting at position 373 of SEQ ID NO: 3742
aagguagaccauugcaaga

SEQ ID NO: 291063 - RNA, 19 nt, Artificial Sequence
  Description of Artificial Sequence: Synthetic oligonucleotide
  Antisense strand to SEQ ID NO: 291062
ucuugcaauggucuaccuu

SEQ ID NO: 291064 - RNA, 19 nt, Artificial Sequence
  Description of Artificial Sequence: Synthetic oligonucleotide
  Sense strand starting at position 509 of SEQ ID NO: 3742
gauagcucauaaguaggaa

SEQ ID NO: 291065 - RNA, 19 nt, Artificial Sequence
  Description of Artificial Sequence: Synthetic oligonucleotide
  Antisense strand to SEQ ID NO: 291064
uuccuacuuaugagcuauc

SEQ ID NO: 291066 - RNA, 19 nt, Artificial Sequence
  Description of Artificial Sequence: Synthetic oligonucleotide
  Sense strand starting at position 754 of SEQ ID NO: 3742
agagaaguauaagcuauau

SEQ ID NO: 291067 - RNA, 19 nt, Artificial Sequence
  Description of Artificial Sequence: Synthetic oligonucleotide
  Antisense strand to SEQ ID NO: 291066
auauagcuuauacuucucu

SEQ ID NO: 291068 - RNA, 19 nt, Artificial Sequence
  Description of Artificial Sequence: Synthetic oligonucleotide
  Sense strand starting at position 775 of SEQ ID NO: 3742
uccggucauguuugaaaga

SEQ ID NO: 291069 - RNA, 19 nt, Artificial Sequence
  Description of Artificial Sequence: Synthetic oligonucleotide
  Antisense strand to SEQ ID NO: 291068
ucuuucaaacaugaccgga

SEQ ID NO: 291070 - RNA, 19 nt, Artificial Sequence
  Description of Artificial Sequence: Synthetic oligonucleotide
  Sense strand starting at position 818 of SEQ ID NO: 3742
aaaguuaaggcaugaauag

SEQ ID NO: 291071 - RNA, 19 nt, Artificial Sequence
  Description of Artificial Sequence: Synthetic oligonucleotide
  Antisense strand to SEQ ID NO: 291070
cuauucaugccuuaacuuu

SEQ ID NO: 291072 - RNA, 19 nt, Artificial Sequence
  Description of Artificial Sequence: Synthetic oligonucleotide
  Sense strand starting at position 836 of SEQ ID NO: 3742
ggacuaaggacauguacgu

SEQ ID NO: 291073 - RNA, 19 nt, Artificial Sequence
  Description of Artificial Sequence: Synthetic oligonucleotide
  Antisense strand to SEQ ID NO: 291072
acguacauguccuuagucc

SEQ ID NO: 291074 - RNA, 19 nt, Artificial Sequence
  Description of Artificial Sequence: Synthetic oligonucleotide
  Sense strand starting at position 1021 of SEQ ID NO: 3742
aggucacauggcuaacaau

SEQ ID NO: 291075 - RNA, 19 nt, Artificial Sequence
  Description of Artificial Sequence: Synthetic oligonucleotide
  Antisense strand to SEQ ID NO: 291074
auuguuagccaugugaccu

SEQ ID NO: 291076 - RNA, 19 nt, Artificial Sequence
  Description of Artificial Sequence: Synthetic oligonucleotide
  Sense strand starting at position 1083 of SEQ ID NO: 3742
gcccuaauugcugauaaga

SEQ ID NO: 291077 - RNA, 19 nt, Artificial Sequence
  Description of Artificial Sequence: Synthetic oligonucleotide
  Antisense strand to SEQ ID NO: 291076
ucuuaucagcaauuagggc

SEQ ID NO: 291078 - RNA, 19 nt, Artificial Sequence
  Description of Artificial Sequence: Synthetic oligonucleotide
  Sense strand starting at position 1110 of SEQ ID NO: 3742
acuggauaacugugacuag

SEQ ID NO: 291079 - RNA, 19 nt, Artificial Sequence
  Description of Artificial Sequence: Synthetic oligonucleotide
  Antisense strand to SEQ ID NO: 291078
cuagucacaguuauccagu

SEQ ID NO: 291080 - RNA, 19 nt, Artificial Sequence
  Description of Artificial Sequence: Synthetic oligonucleotide
  Sense strand starting at position 1144 of SEQ ID NO: 3742
gugcgaauagccuaagaua

SEQ ID NO: 291081 - RNA, 19 nt, Artificial Sequence
  Description of Artificial Sequence: Synthetic oligonucleotide
  Antisense strand to SEQ ID NO: 291080
uaucuuaggcuauucgcac

SEQ ID NO: 291082 - RNA, 19 nt, Artificial Sequence
  Description of Artificial Sequence: Synthetic oligonucleotide
  Sense strand starting at position 2304 of SEQ ID NO: 3742
gccuauacugagcaagguu

SEQ ID NO: 291083 - RNA, 19 nt, Artificial Sequence
  Description of Artificial Sequence: Synthetic oligonucleotide
  Antisense strand to SEQ ID NO: 291082
aaccuugcucaguauaggc

SEQ ID NO: 291084 - RNA, 19 nt, Artificial Sequence
  Description of Artificial Sequence: Synthetic oligonucleotide
  Sense strand starting at position 2316 of SEQ ID NO: 3742
caagguuccgacggaucaa

SEQ ID NO: 291085 - RNA, 19 nt, Artificial Sequence
  Description of Artificial Sequence: Synthetic oligonucleotide
  Antisense strand to SEQ ID NO: 291084
uugauccgucggaaccuug

SEQ ID NO: 291086 - RNA, 19 nt, Artificial Sequence
  Description of Artificial Sequence: Synthetic oligonucleotide
  Sense strand starting at position 2317 of SEQ ID NO: 3742
aagguuccgacggaucaaa

SEQ ID NO: 291087 - RNA, 19 nt, Artificial Sequence
  Description of Artificial Sequence: Synthetic oligonucleotide
  Antisense strand to SEQ ID NO: 291086
uuugauccgucggaaccuu

SEQ ID NO: 291088 - RNA, 19 nt, Artificial Sequence
  Description of Artificial Sequence: Synthetic oligonucleotide
  Sense strand starting at position 2357 of SEQ ID NO: 3742
augaauuaaugacaacuga

SEQ ID NO: 291089 - RNA, 19 nt, Artificial Sequence
  Description of Artificial Sequence: Synthetic oligonucleotide
  Antisense strand to SEQ ID NO: 291088
ucaguugucauuaauucau

SEQ ID NO: 291090 - RNA, 19 nt, Artificial Sequence
  Description of Artificial Sequence: Synthetic oligonucleotide
  Sense strand starting at position 2365 of SEQ ID NO: 3742
augacaacugauggcaaau

SEQ ID NO: 291091 - RNA, 19 nt, Artificial Sequence
  Description of Artificial Sequence: Synthetic oligonucleotide
  Antisense strand to SEQ ID NO: 291090
auuugccaucaguugucau

SEQ ID NO: 291092 - RNA, 19 nt, Artificial Sequence
  Description of Artificial Sequence: Synthetic oligonucleotide
  Sense strand starting at position 2442 of SEQ ID NO: 3742
ugagaaauaugcuccuaaa

SEQ ID NO: 291093 - RNA, 19 nt, Artificial Sequence
  Description of Artificial Sequence: Synthetic oligonucleotide
  Antisense strand to SEQ ID NO: 291092
uuuaggagcauauuucuca

SEQ ID NO: 291094 - RNA, 19 nt, Artificial Sequence
  Description of Artificial Sequence: Synthetic oligonucleotide
  Sense strand starting at position 2491 of SEQ ID NO: 3742
uuugcuuugcgugcuauua

SEQ ID NO: 291095 - RNA, 19 nt, Artificial Sequence
  Description of Artificial Sequence: Synthetic oligonucleotide
  Antisense strand to SEQ ID NO: 291094
uaauagcacgcaaagcaaa

SEQ ID NO: 291096 - RNA, 19 nt, Artificial Sequence
  Description of Artificial Sequence: Synthetic oligonucleotide
  Sense strand starting at position 2506 of SEQ ID NO: 3742
auuacaacgguuuauuagu

SEQ ID NO: 291097 - RNA, 19 nt, Artificial Sequence
  Description of Artificial Sequence: Synthetic oligonucleotide
  Antisense strand to SEQ ID NO: 291096
acuaauaaaccguuguaau

SEQ ID NO: 291098 - RNA, 19 nt, Artificial Sequence
  Description of Artificial Sequence: Synthetic oligonucleotide
  Sense strand starting at position 2511 of SEQ ID NO: 3742
aacgguuuauuaguagacu

SEQ ID NO: 291099 - RNA, 19 nt, Artificial Sequence
  Description of Artificial Sequence: Synthetic oligonucleotide
  Antisense strand to SEQ ID NO: 291098
agucuacuaauaaaccguu

SEQ ID NO: 291100 - RNA, 19 nt, Artificial Sequence
  Description of Artificial Sequence: Synthetic oligonucleotide
  Sense strand starting at position 2555 of SEQ ID NO: 3742
uccugugugcaaugagaaa

SEQ ID NO: 291101 - RNA, 19 nt, Artificial Sequence
  Description of Artificial Sequence: Synthetic oligonucleotide
  Antisense strand to SEQ ID NO: 291100
uuucucauugcacacagga

SEQ ID NO: 291102 - RNA, 19 nt, Artificial Sequence
  Description of Artificial Sequence: Synthetic oligonucleotide
  Sense strand starting at position 2579 of SEQ ID NO: 3742
cucuaugugucuuugacag

SEQ ID NO: 291103 - RNA, 19 nt, Artificial Sequence
  Description of Artificial Sequence: Synthetic oligonucleotide
  Antisense strand to SEQ ID NO: 291102
cugucaaagacacauagag

SEQ ID NO: 291104 - RNA, 19 nt, Artificial Sequence
  Description of Artificial Sequence: Synthetic oligonucleotide
  Sense strand starting at position 2610 of SEQ ID NO: 3742
aucgcuugcccauacauga

SEQ ID NO: 291105 - RNA, 19 nt, Artificial Sequence
  Description of Artificial Sequence: Synthetic oligonucleotide
  Antisense strand to SEQ ID NO: 291104
ucauguaugggcaagcgau

SEQ ID NO: 291106 - RNA, 19 nt, Artificial Sequence
  Description of Artificial Sequence: Synthetic oligonucleotide
  Sense strand starting at position 2736 of SEQ ID NO: 3742
acuguauuaggcuacauau

SEQ ID NO: 291107 - RNA, 19 nt, Artificial Sequence
  Description of Artificial Sequence: Synthetic oligonucleotide
  Antisense strand to SEQ ID NO: 291106
auauguagccuaauacagu

SEQ ID NO: 291108 - RNA, 19 nt, Artificial Sequence
  Description of Artificial Sequence: Synthetic oligonucleotide
  Sense strand starting at position 2777 of SEQ ID NO: 3742
ccauuauaugccugacaug

SEQ ID NO: 291109 - RNA, 19 nt, Artificial Sequence
  Description of Artificial Sequence: Synthetic oligonucleotide
  Antisense strand to SEQ ID NO: 291108
caugucaggcauauaaugg

SEQ ID NO: 291110 - RNA, 19 nt, Artificial Sequence
  Description of Artificial Sequence: Synthetic oligonucleotide
  Sense strand starting at position 2843 of SEQ ID NO: 3742
gggcuuacagauggucaau

SEQ ID NO: 291111 - RNA, 19 nt, Artificial Sequence
  Description of Artificial Sequence: Synthetic oligonucleotide
  Antisense strand to SEQ ID NO: 291110
auugaccaucuguaagccc

SEQ ID NO: 291112 - RNA, 19 nt, Artificial Sequence
  Description of Artificial Sequence: Synthetic oligonucleotide
  Sense strand starting at position 2855 of SEQ ID NO: 3742
ggucaaugcuucuccacaa

SEQ ID NO: 291113 - RNA, 19 nt, Artificial Sequence
  Description of Artificial Sequence: Synthetic oligonucleotide
  Antisense strand to SEQ ID NO: 291112
uuguggagaagcauugacc

SEQ ID NO: 291114 - RNA, 19 nt, Artificial Sequence
  Description of Artificial Sequence: Synthetic oligonucleotide
  Sense strand starting at position 3457 of SEQ ID NO: 3742
agggcuucucuauacugua

SEQ ID NO: 291115 - RNA, 19 nt, Artificial Sequence
  Description of Artificial Sequence: Synthetic oligonucleotide
  Antisense strand to SEQ ID NO: 291114
uacaguauagagaagcccu

SEQ ID NO: 291116 - RNA, 19 nt, Artificial Sequence
  Description of Artificial Sequence: Synthetic oligonucleotide
  Sense strand starting at position 3635 of SEQ ID NO: 3742
uaaauuaugcaguggagau

SEQ ID NO: 291117 - RNA, 19 nt, Artificial Sequence
  Description of Artificial Sequence: Synthetic oligonucleotide
  Antisense strand to SEQ ID NO: 291116
aucuccacugcauaauuua

SEQ ID NO: 291118 - RNA, 19 nt, Artificial Sequence
  Description of Artificial Sequence: Synthetic oligonucleotide
  Sense strand starting at position 3650 of SEQ ID NO: 3742
agaugauggugaucuuauu

SEQ ID NO: 291119 - RNA, 19 nt, Artificial Sequence
  Description of Artificial Sequence: Synthetic oligonucleotide
  Antisense strand to SEQ ID NO: 291118
aauaagaucaccaucaucu

SEQ ID NO: 291120 - RNA, 19 nt, Artificial Sequence
  Description of Artificial Sequence: Synthetic oligonucleotide
  Sense strand starting at position 3684 of SEQ ID NO: 3742
ucuuuauucccuuggugaa

SEQ ID NO: 291121 - RNA, 19 nt, Artificial Sequence
  Description of Artificial Sequence: Synthetic oligonucleotide
  Antisense strand to SEQ ID NO: 291120
uucaccaagggaauaaaga

SEQ ID NO: 291122 - RNA, 19 nt, Artificial Sequence
  Description of Artificial Sequence: Synthetic oligonucleotide
  Sense strand starting at position 3685 of SEQ ID NO: 3742
cuuuauucccuuggugaag

SEQ ID NO: 291123 - RNA, 19 nt, Artificial Sequence
  Description of Artificial Sequence: Synthetic oligonucleotide
  Antisense strand to SEQ ID NO: 291122
cuucaccaagggaauaaag

SEQ ID NO: 291124 - RNA, 19 nt, Artificial Sequence
  Description of Artificial Sequence: Synthetic oligonucleotide
  Sense strand starting at position 3754 of SEQ ID NO: 3742
ugagcugcucuagacauau

SEQ ID NO: 291125 - RNA, 19 nt, Artificial Sequence
  Description of Artificial Sequence: Synthetic oligonucleotide
  Antisense strand to SEQ ID NO: 291124
auaugucuagagcagcuca

SEQ ID NO: 291126 - RNA, 19 nt, Artificial Sequence
  Description of Artificial Sequence: Synthetic oligonucleotide
  Sense strand starting at position 3766 of SEQ ID NO: 3742
gacauauauggcugugagu

SEQ ID NO: 291127 - RNA, 19 nt, Artificial Sequence
  Description of Artificial Sequence: Synthetic oligonucleotide
  Antisense strand to SEQ ID NO: 291126
acucacagccauauauguc

SEQ ID NO: 291128 - RNA, 19 nt, Artificial Sequence
  Description of Artificial Sequence: Synthetic oligonucleotide
  Sense strand starting at position 3772 of SEQ ID NO: 3742
uauggcugugaguacucua

SEQ ID NO: 291129 - RNA, 19 nt, Artificial Sequence
  Description of Artificial Sequence: Synthetic oligonucleotide
  Antisense strand to SEQ ID NO: 291128
uagaguacucacagccaua

SEQ ID NO: 291130 - RNA, 19 nt, Artificial Sequence
  Description of Artificial Sequence: Synthetic oligonucleotide
  Sense strand starting at position 3777 of SEQ ID NO: 3742
cugugaguacucuaucacu

SEQ ID NO: 291131 - RNA, 19 nt, Artificial Sequence
  Description of Artificial Sequence: Synthetic oligonucleotide
  Antisense strand to SEQ ID NO: 291130
agugauagaguacucacag

SEQ ID NO: 291132 - RNA, 19 nt, Artificial Sequence
  Description of Artificial Sequence: Synthetic oligonucleotide
  Sense strand starting at position 3813 of SEQ ID NO: 3742
ccugguauuuaguaggaca

SEQ ID NO: 291133 - RNA, 19 nt, Artificial Sequence
  Description of Artificial Sequence: Synthetic oligonucleotide
  Antisense strand to SEQ ID NO: 291132
uguccuacuaaauaccagg

SEQ ID NO: 291134 - RNA, 19 nt, Artificial Sequence
  Description of Artificial Sequence: Synthetic oligonucleotide
  Sense strand starting at position 3816 of SEQ ID NO: 3742
gguauuuaguaggacacua

SEQ ID NO: 291135 - RNA, 19 nt, Artificial Sequence
  Description of Artificial Sequence: Synthetic oligonucleotide
  Antisense strand to SEQ ID NO: 291134
uaguguccuacuaaauacc

SEQ ID NO: 291136 - RNA, 19 nt, Artificial Sequence
  Description of Artificial Sequence: Synthetic oligonucleotide
  Sense strand starting at position 3831 of SEQ ID NO: 3742
acuauauaaucagauggag

SEQ ID NO: 291137 - RNA, 19 nt, Artificial Sequence
  Description of Artificial Sequence: Synthetic oligonucleotide
  Antisense strand to SEQ ID NO: 291136
cuccaucugauuauauagu

SEQ ID NO: 291138 - RNA, 19 nt, Artificial Sequence
  Description of Artificial Sequence: Synthetic oligonucleotide
  Sense strand starting at position 3853 of SEQ ID NO: 3742
ugaacuagaugagcuuuaa

SEQ ID NO: 291139 - RNA, 19 nt, Artificial Sequence
  Description of Artificial Sequence: Synthetic oligonucleotide
  Antisense strand to SEQ ID NO: 291138
uuaaagcucaucuaguuca

SEQ ID NO: 291140 - RNA, 19 nt, Artificial Sequence
  Description of Artificial Sequence: Synthetic oligonucleotide
  Sense strand starting at position 3857 of SEQ ID NO: 3742
cuagaugagcuuuaaugcu

SEQ ID NO: 291141 - RNA, 19 nt, Artificial Sequence
  Description of Artificial Sequence: Synthetic oligonucleotide
  Antisense strand to SEQ ID NO: 291140
agcauuaaagcucaucuag

SEQ ID NO: 291142 - RNA, 19 nt, Artificial Sequence
  Description of Artificial Sequence: Synthetic oligonucleotide
  Sense strand starting at position 20 of SEQ ID NO: 3743
aaggguguuccagacaugu

SEQ ID NO: 291143 - RNA, 19 nt, Artificial Sequence
  Description of Artificial Sequence: Synthetic oligonucleotide
  Antisense strand to SEQ ID NO: 291142
acaugucuggaacacccuu

SEQ ID NO: 291144 - RNA, 19 nt, Artificial Sequence
  Description of Artificial Sequence: Synthetic oligonucleotide
  Sense strand starting at position 22 of SEQ ID NO: 3743
ggguguuccagacauguag

SEQ ID NO: 291145 - RNA, 19 nt, Artificial Sequence
  Description of Artificial Sequence: Synthetic oligonucleotide
  Antisense strand to SEQ ID NO: 291144
cuacaugucuggaacaccc

SEQ ID NO: 291146 - RNA, 19 nt, Artificial Sequence
  Description of Artificial Sequence: Synthetic oligonucleotide
  Sense strand starting at position 24 of SEQ ID NO: 3743
guguuccagacauguagaa

SEQ ID NO: 291147 - RNA, 19 nt, Artificial Sequence
  Description of Artificial Sequence: Synthetic oligonucleotide
  Antisense strand to SEQ ID NO: 291146
uucuacaugucuggaacac

SEQ ID NO: 291148 - RNA, 19 nt, Artificial Sequence
  Description of Artificial Sequence: Synthetic oligonucleotide
  Sense strand starting at position 56 of SEQ ID NO: 3743
guuuguggcuuggagucua

SEQ ID NO: 291149 - RNA, 19 nt, Artificial Sequence
  Description of Artificial Sequence: Synthetic oligonucleotide
  Antisense strand to SEQ ID NO: 291148
uagacuccaagccacaaac

SEQ ID NO: 291150 - RNA, 19 nt, Artificial Sequence
  Description of Artificial Sequence: Synthetic oligonucleotide
  Sense strand starting at position 64 of SEQ ID NO: 3743
cuuggagucuaagcgugaa

SEQ ID NO: 291151 - RNA, 19 nt, Artificial Sequence
  Description of Artificial Sequence: Synthetic oligonucleotide
  Antisense strand to SEQ ID NO: 291150
uucacgcuuagacuccaag

SEQ ID NO: 291152 - RNA, 19 nt, Artificial Sequence
  Description of Artificial Sequence: Synthetic oligonucleotide
  Sense strand starting at position 67 of SEQ ID NO: 3743
ggagucuaagcgugaagug

SEQ ID NO: 291153 - RNA, 19 nt, Artificial Sequence
  Description of Artificial Sequence: Synthetic oligonucleotide
  Antisense strand to SEQ ID NO: 291152
cacuucacgcuuagacucc

SEQ ID NO: 291154 - RNA, 19 nt, Artificial Sequence
  Description of Artificial Sequence: Synthetic oligonucleotide
  Sense strand starting at position 68 of SEQ ID NO: 3743
gagucuaagcgugaagugu

SEQ ID NO: 291155 - RNA, 19 nt, Artificial Sequence
  Description of Artificial Sequence: Synthetic oligonucleotide
  Antisense strand to SEQ ID NO: 291154
acacuucacgcuuagacuc

SEQ ID NO: 291156 - RNA, 19 nt, Artificial Sequence
  Description of Artificial Sequence: Synthetic oligonucleotide
  Sense strand starting at position 173 of SEQ ID NO: 3743
cugagaugaccuugcugau

SEQ ID NO: 291157 - RNA, 19 nt, Artificial Sequence
  Description of Artificial Sequence: Synthetic oligonucleotide
  Antisense strand to SEQ ID NO: 291156
aucagcaaggucaucucag

SEQ ID NO: 291158 - RNA, 19 nt, Artificial Sequence
  Description of Artificial Sequence: Synthetic oligonucleotide
  Sense strand starting at position 297 of SEQ ID NO: 3743
gcaggauucggugacuaau

SEQ ID NO: 291159 - RNA, 19 nt, Artificial Sequence
  Description of Artificial Sequence: Synthetic oligonucleotide
  Antisense strand to SEQ ID NO: 291158
auuagucaccgaauccugc

SEQ ID NO: 291160 - RNA, 19 nt, Artificial Sequence
  Description of Artificial Sequence: Synthetic oligonucleotide
  Sense strand starting at position 303 of SEQ ID NO: 3743
uucggugacuaauggucau

SEQ ID NO: 291161 - RNA, 19 nt, Artificial Sequence
  Description of Artificial Sequence: Synthetic oligonucleotide
  Antisense strand to SEQ ID NO: 291160
augaccauuagucaccgaa

SEQ ID NO: 291162 - RNA, 19 nt, Artificial Sequence
  Description of Artificial Sequence: Synthetic oligonucleotide
  Sense strand starting at position 306 of SEQ ID NO: 3743
ggugacuaauggucauaug

SEQ ID NO: 291163 - RNA, 19 nt, Artificial Sequence
  Description of Artificial Sequence: Synthetic oligonucleotide
  Antisense strand to SEQ ID NO: 291162
cauaugaccauuagucacc

SEQ ID NO: 291164 - RNA, 19 nt, Artificial Sequence
  Description of Artificial Sequence: Synthetic oligonucleotide
  Sense strand starting at position 309 of SEQ ID NO: 3743
gacuaauggucauaugagu

SEQ ID NO: 291165 - RNA, 19 nt, Artificial Sequence
  Description of Artificial Sequence: Synthetic oligonucleotide
  Antisense strand to SEQ ID NO: 291164
acucauaugaccauuaguc

SEQ ID NO: 291166 - RNA, 19 nt, Artificial Sequence
  Description of Artificial Sequence: Synthetic oligonucleotide
  Sense strand starting at position 314 of SEQ ID NO: 3743
auggucauaugagugaaga

SEQ ID NO: 291167 - RNA, 19 nt, Artificial Sequence
  Description of Artificial Sequence: Synthetic oligonucleotide
  Antisense strand to SEQ ID NO: 291166
ucuucacucauaugaccau

SEQ ID NO: 291168 - RNA, 19 nt, Artificial Sequence
  Description of Artificial Sequence: Synthetic oligonucleotide
  Sense strand starting at position 315 of SEQ ID NO: 3743
uggucauaugagugaagau

SEQ ID NO: 291169 - RNA, 19 nt, Artificial Sequence
  Description of Artificial Sequence: Synthetic oligonucleotide
  Antisense strand to SEQ ID NO: 291168
aucuucacucauaugacca

SEQ ID NO: 291170 - RNA, 19 nt, Artificial Sequence
  Description of Artificial Sequence: Synthetic oligonucleotide
  Sense strand starting at position 338 of SEQ ID NO: 3743
uggaguuggagaugugagu

SEQ ID NO: 291171 - RNA, 19 nt, Artificial Sequence
  Description of Artificial Sequence: Synthetic oligonucleotide
  Antisense strand to SEQ ID NO: 291170
acucacaucuccaacucca

SEQ ID NO: 291172 - RNA, 19 nt, Artificial Sequence
  Description of Artificial Sequence: Synthetic oligonucleotide
  Sense strand starting at position 478 of SEQ ID NO: 3743
cugcauaauuugggcacua

SEQ ID NO: 291173 - RNA, 19 nt, Artificial Sequence
  Description of Artificial Sequence: Synthetic oligonucleotide
  Antisense strand to SEQ ID NO: 291172
uagugcccaaauuaugcag

SEQ ID NO: 291174 - RNA, 19 nt, Artificial Sequence
  Description of Artificial Sequence: Synthetic oligonucleotide
  Sense strand starting at position 542 of SEQ ID NO: 3743
gcuacaugcuguuuagaga

SEQ ID NO: 291175 - RNA, 19 nt, Artificial Sequence
  Description of Artificial Sequence: Synthetic oligonucleotide
  Antisense strand to SEQ ID NO: 291174
ucucuaaacagcauguagc

SEQ ID NO: 291176 - RNA, 19 nt, Artificial Sequence
  Description of Artificial Sequence: Synthetic oligonucleotide
  Sense strand starting at position 545 of SEQ ID NO: 3743
acaugcuguuuagagacaa

SEQ ID NO: 291177 - RNA, 19 nt, Artificial Sequence
  Description of Artificial Sequence: Synthetic oligonucleotide
  Antisense strand to SEQ ID NO: 291176
uugucucuaaacagcaugu

SEQ ID NO: 291178 - RNA, 19 nt, Artificial Sequence
  Description of Artificial Sequence: Synthetic oligonucleotide
  Sense strand starting at position 2124 of SEQ ID NO: 3743
ccacccgaguucuggagaa

SEQ ID NO: 291179 - RNA, 19 nt, Artificial Sequence
  Description of Artificial Sequence: Synthetic oligonucleotide
  Antisense strand to SEQ ID NO: 291178
uucuccagaacucgggugg

SEQ ID NO: 291180 - RNA, 19 nt, Artificial Sequence
  Description of Artificial Sequence: Synthetic oligonucleotide
  Sense strand starting at position 2126 of SEQ ID NO: 3743
acccgaguucuggagaacu

SEQ ID NO: 291181 - RNA, 19 nt, Artificial Sequence
  Description of Artificial Sequence: Synthetic oligonucleotide
  Antisense strand to SEQ ID NO: 291180
aguucuccagaacucgggu

SEQ ID NO: 291182 - RNA, 19 nt, Artificial Sequence
  Description of Artificial Sequence: Synthetic oligonucleotide
  Sense strand starting at position 2471 of SEQ ID NO: 3743
agcccagucugcugccaau

SEQ ID NO: 291183 - RNA, 19 nt, Artificial Sequence
  Description of Artificial Sequence: Synthetic oligonucleotide
  Antisense strand to SEQ ID NO: 291182
auuggcagcagacugggcu

SEQ ID NO: 291184 - RNA, 19 nt, Artificial Sequence
  Description of Artificial Sequence: Synthetic oligonucleotide
  Sense strand starting at position 2608 of SEQ ID NO: 3743
agaagaguccaaggucaug

SEQ ID NO: 291185 - RNA, 19 nt, Artificial Sequence
  Description of Artificial Sequence: Synthetic oligonucleotide
  Antisense strand to SEQ ID NO: 291184
caugaccuuggacucuucu

SEQ ID NO: 291186 - RNA, 19 nt, Artificial Sequence
  Description of Artificial Sequence: Synthetic oligonucleotide
  Sense strand starting at position 2620 of SEQ ID NO: 3743
ggucaugcaggcugugaau

SEQ ID NO: 291187 - RNA, 19 nt, Artificial Sequence
  Description of Artificial Sequence: Synthetic oligonucleotide
  Antisense strand to SEQ ID NO: 291186
auucacagccugcaugacc

SEQ ID NO: 291188 - RNA, 19 nt, Artificial Sequence
  Description of Artificial Sequence: Synthetic oligonucleotide
  Sense strand starting at position 2622 of SEQ ID NO: 3743
ucaugcaggcugugaauaa

SEQ ID NO: 291189 - RNA, 19 nt, Artificial Sequence
  Description of Artificial Sequence: Synthetic oligonucleotide
  Antisense strand to SEQ ID NO: 291188
uuauucacagccugcauga

SEQ ID NO: 291190 - RNA, 19 nt, Artificial Sequence
  Description of Artificial Sequence: Synthetic oligonucleotide
  Sense strand starting at position 2623 of SEQ ID NO: 3743
caugcaggcugugaauaaa

SEQ ID NO: 291191 - RNA, 19 nt, Artificial Sequence
  Description of Artificial Sequence: Synthetic oligonucleotide
  Antisense strand to SEQ ID NO: 291190
uuuauucacagccugcaug

SEQ ID NO: 291192 - RNA, 19 nt, Artificial Sequence
  Description of Artificial Sequence: Synthetic oligonucleotide
  Sense strand starting at position 2807 of SEQ ID NO: 3743
cagcgugucagcuagugau

SEQ ID NO: 291193 - RNA, 19 nt, Artificial Sequence
  Description of Artificial Sequence: Synthetic oligonucleotide
  Antisense strand to SEQ ID NO: 291192
aucacuagcugacacgcug

SEQ ID NO: 291194 - RNA, 19 nt, Artificial Sequence
  Description of Artificial Sequence: Synthetic oligonucleotide
  Sense strand starting at position 2809 of SEQ ID NO: 3743
gcgugucagcuagugauuc

SEQ ID NO: 291195 - RNA, 19 nt, Artificial Sequence
  Description of Artificial Sequence: Synthetic oligonucleotide
  Antisense strand to SEQ ID NO: 291194
gaaucacuagcugacacgc

SEQ ID NO: 291196 - RNA, 19 nt, Artificial Sequence
  Description of Artificial Sequence: Synthetic oligonucleotide
  Sense strand starting at position 2813 of SEQ ID NO: 3743
gucagcuagugauucccau

SEQ ID NO: 291197 - RNA, 19 nt, Artificial Sequence
  Description of Artificial Sequence: Synthetic oligonucleotide
  Antisense strand to SEQ ID NO: 291196
augggaaucacuagcugac

SEQ ID NO: 291198 - RNA, 19 nt, Artificial Sequence
  Description of Artificial Sequence: Synthetic oligonucleotide
  Sense strand starting at position 3034 of SEQ ID NO: 3743
cugugacagucugugaaga

SEQ ID NO: 291199 - RNA, 19 nt, Artificial Sequence
  Description of Artificial Sequence: Synthetic oligonucleotide
  Antisense strand to SEQ ID NO: 291198
ucuucacagacugucacag

SEQ ID NO: 291200 - RNA, 19 nt, Artificial Sequence
  Description of Artificial Sequence: Synthetic oligonucleotide
  Sense strand starting at position 3206 of SEQ ID NO: 3743
ccucgauauuguuauucca

SEQ ID NO: 291201 - RNA, 19 nt, Artificial Sequence
  Description of Artificial Sequence: Synthetic oligonucleotide
  Antisense strand to SEQ ID NO: 291200
uggaauaacaauaucgagg

SEQ ID NO: 291202 - RNA, 19 nt, Artificial Sequence
  Description of Artificial Sequence: Synthetic oligonucleotide
  Sense strand starting at position 3208 of SEQ ID NO: 3743
ucgauauuguuauuccaac

SEQ ID NO: 291203 - RNA, 19 nt, Artificial Sequence
  Description of Artificial Sequence: Synthetic oligonucleotide
  Antisense strand to SEQ ID NO: 291202
guuggaauaacaauaucga

SEQ ID NO: 291204 - RNA, 19 nt, Artificial Sequence
  Description of Artificial Sequence: Synthetic oligonucleotide
  Sense strand starting at position 3286 of SEQ ID NO: 3743
gccagauacagugguugga

SEQ ID NO: 291205 - RNA, 19 nt, Artificial Sequence
  Description of Artificial Sequence: Synthetic oligonucleotide
  Antisense strand to SEQ ID NO: 291204
uccaaccacuguaucuggc

SEQ ID NO: 291206 - RNA, 19 nt, Artificial Sequence
  Description of Artificial Sequence: Synthetic oligonucleotide
  Sense strand starting at position 3340 of SEQ ID NO: 3743
aggugaggcuuaaacggau

SEQ ID NO: 291207 - RNA, 19 nt, Artificial Sequence
  Description of Artificial Sequence: Synthetic oligonucleotide
  Antisense strand to SEQ ID NO: 291206
auccguuuaagccucaccu

SEQ ID NO: 291208 - RNA, 19 nt, Artificial Sequence
  Description of Artificial Sequence: Synthetic oligonucleotide
  Sense strand starting at position 3736 of SEQ ID NO: 3743
ggcuacuuaucagagccaa

SEQ ID NO: 291209 - RNA, 19 nt, Artificial Sequence
  Description of Artificial Sequence: Synthetic oligonucleotide
  Antisense strand to SEQ ID NO: 291208
uuggcucugauaaguagcc

SEQ ID NO: 291210 - RNA, 19 nt, Artificial Sequence
  Description of Artificial Sequence: Synthetic oligonucleotide
  Sense strand starting at position 3942 of SEQ ID NO: 3743
ggcgggugagcucgagaau

SEQ ID NO: 291211 - RNA, 19 nt, Artificial Sequence
  Description of Artificial Sequence: Synthetic oligonucleotide
  Antisense strand to SEQ ID NO: 291210
auucucgagcucacccgcc

SEQ ID NO: 291212 - RNA, 19 nt, Artificial Sequence
  Description of Artificial Sequence: Synthetic oligonucleotide
  Sense strand starting at position 3943 of SEQ ID NO: 3743
gcgggugagcucgagaaug

SEQ ID NO: 291213 - RNA, 19 nt, Artificial Sequence
  Description of Artificial Sequence: Synthetic oligonucleotide
  Antisense strand to SEQ ID NO: 291212
cauucucgagcucacccgc

SEQ ID NO: 291214 - RNA, 19 nt, Artificial Sequence
  Description of Artificial Sequence: Synthetic oligonucleotide
  Sense strand starting at position 4 of SEQ ID NO: 3744
agggcugugaguuaaugaa

SEQ ID NO: 291215 - RNA, 19 nt, Artificial Sequence
  Description of Artificial Sequence: Synthetic oligonucleotide
  Antisense strand to SEQ ID NO: 291214
uucauuaacucacagcccu

SEQ ID NO: 291216 - RNA, 19 nt, Artificial Sequence
  Description of Artificial Sequence: Synthetic oligonucleotide
  Sense strand starting at position 11 of SEQ ID NO: 3744
ugaguuaaugaagguguau

SEQ ID NO: 291217 - RNA, 19 nt, Artificial Sequence
  Description of Artificial Sequence: Synthetic oligonucleotide
  Antisense strand to SEQ ID NO: 291216
auacaccuucauuaacuca

SEQ ID NO: 291218 - RNA, 19 nt, Artificial Sequence
  Description of Artificial Sequence: Synthetic oligonucleotide
  Sense strand starting at position 13 of SEQ ID NO: 3744
aguuaaugaagguguauaa

SEQ ID NO: 291219 - RNA, 19 nt, Artificial Sequence
  Description of Artificial Sequence: Synthetic oligonucleotide
  Antisense strand to SEQ ID NO: 291218
uuauacaccuucauuaacu

SEQ ID NO: 291220 - RNA, 19 nt, Artificial Sequence
  Description of Artificial Sequence: Synthetic oligonucleotide
  Sense strand starting at position 20 of SEQ ID NO: 3744
gaagguguauaaucugaaa

SEQ ID NO: 291221 - RNA, 19 nt, Artificial Sequence
  Description of Artificial Sequence: Synthetic oligonucleotide
  Antisense strand to SEQ ID NO: 291220
uuucagauuauacaccuuc

SEQ ID NO: 291222 - RNA, 19 nt, Artificial Sequence
  Description of Artificial Sequence: Synthetic oligonucleotide
  Sense strand starting at position 22 of SEQ ID NO: 3744
agguguauaaucugaaaga

SEQ ID NO: 291223 - RNA, 19 nt, Artificial Sequence
  Description of Artificial Sequence: Synthetic oligonucleotide
  Antisense strand to SEQ ID NO: 291222
ucuuucagauuauacaccu

SEQ ID NO: 291224 - RNA, 19 nt, Artificial Sequence
  Description of Artificial Sequence: Synthetic oligonucleotide
  Sense strand starting at position 92 of SEQ ID NO: 3744
ucaguauuauaggcaaguu

SEQ ID NO: 291225 - RNA, 19 nt, Artificial Sequence
  Description of Artificial Sequence: Synthetic oligonucleotide
  Antisense strand to SEQ ID NO: 291224
aacuugccuauaauacuga

SEQ ID NO: 291226 - RNA, 19 nt, Artificial Sequence
  Description of Artificial Sequence: Synthetic oligonucleotide
  Sense strand starting at position 280 of SEQ ID NO: 3744
auauaaggguuauucugau

SEQ ID NO: 291227 - RNA, 19 nt, Artificial Sequence
  Description of Artificial Sequence: Synthetic oligonucleotide
  Antisense strand to SEQ ID NO: 291226
aucagaauaacccuuauau

SEQ ID NO: 291228 - RNA, 19 nt, Artificial Sequence
  Description of Artificial Sequence: Synthetic oligonucleotide
  Sense strand starting at position 338 of SEQ ID NO: 3744
ggaagagcauaugcaaauu

SEQ ID NO: 291229 - RNA, 19 nt, Artificial Sequence
  Description of Artificial Sequence: Synthetic oligonucleotide
  Antisense strand to SEQ ID NO: 291228
aauuugcauaugcucuucc

SEQ ID NO: 291230 - RNA, 19 nt, Artificial Sequence
  Description of Artificial Sequence: Synthetic oligonucleotide
  Sense strand starting at position 408 of SEQ ID NO: 3744
cugaaauacggauguugca

SEQ ID NO: 291231 - RNA, 19 nt, Artificial Sequence
  Description of Artificial Sequence: Synthetic oligonucleotide
  Antisense strand to SEQ ID NO: 291230
ugcaacauccguauuucag

SEQ ID NO: 291232 - RNA, 19 nt, Artificial Sequence
  Description of Artificial Sequence: Synthetic oligonucleotide
  Sense strand starting at position 417 of SEQ ID NO: 3744
ggauguugcauacauguau

SEQ ID NO: 291233 - RNA, 19 nt, Artificial Sequence
  Description of Artificial Sequence: Synthetic oligonucleotide
  Antisense strand to SEQ ID NO: 291232
auacauguaugcaacaucc

SEQ ID NO: 291234 - RNA, 19 nt, Artificial Sequence
  Description of Artificial Sequence: Synthetic oligonucleotide
  Sense strand starting at position 789 of SEQ ID NO: 3744
cuugauaaugaguggcuuu

SEQ ID NO: 291235 - RNA, 19 nt, Artificial Sequence
  Description of Artificial Sequence: Synthetic oligonucleotide
  Antisense strand to SEQ ID NO: 291234
aaagccacucauuaucaag

SEQ ID NO: 291236 - RNA, 19 nt, Artificial Sequence
  Description of Artificial Sequence: Synthetic oligonucleotide
  Sense strand starting at position 792 of SEQ ID NO: 3744
gauaaugaguggcuuugua

SEQ ID NO: 291237 - RNA, 19 nt, Artificial Sequence
  Description of Artificial Sequence: Synthetic oligonucleotide
  Antisense strand to SEQ ID NO: 291236
uacaaagccacucauuauc

SEQ ID NO: 291238 - RNA, 19 nt, Artificial Sequence
  Description of Artificial Sequence: Synthetic oligonucleotide
  Sense strand starting at position 822 of SEQ ID NO: 3744
acaggacuuuaucuugagu

SEQ ID NO: 291239 - RNA, 19 nt, Artificial Sequence
  Description of Artificial Sequence: Synthetic oligonucleotide
  Antisense strand to SEQ ID NO: 291238
acucaagauaaaguccugu

SEQ ID NO: 291240 - RNA, 19 nt, Artificial Sequence
  Description of Artificial Sequence: Synthetic oligonucleotide
  Sense strand starting at position 825 of SEQ ID NO: 3744
ggacuuuaucuugagugcu

SEQ ID NO: 291241 - RNA, 19 nt, Artificial Sequence
  Description of Artificial Sequence: Synthetic oligonucleotide
  Antisense strand to SEQ ID NO: 291240
agcacucaagauaaagucc

SEQ ID NO: 291242 - RNA, 19 nt, Artificial Sequence
  Description of Artificial Sequence: Synthetic oligonucleotide
  Sense strand starting at position 875 of SEQ ID NO: 3744
aagggagugauguggucaa

SEQ ID NO: 291243 - RNA, 19 nt, Artificial Sequence
  Description of Artificial Sequence: Synthetic oligonucleotide
  Antisense strand to SEQ ID NO: 291242
uugaccacaucacucccuu

SEQ ID NO: 291244 - RNA, 19 nt, Artificial Sequence
  Description of Artificial Sequence: Synthetic oligonucleotide
  Sense strand starting at position 1038 of SEQ ID NO: 3744
aaacauaaagugugugaau

SEQ ID NO: 291245 - RNA, 19 nt, Artificial Sequence
  Description of Artificial Sequence: Synthetic oligonucleotide
  Antisense strand to SEQ ID NO: 291244
auucacacacuuuauguuu

SEQ ID NO: 291246 - RNA, 19 nt, Artificial Sequence
  Description of Artificial Sequence: Synthetic oligonucleotide
  Sense strand starting at position 1040 of SEQ ID NO: 3744
acauaaagugugugaauga

SEQ ID NO: 291247 - RNA, 19 nt, Artificial Sequence
  Description of Artificial Sequence: Synthetic oligonucleotide
  Antisense strand to SEQ ID NO: 291246
ucauucacacacuuuaugu

SEQ ID NO: 291248 - RNA, 19 nt, Artificial Sequence
  Description of Artificial Sequence: Synthetic oligonucleotide
  Sense strand starting at position 1111 of SEQ ID NO: 3744
agcuuaggcacagaaaugu

SEQ ID NO: 291249 - RNA, 19 nt, Artificial Sequence
  Description of Artificial Sequence: Synthetic oligonucleotide
  Antisense strand to SEQ ID NO: 291248
acauuucugugccuaagcu

SEQ ID NO: 291250 - RNA, 19 nt, Artificial Sequence
  Description of Artificial Sequence: Synthetic oligonucleotide
  Sense strand starting at position 1120 of SEQ ID NO: 3744
acagaaauguggucucuuu

SEQ ID NO: 291251 - RNA, 19 nt, Artificial Sequence
  Description of Artificial Sequence: Synthetic oligonucleotide
  Antisense strand to SEQ ID NO: 291250
aaagagaccacauuucugu

SEQ ID NO: 291252 - RNA, 19 nt, Artificial Sequence
  Description of Artificial Sequence: Synthetic oligonucleotide
  Sense strand starting at position 1140 of SEQ ID NO: 3744
ucauacguaggcuaucaau

SEQ ID NO: 291253 - RNA, 19 nt, Artificial Sequence
  Description of Artificial Sequence: Synthetic oligonucleotide
  Antisense strand to SEQ ID NO: 291252
auugauagccuacguauga

SEQ ID NO: 291254 - RNA, 19 nt, Artificial Sequence
  Description of Artificial Sequence: Synthetic oligonucleotide
  Sense strand starting at position 1146 of SEQ ID NO: 3744
guaggcuaucaauaaguac

SEQ ID NO: 291255 - RNA, 19 nt, Artificial Sequence
  Description of Artificial Sequence: Synthetic oligonucleotide
  Antisense strand to SEQ ID NO: 291254
guacuuauugauagccuac

SEQ ID NO: 291256 - RNA, 19 nt, Artificial Sequence
  Description of Artificial Sequence: Synthetic oligonucleotide
  Sense strand starting at position 1340 of SEQ ID NO: 3744
ucuacugggucuuccauua

SEQ ID NO: 291257 - RNA, 19 nt, Artificial Sequence
  Description of Artificial Sequence: Synthetic oligonucleotide
  Antisense strand to SEQ ID NO: 291256
uaauggaagacccaguaga

SEQ ID NO: 291258 - RNA, 19 nt, Artificial Sequence
  Description of Artificial Sequence: Synthetic oligonucleotide
  Sense strand starting at position 1419 of SEQ ID NO: 3744
guaguuacugcgcuuauga

SEQ ID NO: 291259 - RNA, 19 nt, Artificial Sequence
  Description of Artificial Sequence: Synthetic oligonucleotide
  Antisense strand to SEQ ID NO: 291258
ucauaagcgcaguaacuac

SEQ ID NO: 291260 - RNA, 19 nt, Artificial Sequence
  Description of Artificial Sequence: Synthetic oligonucleotide
  Sense strand starting at position 1447 of SEQ ID NO: 3744
ccguaaucaggcuacuuaa

SEQ ID NO: 291261 - RNA, 19 nt, Artificial Sequence
  Description of Artificial Sequence: Synthetic oligonucleotide
  Antisense strand to SEQ ID NO: 291260
uuaaguagccugauuacgg

SEQ ID NO: 291262 - RNA, 19 nt, Artificial Sequence
  Description of Artificial Sequence: Synthetic oligonucleotide
  Sense strand starting at position 1655 of SEQ ID NO: 3744
uaaagaaaucucggcagag

SEQ ID NO: 291263 - RNA, 19 nt, Artificial Sequence
  Description of Artificial Sequence: Synthetic oligonucleotide
  Antisense strand to SEQ ID NO: 291262
cucugccgagauuucuuua

SEQ ID NO: 291264 - RNA, 19 nt, Artificial Sequence
  Description of Artificial Sequence: Synthetic oligonucleotide
  Sense strand starting at position 1869 of SEQ ID NO: 3744
ucgcuucgggaccaaauaa

SEQ ID NO: 291265 - RNA, 19 nt, Artificial Sequence
  Description of Artificial Sequence: Synthetic oligonucleotide
  Antisense strand to SEQ ID NO: 291264
uuauuuggucccgaagcga

SEQ ID NO: 291266 - RNA, 19 nt, Artificial Sequence
  Description of Artificial Sequence: Synthetic oligonucleotide
  Sense strand starting at position 2135 of SEQ ID NO: 3744
cucugagcucuccgagaga

SEQ ID NO: 291267 - RNA, 19 nt, Artificial Sequence
  Description of Artificial Sequence: Synthetic oligonucleotide
  Antisense strand to SEQ ID NO: 291266
ucucucggagagcucagag

SEQ ID NO: 291268 - RNA, 19 nt, Artificial Sequence
  Description of Artificial Sequence: Synthetic oligonucleotide
  Sense strand starting at position 2138 of SEQ ID NO: 3744
ugagcucuccgagagauug

SEQ ID NO: 291269 - RNA, 19 nt, Artificial Sequence
  Description of Artificial Sequence: Synthetic oligonucleotide
  Antisense strand to SEQ ID NO: 291268
caaucucucggagagcuca

SEQ ID NO: 291270 - RNA, 19 nt, Artificial Sequence
  Description of Artificial Sequence: Synthetic oligonucleotide
  Sense strand starting at position 2148 of SEQ ID NO: 3744
gagagauuggucgggaccu

SEQ ID NO: 291271 - RNA, 19 nt, Artificial Sequence
  Description of Artificial Sequence: Synthetic oligonucleotide
  Antisense strand to SEQ ID NO: 291270
aggucccgaccaaucucuc

SEQ ID NO: 291272 - RNA, 19 nt, Artificial Sequence
  Description of Artificial Sequence: Synthetic oligonucleotide
  Sense strand starting at position 2163 of SEQ ID NO: 3744
accugaagcguugagguua

SEQ ID NO: 291273 - RNA, 19 nt, Artificial Sequence
  Description of Artificial Sequence: Synthetic oligonucleotide
  Antisense strand to SEQ ID NO: 291272
uaaccucaacgcuucaggu

SEQ ID NO: 291274 - RNA, 19 nt, Artificial Sequence
  Description of Artificial Sequence: Synthetic oligonucleotide
  Sense strand starting at position 2254 of SEQ ID NO: 3744
accuguguuguaugauuua

SEQ ID NO: 291275 - RNA, 19 nt, Artificial Sequence
  Description of Artificial Sequence: Synthetic oligonucleotide
  Antisense strand to SEQ ID NO: 291274
uaaaucauacaacacaggu

SEQ ID NO: 291276 - RNA, 19 nt, Artificial Sequence
  Description of Artificial Sequence: Synthetic oligonucleotide
  Sense strand starting at position 2635 of SEQ ID NO: 3744
ccuugaguccuacauauag

SEQ ID NO: 291277 - RNA, 19 nt, Artificial Sequence
  Description of Artificial Sequence: Synthetic oligonucleotide
  Antisense strand to SEQ ID NO: 291276
cuauauguaggacucaagg

SEQ ID NO: 291278 - RNA, 19 nt, Artificial Sequence
  Description of Artificial Sequence: Synthetic oligonucleotide
  Sense strand starting at position 2685 of SEQ ID NO: 3744
cgacuaauggucuacuuaa

SEQ ID NO: 291279 - RNA, 19 nt, Artificial Sequence
  Description of Artificial Sequence: Synthetic oligonucleotide
  Antisense strand to SEQ ID NO: 291278
uuaaguagaccauuagucg

SEQ ID NO: 291280 - RNA, 19 nt, Artificial Sequence
  Description of Artificial Sequence: Synthetic oligonucleotide
  Sense strand starting at position 2926 of SEQ ID NO: 3744
cuggguauagguugaguau

SEQ ID NO: 291281 - RNA, 19 nt, Artificial Sequence
  Description of Artificial Sequence: Synthetic oligonucleotide
  Antisense strand to SEQ ID NO: 291280
auacucaaccuauacccag

SEQ ID NO: 291282 - RNA, 19 nt, Artificial Sequence
  Description of Artificial Sequence: Synthetic oligonucleotide
  Sense strand starting at position 2958 of SEQ ID NO: 3744
ugcuuaagaccagaacugu

SEQ ID NO: 291283 - RNA, 19 nt, Artificial Sequence
  Description of Artificial Sequence: Synthetic oligonucleotide
  Antisense strand to SEQ ID NO: 291282
acaguucuggucuuaagca

SEQ ID NO: 291284 - RNA, 19 nt, Artificial Sequence
  Description of Artificial Sequence: Synthetic oligonucleotide
  Sense strand starting at position 3166 of SEQ ID NO: 3744
caucguguugaugaucaaa

SEQ ID NO: 291285 - RNA, 19 nt, Artificial Sequence
  Description of Artificial Sequence: Synthetic oligonucleotide
  Antisense strand to SEQ ID NO: 291284
uuugaucaucaacacgaug

SEQ ID NO: 291286 - RNA, 19 nt, Artificial Sequence
  Description of Artificial Sequence: Synthetic oligonucleotide
  Sense strand starting at position 3220 of SEQ ID NO: 3744
uuggauuaggguugcugaa

SEQ ID NO: 291287 - RNA, 19 nt, Artificial Sequence
  Description of Artificial Sequence: Synthetic oligonucleotide
  Antisense strand to SEQ ID NO: 291286
uucagcaacccuaauccaa

SEQ ID NO: 291288 - RNA, 19 nt, Artificial Sequence
  Description of Artificial Sequence: Synthetic oligonucleotide
  Sense strand starting at position 3222 of SEQ ID NO: 3744
ggauuaggguugcugaaca

SEQ ID NO: 291289 - RNA, 19 nt, Artificial Sequence
  Description of Artificial Sequence: Synthetic oligonucleotide
  Antisense strand to SEQ ID NO: 291288
uguucagcaacccuaaucc

SEQ ID NO: 291290 - RNA, 19 nt, Artificial Sequence
  Description of Artificial Sequence: Synthetic oligonucleotide
  Sense strand starting at position 3227 of SEQ ID NO: 3744
aggguugcugaacauguaa

SEQ ID NO: 291291 - RNA, 19 nt, Artificial Sequence
  Description of Artificial Sequence: Synthetic oligonucleotide
  Antisense strand to SEQ ID NO: 291290
uuacauguucagcaacccu

SEQ ID NO: 291292 - RNA, 19 nt, Artificial Sequence
  Description of Artificial Sequence: Synthetic oligonucleotide
  Sense strand starting at position 3785 of SEQ ID NO: 3744
auaugugguaggcaguauu

SEQ ID NO: 291293 - RNA, 19 nt, Artificial Sequence
  Description of Artificial Sequence: Synthetic oligonucleotide
  Antisense strand to SEQ ID NO: 291292
aauacugccuaccacauau

SEQ ID NO: 291294 - RNA, 19 nt, Artificial Sequence
  Description of Artificial Sequence: Synthetic oligonucleotide
  Sense strand starting at position 255 of SEQ ID NO: 3745
ggagauuguaacggcuaga

SEQ ID NO: 291295 - RNA, 19 nt, Artificial Sequence
  Description of Artificial Sequence: Synthetic oligonucleotide
  Antisense strand to SEQ ID NO: 291294
ucuagccguuacaaucucc

SEQ ID NO: 291296 - RNA, 19 nt, Artificial Sequence
  Description of Artificial Sequence: Synthetic oligonucleotide
  Sense strand starting at position 258 of SEQ ID NO: 3745
gauuguaacggcuagaguu

SEQ ID NO: 291297 - RNA, 19 nt, Artificial Sequence
  Description of Artificial Sequence: Synthetic oligonucleotide
  Antisense strand to SEQ ID NO: 291296
aacucuagccguuacaauc

SEQ ID NO: 291298 - RNA, 19 nt, Artificial Sequence
  Description of Artificial Sequence: Synthetic oligonucleotide
  Sense strand starting at position 274 of SEQ ID NO: 3745
guuacuacagguuaagagu

SEQ ID NO: 291299 - RNA, 19 nt, Artificial Sequence
  Description of Artificial Sequence: Synthetic oligonucleotide
  Antisense strand to SEQ ID NO: 291298
acucuuaaccuguaguaac

SEQ ID NO: 291300 - RNA, 19 nt, Artificial Sequence
  Description of Artificial Sequence: Synthetic oligonucleotide
  Sense strand starting at position 422 of SEQ ID NO: 3745
gagugaaaccacuguucug

SEQ ID NO: 291301 - RNA, 19 nt, Artificial Sequence
  Description of Artificial Sequence: Synthetic oligonucleotide
  Antisense strand to SEQ ID NO: 291300
cagaacagugguuucacuc

SEQ ID NO: 291302 - RNA, 19 nt, Artificial Sequence
  Description of Artificial Sequence: Synthetic oligonucleotide
  Sense strand starting at position 429 of SEQ ID NO: 3745
accacuguucugggaauuc

SEQ ID NO: 291303 - RNA, 19 nt, Artificial Sequence
  Description of Artificial Sequence: Synthetic oligonucleotide
  Antisense strand to SEQ ID NO: 291302
gaauucccagaacaguggu

SEQ ID NO: 291304 - RNA, 19 nt, Artificial Sequence
  Description of Artificial Sequence: Synthetic oligonucleotide
  Sense strand starting at position 610 of SEQ ID NO: 3745
gaggauaaacguggaaucu

SEQ ID NO: 291305 - RNA, 19 nt, Artificial Sequence
  Description of Artificial Sequence: Synthetic oligonucleotide
  Antisense strand to SEQ ID NO: 291304
agauuccacguuuauccuc

SEQ ID NO: 291306 - RNA, 19 nt, Artificial Sequence
  Description of Artificial Sequence: Synthetic oligonucleotide
  Sense strand starting at position 621 of SEQ ID NO: 3745
uggaaucuaccuugucuua

SEQ ID NO: 291307 - RNA, 19 nt, Artificial Sequence
  Description of Artificial Sequence: Synthetic oligonucleotide
  Antisense strand to SEQ ID NO: 291306
uaagacaagguagauucca

SEQ ID NO: 291308 - RNA, 19 nt, Artificial Sequence
  Description of Artificial Sequence: Synthetic oligonucleotide
  Sense strand starting at position 732 of SEQ ID NO: 3745
ccaugaaauuaugcuauga

SEQ ID NO: 291309 - RNA, 19 nt, Artificial Sequence
  Description of Artificial Sequence: Synthetic oligonucleotide
  Antisense strand to SEQ ID NO: 291308
ucauagcauaauuucaugg

SEQ ID NO: 291310 - RNA, 19 nt, Artificial Sequence
  Description of Artificial Sequence: Synthetic oligonucleotide
  Sense strand starting at position 753 of SEQ ID NO: 3745
acgugaauaacucaaggua

SEQ ID NO: 291311 - RNA, 19 nt, Artificial Sequence
  Description of Artificial Sequence: Synthetic oligonucleotide
  Antisense strand to SEQ ID NO: 291310
uaccuugaguuauucacgu

SEQ ID NO: 291312 - RNA, 19 nt, Artificial Sequence
  Description of Artificial Sequence: Synthetic oligonucleotide
  Sense strand starting at position 905 of SEQ ID NO: 3745
cuuagagagauacgcgaua

SEQ ID NO: 291313 - RNA, 19 nt, Artificial Sequence
  Description of Artificial Sequence: Synthetic oligonucleotide
  Antisense strand to SEQ ID NO: 291312
uaucgcguaucucucuaag

SEQ ID NO: 291314 - RNA, 19 nt, Artificial Sequence
  Description of Artificial Sequence: Synthetic oligonucleotide
  Sense strand starting at position 1123 of SEQ ID NO: 3745
uugguuaucggagaguaag

SEQ ID NO: 291315 - RNA, 19 nt, Artificial Sequence
  Description of Artificial Sequence: Synthetic oligonucleotide
  Antisense strand to SEQ ID NO: 291314
cuuacucuccgauaaccaa

SEQ ID NO: 291316 - RNA, 19 nt, Artificial Sequence
  Description of Artificial Sequence: Synthetic oligonucleotide
  Sense strand starting at position 1135 of SEQ ID NO: 3745
gaguaagugauuugcugug

SEQ ID NO: 291317 - RNA, 19 nt, Artificial Sequence
  Description of Artificial Sequence: Synthetic oligonucleotide
  Antisense strand to SEQ ID NO: 291316
cacagcaaaucacuuacuc

SEQ ID NO: 291318 - RNA, 19 nt, Artificial Sequence
  Description of Artificial Sequence: Synthetic oligonucleotide
  Sense strand starting at position 1140 of SEQ ID NO: 3745
agugauuugcugugggucu

SEQ ID NO: 291319 - RNA, 19 nt, Artificial Sequence
  Description of Artificial Sequence: Synthetic oligonucleotide
  Antisense strand to SEQ ID NO: 291318
agacccacagcaaaucacu

SEQ ID NO: 291320 - RNA, 19 nt, Artificial Sequence
  Description of Artificial Sequence: Synthetic oligonucleotide
  Sense strand starting at position 2154 of SEQ ID NO: 3745
ggccguuccguuucacaaa

SEQ ID NO: 291321 - RNA, 19 nt, Artificial Sequence
  Description of Artificial Sequence: Synthetic oligonucleotide
  Antisense strand to SEQ ID NO: 291320
uuugugaaacggaacggcc

SEQ ID NO: 291322 - RNA, 19 nt, Artificial Sequence
  Description of Artificial Sequence: Synthetic oligonucleotide
  Sense strand starting at position 2192 of SEQ ID NO: 3745
gauaucccuuucucgauga

SEQ ID NO: 291323 - RNA, 19 nt, Artificial Sequence
  Description of Artificial Sequence: Synthetic oligonucleotide
  Antisense strand to SEQ ID NO: 291322
ucaucgagaaagggauauc

SEQ ID NO: 291324 - RNA, 19 nt, Artificial Sequence
  Description of Artificial Sequence: Synthetic oligonucleotide
  Sense strand starting at position 2272 of SEQ ID NO: 3745
agaucucagcucuaggagu

SEQ ID NO: 291325 - RNA, 19 nt, Artificial Sequence
  Description of Artificial Sequence: Synthetic oligonucleotide
  Antisense strand to SEQ ID NO: 291324
acuccuagagcugagaucu

SEQ ID NO: 291326 - RNA, 19 nt, Artificial Sequence
  Description of Artificial Sequence: Synthetic oligonucleotide
  Sense strand starting at position 2274 of SEQ ID NO: 3745
aucucagcucuaggaguua

SEQ ID NO: 291327 - RNA, 19 nt, Artificial Sequence
  Description of Artificial Sequence: Synthetic oligonucleotide
  Antisense strand to SEQ ID NO: 291326
uaacuccuagagcugagau

SEQ ID NO: 291328 - RNA, 19 nt, Artificial Sequence
  Description of Artificial Sequence: Synthetic oligonucleotide
  Sense strand starting at position 2342 of SEQ ID NO: 3745
ccuugucuacgauaaugau

SEQ ID NO: 291329 - RNA, 19 nt, Artificial Sequence
  Description of Artificial Sequence: Synthetic oligonucleotide
  Antisense strand to SEQ ID NO: 291328
aucauuaucguagacaagg

SEQ ID NO: 291330 - RNA, 19 nt, Artificial Sequence
  Description of Artificial Sequence: Synthetic oligonucleotide
  Sense strand starting at position 2346 of SEQ ID NO: 3745
gucuacgauaaugauagua

SEQ ID NO: 291331 - RNA, 19 nt, Artificial Sequence
  Description of Artificial Sequence: Synthetic oligonucleotide
  Antisense strand to SEQ ID NO: 291330
uacuaucauuaucguagac

SEQ ID NO: 291332 - RNA, 19 nt, Artificial Sequence
  Description of Artificial Sequence: Synthetic oligonucleotide
  Sense strand starting at position 2393 of SEQ ID NO: 3745
cuaggauugcaugaguuua

SEQ ID NO: 291333 - RNA, 19 nt, Artificial Sequence
  Description of Artificial Sequence: Synthetic oligonucleotide
  Antisense strand to SEQ ID NO: 291332
uaaacucaugcaauccuag

SEQ ID NO: 291334 - RNA, 19 nt, Artificial Sequence
  Description of Artificial Sequence: Synthetic oligonucleotide
  Sense strand starting at position 2395 of SEQ ID NO: 3745
aggauugcaugaguuuaca

SEQ ID NO: 291335 - RNA, 19 nt, Artificial Sequence
  Description of Artificial Sequence: Synthetic oligonucleotide
  Antisense strand to SEQ ID NO: 291334
uguaaacucaugcaauccu

SEQ ID NO: 291336 - RNA, 19 nt, Artificial Sequence
  Description of Artificial Sequence: Synthetic oligonucleotide
  Sense strand starting at position 2404 of SEQ ID NO: 3745
ugaguuuacauaugugaag

SEQ ID NO: 291337 - RNA, 19 nt, Artificial Sequence
  Description of Artificial Sequence: Synthetic oligonucleotide
  Antisense strand to SEQ ID NO: 291336
cuucacauauguaaacuca

SEQ ID NO: 291338 - RNA, 19 nt, Artificial Sequence
  Description of Artificial Sequence: Synthetic oligonucleotide
  Sense strand starting at position 2406 of SEQ ID NO: 3745
aguuuacauaugugaagga

SEQ ID NO: 291339 - RNA, 19 nt, Artificial Sequence
  Description of Artificial Sequence: Synthetic oligonucleotide
  Antisense strand to SEQ ID NO: 291338
uccuucacauauguaaacu

SEQ ID NO: 291340 - RNA, 19 nt, Artificial Sequence
  Description of Artificial Sequence: Synthetic oligonucleotide
  Sense strand starting at position 2410 of SEQ ID NO: 3745
uacauaugugaaggacgua

SEQ ID NO: 291341 - RNA, 19 nt, Artificial Sequence
  Description of Artificial Sequence: Synthetic oligonucleotide
  Antisense strand to SEQ ID NO: 291340
uacguccuucacauaugua

SEQ ID NO: 291342 - RNA, 19 nt, Artificial Sequence
  Description of Artificial Sequence: Synthetic oligonucleotide
  Sense strand starting at position 2831 of SEQ ID NO: 3745
gagaaagguuuguccagca

SEQ ID NO: 291343 - RNA, 19 nt, Artificial Sequence
  Description of Artificial Sequence: Synthetic oligonucleotide
  Antisense strand to SEQ ID NO: 291342
ugcuggacaaaccuuucuc

SEQ ID NO: 291344 - RNA, 19 nt, Artificial Sequence
  Description of Artificial Sequence: Synthetic oligonucleotide
  Sense strand starting at position 2898 of SEQ ID NO: 3745
uuuaacaucuuggucagau

SEQ ID NO: 291345 - RNA, 19 nt, Artificial Sequence
  Description of Artificial Sequence: Synthetic oligonucleotide
  Antisense strand to SEQ ID NO: 291344
aucugaccaagauguuaaa

SEQ ID NO: 291346 - RNA, 19 nt, Artificial Sequence
  Description of Artificial Sequence: Synthetic oligonucleotide
  Sense strand starting at position 2899 of SEQ ID NO: 3745
uuaacaucuuggucagaug

SEQ ID NO: 291347 - RNA, 19 nt, Artificial Sequence
  Description of Artificial Sequence: Synthetic oligonucleotide
  Antisense strand to SEQ ID NO: 291346
caucugaccaagauguuaa

SEQ ID NO: 291348 - RNA, 19 nt, Artificial Sequence
  Description of Artificial Sequence: Synthetic oligonucleotide
  Sense strand starting at position 2910 of SEQ ID NO: 3745
gucagauggcgugaagaaa

SEQ ID NO: 291349 - RNA, 19 nt, Artificial Sequence
  Description of Artificial Sequence: Synthetic oligonucleotide
  Antisense strand to SEQ ID NO: 291348
uuucuucacgccaucugac

SEQ ID NO: 291350 - RNA, 19 nt, Artificial Sequence
  Description of Artificial Sequence: Synthetic oligonucleotide
  Sense strand starting at position 2991 of SEQ ID NO: 3745
agugaaguugaaugcauau

SEQ ID NO: 291351 - RNA, 19 nt, Artificial Sequence
  Description of Artificial Sequence: Synthetic oligonucleotide
  Antisense strand to SEQ ID NO: 291350
auaugcauucaacuucacu

SEQ ID NO: 291352 - RNA, 19 nt, Artificial Sequence
  Description of Artificial Sequence: Synthetic oligonucleotide
  Sense strand starting at position 3104 of SEQ ID NO: 3745
gaaaccuauugugcagagu

SEQ ID NO: 291353 - RNA, 19 nt, Artificial Sequence
  Description of Artificial Sequence: Synthetic oligonucleotide
  Antisense strand to SEQ ID NO: 291352
acucugcacaauagguuuc

SEQ ID NO: 291354 - RNA, 19 nt, Artificial Sequence
  Description of Artificial Sequence: Synthetic oligonucleotide
  Sense strand starting at position 3105 of SEQ ID NO: 3745
aaaccuauugugcagagua

SEQ ID NO: 291355 - RNA, 19 nt, Artificial Sequence
  Description of Artificial Sequence: Synthetic oligonucleotide
  Antisense strand to SEQ ID NO: 291354
uacucugcacaauagguuu

SEQ ID NO: 291356 - RNA, 19 nt, Artificial Sequence
  Description of Artificial Sequence: Synthetic oligonucleotide
  Sense strand starting at position 3107 of SEQ ID NO: 3745
accuauugugcagaguaaa

SEQ ID NO: 291357 - RNA, 19 nt, Artificial Sequence
  Description of Artificial Sequence: Synthetic oligonucleotide
  Antisense strand to SEQ ID NO: 291356
uuuacucugcacaauaggu

SEQ ID NO: 291358 - RNA, 19 nt, Artificial Sequence
  Description of Artificial Sequence: Synthetic oligonucleotide
  Sense strand starting at position 3539 of SEQ ID NO: 3745
auuagcauucuuuagggua

SEQ ID NO: 291359 - RNA, 19 nt, Artificial Sequence
  Description of Artificial Sequence: Synthetic oligonucleotide
  Antisense strand to SEQ ID NO: 291358
uacccuaaagaaugcuaau

SEQ ID NO: 291360 - RNA, 19 nt, Artificial Sequence
  Description of Artificial Sequence: Synthetic oligonucleotide
  Sense strand starting at position 3552 of SEQ ID NO: 3745
aggguaucagcccauaaua

SEQ ID NO: 291361 - RNA, 19 nt, Artificial Sequence
  Description of Artificial Sequence: Synthetic oligonucleotide
  Antisense strand to SEQ ID NO: 291360
uauuaugggcugauacccu

SEQ ID NO: 291362 - RNA, 19 nt, Artificial Sequence
  Description of Artificial Sequence: Synthetic oligonucleotide
  Sense strand starting at position 3563 of SEQ ID NO: 3745
ccauaauacgccuaagaau

SEQ ID NO: 291363 - RNA, 19 nt, Artificial Sequence
  Description of Artificial Sequence: Synthetic oligonucleotide
  Antisense strand to SEQ ID NO: 291362
auucuuaggcguauuaugg

SEQ ID NO: 291364 - RNA, 19 nt, Artificial Sequence
  Description of Artificial Sequence: Synthetic oligonucleotide
  Sense strand starting at position 3749 of SEQ ID NO: 3745
aaauauggguuucugaauu

SEQ ID NO: 291365 - RNA, 19 nt, Artificial Sequence
  Description of Artificial Sequence: Synthetic oligonucleotide
  Antisense strand to SEQ ID NO: 291364
aauucagaaacccauauuu

SEQ ID NO: 291366 - RNA, 19 nt, Artificial Sequence
  Description of Artificial Sequence: Synthetic oligonucleotide
  Sense strand starting at position 3780 of SEQ ID NO: 3745
augauaguacuuuguuaag

SEQ ID NO: 291367 - RNA, 19 nt, Artificial Sequence
  Description of Artificial Sequence: Synthetic oligonucleotide
  Antisense strand to SEQ ID NO: 291366
cuuaacaaaguacuaucau

SEQ ID NO: 291368 - RNA, 19 nt, Artificial Sequence
  Description of Artificial Sequence: Synthetic oligonucleotide
  Sense strand starting at position 3855 of SEQ ID NO: 3745
ucuuguaacggauaaagua

SEQ ID NO: 291369 - RNA, 19 nt, Artificial Sequence
  Description of Artificial Sequence: Synthetic oligonucleotide
  Antisense strand to SEQ ID NO: 291368
uacuuuauccguuacaaga

SEQ ID NO: 291370 - RNA, 19 nt, Artificial Sequence
  Description of Artificial Sequence: Synthetic oligonucleotide
  Sense strand starting at position 3939 of SEQ ID NO: 3745
ggguucuuuaagggaaauu

SEQ ID NO: 291371 - RNA, 19 nt, Artificial Sequence
  Description of Artificial Sequence: Synthetic oligonucleotide
  Antisense strand to SEQ ID NO: 291370
aauuucccuuaaagaaccc

SEQ ID NO: 291372 - RNA, 19 nt, Artificial Sequence
  Description of Artificial Sequence: Synthetic oligonucleotide
  Sense strand starting at position 3960 of SEQ ID NO: 3745
acuggacugcuguaacaua

SEQ ID NO: 291373 - RNA, 19 nt, Artificial Sequence
  Description of Artificial Sequence: Synthetic oligonucleotide
  Antisense strand to SEQ ID NO: 291372
uauguuacagcaguccagu

SEQ ID NO: 291374 - RNA, 19 nt, Artificial Sequence
  Description of Artificial Sequence: Synthetic oligonucleotide
  Sense strand starting at position 16 of SEQ ID NO: 3746
uguucuuucucccuaagag

SEQ ID NO: 291375 - RNA, 19 nt, Artificial Sequence
  Description of Artificial Sequence: Synthetic oligonucleotide
  Antisense strand to SEQ ID NO: 291374
cucuuagggagaaagaaca

SEQ ID NO: 291376 - RNA, 19 nt, Artificial Sequence
  Description of Artificial Sequence: Synthetic oligonucleotide
  Sense strand starting at position 17 of SEQ ID NO: 3746
guucuuucucccuaagagu

SEQ ID NO: 291377 - RNA, 19 nt, Artificial Sequence
  Description of Artificial Sequence: Synthetic oligonucleotide
  Antisense strand to SEQ ID NO: 291376
acucuuagggagaaagaac

SEQ ID NO: 291378 - RNA, 19 nt, Artificial Sequence
  Description of Artificial Sequence: Synthetic oligonucleotide
  Sense strand starting at position 46 of SEQ ID NO: 3746
gugguuugaccuuagaaca

SEQ ID NO: 291379 - RNA, 19 nt, Artificial Sequence
  Description of Artificial Sequence: Synthetic oligonucleotide
  Antisense strand to SEQ ID NO: 291378
uguucuaaggucaaaccac

SEQ ID NO: 291380 - RNA, 19 nt, Artificial Sequence
  Description of Artificial Sequence: Synthetic oligonucleotide
  Sense strand starting at position 209 of SEQ ID NO: 3746
cgacgccuucugggauuga

SEQ ID NO: 291381 - RNA, 19 nt, Artificial Sequence
  Description of Artificial Sequence: Synthetic oligonucleotide
  Antisense strand to SEQ ID NO: 291380
ucaaucccagaaggcgucg

SEQ ID NO: 291382 - RNA, 19 nt, Artificial Sequence
  Description of Artificial Sequence: Synthetic oligonucleotide
  Sense strand starting at position 213 of SEQ ID NO: 3746
gccuucugggauugaggau

SEQ ID NO: 291383 - RNA, 19 nt, Artificial Sequence
  Description of Artificial Sequence: Synthetic oligonucleotide
  Antisense strand to SEQ ID NO: 291382
auccucaaucccagaaggc

SEQ ID NO: 291384 - RNA, 19 nt, Artificial Sequence
  Description of Artificial Sequence: Synthetic oligonucleotide
  Sense strand starting at position 222 of SEQ ID NO: 3746
gauugaggaucucuaagcu

SEQ ID NO: 291385 - RNA, 19 nt, Artificial Sequence
  Description of Artificial Sequence: Synthetic oligonucleotide
  Antisense strand to SEQ ID NO: 291384
agcuuagagauccucaauc

SEQ ID NO: 291386 - RNA, 19 nt, Artificial Sequence
  Description of Artificial Sequence: Synthetic oligonucleotide
  Sense strand starting at position 245 of SEQ ID NO: 3746
accugacugguuuggaguu

SEQ ID NO: 291387 - RNA, 19 nt, Artificial Sequence
  Description of Artificial Sequence: Synthetic oligonucleotide
  Antisense strand to SEQ ID NO: 291386
aacuccaaaccagucaggu

SEQ ID NO: 291388 - RNA, 19 nt, Artificial Sequence
  Description of Artificial Sequence: Synthetic oligonucleotide
  Sense strand starting at position 274 of SEQ ID NO: 3746
ggaggugaaucagcacagu

SEQ ID NO: 291389 - RNA, 19 nt, Artificial Sequence
  Description of Artificial Sequence: Synthetic oligonucleotide
  Antisense strand to SEQ ID NO: 291388
acugugcugauucaccucc

SEQ ID NO: 291390 - RNA, 19 nt, Artificial Sequence
  Description of Artificial Sequence: Synthetic oligonucleotide
  Sense strand starting at position 277 of SEQ ID NO: 3746
ggugaaucagcacaguuua

SEQ ID NO: 291391 - RNA, 19 nt, Artificial Sequence
  Description of Artificial Sequence: Synthetic oligonucleotide
  Antisense strand to SEQ ID NO: 291390
uaaacugugcugauucacc

SEQ ID NO: 291392 - RNA, 19 nt, Artificial Sequence
  Description of Artificial Sequence: Synthetic oligonucleotide
  Sense strand starting at position 486 of SEQ ID NO: 3746
gagugauccucaggaggau

SEQ ID NO: 291393 - RNA, 19 nt, Artificial Sequence
  Description of Artificial Sequence: Synthetic oligonucleotide
  Antisense strand to SEQ ID NO: 291392
auccuccugaggaucacuc

SEQ ID NO: 291394 - RNA, 19 nt, Artificial Sequence
  Description of Artificial Sequence: Synthetic oligonucleotide
  Sense strand starting at position 519 of SEQ ID NO: 3746
gcuaguaguucuccacaag

SEQ ID NO: 291395 - RNA, 19 nt, Artificial Sequence
  Description of Artificial Sequence: Synthetic oligonucleotide
  Antisense strand to SEQ ID NO: 291394
cuuguggagaacuacuagc

SEQ ID NO: 291396 - RNA, 19 nt, Artificial Sequence
  Description of Artificial Sequence: Synthetic oligonucleotide
  Sense strand starting at position 522 of SEQ ID NO: 3746
aguaguucuccacaaggca

SEQ ID NO: 291397 - RNA, 19 nt, Artificial Sequence
  Description of Artificial Sequence: Synthetic oligonucleotide
  Antisense strand to SEQ ID NO: 291396
ugccuuguggagaacuacu

SEQ ID NO: 291398 - RNA, 19 nt, Artificial Sequence
  Description of Artificial Sequence: Synthetic oligonucleotide
  Sense strand starting at position 618 of SEQ ID NO: 3746
gggagaacacugugacugu

SEQ ID NO: 291399 - RNA, 19 nt, Artificial Sequence
  Description of Artificial Sequence: Synthetic oligonucleotide
  Antisense strand to SEQ ID NO: 291398
acagucacaguguucuccc

SEQ ID NO: 291400 - RNA, 19 nt, Artificial Sequence
  Description of Artificial Sequence: Synthetic oligonucleotide
  Sense strand starting at position 740 of SEQ ID NO: 3746
accuuauacaugggaucgu

SEQ ID NO: 291401 - RNA, 19 nt, Artificial Sequence
  Description of Artificial Sequence: Synthetic oligonucleotide
  Antisense strand to SEQ ID NO: 291400
acgaucccauguauaaggu

SEQ ID NO: 291402 - RNA, 19 nt, Artificial Sequence
  Description of Artificial Sequence: Synthetic oligonucleotide
  Sense strand starting at position 977 of SEQ ID NO: 3746
gcccucucugucugaguua

SEQ ID NO: 291403 - RNA, 19 nt, Artificial Sequence
  Description of Artificial Sequence: Synthetic oligonucleotide
  Antisense strand to SEQ ID NO: 291402
uaacucagacagagagggc

SEQ ID NO: 291404 - RNA, 19 nt, Artificial Sequence
  Description of Artificial Sequence: Synthetic oligonucleotide
  Sense strand starting at position 980 of SEQ ID NO: 3746
cucucugucugaguuaaug

SEQ ID NO: 291405 - RNA, 19 nt, Artificial Sequence
  Description of Artificial Sequence: Synthetic oligonucleotide
  Antisense strand to SEQ ID NO: 291404
cauuaacucagacagagag

SEQ ID NO: 291406 - RNA, 19 nt, Artificial Sequence
  Description of Artificial Sequence: Synthetic oligonucleotide
  Sense strand starting at position 986 of SEQ ID NO: 3746
gucugaguuaauggcacuu

SEQ ID NO: 291407 - RNA, 19 nt, Artificial Sequence
  Description of Artificial Sequence: Synthetic oligonucleotide
  Antisense strand to SEQ ID NO: 291406
aagugccauuaacucagac

SEQ ID NO: 291408 - RNA, 19 nt, Artificial Sequence
  Description of Artificial Sequence: Synthetic oligonucleotide
  Sense strand starting at position 1004 of SEQ ID NO: 3746
uuucuucucccaggcagaa

SEQ ID NO: 291409 - RNA, 19 nt, Artificial Sequence
  Description of Artificial Sequence: Synthetic oligonucleotide
  Antisense strand to SEQ ID NO: 291408
uucugccugggagaagaaa

SEQ ID NO: 291410 - RNA, 19 nt, Artificial Sequence
  Description of Artificial Sequence: Synthetic oligonucleotide
  Sense strand starting at position 1016 of SEQ ID NO: 3746
ggcagaaacccuggaguga

SEQ ID NO: 291411 - RNA, 19 nt, Artificial Sequence
  Description of Artificial Sequence: Synthetic oligonucleotide
  Antisense strand to SEQ ID NO: 291410
ucacuccaggguuucugcc

SEQ ID NO: 291412 - RNA, 19 nt, Artificial Sequence
  Description of Artificial Sequence: Synthetic oligonucleotide
  Sense strand starting at position 1029 of SEQ ID NO: 3746
gagugauccuuguuucuug

SEQ ID NO: 291413 - RNA, 19 nt, Artificial Sequence
  Description of Artificial Sequence: Synthetic oligonucleotide
  Antisense strand to SEQ ID NO: 291412
caagaaacaaggaucacuc

SEQ ID NO: 291414 - RNA, 19 nt, Artificial Sequence
  Description of Artificial Sequence: Synthetic oligonucleotide
  Sense strand starting at position 1189 of SEQ ID NO: 3746
uccucaugucauugaguca

SEQ ID NO: 291415 - RNA, 19 nt, Artificial Sequence
  Description of Artificial Sequence: Synthetic oligonucleotide
  Antisense strand to SEQ ID NO: 291414
ugacucaaugacaugagga

SEQ ID NO: 291416 - RNA, 19 nt, Artificial Sequence
  Description of Artificial Sequence: Synthetic oligonucleotide
  Sense strand starting at position 1192 of SEQ ID NO: 3746
ucaugucauugagucaauc

SEQ ID NO: 291417 - RNA, 19 nt, Artificial Sequence
  Description of Artificial Sequence: Synthetic oligonucleotide
  Antisense strand to SEQ ID NO: 291416
gauugacucaaugacauga

SEQ ID NO: 291418 - RNA, 19 nt, Artificial Sequence
  Description of Artificial Sequence: Synthetic oligonucleotide
  Sense strand starting at position 1281 of SEQ ID NO: 3746
gcauuugaugcugguuaca

SEQ ID NO: 291419 - RNA, 19 nt, Artificial Sequence
  Description of Artificial Sequence: Synthetic oligonucleotide
  Antisense strand to SEQ ID NO: 291418
uguaaccagcaucaaaugc

SEQ ID NO: 291420 - RNA, 19 nt, Artificial Sequence
  Description of Artificial Sequence: Synthetic oligonucleotide
  Sense strand starting at position 1290 of SEQ ID NO: 3746
gcugguuacaaucgacuuu

SEQ ID NO: 291421 - RNA, 19 nt, Artificial Sequence
  Description of Artificial Sequence: Synthetic oligonucleotide
  Antisense strand to SEQ ID NO: 291420
aaagucgauuguaaccagc

SEQ ID NO: 291422 - RNA, 19 nt, Artificial Sequence
  Description of Artificial Sequence: Synthetic oligonucleotide
  Sense strand starting at position 1312 of SEQ ID NO: 3746
cuggccuuuccguagacuu

SEQ ID NO: 291423 - RNA, 19 nt, Artificial Sequence
  Description of Artificial Sequence: Synthetic oligonucleotide
  Antisense strand to SEQ ID NO: 291422
aagucuacggaaaggccag

SEQ ID NO: 291424 - RNA, 19 nt, Artificial Sequence
  Description of Artificial Sequence: Synthetic oligonucleotide
  Sense strand starting at position 1322 of SEQ ID NO: 3746
cguagacuuuccuugacuu

SEQ ID NO: 291425 - RNA, 19 nt, Artificial Sequence
  Description of Artificial Sequence: Synthetic oligonucleotide
  Antisense strand to SEQ ID NO: 291424
aagucaaggaaagucuacg

SEQ ID NO: 291426 - RNA, 19 nt, Artificial Sequence
  Description of Artificial Sequence: Synthetic oligonucleotide
  Sense strand starting at position 1323 of SEQ ID NO: 3746
guagacuuuccuugacuua

SEQ ID NO: 291427 - RNA, 19 nt, Artificial Sequence
  Description of Artificial Sequence: Synthetic oligonucleotide
  Antisense strand to SEQ ID NO: 291426
uaagucaaggaaagucuac

SEQ ID NO: 291428 - RNA, 19 nt, Artificial Sequence
  Description of Artificial Sequence: Synthetic oligonucleotide
  Sense strand starting at position 1338 of SEQ ID NO: 3746
cuuacagucucagacacau

SEQ ID NO: 291429 - RNA, 19 nt, Artificial Sequence
  Description of Artificial Sequence: Synthetic oligonucleotide
  Antisense strand to SEQ ID NO: 291428
augugucugagacuguaag

SEQ ID NO: 291430 - RNA, 19 nt, Artificial Sequence
  Description of Artificial Sequence: Synthetic oligonucleotide
  Sense strand starting at position 1701 of SEQ ID NO: 3746
caucccuuggguggucaua

SEQ ID NO: 291431 - RNA, 19 nt, Artificial Sequence
  Description of Artificial Sequence: Synthetic oligonucleotide
  Antisense strand to SEQ ID NO: 291430
uaugaccacccaagggaug

SEQ ID NO: 291432 - RNA, 19 nt, Artificial Sequence
  Description of Artificial Sequence: Synthetic oligonucleotide
  Sense strand starting at position 2508 of SEQ ID NO: 3746
aucuuugggucuuccuauu

SEQ ID NO: 291433 - RNA, 19 nt, Artificial Sequence
  Description of Artificial Sequence: Synthetic oligonucleotide
  Antisense strand to SEQ ID NO: 291432
aauaggaagacccaaagau

SEQ ID NO: 291434 - RNA, 19 nt, Artificial Sequence
  Description of Artificial Sequence: Synthetic oligonucleotide
  Sense strand starting at position 2560 of SEQ ID NO: 3746
gugcaucguggcuauuaca

SEQ ID NO: 291435 - RNA, 19 nt, Artificial Sequence
  Description of Artificial Sequence: Synthetic oligonucleotide
  Antisense strand to SEQ ID NO: 291434
uguaauagccacgaugcac

SEQ ID NO: 291436 - RNA, 19 nt, Artificial Sequence
  Description of Artificial Sequence: Synthetic oligonucleotide
  Sense strand starting at position 2674 of SEQ ID NO: 3746
aggagauucccacgcugga

SEQ ID NO: 291437 - RNA, 19 nt, Artificial Sequence
  Description of Artificial Sequence: Synthetic oligonucleotide
  Antisense strand to SEQ ID NO: 291436
uccagcgugggaaucuccu

SEQ ID NO: 291438 - RNA, 19 nt, Artificial Sequence
  Description of Artificial Sequence: Synthetic oligonucleotide
  Sense strand starting at position 2991 of SEQ ID NO: 3746
gaaagaccaucccuagguu

SEQ ID NO: 291439 - RNA, 19 nt, Artificial Sequence
  Description of Artificial Sequence: Synthetic oligonucleotide
  Antisense strand to SEQ ID NO: 291438
aaccuagggauggucuuuc

SEQ ID NO: 291440 - RNA, 19 nt, Artificial Sequence
  Description of Artificial Sequence: Synthetic oligonucleotide
  Sense strand starting at position 2999 of SEQ ID NO: 3746
aucccuagguuuguuugaa

SEQ ID NO: 291441 - RNA, 19 nt, Artificial Sequence
  Description of Artificial Sequence: Synthetic oligonucleotide
  Antisense strand to SEQ ID NO: 291440
uucaaacaaaccuagggau

SEQ ID NO: 291442 - RNA, 19 nt, Artificial Sequence
  Description of Artificial Sequence: Synthetic oligonucleotide
  Sense strand starting at position 3005 of SEQ ID NO: 3746
agguuuguuugaagagggu

SEQ ID NO: 291443 - RNA, 19 nt, Artificial Sequence
  Description of Artificial Sequence: Synthetic oligonucleotide
  Antisense strand to SEQ ID NO: 291442
acccucuucaaacaaaccu

SEQ ID NO: 291444 - RNA, 19 nt, Artificial Sequence
  Description of Artificial Sequence: Synthetic oligonucleotide
  Sense strand starting at position 3018 of SEQ ID NO: 3746
gaggguguugacgaagagu

SEQ ID NO: 291445 - RNA, 19 nt, Artificial Sequence
  Description of Artificial Sequence: Synthetic oligonucleotide
  Antisense strand to SEQ ID NO: 291444
acucuucgucaacacccuc

SEQ ID NO: 291446 - RNA, 19 nt, Artificial Sequence
  Description of Artificial Sequence: Synthetic oligonucleotide
  Sense strand starting at position 3027 of SEQ ID NO: 3746
gacgaagagucacacucua

SEQ ID NO: 291447 - RNA, 19 nt, Artificial Sequence
  Description of Artificial Sequence: Synthetic oligonucleotide
  Antisense strand to SEQ ID NO: 291446
uagagugugacucuucguc

SEQ ID NO: 291448 - RNA, 19 nt, Artificial Sequence
  Description of Artificial Sequence: Synthetic oligonucleotide
  Sense strand starting at position 3071 of SEQ ID NO: 3746
gccaaauauuugugaccau

SEQ ID NO: 291449 - RNA, 19 nt, Artificial Sequence
  Description of Artificial Sequence: Synthetic oligonucleotide
  Antisense strand to SEQ ID NO: 291448
auggucacaaauauuuggc

SEQ ID NO: 291450 - RNA, 19 nt, Artificial Sequence
  Description of Artificial Sequence: Synthetic oligonucleotide
  Sense strand starting at position 3072 of SEQ ID NO: 3746
ccaaauauuugugaccaug

SEQ ID NO: 291451 - RNA, 19 nt, Artificial Sequence
  Description of Artificial Sequence: Synthetic oligonucleotide
  Antisense strand to SEQ ID NO: 291450
cauggucacaaauauuugg

SEQ ID NO: 291452 - RNA, 19 nt, Artificial Sequence
  Description of Artificial Sequence: Synthetic oligonucleotide
  Sense strand starting at position 3582 of SEQ ID NO: 3746
gccgguaauagagauucuu

SEQ ID NO: 291453 - RNA, 19 nt, Artificial Sequence
  Description of Artificial Sequence: Synthetic oligonucleotide
  Antisense strand to SEQ ID NO: 291452
aagaaucucuauuaccggc

SEQ ID NO: 291454 - RNA, 19 nt, Artificial Sequence
  Description of Artificial Sequence: Synthetic oligonucleotide
  Sense strand starting at position 544 of SEQ ID NO: 3747
uugcauuguugacuaaaua

SEQ ID NO: 291455 - RNA, 19 nt, Artificial Sequence
  Description of Artificial Sequence: Synthetic oligonucleotide
  Antisense strand to SEQ ID NO: 291454
uauuuagucaacaaugcaa

SEQ ID NO: 291456 - RNA, 19 nt, Artificial Sequence
  Description of Artificial Sequence: Synthetic oligonucleotide
  Sense strand starting at position 545 of SEQ ID NO: 3747
ugcauuguugacuaaauaa

SEQ ID NO: 291457 - RNA, 19 nt, Artificial Sequence
  Description of Artificial Sequence: Synthetic oligonucleotide
  Antisense strand to SEQ ID NO: 291456
uuauuuagucaacaaugca

SEQ ID NO: 291458 - RNA, 19 nt, Artificial Sequence
  Description of Artificial Sequence: Synthetic oligonucleotide
  Sense strand starting at position 611 of SEQ ID NO: 3747
acuguauagauagguaaag

SEQ ID NO: 291459 - RNA, 19 nt, Artificial Sequence
  Description of Artificial Sequence: Synthetic oligonucleotide
  Antisense strand to SEQ ID NO: 291458
cuuuaccuaucuauacagu

SEQ ID NO: 291460 - RNA, 19 nt, Artificial Sequence
  Description of Artificial Sequence: Synthetic oligonucleotide
  Sense strand starting at position 612 of SEQ ID NO: 3747
cuguauagauagguaaaga

SEQ ID NO: 291461 - RNA, 19 nt, Artificial Sequence
  Description of Artificial Sequence: Synthetic oligonucleotide
  Antisense strand to SEQ ID NO: 291460
ucuuuaccuaucuauacag

SEQ ID NO: 291462 - RNA, 19 nt, Artificial Sequence
  Description of Artificial Sequence: Synthetic oligonucleotide
  Sense strand starting at position 778 of SEQ ID NO: 3747
aaguacauucgguaacacu

SEQ ID NO: 291463 - RNA, 19 nt, Artificial Sequence
  Description of Artificial Sequence: Synthetic oligonucleotide
  Antisense strand to SEQ ID NO: 291462
aguguuaccgaauguacuu

SEQ ID NO: 291464 - RNA, 19 nt, Artificial Sequence
  Description of Artificial Sequence: Synthetic oligonucleotide
  Sense strand starting at position 890 of SEQ ID NO: 3747
guggaaacagugugaauua

SEQ ID NO: 291465 - RNA, 19 nt, Artificial Sequence
  Description of Artificial Sequence: Synthetic oligonucleotide
  Antisense strand to SEQ ID NO: 291464
uaauucacacuguuuccac

SEQ ID NO: 291466 - RNA, 19 nt, Artificial Sequence
  Description of Artificial Sequence: Synthetic oligonucleotide
  Sense strand starting at position 1042 of SEQ ID NO: 3747
cagcguagcgagucuuaaa

SEQ ID NO: 291467 - RNA, 19 nt, Artificial Sequence
  Description of Artificial Sequence: Synthetic oligonucleotide
  Antisense strand to SEQ ID NO: 291466
uuuaagacucgcuacgcug

SEQ ID NO: 291468 - RNA, 19 nt, Artificial Sequence
  Description of Artificial Sequence: Synthetic oligonucleotide
  Sense strand starting at position 1043 of SEQ ID NO: 3747
agcguagcgagucuuaaau

SEQ ID NO: 291469 - RNA, 19 nt, Artificial Sequence
  Description of Artificial Sequence: Synthetic oligonucleotide
  Antisense strand to SEQ ID NO: 291468
auuuaagacucgcuacgcu

SEQ ID NO: 291470 - RNA, 19 nt, Artificial Sequence
  Description of Artificial Sequence: Synthetic oligonucleotide
  Sense strand starting at position 1194 of SEQ ID NO: 3747
aaggguuucucugucaucu

SEQ ID NO: 291471 - RNA, 19 nt, Artificial Sequence
  Description of Artificial Sequence: Synthetic oligonucleotide
  Antisense strand to SEQ ID NO: 291470
agaugacagagaaacccuu

SEQ ID NO: 291472 - RNA, 19 nt, Artificial Sequence
  Description of Artificial Sequence: Synthetic oligonucleotide
  Sense strand starting at position 1198 of SEQ ID NO: 3747
guuucucugucaucuaaau

SEQ ID NO: 291473 - RNA, 19 nt, Artificial Sequence
  Description of Artificial Sequence: Synthetic oligonucleotide
  Antisense strand to SEQ ID NO: 291472
auuuagaugacagagaaac

SEQ ID NO: 291474 - RNA, 19 nt, Artificial Sequence
  Description of Artificial Sequence: Synthetic oligonucleotide
  Sense strand starting at position 1281 of SEQ ID NO: 3747
auauguaaugcaggauacu

SEQ ID NO: 291475 - RNA, 19 nt, Artificial Sequence
  Description of Artificial Sequence: Synthetic oligonucleotide
  Antisense strand to SEQ ID NO: 291474
aguauccugcauuacauau

SEQ ID NO: 291476 - RNA, 19 nt, Artificial Sequence
  Description of Artificial Sequence: Synthetic oligonucleotide
  Sense strand starting at position 1282 of SEQ ID NO: 3747
uauguaaugcaggauacua

SEQ ID NO: 291477 - RNA, 19 nt, Artificial Sequence
  Description of Artificial Sequence: Synthetic oligonucleotide
  Antisense strand to SEQ ID NO: 291476
uaguauccugcauuacaua

SEQ ID NO: 291478 - RNA, 19 nt, Artificial Sequence
  Description of Artificial Sequence: Synthetic oligonucleotide
  Sense strand starting at position 1345 of SEQ ID NO: 3747
aaauaaaugccgggauaac

SEQ ID NO: 291479 - RNA, 19 nt, Artificial Sequence
  Description of Artificial Sequence: Synthetic oligonucleotide
  Antisense strand to SEQ ID NO: 291478
guuaucccggcauuuauuu

SEQ ID NO: 291480 - RNA, 19 nt, Artificial Sequence
  Description of Artificial Sequence: Synthetic oligonucleotide
  Sense strand starting at position 1622 of SEQ ID NO: 3747
uugcaaggugaaugaaauu

SEQ ID NO: 291481 - RNA, 19 nt, Artificial Sequence
  Description of Artificial Sequence: Synthetic oligonucleotide
  Antisense strand to SEQ ID NO: 291480
aauuucauucaccuugcaa

SEQ ID NO: 291482 - RNA, 19 nt, Artificial Sequence
  Description of Artificial Sequence: Synthetic oligonucleotide
  Sense strand starting at position 1631 of SEQ ID NO: 3747
gaaugaaauuuccggacaa

SEQ ID NO: 291483 - RNA, 19 nt, Artificial Sequence
  Description of Artificial Sequence: Synthetic oligonucleotide
  Antisense strand to SEQ ID NO: 291482
uuguccggaaauuucauuc

SEQ ID NO: 291484 - RNA, 19 nt, Artificial Sequence
  Description of Artificial Sequence: Synthetic oligonucleotide
  Sense strand starting at position 1941 of SEQ ID NO: 3747
ggaguucgcccagacaaau

SEQ ID NO: 291485 - RNA, 19 nt, Artificial Sequence
  Description of Artificial Sequence: Synthetic oligonucleotide
  Antisense strand to SEQ ID NO: 291484
auuugucugggcgaacucc

SEQ ID NO: 291486 - RNA, 19 nt, Artificial Sequence
  Description of Artificial Sequence: Synthetic oligonucleotide
  Sense strand starting at position 2134 of SEQ ID NO: 3747
gaguuaugaccgccucguu

SEQ ID NO: 291487 - RNA, 19 nt, Artificial Sequence
  Description of Artificial Sequence: Synthetic oligonucleotide
  Antisense strand to SEQ ID NO: 291486
aacgaggcggucauaacuc

SEQ ID NO: 291488 - RNA, 19 nt, Artificial Sequence
  Description of Artificial Sequence: Synthetic oligonucleotide
  Sense strand starting at position 2189 of SEQ ID NO: 3747
gucugaagcccagguaaga

SEQ ID NO: 291489 - RNA, 19 nt, Artificial Sequence
  Description of Artificial Sequence: Synthetic oligonucleotide
  Antisense strand to SEQ ID NO: 291488
ucuuaccugggcuucagac

SEQ ID NO: 291490 - RNA, 19 nt, Artificial Sequence
  Description of Artificial Sequence: Synthetic oligonucleotide
  Sense strand starting at position 2231 of SEQ ID NO: 3747
ugggccaucuucccuauua

SEQ ID NO: 291491 - RNA, 19 nt, Artificial Sequence
  Description of Artificial Sequence: Synthetic oligonucleotide
  Antisense strand to SEQ ID NO: 291490
uaauagggaagauggccca

SEQ ID NO: 291492 - RNA, 19 nt, Artificial Sequence
  Description of Artificial Sequence: Synthetic oligonucleotide
  Sense strand starting at position 2326 of SEQ ID NO: 3747
uggaaagacucauaagaaa

SEQ ID NO: 291493 - RNA, 19 nt, Artificial Sequence
  Description of Artificial Sequence: Synthetic oligonucleotide
  Antisense strand to SEQ ID NO: 291492
uuucuuaugagucuuucca

SEQ ID NO: 291494 - RNA, 19 nt, Artificial Sequence
  Description of Artificial Sequence: Synthetic oligonucleotide
  Sense strand starting at position 2508 of SEQ ID NO: 3747
aguacaaggguuugggaaa

SEQ ID NO: 291495 - RNA, 19 nt, Artificial Sequence
  Description of Artificial Sequence: Synthetic oligonucleotide
  Antisense strand to SEQ ID NO: 291494
uuucccaaacccuuguacu

SEQ ID NO: 291496 - RNA, 19 nt, Artificial Sequence
  Description of Artificial Sequence: Synthetic oligonucleotide
  Sense strand starting at position 2542 of SEQ ID NO: 3747
gugccugagcuagaaagaa

SEQ ID NO: 291497 - RNA, 19 nt, Artificial Sequence
  Description of Artificial Sequence: Synthetic oligonucleotide
  Antisense strand to SEQ ID NO: 291496
uucuuucuagcucaggcac

SEQ ID NO: 291498 - RNA, 19 nt, Artificial Sequence
  Description of Artificial Sequence: Synthetic oligonucleotide
  Sense strand starting at position 2582 of SEQ ID NO: 3747
guccucuuacauuacagau

SEQ ID NO: 291499 - RNA, 19 nt, Artificial Sequence
  Description of Artificial Sequence: Synthetic oligonucleotide
  Antisense strand to SEQ ID NO: 291498
aucuguaauguaagaggac

SEQ ID NO: 291500 - RNA, 19 nt, Artificial Sequence
  Description of Artificial Sequence: Synthetic oligonucleotide
  Sense strand starting at position 2664 of SEQ ID NO: 3747
ggcaauaagagcggugaua

SEQ ID NO: 291501 - RNA, 19 nt, Artificial Sequence
  Description of Artificial Sequence: Synthetic oligonucleotide
  Antisense strand to SEQ ID NO: 291500
uaucaccgcucuuauugcc

SEQ ID NO: 291502 - RNA, 19 nt, Artificial Sequence
  Description of Artificial Sequence: Synthetic oligonucleotide
  Sense strand starting at position 2666 of SEQ ID NO: 3747
caauaagagcggugauaug

SEQ ID NO: 291503 - RNA, 19 nt, Artificial Sequence
  Description of Artificial Sequence: Synthetic oligonucleotide
  Antisense strand to SEQ ID NO: 291502
cauaucaccgcucuuauug

SEQ ID NO: 291504 - RNA, 19 nt, Artificial Sequence
  Description of Artificial Sequence: Synthetic oligonucleotide
  Sense strand starting at position 2677 of SEQ ID NO: 3747
gugauaugccaucauacuu

SEQ ID NO: 291505 - RNA, 19 nt, Artificial Sequence
  Description of Artificial Sequence: Synthetic oligonucleotide
  Antisense strand to SEQ ID NO: 291504
aaguaugauggcauaucac

SEQ ID NO: 291506 - RNA, 19 nt, Artificial Sequence
  Description of Artificial Sequence: Synthetic oligonucleotide
  Sense strand starting at position 2782 of SEQ ID NO: 3747
gauaguaaacagcauggua

SEQ ID NO: 291507 - RNA, 19 nt, Artificial Sequence
  Description of Artificial Sequence: Synthetic oligonucleotide
  Antisense strand to SEQ ID NO: 291506
uaccaugcuguuuacuauc

SEQ ID NO: 291508 - RNA, 19 nt, Artificial Sequence
  Description of Artificial Sequence: Synthetic oligonucleotide
  Sense strand starting at position 2784 of SEQ ID NO: 3747
uaguaaacagcaugguauu

SEQ ID NO: 291509 - RNA, 19 nt, Artificial Sequence
  Description of Artificial Sequence: Synthetic oligonucleotide
  Antisense strand to SEQ ID NO: 291508
aauaccaugcuguuuacua

SEQ ID NO: 291510 - RNA, 19 nt, Artificial Sequence
  Description of Artificial Sequence: Synthetic oligonucleotide
  Sense strand starting at position 2804 of SEQ ID NO: 3747
acauguaaccuaggcacau

SEQ ID NO: 291511 - RNA, 19 nt, Artificial Sequence
  Description of Artificial Sequence: Synthetic oligonucleotide
  Antisense strand to SEQ ID NO: 291510
augugccuagguuacaugu

SEQ ID NO: 291512 - RNA, 19 nt, Artificial Sequence
  Description of Artificial Sequence: Synthetic oligonucleotide
  Sense strand starting at position 2881 of SEQ ID NO: 3747
gcuauuuacuuguuguuau

SEQ ID NO: 291513 - RNA, 19 nt, Artificial Sequence
  Description of Artificial Sequence: Synthetic oligonucleotide
  Antisense strand to SEQ ID NO: 291512
auaacaacaaguaaauagc

SEQ ID NO: 291514 - RNA, 19 nt, Artificial Sequence
  Description of Artificial Sequence: Synthetic oligonucleotide
  Sense strand starting at position 2978 of SEQ ID NO: 3747
uugaucugggauugguuua

SEQ ID NO: 291515 - RNA, 19 nt, Artificial Sequence
  Description of Artificial Sequence: Synthetic oligonucleotide
  Antisense strand to SEQ ID NO: 291514
uaaaccaaucccagaucaa

SEQ ID NO: 291516 - RNA, 19 nt, Artificial Sequence
  Description of Artificial Sequence: Synthetic oligonucleotide
  Sense strand starting at position 2979 of SEQ ID NO: 3747
ugaucugggauugguuuaa

SEQ ID NO: 291517 - RNA, 19 nt, Artificial Sequence
  Description of Artificial Sequence: Synthetic oligonucleotide
  Antisense strand to SEQ ID NO: 291516
uuaaaccaaucccagauca

SEQ ID NO: 291518 - RNA, 19 nt, Artificial Sequence
  Description of Artificial Sequence: Synthetic oligonucleotide
  Sense strand starting at position 2983 of SEQ ID NO: 3747
cugggauugguuuaaugca

SEQ ID NO: 291519 - RNA, 19 nt, Artificial Sequence
  Description of Artificial Sequence: Synthetic oligonucleotide
  Antisense strand to SEQ ID NO: 291518
ugcauuaaaccaaucccag

SEQ ID NO: 291520 - RNA, 19 nt, Artificial Sequence
  Description of Artificial Sequence: Synthetic oligonucleotide
  Sense strand starting at position 2988 of SEQ ID NO: 3747
auugguuuaaugcauggau

SEQ ID NO: 291521 - RNA, 19 nt, Artificial Sequence
  Description of Artificial Sequence: Synthetic oligonucleotide
  Antisense strand to SEQ ID NO: 291520
auccaugcauuaaaccaau

SEQ ID NO: 291522 - RNA, 19 nt, Artificial Sequence
  Description of Artificial Sequence: Synthetic oligonucleotide
  Sense strand starting at position 3026 of SEQ ID NO: 3747
ggccaacuguaccuaauua

SEQ ID NO: 291523 - RNA, 19 nt, Artificial Sequence
  Description of Artificial Sequence: Synthetic oligonucleotide
  Antisense strand to SEQ ID NO: 291522
uaauuagguacaguuggcc

SEQ ID NO: 291524 - RNA, 19 nt, Artificial Sequence
  Description of Artificial Sequence: Synthetic oligonucleotide
  Sense strand starting at position 3377 of SEQ ID NO: 3747
ugccauauuguacauguua

SEQ ID NO: 291525 - RNA, 19 nt, Artificial Sequence
  Description of Artificial Sequence: Synthetic oligonucleotide
  Antisense strand to SEQ ID NO: 291524
uaacauguacaauauggca

SEQ ID NO: 291526 - RNA, 19 nt, Artificial Sequence
  Description of Artificial Sequence: Synthetic oligonucleotide
  Sense strand starting at position 3422 of SEQ ID NO: 3747
gcauguaugauguagauau

SEQ ID NO: 291527 - RNA, 19 nt, Artificial Sequence
  Description of Artificial Sequence: Synthetic oligonucleotide
  Antisense strand to SEQ ID NO: 291526
auaucuacaucauacaugc

SEQ ID NO: 291528 - RNA, 19 nt, Artificial Sequence
  Description of Artificial Sequence: Synthetic oligonucleotide
  Sense strand starting at position 3559 of SEQ ID NO: 3747
uguagaaguguuagguagu

SEQ ID NO: 291529 - RNA, 19 nt, Artificial Sequence
  Description of Artificial Sequence: Synthetic oligonucleotide
  Antisense strand to SEQ ID NO: 291528
acuaccuaacacuucuaca

SEQ ID NO: 291530 - RNA, 19 nt, Artificial Sequence
  Description of Artificial Sequence: Synthetic oligonucleotide
  Sense strand starting at position 3726 of SEQ ID NO: 3747
ucaggaguagcugggaaua

SEQ ID NO: 291531 - RNA, 19 nt, Artificial Sequence
  Description of Artificial Sequence: Synthetic oligonucleotide
  Antisense strand to SEQ ID NO: 291530
uauucccagcuacuccuga

SEQ ID NO: 291532 - RNA, 19 nt, Artificial Sequence
  Description of Artificial Sequence: Synthetic oligonucleotide
  Sense strand starting at position 3920 of SEQ ID NO: 3747
uugaauugcuuugcaaauu

SEQ ID NO: 291533 - RNA, 19 nt, Artificial Sequence
  Description of Artificial Sequence: Synthetic oligonucleotide
  Antisense strand to SEQ ID NO: 291532
aauuugcaaagcaauucaa

SEQ ID NO: 291534 - RNA, 19 nt, Artificial Sequence
  Description of Artificial Sequence: Synthetic oligonucleotide
  Sense strand starting at position 35 of SEQ ID NO: 3748
gcagaaugugcguugucug

SEQ ID NO: 291535 - RNA, 19 nt, Artificial Sequence
  Description of Artificial Sequence: Synthetic oligonucleotide
  Antisense strand to SEQ ID NO: 291534
cagacaacgcacauucugc

SEQ ID NO: 291536 - RNA, 19 nt, Artificial Sequence
  Description of Artificial Sequence: Synthetic oligonucleotide
  Sense strand starting at position 42 of SEQ ID NO: 3748
gugcguugucuggcaugga

SEQ ID NO: 291537 - RNA, 19 nt, Artificial Sequence
  Description of Artificial Sequence: Synthetic oligonucleotide
  Antisense strand to SEQ ID NO: 291536
uccaugccagacaacgcac

SEQ ID NO: 291538 - RNA, 19 nt, Artificial Sequence
  Description of Artificial Sequence: Synthetic oligonucleotide
  Sense strand starting at position 144 of SEQ ID NO: 3748
ggagucuugacuugaggcu

SEQ ID NO: 291539 - RNA, 19 nt, Artificial Sequence
  Description of Artificial Sequence: Synthetic oligonucleotide
  Antisense strand to SEQ ID NO: 291538
agccucaagucaagacucc

SEQ ID NO: 291540 - RNA, 19 nt, Artificial Sequence
  Description of Artificial Sequence: Synthetic oligonucleotide
  Sense strand starting at position 167 of SEQ ID NO: 3748
auugcauacuaaguuagaa

SEQ ID NO: 291541 - RNA, 19 nt, Artificial Sequence
  Description of Artificial Sequence: Synthetic oligonucleotide
  Antisense strand to SEQ ID NO: 291540
uucuaacuuaguaugcaau

SEQ ID NO: 291542 - RNA, 19 nt, Artificial Sequence
  Description of Artificial Sequence: Synthetic oligonucleotide
  Sense strand starting at position 420 of SEQ ID NO: 3748
ugucacuguuacuuagaau

SEQ ID NO: 291543 - RNA, 19 nt, Artificial Sequence
  Description of Artificial Sequence: Synthetic oligonucleotide
  Antisense strand to SEQ ID NO: 291542
auucuaaguaacagugaca

SEQ ID NO: 291544 - RNA, 19 nt, Artificial Sequence
  Description of Artificial Sequence: Synthetic oligonucleotide
  Sense strand starting at position 434 of SEQ ID NO: 3748
agaauagguacucgaguga

SEQ ID NO: 291545 - RNA, 19 nt, Artificial Sequence
  Description of Artificial Sequence: Synthetic oligonucleotide
  Antisense strand to SEQ ID NO: 291544
ucacucgaguaccuauucu

SEQ ID NO: 291546 - RNA, 19 nt, Artificial Sequence
  Description of Artificial Sequence: Synthetic oligonucleotide
  Sense strand starting at position 486 of SEQ ID NO: 3748
agugauauuucuuccucgu

SEQ ID NO: 291547 - RNA, 19 nt, Artificial Sequence
  Description of Artificial Sequence: Synthetic oligonucleotide
  Antisense strand to SEQ ID NO: 291546
acgaggaagaaauaucacu

SEQ ID NO: 291548 - RNA, 19 nt, Artificial Sequence
  Description of Artificial Sequence: Synthetic oligonucleotide
  Sense strand starting at position 503 of SEQ ID NO: 3748
gugccagauccuuaguaca

SEQ ID NO: 291549 - RNA, 19 nt, Artificial Sequence
  Description of Artificial Sequence: Synthetic oligonucleotide
  Antisense strand to SEQ ID NO: 291548
uguacuaaggaucuggcac

SEQ ID NO: 291550 - RNA, 19 nt, Artificial Sequence
  Description of Artificial Sequence: Synthetic oligonucleotide
  Sense strand starting at position 1057 of SEQ ID NO: 3748
cgaagaccugccuacagau

SEQ ID NO: 291551 - RNA, 19 nt, Artificial Sequence
  Description of Artificial Sequence: Synthetic oligonucleotide
  Antisense strand to SEQ ID NO: 291550
aucuguaggcaggucuucg

SEQ ID NO: 291552 - RNA, 19 nt, Artificial Sequence
  Description of Artificial Sequence: Synthetic oligonucleotide
  Sense strand starting at position 1768 of SEQ ID NO: 3748
gccaguugcguaaaggagu

SEQ ID NO: 291553 - RNA, 19 nt, Artificial Sequence
  Description of Artificial Sequence: Synthetic oligonucleotide
  Antisense strand to SEQ ID NO: 291552
acuccuuuacgcaacuggc

SEQ ID NO: 291554 - RNA, 19 nt, Artificial Sequence
  Description of Artificial Sequence: Synthetic oligonucleotide
  Sense strand starting at position 2084 of SEQ ID NO: 3748
guuaaacaucuacguuaag

SEQ ID NO: 291555 - RNA, 19 nt, Artificial Sequence
  Description of Artificial Sequence: Synthetic oligonucleotide
  Antisense strand to SEQ ID NO: 291554
cuuaacguagauguuuaac

SEQ ID NO: 291556 - RNA, 19 nt, Artificial Sequence
  Description of Artificial Sequence: Synthetic oligonucleotide
  Sense strand starting at position 2290 of SEQ ID NO: 3748
agagaaauucucgaggcuu

SEQ ID NO: 291557 - RNA, 19 nt, Artificial Sequence
  Description of Artificial Sequence: Synthetic oligonucleotide
  Antisense strand to SEQ ID NO: 291556
aagccucgagaauuucucu

SEQ ID NO: 291558 - RNA, 19 nt, Artificial Sequence
  Description of Artificial Sequence: Synthetic oligonucleotide
  Sense strand starting at position 2340 of SEQ ID NO: 3748
cuccucaacugaucgacua

SEQ ID NO: 291559 - RNA, 19 nt, Artificial Sequence
  Description of Artificial Sequence: Synthetic oligonucleotide
  Antisense strand to SEQ ID NO: 291558
uagucgaucaguugaggag

SEQ ID NO: 291560 - RNA, 19 nt, Artificial Sequence
  Description of Artificial Sequence: Synthetic oligonucleotide
  Sense strand starting at position 2341 of SEQ ID NO: 3748
uccucaacugaucgacuau

SEQ ID NO: 291561 - RNA, 19 nt, Artificial Sequence
  Description of Artificial Sequence: Synthetic oligonucleotide
  Antisense strand to SEQ ID NO: 291560
auagucgaucaguugagga

SEQ ID NO: 291562 - RNA, 19 nt, Artificial Sequence
  Description of Artificial Sequence: Synthetic oligonucleotide
  Sense strand starting at position 2397 of SEQ ID NO: 3748
caagcaguuccauggacuu

SEQ ID NO: 291563 - RNA, 19 nt, Artificial Sequence
  Description of Artificial Sequence: Synthetic oligonucleotide
  Antisense strand to SEQ ID NO: 291562
aaguccauggaacugcuug

SEQ ID NO: 291564 - RNA, 19 nt, Artificial Sequence
  Description of Artificial Sequence: Synthetic oligonucleotide
  Sense strand starting at position 2581 of SEQ ID NO: 3748
uguugaggcguaucugcau

SEQ ID NO: 291565 - RNA, 19 nt, Artificial Sequence
  Description of Artificial Sequence: Synthetic oligonucleotide
  Antisense strand to SEQ ID NO: 291564
augcagauacgccucaaca

SEQ ID NO: 291566 - RNA, 19 nt, Artificial Sequence
  Description of Artificial Sequence: Synthetic oligonucleotide
  Sense strand starting at position 2668 of SEQ ID NO: 3748
cuuacuggugucuaguaga

SEQ ID NO: 291567 - RNA, 19 nt, Artificial Sequence
  Description of Artificial Sequence: Synthetic oligonucleotide
  Antisense strand to SEQ ID NO: 291566
ucuacuagacaccaguaag

SEQ ID NO: 291568 - RNA, 19 nt, Artificial Sequence
  Description of Artificial Sequence: Synthetic oligonucleotide
  Sense strand starting at position 2730 of SEQ ID NO: 3748
ugucaaguacuccacauau

SEQ ID NO: 291569 - RNA, 19 nt, Artificial Sequence
  Description of Artificial Sequence: Synthetic oligonucleotide
  Antisense strand to SEQ ID NO: 291568
auauguggaguacuugaca

SEQ ID NO: 291570 - RNA, 19 nt, Artificial Sequence
  Description of Artificial Sequence: Synthetic oligonucleotide
  Sense strand starting at position 2763 of SEQ ID NO: 3748
accauaacacggugaggua

SEQ ID NO: 291571 - RNA, 19 nt, Artificial Sequence
  Description of Artificial Sequence: Synthetic oligonucleotide
  Antisense strand to SEQ ID NO: 291570
uaccucaccguguuauggu

SEQ ID NO: 291572 - RNA, 19 nt, Artificial Sequence
  Description of Artificial Sequence: Synthetic oligonucleotide
  Sense strand starting at position 2974 of SEQ ID NO: 3748
cuugauaaaugccuacuga

SEQ ID NO: 291573 - RNA, 19 nt, Artificial Sequence
  Description of Artificial Sequence: Synthetic oligonucleotide
  Antisense strand to SEQ ID NO: 291572
ucaguaggcauuuaucaag

SEQ ID NO: 291574 - RNA, 19 nt, Artificial Sequence
  Description of Artificial Sequence: Synthetic oligonucleotide
  Sense strand starting at position 2975 of SEQ ID NO: 3748
uugauaaaugccuacugau

SEQ ID NO: 291575 - RNA, 19 nt, Artificial Sequence
  Description of Artificial Sequence: Synthetic oligonucleotide
  Antisense strand to SEQ ID NO: 291574
aucaguaggcauuuaucaa

SEQ ID NO: 291576 - RNA, 19 nt, Artificial Sequence
  Description of Artificial Sequence: Synthetic oligonucleotide
  Sense strand starting at position 2987 of SEQ ID NO: 3748
uacugauugccauacguag

SEQ ID NO: 291577 - RNA, 19 nt, Artificial Sequence
  Description of Artificial Sequence: Synthetic oligonucleotide
  Antisense strand to SEQ ID NO: 291576
cuacguauggcaaucagua

SEQ ID NO: 291578 - RNA, 19 nt, Artificial Sequence
  Description of Artificial Sequence: Synthetic oligonucleotide
  Sense strand starting at position 3083 of SEQ ID NO: 3748
gggagaaguccugaggugu

SEQ ID NO: 291579 - RNA, 19 nt, Artificial Sequence
  Description of Artificial Sequence: Synthetic oligonucleotide
  Antisense strand to SEQ ID NO: 291578
acaccucaggacuucuccc

SEQ ID NO: 291580 - RNA, 19 nt, Artificial Sequence
  Description of Artificial Sequence: Synthetic oligonucleotide
  Sense strand starting at position 3089 of SEQ ID NO: 3748
aguccugagguguggagaa

SEQ ID NO: 291581 - RNA, 19 nt, Artificial Sequence
  Description of Artificial Sequence: Synthetic oligonucleotide
  Antisense strand to SEQ ID NO: 291580
uucuccacaccucaggacu

SEQ ID NO: 291582 - RNA, 19 nt, Artificial Sequence
  Description of Artificial Sequence: Synthetic oligonucleotide
  Sense strand starting at position 3110 of SEQ ID NO: 3748
gagauuaagccugaguccu

SEQ ID NO: 291583 - RNA, 19 nt, Artificial Sequence
  Description of Artificial Sequence: Synthetic oligonucleotide
  Antisense strand to SEQ ID NO: 291582
aggacucaggcuuaaucuc

SEQ ID NO: 291584 - RNA, 19 nt, Artificial Sequence
  Description of Artificial Sequence: Synthetic oligonucleotide
  Sense strand starting at position 3236 of SEQ ID NO: 3748
gaacuaaaguccuuagagu

SEQ ID NO: 291585 - RNA, 19 nt, Artificial Sequence
  Description of Artificial Sequence: Synthetic oligonucleotide
  Antisense strand to SEQ ID NO: 291584
acucuaaggacuuuaguuc

SEQ ID NO: 291586 - RNA, 19 nt, Artificial Sequence
  Description of Artificial Sequence: Synthetic oligonucleotide
  Sense strand starting at position 3410 of SEQ ID NO: 3748
gcgcuugcaguccuuacau

SEQ ID NO: 291587 - RNA, 19 nt, Artificial Sequence
  Description of Artificial Sequence: Synthetic oligonucleotide
  Antisense strand to SEQ ID NO: 291586
auguaaggacugcaagcgc

SEQ ID NO: 291588 - RNA, 19 nt, Artificial Sequence
  Description of Artificial Sequence: Synthetic oligonucleotide
  Sense strand starting at position 3412 of SEQ ID NO: 3748
gcuugcaguccuuacauuu

SEQ ID NO: 291589 - RNA, 19 nt, Artificial Sequence
  Description of Artificial Sequence: Synthetic oligonucleotide
  Antisense strand to SEQ ID NO: 291588
aaauguaaggacugcaagc

SEQ ID NO: 291590 - RNA, 19 nt, Artificial Sequence
  Description of Artificial Sequence: Synthetic oligonucleotide
  Sense strand starting at position 3458 of SEQ ID NO: 3748
auggauauacaaggcuaau

SEQ ID NO: 291591 - RNA, 19 nt, Artificial Sequence
  Description of Artificial Sequence: Synthetic oligonucleotide
  Antisense strand to SEQ ID NO: 291590
auuagccuuguauauccau

SEQ ID NO: 291592 - RNA, 19 nt, Artificial Sequence
  Description of Artificial Sequence: Synthetic oligonucleotide
  Sense strand starting at position 3461 of SEQ ID NO: 3748
gauauacaaggcuaauguu

SEQ ID NO: 291593 - RNA, 19 nt, Artificial Sequence
  Description of Artificial Sequence: Synthetic oligonucleotide
  Antisense strand to SEQ ID NO: 291592
aacauuagccuuguauauc

SEQ ID NO: 291594 - RNA, 19 nt, Artificial Sequence
  Description of Artificial Sequence: Synthetic oligonucleotide
  Sense strand starting at position 3533 of SEQ ID NO: 3748
caaugcaaguugguuaaca

SEQ ID NO: 291595 - RNA, 19 nt, Artificial Sequence
  Description of Artificial Sequence: Synthetic oligonucleotide
  Antisense strand to SEQ ID NO: 291594
uguuaaccaacuugcauug

SEQ ID NO: 291596 - RNA, 19 nt, Artificial Sequence
  Description of Artificial Sequence: Synthetic oligonucleotide
  Sense strand starting at position 3634 of SEQ ID NO: 3748
uuaggaacuaguggguuaa

SEQ ID NO: 291597 - RNA, 19 nt, Artificial Sequence
  Description of Artificial Sequence: Synthetic oligonucleotide
  Antisense strand to SEQ ID NO: 291596
uuaacccacuaguuccuaa

SEQ ID NO: 291598 - RNA, 19 nt, Artificial Sequence
  Description of Artificial Sequence: Synthetic oligonucleotide
  Sense strand starting at position 3635 of SEQ ID NO: 3748
uaggaacuaguggguuaau

SEQ ID NO: 291599 - RNA, 19 nt, Artificial Sequence
  Description of Artificial Sequence: Synthetic oligonucleotide
  Antisense strand to SEQ ID NO: 291598
auuaacccacuaguuccua

SEQ ID NO: 291600 - RNA, 19 nt, Artificial Sequence
  Description of Artificial Sequence: Synthetic oligonucleotide
  Sense strand starting at position 3636 of SEQ ID NO: 3748
aggaacuaguggguuaaua

SEQ ID NO: 291601 - RNA, 19 nt, Artificial Sequence
  Description of Artificial Sequence: Synthetic oligonucleotide
  Antisense strand to SEQ ID NO: 291600
uauuaacccacuaguuccu

SEQ ID NO: 291602 - RNA, 19 nt, Artificial Sequence
  Description of Artificial Sequence: Synthetic oligonucleotide
  Sense strand starting at position 3645 of SEQ ID NO: 3748
uggguuaauaccuggcuaa

SEQ ID NO: 291603 - RNA, 19 nt, Artificial Sequence
  Description of Artificial Sequence: Synthetic oligonucleotide
  Antisense strand to SEQ ID NO: 291602
uuagccagguauuaaccca

SEQ ID NO: 291604 - RNA, 19 nt, Artificial Sequence
  Description of Artificial Sequence: Synthetic oligonucleotide
  Sense strand starting at position 3646 of SEQ ID NO: 3748
ggguuaauaccuggcuaag

SEQ ID NO: 291605 - RNA, 19 nt, Artificial Sequence
  Description of Artificial Sequence: Synthetic oligonucleotide
  Antisense strand to SEQ ID NO: 291604
cuuagccagguauuaaccc

SEQ ID NO: 291606 - RNA, 19 nt, Artificial Sequence
  Description of Artificial Sequence: Synthetic oligonucleotide
  Sense strand starting at position 3648 of SEQ ID NO: 3748
guuaauaccuggcuaagau

SEQ ID NO: 291607 - RNA, 19 nt, Artificial Sequence
  Description of Artificial Sequence: Synthetic oligonucleotide
  Antisense strand to SEQ ID NO: 291606
aucuuagccagguauuaac

SEQ ID NO: 291608 - RNA, 19 nt, Artificial Sequence
  Description of Artificial Sequence: Synthetic oligonucleotide
  Sense strand starting at position 3793 of SEQ ID NO: 3748
uagagacugugucuccuaa

SEQ ID NO: 291609 - RNA, 19 nt, Artificial Sequence
  Description of Artificial Sequence: Synthetic oligonucleotide
  Antisense strand to SEQ ID NO: 291608
uuaggagacacagucucua

SEQ ID NO: 291610 - RNA, 19 nt, Artificial Sequence
  Description of Artificial Sequence: Synthetic oligonucleotide
  Sense strand starting at position 3795 of SEQ ID NO: 3748
gagacugugucuccuaaca

SEQ ID NO: 291611 - RNA, 19 nt, Artificial Sequence
  Description of Artificial Sequence: Synthetic oligonucleotide
  Antisense strand to SEQ ID NO: 291610
uguuaggagacacagucuc

SEQ ID NO: 291612 - RNA, 19 nt, Artificial Sequence
  Description of Artificial Sequence: Synthetic oligonucleotide
  Sense strand starting at position 3983 of SEQ ID NO: 3748
aucaccugcugagucaaau

SEQ ID NO: 291613 - RNA, 19 nt, Artificial Sequence
  Description of Artificial Sequence: Synthetic oligonucleotide
  Antisense strand to SEQ ID NO: 291612
auuugacucagcaggugau

SEQ ID NO: 291614 - RNA, 19 nt, Artificial Sequence
  Description of Artificial Sequence: Synthetic oligonucleotide
  Sense strand starting at position 46 of SEQ ID NO: 3749
aaauuacagcgaugugaaa

SEQ ID NO: 291615 - RNA, 19 nt, Artificial Sequence
  Description of Artificial Sequence: Synthetic oligonucleotide
  Antisense strand to SEQ ID NO: 291614
uuucacaucgcuguaauuu

SEQ ID NO: 291616 - RNA, 19 nt, Artificial Sequence
  Description of Artificial Sequence: Synthetic oligonucleotide
  Sense strand starting at position 48 of SEQ ID NO: 3749
auuacagcgaugugaaaua

SEQ ID NO: 291617 - RNA, 19 nt, Artificial Sequence
  Description of Artificial Sequence: Synthetic oligonucleotide
  Antisense strand to SEQ ID NO: 291616
uauuucacaucgcuguaau

SEQ ID NO: 291618 - RNA, 19 nt, Artificial Sequence
  Description of Artificial Sequence: Synthetic oligonucleotide
  Sense strand starting at position 58 of SEQ ID NO: 3749
ugugaaauaccugauagca

SEQ ID NO: 291619 - RNA, 19 nt, Artificial Sequence
  Description of Artificial Sequence: Synthetic oligonucleotide
  Antisense strand to SEQ ID NO: 291618
ugcuaucagguauuucaca

SEQ ID NO: 291620 - RNA, 19 nt, Artificial Sequence
  Description of Artificial Sequence: Synthetic oligonucleotide
  Sense strand starting at position 191 of SEQ ID NO: 3749
guugcaauucuauguauuu

SEQ ID NO: 291621 - RNA, 19 nt, Artificial Sequence
  Description of Artificial Sequence: Synthetic oligonucleotide
  Antisense strand to SEQ ID NO: 291620
aaauacauagaauugcaac

SEQ ID NO: 291622 - RNA, 19 nt, Artificial Sequence
  Description of Artificial Sequence: Synthetic oligonucleotide
  Sense strand starting at position 355 of SEQ ID NO: 3749
gcagaaugugcguugucug

SEQ ID NO: 291623 - RNA, 19 nt, Artificial Sequence
  Description of Artificial Sequence: Synthetic oligonucleotide
  Antisense strand to SEQ ID NO: 291622
cagacaacgcacauucugc

SEQ ID NO: 291624 - RNA, 19 nt, Artificial Sequence
  Description of Artificial Sequence: Synthetic oligonucleotide
  Sense strand starting at position 362 of SEQ ID NO: 3749
gugcguugucuggcaugga

SEQ ID NO: 291625 - RNA, 19 nt, Artificial Sequence
  Description of Artificial Sequence: Synthetic oligonucleotide
  Antisense strand to SEQ ID NO: 291624
uccaugccagacaacgcac

SEQ ID NO: 291626 - RNA, 19 nt, Artificial Sequence
  Description of Artificial Sequence: Synthetic oligonucleotide
  Sense strand starting at position 464 of SEQ ID NO: 3749
ggagucuugacuugaggcu

SEQ ID NO: 291627 - RNA, 19 nt, Artificial Sequence
  Description of Artificial Sequence: Synthetic oligonucleotide
  Antisense strand to SEQ ID NO: 291626
agccucaagucaagacucc

SEQ ID NO: 291628 - RNA, 19 nt, Artificial Sequence
  Description of Artificial Sequence: Synthetic oligonucleotide
  Sense strand starting at position 487 of SEQ ID NO: 3749
auugcauacuaaguuagaa

SEQ ID NO: 291629 - RNA, 19 nt, Artificial Sequence
  Description of Artificial Sequence: Synthetic oligonucleotide
  Antisense strand to SEQ ID NO: 291628
uucuaacuuaguaugcaau

SEQ ID NO: 291630 - RNA, 19 nt, Artificial Sequence
  Description of Artificial Sequence: Synthetic oligonucleotide
  Sense strand starting at position 740 of SEQ ID NO: 3749
ugucacuguuacuuagaau

SEQ ID NO: 291631 - RNA, 19 nt, Artificial Sequence
  Description of Artificial Sequence: Synthetic oligonucleotide
  Antisense strand to SEQ ID NO: 291630
auucuaaguaacagugaca

SEQ ID NO: 291632 - RNA, 19 nt, Artificial Sequence
  Description of Artificial Sequence: Synthetic oligonucleotide
  Sense strand starting at position 754 of SEQ ID NO: 3749
agaauagguacucgaguga

SEQ ID NO: 291633 - RNA, 19 nt, Artificial Sequence
  Description of Artificial Sequence: Synthetic oligonucleotide
  Antisense strand to SEQ ID NO: 291632
ucacucgaguaccuauucu

SEQ ID NO: 291634 - RNA, 19 nt, Artificial Sequence
  Description of Artificial Sequence: Synthetic oligonucleotide
  Sense strand starting at position 806 of SEQ ID NO: 3749
agugauauuucuuccucgu

SEQ ID NO: 291635 - RNA, 19 nt, Artificial Sequence
  Description of Artificial Sequence: Synthetic oligonucleotide
  Antisense strand to SEQ ID NO: 291634
acgaggaagaaauaucacu

SEQ ID NO: 291636 - RNA, 19 nt, Artificial Sequence
  Description of Artificial Sequence: Synthetic oligonucleotide
  Sense strand starting at position 823 of SEQ ID NO: 3749
gugccagauccuuaguaca

SEQ ID NO: 291637 - RNA, 19 nt, Artificial Sequence
  Description of Artificial Sequence: Synthetic oligonucleotide
  Antisense strand to SEQ ID NO: 291636
uguacuaaggaucuggcac

SEQ ID NO: 291638 - RNA, 19 nt, Artificial Sequence
  Description of Artificial Sequence: Synthetic oligonucleotide
  Sense strand starting at position 1377 of SEQ ID NO: 3749
cgaagaccugccuacagau

SEQ ID NO: 291639 - RNA, 19 nt, Artificial Sequence
  Description of Artificial Sequence: Synthetic oligonucleotide
  Antisense strand to SEQ ID NO: 291638
aucuguaggcaggucuucg

SEQ ID NO: 291640 - RNA, 19 nt, Artificial Sequence
  Description of Artificial Sequence: Synthetic oligonucleotide
  Sense strand starting at position 2088 of SEQ ID NO: 3749
gccaguugcguaaaggagu

SEQ ID NO: 291641 - RNA, 19 nt, Artificial Sequence
  Description of Artificial Sequence: Synthetic oligonucleotide
  Antisense strand to SEQ ID NO: 291640
acuccuuuacgcaacuggc

SEQ ID NO: 291642 - RNA, 19 nt, Artificial Sequence
  Description of Artificial Sequence: Synthetic oligonucleotide
  Sense strand starting at position 2404 of SEQ ID NO: 3749
guuaaacaucuacguuaag

SEQ ID NO: 291643 - RNA, 19 nt, Artificial Sequence
  Description of Artificial Sequence: Synthetic oligonucleotide
  Antisense strand to SEQ ID NO: 291642
cuuaacguagauguuuaac

SEQ ID NO: 291644 - RNA, 19 nt, Artificial Sequence
  Description of Artificial Sequence: Synthetic oligonucleotide
  Sense strand starting at position 2610 of SEQ ID NO: 3749
agagaaauucucgaggcuu

SEQ ID NO: 291645 - RNA, 19 nt, Artificial Sequence
  Description of Artificial Sequence: Synthetic oligonucleotide
  Antisense strand to SEQ ID NO: 291644
aagccucgagaauuucucu

SEQ ID NO: 291646 - RNA, 19 nt, Artificial Sequence
  Description of Artificial Sequence: Synthetic oligonucleotide
  Sense strand starting at position 2660 of SEQ ID NO: 3749
cuccucaacugaucgacua

SEQ ID NO: 291647 - RNA, 19 nt, Artificial Sequence
  Description of Artificial Sequence: Synthetic oligonucleotide
  Antisense strand to SEQ ID NO: 291646
uagucgaucaguugaggag

SEQ ID NO: 291648 - RNA, 19 nt, Artificial Sequence
  Description of Artificial Sequence: Synthetic oligonucleotide
  Sense strand starting at position 2661 of SEQ ID NO: 3749
uccucaacugaucgacuau

SEQ ID NO: 291649 - RNA, 19 nt, Artificial Sequence
  Description of Artificial Sequence: Synthetic oligonucleotide
  Antisense strand to SEQ ID NO: 291648
auagucgaucaguugagga

SEQ ID NO: 291650 - RNA, 19 nt, Artificial Sequence
  Description of Artificial Sequence: Synthetic oligonucleotide
  Sense strand starting at position 2901 of SEQ ID NO: 3749
uguugaggcguaucugcau

SEQ ID NO: 291651 - RNA, 19 nt, Artificial Sequence
  Description of Artificial Sequence: Synthetic oligonucleotide
  Antisense strand to SEQ ID NO: 291650
augcagauacgccucaaca

SEQ ID NO: 291652 - RNA, 19 nt, Artificial Sequence
  Description of Artificial Sequence: Synthetic oligonucleotide
  Sense strand starting at position 2988 of SEQ ID NO: 3749
cuuacuggugucuaguaga

SEQ ID NO: 291653 - RNA, 19 nt, Artificial Sequence
  Description of Artificial Sequence: Synthetic oligonucleotide
  Antisense strand to SEQ ID NO: 291652
ucuacuagacaccaguaag

SEQ ID NO: 291654 - RNA, 19 nt, Artificial Sequence
  Description of Artificial Sequence: Synthetic oligonucleotide
  Sense strand starting at position 3050 of SEQ ID NO: 3749
ugucaaguacuccacauau

SEQ ID NO: 291655 - RNA, 19 nt, Artificial Sequence
  Description of Artificial Sequence: Synthetic oligonucleotide
  Antisense strand to SEQ ID NO: 291654
auauguggaguacuugaca

SEQ ID NO: 291656 - RNA, 19 nt, Artificial Sequence
  Description of Artificial Sequence: Synthetic oligonucleotide
  Sense strand starting at position 3083 of SEQ ID NO: 3749
accauaacacggugaggua

SEQ ID NO: 291657 - RNA, 19 nt, Artificial Sequence
  Description of Artificial Sequence: Synthetic oligonucleotide
  Antisense strand to SEQ ID NO: 291656
uaccucaccguguuauggu

SEQ ID NO: 291658 - RNA, 19 nt, Artificial Sequence
  Description of Artificial Sequence: Synthetic oligonucleotide
  Sense strand starting at position 3294 of SEQ ID NO: 3749
cuugauaaaugccuacuga

SEQ ID NO: 291659 - RNA, 19 nt, Artificial Sequence
  Description of Artificial Sequence: Synthetic oligonucleotide
  Antisense strand to SEQ ID NO: 291658
ucaguaggcauuuaucaag

SEQ ID NO: 291660 - RNA, 19 nt, Artificial Sequence
  Description of Artificial Sequence: Synthetic oligonucleotide
  Sense strand starting at position 3295 of SEQ ID NO: 3749
uugauaaaugccuacugau

SEQ ID NO: 291661 - RNA, 19 nt, Artificial Sequence
  Description of Artificial Sequence: Synthetic oligonucleotide
  Antisense strand to SEQ ID NO: 291660
aucaguaggcauuuaucaa

SEQ ID NO: 291662 - RNA, 19 nt, Artificial Sequence
  Description of Artificial Sequence: Synthetic oligonucleotide
  Sense strand starting at position 3307 of SEQ ID NO: 3749
uacugauugccauacguag

SEQ ID NO: 291663 - RNA, 19 nt, Artificial Sequence
  Description of Artificial Sequence: Synthetic oligonucleotide
  Antisense strand to SEQ ID NO: 291662
cuacguauggcaaucagua

SEQ ID NO: 291664 - RNA, 19 nt, Artificial Sequence
  Description of Artificial Sequence: Synthetic oligonucleotide
  Sense strand starting at position 3403 of SEQ ID NO: 3749
gggagaaguccugaggugu

SEQ ID NO: 291665 - RNA, 19 nt, Artificial Sequence
  Description of Artificial Sequence: Synthetic oligonucleotide
  Antisense strand to SEQ ID NO: 291664
acaccucaggacuucuccc

SEQ ID NO: 291666 - RNA, 19 nt, Artificial Sequence
  Description of Artificial Sequence: Synthetic oligonucleotide
  Sense strand starting at position 3409 of SEQ ID NO: 3749
aguccugagguguggagaa

SEQ ID NO: 291667 - RNA, 19 nt, Artificial Sequence
  Description of Artificial Sequence: Synthetic oligonucleotide
  Antisense strand to SEQ ID NO: 291666
uucuccacaccucaggacu

SEQ ID NO: 291668 - RNA, 19 nt, Artificial Sequence
  Description of Artificial Sequence: Synthetic oligonucleotide
  Sense strand starting at position 3430 of SEQ ID NO: 3749
gagauuaagccugaguccu

SEQ ID NO: 291669 - RNA, 19 nt, Artificial Sequence
  Description of Artificial Sequence: Synthetic oligonucleotide
  Antisense strand to SEQ ID NO: 291668
aggacucaggcuuaaucuc

SEQ ID NO: 291670 - RNA, 19 nt, Artificial Sequence
  Description of Artificial Sequence: Synthetic oligonucleotide
  Sense strand starting at position 3556 of SEQ ID NO: 3749
gaacuaaaguccuuagagu

SEQ ID NO: 291671 - RNA, 19 nt, Artificial Sequence
  Description of Artificial Sequence: Synthetic oligonucleotide
  Antisense strand to SEQ ID NO: 291670
acucuaaggacuuuaguuc

SEQ ID NO: 291672 - RNA, 19 nt, Artificial Sequence
  Description of Artificial Sequence: Synthetic oligonucleotide
  Sense strand starting at position 3730 of SEQ ID NO: 3749
gcgcuugcaguccuuacau

SEQ ID NO: 291673 - RNA, 19 nt, Artificial Sequence
  Description of Artificial Sequence: Synthetic oligonucleotide
  Antisense strand to SEQ ID NO: 291672
auguaaggacugcaagcgc

SEQ ID NO: 291674 - RNA, 19 nt, Artificial Sequence
  Description of Artificial Sequence: Synthetic oligonucleotide
  Sense strand starting at position 3732 of SEQ ID NO: 3749
gcuugcaguccuuacauuu

SEQ ID NO: 291675 - RNA, 19 nt, Artificial Sequence
  Description of Artificial Sequence: Synthetic oligonucleotide
  Antisense strand to SEQ ID NO: 291674
aaauguaaggacugcaagc

SEQ ID NO: 291676 - RNA, 19 nt, Artificial Sequence
  Description of Artificial Sequence: Synthetic oligonucleotide
  Sense strand starting at position 3778 of SEQ ID NO: 3749
auggauauacaaggcuaau

SEQ ID NO: 291677 - RNA, 19 nt, Artificial Sequence
  Description of Artificial Sequence: Synthetic oligonucleotide
  Antisense strand to SEQ ID NO: 291676
auuagccuuguauauccau

SEQ ID NO: 291678 - RNA, 19 nt, Artificial Sequence
  Description of Artificial Sequence: Synthetic oligonucleotide
  Sense strand starting at position 3781 of SEQ ID NO: 3749
gauauacaaggcuaauguu

SEQ ID NO: 291679 - RNA, 19 nt, Artificial Sequence
  Description of Artificial Sequence: Synthetic oligonucleotide
  Antisense strand to SEQ ID NO: 291678
aacauuagccuuguauauc

SEQ ID NO: 291680 - RNA, 19 nt, Artificial Sequence
  Description of Artificial Sequence: Synthetic oligonucleotide
  Sense strand starting at position 3853 of SEQ ID NO: 3749
caaugcaaguugguuaaca

SEQ ID NO: 291681 - RNA, 19 nt, Artificial Sequence
  Description of Artificial Sequence: Synthetic oligonucleotide
  Antisense strand to SEQ ID NO: 291680
uguuaaccaacuugcauug

SEQ ID NO: 291682 - RNA, 19 nt, Artificial Sequence
  Description of Artificial Sequence: Synthetic oligonucleotide
  Sense strand starting at position 3954 of SEQ ID NO: 3749
uuaggaacuaguggguuaa

SEQ ID NO: 291683 - RNA, 19 nt, Artificial Sequence
  Description of Artificial Sequence: Synthetic oligonucleotide
  Antisense strand to SEQ ID NO: 291682
uuaacccacuaguuccuaa

SEQ ID NO: 291684 - RNA, 19 nt, Artificial Sequence
  Description of Artificial Sequence: Synthetic oligonucleotide
  Sense strand starting at position 3955 of SEQ ID NO: 3749
uaggaacuaguggguuaau

SEQ ID NO: 291685 - RNA, 19 nt, Artificial Sequence
  Description of Artificial Sequence: Synthetic oligonucleotide
  Antisense strand to SEQ ID NO: 291684
auuaacccacuaguuccua

SEQ ID NO: 291686 - RNA, 19 nt, Artificial Sequence
  Description of Artificial Sequence: Synthetic oligonucleotide
  Sense strand starting at position 3956 of SEQ ID NO: 3749
aggaacuaguggguuaaua

SEQ ID NO: 291687 - RNA, 19 nt, Artificial Sequence
  Description of Artificial Sequence: Synthetic oligonucleotide
  Antisense strand to SEQ ID NO: 291686
uauuaacccacuaguuccu

SEQ ID NO: 291688 - RNA, 19 nt, Artificial Sequence
  Description of Artificial Sequence: Synthetic oligonucleotide
  Sense strand starting at position 3965 of SEQ ID NO: 3749
uggguuaauaccuggcuaa

SEQ ID NO: 291689 - RNA, 19 nt, Artificial Sequence
  Description of Artificial Sequence: Synthetic oligonucleotide
  Antisense strand to SEQ ID NO: 291688
uuagccagguauuaaccca

SEQ ID NO: 291690 - RNA, 19 nt, Artificial Sequence
  Description of Artificial Sequence: Synthetic oligonucleotide
  Sense strand starting at position 3966 of SEQ ID NO: 3749
ggguuaauaccuggcuaag

SEQ ID NO: 291691 - RNA, 19 nt, Artificial Sequence
  Description of Artificial Sequence: Synthetic oligonucleotide
  Antisense strand to SEQ ID NO: 291690
cuuagccagguauuaaccc

SEQ ID NO: 291692 - RNA, 19 nt, Artificial Sequence
  Description of Artificial Sequence: Synthetic oligonucleotide
  Sense strand starting at position 3968 of SEQ ID NO: 3749
guuaauaccuggcuaagau

SEQ ID NO: 291693 - RNA, 19 nt, Artificial Sequence
  Description of Artificial Sequence: Synthetic oligonucleotide
  Antisense strand to SEQ ID NO: 291692
aucuuagccagguauuaac

SEQ ID NO: 291694 - RNA, 19 nt, Artificial Sequence
  Description of Artificial Sequence: Synthetic oligonucleotide
  Sense strand starting at position 153 of SEQ ID NO: 3750
ggagaacccucgucucuau

SEQ ID NO: 291695 - RNA, 19 nt, Artificial Sequence
  Description of Artificial Sequence: Synthetic oligonucleotide
  Antisense strand to SEQ ID NO: 291694
auagagacgaggguucucc

SEQ ID NO: 291696 - RNA, 19 nt, Artificial Sequence
  Description of Artificial Sequence: Synthetic oligonucleotide
  Sense strand starting at position 238 of SEQ ID NO: 3750
ccgagagaauugcuugaac

SEQ ID NO: 291697 - RNA, 19 nt, Artificial Sequence
  Description of Artificial Sequence: Synthetic oligonucleotide
  Antisense strand to SEQ ID NO: 291696
guucaagcaauucucucgg

SEQ ID NO: 291698 - RNA, 19 nt, Artificial Sequence
  Description of Artificial Sequence: Synthetic oligonucleotide
  Sense strand starting at position 365 of SEQ ID NO: 3750
gaaugauaggagcgugaaa

SEQ ID NO: 291699 - RNA, 19 nt, Artificial Sequence
  Description of Artificial Sequence: Synthetic oligonucleotide
  Antisense strand to SEQ ID NO: 291698
uuucacgcuccuaucauuc

SEQ ID NO: 291700 - RNA, 19 nt, Artificial Sequence
  Description of Artificial Sequence: Synthetic oligonucleotide
  Sense strand starting at position 394 of SEQ ID NO: 3750
uucuacuagugauuaaaga

SEQ ID NO: 291701 - RNA, 19 nt, Artificial Sequence
  Description of Artificial Sequence: Synthetic oligonucleotide
  Antisense strand to SEQ ID NO: 291700
ucuuuaaucacuaguagaa

SEQ ID NO: 291702 - RNA, 19 nt, Artificial Sequence
  Description of Artificial Sequence: Synthetic oligonucleotide
  Sense strand starting at position 407 of SEQ ID NO: 3750
uaaagaaagcugcagguuu

SEQ ID NO: 291703 - RNA, 19 nt, Artificial Sequence
  Description of Artificial Sequence: Synthetic oligonucleotide
  Antisense strand to SEQ ID NO: 291702
aaaccugcagcuuucuuua

SEQ ID NO: 291704 - RNA, 19 nt, Artificial Sequence
  Description of Artificial Sequence: Synthetic oligonucleotide
  Sense strand starting at position 537 of SEQ ID NO: 3750
uuguuaguuuccuuauuug

SEQ ID NO: 291705 - RNA, 19 nt, Artificial Sequence
  Description of Artificial Sequence: Synthetic oligonucleotide
  Antisense strand to SEQ ID NO: 291704
caaauaaggaaacuaacaa

SEQ ID NO: 291706 - RNA, 19 nt, Artificial Sequence
  Description of Artificial Sequence: Synthetic oligonucleotide
  Sense strand starting at position 548 of SEQ ID NO: 3750
cuuauuuguuuccuauugu

SEQ ID NO: 291707 - RNA, 19 nt, Artificial Sequence
  Description of Artificial Sequence: Synthetic oligonucleotide
  Antisense strand to SEQ ID NO: 291706
acaauaggaaacaaauaag

SEQ ID NO: 291708 - RNA, 19 nt, Artificial Sequence
  Description of Artificial Sequence: Synthetic oligonucleotide
  Sense strand starting at position 561 of SEQ ID NO: 3750
uauuguugccuugaaguag

SEQ ID NO: 291709 - RNA, 19 nt, Artificial Sequence
  Description of Artificial Sequence: Synthetic oligonucleotide
  Antisense strand to SEQ ID NO: 291708
cuacuucaaggcaacaaua

SEQ ID NO: 291710 - RNA, 19 nt, Artificial Sequence
  Description of Artificial Sequence: Synthetic oligonucleotide
  Sense strand starting at position 660 of SEQ ID NO: 3750
ugguuugagcaauauauug

SEQ ID NO: 291711 - RNA, 19 nt, Artificial Sequence
  Description of Artificial Sequence: Synthetic oligonucleotide
  Antisense strand to SEQ ID NO: 291710
caauauauugcucaaacca

SEQ ID NO: 291712 - RNA, 19 nt, Artificial Sequence
  Description of Artificial Sequence: Synthetic oligonucleotide
  Sense strand starting at position 876 of SEQ ID NO: 3750
ugguuaauucuuuacuugu

SEQ ID NO: 291713 - RNA, 19 nt, Artificial Sequence
  Description of Artificial Sequence: Synthetic oligonucleotide
  Antisense strand to SEQ ID NO: 291712
acaaguaaagaauuaacca

SEQ ID NO: 291714 - RNA, 19 nt, Artificial Sequence
  Description of Artificial Sequence: Synthetic oligonucleotide
  Sense strand starting at position 934 of SEQ ID NO: 3750
ucaaguaaugacgaaugca

SEQ ID NO: 291715 - RNA, 19 nt, Artificial Sequence
  Description of Artificial Sequence: Synthetic oligonucleotide
  Antisense strand to SEQ ID NO: 291714
ugcauucgucauuacuuga

SEQ ID NO: 291716 - RNA, 19 nt, Artificial Sequence
  Description of Artificial Sequence: Synthetic oligonucleotide
  Sense strand starting at position 1189 of SEQ ID NO: 3750
aaggaaggcugcucuaaga

SEQ ID NO: 291717 - RNA, 19 nt, Artificial Sequence
  Description of Artificial Sequence: Synthetic oligonucleotide
  Antisense strand to SEQ ID NO: 291716
ucuuagagcagccuuccuu

SEQ ID NO: 291718 - RNA, 19 nt, Artificial Sequence
  Description of Artificial Sequence: Synthetic oligonucleotide
  Sense strand starting at position 1235 of SEQ ID NO: 3750
auguacuuagugggcaaua

SEQ ID NO: 291719 - RNA, 19 nt, Artificial Sequence
  Description of Artificial Sequence: Synthetic oligonucleotide
  Antisense strand to SEQ ID NO: 291718
uauugcccacuaaguacau

SEQ ID NO: 291720 - RNA, 19 nt, Artificial Sequence
  Description of Artificial Sequence: Synthetic oligonucleotide
  Sense strand starting at position 1236 of SEQ ID NO: 3750
uguacuuagugggcaauaa

SEQ ID NO: 291721 - RNA, 19 nt, Artificial Sequence
  Description of Artificial Sequence: Synthetic oligonucleotide
  Antisense strand to SEQ ID NO: 291720
uuauugcccacuaaguaca

SEQ ID NO: 291722 - RNA, 19 nt, Artificial Sequence
  Description of Artificial Sequence: Synthetic oligonucleotide
  Sense strand starting at position 1237 of SEQ ID NO: 3750
guacuuagugggcaauaaa

SEQ ID NO: 291723 - RNA, 19 nt, Artificial Sequence
  Description of Artificial Sequence: Synthetic oligonucleotide
  Antisense strand to SEQ ID NO: 291722
uuuauugcccacuaaguac

SEQ ID NO: 291724 - RNA, 19 nt, Artificial Sequence
  Description of Artificial Sequence: Synthetic oligonucleotide
  Sense strand starting at position 1240 of SEQ ID NO: 3750
cuuagugggcaauaaauua

SEQ ID NO: 291725 - RNA, 19 nt, Artificial Sequence
  Description of Artificial Sequence: Synthetic oligonucleotide
  Antisense strand to SEQ ID NO: 291724
uaauuuauugcccacuaag

SEQ ID NO: 291726 - RNA, 19 nt, Artificial Sequence
  Description of Artificial Sequence: Synthetic oligonucleotide
  Sense strand starting at position 1318 of SEQ ID NO: 3750
cuggguucugcugagugau

SEQ ID NO: 291727 - RNA, 19 nt, Artificial Sequence
  Description of Artificial Sequence: Synthetic oligonucleotide
  Antisense strand to SEQ ID NO: 291726
aucacucagcagaacccag

SEQ ID NO: 291728 - RNA, 19 nt, Artificial Sequence
  Description of Artificial Sequence: Synthetic oligonucleotide
  Sense strand starting at position 1320 of SEQ ID NO: 3750
ggguucugcugagugauuu

SEQ ID NO: 291729 - RNA, 19 nt, Artificial Sequence
  Description of Artificial Sequence: Synthetic oligonucleotide
  Antisense strand to SEQ ID NO: 291728
aaaucacucagcagaaccc

SEQ ID NO: 291730 - RNA, 19 nt, Artificial Sequence
  Description of Artificial Sequence: Synthetic oligonucleotide
  Sense strand starting at position 1379 of SEQ ID NO: 3750
gucauaauggaaugugcuu

SEQ ID NO: 291731 - RNA, 19 nt, Artificial Sequence
  Description of Artificial Sequence: Synthetic oligonucleotide
  Antisense strand to SEQ ID NO: 291730
aagcacauuccauuaugac

SEQ ID NO: 291732 - RNA, 19 nt, Artificial Sequence
  Description of Artificial Sequence: Synthetic oligonucleotide
  Sense strand starting at position 1384 of SEQ ID NO: 3750
aauggaaugugcuuacuga

SEQ ID NO: 291733 - RNA, 19 nt, Artificial Sequence
  Description of Artificial Sequence: Synthetic oligonucleotide
  Antisense strand to SEQ ID NO: 291732
ucaguaagcacauuccauu

SEQ ID NO: 291734 - RNA, 19 nt, Artificial Sequence
  Description of Artificial Sequence: Synthetic oligonucleotide
  Sense strand starting at position 1385 of SEQ ID NO: 3750
auggaaugugcuuacugaa

SEQ ID NO: 291735 - RNA, 19 nt, Artificial Sequence
  Description of Artificial Sequence: Synthetic oligonucleotide
  Antisense strand to SEQ ID NO: 291734
uucaguaagcacauuccau

SEQ ID NO: 291736 - RNA, 19 nt, Artificial Sequence
  Description of Artificial Sequence: Synthetic oligonucleotide
  Sense strand starting at position 1470 of SEQ ID NO: 3750
ccuaaaugaucucugggca

SEQ ID NO: 291737 - RNA, 19 nt, Artificial Sequence
  Description of Artificial Sequence: Synthetic oligonucleotide
  Antisense strand to SEQ ID NO: 291736
ugcccagagaucauuuagg

SEQ ID NO: 291738 - RNA, 19 nt, Artificial Sequence
  Description of Artificial Sequence: Synthetic oligonucleotide
  Sense strand starting at position 1471 of SEQ ID NO: 3750
cuaaaugaucucugggcau

SEQ ID NO: 291739 - RNA, 19 nt, Artificial Sequence
  Description of Artificial Sequence: Synthetic oligonucleotide
  Antisense strand to SEQ ID NO: 291738
augcccagagaucauuuag

SEQ ID NO: 291740 - RNA, 19 nt, Artificial Sequence
  Description of Artificial Sequence: Synthetic oligonucleotide
  Sense strand starting at position 1473 of SEQ ID NO: 3750
aaaugaucucugggcaugu

SEQ ID NO: 291741 - RNA, 19 nt, Artificial Sequence
  Description of Artificial Sequence: Synthetic oligonucleotide
  Antisense strand to SEQ ID NO: 291740
acaugcccagagaucauuu

SEQ ID NO: 291742 - RNA, 19 nt, Artificial Sequence
  Description of Artificial Sequence: Synthetic oligonucleotide
  Sense strand starting at position 1474 of SEQ ID NO: 3750
aaugaucucugggcaugua

SEQ ID NO: 291743 - RNA, 19 nt, Artificial Sequence
  Description of Artificial Sequence: Synthetic oligonucleotide
  Antisense strand to SEQ ID NO: 291742
uacaugcccagagaucauu

SEQ ID NO: 291744 - RNA, 19 nt, Artificial Sequence
  Description of Artificial Sequence: Synthetic oligonucleotide
  Sense strand starting at position 2009 of SEQ ID NO: 3750
aacuuugugugguuuauaa

SEQ ID NO: 291745 - RNA, 19 nt, Artificial Sequence
  Description of Artificial Sequence: Synthetic oligonucleotide
  Antisense strand to SEQ ID NO: 291744
uuauaaaccacacaaaguu

SEQ ID NO: 291746 - RNA, 19 nt, Artificial Sequence
  Description of Artificial Sequence: Synthetic oligonucleotide
  Sense strand starting at position 2011 of SEQ ID NO: 3750
cuuugugugguuuauaaau

SEQ ID NO: 291747 - RNA, 19 nt, Artificial Sequence
  Description of Artificial Sequence: Synthetic oligonucleotide
  Antisense strand to SEQ ID NO: 291746
auuuauaaaccacacaaag

SEQ ID NO: 291748 - RNA, 19 nt, Artificial Sequence
  Description of Artificial Sequence: Synthetic oligonucleotide
  Sense strand starting at position 2775 of SEQ ID NO: 3750
gcuaucaucagauggauag

SEQ ID NO: 291749 - RNA, 19 nt, Artificial Sequence
  Description of Artificial Sequence: Synthetic oligonucleotide
  Antisense strand to SEQ ID NO: 291748
cuauccaucugaugauagc

SEQ ID NO: 291750 - RNA, 19 nt, Artificial Sequence
  Description of Artificial Sequence: Synthetic oligonucleotide
  Sense strand starting at position 3199 of SEQ ID NO: 3750
ggagguugcggugaaugga

SEQ ID NO: 291751 - RNA, 19 nt, Artificial Sequence
  Description of Artificial Sequence: Synthetic oligonucleotide
  Antisense strand to SEQ ID NO: 291750
uccauucaccgcaaccucc

SEQ ID NO: 291752 - RNA, 19 nt, Artificial Sequence
  Description of Artificial Sequence: Synthetic oligonucleotide
  Sense strand starting at position 3420 of SEQ ID NO: 3750
gugagacugucuccaauac

SEQ ID NO: 291753 - RNA, 19 nt, Artificial Sequence
  Description of Artificial Sequence: Synthetic oligonucleotide
  Antisense strand to SEQ ID NO: 291752
guauuggagacagucucac

SEQ ID NO: 291754 - RNA, 19 nt, Artificial Sequence
  Description of Artificial Sequence: Synthetic oligonucleotide
  Sense strand starting at position 3551 of SEQ ID NO: 3750
gagguaucuugaguaguag

SEQ ID NO: 291755 - RNA, 19 nt, Artificial Sequence
  Description of Artificial Sequence: Synthetic oligonucleotide
  Antisense strand to SEQ ID NO: 291754
cuacuacucaagauaccuc

SEQ ID NO: 291756 - RNA, 19 nt, Artificial Sequence
  Description of Artificial Sequence: Synthetic oligonucleotide
  Sense strand starting at position 3636 of SEQ ID NO: 3750
auuguucauugggcagaga

SEQ ID NO: 291757 - RNA, 19 nt, Artificial Sequence
  Description of Artificial Sequence: Synthetic oligonucleotide
  Antisense strand to SEQ ID NO: 291756
ucucugcccaaugaacaau

SEQ ID NO: 291758 - RNA, 19 nt, Artificial Sequence
  Description of Artificial Sequence: Synthetic oligonucleotide
  Sense strand starting at position 3637 of SEQ ID NO: 3750
uuguucauugggcagagaa

SEQ ID NO: 291759 - RNA, 19 nt, Artificial Sequence
  Description of Artificial Sequence: Synthetic oligonucleotide
  Antisense strand to SEQ ID NO: 291758
uucucugcccaaugaacaa

SEQ ID NO: 291760 - RNA, 19 nt, Artificial Sequence
  Description of Artificial Sequence: Synthetic oligonucleotide
  Sense strand starting at position 3639 of SEQ ID NO: 3750
guucauugggcagagaauu

SEQ ID NO: 291761 - RNA, 19 nt, Artificial Sequence
  Description of Artificial Sequence: Synthetic oligonucleotide
  Antisense strand to SEQ ID NO: 291760
aauucucugcccaaugaac

SEQ ID NO: 291762 - RNA, 19 nt, Artificial Sequence
  Description of Artificial Sequence: Synthetic oligonucleotide
  Sense strand starting at position 3678 of SEQ ID NO: 3750
guauuccugagaugauagu

SEQ ID NO: 291763 - RNA, 19 nt, Artificial Sequence
  Description of Artificial Sequence: Synthetic oligonucleotide
  Antisense strand to SEQ ID NO: 291762
acuaucaucucaggaauac

SEQ ID NO: 291764 - RNA, 19 nt, Artificial Sequence
  Description of Artificial Sequence: Synthetic oligonucleotide
  Sense strand starting at position 3704 of SEQ ID NO: 3750
guugcauaacaguauaaac

SEQ ID NO: 291765 - RNA, 19 nt, Artificial Sequence
  Description of Artificial Sequence: Synthetic oligonucleotide
  Antisense strand to SEQ ID NO: 291764
guuuauacuguuaugcaac

SEQ ID NO: 291766 - RNA, 19 nt, Artificial Sequence
  Description of Artificial Sequence: Synthetic oligonucleotide
  Sense strand starting at position 3725 of SEQ ID NO: 3750
acguaaugccacugaaaug

SEQ ID NO: 291767 - RNA, 19 nt, Artificial Sequence
  Description of Artificial Sequence: Synthetic oligonucleotide
  Antisense strand to SEQ ID NO: 291766
cauuucaguggcauuacgu

SEQ ID NO: 291768 - RNA, 19 nt, Artificial Sequence
  Description of Artificial Sequence: Synthetic oligonucleotide
  Sense strand starting at position 3726 of SEQ ID NO: 3750
cguaaugccacugaaaugu

SEQ ID NO: 291769 - RNA, 19 nt, Artificial Sequence
  Description of Artificial Sequence: Synthetic oligonucleotide
  Antisense strand to SEQ ID NO: 291768
acauuucaguggcauuacg

SEQ ID NO: 291770 - RNA, 19 nt, Artificial Sequence
  Description of Artificial Sequence: Synthetic oligonucleotide
  Sense strand starting at position 3785 of SEQ ID NO: 3750
uucucuauuuagccaggua

SEQ ID NO: 291771 - RNA, 19 nt, Artificial Sequence
  Description of Artificial Sequence: Synthetic oligonucleotide
  Antisense strand to SEQ ID NO: 291770
uaccuggcuaaauagagaa

SEQ ID NO: 291772 - RNA, 19 nt, Artificial Sequence
  Description of Artificial Sequence: Synthetic oligonucleotide
  Sense strand starting at position 3853 of SEQ ID NO: 3750
uagagaaagugggaagaua

SEQ ID NO: 291773 - RNA, 19 nt, Artificial Sequence
  Description of Artificial Sequence: Synthetic oligonucleotide
  Antisense strand to SEQ ID NO: 291772
uaucuucccacuuucucua

SEQ ID NO: 291774 - RNA, 19 nt, Artificial Sequence
  Description of Artificial Sequence: Synthetic oligonucleotide
  Sense strand starting at position 38 of SEQ ID NO: 3751
cucaaagguauuggguaua

SEQ ID NO: 291775 - RNA, 19 nt, Artificial Sequence
  Description of Artificial Sequence: Synthetic oligonucleotide
  Antisense strand to SEQ ID NO: 291774
uauacccaauaccuuugag

SEQ ID NO: 291776 - RNA, 19 nt, Artificial Sequence
  Description of Artificial Sequence: Synthetic oligonucleotide
  Sense strand starting at position 84 of SEQ ID NO: 3751
augucuuaaggaugaucca

SEQ ID NO: 291777 - RNA, 19 nt, Artificial Sequence
  Description of Artificial Sequence: Synthetic oligonucleotide
  Antisense strand to SEQ ID NO: 291776
uggaucauccuuaagacau

SEQ ID NO: 291778 - RNA, 19 nt, Artificial Sequence
  Description of Artificial Sequence: Synthetic oligonucleotide
  Sense strand starting at position 377 of SEQ ID NO: 3751
guaaauccauugcugauau

SEQ ID NO: 291779 - RNA, 19 nt, Artificial Sequence
  Description of Artificial Sequence: Synthetic oligonucleotide
  Antisense strand to SEQ ID NO: 291778
auaucagcaauggauuuac

SEQ ID NO: 291780 - RNA, 19 nt, Artificial Sequence
  Description of Artificial Sequence: Synthetic oligonucleotide
  Sense strand starting at position 753 of SEQ ID NO: 3751
uugauaaucuugucuggau

SEQ ID NO: 291781 - RNA, 19 nt, Artificial Sequence
  Description of Artificial Sequence: Synthetic oligonucleotide
  Antisense strand to SEQ ID NO: 291780
auccagacaagauuaucaa

SEQ ID NO: 291782 - RNA, 19 nt, Artificial Sequence
  Description of Artificial Sequence: Synthetic oligonucleotide
  Sense strand starting at position 754 of SEQ ID NO: 3751
ugauaaucuugucuggaua

SEQ ID NO: 291783 - RNA, 19 nt, Artificial Sequence
  Description of Artificial Sequence: Synthetic oligonucleotide
  Antisense strand to SEQ ID NO: 291782
uauccagacaagauuauca

SEQ ID NO: 291784 - RNA, 19 nt, Artificial Sequence
  Description of Artificial Sequence: Synthetic oligonucleotide
  Sense strand starting at position 755 of SEQ ID NO: 3751
gauaaucuugucuggauag

SEQ ID NO: 291785 - RNA, 19 nt, Artificial Sequence
  Description of Artificial Sequence: Synthetic oligonucleotide
  Antisense strand to SEQ ID NO: 291784
cuauccagacaagauuauc

SEQ ID NO: 291786 - RNA, 19 nt, Artificial Sequence
  Description of Artificial Sequence: Synthetic oligonucleotide
  Sense strand starting at position 757 of SEQ ID NO: 3751
uaaucuugucuggauaguu

SEQ ID NO: 291787 - RNA, 19 nt, Artificial Sequence
  Description of Artificial Sequence: Synthetic oligonucleotide
  Antisense strand to SEQ ID NO: 291786
aacuauccagacaagauua

SEQ ID NO: 291788 - RNA, 19 nt, Artificial Sequence
  Description of Artificial Sequence: Synthetic oligonucleotide
  Sense strand starting at position 766 of SEQ ID NO: 3751
cuggauaguugucuaucua

SEQ ID NO: 291789 - RNA, 19 nt, Artificial Sequence
  Description of Artificial Sequence: Synthetic oligonucleotide
  Antisense strand to SEQ ID NO: 291788
uagauagacaacuauccag

SEQ ID NO: 291790 - RNA, 19 nt, Artificial Sequence
  Description of Artificial Sequence: Synthetic oligonucleotide
  Sense strand starting at position 767 of SEQ ID NO: 3751
uggauaguugucuaucuac

SEQ ID NO: 291791 - RNA, 19 nt, Artificial Sequence
  Description of Artificial Sequence: Synthetic oligonucleotide
  Antisense strand to SEQ ID NO: 291790
guagauagacaacuaucca

SEQ ID NO: 291792 - RNA, 19 nt, Artificial Sequence
  Description of Artificial Sequence: Synthetic oligonucleotide
  Sense strand starting at position 770 of SEQ ID NO: 3751
auaguugucuaucuacaua

SEQ ID NO: 291793 - RNA, 19 nt, Artificial Sequence
  Description of Artificial Sequence: Synthetic oligonucleotide
  Antisense strand to SEQ ID NO: 291792
uauguagauagacaacuau

SEQ ID NO: 291794 - RNA, 19 nt, Artificial Sequence
  Description of Artificial Sequence: Synthetic oligonucleotide
  Sense strand starting at position 773 of SEQ ID NO: 3751
guugucuaucuacauaaac

SEQ ID NO: 291795 - RNA, 19 nt, Artificial Sequence
  Description of Artificial Sequence: Synthetic oligonucleotide
  Antisense strand to SEQ ID NO: 291794
guuuauguagauagacaac

SEQ ID NO: 291796 - RNA, 19 nt, Artificial Sequence
  Description of Artificial Sequence: Synthetic oligonucleotide
  Sense strand starting at position 834 of SEQ ID NO: 3751
gggaaagaucuucgaugua

SEQ ID NO: 291797 - RNA, 19 nt, Artificial Sequence
  Description of Artificial Sequence: Synthetic oligonucleotide
  Antisense strand to SEQ ID NO: 291796
uacaucgaagaucuuuccc

SEQ ID NO: 291798 - RNA, 19 nt, Artificial Sequence
  Description of Artificial Sequence: Synthetic oligonucleotide
  Sense strand starting at position 837 of SEQ ID NO: 3751
aaagaucuucgauguaaau

SEQ ID NO: 291799 - RNA, 19 nt, Artificial Sequence
  Description of Artificial Sequence: Synthetic oligonucleotide
  Antisense strand to SEQ ID NO: 291798
auuuacaucgaagaucuuu

SEQ ID NO: 291800 - RNA, 19 nt, Artificial Sequence
  Description of Artificial Sequence: Synthetic oligonucleotide
  Sense strand starting at position 843 of SEQ ID NO: 3751
cuucgauguaaauaacguu

SEQ ID NO: 291801 - RNA, 19 nt, Artificial Sequence
  Description of Artificial Sequence: Synthetic oligonucleotide
  Antisense strand to SEQ ID NO: 291800
aacguuauuuacaucgaag

SEQ ID NO: 291802 - RNA, 19 nt, Artificial Sequence
  Description of Artificial Sequence: Synthetic oligonucleotide
  Sense strand starting at position 914 of SEQ ID NO: 3751
acuggaaguuggcuuaaua

SEQ ID NO: 291803 - RNA, 19 nt, Artificial Sequence
  Description of Artificial Sequence: Synthetic oligonucleotide
  Antisense strand to SEQ ID NO: 291802
uauuaagccaacuuccagu

SEQ ID NO: 291804 - RNA, 19 nt, Artificial Sequence
  Description of Artificial Sequence: Synthetic oligonucleotide
  Sense strand starting at position 1050 of SEQ ID NO: 3751
cagguagucggccaaggau

SEQ ID NO: 291805 - RNA, 19 nt, Artificial Sequence
  Description of Artificial Sequence: Synthetic oligonucleotide
  Antisense strand to SEQ ID NO: 291804
auccuuggccgacuaccug

SEQ ID NO: 291806 - RNA, 19 nt, Artificial Sequence
  Description of Artificial Sequence: Synthetic oligonucleotide
  Sense strand starting at position 1098 of SEQ ID NO: 3751
agcgaugguagucacuuaa

SEQ ID NO: 291807 - RNA, 19 nt, Artificial Sequence
  Description of Artificial Sequence: Synthetic oligonucleotide
  Antisense strand to SEQ ID NO: 291806
uuaagugacuaccaucgcu

SEQ ID NO: 291808 - RNA, 19 nt, Artificial Sequence
  Description of Artificial Sequence: Synthetic oligonucleotide
  Sense strand starting at position 1529 of SEQ ID NO: 3751
ccagaacucguguagaguu

SEQ ID NO: 291809 - RNA, 19 nt, Artificial Sequence
  Description of Artificial Sequence: Synthetic oligonucleotide
  Antisense strand to SEQ ID NO: 291808
aacucuacacgaguucugg

SEQ ID NO: 291810 - RNA, 19 nt, Artificial Sequence
  Description of Artificial Sequence: Synthetic oligonucleotide
  Sense strand starting at position 1570 of SEQ ID NO: 3751
ggguuuccaccauaugcuu

SEQ ID NO: 291811 - RNA, 19 nt, Artificial Sequence
  Description of Artificial Sequence: Synthetic oligonucleotide
  Antisense strand to SEQ ID NO: 291810
aagcauaugguggaaaccc

SEQ ID NO: 291812 - RNA, 19 nt, Artificial Sequence
  Description of Artificial Sequence: Synthetic oligonucleotide
  Sense strand starting at position 1713 of SEQ ID NO: 3751
gcuuguuaacaggagugca

SEQ ID NO: 291813 - RNA, 19 nt, Artificial Sequence
  Description of Artificial Sequence: Synthetic oligonucleotide
  Antisense strand to SEQ ID NO: 291812
ugcacuccuguuaacaagc

SEQ ID NO: 291814 - RNA, 19 nt, Artificial Sequence
  Description of Artificial Sequence: Synthetic oligonucleotide
  Sense strand starting at position 1727 of SEQ ID NO: 3751
gugcaaggaacuggagaua

SEQ ID NO: 291815 - RNA, 19 nt, Artificial Sequence
  Description of Artificial Sequence: Synthetic oligonucleotide
  Antisense strand to SEQ ID NO: 291814
uaucuccaguuccuugcac

SEQ ID NO: 291816 - RNA, 19 nt, Artificial Sequence
  Description of Artificial Sequence: Synthetic oligonucleotide
  Sense strand starting at position 2332 of SEQ ID NO: 3751
gagauucugcgcgaaacua

SEQ ID NO: 291817 - RNA, 19 nt, Artificial Sequence
  Description of Artificial Sequence: Synthetic oligonucleotide
  Antisense strand to SEQ ID NO: 291816
uaguuucgcgcagaaucuc

SEQ ID NO: 291818 - RNA, 19 nt, Artificial Sequence
  Description of Artificial Sequence: Synthetic oligonucleotide
  Sense strand starting at position 2750 of SEQ ID NO: 3751
caaauccguccuggagaca

SEQ ID NO: 291819 - RNA, 19 nt, Artificial Sequence
  Description of Artificial Sequence: Synthetic oligonucleotide
  Antisense strand to SEQ ID NO: 291818
ugucuccaggacggauuug

SEQ ID NO: 291820 - RNA, 19 nt, Artificial Sequence
  Description of Artificial Sequence: Synthetic oligonucleotide
  Sense strand starting at position 2898 of SEQ ID NO: 3751
aggaauaccgguuauccca

SEQ ID NO: 291821 - RNA, 19 nt, Artificial Sequence
  Description of Artificial Sequence: Synthetic oligonucleotide
  Antisense strand to SEQ ID NO: 291820
ugggauaaccgguauuccu

SEQ ID NO: 291822 - RNA, 19 nt, Artificial Sequence
  Description of Artificial Sequence: Synthetic oligonucleotide
  Sense strand starting at position 2905 of SEQ ID NO: 3751
ccgguuaucccaguugugu

SEQ ID NO: 291823 - RNA, 19 nt, Artificial Sequence
  Description of Artificial Sequence: Synthetic oligonucleotide
  Antisense strand to SEQ ID NO: 291822
acacaacugggauaaccgg

SEQ ID NO: 291824 - RNA, 19 nt, Artificial Sequence
  Description of Artificial Sequence: Synthetic oligonucleotide
  Sense strand starting at position 2906 of SEQ ID NO: 3751
cgguuaucccaguuguguc

SEQ ID NO: 291825 - RNA, 19 nt, Artificial Sequence
  Description of Artificial Sequence: Synthetic oligonucleotide
  Antisense strand to SEQ ID NO: 291824
gacacaacugggauaaccg

SEQ ID NO: 291826 - RNA, 19 nt, Artificial Sequence
  Description of Artificial Sequence: Synthetic oligonucleotide
  Sense strand starting at position 2972 of SEQ ID NO: 3751
gggugaggugaaugacuaa

SEQ ID NO: 291827 - RNA, 19 nt, Artificial Sequence
  Description of Artificial Sequence: Synthetic oligonucleotide
  Antisense strand to SEQ ID NO: 291826
uuagucauucaccucaccc

SEQ ID NO: 291828 - RNA, 19 nt, Artificial Sequence
  Description of Artificial Sequence: Synthetic oligonucleotide
  Sense strand starting at position 3286 of SEQ ID NO: 3751
guggucuggugaguagaga

SEQ ID NO: 291829 - RNA, 19 nt, Artificial Sequence
  Description of Artificial Sequence: Synthetic oligonucleotide
  Antisense strand to SEQ ID NO: 291828
ucucuacucaccagaccac

SEQ ID NO: 291830 - RNA, 19 nt, Artificial Sequence
  Description of Artificial Sequence: Synthetic oligonucleotide
  Sense strand starting at position 3287 of SEQ ID NO: 3751
uggucuggugaguagagau

SEQ ID NO: 291831 - RNA, 19 nt, Artificial Sequence
  Description of Artificial Sequence: Synthetic oligonucleotide
  Antisense strand to SEQ ID NO: 291830
aucucuacucaccagacca

SEQ ID NO: 291832 - RNA, 19 nt, Artificial Sequence
  Description of Artificial Sequence: Synthetic oligonucleotide
  Sense strand starting at position 3420 of SEQ ID NO: 3751
uugcuaaccguggagaaua

SEQ ID NO: 291833 - RNA, 19 nt, Artificial Sequence
  Description of Artificial Sequence: Synthetic oligonucleotide
  Antisense strand to SEQ ID NO: 291832
uauucuccacgguuagcaa

SEQ ID NO: 291834 - RNA, 19 nt, Artificial Sequence
  Description of Artificial Sequence: Synthetic oligonucleotide
  Sense strand starting at position 3448 of SEQ ID NO: 3751
auacaugcauccuugagaa

SEQ ID NO: 291835 - RNA, 19 nt, Artificial Sequence
  Description of Artificial Sequence: Synthetic oligonucleotide
  Antisense strand to SEQ ID NO: 291834
uucucaaggaugcauguau

SEQ ID NO: 291836 - RNA, 19 nt, Artificial Sequence
  Description of Artificial Sequence: Synthetic oligonucleotide
  Sense strand starting at position 3475 of SEQ ID NO: 3751
aguauacucagaugaguga

SEQ ID NO: 291837 - RNA, 19 nt, Artificial Sequence
  Description of Artificial Sequence: Synthetic oligonucleotide
  Antisense strand to SEQ ID NO: 291836
ucacucaucugaguauacu

SEQ ID NO: 291838 - RNA, 19 nt, Artificial Sequence
  Description of Artificial Sequence: Synthetic oligonucleotide
  Sense strand starting at position 3479 of SEQ ID NO: 3751
uacucagaugagugaacua

SEQ ID NO: 291839 - RNA, 19 nt, Artificial Sequence
  Description of Artificial Sequence: Synthetic oligonucleotide
  Antisense strand to SEQ ID NO: 291838
uaguucacucaucugagua

SEQ ID NO: 291840 - RNA, 19 nt, Artificial Sequence
  Description of Artificial Sequence: Synthetic oligonucleotide
  Sense strand starting at position 3539 of SEQ ID NO: 3751
ggcgaucccuuauuagaga

SEQ ID NO: 291841 - RNA, 19 nt, Artificial Sequence
  Description of Artificial Sequence: Synthetic oligonucleotide
  Antisense strand to SEQ ID NO: 291840
ucucuaauaagggaucgcc

SEQ ID NO: 291842 - RNA, 19 nt, Artificial Sequence
  Description of Artificial Sequence: Synthetic oligonucleotide
  Sense strand starting at position 3565 of SEQ ID NO: 3751
uuugacagguccucaacaa

SEQ ID NO: 291843 - RNA, 19 nt, Artificial Sequence
  Description of Artificial Sequence: Synthetic oligonucleotide
  Antisense strand to SEQ ID NO: 291842
uuguugaggaccugucaaa

SEQ ID NO: 291844 - RNA, 19 nt, Artificial Sequence
  Description of Artificial Sequence: Synthetic oligonucleotide
  Sense strand starting at position 3604 of SEQ ID NO: 3751
uuugcacauuugucagagu

SEQ ID NO: 291845 - RNA, 19 nt, Artificial Sequence
  Description of Artificial Sequence: Synthetic oligonucleotide
  Antisense strand to SEQ ID NO: 291844
acucugacaaaugugcaaa

SEQ ID NO: 291846 - RNA, 19 nt, Artificial Sequence
  Description of Artificial Sequence: Synthetic oligonucleotide
  Sense strand starting at position 3753 of SEQ ID NO: 3751
cguagacacuguuuaagaa

SEQ ID NO: 291847 - RNA, 19 nt, Artificial Sequence
  Description of Artificial Sequence: Synthetic oligonucleotide
  Antisense strand to SEQ ID NO: 291846
uucuuaaacagugucuacg

SEQ ID NO: 291848 - RNA, 19 nt, Artificial Sequence
  Description of Artificial Sequence: Synthetic oligonucleotide
  Sense strand starting at position 3768 of SEQ ID NO: 3751
agaaguauuuguggaaaga

SEQ ID NO: 291849 - RNA, 19 nt, Artificial Sequence
  Description of Artificial Sequence: Synthetic oligonucleotide
  Antisense strand to SEQ ID NO: 291848
ucuuuccacaaauacuucu

SEQ ID NO: 291850 - RNA, 19 nt, Artificial Sequence
  Description of Artificial Sequence: Synthetic oligonucleotide
  Sense strand starting at position 3833 of SEQ ID NO: 3751
ucuccauugucaccaagga

SEQ ID NO: 291851 - RNA, 19 nt, Artificial Sequence
  Description of Artificial Sequence: Synthetic oligonucleotide
  Antisense strand to SEQ ID NO: 291850
uccuuggugacaauggaga

SEQ ID NO: 291852 - RNA, 19 nt, Artificial Sequence
  Description of Artificial Sequence: Synthetic oligonucleotide
  Sense strand starting at position 3871 of SEQ ID NO: 3751
gagagaauguuauaaagaa

SEQ ID NO: 291853 - RNA, 19 nt, Artificial Sequence
  Description of Artificial Sequence: Synthetic oligonucleotide
  Antisense strand to SEQ ID NO: 291852
uucuuuauaacauucucuc

SEQ ID NO: 291854 - RNA, 19 nt, Artificial Sequence
  Description of Artificial Sequence: Synthetic oligonucleotide
  Sense strand starting at position 208 of SEQ ID NO: 3752
acgauuccuguguauaguu

SEQ ID NO: 291855 - RNA, 19 nt, Artificial Sequence
  Description of Artificial Sequence: Synthetic oligonucleotide
  Antisense strand to SEQ ID NO: 291854
aacuauacacaggaaucgu

SEQ ID NO: 291856 - RNA, 19 nt, Artificial Sequence
  Description of Artificial Sequence: Synthetic oligonucleotide
  Sense strand starting at position 228 of SEQ ID NO: 3752
ccgucucucauccagggaa

SEQ ID NO: 291857 - RNA, 19 nt, Artificial Sequence
  Description of Artificial Sequence: Synthetic oligonucleotide
  Antisense strand to SEQ ID NO: 291856
uucccuggaugagagacgg

SEQ ID NO: 291858 - RNA, 19 nt, Artificial Sequence
  Description of Artificial Sequence: Synthetic oligonucleotide
  Sense strand starting at position 230 of SEQ ID NO: 3752
gucucucauccagggaaga

SEQ ID NO: 291859 - RNA, 19 nt, Artificial Sequence
  Description of Artificial Sequence: Synthetic oligonucleotide
  Antisense strand to SEQ ID NO: 291858
ucuucccuggaugagagac

SEQ ID NO: 291860 - RNA, 19 nt, Artificial Sequence
  Description of Artificial Sequence: Synthetic oligonucleotide
  Sense strand starting at position 244 of SEQ ID NO: 3752
gaagaagaguucccuggua

SEQ ID NO: 291861 - RNA, 19 nt, Artificial Sequence
  Description of Artificial Sequence: Synthetic oligonucleotide
  Antisense strand to SEQ ID NO: 291860
uaccagggaacucuucuuc

SEQ ID NO: 291862 - RNA, 19 nt, Artificial Sequence
  Description of Artificial Sequence: Synthetic oligonucleotide
  Sense strand starting at position 246 of SEQ ID NO: 3752
agaagaguucccugguauu

SEQ ID NO: 291863 - RNA, 19 nt, Artificial Sequence
  Description of Artificial Sequence: Synthetic oligonucleotide
  Antisense strand to SEQ ID NO: 291862
aauaccagggaacucuucu

SEQ ID NO: 291864 - RNA, 19 nt, Artificial Sequence
  Description of Artificial Sequence: Synthetic oligonucleotide
  Sense strand starting at position 486 of SEQ ID NO: 3752
gacucuauucuugguggua

SEQ ID NO: 291865 - RNA, 19 nt, Artificial Sequence
  Description of Artificial Sequence: Synthetic oligonucleotide
  Antisense strand to SEQ ID NO: 291864
uaccaccaagaauagaguc

SEQ ID NO: 291866 - RNA, 19 nt, Artificial Sequence
  Description of Artificial Sequence: Synthetic oligonucleotide
  Sense strand starting at position 487 of SEQ ID NO: 3752
acucuauucuuggugguaa

SEQ ID NO: 291867 - RNA, 19 nt, Artificial Sequence
  Description of Artificial Sequence: Synthetic oligonucleotide
  Antisense strand to SEQ ID NO: 291866
uuaccaccaagaauagagu

SEQ ID NO: 291868 - RNA, 19 nt, Artificial Sequence
  Description of Artificial Sequence: Synthetic oligonucleotide
  Sense strand starting at position 489 of SEQ ID NO: 3752
ucuauucuuggugguaacu

SEQ ID NO: 291869 - RNA, 19 nt, Artificial Sequence
  Description of Artificial Sequence: Synthetic oligonucleotide
  Antisense strand to SEQ ID NO: 291868
aguuaccaccaagaauaga

SEQ ID NO: 291870 - RNA, 19 nt, Artificial Sequence
  Description of Artificial Sequence: Synthetic oligonucleotide
  Sense strand starting at position 661 of SEQ ID NO: 3752
aauacuguggcccagaauu

SEQ ID NO: 291871 - RNA, 19 nt, Artificial Sequence
  Description of Artificial Sequence: Synthetic oligonucleotide
  Antisense strand to SEQ ID NO: 291870
aauucugggccacaguauu

SEQ ID NO: 291872 - RNA, 19 nt, Artificial Sequence
  Description of Artificial Sequence: Synthetic oligonucleotide
  Sense strand starting at position 845 of SEQ ID NO: 3752
ugugguagcacugauagau

SEQ ID NO: 291873 - RNA, 19 nt, Artificial Sequence
  Description of Artificial Sequence: Synthetic oligonucleotide
  Antisense strand to SEQ ID NO: 291872
aucuaucagugcuaccaca

SEQ ID NO: 291874 - RNA, 19 nt, Artificial Sequence
  Description of Artificial Sequence: Synthetic oligonucleotide
  Sense strand starting at position 857 of SEQ ID NO: 3752
gauagauggcuggaagcua

SEQ ID NO: 291875 - RNA, 19 nt, Artificial Sequence
  Description of Artificial Sequence: Synthetic oligonucleotide
  Antisense strand to SEQ ID NO: 291874
uagcuuccagccaucuauc

SEQ ID NO: 291876 - RNA, 19 nt, Artificial Sequence
  Description of Artificial Sequence: Synthetic oligonucleotide
  Sense strand starting at position 965 of SEQ ID NO: 3752
aaagauguugccugaagau

SEQ ID NO: 291877 - RNA, 19 nt, Artificial Sequence
  Description of Artificial Sequence: Synthetic oligonucleotide
  Antisense strand to SEQ ID NO: 291876
aucuucaggcaacaucuuu

SEQ ID NO: 291878 - RNA, 19 nt, Artificial Sequence
  Description of Artificial Sequence: Synthetic oligonucleotide
  Sense strand starting at position 974 of SEQ ID NO: 3752
gccugaagaucuccaaagu

SEQ ID NO: 291879 - RNA, 19 nt, Artificial Sequence
  Description of Artificial Sequence: Synthetic oligonucleotide
  Antisense strand to SEQ ID NO: 291878
acuuuggagaucuucaggc

SEQ ID NO: 291880 - RNA, 19 nt, Artificial Sequence
  Description of Artificial Sequence: Synthetic oligonucleotide
  Sense strand starting at position 1082 of SEQ ID NO: 3752
gagguaaacagaugggcua

SEQ ID NO: 291881 - RNA, 19 nt, Artificial Sequence
  Description of Artificial Sequence: Synthetic oligonucleotide
  Antisense strand to SEQ ID NO: 291880
uagcccaucuguuuaccuc

SEQ ID NO: 291882 - RNA, 19 nt, Artificial Sequence
  Description of Artificial Sequence: Synthetic oligonucleotide
  Sense strand starting at position 1084 of SEQ ID NO: 3752
gguaaacagaugggcuauu

SEQ ID NO: 291883 - RNA, 19 nt, Artificial Sequence
  Description of Artificial Sequence: Synthetic oligonucleotide
  Antisense strand to SEQ ID NO: 291882
aauagcccaucuguuuacc

SEQ ID NO: 291884 - RNA, 19 nt, Artificial Sequence
  Description of Artificial Sequence: Synthetic oligonucleotide
  Sense strand starting at position 1085 of SEQ ID NO: 3752
guaaacagaugggcuauua

SEQ ID NO: 291885 - RNA, 19 nt, Artificial Sequence
  Description of Artificial Sequence: Synthetic oligonucleotide
  Antisense strand to SEQ ID NO: 291884
uaauagcccaucuguuuac

SEQ ID NO: 291886 - RNA, 19 nt, Artificial Sequence
  Description of Artificial Sequence: Synthetic oligonucleotide
  Sense strand starting at position 1198 of SEQ ID NO: 3752
acauuugccuuugagaaag

SEQ ID NO: 291887 - RNA, 19 nt, Artificial Sequence
  Description of Artificial Sequence: Synthetic oligonucleotide
  Antisense strand to SEQ ID NO: 291886
cuuucucaaaggcaaaugu

SEQ ID NO: 291888 - RNA, 19 nt, Artificial Sequence
  Description of Artificial Sequence: Synthetic oligonucleotide
  Sense strand starting at position 1289 of SEQ ID NO: 3752
cugguuucuguagagacua

SEQ ID NO: 291889 - RNA, 19 nt, Artificial Sequence
  Description of Artificial Sequence: Synthetic oligonucleotide
  Antisense strand to SEQ ID NO: 291888
uagucucuacagaaaccag

SEQ ID NO: 291890 - RNA, 19 nt, Artificial Sequence
  Description of Artificial Sequence: Synthetic oligonucleotide
  Sense strand starting at position 1736 of SEQ ID NO: 3752
cgguuaaucuaugugauag

SEQ ID NO: 291891 - RNA, 19 nt, Artificial Sequence
  Description of Artificial Sequence: Synthetic oligonucleotide
  Antisense strand to SEQ ID NO: 291890
cuaucacauagauuaaccg

SEQ ID NO: 291892 - RNA, 19 nt, Artificial Sequence
  Description of Artificial Sequence: Synthetic oligonucleotide
  Sense strand starting at position 1737 of SEQ ID NO: 3752
gguuaaucuaugugauagc

SEQ ID NO: 291893 - RNA, 19 nt, Artificial Sequence
  Description of Artificial Sequence: Synthetic oligonucleotide
  Antisense strand to SEQ ID NO: 291892
gcuaucacauagauuaacc

SEQ ID NO: 291894 - RNA, 19 nt, Artificial Sequence
  Description of Artificial Sequence: Synthetic oligonucleotide
  Sense strand starting at position 1754 of SEQ ID NO: 3752
gcagguugucucuuaccgu

SEQ ID NO: 291895 - RNA, 19 nt, Artificial Sequence
  Description of Artificial Sequence: Synthetic oligonucleotide
  Antisense strand to SEQ ID NO: 291894
acgguaagagacaaccugc

SEQ ID NO: 291896 - RNA, 19 nt, Artificial Sequence
  Description of Artificial Sequence: Synthetic oligonucleotide
  Sense strand starting at position 2337 of SEQ ID NO: 3752
cuuagugaggcugaacuau

SEQ ID NO: 291897 - RNA, 19 nt, Artificial Sequence
  Description of Artificial Sequence: Synthetic oligonucleotide
  Antisense strand to SEQ ID NO: 291896
auaguucagccucacuaag

SEQ ID NO: 291898 - RNA, 19 nt, Artificial Sequence
  Description of Artificial Sequence: Synthetic oligonucleotide
  Sense strand starting at position 2381 of SEQ ID NO: 3752
gcauuuaagucacuguuga

SEQ ID NO: 291899 - RNA, 19 nt, Artificial Sequence
  Description of Artificial Sequence: Synthetic oligonucleotide
  Antisense strand to SEQ ID NO: 291898
ucaacagugacuuaaaugc

SEQ ID NO: 291900 - RNA, 19 nt, Artificial Sequence
  Description of Artificial Sequence: Synthetic oligonucleotide
  Sense strand starting at position 2392 of SEQ ID NO: 3752
acuguugacucaguaagga

SEQ ID NO: 291901 - RNA, 19 nt, Artificial Sequence
  Description of Artificial Sequence: Synthetic oligonucleotide
  Antisense strand to SEQ ID NO: 291900
uccuuacugagucaacagu

SEQ ID NO: 291902 - RNA, 19 nt, Artificial Sequence
  Description of Artificial Sequence: Synthetic oligonucleotide
  Sense strand starting at position 2414 of SEQ ID NO: 3752
gacagauauuugcaguauu

SEQ ID NO: 291903 - RNA, 19 nt, Artificial Sequence
  Description of Artificial Sequence: Synthetic oligonucleotide
  Antisense strand to SEQ ID NO: 291902
aauacugcaaauaucuguc

SEQ ID NO: 291904 - RNA, 19 nt, Artificial Sequence
  Description of Artificial Sequence: Synthetic oligonucleotide
  Sense strand starting at position 2690 of SEQ ID NO: 3752
gaaguaguuggugaggauc

SEQ ID NO: 291905 - RNA, 19 nt, Artificial Sequence
  Description of Artificial Sequence: Synthetic oligonucleotide
  Antisense strand to SEQ ID NO: 291904
gauccucaccaacuacuuc

SEQ ID NO: 291906 - RNA, 19 nt, Artificial Sequence
  Description of Artificial Sequence: Synthetic oligonucleotide
  Sense strand starting at position 2762 of SEQ ID NO: 3752
aguaaugaagcccauauau

SEQ ID NO: 291907 - RNA, 19 nt, Artificial Sequence
  Description of Artificial Sequence: Synthetic oligonucleotide
  Antisense strand to SEQ ID NO: 291906
auauaugggcuucauuacu

SEQ ID NO: 291908 - RNA, 19 nt, Artificial Sequence
  Description of Artificial Sequence: Synthetic oligonucleotide
  Sense strand starting at position 2799 of SEQ ID NO: 3752
guguauggagguuacaaau

SEQ ID NO: 291909 - RNA, 19 nt, Artificial Sequence
  Description of Artificial Sequence: Synthetic oligonucleotide
  Antisense strand to SEQ ID NO: 291908
auuuguaaccuccauacac

SEQ ID NO: 291910 - RNA, 19 nt, Artificial Sequence
  Description of Artificial Sequence: Synthetic oligonucleotide
  Sense strand starting at position 2916 of SEQ ID NO: 3752
cuuuaauaagcaggaauga

SEQ ID NO: 291911 - RNA, 19 nt, Artificial Sequence
  Description of Artificial Sequence: Synthetic oligonucleotide
  Antisense strand to SEQ ID NO: 291910
ucauuccugcuuauuaaag

SEQ ID NO: 291912 - RNA, 19 nt, Artificial Sequence
  Description of Artificial Sequence: Synthetic oligonucleotide
  Sense strand starting at position 2975 of SEQ ID NO: 3752
augcucauugcagguagaa

SEQ ID NO: 291913 - RNA, 19 nt, Artificial Sequence
  Description of Artificial Sequence: Synthetic oligonucleotide
  Antisense strand to SEQ ID NO: 291912
uucuaccugcaaugagcau

SEQ ID NO: 291914 - RNA, 19 nt, Artificial Sequence
  Description of Artificial Sequence: Synthetic oligonucleotide
  Sense strand starting at position 2977 of SEQ ID NO: 3752
gcucauugcagguagaauu

SEQ ID NO: 291915 - RNA, 19 nt, Artificial Sequence
  Description of Artificial Sequence: Synthetic oligonucleotide
  Antisense strand to SEQ ID NO: 291914
aauucuaccugcaaugagc

SEQ ID NO: 291916 - RNA, 19 nt, Artificial Sequence
  Description of Artificial Sequence: Synthetic oligonucleotide
  Sense strand starting at position 2985 of SEQ ID NO: 3752
cagguagaauuaucgauaa

SEQ ID NO: 291917 - RNA, 19 nt, Artificial Sequence
  Description of Artificial Sequence: Synthetic oligonucleotide
  Antisense strand to SEQ ID NO: 291916
uuaucgauaauucuaccug

SEQ ID NO: 291918 - RNA, 19 nt, Artificial Sequence
  Description of Artificial Sequence: Synthetic oligonucleotide
  Sense strand starting at position 3120 of SEQ ID NO: 3752
auagcauacugaguugaua

SEQ ID NO: 291919 - RNA, 19 nt, Artificial Sequence
  Description of Artificial Sequence: Synthetic oligonucleotide
  Antisense strand to SEQ ID NO: 291918
uaucaacucaguaugcuau

SEQ ID NO: 291920 - RNA, 19 nt, Artificial Sequence
  Description of Artificial Sequence: Synthetic oligonucleotide
  Sense strand starting at position 3131 of SEQ ID NO: 3752
aguugauaccaaggguuua

SEQ ID NO: 291921 - RNA, 19 nt, Artificial Sequence
  Description of Artificial Sequence: Synthetic oligonucleotide
  Antisense strand to SEQ ID NO: 291920
uaaacccuugguaucaacu

SEQ ID NO: 291922 - RNA, 19 nt, Artificial Sequence
  Description of Artificial Sequence: Synthetic oligonucleotide
  Sense strand starting at position 3132 of SEQ ID NO: 3752
guugauaccaaggguuuaa

SEQ ID NO: 291923 - RNA, 19 nt, Artificial Sequence
  Description of Artificial Sequence: Synthetic oligonucleotide
  Antisense strand to SEQ ID NO: 291922
uuaaacccuugguaucaac

SEQ ID NO: 291924 - RNA, 19 nt, Artificial Sequence
  Description of Artificial Sequence: Synthetic oligonucleotide
  Sense strand starting at position 3159 of SEQ ID NO: 3752
auaucugacugggaauuua

SEQ ID NO: 291925 - RNA, 19 nt, Artificial Sequence
  Description of Artificial Sequence: Synthetic oligonucleotide
  Antisense strand to SEQ ID NO: 291924
uaaauucccagucagauau

SEQ ID NO: 291926 - RNA, 19 nt, Artificial Sequence
  Description of Artificial Sequence: Synthetic oligonucleotide
  Sense strand starting at position 3167 of SEQ ID NO: 3752
cugggaauuuacugauauu

SEQ ID NO: 291927 - RNA, 19 nt, Artificial Sequence
  Description of Artificial Sequence: Synthetic oligonucleotide
  Antisense strand to SEQ ID NO: 291926
aauaucaguaaauucccag

SEQ ID NO: 291928 - RNA, 19 nt, Artificial Sequence
  Description of Artificial Sequence: Synthetic oligonucleotide
  Sense strand starting at position 3311 of SEQ ID NO: 3752
uuucuaucccauugagaag

SEQ ID NO: 291929 - RNA, 19 nt, Artificial Sequence
  Description of Artificial Sequence: Synthetic oligonucleotide
  Antisense strand to SEQ ID NO: 291928
cuucucaaugggauagaaa

SEQ ID NO: 291930 - RNA, 19 nt, Artificial Sequence
  Description of Artificial Sequence: Synthetic oligonucleotide
  Sense strand starting at position 3320 of SEQ ID NO: 3752
cauugagaagccuauguug

SEQ ID NO: 291931 - RNA, 19 nt, Artificial Sequence
  Description of Artificial Sequence: Synthetic oligonucleotide
  Antisense strand to SEQ ID NO: 291930
caacauaggcuucucaaug

SEQ ID NO: 291932 - RNA, 19 nt, Artificial Sequence
  Description of Artificial Sequence: Synthetic oligonucleotide
  Sense strand starting at position 3960 of SEQ ID NO: 3752
auuaccugccuuggagauu

SEQ ID NO: 291933 - RNA, 19 nt, Artificial Sequence
  Description of Artificial Sequence: Synthetic oligonucleotide
  Antisense strand to SEQ ID NO: 291932
aaucuccaaggcagguaau

SEQ ID NO: 291934 - RNA, 19 nt, Artificial Sequence
  Description of Artificial Sequence: Synthetic oligonucleotide
  Sense strand starting at position 6 of SEQ ID NO: 3753
acaguaaagucagugaauc

SEQ ID NO: 291935 - RNA, 19 nt, Artificial Sequence
  Description of Artificial Sequence: Synthetic oligonucleotide
  Antisense strand to SEQ ID NO: 291934
gauucacugacuuuacugu

SEQ ID NO: 291936 - RNA, 19 nt, Artificial Sequence
  Description of Artificial Sequence: Synthetic oligonucleotide
  Sense strand starting at position 698 of SEQ ID NO: 3753
uuuagaguucgggauugug

SEQ ID NO: 291937 - RNA, 19 nt, Artificial Sequence
  Description of Artificial Sequence: Synthetic oligonucleotide
  Antisense strand to SEQ ID NO: 291936
cacaaucccgaacucuaaa

SEQ ID NO: 291938 - RNA, 19 nt, Artificial Sequence
  Description of Artificial Sequence: Synthetic oligonucleotide
  Sense strand starting at position 701 of SEQ ID NO: 3753
agaguucgggauugugaac

SEQ ID NO: 291939 - RNA, 19 nt, Artificial Sequence
  Description of Artificial Sequence: Synthetic oligonucleotide
  Antisense strand to SEQ ID NO: 291938
guucacaaucccgaacucu

SEQ ID NO: 291940 - RNA, 19 nt, Artificial Sequence
  Description of Artificial Sequence: Synthetic oligonucleotide
  Sense strand starting at position 707 of SEQ ID NO: 3753
cgggauugugaacaugacu

SEQ ID NO: 291941 - RNA, 19 nt, Artificial Sequence
  Description of Artificial Sequence: Synthetic oligonucleotide
  Antisense strand to SEQ ID NO: 291940
agucauguucacaaucccg

SEQ ID NO: 291942 - RNA, 19 nt, Artificial Sequence
  Description of Artificial Sequence: Synthetic oligonucleotide
  Sense strand starting at position 730 of SEQ ID NO: 3753
gaaauauagcaauguguac

SEQ ID NO: 291943 - RNA, 19 nt, Artificial Sequence
  Description of Artificial Sequence: Synthetic oligonucleotide
  Antisense strand to SEQ ID NO: 291942
guacacauugcuauauuuc

SEQ ID NO: 291944 - RNA, 19 nt, Artificial Sequence
  Description of Artificial Sequence: Synthetic oligonucleotide
  Sense strand starting at position 790 of SEQ ID NO: 3753
ucguaaucgcugaguggga

SEQ ID NO: 291945 - RNA, 19 nt, Artificial Sequence
  Description of Artificial Sequence: Synthetic oligonucleotide
  Antisense strand to SEQ ID NO: 291944
ucccacucagcgauuacga

SEQ ID NO: 291946 - RNA, 19 nt, Artificial Sequence
  Description of Artificial Sequence: Synthetic oligonucleotide
  Sense strand starting at position 805 of SEQ ID NO: 3753
gggagauucuucuuccuca

SEQ ID NO: 291947 - RNA, 19 nt, Artificial Sequence
  Description of Artificial Sequence: Synthetic oligonucleotide
  Antisense strand to SEQ ID NO: 291946
ugaggaagaagaaucuccc

SEQ ID NO: 291948 - RNA, 19 nt, Artificial Sequence
  Description of Artificial Sequence: Synthetic oligonucleotide
  Sense strand starting at position 2217 of SEQ ID NO: 3753
cagaauaguuaagugguua

SEQ ID NO: 291949 - RNA, 19 nt, Artificial Sequence
  Description of Artificial Sequence: Synthetic oligonucleotide
  Antisense strand to SEQ ID NO: 291948
uaaccacuuaacuauucug

SEQ ID NO: 291950 - RNA, 19 nt, Artificial Sequence
  Description of Artificial Sequence: Synthetic oligonucleotide
  Sense strand starting at position 2218 of SEQ ID NO: 3753
agaauaguuaagugguuaa

SEQ ID NO: 291951 - RNA, 19 nt, Artificial Sequence
  Description of Artificial Sequence: Synthetic oligonucleotide
  Antisense strand to SEQ ID NO: 291950
uuaaccacuuaacuauucu

SEQ ID NO: 291952 - RNA, 19 nt, Artificial Sequence
  Description of Artificial Sequence: Synthetic oligonucleotide
  Sense strand starting at position 2221 of SEQ ID NO: 3753
auaguuaagugguuaagag

SEQ ID NO: 291953 - RNA, 19 nt, Artificial Sequence
  Description of Artificial Sequence: Synthetic oligonucleotide
  Antisense strand to SEQ ID NO: 291952
cucuuaaccacuuaacuau

SEQ ID NO: 291954 - RNA, 19 nt, Artificial Sequence
  Description of Artificial Sequence: Synthetic oligonucleotide
  Sense strand starting at position 2222 of SEQ ID NO: 3753
uaguuaagugguuaagaga

SEQ ID NO: 291955 - RNA, 19 nt, Artificial Sequence
  Description of Artificial Sequence: Synthetic oligonucleotide
  Antisense strand to SEQ ID NO: 291954
ucucuuaaccacuuaacua

SEQ ID NO: 291956 - RNA, 19 nt, Artificial Sequence
  Description of Artificial Sequence: Synthetic oligonucleotide
  Sense strand starting at position 2327 of SEQ ID NO: 3753
gggauaagauuauuagccu

SEQ ID NO: 291957 - RNA, 19 nt, Artificial Sequence
  Description of Artificial Sequence: Synthetic oligonucleotide
  Antisense strand to SEQ ID NO: 291956
aggcuaauaaucuuauccc

SEQ ID NO: 291958 - RNA, 19 nt, Artificial Sequence
  Description of Artificial Sequence: Synthetic oligonucleotide
  Sense strand starting at position 2693 of SEQ ID NO: 3753
aaaggugaagucuggcaua

SEQ ID NO: 291959 - RNA, 19 nt, Artificial Sequence
  Description of Artificial Sequence: Synthetic oligonucleotide
  Antisense strand to SEQ ID NO: 291958
uaugccagacuucaccuuu

SEQ ID NO: 291960 - RNA, 19 nt, Artificial Sequence
  Description of Artificial Sequence: Synthetic oligonucleotide
  Sense strand starting at position 2698 of SEQ ID NO: 3753
ugaagucuggcauauagua

SEQ ID NO: 291961 - RNA, 19 nt, Artificial Sequence
  Description of Artificial Sequence: Synthetic oligonucleotide
  Antisense strand to SEQ ID NO: 291960
uacuauaugccagacuuca

SEQ ID NO: 291962 - RNA, 19 nt, Artificial Sequence
  Description of Artificial Sequence: Synthetic oligonucleotide
  Sense strand starting at position 2733 of SEQ ID NO: 3753
cagauauuucugugugccu

SEQ ID NO: 291963 - RNA, 19 nt, Artificial Sequence
  Description of Artificial Sequence: Synthetic oligonucleotide
  Antisense strand to SEQ ID NO: 291962
aggcacacagaaauaucug

SEQ ID NO: 291964 - RNA, 19 nt, Artificial Sequence
  Description of Artificial Sequence: Synthetic oligonucleotide
  Sense strand starting at position 2798 of SEQ ID NO: 3753
aaucuauugcgauaaguac

SEQ ID NO: 291965 - RNA, 19 nt, Artificial Sequence
  Description of Artificial Sequence: Synthetic oligonucleotide
  Antisense strand to SEQ ID NO: 291964
guacuuaucgcaauagauu

SEQ ID NO: 291966 - RNA, 19 nt, Artificial Sequence
  Description of Artificial Sequence: Synthetic oligonucleotide
  Sense strand starting at position 2831 of SEQ ID NO: 3753
ggauaacugcugugacaua

SEQ ID NO: 291967 - RNA, 19 nt, Artificial Sequence
  Description of Artificial Sequence: Synthetic oligonucleotide
  Antisense strand to SEQ ID NO: 291966
uaugucacagcaguuaucc

SEQ ID NO: 291968 - RNA, 19 nt, Artificial Sequence
  Description of Artificial Sequence: Synthetic oligonucleotide
  Sense strand starting at position 2842 of SEQ ID NO: 3753
gugacauagacuugcaaag

SEQ ID NO: 291969 - RNA, 19 nt, Artificial Sequence
  Description of Artificial Sequence: Synthetic oligonucleotide
  Antisense strand to SEQ ID NO: 291968
cuuugcaagucuaugucac

SEQ ID NO: 291970 - RNA, 19 nt, Artificial Sequence
  Description of Artificial Sequence: Synthetic oligonucleotide
  Sense strand starting at position 2880 of SEQ ID NO: 3753
gggagaugcacuggugaag

SEQ ID NO: 291971 - RNA, 19 nt, Artificial Sequence
  Description of Artificial Sequence: Synthetic oligonucleotide
  Antisense strand to SEQ ID NO: 291970
cuucaccagugcaucuccc

SEQ ID NO: 291972 - RNA, 19 nt, Artificial Sequence
  Description of Artificial Sequence: Synthetic oligonucleotide
  Sense strand starting at position 2912 of SEQ ID NO: 3753
ggacuuaugcuguacuuaa

SEQ ID NO: 291973 - RNA, 19 nt, Artificial Sequence
  Description of Artificial Sequence: Synthetic oligonucleotide
  Antisense strand to SEQ ID NO: 291972
uuaaguacagcauaagucc

SEQ ID NO: 291974 - RNA, 19 nt, Artificial Sequence
  Description of Artificial Sequence: Synthetic oligonucleotide
  Sense strand starting at position 2996 of SEQ ID NO: 3753
gaaagugucaauuguggaa

SEQ ID NO: 291975 - RNA, 19 nt, Artificial Sequence
  Description of Artificial Sequence: Synthetic oligonucleotide
  Antisense strand to SEQ ID NO: 291974
uuccacaauugacacuuuc

SEQ ID NO: 291976 - RNA, 19 nt, Artificial Sequence
  Description of Artificial Sequence: Synthetic oligonucleotide
  Sense strand starting at position 3000 of SEQ ID NO: 3753
gugucaauuguggaaaugu

SEQ ID NO: 291977 - RNA, 19 nt, Artificial Sequence
  Description of Artificial Sequence: Synthetic oligonucleotide
  Antisense strand to SEQ ID NO: 291976
acauuuccacaauugacac

SEQ ID NO: 291978 - RNA, 19 nt, Artificial Sequence
  Description of Artificial Sequence: Synthetic oligonucleotide
  Sense strand starting at position 3008 of SEQ ID NO: 3753
uguggaaauguacagcauu

SEQ ID NO: 291979 - RNA, 19 nt, Artificial Sequence
  Description of Artificial Sequence: Synthetic oligonucleotide
  Antisense strand to SEQ ID NO: 291978
aaugcuguacauuuccaca

SEQ ID NO: 291980 - RNA, 19 nt, Artificial Sequence
  Description of Artificial Sequence: Synthetic oligonucleotide
  Sense strand starting at position 3016 of SEQ ID NO: 3753
uguacagcauucucaagaa

SEQ ID NO: 291981 - RNA, 19 nt, Artificial Sequence
  Description of Artificial Sequence: Synthetic oligonucleotide
  Antisense strand to SEQ ID NO: 291980
uucuugagaaugcuguaca

SEQ ID NO: 291982 - RNA, 19 nt, Artificial Sequence
  Description of Artificial Sequence: Synthetic oligonucleotide
  Sense strand starting at position 3028 of SEQ ID NO: 3753
ucaagaaacugaguaguau

SEQ ID NO: 291983 - RNA, 19 nt, Artificial Sequence
  Description of Artificial Sequence: Synthetic oligonucleotide
  Antisense strand to SEQ ID NO: 291982
auacuacucaguuucuuga

SEQ ID NO: 291984 - RNA, 19 nt, Artificial Sequence
  Description of Artificial Sequence: Synthetic oligonucleotide
  Sense strand starting at position 3034 of SEQ ID NO: 3753
aacugaguaguauaauguu

SEQ ID NO: 291985 - RNA, 19 nt, Artificial Sequence
  Description of Artificial Sequence: Synthetic oligonucleotide
  Antisense strand to SEQ ID NO: 291984
aacauuauacuacucaguu

SEQ ID NO: 291986 - RNA, 19 nt, Artificial Sequence
  Description of Artificial Sequence: Synthetic oligonucleotide
  Sense strand starting at position 3042 of SEQ ID NO: 3753
aguauaauguuguuagaac

SEQ ID NO: 291987 - RNA, 19 nt, Artificial Sequence
  Description of Artificial Sequence: Synthetic oligonucleotide
  Antisense strand to SEQ ID NO: 291986
guucuaacaacauuauacu

SEQ ID NO: 291988 - RNA, 19 nt, Artificial Sequence
  Description of Artificial Sequence: Synthetic oligonucleotide
  Sense strand starting at position 3212 of SEQ ID NO: 3753
gucuuugaccgacacagaa

SEQ ID NO: 291989 - RNA, 19 nt, Artificial Sequence
  Description of Artificial Sequence: Synthetic oligonucleotide
  Antisense strand to SEQ ID NO: 291988
uucugugucggucaaagac

SEQ ID NO: 291990 - RNA, 19 nt, Artificial Sequence
  Description of Artificial Sequence: Synthetic oligonucleotide
  Sense strand starting at position 3242 of SEQ ID NO: 3753
ugauaaauguuuguugaac

SEQ ID NO: 291991 - RNA, 19 nt, Artificial Sequence
  Description of Artificial Sequence: Synthetic oligonucleotide
  Antisense strand to SEQ ID NO: 291990
guucaacaaacauuuauca

SEQ ID NO: 291992 - RNA, 19 nt, Artificial Sequence
  Description of Artificial Sequence: Synthetic oligonucleotide
  Sense strand starting at position 3243 of SEQ ID NO: 3753
gauaaauguuuguugaacu

SEQ ID NO: 291993 - RNA, 19 nt, Artificial Sequence
  Description of Artificial Sequence: Synthetic oligonucleotide
  Antisense strand to SEQ ID NO: 291992
aguucaacaaacauuuauc

SEQ ID NO: 291994 - RNA, 19 nt, Artificial Sequence
  Description of Artificial Sequence: Synthetic oligonucleotide
  Sense strand starting at position 3250 of SEQ ID NO: 3753
guuuguugaacuugaagag

SEQ ID NO: 291995 - RNA, 19 nt, Artificial Sequence
  Description of Artificial Sequence: Synthetic oligonucleotide
  Antisense strand to SEQ ID NO: 291994
cucuucaaguucaacaaac

SEQ ID NO: 291996 - RNA, 19 nt, Artificial Sequence
  Description of Artificial Sequence: Synthetic oligonucleotide
  Sense strand starting at position 3286 of SEQ ID NO: 3753
cugcaaaggugaguugaaa

SEQ ID NO: 291997 - RNA, 19 nt, Artificial Sequence
  Description of Artificial Sequence: Synthetic oligonucleotide
  Antisense strand to SEQ ID NO: 291996
uuucaacucaccuuugcag

SEQ ID NO: 291998 - RNA, 19 nt, Artificial Sequence
  Description of Artificial Sequence: Synthetic oligonucleotide
  Sense strand starting at position 3299 of SEQ ID NO: 3753
uugaaaccagauugugaau

SEQ ID NO: 291999 - RNA, 19 nt, Artificial Sequence
  Description of Artificial Sequence: Synthetic oligonucleotide
  Antisense strand to SEQ ID NO: 291998
auucacaaucugguuucaa

SEQ ID NO: 292000 - RNA, 19 nt, Artificial Sequence
  Description of Artificial Sequence: Synthetic oligonucleotide
  Sense strand starting at position 3461 of SEQ ID NO: 3753
guuagaaggcagcagaaau

SEQ ID NO: 292001 - RNA, 19 nt, Artificial Sequence
  Description of Artificial Sequence: Synthetic oligonucleotide
  Antisense strand to SEQ ID NO: 292000
auuucugcugccuucuaac

SEQ ID NO: 292002 - RNA, 19 nt, Artificial Sequence
  Description of Artificial Sequence: Synthetic oligonucleotide
  Sense strand starting at position 3675 of SEQ ID NO: 3753
aggauugagcgugauggua

SEQ ID NO: 292003 - RNA, 19 nt, Artificial Sequence
  Description of Artificial Sequence: Synthetic oligonucleotide
  Antisense strand to SEQ ID NO: 292002
uaccaucacgcucaauccu

SEQ ID NO: 292004 - RNA, 19 nt, Artificial Sequence
  Description of Artificial Sequence: Synthetic oligonucleotide
  Sense strand starting at position 3697 of SEQ ID NO: 3753
cugguaaugaguuagugag

SEQ ID NO: 292005 - RNA, 19 nt, Artificial Sequence
  Description of Artificial Sequence: Synthetic oligonucleotide
  Antisense strand to SEQ ID NO: 292004
cucacuaacucauuaccag

SEQ ID NO: 292006 - RNA, 19 nt, Artificial Sequence
  Description of Artificial Sequence: Synthetic oligonucleotide
  Sense strand starting at position 3703 of SEQ ID NO: 3753
augaguuagugagugagau

SEQ ID NO: 292007 - RNA, 19 nt, Artificial Sequence
  Description of Artificial Sequence: Synthetic oligonucleotide
  Antisense strand to SEQ ID NO: 292006
aucucacucacuaacucau

SEQ ID NO: 292008 - RNA, 19 nt, Artificial Sequence
  Description of Artificial Sequence: Synthetic oligonucleotide
  Sense strand starting at position 3704 of SEQ ID NO: 3753
ugaguuagugagugagaug

SEQ ID NO: 292009 - RNA, 19 nt, Artificial Sequence
  Description of Artificial Sequence: Synthetic oligonucleotide
  Antisense strand to SEQ ID NO: 292008
caucucacucacuaacuca

SEQ ID NO: 292010 - RNA, 19 nt, Artificial Sequence
  Description of Artificial Sequence: Synthetic oligonucleotide
  Sense strand starting at position 3812 of SEQ ID NO: 3753
auugucauaguaugacaau

SEQ ID NO: 292011 - RNA, 19 nt, Artificial Sequence
  Description of Artificial Sequence: Synthetic oligonucleotide
  Antisense strand to SEQ ID NO: 292010
auugucauacuaugacaau

SEQ ID NO: 292012 - RNA, 19 nt, Artificial Sequence
  Description of Artificial Sequence: Synthetic oligonucleotide
  Sense strand starting at position 3954 of SEQ ID NO: 3753
cuggcuagaccucguauuu

SEQ ID NO: 292013 - RNA, 19 nt, Artificial Sequence
  Description of Artificial Sequence: Synthetic oligonucleotide
  Antisense strand to SEQ ID NO: 292012
aaauacgaggucuagccag

SEQ ID NO: 292014 - RNA, 19 nt, Artificial Sequence
  Description of Artificial Sequence: Synthetic oligonucleotide
  Sense strand starting at position 572 of SEQ ID NO: 3754
ccacgugccugucauugau

SEQ ID NO: 292015 - RNA, 19 nt, Artificial Sequence
  Description of Artificial Sequence: Synthetic oligonucleotide
  Antisense strand to SEQ ID NO: 292014
aucaaugacaggcacgugg

SEQ ID NO: 292016 - RNA, 19 nt, Artificial Sequence
  Description of Artificial Sequence: Synthetic oligonucleotide
  Sense strand starting at position 574 of SEQ ID NO: 3754
acgugccugucauugauga

SEQ ID NO: 292017 - RNA, 19 nt, Artificial Sequence
  Description of Artificial Sequence: Synthetic oligonucleotide
  Antisense strand to SEQ ID NO: 292016
ucaucaaugacaggcacgu

SEQ ID NO: 292018 - RNA, 19 nt, Artificial Sequence
  Description of Artificial Sequence: Synthetic oligonucleotide
  Sense strand starting at position 578 of SEQ ID NO: 3754
gccugucauugaugagguc

SEQ ID NO: 292019 - RNA, 19 nt, Artificial Sequence
  Description of Artificial Sequence: Synthetic oligonucleotide
  Antisense strand to SEQ ID NO: 292018
gaccucaucaaugacaggc

SEQ ID NO: 292020 - RNA, 19 nt, Artificial Sequence
  Description of Artificial Sequence: Synthetic oligonucleotide
  Sense strand starting at position 934 of SEQ ID NO: 3754
cggugaugguggcgaugaa

SEQ ID NO: 292021 - RNA, 19 nt, Artificial Sequence
  Description of Artificial Sequence: Synthetic oligonucleotide
  Antisense strand to SEQ ID NO: 292020
uucaucgccaccaucaccg

SEQ ID NO: 292022 - RNA, 19 nt, Artificial Sequence
  Description of Artificial Sequence: Synthetic oligonucleotide
  Sense strand starting at position 2183 of SEQ ID NO: 3754
gcccgauauucccacaauc

SEQ ID NO: 292023 - RNA, 19 nt, Artificial Sequence
  Description of Artificial Sequence: Synthetic oligonucleotide
  Antisense strand to SEQ ID NO: 292022
gauugugggaauaucgggc

SEQ ID NO: 292024 - RNA, 19 nt, Artificial Sequence
  Description of Artificial Sequence: Synthetic oligonucleotide
  Sense strand starting at position 2400 of SEQ ID NO: 3754
aacguuugaccuugacaca

SEQ ID NO: 292025 - RNA, 19 nt, Artificial Sequence
  Description of Artificial Sequence: Synthetic oligonucleotide
  Antisense strand to SEQ ID NO: 292024
ugugucaaggucaaacguu

SEQ ID NO: 292026 - RNA, 19 nt, Artificial Sequence
  Description of Artificial Sequence: Synthetic oligonucleotide
  Sense strand starting at position 2403 of SEQ ID NO: 3754
guuugaccuugacacagua

SEQ ID NO: 292027 - RNA, 19 nt, Artificial Sequence
  Description of Artificial Sequence: Synthetic oligonucleotide
  Antisense strand to SEQ ID NO: 292026
uacugugucaaggucaaac

SEQ ID NO: 292028 - RNA, 19 nt, Artificial Sequence
  Description of Artificial Sequence: Synthetic oligonucleotide
  Sense strand starting at position 2481 of SEQ ID NO: 3754
guuccaaaguucuaugcaa

SEQ ID NO: 292029 - RNA, 19 nt, Artificial Sequence
  Description of Artificial Sequence: Synthetic oligonucleotide
  Antisense strand to SEQ ID NO: 292028
uugcauagaacuuuggaac

SEQ ID NO: 292030 - RNA, 19 nt, Artificial Sequence
  Description of Artificial Sequence: Synthetic oligonucleotide
  Sense strand starting at position 2625 of SEQ ID NO: 3754
ucccgagaucaaugaaacu

SEQ ID NO: 292031 - RNA, 19 nt, Artificial Sequence
  Description of Artificial Sequence: Synthetic oligonucleotide
  Antisense strand to SEQ ID NO: 292030
aguuucauugaucucggga

SEQ ID NO: 292032 - RNA, 19 nt, Artificial Sequence
  Description of Artificial Sequence: Synthetic oligonucleotide
  Sense strand starting at position 2674 of SEQ ID NO: 3754
cccugugaccuugguacuu

SEQ ID NO: 292033 - RNA, 19 nt, Artificial Sequence
  Description of Artificial Sequence: Synthetic oligonucleotide
  Antisense strand to SEQ ID NO: 292032
aaguaccaaggucacaggg

SEQ ID NO: 292034 - RNA, 19 nt, Artificial Sequence
  Description of Artificial Sequence: Synthetic oligonucleotide
  Sense strand starting at position 2709 of SEQ ID NO: 3754
uggccucaucuagaucuca

SEQ ID NO: 292035 - RNA, 19 nt, Artificial Sequence
  Description of Artificial Sequence: Synthetic oligonucleotide
  Antisense strand to SEQ ID NO: 292034
ugagaucuagaugaggcca

SEQ ID NO: 292036 - RNA, 19 nt, Artificial Sequence
  Description of Artificial Sequence: Synthetic oligonucleotide
  Sense strand starting at position 2777 of SEQ ID NO: 3754
ggagcuaggaucuguugga

SEQ ID NO: 292037 - RNA, 19 nt, Artificial Sequence
  Description of Artificial Sequence: Synthetic oligonucleotide
  Antisense strand to SEQ ID NO: 292036
uccaacagauccuagcucc

SEQ ID NO: 292038 - RNA, 19 nt, Artificial Sequence
  Description of Artificial Sequence: Synthetic oligonucleotide
  Sense strand starting at position 2798 of SEQ ID NO: 3754
cccacauugucuugugugu

SEQ ID NO: 292039 - RNA, 19 nt, Artificial Sequence
  Description of Artificial Sequence: Synthetic oligonucleotide
  Antisense strand to SEQ ID NO: 292038
acacacaagacaauguggg

SEQ ID NO: 292040 - RNA, 19 nt, Artificial Sequence
  Description of Artificial Sequence: Synthetic oligonucleotide
  Sense strand starting at position 2857 of SEQ ID NO: 3754
ugccucgucucaggcauaa

SEQ ID NO: 292041 - RNA, 19 nt, Artificial Sequence
  Description of Artificial Sequence: Synthetic oligonucleotide
  Antisense strand to SEQ ID NO: 292040
uuaugccugagacgaggca

SEQ ID NO: 292042 - RNA, 19 nt, Artificial Sequence
  Description of Artificial Sequence: Synthetic oligonucleotide
  Sense strand starting at position 2861 of SEQ ID NO: 3754
ucgucucaggcauaauaau

SEQ ID NO: 292043 - RNA, 19 nt, Artificial Sequence
  Description of Artificial Sequence: Synthetic oligonucleotide
  Antisense strand to SEQ ID NO: 292042
auuauuaugccugagacga

SEQ ID NO: 292044 - RNA, 19 nt, Artificial Sequence
  Description of Artificial Sequence: Synthetic oligonucleotide
  Sense strand starting at position 2897 of SEQ ID NO: 3754
uucccauuuggucggcaga

SEQ ID NO: 292045 - RNA, 19 nt, Artificial Sequence
  Description of Artificial Sequence: Synthetic oligonucleotide
  Antisense strand to SEQ ID NO: 292044
ucugccgaccaaaugggaa

SEQ ID NO: 292046 - RNA, 19 nt, Artificial Sequence
  Description of Artificial Sequence: Synthetic oligonucleotide
  Sense strand starting at position 2987 of SEQ ID NO: 3754
gggcaucauuauccaugua

SEQ ID NO: 292047 - RNA, 19 nt, Artificial Sequence
  Description of Artificial Sequence: Synthetic oligonucleotide
  Antisense strand to SEQ ID NO: 292046
uacauggauaaugaugccc

SEQ ID NO: 292048 - RNA, 19 nt, Artificial Sequence
  Description of Artificial Sequence: Synthetic oligonucleotide
  Sense strand starting at position 3051 of SEQ ID NO: 3754
gaugaacuguccuccuaag

SEQ ID NO: 292049 - RNA, 19 nt, Artificial Sequence
  Description of Artificial Sequence: Synthetic oligonucleotide
  Antisense strand to SEQ ID NO: 292048
cuuaggaggacaguucauc

SEQ ID NO: 292050 - RNA, 19 nt, Artificial Sequence
  Description of Artificial Sequence: Synthetic oligonucleotide
  Sense strand starting at position 3093 of SEQ ID NO: 3754
gggaauuccuaggguggga

SEQ ID NO: 292051 - RNA, 19 nt, Artificial Sequence
  Description of Artificial Sequence: Synthetic oligonucleotide
  Antisense strand to SEQ ID NO: 292050
ucccacccuaggaauuccc

SEQ ID NO: 292052 - RNA, 19 nt, Artificial Sequence
  Description of Artificial Sequence: Synthetic oligonucleotide
  Sense strand starting at position 3095 of SEQ ID NO: 3754
gaauuccuagggugggaau

SEQ ID NO: 292053 - RNA, 19 nt, Artificial Sequence
  Description of Artificial Sequence: Synthetic oligonucleotide
  Antisense strand to SEQ ID NO: 292052
auucccacccuaggaauuc

SEQ ID NO: 292054 - RNA, 19 nt, Artificial Sequence
  Description of Artificial Sequence: Synthetic oligonucleotide
  Sense strand starting at position 3106 of SEQ ID NO: 3754
gugggaaucagcuaugccu

SEQ ID NO: 292055 - RNA, 19 nt, Artificial Sequence
  Description of Artificial Sequence: Synthetic oligonucleotide
  Antisense strand to SEQ ID NO: 292054
aggcauagcugauucccac

SEQ ID NO: 292056 - RNA, 19 nt, Artificial Sequence
  Description of Artificial Sequence: Synthetic oligonucleotide
  Sense strand starting at position 3230 of SEQ ID NO: 3754
aucagagugugcccuuauu

SEQ ID NO: 292057 - RNA, 19 nt, Artificial Sequence
  Description of Artificial Sequence: Synthetic oligonucleotide
  Antisense strand to SEQ ID NO: 292056
aauaagggcacacucugau

SEQ ID NO: 292058 - RNA, 19 nt, Artificial Sequence
  Description of Artificial Sequence: Synthetic oligonucleotide
  Sense strand starting at position 3238 of SEQ ID NO: 3754
gugcccuuauuuggcaaua

SEQ ID NO: 292059 - RNA, 19 nt, Artificial Sequence
  Description of Artificial Sequence: Synthetic oligonucleotide
  Antisense strand to SEQ ID NO: 292058
uauugccaaauaagggcac

SEQ ID NO: 292060 - RNA, 19 nt, Artificial Sequence
  Description of Artificial Sequence: Synthetic oligonucleotide
  Sense strand starting at position 3240 of SEQ ID NO: 3754
gcccuuauuuggcaauaac

SEQ ID NO: 292061 - RNA, 19 nt, Artificial Sequence
  Description of Artificial Sequence: Synthetic oligonucleotide
  Antisense strand to SEQ ID NO: 292060
guuauugccaaauaagggc

SEQ ID NO: 292062 - RNA, 19 nt, Artificial Sequence
  Description of Artificial Sequence: Synthetic oligonucleotide
  Sense strand starting at position 3256 of SEQ ID NO: 3754
aacguucuugcagauguua

SEQ ID NO: 292063 - RNA, 19 nt, Artificial Sequence
  Description of Artificial Sequence: Synthetic oligonucleotide
  Antisense strand to SEQ ID NO: 292062
uaacaucugcaagaacguu

SEQ ID NO: 292064 - RNA, 19 nt, Artificial Sequence
  Description of Artificial Sequence: Synthetic oligonucleotide
  Sense strand starting at position 3258 of SEQ ID NO: 3754
cguucuugcagauguuaag

SEQ ID NO: 292065 - RNA, 19 nt, Artificial Sequence
  Description of Artificial Sequence: Synthetic oligonucleotide
  Antisense strand to SEQ ID NO: 292064
cuuaacaucugcaagaacg

SEQ ID NO: 292066 - RNA, 19 nt, Artificial Sequence
  Description of Artificial Sequence: Synthetic oligonucleotide
  Sense strand starting at position 3261 of SEQ ID NO: 3754
ucuugcagauguuaagaua

SEQ ID NO: 292067 - RNA, 19 nt, Artificial Sequence
  Description of Artificial Sequence: Synthetic oligonucleotide
  Antisense strand to SEQ ID NO: 292066
uaucuuaacaucugcaaga

SEQ ID NO: 292068 - RNA, 19 nt, Artificial Sequence
  Description of Artificial Sequence: Synthetic oligonucleotide
  Sense strand starting at position 3294 of SEQ ID NO: 3754
cauuaugacugguguucca

SEQ ID NO: 292069 - RNA, 19 nt, Artificial Sequence
  Description of Artificial Sequence: Synthetic oligonucleotide
  Antisense strand to SEQ ID NO: 292068
uggaacaccagucauaaug

SEQ ID NO: 292070 - RNA, 19 nt, Artificial Sequence
  Description of Artificial Sequence: Synthetic oligonucleotide
  Sense strand starting at position 3664 of SEQ ID NO: 3754
cagagaacgcuuugugaag

SEQ ID NO: 292071 - RNA, 19 nt, Artificial Sequence
  Description of Artificial Sequence: Synthetic oligonucleotide
  Antisense strand to SEQ ID NO: 292070
cuucacaaagcguucucug

SEQ ID NO: 292072 - RNA, 19 nt, Artificial Sequence
  Description of Artificial Sequence: Synthetic oligonucleotide
  Sense strand starting at position 3665 of SEQ ID NO: 3754
agagaacgcuuugugaaga

SEQ ID NO: 292073 - RNA, 19 nt, Artificial Sequence
  Description of Artificial Sequence: Synthetic oligonucleotide
  Antisense strand to SEQ ID NO: 292072
ucuucacaaagcguucucu

SEQ ID NO: 292074 - RNA, 19 nt, Artificial Sequence
  Description of Artificial Sequence: Synthetic oligonucleotide
  Sense strand starting at position 3670 of SEQ ID NO: 3754
acgcuuugugaagacugga

SEQ ID NO: 292075 - RNA, 19 nt, Artificial Sequence
  Description of Artificial Sequence: Synthetic oligonucleotide
  Antisense strand to SEQ ID NO: 292074
uccagucuucacaaagcgu

SEQ ID NO: 292076 - RNA, 19 nt, Artificial Sequence
  Description of Artificial Sequence: Synthetic oligonucleotide
  Sense strand starting at position 3673 of SEQ ID NO: 3754
cuuugugaagacuggaguu

SEQ ID NO: 292077 - RNA, 19 nt, Artificial Sequence
  Description of Artificial Sequence: Synthetic oligonucleotide
  Antisense strand to SEQ ID NO: 292076
aacuccagucuucacaaag

SEQ ID NO: 292078 - RNA, 19 nt, Artificial Sequence
  Description of Artificial Sequence: Synthetic oligonucleotide
  Sense strand starting at position 3810 of SEQ ID NO: 3754
ccagaucuguaagacagua

SEQ ID NO: 292079 - RNA, 19 nt, Artificial Sequence
  Description of Artificial Sequence: Synthetic oligonucleotide
  Antisense strand to SEQ ID NO: 292078
uacugucuuacagaucugg

SEQ ID NO: 292080 - RNA, 19 nt, Artificial Sequence
  Description of Artificial Sequence: Synthetic oligonucleotide
  Sense strand starting at position 3823 of SEQ ID NO: 3754
acaguagauuuccauuguu

SEQ ID NO: 292081 - RNA, 19 nt, Artificial Sequence
  Description of Artificial Sequence: Synthetic oligonucleotide
  Antisense strand to SEQ ID NO: 292080
aacaauggaaaucuacugu

SEQ ID NO: 292082 - RNA, 19 nt, Artificial Sequence
  Description of Artificial Sequence: Synthetic oligonucleotide
  Sense strand starting at position 3839 of SEQ ID NO: 3754
guuuaagccacuggguuua

SEQ ID NO: 292083 - RNA, 19 nt, Artificial Sequence
  Description of Artificial Sequence: Synthetic oligonucleotide
  Antisense strand to SEQ ID NO: 292082
uaaacccaguggcuuaaac

SEQ ID NO: 292084 - RNA, 19 nt, Artificial Sequence
  Description of Artificial Sequence: Synthetic oligonucleotide
  Sense strand starting at position 3844 of SEQ ID NO: 3754
agccacuggguuuaugaua

SEQ ID NO: 292085 - RNA, 19 nt, Artificial Sequence
  Description of Artificial Sequence: Synthetic oligonucleotide
  Antisense strand to SEQ ID NO: 292084
uaucauaaacccaguggcu

SEQ ID NO: 292086 - RNA, 19 nt, Artificial Sequence
  Description of Artificial Sequence: Synthetic oligonucleotide
  Sense strand starting at position 3852 of SEQ ID NO: 3754
gguuuaugauacuguguua

SEQ ID NO: 292087 - RNA, 19 nt, Artificial Sequence
  Description of Artificial Sequence: Synthetic oligonucleotide
  Antisense strand to SEQ ID NO: 292086
uaacacaguaucauaaacc

SEQ ID NO: 292088 - RNA, 19 nt, Artificial Sequence
  Description of Artificial Sequence: Synthetic oligonucleotide
  Sense strand starting at position 3855 of SEQ ID NO: 3754
uuaugauacuguguuacag

SEQ ID NO: 292089 - RNA, 19 nt, Artificial Sequence
  Description of Artificial Sequence: Synthetic oligonucleotide
  Antisense strand to SEQ ID NO: 292088
cuguaacacaguaucauaa

SEQ ID NO: 292090 - RNA, 19 nt, Artificial Sequence
  Description of Artificial Sequence: Synthetic oligonucleotide
  Sense strand starting at position 3857 of SEQ ID NO: 3754
augauacuguguuacagua

SEQ ID NO: 292091 - RNA, 19 nt, Artificial Sequence
  Description of Artificial Sequence: Synthetic oligonucleotide
  Antisense strand to SEQ ID NO: 292090
uacuguaacacaguaucau

SEQ ID NO: 292092 - RNA, 19 nt, Artificial Sequence
  Description of Artificial Sequence: Synthetic oligonucleotide
  Sense strand starting at position 204 of SEQ ID NO: 3755
cucaucucugaguguauaa

SEQ ID NO: 292093 - RNA, 19 nt, Artificial Sequence
  Description of Artificial Sequence: Synthetic oligonucleotide
  Antisense strand to SEQ ID NO: 292092
uuauacacucagagaugag

SEQ ID NO: 292094 - RNA, 19 nt, Artificial Sequence
  Description of Artificial Sequence: Synthetic oligonucleotide
  Sense strand starting at position 314 of SEQ ID NO: 3755
uguuucucagcugaacuau

SEQ ID NO: 292095 - RNA, 19 nt, Artificial Sequence
  Description of Artificial Sequence: Synthetic oligonucleotide
  Antisense strand to SEQ ID NO: 292094
auaguucagcugagaaaca

SEQ ID NO: 292096 - RNA, 19 nt, Artificial Sequence
  Description of Artificial Sequence: Synthetic oligonucleotide
  Sense strand starting at position 320 of SEQ ID NO: 3755
ucagcugaacuauggagaa

SEQ ID NO: 292097 - RNA, 19 nt, Artificial Sequence
  Description of Artificial Sequence: Synthetic oligonucleotide
  Antisense strand to SEQ ID NO: 292096
uucuccauaguucagcuga

SEQ ID NO: 292098 - RNA, 19 nt, Artificial Sequence
  Description of Artificial Sequence: Synthetic oligonucleotide
  Sense strand starting at position 330 of SEQ ID NO: 3755
uauggagaagcaugucuaa

SEQ ID NO: 292099 - RNA, 19 nt, Artificial Sequence
  Description of Artificial Sequence: Synthetic oligonucleotide
  Antisense strand to SEQ ID NO: 292098
uuagacaugcuucuccaua

SEQ ID NO: 292100 - RNA, 19 nt, Artificial Sequence
  Description of Artificial Sequence: Synthetic oligonucleotide
  Sense strand starting at position 363 of SEQ ID NO: 3755
aguugaauaugcuuuagag

SEQ ID NO: 292101 - RNA, 19 nt, Artificial Sequence
  Description of Artificial Sequence: Synthetic oligonucleotide
  Antisense strand to SEQ ID NO: 292100
cucuaaagcauauucaacu

SEQ ID NO: 292102 - RNA, 19 nt, Artificial Sequence
  Description of Artificial Sequence: Synthetic oligonucleotide
  Sense strand starting at position 369 of SEQ ID NO: 3755
auaugcuuuagagagaugu

SEQ ID NO: 292103 - RNA, 19 nt, Artificial Sequence
  Description of Artificial Sequence: Synthetic oligonucleotide
  Antisense strand to SEQ ID NO: 292102
acaucucucuaaagcauau

SEQ ID NO: 292104 - RNA, 19 nt, Artificial Sequence
  Description of Artificial Sequence: Synthetic oligonucleotide
  Sense strand starting at position 373 of SEQ ID NO: 3755
gcuuuagagagauguugaa

SEQ ID NO: 292105 - RNA, 19 nt, Artificial Sequence
  Description of Artificial Sequence: Synthetic oligonucleotide
  Antisense strand to SEQ ID NO: 292104
uucaacaucucucuaaagc

SEQ ID NO: 292106 - RNA, 19 nt, Artificial Sequence
  Description of Artificial Sequence: Synthetic oligonucleotide
  Sense strand starting at position 380 of SEQ ID NO: 3755
agagauguugaauaugcuu

SEQ ID NO: 292107 - RNA, 19 nt, Artificial Sequence
  Description of Artificial Sequence: Synthetic oligonucleotide
  Antisense strand to SEQ ID NO: 292106
aagcauauucaacaucucu

SEQ ID NO: 292108 - RNA, 19 nt, Artificial Sequence
  Description of Artificial Sequence: Synthetic oligonucleotide
  Sense strand starting at position 385 of SEQ ID NO: 3755
uguugaauaugcuuuagac

SEQ ID NO: 292109 - RNA, 19 nt, Artificial Sequence
  Description of Artificial Sequence: Synthetic oligonucleotide
  Antisense strand to SEQ ID NO: 292108
gucuaaagcauauucaaca

SEQ ID NO: 292110 - RNA, 19 nt, Artificial Sequence
  Description of Artificial Sequence: Synthetic oligonucleotide
  Sense strand starting at position 464 of SEQ ID NO: 3755
ggaugucaguguccaaauc

SEQ ID NO: 292111 - RNA, 19 nt, Artificial Sequence
  Description of Artificial Sequence: Synthetic oligonucleotide
  Antisense strand to SEQ ID NO: 292110
gauuuggacacugacaucc

SEQ ID NO: 292112 - RNA, 19 nt, Artificial Sequence
  Description of Artificial Sequence: Synthetic oligonucleotide
  Sense strand starting at position 465 of SEQ ID NO: 3755
gaugucaguguccaaaucu

SEQ ID NO: 292113 - RNA, 19 nt, Artificial Sequence
  Description of Artificial Sequence: Synthetic oligonucleotide
  Antisense strand to SEQ ID NO: 292112
agauuuggacacugacauc

SEQ ID NO: 292114 - RNA, 19 nt, Artificial Sequence
  Description of Artificial Sequence: Synthetic oligonucleotide
  Sense strand starting at position 475 of SEQ ID NO: 3755
uccaaaucugucuaaaguc

SEQ ID NO: 292115 - RNA, 19 nt, Artificial Sequence
  Description of Artificial Sequence: Synthetic oligonucleotide
  Antisense strand to SEQ ID NO: 292114
gacuuuagacagauuugga

SEQ ID NO: 292116 - RNA, 19 nt, Artificial Sequence
  Description of Artificial Sequence: Synthetic oligonucleotide
  Sense strand starting at position 606 of SEQ ID NO: 3755
gggugucagaaugacuagu

SEQ ID NO: 292117 - RNA, 19 nt, Artificial Sequence
  Description of Artificial Sequence: Synthetic oligonucleotide
  Antisense strand to SEQ ID NO: 292116
acuagucauucugacaccc

SEQ ID NO: 292118 - RNA, 19 nt, Artificial Sequence
  Description of Artificial Sequence: Synthetic oligonucleotide
  Sense strand starting at position 608 of SEQ ID NO: 3755
gugucagaaugacuaguuu

SEQ ID NO: 292119 - RNA, 19 nt, Artificial Sequence
  Description of Artificial Sequence: Synthetic oligonucleotide
  Antisense strand to SEQ ID NO: 292118
aaacuagucauucugacac

SEQ ID NO: 292120 - RNA, 19 nt, Artificial Sequence
  Description of Artificial Sequence: Synthetic oligonucleotide
  Sense strand starting at position 734 of SEQ ID NO: 3755
agagguaaguaguuccacu

SEQ ID NO: 292121 - RNA, 19 nt, Artificial Sequence
  Description of Artificial Sequence: Synthetic oligonucleotide
  Antisense strand to SEQ ID NO: 292120
aguggaacuacuuaccucu

SEQ ID NO: 292122 - RNA, 19 nt, Artificial Sequence
  Description of Artificial Sequence: Synthetic oligonucleotide
  Sense strand starting at position 750 of SEQ ID NO: 3755
acucuaagggcuuagcaua

SEQ ID NO: 292123 - RNA, 19 nt, Artificial Sequence
  Description of Artificial Sequence: Synthetic oligonucleotide
  Antisense strand to SEQ ID NO: 292122
uaugcuaagcccuuagagu

SEQ ID NO: 292124 - RNA, 19 nt, Artificial Sequence
  Description of Artificial Sequence: Synthetic oligonucleotide
  Sense strand starting at position 935 of SEQ ID NO: 3755
ggugaacucaucuguaaug

SEQ ID NO: 292125 - RNA, 19 nt, Artificial Sequence
  Description of Artificial Sequence: Synthetic oligonucleotide
  Antisense strand to SEQ ID NO: 292124
cauuacagaugaguucacc

SEQ ID NO: 292126 - RNA, 19 nt, Artificial Sequence
  Description of Artificial Sequence: Synthetic oligonucleotide
  Sense strand starting at position 1030 of SEQ ID NO: 3755
gcaaauuguaagggacuau

SEQ ID NO: 292127 - RNA, 19 nt, Artificial Sequence
  Description of Artificial Sequence: Synthetic oligonucleotide
  Antisense strand to SEQ ID NO: 292126
auagucccuuacaauuugc

SEQ ID NO: 292128 - RNA, 19 nt, Artificial Sequence
  Description of Artificial Sequence: Synthetic oligonucleotide
  Sense strand starting at position 1080 of SEQ ID NO: 3755
agaggagauggcugucaaa

SEQ ID NO: 292129 - RNA, 19 nt, Artificial Sequence
  Description of Artificial Sequence: Synthetic oligonucleotide
  Antisense strand to SEQ ID NO: 292128
uuugacagccaucuccucu

SEQ ID NO: 292130 - RNA, 19 nt, Artificial Sequence
  Description of Artificial Sequence: Synthetic oligonucleotide
  Sense strand starting at position 1252 of SEQ ID NO: 3755
cuccucucacgguaaguau

SEQ ID NO: 292131 - RNA, 19 nt, Artificial Sequence
  Description of Artificial Sequence: Synthetic oligonucleotide
  Antisense strand to SEQ ID NO: 292130
auacuuaccgugagaggag

SEQ ID NO: 292132 - RNA, 19 nt, Artificial Sequence
  Description of Artificial Sequence: Synthetic oligonucleotide
  Sense strand starting at position 1273 of SEQ ID NO: 3755
ugcaguuuggcucaggaca

SEQ ID NO: 292133 - RNA, 19 nt, Artificial Sequence
  Description of Artificial Sequence: Synthetic oligonucleotide
  Antisense strand to SEQ ID NO: 292132
uguccugagccaaacugca

SEQ ID NO: 292134 - RNA, 19 nt, Artificial Sequence
  Description of Artificial Sequence: Synthetic oligonucleotide
  Sense strand starting at position 1511 of SEQ ID NO: 3755
agcuaaagucagcaauucu

SEQ ID NO: 292135 - RNA, 19 nt, Artificial Sequence
  Description of Artificial Sequence: Synthetic oligonucleotide
  Antisense strand to SEQ ID NO: 292134
agaauugcugacuuuagcu

SEQ ID NO: 292136 - RNA, 19 nt, Artificial Sequence
  Description of Artificial Sequence: Synthetic oligonucleotide
  Sense strand starting at position 1522 of SEQ ID NO: 3755
gcaauucuggagcaacaga

SEQ ID NO: 292137 - RNA, 19 nt, Artificial Sequence
  Description of Artificial Sequence: Synthetic oligonucleotide
  Antisense strand to SEQ ID NO: 292136
ucuguugcuccagaauugc

SEQ ID NO: 292138 - RNA, 19 nt, Artificial Sequence
  Description of Artificial Sequence: Synthetic oligonucleotide
  Sense strand starting at position 1616 of SEQ ID NO: 3755
guugauauuuggcauuuau

SEQ ID NO: 292139 - RNA, 19 nt, Artificial Sequence
  Description of Artificial Sequence: Synthetic oligonucleotide
  Antisense strand to SEQ ID NO: 292138
auaaaugccaaauaucaac

SEQ ID NO: 292140 - RNA, 19 nt, Artificial Sequence
  Description of Artificial Sequence: Synthetic oligonucleotide
  Sense strand starting at position 1866 of SEQ ID NO: 3755
agagaauucucagugccuc

SEQ ID NO: 292141 - RNA, 19 nt, Artificial Sequence
  Description of Artificial Sequence: Synthetic oligonucleotide
  Antisense strand to SEQ ID NO: 292140
gaggcacugagaauucucu

SEQ ID NO: 292142 - RNA, 19 nt, Artificial Sequence
  Description of Artificial Sequence: Synthetic oligonucleotide
  Sense strand starting at position 1883 of SEQ ID NO: 3755
uccugagauuugcaucaag

SEQ ID NO: 292143 - RNA, 19 nt, Artificial Sequence
  Description of Artificial Sequence: Synthetic oligonucleotide
  Antisense strand to SEQ ID NO: 292142
cuugaugcaaaucucagga

SEQ ID NO: 292144 - RNA, 19 nt, Artificial Sequence
  Description of Artificial Sequence: Synthetic oligonucleotide
  Sense strand starting at position 1916 of SEQ ID NO: 3755
ucaccuuucugauccggaa

SEQ ID NO: 292145 - RNA, 19 nt, Artificial Sequence
  Description of Artificial Sequence: Synthetic oligonucleotide
  Antisense strand to SEQ ID NO: 292144
uuccggaucagaaagguga

SEQ ID NO: 292146 - RNA, 19 nt, Artificial Sequence
  Description of Artificial Sequence: Synthetic oligonucleotide
  Sense strand starting at position 1920 of SEQ ID NO: 3755
cuuucugauccggaaaucu

SEQ ID NO: 292147 - RNA, 19 nt, Artificial Sequence
  Description of Artificial Sequence: Synthetic oligonucleotide
  Antisense strand to SEQ ID NO: 292146
agauuuccggaucagaaag

SEQ ID NO: 292148 - RNA, 19 nt, Artificial Sequence
  Description of Artificial Sequence: Synthetic oligonucleotide
  Sense strand starting at position 2067 of SEQ ID NO: 3755
uggucaaauccacagucau

SEQ ID NO: 292149 - RNA, 19 nt, Artificial Sequence
  Description of Artificial Sequence: Synthetic oligonucleotide
  Antisense strand to SEQ ID NO: 292148
augacuguggauuugacca

SEQ ID NO: 292150 - RNA, 19 nt, Artificial Sequence
  Description of Artificial Sequence: Synthetic oligonucleotide
  Sense strand starting at position 2125 of SEQ ID NO: 3755
ggacauauaacugggugca

SEQ ID NO: 292151 - RNA, 19 nt, Artificial Sequence
  Description of Artificial Sequence: Synthetic oligonucleotide
  Antisense strand to SEQ ID NO: 292150
ugcacccaguuauaugucc

SEQ ID NO: 292152 - RNA, 19 nt, Artificial Sequence
  Description of Artificial Sequence: Synthetic oligonucleotide
  Sense strand starting at position 3086 of SEQ ID NO: 3755
uggacaaucuguuucugga

SEQ ID NO: 292153 - RNA, 19 nt, Artificial Sequence
  Description of Artificial Sequence: Synthetic oligonucleotide
  Antisense strand to SEQ ID NO: 292152
uccagaaacagauugucca

SEQ ID NO: 292154 - RNA, 19 nt, Artificial Sequence
  Description of Artificial Sequence: Synthetic oligonucleotide
  Sense strand starting at position 3124 of SEQ ID NO: 3755
aggcuaauacauggauacu

SEQ ID NO: 292155 - RNA, 19 nt, Artificial Sequence
  Description of Artificial Sequence: Synthetic oligonucleotide
  Antisense strand to SEQ ID NO: 292154
aguauccauguauuagccu

SEQ ID NO: 292156 - RNA, 19 nt, Artificial Sequence
  Description of Artificial Sequence: Synthetic oligonucleotide
  Sense strand starting at position 3539 of SEQ ID NO: 3755
ccuuuauggcaauaaggua

SEQ ID NO: 292157 - RNA, 19 nt, Artificial Sequence
  Description of Artificial Sequence: Synthetic oligonucleotide
  Antisense strand to SEQ ID NO: 292156
uaccuuauugccauaaagg

SEQ ID NO: 292158 - RNA, 19 nt, Artificial Sequence
  Description of Artificial Sequence: Synthetic oligonucleotide
  Sense strand starting at position 3609 of SEQ ID NO: 3755
acgccuacacuugaagaau

SEQ ID NO: 292159 - RNA, 19 nt, Artificial Sequence
  Description of Artificial Sequence: Synthetic oligonucleotide
  Antisense strand to SEQ ID NO: 292158
auucuucaaguguaggcgu

SEQ ID NO: 292160 - RNA, 19 nt, Artificial Sequence
  Description of Artificial Sequence: Synthetic oligonucleotide
  Sense strand starting at position 3623 of SEQ ID NO: 3755
agaauaaacuguguccuaa

SEQ ID NO: 292161 - RNA, 19 nt, Artificial Sequence
  Description of Artificial Sequence: Synthetic oligonucleotide
  Antisense strand to SEQ ID NO: 292160
uuaggacacaguuuauucu

SEQ ID NO: 292162 - RNA, 19 nt, Artificial Sequence
  Description of Artificial Sequence: Synthetic oligonucleotide
  Sense strand starting at position 3732 of SEQ ID NO: 3755
gcagaugcugacuaaccaa

SEQ ID NO: 292163 - RNA, 19 nt, Artificial Sequence
  Description of Artificial Sequence: Synthetic oligonucleotide
  Antisense strand to SEQ ID NO: 292162
uugguuagucagcaucugc

SEQ ID NO: 292164 - RNA, 19 nt, Artificial Sequence
  Description of Artificial Sequence: Synthetic oligonucleotide
  Sense strand starting at position 3879 of SEQ ID NO: 3755
acgcauuuguguccuacaa

SEQ ID NO: 292165 - RNA, 19 nt, Artificial Sequence
  Description of Artificial Sequence: Synthetic oligonucleotide
  Antisense strand to SEQ ID NO: 292164
uuguaggacacaaaugcgu

SEQ ID NO: 292166 - RNA, 19 nt, Artificial Sequence
  Description of Artificial Sequence: Synthetic oligonucleotide
  Sense strand starting at position 3908 of SEQ ID NO: 3755
acguauaaugccuaaugua

SEQ ID NO: 292167 - RNA, 19 nt, Artificial Sequence
  Description of Artificial Sequence: Synthetic oligonucleotide
  Antisense strand to SEQ ID NO: 292166
uacauuaggcauuauacgu

SEQ ID NO: 292168 - RNA, 19 nt, Artificial Sequence
  Description of Artificial Sequence: Synthetic oligonucleotide
  Sense strand starting at position 3937 of SEQ ID NO: 3755
auguuauggcuccauccca

SEQ ID NO: 292169 - RNA, 19 nt, Artificial Sequence
  Description of Artificial Sequence: Synthetic oligonucleotide
  Antisense strand to SEQ ID NO: 292168
ugggauggagccauaacau

SEQ ID NO: 292170 - RNA, 19 nt, Artificial Sequence
  Description of Artificial Sequence: Synthetic oligonucleotide
  Sense strand starting at position 3973 of SEQ ID NO: 3755
cguaauaugcauguuuguu

SEQ ID NO: 292171 - RNA, 19 nt, Artificial Sequence
  Description of Artificial Sequence: Synthetic oligonucleotide
  Antisense strand to SEQ ID NO: 292170
aacaaacaugcauauuacg

SEQ ID NO: 292172 - RNA, 19 nt, Artificial Sequence
  Description of Artificial Sequence: Synthetic oligonucleotide
  Sense strand starting at position 174 of SEQ ID NO: 3756
gugaauugcugaccaagag

SEQ ID NO: 292173 - RNA, 19 nt, Artificial Sequence
  Description of Artificial Sequence: Synthetic oligonucleotide
  Antisense strand to SEQ ID NO: 292172
cucuuggucagcaauucac

SEQ ID NO: 292174 - RNA, 19 nt, Artificial Sequence
  Description of Artificial Sequence: Synthetic oligonucleotide
  Sense strand starting at position 301 of SEQ ID NO: 3756
aagagucugugaucuagga

SEQ ID NO: 292175 - RNA, 19 nt, Artificial Sequence
  Description of Artificial Sequence: Synthetic oligonucleotide
  Antisense strand to SEQ ID NO: 292174
uccuagaucacagacucuu

SEQ ID NO: 292176 - RNA, 19 nt, Artificial Sequence
  Description of Artificial Sequence: Synthetic oligonucleotide
  Sense strand starting at position 419 of SEQ ID NO: 3756
gcucuuacucuggaguaag

SEQ ID NO: 292177 - RNA, 19 nt, Artificial Sequence
  Description of Artificial Sequence: Synthetic oligonucleotide
  Antisense strand to SEQ ID NO: 292176
cuuacuccagaguaagagc

SEQ ID NO: 292178 - RNA, 19 nt, Artificial Sequence
  Description of Artificial Sequence: Synthetic oligonucleotide
  Sense strand starting at position 543 of SEQ ID NO: 3756
gaauccauuucugaguaag

SEQ ID NO: 292179 - RNA, 19 nt, Artificial Sequence
  Description of Artificial Sequence: Synthetic oligonucleotide
  Antisense strand to SEQ ID NO: 292178
cuuacucagaaauggauuc

SEQ ID NO: 292180 - RNA, 19 nt, Artificial Sequence
  Description of Artificial Sequence: Synthetic oligonucleotide
  Sense strand starting at position 657 of SEQ ID NO: 3756
ccucuuaagauagggaagu

SEQ ID NO: 292181 - RNA, 19 nt, Artificial Sequence
  Description of Artificial Sequence: Synthetic oligonucleotide
  Antisense strand to SEQ ID NO: 292180
acuucccuaucuuaagagg

SEQ ID NO: 292182 - RNA, 19 nt, Artificial Sequence
  Description of Artificial Sequence: Synthetic oligonucleotide
  Sense strand starting at position 745 of SEQ ID NO: 3756
uugauucugguuugggaaa

SEQ ID NO: 292183 - RNA, 19 nt, Artificial Sequence
  Description of Artificial Sequence: Synthetic oligonucleotide
  Antisense strand to SEQ ID NO: 292182
uuucccaaaccagaaucaa

SEQ ID NO: 292184 - RNA, 19 nt, Artificial Sequence
  Description of Artificial Sequence: Synthetic oligonucleotide
  Sense strand starting at position 977 of SEQ ID NO: 3756
ccaccaauggugugggaaa

SEQ ID NO: 292185 - RNA, 19 nt, Artificial Sequence
  Description of Artificial Sequence: Synthetic oligonucleotide
  Antisense strand to SEQ ID NO: 292184
uuucccacaccauuggugg

SEQ ID NO: 292186 - RNA, 19 nt, Artificial Sequence
  Description of Artificial Sequence: Synthetic oligonucleotide
  Sense strand starting at position 996 of SEQ ID NO: 3756
agaugacucuccuuagacu

SEQ ID NO: 292187 - RNA, 19 nt, Artificial Sequence
  Description of Artificial Sequence: Synthetic oligonucleotide
  Antisense strand to SEQ ID NO: 292186
agucuaaggagagucaucu

SEQ ID NO: 292188 - RNA, 19 nt, Artificial Sequence
  Description of Artificial Sequence: Synthetic oligonucleotide
  Sense strand starting at position 1007 of SEQ ID NO: 3756
cuuagacugguccauccaa

SEQ ID NO: 292189 - RNA, 19 nt, Artificial Sequence
  Description of Artificial Sequence: Synthetic oligonucleotide
  Antisense strand to SEQ ID NO: 292188
uuggauggaccagucuaag

SEQ ID NO: 292190 - RNA, 19 nt, Artificial Sequence
  Description of Artificial Sequence: Synthetic oligonucleotide
  Sense strand starting at position 1051 of SEQ ID NO: 3756
cuggguggucuucagggua

SEQ ID NO: 292191 - RNA, 19 nt, Artificial Sequence
  Description of Artificial Sequence: Synthetic oligonucleotide
  Antisense strand to SEQ ID NO: 292190
uacccugaagaccacccag

SEQ ID NO: 292192 - RNA, 19 nt, Artificial Sequence
  Description of Artificial Sequence: Synthetic oligonucleotide
  Sense strand starting at position 1063 of SEQ ID NO: 3756
caggguacuccuggaaaca

SEQ ID NO: 292193 - RNA, 19 nt, Artificial Sequence
  Description of Artificial Sequence: Synthetic oligonucleotide
  Antisense strand to SEQ ID NO: 292192
uguuuccaggaguacccug

SEQ ID NO: 292194 - RNA, 19 nt, Artificial Sequence
  Description of Artificial Sequence: Synthetic oligonucleotide
  Sense strand starting at position 1189 of SEQ ID NO: 3756
cuggguuucuaagucagga

SEQ ID NO: 292195 - RNA, 19 nt, Artificial Sequence
  Description of Artificial Sequence: Synthetic oligonucleotide
  Antisense strand to SEQ ID NO: 292194
uccugacuuagaaacccag

SEQ ID NO: 292196 - RNA, 19 nt, Artificial Sequence
  Description of Artificial Sequence: Synthetic oligonucleotide
  Sense strand starting at position 1191 of SEQ ID NO: 3756
ggguuucuaagucaggauu

SEQ ID NO: 292197 - RNA, 19 nt, Artificial Sequence
  Description of Artificial Sequence: Synthetic oligonucleotide
  Antisense strand to SEQ ID NO: 292196
aauccugacuuagaaaccc

SEQ ID NO: 292198 - RNA, 19 nt, Artificial Sequence
  Description of Artificial Sequence: Synthetic oligonucleotide
  Sense strand starting at position 1367 of SEQ ID NO: 3756
gaaacagauccuugguaac

SEQ ID NO: 292199 - RNA, 19 nt, Artificial Sequence
  Description of Artificial Sequence: Synthetic oligonucleotide
  Antisense strand to SEQ ID NO: 292198
guuaccaaggaucuguuuc

SEQ ID NO: 292200 - RNA, 19 nt, Artificial Sequence
  Description of Artificial Sequence: Synthetic oligonucleotide
  Sense strand starting at position 1401 of SEQ ID NO: 3756
ccagaaagcuuaguugaag

SEQ ID NO: 292201 - RNA, 19 nt, Artificial Sequence
  Description of Artificial Sequence: Synthetic oligonucleotide
  Antisense strand to SEQ ID NO: 292200
cuucaacuaagcuuucugg

SEQ ID NO: 292202 - RNA, 19 nt, Artificial Sequence
  Description of Artificial Sequence: Synthetic oligonucleotide
  Sense strand starting at position 1404 of SEQ ID NO: 3756
gaaagcuuaguugaagugu

SEQ ID NO: 292203 - RNA, 19 nt, Artificial Sequence
  Description of Artificial Sequence: Synthetic oligonucleotide
  Antisense strand to SEQ ID NO: 292202
acacuucaacuaagcuuuc

SEQ ID NO: 292204 - RNA, 19 nt, Artificial Sequence
  Description of Artificial Sequence: Synthetic oligonucleotide
  Sense strand starting at position 1412 of SEQ ID NO: 3756
aguugaaguguggauucuu

SEQ ID NO: 292205 - RNA, 19 nt, Artificial Sequence
  Description of Artificial Sequence: Synthetic oligonucleotide
  Antisense strand to SEQ ID NO: 292204
aagaauccacacuucaacu

SEQ ID NO: 292206 - RNA, 19 nt, Artificial Sequence
  Description of Artificial Sequence: Synthetic oligonucleotide
  Sense strand starting at position 1417 of SEQ ID NO: 3756
aaguguggauucuuauaca

SEQ ID NO: 292207 - RNA, 19 nt, Artificial Sequence
  Description of Artificial Sequence: Synthetic oligonucleotide
  Antisense strand to SEQ ID NO: 292206
uguauaagaauccacacuu

SEQ ID NO: 292208 - RNA, 19 nt, Artificial Sequence
  Description of Artificial Sequence: Synthetic oligonucleotide
  Sense strand starting at position 1448 of SEQ ID NO: 3756
ucuggacuccuaggagacu

SEQ ID NO: 292209 - RNA, 19 nt, Artificial Sequence
  Description of Artificial Sequence: Synthetic oligonucleotide
  Antisense strand to SEQ ID NO: 292208
agucuccuaggaguccaga

SEQ ID NO: 292210 - RNA, 19 nt, Artificial Sequence
  Description of Artificial Sequence: Synthetic oligonucleotide
  Sense strand starting at position 1482 of SEQ ID NO: 3756
agguaacccuuauugaacu

SEQ ID NO: 292211 - RNA, 19 nt, Artificial Sequence
  Description of Artificial Sequence: Synthetic oligonucleotide
  Antisense strand to SEQ ID NO: 292210
aguucaauaaggguuaccu

SEQ ID NO: 292212 - RNA, 19 nt, Artificial Sequence
  Description of Artificial Sequence: Synthetic oligonucleotide
  Sense strand starting at position 1499 of SEQ ID NO: 3756
cuggaagaagugugaagua

SEQ ID NO: 292213 - RNA, 19 nt, Artificial Sequence
  Description of Artificial Sequence: Synthetic oligonucleotide
  Antisense strand to SEQ ID NO: 292212
uacuucacacuucuuccag

SEQ ID NO: 292214 - RNA, 19 nt, Artificial Sequence
  Description of Artificial Sequence: Synthetic oligonucleotide
  Sense strand starting at position 1504 of SEQ ID NO: 3756
agaagugugaaguacuauc

SEQ ID NO: 292215 - RNA, 19 nt, Artificial Sequence
  Description of Artificial Sequence: Synthetic oligonucleotide
  Antisense strand to SEQ ID NO: 292214
gauaguacuucacacuucu

SEQ ID NO: 292216 - RNA, 19 nt, Artificial Sequence
  Description of Artificial Sequence: Synthetic oligonucleotide
  Sense strand starting at position 1533 of SEQ ID NO: 3756
acucccauggcucaagaau

SEQ ID NO: 292217 - RNA, 19 nt, Artificial Sequence
  Description of Artificial Sequence: Synthetic oligonucleotide
  Antisense strand to SEQ ID NO: 292216
auucuugagccaugggagu

SEQ ID NO: 292218 - RNA, 19 nt, Artificial Sequence
  Description of Artificial Sequence: Synthetic oligonucleotide
  Sense strand starting at position 1591 of SEQ ID NO: 3756
acuuuagaagucugacauu

SEQ ID NO: 292219 - RNA, 19 nt, Artificial Sequence
  Description of Artificial Sequence: Synthetic oligonucleotide
  Antisense strand to SEQ ID NO: 292218
aaugucagacuucuaaagu

SEQ ID NO: 292220 - RNA, 19 nt, Artificial Sequence
  Description of Artificial Sequence: Synthetic oligonucleotide
  Sense strand starting at position 2165 of SEQ ID NO: 3756
gcgucuucagugguucuca

SEQ ID NO: 292221 - RNA, 19 nt, Artificial Sequence
  Description of Artificial Sequence: Synthetic oligonucleotide
  Antisense strand to SEQ ID NO: 292220
ugagaaccacugaagacgc

SEQ ID NO: 292222 - RNA, 19 nt, Artificial Sequence
  Description of Artificial Sequence: Synthetic oligonucleotide
  Sense strand starting at position 2627 of SEQ ID NO: 3756
gugaguaggaagugagaau

SEQ ID NO: 292223 - RNA, 19 nt, Artificial Sequence
  Description of Artificial Sequence: Synthetic oligonucleotide
  Antisense strand to SEQ ID NO: 292222
auucucacuuccuacucac

SEQ ID NO: 292224 - RNA, 19 nt, Artificial Sequence
  Description of Artificial Sequence: Synthetic oligonucleotide
  Sense strand starting at position 2981 of SEQ ID NO: 3756
uuuaucaucugguuggaua

SEQ ID NO: 292225 - RNA, 19 nt, Artificial Sequence
  Description of Artificial Sequence: Synthetic oligonucleotide
  Antisense strand to SEQ ID NO: 292224
uauccaaccagaugauaaa

SEQ ID NO: 292226 - RNA, 19 nt, Artificial Sequence
  Description of Artificial Sequence: Synthetic oligonucleotide
  Sense strand starting at position 2982 of SEQ ID NO: 3756
uuaucaucugguuggauau

SEQ ID NO: 292227 - RNA, 19 nt, Artificial Sequence
  Description of Artificial Sequence: Synthetic oligonucleotide
  Antisense strand to SEQ ID NO: 292226
auauccaaccagaugauaa

SEQ ID NO: 292228 - RNA, 19 nt, Artificial Sequence
  Description of Artificial Sequence: Synthetic oligonucleotide
  Sense strand starting at position 2992 of SEQ ID NO: 3756
guuggauauccucacuuuc

SEQ ID NO: 292229 - RNA, 19 nt, Artificial Sequence
  Description of Artificial Sequence: Synthetic oligonucleotide
  Antisense strand to SEQ ID NO: 292228
gaaagugaggauauccaac

SEQ ID NO: 292230 - RNA, 19 nt, Artificial Sequence
  Description of Artificial Sequence: Synthetic oligonucleotide
  Sense strand starting at position 3047 of SEQ ID NO: 3756
gccucauuccuggaucuag

SEQ ID NO: 292231 - RNA, 19 nt, Artificial Sequence
  Description of Artificial Sequence: Synthetic oligonucleotide
  Antisense strand to SEQ ID NO: 292230
cuagauccaggaaugaggc

SEQ ID NO: 292232 - RNA, 19 nt, Artificial Sequence
  Description of Artificial Sequence: Synthetic oligonucleotide
  Sense strand starting at position 3148 of SEQ ID NO: 3756
guuaauaauccauggaauc

SEQ ID NO: 292233 - RNA, 19 nt, Artificial Sequence
  Description of Artificial Sequence: Synthetic oligonucleotide
  Antisense strand to SEQ ID NO: 292232
gauuccauggauuauuaac

SEQ ID NO: 292234 - RNA, 19 nt, Artificial Sequence
  Description of Artificial Sequence: Synthetic oligonucleotide
  Sense strand starting at position 3231 of SEQ ID NO: 3756
acagaagaucugugaccca

SEQ ID NO: 292235 - RNA, 19 nt, Artificial Sequence
  Description of Artificial Sequence: Synthetic oligonucleotide
  Antisense strand to SEQ ID NO: 292234
ugggucacagaucuucugu

SEQ ID NO: 292236 - RNA, 19 nt, Artificial Sequence
  Description of Artificial Sequence: Synthetic oligonucleotide
  Sense strand starting at position 3256 of SEQ ID NO: 3756
cccuuagucccaggaagau

SEQ ID NO: 292237 - RNA, 19 nt, Artificial Sequence
  Description of Artificial Sequence: Synthetic oligonucleotide
  Antisense strand to SEQ ID NO: 292236
aucuuccugggacuaaggg

SEQ ID NO: 292238 - RNA, 19 nt, Artificial Sequence
  Description of Artificial Sequence: Synthetic oligonucleotide
  Sense strand starting at position 3419 of SEQ ID NO: 3756
ggaggauuaccuuguucca

SEQ ID NO: 292239 - RNA, 19 nt, Artificial Sequence
  Description of Artificial Sequence: Synthetic oligonucleotide
  Antisense strand to SEQ ID NO: 292238
uggaacaagguaauccucc

SEQ ID NO: 292240 - RNA, 19 nt, Artificial Sequence
  Description of Artificial Sequence: Synthetic oligonucleotide
  Sense strand starting at position 3421 of SEQ ID NO: 3756
aggauuaccuuguuccaca

SEQ ID NO: 292241 - RNA, 19 nt, Artificial Sequence
  Description of Artificial Sequence: Synthetic oligonucleotide
  Antisense strand to SEQ ID NO: 292240
uguggaacaagguaauccu

SEQ ID NO: 292242 - RNA, 19 nt, Artificial Sequence
  Description of Artificial Sequence: Synthetic oligonucleotide
  Sense strand starting at position 3422 of SEQ ID NO: 3756
ggauuaccuuguuccacaa

SEQ ID NO: 292243 - RNA, 19 nt, Artificial Sequence
  Description of Artificial Sequence: Synthetic oligonucleotide
  Antisense strand to SEQ ID NO: 292242
uuguggaacaagguaaucc

SEQ ID NO: 292244 - RNA, 19 nt, Artificial Sequence
  Description of Artificial Sequence: Synthetic oligonucleotide
  Sense strand starting at position 3678 of SEQ ID NO: 3756
gaaauaaagcuuugggcau

SEQ ID NO: 292245 - RNA, 19 nt, Artificial Sequence
  Description of Artificial Sequence: Synthetic oligonucleotide
  Antisense strand to SEQ ID NO: 292244
augcccaaagcuuuauuuc

SEQ ID NO: 292246 - RNA, 19 nt, Artificial Sequence
  Description of Artificial Sequence: Synthetic oligonucleotide
  Sense strand starting at position 3714 of SEQ ID NO: 3756
agucuauggagagguguaa

SEQ ID NO: 292247 - RNA, 19 nt, Artificial Sequence
  Description of Artificial Sequence: Synthetic oligonucleotide
  Antisense strand to SEQ ID NO: 292246
uuacaccucuccauagacu

SEQ ID NO: 292248 - RNA, 19 nt, Artificial Sequence
  Description of Artificial Sequence: Synthetic oligonucleotide
  Sense strand starting at position 3725 of SEQ ID NO: 3756
agguguaaacaucagcaaa

SEQ ID NO: 292249 - RNA, 19 nt, Artificial Sequence
  Description of Artificial Sequence: Synthetic oligonucleotide
  Antisense strand to SEQ ID NO: 292248
uuugcugauguuuacaccu

SEQ ID NO: 292250 - RNA, 19 nt, Artificial Sequence
  Description of Artificial Sequence: Synthetic oligonucleotide
  Sense strand starting at position 3727 of SEQ ID NO: 3756
guguaaacaucagcaaaca

SEQ ID NO: 292251 - RNA, 19 nt, Artificial Sequence
  Description of Artificial Sequence: Synthetic oligonucleotide
  Antisense strand to SEQ ID NO: 292250
uguuugcugauguuuacac

SEQ ID NO: 292252 - RNA, 19 nt, Artificial Sequence
  Description of Artificial Sequence: Synthetic oligonucleotide
  Sense strand starting at position 24 of SEQ ID NO: 3757
ucucgcaucucuccagaaa

SEQ ID NO: 292253 - RNA, 19 nt, Artificial Sequence
  Description of Artificial Sequence: Synthetic oligonucleotide
  Antisense strand to SEQ ID NO: 292252
uuucuggagagaugcgaga

SEQ ID NO: 292254 - RNA, 19 nt, Artificial Sequence
  Description of Artificial Sequence: Synthetic oligonucleotide
  Sense strand starting at position 25 of SEQ ID NO: 3757
cucgcaucucuccagaaag

SEQ ID NO: 292255 - RNA, 19 nt, Artificial Sequence
  Description of Artificial Sequence: Synthetic oligonucleotide
  Antisense strand to SEQ ID NO: 292254
cuuucuggagagaugcgag

SEQ ID NO: 292256 - RNA, 19 nt, Artificial Sequence
  Description of Artificial Sequence: Synthetic oligonucleotide
  Sense strand starting at position 27 of SEQ ID NO: 3757
cgcaucucuccagaaagag

SEQ ID NO: 292257 - RNA, 19 nt, Artificial Sequence
  Description of Artificial Sequence: Synthetic oligonucleotide
  Antisense strand to SEQ ID NO: 292256
cucuuucuggagagaugcg

SEQ ID NO: 292258 - RNA, 19 nt, Artificial Sequence
  Description of Artificial Sequence: Synthetic oligonucleotide
  Sense strand starting at position 57 of SEQ ID NO: 3757
gcaagagcuagcuguuguu

SEQ ID NO: 292259 - RNA, 19 nt, Artificial Sequence
  Description of Artificial Sequence: Synthetic oligonucleotide
  Antisense strand to SEQ ID NO: 292258
aacaacagcuagcucuugc

SEQ ID NO: 292260 - RNA, 19 nt, Artificial Sequence
  Description of Artificial Sequence: Synthetic oligonucleotide
  Sense strand starting at position 859 of SEQ ID NO: 3757
gccuauaauuccucaaggu

SEQ ID NO: 292261 - RNA, 19 nt, Artificial Sequence
  Description of Artificial Sequence: Synthetic oligonucleotide
  Antisense strand to SEQ ID NO: 292260
accuugaggaauuauaggc

SEQ ID NO: 292262 - RNA, 19 nt, Artificial Sequence
  Description of Artificial Sequence: Synthetic oligonucleotide
  Sense strand starting at position 860 of SEQ ID NO: 3757
ccuauaauuccucaaggug

SEQ ID NO: 292263 - RNA, 19 nt, Artificial Sequence
  Description of Artificial Sequence: Synthetic oligonucleotide
  Antisense strand to SEQ ID NO: 292262
caccuugaggaauuauagg

SEQ ID NO: 292264 - RNA, 19 nt, Artificial Sequence
  Description of Artificial Sequence: Synthetic oligonucleotide
  Sense strand starting at position 863 of SEQ ID NO: 3757
auaauuccucaagguguga

SEQ ID NO: 292265 - RNA, 19 nt, Artificial Sequence
  Description of Artificial Sequence: Synthetic oligonucleotide
  Antisense strand to SEQ ID NO: 292264
ucacaccuugaggaauuau

SEQ ID NO: 292266 - RNA, 19 nt, Artificial Sequence
  Description of Artificial Sequence: Synthetic oligonucleotide
  Sense strand starting at position 1014 of SEQ ID NO: 3757
ucggcuacucgagaugauc

SEQ ID NO: 292267 - RNA, 19 nt, Artificial Sequence
  Description of Artificial Sequence: Synthetic oligonucleotide
  Antisense strand to SEQ ID NO: 292266
gaucaucucgaguagccga

SEQ ID NO: 292268 - RNA, 19 nt, Artificial Sequence
  Description of Artificial Sequence: Synthetic oligonucleotide
  Sense strand starting at position 1022 of SEQ ID NO: 3757
ucgagaugaucacuugggu

SEQ ID NO: 292269 - RNA, 19 nt, Artificial Sequence
  Description of Artificial Sequence: Synthetic oligonucleotide
  Antisense strand to SEQ ID NO: 292268
acccaagugaucaucucga

SEQ ID NO: 292270 - RNA, 19 nt, Artificial Sequence
  Description of Artificial Sequence: Synthetic oligonucleotide
  Sense strand starting at position 1031 of SEQ ID NO: 3757
ucacuugggucggcuuuaa

SEQ ID NO: 292271 - RNA, 19 nt, Artificial Sequence
  Description of Artificial Sequence: Synthetic oligonucleotide
  Antisense strand to SEQ ID NO: 292270
uuaaagccgacccaaguga

SEQ ID NO: 292272 - RNA, 19 nt, Artificial Sequence
  Description of Artificial Sequence: Synthetic oligonucleotide
  Sense strand starting at position 1246 of SEQ ID NO: 3757
gaguuagggaagcgucuau

SEQ ID NO: 292273 - RNA, 19 nt, Artificial Sequence
  Description of Artificial Sequence: Synthetic oligonucleotide
  Antisense strand to SEQ ID NO: 292272
auagacgcuucccuaacuc

SEQ ID NO: 292274 - RNA, 19 nt, Artificial Sequence
  Description of Artificial Sequence: Synthetic oligonucleotide
  Sense strand starting at position 1302 of SEQ ID NO: 3757
gcgcuaucagcauugaggu

SEQ ID NO: 292275 - RNA, 19 nt, Artificial Sequence
  Description of Artificial Sequence: Synthetic oligonucleotide
  Antisense strand to SEQ ID NO: 292274
accucaaugcugauagcgc

SEQ ID NO: 292276 - RNA, 19 nt, Artificial Sequence
  Description of Artificial Sequence: Synthetic oligonucleotide
  Sense strand starting at position 1308 of SEQ ID NO: 3757
ucagcauugaggugaagag

SEQ ID NO: 292277 - RNA, 19 nt, Artificial Sequence
  Description of Artificial Sequence: Synthetic oligonucleotide
  Antisense strand to SEQ ID NO: 292276
cucuucaccucaaugcuga

SEQ ID NO: 292278 - RNA, 19 nt, Artificial Sequence
  Description of Artificial Sequence: Synthetic oligonucleotide
  Sense strand starting at position 2440 of SEQ ID NO: 3757
uguguaaucucucuacgca

SEQ ID NO: 292279 - RNA, 19 nt, Artificial Sequence
  Description of Artificial Sequence: Synthetic oligonucleotide
  Antisense strand to SEQ ID NO: 292278
ugcguagagagauuacaca

SEQ ID NO: 292280 - RNA, 19 nt, Artificial Sequence
  Description of Artificial Sequence: Synthetic oligonucleotide
  Sense strand starting at position 2441 of SEQ ID NO: 3757
guguaaucucucuacgcac

SEQ ID NO: 292281 - RNA, 19 nt, Artificial Sequence
  Description of Artificial Sequence: Synthetic oligonucleotide
  Antisense strand to SEQ ID NO: 292280
gugcguagagagauuacac

SEQ ID NO: 292282 - RNA, 19 nt, Artificial Sequence
  Description of Artificial Sequence: Synthetic oligonucleotide
  Sense strand starting at position 2465 of SEQ ID NO: 3757
ccauauaucgugcgguggu

SEQ ID NO: 292283 - RNA, 19 nt, Artificial Sequence
  Description of Artificial Sequence: Synthetic oligonucleotide
  Antisense strand to SEQ ID NO: 292282
accaccgcacgauauaugg

SEQ ID NO: 292284 - RNA, 19 nt, Artificial Sequence
  Description of Artificial Sequence: Synthetic oligonucleotide
  Sense strand starting at position 2495 of SEQ ID NO: 3757
uuuguaaugcuugaugagu

SEQ ID NO: 292285 - RNA, 19 nt, Artificial Sequence
  Description of Artificial Sequence: Synthetic oligonucleotide
  Antisense strand to SEQ ID NO: 292284
acucaucaagcauuacaaa

SEQ ID NO: 292286 - RNA, 19 nt, Artificial Sequence
  Description of Artificial Sequence: Synthetic oligonucleotide
  Sense strand starting at position 2504 of SEQ ID NO: 3757
cuugaugaguucuuuacgu

SEQ ID NO: 292287 - RNA, 19 nt, Artificial Sequence
  Description of Artificial Sequence: Synthetic oligonucleotide
  Antisense strand to SEQ ID NO: 292286
acguaaagaacucaucaag

SEQ ID NO: 292288 - RNA, 19 nt, Artificial Sequence
  Description of Artificial Sequence: Synthetic oligonucleotide
  Sense strand starting at position 2506 of SEQ ID NO: 3757
ugaugaguucuuuacguac

SEQ ID NO: 292289 - RNA, 19 nt, Artificial Sequence
  Description of Artificial Sequence: Synthetic oligonucleotide
  Antisense strand to SEQ ID NO: 292288
guacguaaagaacucauca

SEQ ID NO: 292290 - RNA, 19 nt, Artificial Sequence
  Description of Artificial Sequence: Synthetic oligonucleotide
  Sense strand starting at position 2546 of SEQ ID NO: 3757
ccaaacuagggcugucaga

SEQ ID NO: 292291 - RNA, 19 nt, Artificial Sequence
  Description of Artificial Sequence: Synthetic oligonucleotide
  Antisense strand to SEQ ID NO: 292290
ucugacagcccuaguuugg

SEQ ID NO: 292292 - RNA, 19 nt, Artificial Sequence
  Description of Artificial Sequence: Synthetic oligonucleotide
  Sense strand starting at position 2555 of SEQ ID NO: 3757
ggcugucagauugagaagu

SEQ ID NO: 292293 - RNA, 19 nt, Artificial Sequence
  Description of Artificial Sequence: Synthetic oligonucleotide
  Antisense strand to SEQ ID NO: 292292
acuucucaaucugacagcc

SEQ ID NO: 292294 - RNA, 19 nt, Artificial Sequence
  Description of Artificial Sequence: Synthetic oligonucleotide
  Sense strand starting at position 2557 of SEQ ID NO: 3757
cugucagauugagaagucu

SEQ ID NO: 292295 - RNA, 19 nt, Artificial Sequence
  Description of Artificial Sequence: Synthetic oligonucleotide
  Antisense strand to SEQ ID NO: 292294
agacuucucaaucugacag

SEQ ID NO: 292296 - RNA, 19 nt, Artificial Sequence
  Description of Artificial Sequence: Synthetic oligonucleotide
  Sense strand starting at position 2565 of SEQ ID NO: 3757
uugagaagucucugcagaa

SEQ ID NO: 292297 - RNA, 19 nt, Artificial Sequence
  Description of Artificial Sequence: Synthetic oligonucleotide
  Antisense strand to SEQ ID NO: 292296
uucugcagagacuucucaa

SEQ ID NO: 292298 - RNA, 19 nt, Artificial Sequence
  Description of Artificial Sequence: Synthetic oligonucleotide
  Sense strand starting at position 2566 of SEQ ID NO: 3757
ugagaagucucugcagaaa

SEQ ID NO: 292299 - RNA, 19 nt, Artificial Sequence
  Description of Artificial Sequence: Synthetic oligonucleotide
  Antisense strand to SEQ ID NO: 292298
uuucugcagagacuucuca

SEQ ID NO: 292300 - RNA, 19 nt, Artificial Sequence
  Description of Artificial Sequence: Synthetic oligonucleotide
  Sense strand starting at position 2569 of SEQ ID NO: 3757
gaagucucugcagaaagca

SEQ ID NO: 292301 - RNA, 19 nt, Artificial Sequence
  Description of Artificial Sequence: Synthetic oligonucleotide
  Antisense strand to SEQ ID NO: 292300
ugcuuucugcagagacuuc

SEQ ID NO: 292302 - RNA, 19 nt, Artificial Sequence
  Description of Artificial Sequence: Synthetic oligonucleotide
  Sense strand starting at position 2624 of SEQ ID NO: 3757
ggaccuucccugugcgaua

SEQ ID NO: 292303 - RNA, 19 nt, Artificial Sequence
  Description of Artificial Sequence: Synthetic oligonucleotide
  Antisense strand to SEQ ID NO: 292302
uaucgcacagggaaggucc

SEQ ID NO: 292304 - RNA, 19 nt, Artificial Sequence
  Description of Artificial Sequence: Synthetic oligonucleotide
  Sense strand starting at position 2625 of SEQ ID NO: 3757
gaccuucccugugcgauau

SEQ ID NO: 292305 - RNA, 19 nt, Artificial Sequence
  Description of Artificial Sequence: Synthetic oligonucleotide
  Antisense strand to SEQ ID NO: 292304
auaucgcacagggaagguc

SEQ ID NO: 292306 - RNA, 19 nt, Artificial Sequence
  Description of Artificial Sequence: Synthetic oligonucleotide
  Sense strand starting at position 2636 of SEQ ID NO: 3757
ugcgauaucugguacugaa

SEQ ID NO: 292307 - RNA, 19 nt, Artificial Sequence
  Description of Artificial Sequence: Synthetic oligonucleotide
  Antisense strand to SEQ ID NO: 292306
uucaguaccagauaucgca

SEQ ID NO: 292308 - RNA, 19 nt, Artificial Sequence
  Description of Artificial Sequence: Synthetic oligonucleotide
  Sense strand starting at position 2639 of SEQ ID NO: 3757
gauaucugguacugaaagu

SEQ ID NO: 292309 - RNA, 19 nt, Artificial Sequence
  Description of Artificial Sequence: Synthetic oligonucleotide
  Antisense strand to SEQ ID NO: 292308
acuuucaguaccagauauc

SEQ ID NO: 292310 - RNA, 19 nt, Artificial Sequence
  Description of Artificial Sequence: Synthetic oligonucleotide
  Sense strand starting at position 2695 of SEQ ID NO: 3757
gauggcaucuccuagccua

SEQ ID NO: 292311 - RNA, 19 nt, Artificial Sequence
  Description of Artificial Sequence: Synthetic oligonucleotide
  Antisense strand to SEQ ID NO: 292310
uaggcuaggagaugccauc

SEQ ID NO: 292312 - RNA, 19 nt, Artificial Sequence
  Description of Artificial Sequence: Synthetic oligonucleotide
  Sense strand starting at position 2732 of SEQ ID NO: 3757
acacgagccguuuauccau

SEQ ID NO: 292313 - RNA, 19 nt, Artificial Sequence
  Description of Artificial Sequence: Synthetic oligonucleotide
  Antisense strand to SEQ ID NO: 292312
auggauaaacggcucgugu

SEQ ID NO: 292314 - RNA, 19 nt, Artificial Sequence
  Description of Artificial Sequence: Synthetic oligonucleotide
  Sense strand starting at position 2735 of SEQ ID NO: 3757
cgagccguuuauccauuua

SEQ ID NO: 292315 - RNA, 19 nt, Artificial Sequence
  Description of Artificial Sequence: Synthetic oligonucleotide
  Antisense strand to SEQ ID NO: 292314
uaaauggauaaacggcucg

SEQ ID NO: 292316 - RNA, 19 nt, Artificial Sequence
  Description of Artificial Sequence: Synthetic oligonucleotide
  Sense strand starting at position 3096 of SEQ ID NO: 3757
guaaucaucacgcagaugu

SEQ ID NO: 292317 - RNA, 19 nt, Artificial Sequence
  Description of Artificial Sequence: Synthetic oligonucleotide
  Antisense strand to SEQ ID NO: 292316
acaucugcgugaugauuac

SEQ ID NO: 292318 - RNA, 19 nt, Artificial Sequence
  Description of Artificial Sequence: Synthetic oligonucleotide
  Sense strand starting at position 3104 of SEQ ID NO: 3757
cacgcagaugucuaccaaa

SEQ ID NO: 292319 - RNA, 19 nt, Artificial Sequence
  Description of Artificial Sequence: Synthetic oligonucleotide
  Antisense strand to SEQ ID NO: 292318
uuugguagacaucugcgug

SEQ ID NO: 292320 - RNA, 19 nt, Artificial Sequence
  Description of Artificial Sequence: Synthetic oligonucleotide
  Sense strand starting at position 3444 of SEQ ID NO: 3757
cgcucaaaccuccauaaug

SEQ ID NO: 292321 - RNA, 19 nt, Artificial Sequence
  Description of Artificial Sequence: Synthetic oligonucleotide
  Antisense strand to SEQ ID NO: 292320
cauuauggagguuugagcg

SEQ ID NO: 292322 - RNA, 19 nt, Artificial Sequence
  Description of Artificial Sequence: Synthetic oligonucleotide
  Sense strand starting at position 3602 of SEQ ID NO: 3757
acuacuaaguuccagagua

SEQ ID NO: 292323 - RNA, 19 nt, Artificial Sequence
  Description of Artificial Sequence: Synthetic oligonucleotide
  Antisense strand to SEQ ID NO: 292322
uacucuggaacuuaguagu

SEQ ID NO: 292324 - RNA, 19 nt, Artificial Sequence
  Description of Artificial Sequence: Synthetic oligonucleotide
  Sense strand starting at position 3610 of SEQ ID NO: 3757
guuccagaguaauaccuuu

SEQ ID NO: 292325 - RNA, 19 nt, Artificial Sequence
  Description of Artificial Sequence: Synthetic oligonucleotide
  Antisense strand to SEQ ID NO: 292324
aaagguauuacucuggaac

SEQ ID NO: 292326 - RNA, 19 nt, Artificial Sequence
  Description of Artificial Sequence: Synthetic oligonucleotide
  Sense strand starting at position 3771 of SEQ ID NO: 3757
cuguaaucuuuagugucca

SEQ ID NO: 292327 - RNA, 19 nt, Artificial Sequence
  Description of Artificial Sequence: Synthetic oligonucleotide
  Antisense strand to SEQ ID NO: 292326
uggacacuaaagauuacag

SEQ ID NO: 292328 - RNA, 19 nt, Artificial Sequence
  Description of Artificial Sequence: Synthetic oligonucleotide
  Sense strand starting at position 3776 of SEQ ID NO: 3757
aucuuuaguguccacucaa

SEQ ID NO: 292329 - RNA, 19 nt, Artificial Sequence
  Description of Artificial Sequence: Synthetic oligonucleotide
  Antisense strand to SEQ ID NO: 292328
uugaguggacacuaaagau

SEQ ID NO: 292330 - RNA, 19 nt, Artificial Sequence
  Description of Artificial Sequence: Synthetic oligonucleotide
  Sense strand starting at position 3932 of SEQ ID NO: 3757
uuaacauucucccaguguu

SEQ ID NO: 292331 - RNA, 19 nt, Artificial Sequence
  Description of Artificial Sequence: Synthetic oligonucleotide
  Antisense strand to SEQ ID NO: 292330
aacacugggagaauguuaa

SEQ ID NO: 292332 - RNA, 19 nt, Artificial Sequence
  Description of Artificial Sequence: Synthetic oligonucleotide
  Sense strand starting at position 564 of SEQ ID NO: 3758
acgugaaacgggcaguuaa

SEQ ID NO: 292333 - RNA, 19 nt, Artificial Sequence
  Description of Artificial Sequence: Synthetic oligonucleotide
  Antisense strand to SEQ ID NO: 292332
uuaacugcccguuucacgu

SEQ ID NO: 292334 - RNA, 19 nt, Artificial Sequence
  Description of Artificial Sequence: Synthetic oligonucleotide
  Sense strand starting at position 574 of SEQ ID NO: 3758
ggcaguuaacaauaagugu

SEQ ID NO: 292335 - RNA, 19 nt, Artificial Sequence
  Description of Artificial Sequence: Synthetic oligonucleotide
  Antisense strand to SEQ ID NO: 292334
acacuuauuguuaacugcc

SEQ ID NO: 292336 - RNA, 19 nt, Artificial Sequence
  Description of Artificial Sequence: Synthetic oligonucleotide
  Sense strand starting at position 585 of SEQ ID NO: 3758
auaaguguccacuacauua

SEQ ID NO: 292337 - RNA, 19 nt, Artificial Sequence
  Description of Artificial Sequence: Synthetic oligonucleotide
  Antisense strand to SEQ ID NO: 292336
uaauguaguggacacuuau

SEQ ID NO: 292338 - RNA, 19 nt, Artificial Sequence
  Description of Artificial Sequence: Synthetic oligonucleotide
  Sense strand starting at position 662 of SEQ ID NO: 3758
acggaaauguaguuuaaca

SEQ ID NO: 292339 - RNA, 19 nt, Artificial Sequence
  Description of Artificial Sequence: Synthetic oligonucleotide
  Antisense strand to SEQ ID NO: 292338
uguuaaacuacauuuccgu

SEQ ID NO: 292340 - RNA, 19 nt, Artificial Sequence
  Description of Artificial Sequence: Synthetic oligonucleotide
  Sense strand starting at position 685 of SEQ ID NO: 3758
gaaucauaauccuugugug

SEQ ID NO: 292341 - RNA, 19 nt, Artificial Sequence
  Description of Artificial Sequence: Synthetic oligonucleotide
  Antisense strand to SEQ ID NO: 292340
cacacaaggauuaugauuc

SEQ ID NO: 292342 - RNA, 19 nt, Artificial Sequence
  Description of Artificial Sequence: Synthetic oligonucleotide
  Sense strand starting at position 741 of SEQ ID NO: 3758
uguauaucuuaacucagua

SEQ ID NO: 292343 - RNA, 19 nt, Artificial Sequence
  Description of Artificial Sequence: Synthetic oligonucleotide
  Antisense strand to SEQ ID NO: 292342
uacugaguuaagauauaca

SEQ ID NO: 292344 - RNA, 19 nt, Artificial Sequence
  Description of Artificial Sequence: Synthetic oligonucleotide
  Sense strand starting at position 746 of SEQ ID NO: 3758
aucuuaacucaguaacugu

SEQ ID NO: 292345 - RNA, 19 nt, Artificial Sequence
  Description of Artificial Sequence: Synthetic oligonucleotide
  Antisense strand to SEQ ID NO: 292344
acaguuacugaguuaagau

SEQ ID NO: 292346 - RNA, 19 nt, Artificial Sequence
  Description of Artificial Sequence: Synthetic oligonucleotide
  Sense strand starting at position 930 of SEQ ID NO: 3758
agagaauggcuucaguagu

SEQ ID NO: 292347 - RNA, 19 nt, Artificial Sequence
  Description of Artificial Sequence: Synthetic oligonucleotide
  Antisense strand to SEQ ID NO: 292346
acuacugaagccauucucu

SEQ ID NO: 292348 - RNA, 19 nt, Artificial Sequence
  Description of Artificial Sequence: Synthetic oligonucleotide
  Sense strand starting at position 1070 of SEQ ID NO: 3758
uguuguugaaaggauccau

SEQ ID NO: 292349 - RNA, 19 nt, Artificial Sequence
  Description of Artificial Sequence: Synthetic oligonucleotide
  Antisense strand to SEQ ID NO: 292348
auggauccuuucaacaaca

SEQ ID NO: 292350 - RNA, 19 nt, Artificial Sequence
  Description of Artificial Sequence: Synthetic oligonucleotide
  Sense strand starting at position 1381 of SEQ ID NO: 3758
gggaaacucugacauuugu

SEQ ID NO: 292351 - RNA, 19 nt, Artificial Sequence
  Description of Artificial Sequence: Synthetic oligonucleotide
  Antisense strand to SEQ ID NO: 292350
acaaaugucagaguuuccc

SEQ ID NO: 292352 - RNA, 19 nt, Artificial Sequence
  Description of Artificial Sequence: Synthetic oligonucleotide
  Sense strand starting at position 1493 of SEQ ID NO: 3758
ugccuuugugagcaaccaa

SEQ ID NO: 292353 - RNA, 19 nt, Artificial Sequence
  Description of Artificial Sequence: Synthetic oligonucleotide
  Antisense strand to SEQ ID NO: 292352
uugguugcucacaaaggca

SEQ ID NO: 292354 - RNA, 19 nt, Artificial Sequence
  Description of Artificial Sequence: Synthetic oligonucleotide
  Sense strand starting at position 2009 of SEQ ID NO: 3758
ugggaaucgaucgaguauu

SEQ ID NO: 292355 - RNA, 19 nt, Artificial Sequence
  Description of Artificial Sequence: Synthetic oligonucleotide
  Antisense strand to SEQ ID NO: 292354
aauacucgaucgauuccca

SEQ ID NO: 292356 - RNA, 19 nt, Artificial Sequence
  Description of Artificial Sequence: Synthetic oligonucleotide
  Sense strand starting at position 2348 of SEQ ID NO: 3758
gagggucucagaggauuau

SEQ ID NO: 292357 - RNA, 19 nt, Artificial Sequence
  Description of Artificial Sequence: Synthetic oligonucleotide
  Antisense strand to SEQ ID NO: 292356
auaauccucugagacccuc

SEQ ID NO: 292358 - RNA, 19 nt, Artificial Sequence
  Description of Artificial Sequence: Synthetic oligonucleotide
  Sense strand starting at position 2425 of SEQ ID NO: 3758
caggucagagucuggaauu

SEQ ID NO: 292359 - RNA, 19 nt, Artificial Sequence
  Description of Artificial Sequence: Synthetic oligonucleotide
  Antisense strand to SEQ ID NO: 292358
aauuccagacucugaccug

SEQ ID NO: 292360 - RNA, 19 nt, Artificial Sequence
  Description of Artificial Sequence: Synthetic oligonucleotide
  Sense strand starting at position 2437 of SEQ ID NO: 3758
uggaauuguuuccugacga

SEQ ID NO: 292361 - RNA, 19 nt, Artificial Sequence
  Description of Artificial Sequence: Synthetic oligonucleotide
  Antisense strand to SEQ ID NO: 292360
ucgucaggaaacaauucca

SEQ ID NO: 292362 - RNA, 19 nt, Artificial Sequence
  Description of Artificial Sequence: Synthetic oligonucleotide
  Sense strand starting at position 2450 of SEQ ID NO: 3758
ugacgagucucucugagag

SEQ ID NO: 292363 - RNA, 19 nt, Artificial Sequence
  Description of Artificial Sequence: Synthetic oligonucleotide
  Antisense strand to SEQ ID NO: 292362
cucucagagagacucguca

SEQ ID NO: 292364 - RNA, 19 nt, Artificial Sequence
  Description of Artificial Sequence: Synthetic oligonucleotide
  Sense strand starting at position 2548 of SEQ ID NO: 3758
ggagacauuucaggaaggu

SEQ ID NO: 292365 - RNA, 19 nt, Artificial Sequence
  Description of Artificial Sequence: Synthetic oligonucleotide
  Antisense strand to SEQ ID NO: 292364
accuuccugaaaugucucc

SEQ ID NO: 292366 - RNA, 19 nt, Artificial Sequence
  Description of Artificial Sequence: Synthetic oligonucleotide
  Sense strand starting at position 2631 of SEQ ID NO: 3758
aggcgugguccagauuaac

SEQ ID NO: 292367 - RNA, 19 nt, Artificial Sequence
  Description of Artificial Sequence: Synthetic oligonucleotide
  Antisense strand to SEQ ID NO: 292366
guuaaucuggaccacgccu

SEQ ID NO: 292368 - RNA, 19 nt, Artificial Sequence
  Description of Artificial Sequence: Synthetic oligonucleotide
  Sense strand starting at position 2634 of SEQ ID NO: 3758
cgugguccagauuaacaau

SEQ ID NO: 292369 - RNA, 19 nt, Artificial Sequence
  Description of Artificial Sequence: Synthetic oligonucleotide
  Antisense strand to SEQ ID NO: 292368
auuguuaaucuggaccacg

SEQ ID NO: 292370 - RNA, 19 nt, Artificial Sequence
  Description of Artificial Sequence: Synthetic oligonucleotide
  Sense strand starting at position 2640 of SEQ ID NO: 3758
ccagauuaacaaugagguu

SEQ ID NO: 292371 - RNA, 19 nt, Artificial Sequence
  Description of Artificial Sequence: Synthetic oligonucleotide
  Antisense strand to SEQ ID NO: 292370
aaccucauuguuaaucugg

SEQ ID NO: 292372 - RNA, 19 nt, Artificial Sequence
  Description of Artificial Sequence: Synthetic oligonucleotide
  Sense strand starting at position 2674 of SEQ ID NO: 3758
caagauggcuuuccuggua

SEQ ID NO: 292373 - RNA, 19 nt, Artificial Sequence
  Description of Artificial Sequence: Synthetic oligonucleotide
  Antisense strand to SEQ ID NO: 292372
uaccaggaaagccaucuug

SEQ ID NO: 292374 - RNA, 19 nt, Artificial Sequence
  Description of Artificial Sequence: Synthetic oligonucleotide
  Sense strand starting at position 2677 of SEQ ID NO: 3758
gauggcuuuccugguagag

SEQ ID NO: 292375 - RNA, 19 nt, Artificial Sequence
  Description of Artificial Sequence: Synthetic oligonucleotide
  Antisense strand to SEQ ID NO: 292374
cucuaccaggaaagccauc

SEQ ID NO: 292376 - RNA, 19 nt, Artificial Sequence
  Description of Artificial Sequence: Synthetic oligonucleotide
  Sense strand starting at position 2845 of SEQ ID NO: 3758
cuagguguacauggauaga

SEQ ID NO: 292377 - RNA, 19 nt, Artificial Sequence
  Description of Artificial Sequence: Synthetic oligonucleotide
  Antisense strand to SEQ ID NO: 292376
ucuauccauguacaccuag

SEQ ID NO: 292378 - RNA, 19 nt, Artificial Sequence
  Description of Artificial Sequence: Synthetic oligonucleotide
  Sense strand starting at position 2865 of SEQ ID NO: 3758
gcagauaccugugugaaug

SEQ ID NO: 292379 - RNA, 19 nt, Artificial Sequence
  Description of Artificial Sequence: Synthetic oligonucleotide
  Antisense strand to SEQ ID NO: 292378
cauucacacagguaucugc

SEQ ID NO: 292380 - RNA, 19 nt, Artificial Sequence
  Description of Artificial Sequence: Synthetic oligonucleotide
  Sense strand starting at position 2866 of SEQ ID NO: 3758
cagauaccugugugaaugu

SEQ ID NO: 292381 - RNA, 19 nt, Artificial Sequence
  Description of Artificial Sequence: Synthetic oligonucleotide
  Antisense strand to SEQ ID NO: 292380
acauucacacagguaucug

SEQ ID NO: 292382 - RNA, 19 nt, Artificial Sequence
  Description of Artificial Sequence: Synthetic oligonucleotide
  Sense strand starting at position 2907 of SEQ ID NO: 3758
gggagagaauaagauagaa

SEQ ID NO: 292383 - RNA, 19 nt, Artificial Sequence
  Description of Artificial Sequence: Synthetic oligonucleotide
  Antisense strand to SEQ ID NO: 292382
uucuaucuuauucucuccc

SEQ ID NO: 292384 - RNA, 19 nt, Artificial Sequence
  Description of Artificial Sequence: Synthetic oligonucleotide
  Sense strand starting at position 2976 of SEQ ID NO: 3758
uccgcauuccaccaugaga

SEQ ID NO: 292385 - RNA, 19 nt, Artificial Sequence
  Description of Artificial Sequence: Synthetic oligonucleotide
  Antisense strand to SEQ ID NO: 292384
ucucaugguggaaugcgga

SEQ ID NO: 292386 - RNA, 19 nt, Artificial Sequence
  Description of Artificial Sequence: Synthetic oligonucleotide
  Sense strand starting at position 3201 of SEQ ID NO: 3758
ugagaaagccuagggaguu

SEQ ID NO: 292387 - RNA, 19 nt, Artificial Sequence
  Description of Artificial Sequence: Synthetic oligonucleotide
  Antisense strand to SEQ ID NO: 292386
aacucccuaggcuuucuca

SEQ ID NO: 292388 - RNA, 19 nt, Artificial Sequence
  Description of Artificial Sequence: Synthetic oligonucleotide
  Sense strand starting at position 3271 of SEQ ID NO: 3758
uggguaauaugacuaguuc

SEQ ID NO: 292389 - RNA, 19 nt, Artificial Sequence
  Description of Artificial Sequence: Synthetic oligonucleotide
  Antisense strand to SEQ ID NO: 292388
gaacuagucauauuaccca

SEQ ID NO: 292390 - RNA, 19 nt, Artificial Sequence
  Description of Artificial Sequence: Synthetic oligonucleotide
  Sense strand starting at position 3386 of SEQ ID NO: 3758
gcgaaacagagaugggauu

SEQ ID NO: 292391 - RNA, 19 nt, Artificial Sequence
  Description of Artificial Sequence: Synthetic oligonucleotide
  Antisense strand to SEQ ID NO: 292390
aaucccaucucuguuucgc

SEQ ID NO: 292392 - RNA, 19 nt, Artificial Sequence
  Description of Artificial Sequence: Synthetic oligonucleotide
  Sense strand starting at position 3600 of SEQ ID NO: 3758
aauugcagugucugaaaua

SEQ ID NO: 292393 - RNA, 19 nt, Artificial Sequence
  Description of Artificial Sequence: Synthetic oligonucleotide
  Antisense strand to SEQ ID NO: 292392
uauuucagacacugcaauu

SEQ ID NO: 292394 - RNA, 19 nt, Artificial Sequence
  Description of Artificial Sequence: Synthetic oligonucleotide
  Sense strand starting at position 3636 of SEQ ID NO: 3758
cagggagcuugacucagau

SEQ ID NO: 292395 - RNA, 19 nt, Artificial Sequence
  Description of Artificial Sequence: Synthetic oligonucleotide
  Antisense strand to SEQ ID NO: 292394
aucugagucaagcucccug

SEQ ID NO: 292396 - RNA, 19 nt, Artificial Sequence
  Description of Artificial Sequence: Synthetic oligonucleotide
  Sense strand starting at position 3697 of SEQ ID NO: 3758
ccagccuuucgguaugaga

SEQ ID NO: 292397 - RNA, 19 nt, Artificial Sequence
  Description of Artificial Sequence: Synthetic oligonucleotide
  Antisense strand to SEQ ID NO: 292396
ucucauaccgaaaggcugg

SEQ ID NO: 292398 - RNA, 19 nt, Artificial Sequence
  Description of Artificial Sequence: Synthetic oligonucleotide
  Sense strand starting at position 3706 of SEQ ID NO: 3758
cgguaugagaauugggagu

SEQ ID NO: 292399 - RNA, 19 nt, Artificial Sequence
  Description of Artificial Sequence: Synthetic oligonucleotide
  Antisense strand to SEQ ID NO: 292398
acucccaauucucauaccg

SEQ ID NO: 292400 - RNA, 19 nt, Artificial Sequence
  Description of Artificial Sequence: Synthetic oligonucleotide
  Sense strand starting at position 3791 of SEQ ID NO: 3758
gacucagugccagaucuga

SEQ ID NO: 292401 - RNA, 19 nt, Artificial Sequence
  Description of Artificial Sequence: Synthetic oligonucleotide
  Antisense strand to SEQ ID NO: 292400
ucagaucuggcacugaguc

SEQ ID NO: 292402 - RNA, 19 nt, Artificial Sequence
  Description of Artificial Sequence: Synthetic oligonucleotide
  Sense strand starting at position 3857 of SEQ ID NO: 3758
ggcuguccuccaugacaag

SEQ ID NO: 292403 - RNA, 19 nt, Artificial Sequence
  Description of Artificial Sequence: Synthetic oligonucleotide
  Antisense strand to SEQ ID NO: 292402
cuugucauggaggacagcc

SEQ ID NO: 292404 - RNA, 19 nt, Artificial Sequence
  Description of Artificial Sequence: Synthetic oligonucleotide
  Sense strand starting at position 3858 of SEQ ID NO: 3758
gcuguccuccaugacaaga

SEQ ID NO: 292405 - RNA, 19 nt, Artificial Sequence
  Description of Artificial Sequence: Synthetic oligonucleotide
  Antisense strand to SEQ ID NO: 292404
ucuugucauggaggacagc

SEQ ID NO: 292406 - RNA, 19 nt, Artificial Sequence
  Description of Artificial Sequence: Synthetic oligonucleotide
  Sense strand starting at position 3899 of SEQ ID NO: 3758
ugcugaugaauugagucua

SEQ ID NO: 292407 - RNA, 19 nt, Artificial Sequence
  Description of Artificial Sequence: Synthetic oligonucleotide
  Antisense strand to SEQ ID NO: 292406
uagacucaauucaucagca

SEQ ID NO: 292408 - RNA, 19 nt, Artificial Sequence
  Description of Artificial Sequence: Synthetic oligonucleotide
  Sense strand starting at position 3960 of SEQ ID NO: 3758
ccgugucugaucuaaggau

SEQ ID NO: 292409 - RNA, 19 nt, Artificial Sequence
  Description of Artificial Sequence: Synthetic oligonucleotide
  Antisense strand to SEQ ID NO: 292408
auccuuagaucagacacgg

SEQ ID NO: 292410 - RNA, 19 nt, Artificial Sequence
  Description of Artificial Sequence: Synthetic oligonucleotide
  Sense strand starting at position 3978 of SEQ ID NO: 3758
ugaagcugcaugugaauuu

SEQ ID NO: 292411 - RNA, 19 nt, Artificial Sequence
  Description of Artificial Sequence: Synthetic oligonucleotide
  Antisense strand to SEQ ID NO: 292410
aaauucacaugcagcuuca

SEQ ID NO: 292412 - RNA, 19 nt, Artificial Sequence
  Description of Artificial Sequence: Synthetic oligonucleotide
  Sense strand starting at position 188 of SEQ ID NO: 3759
auucgagcucuccacaagu
